(19) United States
(12) Patent Application Publication
(10) Pub. No.: US 2007/0016976 A1
(43) Pub. Date: Jan. 18, 2007

(54) Plant genes involved in defense against pathogens

(76) Inventors: Fumiaki Katagiri, San Diego, CA (US); Yu-Ming Hou, San Diego, CA (US); Sheng Quan, San Diego, CA (US); Hur-Song Chang, San Diego, CA (US); Tong Zhu, San Diego, CA (US); Steve Whitham, San Diego, CA (US); Steve Goff, Encinitas, CA (US); Bret Cooper, La Jolla, CA (US); Jane Glazebrook, San Diego, CA (US); Wenquiong Chen, San Diego, CA (US); Zhiyi Xie, San Diego, CA (US); Yi Tao, La Jolla, CA (US); Guangzhou Zou, San Diego, CA (US)

Correspondence Address: SCHWEGMAN, LUNDBERG, WOESSNER & KLUTH, P.A., P.O. BOX 2938, MINNEAPOLIS, MN, 55402, US

(21) Appl. No.: 09/887,272

(22) Filed: Jun. 22, 2001

Related U.S. Application Data
(60) Provisional application No. 60/213,634, filed on Jun. 23, 2000.
(60) Provisional application No. 60/214,926, filed on Jun. 23, 2000.
(60) Provisional application No. 60/261,320, filed on Jan. 12, 2001.
(60) Provisional application No. 60/264,353, filed on Jan. 26, 2001.
(60) Provisional application No. 60/273,879, filed on Mar. 7, 2001.

(51) Int. Cl. A01H 5/00; C07H 21/04; C12N 5/04

(52) U.S. Cl. 800/279; 536/23.6; 435/320.1; 435/419

(57) ABSTRACT

Methods to identify genes, the expression of which are altered in response to pathogen infection, are provided, as well as the genes identified thereby and their corresponding promoters.

### CROSS-REFERENCE TO RELATED APPLICATIONS

[0001] This application claims the benefit of the filing date of U.S. application Ser. No. 60/213,634, filed on Jun. 23, 2000, U.S. application Ser. No. 60/214,926, filed on Jun. 23, 2000, U.S. application Ser. No. 60/261,320, filed on Jan. 12, 2001, U.S. application Ser. No. 60/264,353, filed on Jan. 26, 2001, and U.S. application Ser. No. 60/273,879, filed on Mar. 7, 2001 under 35 U.S.C. § 119(e).

### FIELD OF THE INVENTION

[0002] The present invention generally relates to the field of plant molecular biology, and more specifically to the regulation of gene expression in plants in response to pathogen exposure.

### BACKGROUND OF THE INVENTION

[0003] Plants are capable of activating a large array of defense mechanisms in response to pathogen attack, some of which are preexisting and others are inducible. Pathogens must specialize to circumvent the defense mechanisms of the host, especially those biotrophic pathogens that derive their nutrition from an intimate association with living plant cells. If the pathogen can cause disease, the interaction is said to be compatible, but if the plant is resistant, the interaction is said to be incompatible. A crucial factor determining the success of these mechanisms is the speed of their activation. Consequently, there is considerable interest in understanding how plants recognize pathogen attack and control expression of defense mechanisms.

[0004] Some potential pathogens trigger a very rapid resistance response called gene-for-gene resistance. This occurs when the pathogen carries an avirulence (avr) gene that triggers specific recognition by a corresponding host resistance (R) gene. R gene specificity is generally quite narrow, in most cases only pathogens carrying a particular avr gene are recognized. Recognition is thought to be mediated by ligand-receptor binding. R genes have been studied extensively in recent years. For a review of R genes, see Ellis et al. (1998); Jones et al. (1997); and Ronald (1998).

[0005] One of the defense mechanisms triggered by gene-for-gene resistance is programmed cell death at the infection site. This is called the hypersensitive response, or HR. Pathogens that induce the HR, or cause cell death by other means, activate a systemic resistance response called systemic acquired resistance (SAR). During SAR, levels of salicylic acid (SA) rise throughout the plant, defense genes such as pathogenesis related (PR) genes are expressed, and the plant becomes more resistant to pathogen attack. SA is a crucial component of this response. Plants that cannot accumulate SA due to the presence of a transgene that encodes an SA-degrading enzyme (nahG), develop a HR in response to challenge by avirulent pathogens, but do not exhibit systemic expression of defense genes and do not develop resistance to subsequent pathogen attack (Ryals et al., 1996). The nature of the systemic signal that triggers SAR is a subject of debate (Shulaev et al., 1995; Vemooji et al., 1994). SA clearly moves from the site of the HR to other parts of the plant, but if this is the signal, it must be effective at extremely low concentration (Willitset et al., 1998).

[0006] SAR is quite similar to some reactions that occur locally in response to attack by virulent (those that cause disease) or avirulent (those that trigger gene-for-gene resistance) pathogens. In general, activation of defense gene expression occurs more slowly in response to virulent pathogens than in response to avirulent pathogens. Some pathogens trigger expression of defense genes through a different signaling pathway that requires components of the jasmonic acid (JA) and ethylene signaling pathways (Creelman et al., 1997).

[0007] One approach to understanding the signal transduction networks that control defense mechanisms is to use genetic methods to identify signaling components and determine their roles within the network. Considerable progress has been made using this approach in Arabidopsis-pathogen model systems.

R Gene Signal Transduction

[0008] Genes such as NDR1 and EDS1, as well as DND1 and the lesion-mimic genes, likely act in signal transduction pathways downstream from R-avr recognition. NDR1 and EDS1 are required for gene-for-gene mediated resistance to avirulent strains of the bacterial pathogen Pseudomonas syringae and the oomycete pathogen Peronospora parasitica. Curiously, ndr1 mutants are susceptible to one set of avirulent pathogens, whereas eds1 mutants are susceptible to a non-overlapping set (Aarts et el., 1998). The five cloned R genes that require EDS1 all belong to the subset of the nucleotide binding site-leucine rich repeat (NBS-LRR) class of R genes that contain sequences similar to the cytoplasmic domains of Drosophila Toll and mammalian interleukin 1 transmembrane receptors (TIR-NBS-LRR). The two genes that require NDR1 belong to the leucine-zipper (LZ-NBS-LRR) subclass of NBS-LRR genes. There is another LZ-NBS-LRR gene, RPP8, that does not require EDS1 or NDR1, so the correlation between R gene structure and requirement for EDS1 or NDR1 is not perfect. Nevertheless, these results show that R genes differ in their requirements for downstream factors and that these differences are correlated with R gene structural type.

[0009] NDR1 encodes a protein with two predicted transmembrane domains (Century et al. 1997). RPM1, which requires NDR1 to mediate resistance, is membrane-associated, despite the fact that its primary sequence does not include any likely membrane-integral stretches (Boyes et al., 1998). It is possible that part of the function of NDR1 is to hold R proteins close to the membrane. EDS1 encodes a protein with blocks of homology to triacyl glycerol lipases (Falk et al., 1999). The significance of this homology is not known, but it is tempting to speculate that EDS1 is involved in synthesis or degradation of a signal molecule. EDS1 expression is inducible by SA and pathogen infection, suggesting that EDS1 may be involved in signal amplification (Falk et al., 1999).

[0010] It has been extremely difficult to isolate mutations in genes other than the R genes that are required for gene-for-gene resistance. A selection procedure was devised (McNellis et al., 1998) on the basis of precisely controlled inducible expression of the avr gene avrRpt2 in plants carrying the corresponding resistance gene RPS2. Expression of avrRpt2 in this background is lethal, as it triggers a systemic HR. It is now possible to select for mutants with subtle defects in gene-for-gene signaling by requiring growth on a concentration of inducer slightly higher than the lethal dose.

[0011] Putative plant receptor proteins encoded by RPP genes (recognition of P. parasitica) mediate specific recognition of Peronospora isolates and trigger defense reactions. Recently, McDowell et al. (2000) reported that two members of this class, RPP7 and RPP8 (the latter of which encodes a LZ-NBS-LRR type R protein) were not significantly suppressed by mutations in either EDS1 or NDR1, and that RPP7 resistance was also not compromised by mutations in EIN2, JAR1 or COI1, which affect ethylene or jasmonic acid signaling, or in coi1/npr1 or coi1/NahG backgrounds. The authors suggested that RPP7 initiates resistance through a novel signaling pathway that is independent of salicylic acid accumulation or jasmonic acid response components.

SA-Dependent Signaling

[0012] SA levels increase locally in response to pathogen attack, and systemically in response to the SAR-inducing signal. SA is necessary and sufficient for activation of PR gene expression and enhanced disease resistance. Physiological analyses and characterization of certain lesion-mimic mutants strongly suggest that there is a positive autoregulatory loop affecting SA concentrations (Shirasu et al., 1997; Hunt et al., 1997; Weymann et al., 1995). Several mutants with defects in SA signaling have been characterized. These include npr1, in which expression of PR genes in response to SA is blocked; cpr1, cpr5, and cpr6, which constitutively express PR genes; the npr1 suppressor ssi1; pad4, which has a defect in SA accumulation; and eds5, which has a defect in PR1 expression.

[0013] Expression of the defense genes PR1, BG2, and PR5 in response to SA treatment requires a gene called NPR1 or NIM1. Mutations in npr1 abolish SAR, and cause enhanced susceptibility to infection by various pathogens (Cao et al., 1994; Delaney et al., 1995; Glazebrook et al., 1996; Shah et al., 1997). NPR1 appears to be a positive regulator of PR gene expression that acts downstream from SA. NPR1 encodes a novel protein that contains ankyrin repeats (which are often involved in protein-protein interactions (Cao et al., 1997; Ryals et al., 1997), and that is localized to the nucleus in the presence of SA (Dong et al., 1998). Consequently, it is unlikely that NPR1 acts as a transcription factor to directly control PR gene expression, but its nuclear localization suggests that it may interact with such transcription factors.

[0014] PAD4 appears to act upstream from SA. In pad4 plants infected with a virulent P. syringae strain, SA levels, synthesis of the antimicrobial compound camalexin, and PR1 expression are all reduced (Zhou et al., 1998). SA is necessary, but not sufficient, for activation of camalexin synthesis (Zhou et al., 1998; Zhao et al., 1996). The camalexin defect in pad4 plants is reversible by exogenous SA (Zhou et al., 1998). Mutations in pad4 do not affect SA levels, camalexin synthesis, or PR1 when plants are infected with an avirulent P. syringae strain (Zhou et al., 1998). Taken together, these results suggest that PAD4 is required for signal amplification to activate the SA pathway in response to pathogens that do not elicit a strong defense response (Zhou et al., 1998).

JA-Dependent Signaling

[0015] JA signaling affects diverse processes including fruit ripening, pollen development, root growth, and response to wounding (Creelman et al., 1997). The jar1 and coi1 mutants fail to respond to JA (Feys et al., 1994; Staswick et al., 1992). COI1 has been cloned, and found to encode protein containing leucine-rich repeats and a degenerate F-box motif (Xie et al., 1998). These features are characteristic of proteins that function in complexes that ubiquitinate protein targeted for degradation.

[0016] In the past few years it has become apparent that JA plays an important role in regulation of pathogen defenses. For example, the induction of the defensin gene PDF1.2 after inoculation of Arabidopsis with the avirulent pathogen Alternaria brassicicola does not require SA or NPR1, but does require ethylene and JA signaling (Penninck et al., 1996).

[0017] SA signaling and JA signaling pathways are interconnected in complicated ways. Studies in other systems have shown that SA signaling and JA signaling are mutually inhibitory (Creelman et al., 1997; Harms et al., 1998). However, synthesis of camalexin in response to P. syringae infection is blocked in nahG (Zhou et al., 1998; Zhao et al., 1996) and coi1 (Glazebrook, 1999) plants, strongly suggesting that camalexin synthesis requires both SA and JA signaling.

Induced Systemic Resistance (ISR)

[0018] Some rhizosphere-associated bacteria promote disease resistance (van Loon et al., 1998). This phenomenon, called ISR, has been studied using Pseudomonas fluorescens strain WCS417r to colonize Arabidopsis roots (Pieterse et al., 1996). Colonized plants are more resistant to infection by the fungal pathogen Fusarium oxysporum f sp raphani and P. syringae (Pieterse et al., 1996). ISR occurs in nahG plants, indicating that it is not a SA-dependent phenomenon (Pieterse et al., 1996). Rather, ISR appears to be JA- and ethylene-dependent. The observation that ethylene can induce ISR in jar1 mutants led to the hypothesis that ISR requires a JA signal followed by an ethylene signal (Pieterse et al., 1998). No changes in gene expression associated with ISR have been detected (Pieterse et al., 1998), suggesting that it is different from activation of PDF1.2 expression by A. brassicicola.

[0019] Curiously, ISR requires NPR1 (Pieterse et al., 1996). This was unexpected in light of the fact that NPR1 was previously known to be involved only in SA-dependent processes and ISR is SA-independent. If the SA-dependent signal is received, NPR1 mediates a resistance response characterized by PR1 expression, whereas if the ISR signal is received, NPR1 mediates a different resistance response. It is difficult to imagine how this could occur, unless NPR1 is interacting with different ‘adapter’ molecules to mediate the different signals. The ankyrin repeats found in NPR1 could function in protein-protein interactions between NPR1 and adapter proteins. Identification of proteins that interact with NPR1, and characterization of plants with loss-of-function mutations affecting those proteins, would be very helpful for understanding how NPR1 acts in each pathway. It would also be worthwhile to determine if the ssi1 or cpr6 mutations suppress the ISR defect of npr1 mutants.

Relevance to Disease Resistance

[0020] Characterization of the effects of various mutations on resistance to different pathogens has revealed that there is considerable variation in the extent to which pathogens are affected by defense mechanisms. SAR is known to confer resistance to a wide array of pathogens, including bacteria, fungi, oomycetes, and viruses. JA signaling is important for limiting the growth of certain fungal pathogens. In Arabidopsis, the SA pathway mutants npr1 and pad4 show enhanced susceptibility to P. syringae and P. parasitica (Cao et al., 1994; Delaney et al., 1995; Shah et al., 1997; Zhou et al., 1998; Glazebrook et al., 1997).

[0021] Overexpression of rate-limiting defense response regulators may cause the signaling network to respond faster or more strongly to pathogen attack, thereby improving resistance. For example, overexpression of NPR1 caused increased resistance to P. syringae and P. parasitica in a dosage dependent manner (Cao et al., 1998). Moreover, NPR1-overexpression had no obvious deleterious effects on plant growth, in contrast to mutations that lead to constitutive overexpression of defense responses, which generally cause dwarfism.

Promoters for Gene Expression of Plant Pathogen Defense Genes

[0022] Promoters (and other regulatory components) from bacteria, viruses, fungi and plants have been used to control gene expression in plant cells. Numerous plant transformation experiments using DNA constructs comprising various promoter sequences fused to various foreign genes (for example, bacterial marker genes) have led to the identification of useful promoter sequences. It has been demonstrated that sequences up to 500-1,000 bases in most instances are sufficient to allow for the regulated expression of foreign genes. However, it has also been shown that sequences much longer than 1 kb may have useful features which permit high levels of gene expression in transgenic plants. The expression of genes encoding proteins that are useful for protecting plants from pathogen attack may have deleterious effects on plant growth if expressed constitutively. Consequently, it is desirable to have promoter sequences that control expression of these gene(s) in such a way that expression is absent or very low in the absence of pathogens, and high in the presence of pathogens.

[0023] Thus, what is needed is the identification of plant genes useful to confer resistance to a pathogen(s) and plant promoters, the expression of which is altered in response to pathogen attack.

### SUMMARY OF THE INVENTION

[0024] The invention generally provides an isolated nucleic acid molecule (polynucleotide) comprising a plant nucleotide sequence obtained or isolatable from a gene, the expression of which is altered, either increased or decreased, in response to pathogen infection. In one embodiment, the plant nucleotide sequence comprises an open reading frame, while in another embodiment, the plant nucleotide sequence comprises a promoter. A promoter sequence of the invention directs transcription of a linked nucleic acid segment, e.g., a linked plant DNA comprising an open reading frame for a structural or regulatory gene, in a host cell, such as a plant cell, in response to pathogen infection of that cell. As used herein, a “pathogen” includes bacteria, fungi, oomycetes, viruses, nematodes and insects, e.g., aphids (see Hammond-Kosack and Jones, 1997). Moreover, the expression of a plant nucleotide sequence of the invention comprising a promoter may be altered in response to one or more species of bacteria, nematode, fungi, oomycete, virus, or insect. Likewise, the expression of a plant nucleotide sequence of the invention comprising an open reading frame may be useful to confer tolerance or resistance of a plant to one or more species of bacteria, nematode, fungi, oomycete, virus or insect.

[0025] The nucleotide sequence preferably is obtained or isolatable from plant DNA. In particular, the nucleotide sequence is obtained or isolatable from a gene encoding a polypeptide which is substantially similar, and preferably has at least 70%, e.g., 71%, 72%, 73%, 74%, 75%, 76%, 77%, 78%, 79%, 80%, 81%, 82%, 83%, 84%, 85%, 86%, 87%, 88%, 89%, and even 90% or more, e.g., 91%, 92%, 93%, 94%, 95%, 96%, 97%, 98%, and 99%, amino acid sequence identity, to a polypeptide encoded by an Arabidopsis gene comprising any one of SEQ ID NOs: 1-953 and 2137-2661 or a fragment (portion) thereof which encodes a partial length polypeptide having substantially the same activity of the full-length polypeptide, a rice gene comprising one of SEQ ID NOs:2000-2129 and 2662-6813, or a Chenopodium gene comprising one of SEQ ID NOs:1954-1966.

[0026] The present invention also provides an isolated nucleic acid molecule comprising a plant nucleotide sequence that directs transcription of a linked nucleic acid segment in a host cell, e.g., a plant cell. The nucleotide sequence preferably is obtained or isolatable from plant genomic DNA. In particular, the nucleotide sequence is obtained or isolatable from a gene encoding a polypeptide which is substantially similar, and preferably has at least 70%, e.g., 71%, 72%, 73%, 74%, 75%, 76%, 77%, 78%, 79%, 80%, 81%, 82%, 83%, 84%, 85%, 86%, 87%, 88%, 89%, and even 90% or more, e.g., 91%, 92%, 93%, 94%, 95%, 96%, 97%, 98%, and 99%, amino acid sequence identity, to a polypeptide encoded by an Arabidopsis gene comprising any one of SEQ ID NOs:1-953 and 2137-2661, a rice gene comprising one of SEQ ID NOs:2000-2129 and 2662-6813, or a Chenopodium gene comprising any one of SEQ ID NOs:1954-1966, the expression of which is increased or decreased in response to pathogen infection. Preferred promoters comprise DNA obtained or isolatable from a gene encoding a polypeptide which is substantially similar, and preferably has at least 70%, e.g., 71%, 72%, 73%, 74%, 75%, 76%, 77%, 78%, 79%, 80%, 81%, 82%, 83%, 84%, 85%, 86%, 87%, 88%, 89%, and even 90% or more, e.g., 91%, 92%, 93%, 94%, 95%, 96%, 97%, 98%, and 99%, amino acid sequence identity, to a polypeptide encoded by an Arabidopsis gene comprising a promoter according to SEQ ID NOs:1001-1095 and 2137-2661, a rice gene comprising a promoter according to SEQ IN NOs:4738-6813, or a fragment thereof (i.e., promoters isolatable from any one of SEQ ID NOs:1001-1095, 2137-2661 and 4738-6813) which increases or decreases transcription of a linked nucleic acid segment in response to pathogen infection.

[0027] The invention also provides uses for an isolated nucleic acid molecule, e.g., DNA or RNA, comprising a plant nucleotide sequence comprising an open reading frame encoding a polypeptide which is substantially similar, and preferably has at least 70%, e.g., 71%, 72%, 73%, 74%, 75%, 76%, 77%, 78%, 79%, 80%, 81%, 82%, 83%, 84%, 85%, 86%, 87%, 88%, 89%, and even 90% or more, e.g., 91%, 92%, 93%, 94%, 95%, 96%, 97%, 98%, and 99%, amino acid sequence identity, to a polypeptide encoded by an Arabidopsis, Chenopodium or rice gene comprising an open reading frame comprising any one of SEQ ID NOs:1-953, 1954-1966, 2000-2129, 2662-4737 or the complement thereof. For example, these open reading frames may be useful to prepare plants that over- or under-express the encoded product or to prepare knockout plants.

[0028] The promoters and open reading frames of the invention can be identified by any method. For example, they can be identified by employing an array of nucleic acid samples, e.g., each sample having a plurality of oligonucleotides, and each plurality corresponding to a different plant gene, on a solid substrate, e.g., a DNA chip, and probes corresponding to nucleic acid which is up- or down-regulated in response to pathogen infection in one or more ecotypes or species of plant relative to a control (e.g., a water control, nucleic acid from an uninfected plant or nucleic acid from a mutant plant). Thus, genes that are upregulated or downregulated in response to pathogen infection can be systematically identified.

[0029] As described herein, GeneChip® technology was utilized to discover a plurality of genes, the expression of which is altered after pathogen infection. The Arabidopsis oligonucleotide probe array consists of probes from about 8,100 unique Arabidopsis genes, which covers approximately one third of the genome. This genome array permits a broader, more complete and less biased analysis of gene expression. Using labeled cRNA probes, expression levels were determined by laser scanning and genes generally selected for expression levels that were >2 fold over the control.

[0030] For example, using this approach, 953 genes were identified, the expression of which was altered after infection of wild-type Arabidopsis plants with a pathogen (SEQ ID NOs:1-953). In addition, 745 genes were identified, the expression which was increased after infection of wild-type Arabidopsis with Pseudomonas syringae (SEQ ID NOs: 2-6, 16, 18, 22-23, 25, 28-29, 31-32, 35-37, 39-43, 45-47, 49-50, 52, 54-55, 57-58, 60-66, 70-72, 74, 76-77, 79, 81, 83, 85, 87-90, 92, 94, 97, 100-107, 111-115, 117-125, 127-135, 138-140, 142-153, 156-158, 160, 162-165, 168-170, 173-181, 183-184, 186-188, 190-198, 200-201, 203-211, 214-215, 218-224, 227-232, 234-249, 251-262, 264, 266-268, 270, 272-275, 277-281, 283, 286-294, 297-298, 302, 304-306, 308-326, 328-339, 341, 344-345, 347, 350-351, 353-358, 361-371, 373-377, 379-386, 388-390, 392, 394-400, 402-406, 408-410, 412-417, 419-427, 429-433, 435-443, 445-452, 454-457, 459-460, 462-464, 466-470, 473-475, 478-479, 481-482, 484-187, 489-494, 496-498, 500-501, 503-506, 508, 510, 512-515, 517-523, 526, 528-529, 531-538, 540, 544-548, 550-558, 560, 563-568, 570, 572-577, 579-580, 582-585, 588-594, 596, 598-600, 602-603, 605-606, 608-612, 614-617, 619-624, 626-630, 632-639, 642, 644, 646-651, 653-657, 659-665, 667-671, 673-678, 681-689, 691-693, 695-713, 715-717, 719, 721-727, 729-733, 736-738, 740, 742, 744, 746, 748-752, 755-756, 758-760, 762-769, 771, 774, 776-781, 783-788, 790-796, 798-799, 802, 804-808, 810-815, 817-831, 833-848, 850-855, 857-869, 871-880, 882-900, 903-907, 909, 911-915, 918-920, 922-925, 927, 929, 931-938, 940, 943-945, 947, and 950-953). Of the 745 genes, the expression of 530 of those genes was altered in at least one mutant Arabidopsis after infection with Pseudomonas syringae (SEQ ID NOs: 2, 4-6, 11-13, 18, 22-23, 28, 31, 36, 39-43, 45, 47, 49-50, 52, 54-55, 57-58, 60-61, 63-66, 71-72, 74, 77, 81, 83, 85, 87-89, 92, 97, 100-107, 111-112, 114-115, 117-120, 122, 125, 127-128, 134, 128-140, 143-144, 148-151, 153, 156-157, 160, 165, 168-170, 173-174, 176-180, 183, 187-188, 191, 193-194, 197-198, 200, 203-210, 214, 219-224, 227, 230-232, 235-237, 239-240, 243-246, 248-249, 251-254, 256-258, 261, 264, 266-268, 270, 272-275, 277-278, 280, 283, 286-287, 290-293, 297, 302, 305-306, 308-310, 312-316, 321-326, 328-331, 333, 336-339, 341, 345, 351, 353, 355-358, 361-363, 365-366, 368-371, 373, 375, 377, 379-381, 384-385, 388-390, 392, 394-400, 402-406, 410, 412, 415-416, 419-420, 422-425, 429-433, 435-439, 441-443, 445-452, 454, 459-460, 463, 466, 468-470, 473, 481-482, 485-486, 489, 491-494, 497-498, 500-501, 503, 505-506, 508, 510, 513-515, 517, 520-521, 523, 528-529, 531, 533-538, 540, 545-548, 550-551, 553-554, 556-558, 560, 566-567, 575, 580, 582-584, 588-593, 596, 598-600, 602-603, 605-606, 608-610, 612, 614, 616, 620-622, 627-629, 633-634, 636-639, 644, 646, 648-651, 654-657, 659, 661-663, 667, 669, 673-674, 677, 682, 684-687, 689, 691-693, 697, 699, 701, 703-708, 713, 717, 719, 721-727, 730-733, 736, 740, 744, 746, 749-752, 755-756, 758-760, 762-764, 766-769, 774, 776-778, 780-781, 786, 788, 791-796, 799, 802, 804-808, 810-812, 815, 818-821, 823-825, 827-829, 831, 833-836, 838-843, 845, 847-848, 852-853, 855, 858, 860-869, 871-874, 876, 878-880, 884-887, 889, 892-894, 896-900, 904-907, 911-915, 918-920, 922-924, 931, 933, 938, 943-945, 947, and 950-952). Of the 530, 81 encode regulatory factors (SEQ ID NOs: 39, 52, 60, 63, 81, 83, 106, 107, 115, 117, 118, 168, 174, 176, 179, 204, 207, 208, 220, 221, 248, 258, 268, 275, 280, 309, 323, 326, 329, 351, 419, 422, 429, 430, 432, 459, 460, 468, 469, 473, 500, 505, 506, 508, 529, 531, 533, 535, 538, 545, 553, 602, 606, 608, 610, 614, 616, 634, 654, 655, 684, 686, 687, 691, 717, 751, 752, 766, 777, 815, 831, 834, 835, 839, 841, 847, 876, 884, 906, 920, and 924).

[0031] As also described herein, 333 genes were identified that are useful to confer improved resistance to plants to bacterial infection (SEQ ID NOs: 12-13, 18, 23, 36, 39-40, 43, 45, 50, 52, 57-58, 60-61, 64, 71-72, 81, 87-89, 97, 100, 102-105, 107, 111-112, 115, 119-120, 122, 125, 127-128, 140, 144, 148-150, 153, 165, 168-169, 176-177, 179, 183, 188, 191, 193-194, 197-198, 203-206, 208-209, 214, 219-222, 227, 230, 232, 237, 244-246, 248-249, 251-253, 258, 261, 264, 266, 268, 273-275, 283, 287, 290, 293, 297, 302, 305-306, 308, 312-315, 321-322, 324, 326, 330, 333, 338, 341, 345, 353, 356-358, 362-363, 366, 369, 371, 375, 377, 380, 384-385, 389, 392, 394-395, 398-399, 402-404, 406, 410, 415, 419, 422, 425, 429-430, 433, 435-439, 443, 445-452, 454, 463, 466, 468-470, 473, 486, 489, 491-492, 4894, 498, 500-501, 503, 508, 513-514, 517, 529, 533-538, 548, 550, 553-554, 4556-558, 566, 575, 580, 582-583, 590-591, 593, 600, 602, 609-610, 612, 614, 620-622, 627-629, 637-638, 644, 649, 654-657, 659, 663, 667, 669, 673-674, 677, 684-685, 689, 691-693, 699, 703-705, 708, 719, 721, 724-726, 730-732, 744, 746, 749-750, 752, 755-756, 758, 760, 762-764, 767, 769, 774, 780-781, 786, 788, 791-792, 794-796, 799, 804-808, 810-812, 815, 818-819, 823, 828-829, 833, 840841, 843, 847, 852-853, 858, 860, 862-865, 867-868, 872-874, 876, 885-887, 889, 892-894, 896-900, 904-905, 907, 911-914, 918-920, 922-924, 931, 933, 938, 947, 950, and 952).

[0032] Further, 296 genes were identified that are useful to confer improved resistance to plants to fungal infection (SEQ ID NOs: 2, 4, 6, 11-13, 18, 22-23, 31, 41-43, 49-50, 54, 57-58, 61, 64-66, 71-72, 74, 77, 85, 87, 89, 92, 97, 101, 103, 106-107, 112, 114, 117-119, 125, 128, 134, 138, 143, 149, 151, 156-157, 165, 169-170, 174, 176-180, 187-188, 191, 193, 206, 208, 219-220, 222, 224, 231, 236, 239, 243-245, 251-254, 256-257, 267, 272, 287, 290, 292, 297, 302, 312-313, 315-316, 321-322, 324-325, 328, 330, 345, 351, 353, 355-357, 362-363, 366, 368-371, 373, 375, 379, 381, 384, 388-390, 392, 395-400, 405, 410, 415-416, 419, 422, 424, 431-432, 435-436, 438-439, 447, 459-460, 470, 473, 481-482, 489, 491, 493-494, 500-501, 505-506, 513-514, 517, 520-521, 523, 528-529, 531, 535, 537-538, 540, 545-548, 551, 553-554, 557-558, 566, 575, 580, 582, 584, 589, 591, 593, 596, 598-599, 603, 605, 608-609, 612, 628, 633-634, 636-637, 639, 646, 648, 650-651, 656, 661, 663, 667, 674, 685-687, 689, 691, 693, 697, 699, 701, 705, 707, 713, 723-724, 726, 736, 740, 749, 751-752, 756, 758-759, 764, 766-768, 774, 776, 778, 780, 792-796, 799, 802, 806, 810-812, 818, 820-821, 825, 827-829, 833-836, 838-839, 841-843, 848, 855, 860-861, 866, 868-869, 871, 873-874, 876, 878-880, 889, 892, 898-900, 904-905, 907, 915, 918, 922, 924, 933, 943-945, 947, and 951).

[0033] In addition, 288 genes were identified that are useful to confer improved resistance to plants to infection with more than one pathogen, e.g., pathogens that include bacteria, oomycetes and viruses (SEQ ID NOs: 12-13, 18, 23, 36, 39-40, 43, 45, 50, 52, 57-58, 60-61, 64, 71-72, 81, 87-88, 100, 102-105, 107, 111-112, 115, 119-120, 122, 125, 127-128, 140, 148-150, 153, 168-169, 176-177, 188, 191, 193-194, 197-198, 203-206, 209, 219-222, 227, 232, 237, 244-246, 248-249, 251-253, 258, 261, 264, 266, 268, 273-275, 283, 287, 290, 293, 297, 302, 305-306, 308, 312-315, 324, 326, 330, 333, 341, 345, 353, 356, 358, 366, 371, 375, 377, 380, 385, 389, 392, 394, 398, 402-404, 406, 410, 415, 419, 425, 429-430, 433, 435-438, 443, 445-447, 449-452, 454, 463, 466, 468-470, 473, 486, 489, 492, 494, 498, 500-501, 503, 508, 513-514, 517, 533-538, 548, 550, 553-554, 57-558, 566, 575, 582-583, 590-591, 593, 600, 602, 609-610, 612, 620-622, 627-629, 637-638, 644, 649, 654-657, 659, 667, 669, 673, 677, 684, 689, 692-693, 703-705, 719, 721, 724-726, 730-732, 744, 746, 749-750, 752, 755-756, 760, 762-764, 767, 769, 774, 780-781, 786, 788, 791-792, 795-796, 805-808, 810-812, 815, 818-819, 823, 828, 833, 840-841, 843, 852-853, 858, 860, 862-865, 867-868, 872-874, 876, 887, 889, 893-894, 896-898, 900, 905, 907, 911-914, 918-920, 922-923, 931, 933, 938, 947, 950, and 952).

[0034] Using the same approach described above, 25 genes were identified (SEQ ID NOs: 1, 15, 19, 20, 24, 26, 27, 34, 38, 51, 56, 59, 67-69, 99, 116, 155, 159, 182, 212, 284, 372, 444, and 789), the expression of which was decreased at 6 hours in an avr2 plant. Also identified were 33 genes (SEQ ID NOs:17, 70, 76, 81, 84, 109, 123, 144, 160, 230, 265, 268, 269, 271, 323, 333, 385, 427, 428, 430, 457, 505, 569, 597, 602, 606, 616, 708, 730, 741, 812, 862, and 942), the expression of which was elevated in an incompatible or a compatible interaction in four Arabidopsis ecotypes infected with bacteria. Eight of the genes were upregulated by 3 hours in an incompatible interaction, 18 of the genes were upregulated by 6 hours, but not at 3 hours, in an incompatible interaction, and 6 of the genes were upregulated in a compatible interaction.

[0035] Further identified were 33 genes, the expression of which was induced early after infection (SEQ ID NOs:17, 21, 80, 81, 156, 174, 176, 221, 227, 296, 302, 303, 306, 333, 340, 360, 500, 505, 524, 575, 601, 602, 614, 628, 687, 733, 782, 811, 835, 862, 900, 905, and 912), 10 genes, the expression of which was decreased early after infection (SEQ ID NOs:30, 73, 282, 541, 640, 679, 761, 870, 917, and 930), and 135 genes, 107 of which were induced at 3 and/or 6 hours after infection, and 28 of which were decreased after infection (SEQ ID NOs:7, 21, 33, 44, 46, 60, 82, 86, 91, 93, 106, 110, 119, 122, 130, 131, 136, 141, 154, 161, 166-168, 171, 176, 185, 189, 199, 200, 202, 203, 213, 225, 227, 248, 261, 262, 266, 274, 285, 300, 301, 302, 320, 326, 341, 345, 348, 349, 360, 366, 378, 406, 409, 422, 425, 434, 441, 443, 446, 449, 454, 461, 471, 475, 476, 483, 485, 499, 500, 511, 512, 516, 527, 530, 533, 543, 545, 549, 550, 552, 567, 575, 578, 586, 590, 608, 611, 615, 618, 625, 631, 643, 656, 658, 659, 666, 668, 671, 680, 690, 694, 704, 706, 711, 714, 718, 721, 728, 734, 738, 757, 770, 772, 791, 807, 811, 813, 816, 827, 857, 864, 868, 875, 881, 893, 901, 905, 908, 912, 916, 939, 941, 951, and 952).

[0036] In a similar approach, 48 genes that were upregulated in response to infection, e.g., bacterial or fungal infection, as well as 46 of the corresponding promoter containing regions, were identified. Thirty-six of the genes were upregulated in response to bacterial, e.g., Pseudomonas, infection (the promoters for genes corresponding to SEQ ID NOs: 104-106, 119, 123, 129, 131, 151-152, 183, 191, 198, 200, 227, 249, 274, 302, 358, 415, 481, 547, 566, 582, 628, 633, 639, 656, 673, 793, 818, 827, 864, 874, 880, and 904-905), while 23 of the genes were upregulated in response to fungal, e.g., Botrykis, infection (SEQ ID NOs: 18, 71, 119, 123, 129, 151, 191, 244, 245, 302, 545, 547, 562, 566, 637, 653, 747, 756, 774, 793, 842, 864, and 905). Twenty-five of the genes were upregulated only in response to bacterial, e.g., Pseudomonas, infection (the promoters for genes corresponding to SEQ ID NOs: 104-106, 131, 152, 183, 198, 200, 227, 249, 274, 358, 415, 481, 582, 628, 633, 639, 656, 673, 818, 827, 874, 880, and 904 are provided in SEQ ID NOs:1001-1025), 10 of the genes were upregulated only in response to fungal, e.g., Botrytis, infection (the promoters for genes corresponding to SEQ ID NOs:18, 71, 244, 245, 545, 562, 637, 653, 747, 756, 774, and 842 are provided in SEQ ID NOs:1026-1035), and 11 genes were upregulated in response to both bacterial and fungal infection (the promoters for genes corresponding to SEQ ID NOs:119, 123, 129, 151, 191, 302, 547, 566, 793, 864, and 905 are provided in SEQ ID NOs:1036-1046).

[0037] As also described hereinbelow, 129 Arabidopsis genes (SEQ ID NOs: 3, 51, 54, 60, 61, 66, 75, 76, 78, 88, 95, 96, 101, 106, 108, 123, 126, 128, 129, 131, 137, 145-147, 150, 158, 169, 170, 172, 173, 197, 200, 216, 219, 224, 230, 233, 237, 249, 250, 263, 274, 275, 276, 299, 307, 323, 333, 342, 346, 359, 382, 383, 387, 391, 393, 401, 411, 415, 427, 442, 455, 459, 466, 477, 481, 485, 487, 502, 511, 515, 525, 534, 539, 542, 560, 571, 577, 579, 584, 587, 595, 600, 627, 638, 645, 654, 659, 668, 681, 688, 695, 696, 706, 708, 730, 742, 753, 775, 785, 786, 791, 797, 800, 801, 809, 817, 819, 820, 823, 827, 847, 856, 875, 885, 896, 902, 910, 921, 922, 923, 925, 926, 928, 946, and 952) were identified that were upregulated in response to viral infection, and 46 Arabidopsis genes were identified that were downregulated in response to viral infection (SEQ ID NOs: 14, 48, 53, 98, 217, 226, 295, 327, 343, 352, 369, 404, 407, 418, 453, 458, 465, 472, 480, 488, 495, 507, 509, 513, 514, 559, 561, 581, 604, 607, 613, 641, 652, 672, 720, 735, 739, 743, 745, 754, 773, 803, 832, 849, 948, and 949).

[0038] Also provided are nucleic acid molecules comprising a nucleotide sequence comprising an open reading frame expressed in response to pathogen infection comprising SEQ ID NOs:209, 216, 262, 267, 317, 386, 425, 440 and 800. These sequences are useful to over- or under-express the encoded product, or prepare knock-out plants which have an altered response to pathogen infection.

[0039] The invention therefore provides a method in which the open reading frame of a plant pathogen resistance gene, e.g., a gene that is associated with a response to pathogen infection, which is altered in a plant in response to infection is identified and isolated. A transgene comprising the isolated open reading frame may be introduced to and expressed in a transgenic plant, e.g., prior to infection, e.g., constitutively, or early and/or rapidly after infection, or in regulatable (inducible) fashion, e.g., after exposure to a chemical or using a promoter that is upregulated after infection, so as to confer resistance to that transgenic plant to the pathogen relative to a corresponding plant which does not have the transgene. The expression of the transgene is preferably at higher than normal levels, and under the regulation of a promoter that allows very fast and high induction in response to the presence of a pathogen or under cycling promoters (e.g., circadian clock regulated promoters), such that the encoded gene product(s) is maintained at sufficiently high levels to provide enhanced resistance or tolerance. The invention further provides a method in which a gene in a plant which is downregulated in response to infection, is disrupted or the expression of that gene is further downregulated, e.g., using antisense expression, so as to result in a plant that has enhanced resistance to infection, and which disruption or downregulation preferably has little or no detrimental effect(s) on the host plant.

[0040] As also described herein, it was found that the early incompatible response was similar to the late compatible response, suggesting that early expression of plant pathogen-resistance genes is important for resistance. Also, various plant strains were found to respond differently to the same pathogen, but there was also an identifiable global pattern of response. Thus, the comparison of the expression patterns in incompatible and compatible interactions in one or more ecotypes can lead to identifying subsets of key responding genes and clusters of genes that are key (early) responders. In addition, the observed global expression pattern indicated that the least resistant strain tested (Ws) had a low basal level of pathogen-upregulated genes and a high level of pathogen-downregulated genes compared to the most resistant strain (Ler). Thus, plant strains that are more resistant to pathogens have a gene expression phenotype in which genes that are upregulated in response to infection are already expressed at a higher than normal basal level, and those genes that are downregulated are expressed at a lower than normal basal level.

[0041] Thus, further provided herein is a method to identify at least one gene involved in plant (dicot or monocot) resistance or response to infection by at least one pathogen, e.g., a bacterium, fungus or virus, which method involves determining or detecting plant gene expression in an incompatible interaction and identifying at least one gene whose expression is significantly altered, e.g., upregulated or downregulated in response to infection, in the incompatible interaction relative to expression of the at least one gene in an uninfected plant, in a mutant plant that does not express a gene associated with response to infection by a pathogen, or in a corresponding compatible interaction. Also provided is a method to identify at least one gene involved in plant (dicot or monocot) resistance or response to infection by at least one pathogen, e.g., bacterium, fungus or virus, which method involves determining or detecting plant gene expression in a compatible interaction; and identifying at least one gene whose expression is significantly altered, e.g., upregulated or downregulated in response to infection, in the compatible interaction relative to expression of the at least one gene in an uninfected plant, in a mutant plant that does not express a gene associated with response to infection by a pathogen, or in a corresponding incompatible interaction. A compatible interaction can be, for example, between a plant having a resistance gene and a pathogen lacking a corresponding avirulence gene, a plant lacking a resistance gene to a pathogen having a corresponding avirulence gene, or a plant lacking a resistance gene and a pathogen lacking a corresponding avirulence gene. For example, the gene identified by such a method can encode a polypeptide that is substantially similar to a polypeptide encoded by an open reading frame comprising one of SEQ ID NOs: 50, 139, 609, 2699, 3311, 3463, 3584, 3791, 4210, 4451 or 4595, or has an open reading frame comprising one of SEQ ID NOs: 50, 139, 609, 2699, 3311, 3463, 3584, 3791, 4210, 4451 or 4595. In such a method, gene expression can be detected or determined using, for example, a gene chip, a cDNA array, cDNA-AFLP or differential display PCR. Such a method can further involve isolating the at least one gene or a portion thereof which includes the open reading frame or promoter for the gene.

[0042] Further provided is a method to identify at least one gene, the expression of which is altered by pathogen infection in a wild-type plant relative to a plant having a mutation that decreases jasmonic acid or ethylene-dependent signaling, which method involves contacting a plurality of isolated nucleic acid samples on a solid substrate each comprising isolated nucleic acid with a probe comprising plant nucleic acid corresponding to RNA from a wild-type plant infected with the pathogen, so as to form a complex, wherein each sample comprises a plurality of oligonucleotides corresponding to at least a portion of one plant gene; and comparing complex formation in a) with complex formation between a second plurality of isolated nucleic acid samples on a solid substrate with a second probe comprising nucleic acid corresponding to RNA from the plant having the mutation and infected with the pathogen, so as to identify a gene, the expression of which is altered by pathogen infection in a wild-type plant relative to the mutant plant. Also provided herein is a method to identify at least one gene, the expression of which is altered by pathogen infection in a wild-type plant relative to a plant having a mutation in a gene that interferes with salicylic acid dependent signaling, which method involves contacting a plurality of isolated nucleic acid samples on a solid substrate each comprising isolated nucleic acid with a probe comprising plant nucleic acid corresponding to RNA from a wild-type plant infected with the pathogen, so as to form a complex, wherein each sample comprises a plurality of oligonucleotides corresponding to at least a portion of one plant gene; and comparing complex formation in a) with complex formation between a second plurality of isolated nucleic acid samples on a solid substrate with a second probe comprising nucleic acid corresponding to RNA from the plant having a mutation and infected with the pathogen, so as to identify a gene, the expression of which is altered by pathogen infection in a wild-type plant relative to the mutant plant. Also provided herein is a method to identify at least one gene, the expression of which is altered by pathogen infection in a wild-type plant relative to a plant having a mutation that results in enhanced susceptibility to bacterial infection, which method involves contacting a plurality of isolated nucleic acid samples on a solid substrate each comprising isolated nucleic acid with a probe comprising plant nucleic acid corresponding to RNA from a wild-type plant infected with the pathogen, so as to form a complex, wherein each sample comprises a plurality of oligonucleotides corresponding to at least a portion of one plant gene; and comparing complex formation in a) with complex formation between a second plurality of isolated nucleic acid samples on a solid substrate with a second probe comprising nucleic acid corresponding to RNA from the plant having a mutation and infected with the pathogen, so as to identify a gene, the expression of which is altered by pathogen infection in a wild-type plant relative to the mutant plant. In addition, provided herein is a method to identify at least one gene, the expression of which is altered by infection with at least one virus, which method comprises contacting a plurality of isolated nucleic acid samples on a solid substrate each comprising isolated nucleic acid with a probe comprising plant nucleic acid corresponding to RNA from a wild-type plant infected with a virus, so as to form a complex, wherein each sample comprises a plurality of oligonucleotides corresponding to at least a portion of one plant gene; and comparing complex formation in a) with complex formation between a second plurality of isolated nucleic acid samples on a solid substrate with a second probe comprising nucleic acid corresponding to RNA from an uninfected plant, so as to identify a gene, the expression of which is altered by virus infection. Also provided is a method to identify at least one gene, the expression of which is altered by infection with at least one pathogen, which involves contacting a plurality of isolated nucleic acid samples on a solid substrate each comprising isolated nucleic acid with a probe comprising plant nucleic acid corresponding to RNA from an incompatible interaction so as to form a complex, wherein each sample comprises a plurality of oligonucleotides corresponding to at least a portion of one plant gene; and comparing complex formation in a) with complex formation between a second plurality of isolated nucleic acid samples on a solid substrate with a second probe comprising nucleic acid corresponding to RNA from a corresponding compatible interaction so as to identify a gene, the expression of which is altered by the pathogen. In any of the methods described herein, the probes can have nucleic acid, for example, from a dicot, a cereal plant, or a monocot. Further, the methods can additionally involve identifying the promoter for the at least one gene.

[0043] The genes and promoters described hereinabove can be used to identify orthologous genes and their promoters which are also likely useful to enhance resistance of plants to pathogens. Moreover, the orthologous promoters are useful to express linked open reading frames. In addition by aligning the promoters of these orthologs, novel cis elements can be identified that are useful to generate synthetic promoters.

[0044] Hence, the isolated nucleic acid molecules of the invention include the orthologs (homologs) of the Arabidopsis, Chenopodium and rice sequences disclosed herein, i.e., the corresponding nucleic acid molecules in organisms other than Arabidopsis, Chenopodium and rice, including, but not limited to, plants other than Arabidopsis, Chenopodium and rice, preferably cereal plants, e.g., corn, wheat, rye, turfgrass, sorghum, millet, sugarcane, soybean, barley, alfalfa, sunflower, canola, soybean, cotton, peanut, tobacco, sugarbeet, or rice. An ortholog is a gene from a different species that encodes a product having the same function as the product encoded by a gene from a reference organism. Databases such GenBank or one found at http://bioserver.myongjiac.kr/rjce.html (for rice) may be employed to identify sequences related to the Arabidopsis or Chenopodium sequences, e.g., orthologs in cereal crops such as rice. Alternatively, recombinant DNA techniques such as hybridization or PCR may be employed to identify sequences related to the Arabidopsis sequences. The encoded ortholog products likely have at least 70% sequence identity to each other. Hence, the invention includes an isolated nucleic acid molecule comprising a nucleotide sequence encoding a polypeptide having at least 70% identity to a polypeptide encoded by one or more of the Arabidopsis, Chenopodium or rice sequences disclosed herein. For example, promoter sequences within the scope of the invention are those which direct expression of an open reading frame which encodes a polypeptide that is substantially similar to an Arabidopsis polypeptide encoded by a gene comprising SEQ ID NOs:1-953.

[0045] The genes and promoters described hereinabove can be used to identify orthologous genes and their promoters which are also likely expressed in a particular tissue and/or development manner. Moreover, the orthologous promoters are useful to express linked open reading frames. In addition, by aligning the promoters of these orthologs, novel cis elements can be identified that are useful to generate synthetic promoters. Hence, the isolated nucleic acid molecules of the invention include the orthologs of the Arabidopsis sequences disclosed herein, i.e., the corresponding nucleotide sequences in organisms other than Arabidopsis, including, but not limited to, plants other than Arabidopsis, preferably cereal plants, e.g., corn, wheat, rye, turfgrass, sorghum, millet, sugarcane, soybean, barley, alfalfa, sunflower, canola, soybean, cotton, peanut, tobacco, sugarbeet, or rice. An orthologous gene is a gene from a different species that encodes a product having the same or similar function, e.g., catalyzing the same reaction as a product encoded by a gene from a reference organism. Thus, an ortholog includes polypeptides having less than, e.g., 65% amino acid sequence identity, but which ortholog encodes a polypeptide having the same or similar function. Databases such as GenBank or one found at http://bioserver.myongjiac.kr/rjce.html (for rice) may be employed to identify sequences related to the Arabidopsis sequences, e.g., orthologs in cereal crops such as rice, wheat, sunflower or alfalfa. SEQ ID NOs: 6286, 4210 and for example, are the rice promoter and open reading frame for rice peroxidase, the ortholog of the Arabidopsis gene comprising SEQ ID NO: 50. SEQ ID NOs: 3311, 5387, 3791 and 5867 are rice orthologs of the Arabidopsis gene comprising SEQ ID NO:609; SEQ ID NOs: 2699, 4775, 3463, 5539, 3584, 5660, 4451, 6527, 4595 and 6671 are rice orthologs of the Arabidopsis gene comprising SEQ ID NO: 139.

[0046] Preferably, the promoters of the invention include a consecutive stretch of about 25 to 2000, including 50 to 500 or 100 to 250, and up to 1000 or 1500, contiguous nucleotides, e.g., 40 to about 743, 60 to about 743, 125 to about 743, 250 to about 743, 400 to about 743, 600 to about 743, of any one of SEQ ID NOs:1001-1095, 2137-2661, 4738-6813 or the promoter orthologs thereof, which include the minimal promoter region. Preferably, the nucleotide sequence that includes the promoter region includes at least one copy of a TATA box. Thus, the invention provides plant promoters, including orthologs of Arabidopsis promoters corresponding to genes comprising any one of SEQ ID NOs: 1-953. The present invention further provides a composition, an expression cassette or a recombinant vector containing the nucleic acid molecule of the invention, and host cells comprising the expression cassette or vector, e.g., comprising a plasmid. In particular, the present invention provides an expression cassette or a recombinant vector comprising a promoter of the invention linked to a nucleic acid segment which, when present in a plant, plant cell or plant tissue, results in transcription of the linked nucleic acid segment.

[0047] In its broadest sense, the term “substantially similar” when used herein with respect to a nucleotide sequence means that the nucleotide sequence is part of a gene which encodes a polypeptide having substantially the same structure and function as a polypeptide encoded by a gene for the reference nucleotide sequence, e.g., the nucleotide sequence comprises a promoter from a gene that is the ortholog of the gene corresponding to the reference nucleotide sequence, as well as promoter sequences that are structurally related the promoter sequences particularly exemplified herein, i.e., the substantially similar promoter sequences hybridize to the complement of the promoter sequences exemplified herein under high or very high stringency conditions. The term “substantially similar” thus includes nucleotide sequences wherein the sequence has been modified, for example, to optimize expression in particular cells, as well as nucleotide sequences encoding a variant polypeptide comprising one or more amino acid substitutions relative to the (unmodified) polypeptide encoded by the reference sequence, which substitution(s) does not alter the activity of the variant polypeptide relative to the unmodified polypeptide. In its broadest sense, the term “substantially similar” when used herein with respect to polypeptide means that the polypeptide has substantially the same structure and function as the reference polypeptide. The percentage of amino acid sequence identity between the substantially similar and the reference polypeptide is at least 65%, 66%, 67%, 68%, 69%, 70%, e.g., 71%, 72%, 73%, 74%, 75%, 76%, 77%, 78%, 79%, 80%, 81%, 82%, 83%, 84%, 85%, 86%, 87%, 88%, 89%, and even 90% or more, e.g., 91%, 92%, 93%, 94%, 95%, 96%, 97%, 98%, up to at least 99%, wherein the reference polypeptide is a polypeptide encoded by an Arabidopsis gene comprising any one of SEQ ID NOs:1-953, a Chenopodium gene comprising any one of SEQ ID NOs:1954-1966, or a rice gene comprising any one of SEQ ID NOs:2000-2129 and 2662-4737. One indication that two polypeptides are substantially similar to each other, besides having substantially the same function, is that an agent, e.g., an antibody, which specifically binds to one of the polypeptides, specifically binds to the other.

[0048] Sequence comparisons maybe carried out using a Smith-Waterman sequence alignment algorithm (see e.g., Waterman (1995) or http://www hto.usc.edu/software/seqaln/index.html). The localS program, version 1.16, is preferably used with following parameters: match: 1, mismatch penalty: 0.33, open-gap penalty: 2, extended-gap penalty: 2. Further, a nucleotide sequence that is “substantially similar” to a reference nucleotide sequence hybridizes to the reference nucleotide sequence in 7% sodium dodecyl sulfate (SDS), 0.5 M NaPO₄, 1 mM EDTA at 50° C. with washing in 2×SSC, 0.1% SDS at 50° C., more desirably in 7% sodium dodecyl sulfate (SDS), 0.5 M NaPO₄, 1 mM EDTA at 50° C. with washing in 1×SSC, 0.1% SDS at 50° C., more desirably still in 7% sodium dodecyl sulfate (SDS), 0.5 M NaPO₄, 1 mM EDTA at 50° C. with washing in 0.5×SSC, 0.1% SDS at 50° C., preferably in 7% sodium dodecyl sulfate (SDS), 0.5 M NaPO₄, 1 mM EDTA at 50° C. with washing in 0.1×SSC, 0.1% SDS at 50° C., more preferably in 7% sodium dodecyl sulfate (SDS), 0.5 M NaPO₄, 1 mM EDTA at 50° C. with washing in 0.1×SSC, 0.1% SDS at 65° C.

[0049] Hence, the present invention further provides an expression cassette or a vector containing the nucleic acid molecule comprising an open reading frame of the invention operably linked to a promoter, or comprising a promoter of the invention operably linked to an open reading frame or portion thereof, and the vector may be a plasmid. Such cassettes or vectors, when present in a plant, plant cell or plant tissue result in transcription of the linked nucleic acid fragment in the plant. The expression cassettes or vectors of the invention may optionally include other regulatory sequences, e.g., transcription terminator sequences, operator, repressor binding site, transcription factor binding site, and/or an enhancer and may be contained in a host cell. The expression cassette or vector may augment the genome of a transformed plant or may be maintained extrachromosomally. The expression cassette or vector may further have a Ti plasmid and be contained in an Agrobacterium tumefaciens cell; it may be carried on a microparticle, wherein the microparticle is suitable for ballistic transformation of a plant cell; or it may be contained in a plant cell or protoplast. Further, the expression cassette can be contained in a transformed plant or cells thereof and the plant may be a dicot or a monocot. In particular, the plant may be a cereal plant.

[0050] The invention also provides sense and anti-sense nucleic acid molecules corresponding to the open reading frames identified herein as well as their orthologs. Also provided are expression cassettes, e.g., recombinant vectors, and host cells, comprising the nucleic acid molecule of the invention, e.g., one which comprises a nucleotide sequence which encodes a polypeptide the expression of which is altered in response to pathogen infection.

[0051] The present invention further provides a method of augmenting a plant genome by contacting plant cells with a nucleic acid molecule of the invention, e.g., one isolatable or obtained from a plant gene encoding a polypeptide that is substantially similar to a polypeptide encoded by an Arabidopsis, Chenopodium or rice gene comprising a sequence comprising any one of SEQ ID NOs: 1-953, 1954-1966, 2000-2129 or 2662-4737 so as to yield transformed plant cells; and regenerating the transformed plant cells to provide a differentiated transformed plant, wherein the differentiated transformed plant expresses the nucleic acid molecule in the cells of the plant. The nucleic acid molecule may be present in the nucleus, chloroplast, mitochondria and/or plastid of the cells of the plant. The present invention also provides a transgenic plant prepared by this method, a seed from such a plant and progeny plants from such a plant including hybrids and inbreds. Preferred transgenic plants are transgenic maize, soybean, barley, alfalfa, sunflower, canola, soybean, cotton, peanut, sorghum, tobacco, sugarbeet, rice, wheat, rye, turfgrass, millet, sugarcane, tomato, or potato.

[0052] The invention also provides a method of plant breeding, e.g., to prepare a crossed fertile transgenic plant. The method comprises crossing a fertile transgenic plant comprising a particular nucleic acid molecule of the invention with itself or with a second plant, e.g., one lacking the particular nucleic acid molecule, to prepare the seed of a crossed fertile transgenic plant comprising the particular nucleic acid molecule. The seed is then planted to obtain a crossed fertile transgenic plant. The plant may be a monocot or a dicot. In a particular embodiment, the plant is a cereal plant.

[0053] The crossed fertile transgenic plant may have the particular nucleic acid molecule inherited through a female parent or through a male parent. The second plant may be an inbred plant. The crossed fertile transgenic may be a hybrid. Also included within the present invention are seeds of any of these crossed fertile transgenic plants.

[0054] The various breeding steps are characterized by well-defined human intervention such as selecting the lines to be crossed, directing pollination of the parental lines, or selecting appropriate progeny plants. Depending on the desired properties different breeding measures are taken. The relevant techniques are well known in the art and include but are not limited to hybridization, inbreeding, backcross breeding, multiline breeding, variety blend, interspecific hybridization, aneuploid techniques, etc. Hybridization techniques also include the sterilization of plants to yield male or female sterile plants by mechanical, chemical or biochemical means. Cross pollination of a male sterile plant with pollen of a different line assures that the genome of the male sterile but female fertile plant will uniformly obtain properties of both parental lines. Thus, the transgenic plants according to the invention can be used for the breeding of improved plant lines that for example increase the effectiveness of conventional methods such as herbicide or pesticide treatment or allow to dispense with said methods due to their modified genetic properties. Alternatively new crops with improved stress tolerance can be obtained that, due to their optimized genetic “equipment”, yield harvested product of better quality than products that were not able to tolerate comparable adverse developmental conditions.

[0055] The nucleic acid molecules of the invention, their encoded polypeptides and compositions thereof, are: for open reading frames, useful to provide resistance to pathogens to alter expression of a particular gene corresponding to the open reading frame by decreasing or eliminating expression of that plant gene or by overexpressing a particular gene product, and as a diagnostic for the presence or absence of the pathogen by correlating the expression level or pattern of expression of one or more of the nucleic acid molecules or polypeptides of the invention; and for promoters, useful to alter the expression of a linked open reading frame in response to pathogen infection. As one embodiment of the invention includes isolated nucleic acid molecules that have increased expression in response to pathogen infection, the invention further provides compositions and methods for enhancing resistance to pathogen infection. The compositions of the invention include plant nucleic acid sequences and the amino acid sequences for the polypeptides or partial-length polypeptides encoded thereby which are described herein, or other plant nucleic acid sequences and the amino acid sequences for the polypeptides or partial-length polypeptides encoded thereby which are operably linked to a promoters are useful to provide tolerance or resistance to a plant to a pathogen, preferably by preventing or inhibiting pathogen infection. Methods of the invention involve stably transforming a plant with one or more of at least a portion of these nucleotide sequences which confer tolerance or resistance operably linked to a promoter capable of driving expression of that nucleotide sequence in a plant cell. By “portion” or “fragment”, as it relates to a nucleic acid molecule, sequence or segment of the invention, when it is linked to other sequences for expression, is meant a sequence comprising at least 80 nucleotides, more preferably at least 150 nucleotides, and still more preferably at least 400 nucleotides. If not employed for expressing, a “portion” or “fragment” means at least 9, preferably 12, more preferably 15, even more preferably at least 20, consecutive nucleotides, e.g., probes and primers (oligonucleotides), corresponding to the nucleotide sequence of the nucleic acid molecules of the invention. By “resistant” is meant a plant which exhibits substantially no phenotypic changes as a consequence of infection with the pathogen. By “tolerant” is meant a plant which, although it may exhibit some phenotypic changes as a consequence of infection, does not have a substantially decreased reproductive capacity or substantially altered metabolism.

[0056] A method of combating a pathogen in an agricultural crop is also provided. The method comprises introducing to a plant, plant cell, or plant tissue an expression cassette comprising a nucleic acid molecule of the invention comprising an open reading frame so as to yield a transformed differentiated plant, transformed cell or transformed tissue. Transformed cells or tissue can be regenerated to provide a transformed differentiated plant. The transformed differentiated plant preferably expresses the nucleic acid molecule in an amount that confers resistance to the transformed plant to pathogen infection relative to a corresponding nontransformed plant. The present invention also provides a transformed plant prepared by the method, progeny and seed thereof. Examples of plant viruses which may be combated by the present invention include single stranded RNA viruses (with and without envelope), double stranded RNA viruses, and single and double stranded DNA viruses such as (but not limited to) tobacco mosaic virus, cucumber mosaic virus, turnip mosaic virus, turnip vein clearing virus, oilseed rape mosaic virus, tobacco rattle virus, pea enation mosaic virus, barley stripe mosaic virus, potato viruses X and Y, carnation latent virus, beet yellows virus, maize chlorotic virus, tobacco necrosis virus, turnip yellow mosaic virus, tomato bushy stunt virus, southern bean mosaic virus, barley yellow dwarf virus, tomato spotted wilt virus, lettuce necrotic yellows virus, wound tumor virus, maize streak virus, and cauliflower mosaic virus. Other pathogens within the scope of the invention include, but are not limited to, fungi such as Cochliobolus carbonum, Phytophthora infestans, Phytophthora sojae, Collesosichum, Melampsora lini, cladosporium fulvum, Heminthosporium maydia, Peronospora parasitica, Puccinia sorghi, and Puccinia polysora; bacteria such as Phynchosporium secalis, Pseudomonas glycinea, Xanthomonas oryzae and, Fusarium oxyaporium; and nematodes such as Globodera rostochiensis.

[0057] For example, the invention provides a nucleic acid molecule comprising a plant nucleotide sequence comprising at least a portion of a key effector gene(s) responsible for host resistance to particular pathogens. To provide resistance or tolerance to a pathogen in a plant, this sequence may be overexpressed individually, in the sense or antisense orientation, or in combination with other sequences to confer improved disease resistance or tolerance to a plant relative to a plant that does not comprise and/or express the sequence. The overexpression may be constitutive, or it may be preferable to express the effector gene(s) in a tissue-specific manner or from an inducible promoter including a promoter which is responsive to external stimuli, such as chemical application, or to pathogen infection, e.g., so as to avoid possible deleterious effects on plant growth if the effector gene(s) was constitutively expressed. In one embodiment of the invention, the promoter employed may be one that is rapidly and transiently and/or highly transcribed after pathogen infection.

[0058] A transformed (transgenic) plant of the invention includes plants, for example, a plant the cells of which have an expression cassette of the invention, i.e., an expression cassette having a polynucleotide of the invention operatively linked to an open reading frame, or, the genome of which is augmented by a nucleic acid molecule of the invention, or in which the corresponding gene has been disrupted, e.g., to result in a loss, a decrease or an alteration, in the function of the product encoded by the gene, which plant may also have increased yields, e.g., under conditions of pathogen infection, and/or produce a better-quality product than the corresponding wild-type plant. The nucleic acid molecules of the invention are thus useful for targeted gene disruption, as well as markers and probes.

[0059] For example, the invention includes a pathogen, e.g., virus, tolerant or resistant plant and seed thereof having stably integrated and expressed within its genome, a nucleic acid molecule of the invention. The normal fertile transformed (transgenic) plant may be selfed to yield a substantially homogenous line with respect to viral resistance or tolerance. Individuals of the line, or the progeny thereof, may be crossed with plants which optionally exhibit the trait. In a particular embodiment of the method, the selfing and selection steps are repeated at least five times in order to obtain the homogenous (isogenic) line. Thus, the invention also provides transgenic plants and the products of the transgenic plants.

[0060] The invention further includes a nucleotide sequence which is complementary to one (hereinafter “test” sequence) which hybridizes under low, moderate or stringent conditions with the nucleic acid molecules of the invention as well as RNA which is encoded by the nucleic acid molecule. When the hybridization is performed under stringent conditions, either the test or nucleic acid molecule of invention is preferably supported, e.g., on a membrane or DNA chip. Thus, either a denatured test or nucleic acid molecule of the invention is preferably first bound to a support and hybridization is effected for a specified period of time at a temperature of, e.g., between 55 and 70° C., in double strength citrate buffered saline (SC) containing 0.1% SDS followed by rinsing of the support at the same temperature but with a buffer having a reduced SC concentration. Depending upon the degree of stringency required such reduced concentration buffers are typically single strength SC containing 0.1% SDS, half strength SC containing 0.1% SDS and one-tenth strength SC containing 0.1% SDS.

[0061] The invention further provides a method to identify an open reading frame in the genome of a plant cell, the expression of which is altered by pathogen infection of that cell. The method comprises contacting a solid substrate comprising a plurality of samples comprising isolated plant nucleic acid of a probe comprising plant nucleic acid, e.g., cRNA, isolated from a pathogen infected plant so as to form a complex. Each individual sample comprises one or more nucleic acid sequences (e.g., oligonucleotides) corresponding to at least a portion of a plant gene. The method may be employed with nucleic acid samples and probes from any organism, e.g., any prokaryotic or eukaryotic organism. Preferably, the nucleic acid sample and probes are from a plant, such as a dicot or monocot. More preferably the nucleic acid samples and probes are from a cereal plant. Even more preferably the nucleic acids and probes are from a crop plant. A second plurality of samples on a solid substrate, i.e., a DNA chip, each comprising a plurality of samples comprising isolated plant nucleic acid is contacted with a probe comprising plant nucleic acid isolated from an uninfected or infected control (mutant) plant so as to form a complex. Then complex formation between the samples and probes comprising nucleic acid from infected or control cells compared. For example, potato virus X, tobacco mosaic virus, tobravirus, cucumber mosaic virus and gemnivirus are known to infect Arabidopsis. Thus, Arabidopsis genes, the expression of which is altered in response to infection by any of these viruses, can be identified. Regions that are 5′ to the start codon for the gene can then be identified and/or isolated.

[0062] The invention further provides a method for identifying a plant cell infected with a pathogen. The method comprises contacting nucleic acid obtained from a plant cell suspected of being infected with a pathogen with oligonucleotides corresponding to a portion of a plurality of sequences selected from SEQ ID NOs:1-953, 1954-1966, 2000-2129 or 2662-4737 under conditions effective to amplify those sequences. Then the presence of the amplified product is detected or determined. The presence of two or more amplified products, e.g., in an amount that is different than the amount of the corresponding amplified products from an uninfected plant, each corresponding to two or more SEQ ID NOs: 1-953, 1954-1966, 2000-2129 or 2662-4737 is indicative of pathogen infection.

[0063] The invention further provides a method for identifying a plant cell infected with a pathogen. The method comprises contacting a protein sample obtained from a plant cell suspected of being infected with a pathogen with an agent that specifically binds a polypeptide encoded by an open reading frame comprising SEQ ID NOs:1-953, 1954-1966, 2000-2129 or 2662-4737 so as to form a complex. Then the presence or amount of complex formation is detected or determined.

[0064] The invention provides an additional method for identifying a plant cell infected with a pathogen. The method comprises hybridizing a probe selected from SEQ ID NOs:1-953, 1954-1966, 2000-2129 or 2662-4737 to nucleic acid obtained from a plant cell suspected of being infected with a pathogen. The amount of the probe hybridized to nucleic acid obtained from a cell suspected of being infected with a virus is compared to hybridization of the probe to nucleic acid isolated from an uninfected cell. A change in the amount of at least two probes that hybridize to nucleic acid isolated from a cell suspected of being infected by a virus relative to hybridization of at least two probes to nucleic acid isolated from an uninfected cell is indicative of viral infection.

[0065] A method to shuffle the nucleic acids of the invention is provided. This method involves fragmentation of a nucleic acid corresponding to a nucleic acid sequence listed in SEQ ID NOs: 1-953, 1954-1966, 2000-2129 or 2662-4737, the orthologs thereof, and the corresponding genes, followed by religation. This method allows for the production of polypeptides having altered activity relative to the native form of the polypeptide. Accordingly, the invention provides cells and transgenic plants containing nucleic acid segments produced through shuffling that encode polypeptides having altered activity relative to the corresponding native polypeptide.

[0066] A computer readable medium, e.g., a magnetic tape, optical disk, CD-ROM, random access memory, volatile memory, non-volatile memory, or bubble memory, containing the nucleic acid sequences of the invention as well as methods of use for the computer readable medium are provided. For example, a computer readable medium can contain a nucleic acid molecule that has at least 70% nucleic acid sequence identity to SEQ ID NOs: 50, 139, 609, 4210, 6286, 3311, 5387, 3791, 5867, 2699, 4775, 3463, 5539, 3584, 5660, 4451, 6527, 4595, 6671 or the complement thereof. This medium allows a nucleic acid segment corresponding to a nucleic acid sequence listed in SEQ ID NOs:1-953, 1001-1095, 1954-1966, 2000-2129 or 2662-4737 to be used as a reference sequence to search against databases. This medium also allows for computer-based manipulation of a nucleic acid sequence corresponding to a nucleic acid sequence listed in SEQ ID NOs:1-953, 1001-1095, 1954-1966, 2000-2129 or 2662-4737, and the corresponding gene and polypeptide encoded by the nucleic acid sequence.

[0067] The invention also provides a method for marker-assisted breeding to select for plants having altered resistance to a pathogen. The method involves contacting plant DNA or cDNA with a probe corresponding to a nucleic acid sequence listed in SEQ ID NOs. 1-953, 1954-1966, 2000-2129 or 2662-4737, the orthologs thereof, and the corresponding genes, or a portion thereof which hybridizes under moderate stringency conditions to a gene corresponding to one of of SEQ ID Nos. 1-953, 1954-1966, 2000-2129 or 2662-4737 so as to form a duplex and detecting or determining the presence or amount of the duplex. The amount or presence of the duplex is indicative of the presence of a gene, the expression of which alters the resistance of the plant to a pathogen.

[0068] Therefore, another embodiment of the present invention provides a method of using known inducers or inhibitors of genes identified as being important in plant-pathogen interactions to induce genes that are important in resistance, or to inhibit genes that are downregulated in resistance.

[0069] Thus, some of the isolated nucleic acid molecules of the invention are useful in a method of combating a pathogen in an agricultural crop. The method comprises introducing to a plant an expression cassette comprising a nucleic acid molecule of the invention so as to yield a transformed differentiated plant. The transformed differentiated plant expresses the nucleic acid molecule in an amount that confers resistance to the transformed plant to infection relative to a corresponding nontransformed plant.

### DETAILED DESCRIPTION OF THE INVENTION

I. Definitions

[0070] The term “gene” is used broadly to refer to any segment of nucleic acid associated with a biological function. Thus, genes include coding sequences and/or the regulatory sequences required for their expression. For example, gene refers to a nucleic acid fragment that expresses mRNA or functional RNA, or encodes a specific protein, and which includes regulatory sequences. Genes also include nonexpressed DNA segments that, for example, form recognition sequences for other proteins. Genes can be obtained from a variety of sources, including cloning from a source of interest or synthesizing from known or predicted sequence information, and may include sequences designed to have desired parameters.

[0071] The term “native” or “wild type” gene refers to a gene that is present in the genome of an untransformed cell, i.e., a cell not having a known mutation.

[0072] A “marker gene” encodes a selectable or screenable trait.

[0073] The term “chimeric gene” refers to any gene that contains 1) DNA sequences, including regulatory and coding sequences, that are not found together in nature, or 2) sequences encoding parts of proteins not naturally adjoined, or 3) parts of promoters that are not naturally adjoined. Accordingly, a chimeric gene may comprise regulatory sequences and coding sequences that are derived from different sources, or comprise regulatory sequences and coding sequences derived from the same source, but arranged in a manner different from that found in nature.

[0074] A “transgene” refers to a gene that has been introduced into the genome by transformation and is stably maintained. Transgenes may include, for example, genes that are either heterologous or homologous to the genes of a particular plant to be transformed. Additionally, transgenes may comprise native genes inserted into a non-native organism, or chimeric genes. The term “endogenous gene” refers to a native gene in its natural location in the genome of an organism. A “foreign” gene refers to a gene not normally found in the host organism but that is introduced by gene transfer.

[0075] An “oligonucleotide” corresponding to a nucleotide sequence of the invention, e.g., for use in probing or amplification reactions, may be about 30 or fewer nucleotides in length (e.g., 9, 12, 15, 18, 20, 21 or 24, or any number between 9 and 30). Generally specific primers are upwards of 14 nucleotides in length. For optimum specificity and cost effectiveness, primers of 16 to 24 nucleotides in length may be preferred. Those skilled in the art are well versed in the design of primers for use processes such as PCR. If required, probing can be done with entire restriction fragments of the gene disclosed herein which may be 100's or even 1000's of nucleotides in length.

[0076] The terms “protein,” “peptide” and “polypeptide” are used interchangeably herein.

[0077] The nucleotide sequences of the invention can be introduced into any plant. The genes to be introduced can be conveniently used in expression cassettes for introduction and expression in any plant of interest. Such expression cassettes will comprise the transcriptional initiation region of the invention linked to a nucleotide sequence of interest. Preferred promoters include constitutive, tissue-specific, developmental-specific, inducible and/or viral promoters. Such an expression cassette is provided with a plurality of restriction sites for insertion of the gene of interest to be under the transcriptional regulation of the regulatory regions. The expression cassette may additionally contain selectable marker genes. The cassette will include in the 5′-3′ direction of transcription, a transcriptional and translational initiation region, a DNA sequence of interest, and a transcriptional and translational termination region functional in plants. The termination region may be native with the transcriptional initiation region, may be native with the DNA sequence of interest, or may be derived from another source. Convenient termination regions are available from the Ti-plasmid of A. tumefaciens, such as the octopine synthase and nopaline synthase termination regions. See also, Guerineau et al., 1991; Proudfoot, 1991; Sanfacon et al., 1991; Mogen et al., 1990; Munroe et al., 1990; Ballas et al., 1989; Joshi et al., 1987.

[0078] “Coding sequence” refers to a DNA or RNA sequence that codes for a specific amino acid sequence and excludes the non-coding sequences. It may constitute an “uninterrupted coding sequence”, i.e., lacking an intron, such as in a cDNA or it may include one or more introns bounded by appropriate splice junctions. An “intron” is a sequence of RNA which is contained in the primary transcript but which is removed through cleavage and re-ligation of the RNA within the cell to create the mature mRNA that can be translated into a protein.

[0079] The terms “open reading frame” and “ORF” refer to the amino acid sequence encoded between translation initiation and termination codons of a coding sequence. The terms “initiation codon” and “termination codon” refer to a unit of three adjacent nucleotides (‘codon’) in a coding sequence that specifies initiation and chain termination, respectively, of protein synthesis (mRNA translation).

[0080] A “functional RNA” refers to an antisense RNA, ribozyme, or other RNA that is not translated.

[0081] The term “RNA transcript” refers to the product resulting from RNA polymerase catalyzed transcription of a DNA sequence. When the RNA transcript is a perfect complementary copy of the DNA sequence, it is referred to as the primary transcript or it may be a RNA sequence derived from posttranscriptional processing of the primary transcript and is referred to as the mature RNA. “Messenger RNA” (mRNA) refers to the RNA that is without introns and that can be translated into protein by the cell. “cDNA” refers to a single- or a double-stranded DNA that is complementary to and derived from mRNA.

[0082] “Regulatory sequences” and “suitable regulatory sequences” each refer to nucleotide sequences located upstream (5′ non-coding sequences), within, or downstream (3′ non-coding sequences) of a coding sequence, and which influence the transcription, RNA processing or stability, or translation of the associated coding sequence. Regulatory sequences include enhancers, promoters, translation leader sequences, introns, and polyadenylation signal sequences. They include natural and synthetic sequences as well as sequences which may be a combination of synthetic and natural sequences. As is noted above, the term “suitable regulatory sequences” is not limited to promoters.

[0083] “5′ non-coding sequence” refers to a nucleotide sequence located 5′ (upstream) to the coding sequence. It is present in the fully processed mRNA upstream of the initiation codon and may affect processing of the primary transcript to mRNA, mRNA stability or translation efficiency (Turner et al., 1995).

[0084] “3′ non-coding sequence” refers to nucleotide sequences located 3′ (downstream) to a coding sequence and include polyadenylation signal sequences and other sequences encoding regulatory signals capable of affecting mRNA processing or gene expression. The polyadenylation signal is usually characterized by affecting the addition of polyadenylic acid tracts to the 3′ end of the mRNA precursor. The use of different 3′ non-coding sequences is exemplified by Ingelbrecht et al., 1989.

[0085] The term “translation leader sequence” refers to that DNA sequence portion of a gene between the promoter and coding sequence that is transcribed into RNA and is present in the fully processed mRNA upstream (5′) of the translation start codon. The translation leader sequence may affect processing of the primary transcript to mRNA, mRNA stability or translation efficiency.

[0086] The term “mature” protein refers to a post-translationally processed polypeptide without its signal peptide. “Precursor” protein refers to the primary product of translation of an mRNA. “Signal peptide” refers to the amino terminal extension of a polypeptide, which is translated in conjunction with the polypeptide forming a precursor peptide and which is required for its entrance into the secretory pathway. The term “signal sequence” refers to a nucleotide sequence that encodes the signal peptide.

[0087] The term “intracellular localization sequence” refers to a nucleotide sequence that encodes an intracellular targeting signal. An “intracellular targeting signal” is an amino acid sequence that is translated in conjunction with a protein and directs it to a particular sub-cellular compartment. “Endoplasmic reticulum (ER) stop transit signal” refers to a carboxy-terminal extension of a polypeptide, which is translated in conjunction with the polypeptide and causes a protein that enters the secretory pathway to be retained in the ER. “ER stop transit sequence” refers to a nucleotide sequence that encodes the ER targeting signal. Other intracellular targeting sequences encode targeting signals active in seeds and/or leaves and vacuolar targeting signals.

[0088] “Pathogen” as used herein includes but is not limited to bacteria, fungi, yeast, oomycetes and virus, e.g., American wheat striate mosaic virus mosaic (AWSMV), barley stripe mosaic virus (BSMV), barley yellow dwarf virus (BYDV), Brome mosaic virus (BMV), cereal chlorotic mottle virus (CCMV), corn chlorotic vein banding virus (CCVBV), maize chlorotic mottle virus (MCMV), maize dwarf mosaic virus (MDMV), A or B, wheat streak mosaic virus (WSMV), cucumber mosaic virus (CMV), cynodon chlorotic streak virus (CCSV), Johnsongrass mosaic virus (JGMV), maize bushy stunt or mycoplasma-like organism (N]ILO), maize chlorotic dwarf virus (MCDV), maize chlorotic mottle virus (MCMV), maize dwarf mosaic virus (MDMV) strains A, D, E and F, maize leaf fleck virus (MLFV), maize line virus (NELV), maize mosaic virus (MMV), maize mottle and chlorotic stunt virus, maize pellucid ringspot virus (MPRV), maize raya gruesa virus (MRGV), maize rayado fino virus (MRFV), maize red leaf and red stripe virus (MRSV), maize ring mottle virus (MRMV), maize rio cuarto virus (MRCV), maize rough dwarf virus (MRDV), maize sterile stunt virus (strains of barley yellow striate virus), maize streak virus (MSV), maize chlorotic stripe, maize hoja Maize stripe virus blanca, maize stunting virus, maize tassel abortion virus (MTAV), maize vein enation virus (MVEV), maize wallaby ear virus (MAVEV), maize white leaf virus, maize white line mosaic virus (NTVVLMV), millet red leaf virus (NMV), Northern cereal mosaic virus (NCMV), oat pseudorosette virus, oat sterile dwarf virus (OSDV), rice black-streaked dwarf virus (RBSDV), rice stripe virus (RSV), sorghum mosaic virus (SrMV), formerly sugarcane mosaic virus (SCMV) strains H, I and M, sugarcane Fiji disease virus (FDV), sugarcane mosaic virus (SCMV) strains A, B, D, E, SC, BC, Sabi and NM vein enation virus, and wheat spot mosaic virus (WSMV).

[0089] Bacterial pathogens include but are not limited to Pseudomonas avenae subsp. avenae, Xanthomonas campestris pv. holcicola, Enterobacter dissolvens, Erwinia dissolvens, Ervinia carotovora subsp. carotovora, Erwinia chrysanthemi pv. zeae, Pseudomonas andropogonis, Pseudomonas syringae pv. coronafaciens, Clavibacter michiganensis subsp., Corynebacterium michiganense pv. nebraskense, Pseudomonas syringae pv. syringae, Hemiparasitic bacteria (see under fungi), Bacillus subtilis, Erwinia stewartii, and Spiroplasma kunkelii.

[0090] Fungal pathogens include but are not limited to Collelotrichum graminicola, Glomerella graminicola Politis, Glomerella lucumanensis, Aspergillus flavus, Rhizoctonia solani Kuhn, Thanatephorus cucumeris, Acremonium strictum W. Gams, Cephalosporium acremonium Auct. non Corda Black Lasiodiplodia theobromae=BoIr odiplodia y theobromae Borde blanco Marasmiellus sp., Physoderma maydis, Cephalosporium Corticium sasakii, Curvularia clavata, C. maculans, Cochhobolus eragrostidis, Curvularia inaequahs, C. intermedia (teleomorph Cochhobolus intermedius), Curvularia lunata (teleomorph: Cochliobolus lunatus), Curvularia pallescens (teleomorph—Cochliobolus pallescens), Curvularia senegalensis, C. luberculata (teleomorph: Cochliobolus tuberculatus), Didymella exitalis Diplodiaftumenti (teleomorph—Botryosphaeriafestucae), Diplodia maydis=Stenocarpella maydis, Stenocarpella macrospora=Diplodia macrospora, Sclerophthora rayssiae var. zeae, Sclerophthora macrospora=Sclerospora macrospora, Sclerospora graminicola, Peronosclerospora maydis=Sclerospora maydis, Peronosclerospora philippinensis, Sclerospora philippinensis, Peronosclerospora sorghi=Sclerospora sorghi, Peronosclerospora spontanea=Sclerospora spontanea, Peronosclerospora sacchari=Sclerospora sacchari, Nigrospora oryzae (teleomorph: Khuskia oryzae) A. Iternaria alternala=A. tenuis, Aspergillus glaucus, A. niger, Aspergillus spp., Botrytis cinerea, Cunninghamella sp., Curvulariapallescens, Doratomyces slemonitis=Cephalotrichum slemonitis, Fusarium culmorum, Gonatobotrys simplex, Pithomyces maydicus, Rhizopus microsporus Tiegh., R. stolonifer=R. nigricans, Scopulariopsis brumptii, Claviceps gigantea (anamorph: Sphacelia sp) Aureobasidium zeae=Kabatiella zeae, Fusarium subglutinans=F. moniliforme var. subglutinans, Fusarium moniliforme, Fusarium avenaceum (teleomorph—Gibberella avenacea), Botryosphaeria zeae=Physalospora zeae (anamorph: Allacrophoma zeae), Cercospora sorghi=C. sorghi var. maydis, Helminthosporium pedicellatum (teleomorph: Selosphaeriapedicellata), Cladosporium cladosporioides=Hormodendrum cladosporioides, C. herbarum (teleomorph—Mycosphaerella tassiana), Cephalosporium maydis, A. Iternaria alternata, A. scochyta maydis, A. tritici, A. zeicola, Bipolaris victoriae, Helminthosporium victoriae (teleomorph Cochhoholus victoriae), C sativus (anamorph: Bipolaris sorokiniana=H. sorokinianum=H. sativum), Epicoccum nigrum, Exserohilum prolatum=Drechslera prolata (teleomorph: Setosphaeriaprolata), Graphium penicillioides, Leptosphaeria maydis, Leptothyrium zeae, Ophiosphaerella herpotricha (anamorph—Scolecosporiella sp.), Pataphaeosphaeria michotii, Phoma sp., Septoria zeae, S. zeicola, S. zeina Setosphaeria turcica, Exserohilzim turcicum=Helminthosporium furcicum, Cochhoholus carbonum, Bipolaris zeicola=Helminthosporium carhonum, Penicilhum spp., P. chrysogenum, P. expansum, P. oxalicum, Phaeocytostroma ambiguum, Phaeocylosporella zeae, Phaeosphaeria maydis=Sphaerulina maydis, Botryosphaeriafestucae=Physalospora zeicola (anamorph: Diplodiaftumenfi), Herniparasitic bacteria and fungi Pyrenochaeta Phoma terrestris=Pyrenochaeta terrestris, Pythium spp., P. arrhenomanes, P. graminicola, Pythium aphanidermatum=P. hutleri L., Rhizoctonia zeae (teleomorph: Waitea circinata), Rhizoctonia solani, minor A Iternaria alternala, Cercospora sorghi, Dictochaetaftrtilis, Fusarium acuminatum (teleomorph Gihherella acuminata), E. equiseti (teleomorph: G. intricans), E. oxysporum, E. pallidoroseum, E. poae, E. roseum, G. cyanogena (anamorph: E. sulphureum), Microdochium holleyi, Mucor sp., Periconia circinata, Phytophthora cactorum, P. drechsleri, P. nicotianae var. parasitica, Rhizopus arrhizus, Setosphaeria rostrata, Exserohilum rostratum=Helminthosporium rostratum, Puccinia sorghi, Physopella pallescens, P. zeae, Sclerotium rofsii Sacc. (teleomorph—Athelia rotfsii), Bipolaris sorokiniana, B. zeicola=Helminthosporium carbonum, Diplodia maydis, Exserohilum pedicillatum, Exserohilum furcicum=Helminthosporium turcicum, Fusarium avenaceum, E. culmorum, E. moniliforme, Gibberella zeae (anamorph—E. graminearum), Macrophominaphaseolina, Penicillium spp., Phomopsis sp., Pythium spp., Rhizoctonia solani, R. zeae, Sclerotium rolfsfi, Spicaria sp., Selenophoma sp., Gaeumannomyces graminis, Myrothecium gramineum, Monascus purpureus, M ruber Smut, Ustilago zeae=U. maydis Smut, Ustilaginoidea virens Smut, Sphacelotheca reiliana=Sporisorium holci, Cochliobolus heterostrophus (anamorph: Bipolaris maydis=Helminthosporium maydis), Stenocarpella macrospora=Diplodia macrospora, Cercospora sorghi, Fusarium episphaeria, E. merismoides, F. oxysporum Schlechtend, E. poae, E. roseum, E. solani (teleomorph: Nectria haematococca), F. tricincturn, Mariannaea elegans, Mucor sp., Rhopographus zeae, Spicaria sp., Aspergillus spp., Penicillium spp., Trichoderma viride=T lignorum teleomorph: Hypocrea sp., Stenocarpella maydis=Diplodia zeae, Ascochyta ischaemi, Phyllosticta maydis (telomorph: Mycosphaerella zeae-maydis), and Gloeocercospora sorghi.

[0091] Parasitic nematodes include but are not limited to Awl Dolichodorus spp., D. heterocephalus Bulb and stem (Europe), Ditylenchus dipsaci Burrowing Radopholus similis Cyst Heterodera avenae, H. zeae, Punctodera chalcoensis Dagger Xiphinema spp., X americanum, X mediterraneum False root-knot Nacobbus dorsalis Lance, Columbia Hoplolaimus columbus Lance Hoplolaimus spp., H. galeatus Lesion Pratylenchus spp., P. brachyurus, P. crenalus, P. hexincisus, P. neglectus, P. penetrans, P. scribneri, P. thornei, P. zeae Needle Longidorus spp., L. breviannulatus Ring Criconemella spp., Cornata Root-knot Meloidogyne spp., M. chitwoodi, M. incognita, M. javanica Spiral Helicotylenchus spp., Belonolaimus spp., B. longicaudatus Stubby-root Paratrichodorus spp., P. christiei, P. minor, Ouinisulcius aculus, and Trichodorus spp.

[0092] “Promoter” refers to a nucleotide sequence, usually upstream (5′) to its coding sequence, which controls the expression of the coding sequence by providing the recognition for RNA polymerase and other factors required for proper transcription. “Promoter” includes a minimal promoter that is a short DNA sequence comprised of a TATA box and other sequences that serve to specify the site of transcription initiation, to which regulatory elements are added for control of expression. “Promoter” also refers to a nucleotide sequence that includes a minimal promoter plus regulatory elements that is capable of controlling the expression of a coding sequence or functional RNA. This type of promoter sequence consists of proximal and more distal upstream elements, the latter elements often referred to as enhancers. Accordingly, an “enhancer” is a DNA sequence which can stimulate promoter activity and may be an innate element of the promoter or a heterologous element inserted to enhance the level or tissue specificity of a promoter. It is capable of operating in both orientations (normal or flipped), and is capable of functioning even when moved either upstream or downstream from the promoter. Both enhancers and other upstream promoter elements bind sequence-specific DNA-binding proteins that mediate their effects. Promoters may be derived in their entirety from a native gene, or be composed of different elements derived from different promoters found in nature, or even be comprised of synthetic DNA segments. A promoter may also contain DNA sequences that are involved in the binding of protein factors which control the effectiveness of transcription initiation in response to physiological or developmental conditions.

[0093] The “initiation site” is the position surrounding the first nucleotide that is part of the transcribed sequence, which is also defined as position +1. With respect to this site all other sequences of the gene and its controlling regions are numbered. Downstream sequences (i.e., further protein encoding sequences in the 3′ direction) are denominated positive, while upstream sequences (mostly of the controlling regions in the 5′ direction) are denominated negative.

[0094] Promoter elements, particularly a TATA element, that are inactive or that have greatly reduced promoter activity in the absence of upstream activation are referred to as “minimal or core promoters.” In the presence of a suitable transcription factor, the minimal promoter functions to permit transcription. A “minimal or core promoter” thus consists only of all basal elements needed for transcription initiation, e.g., a TATA box and/or an initiator.

[0095] “Constitutive expression” refers to expression using a constitutive or regulated promoter. “Conditional” and “regulated expression” refer to expression controlled by a regulated promoter.

[0096] “Constitutive promoter” refers to a promoter that is able to express the open reading frame (ORF) that it controls in all or nearly all of the plant tissues during all or nearly all developmental stages of the plant. Each of the transcription-activating elements do not exhibit an absolute tissue-specificity, but mediate transcriptional activation in most plant parts at a level of ≧1% of the level reached in the part of the plant in which transcription is most active.

[0097] “Regulated promoter” refers to promoters that direct gene expression not constitutively, but in a temporally- and/or spatially-regulated manner, and includes both tissue-specific and inducible promoters. It includes natural and synthetic sequences as well as sequences which may be a combination of synthetic and natural sequences. Different promoters may direct the expression of a gene in different tissues or cell types, or at different stages of development, or in response to different environmental conditions. New promoters of various types useful in plant cells are constantly being discovered, numerous examples may be found in the compilation by Okamuro et al. (1989). Typical regulated promoters useful in plants include but are not limited to safener-inducible promoters, promoters derived from the tetracycline-inducible system, promoters derived from salicylate-inducible systems, promoters derived from alcohol-inducible systems, promoters derived from glucocorticoid-inducible system, promoters derived from pathogen-inducible systems, and promoters derived from ecdysome-inducible systems.

[0098] “Tissue-specific promoter” refers to regulated promoters that are not expressed in all plant cells but only in one or more cell types in specific organs (such as leaves or seeds), specific tissues (such as embryo or cotyledon), or specific cell types (such as leaf parenchyma or seed storage cells). These also include promoters that are temporally regulated, such as in early or late embryogenesis, during fruit ripening in developing seeds or fruit, in fully differentiated leaf, or at the onset of senescence.

[0099] “Inducible promoter” refers to those regulated promoters that can be turned on in one or more cell types by an external stimulus, such as a chemical, light, hormone, stress, or a pathogen.

[0100] “Operably-linked” refers to the association of nucleic acid sequences on single nucleic acid fragment so that the function of one is affected by the other. For example, a regulatory DNA sequence is said to be “operably linked to” or “associated with” a DNA sequence that codes for an RNA or a polypeptide if the two sequences are situated such that the regulatory DNA sequence affects expression of the coding DNA sequence (i.e., that the coding sequence or functional RNA is under the transcriptional control of the promoter). Coding sequences can be operably-linked to regulatory sequences in sense or antisense orientation.

[0101] “Expression” refers to the transcription and/or translation of an endogenous gene, ORF or portion thereof, or a transgene in plants. For example, in the case of antisense constructs, expression may refer to the transcription of the antisense DNA only. In addition, expression refers to the transcription and stable accumulation of sense (mRNA) or functional RNA. Expression may also refer to the production of protein.

[0102] “Specific expression” is the expression of gene products which is limited to one or a few plant tissues (spatial limitation) and/or to one or a few plant developmental stages (temporal limitation). It is acknowledged that hardly a true specificity exists: promoters seem to be preferably switch on in some tissues, while in other tissues there can be no or only little activity. This phenomenon is known as leaky expression. However, with specific expression in this invention is meant preferable expression in one or a few plant tissues.

[0103] The “expression pattern” of a promoter (with or without enhancer) is the pattern of expression levels which shows where in the plant and in what developmental stage transcription is initiated by said promoter. Expression patterns of a set of promoters are said to be complementary when the expression pattern of one promoter shows little overlap with the expression pattern of the other promoter. The level of expression of a promoter can be determined by measuring the ‘steady state’ concentration of a standard transcribed reporter mRNA. This measurement is indirect since the concentration of the reporter mRNA is dependent not only on its synthesis rate, but also on the rate with which the mRNA is degraded. Therefore, the steady state level is the product of synthesis rates and degradation rates.

[0104] The rate of degradation can however be considered to proceed at a fixed rate when the transcribed sequences are identical, and thus this value can serve as a measure of synthesis rates. When promoters are compared in this way techniques available to those skilled in the art are hybridization S1-RNAse analysis, northern blots and competitive RT-PCR. This list of techniques in no way represents all available techniques, but rather describes commonly used procedures used to analyze transcription activity and expression levels of mRNA.

[0105] The analysis of transcription start points in practically all promoters has revealed that there is usually no single base at which transcription starts, but rather a more or less clustered set of initiation sites, each of which accounts for some start points of the mRNA. Since this distribution varies from promoter to promoter the sequences of the reporter mRNA in each of the populations would differ from each other. Since each mRNA species is more or less prone to degradation, no single degradation rate can be expected for different reporter mRNAs. It has been shown for various eukaryotic promoter sequences that the sequence surrounding the initiation site (‘initiator’) plays an important role in determining the level of RNA expression directed by that specific promoter. This includes also part of the transcribed sequences. The direct fusion of promoter to reporter sequences would therefore lead to suboptimal levels of transcription.

[0106] A commonly used procedure to analyze expression patterns and levels is through determination of the ‘steady state’ level of protein accumulation in a cell. Commonly used candidates for the reporter gene, known to those skilled in the art are β-glucuronidase (GUS), chloramphenicol acetyl transferase (CAT) and proteins with fluorescent properties, such as green fluorescent protein (GFP) from Aequora victoria. In principle, however, many more proteins are suitable for this purpose, provided the protein does not interfere with essential plant functions. For quantification and determination of localization a number of tools are suited. Detection systems can readily be created or are available which are based on, e.g., immunochemical, enzymatic, fluorescent detection and quantification. Protein levels can be determined in plant tissue extracts or in intact tissue using in situ analysis of protein expression.

[0107] Generally, individual transformed lines with one chimeric promoter reporter construct will vary in their levels of expression of the reporter gene. Also frequently observed is the phenomenon that such transformants do not express any detectable product (RNA or protein). The variability in expression is commonly ascribed to ‘position effects’, although the molecular mechanisms underlying this inactivity are usually not clear.

[0108] The term “average expression” is used here as the average level of expression found in all lines that do express detectable amounts of reporter gene, so leaving out of the analysis plants that do not express any detectable reporter mRNA or protein.

[0109] “Root expression level” indicates the expression level found in protein extracts of complete plant roots. Likewise, leaf, and stem expression levels, are determined using whole extracts from leaves and stems. It is acknowledged however, that within each of the plant parts just described, cells with variable functions may exist, in which promoter activity may vary.

[0110] “Non-specific expression” refers to constitutive expression or low level, basal (‘leaky’) expression in nondesired cells or tissues from a ‘regulated promoter’.

[0111] “Altered levels” refers to the level of expression in transgenic organisms that differs from that of normal or untransformed organisms.

[0112] “Overexpression” refers to the level of expression in transgenic cells or organisms that exceeds levels of expression in normal or untransformed (nontransgenic) cells or organisms.

[0113] “Antisense inhibition” refers to the production of antisense RNA transcripts capable of suppressing the expression of protein from an endogenous gene or a transgene.

[0114] “Co-suppression” and “transwitch” each refer to the production of sense RNA transcripts capable of suppressing the expression of identical or substantially similar transgene or endogenous genes (U.S. Pat. No. 5,231,020).

[0115] “Gene silencing” refers to homology-dependent suppression of viral genes, transgenes, or endogenous nuclear genes. Gene silencing may be transcriptional, when the suppression is due to decreased transcription of the affected genes, or post-transcriptional, when the suppression is due to increased turnover (degradation) of RNA species homologous to the affected genes (English et al., 1996). Gene silencing includes virus-induced gene silencing (Ruiz et al. 1998).

[0116] “Silencing suppressor” gene refers to a gene whose expression leads to counteracting gene silencing and enhanced expression of silenced genes. Silencing suppressor genes may be of plant, non-plant, or viral origin. Examples include, but are not limited to HC-Pro, P1-HC-Pro, and 2b proteins. Other examples include one or more genes in TGMV-B genome.

[0117] The terms “heterologous DNA sequence,” “exogenous DNA segment” or “heterologous nucleic acid,” as used herein, each refer to a sequence that originates from a source foreign to the particular host cell or, if from the same source, is modified from its original form. Thus, a heterologous gene in a host cell includes a gene that is endogenous to the particular host cell but has been modified through, for example, the use of DNA shuffling. The terms also include non-naturally occurring multiple copies of a naturally occurring DNA sequence. Thus, the terms refer to a DNA segment that is foreign or heterologous to the cell, or homologous to the cell but in a position within the host cell nucleic acid in which the element is not ordinarily found. Exogenous DNA segments are expressed to yield exogenous polypeptides. A “homologous” DNA sequence is a DNA sequence that is naturally associated with a host cell into which it is introduced.

[0118] “Homologous to” in the context of nucleotide sequence identity refers to the similarity between the nucleotide sequence of two nucleic acid molecules or between the amino acid sequences of two protein molecules. Estimates of such homology are provided by either DNA-DNA or DNA-RNA hybridization under conditions of stringency as is well understood by those skilled in the art (as described in Haines and Higgins (eds.), Nucleic Acid Hybridization, IRL Press, Oxford, U.K.), or by the comparison of sequence similarity between two nucleic acids or proteins.

[0119] The term “substantially similar” refers to nucleotide and amino acid sequences that represent functional and/or structural equivalents of Arabidopsis sequences disclosed herein. For example, altered nucleotide sequences which simply reflect the degeneracy of the genetic code but nonetheless encode amino acid sequences that are identical to a particular amino acid sequence are substantially similar to the particular sequences. In addition, amino acid sequences that are substantially similar to a particular sequence are those wherein overall amino acid identity is at least 65% or greater to the instant sequences. Modifications that result in equivalent nucleotide or amino acid sequences are well within the routine skill in the art. Moreover, the skilled artisan recognizes that equivalent nucleotide sequences encompassed by this invention can also be defined by their ability to hybridize, under low, moderate and/or stringent conditions (e.g., 0.1×SSC, 0.1% SDS, 65° C.), with the nucleotide sequences that are within the literal scope of the instant claims.

[0120] “Target gene” refers to a gene on the replicon that expresses the desired target coding sequence, functional RNA, or protein. The target gene is not essential for replicon replication. Additionally, target genes may comprise native non-viral genes inserted into a non-native organism, or chimeric genes, and will be under the control of suitable regulatory sequences. Thus, the regulatory sequences in the target gene may come from any source, including the virus. Target genes may include coding sequences that are either heterologous or homologous to the genes of a particular plant to be transformed. However, target genes do not include native viral genes. Typical target genes include, but are not limited to genes encoding a structural protein, a seed storage protein, a protein that conveys herbicide resistance, and a protein that conveys insect resistance. Proteins encoded by target genes are known as “foreign proteins”. The expression of a target gene in a plant will typically produce an altered plant trait.

[0121] The term “altered plant trait” means any phenotypic or genotypic change in a transgenic plant relative to the wild-type or non-transgenic plant host.

[0122] “Transcription Stop Fragment” refers to nucleotide sequences that contain one or more regulatory signals, such as polyadenylation signal sequences, capable of terminating transcription. Examples include the 3′ non-regulatory regions of genes encoding nopaline synthase and the small subunit of ribulose bisphosphate carboxylase.

[0123] “Replication gene” refers to a gene encoding a viral replication protein. In addition to the ORF of the replication protein, the replication gene may also contain other overlapping or non-overlapping ORF(s), as are found in viral sequences in nature. While not essential for replication, these additional ORFs may enhance replication and/or viral DNA accumulation. Examples of such additional ORFs are AC3 and AL3 in ACMV and TGMV geminiviruses, respectively.

[0124] “Chimeric trans-acting replication gene” refers either to a replication gene in which the coding sequence of a replication protein is under the control of a regulated plant promoter other than that in the native viral replication gene, or a modified native viral replication gene, for example, in which a site specific sequence(s) is inserted in the 5′ transcribed but untranslated region. Such chimeric genes also include insertion of the known sites of replication protein binding between the promoter and the transcription start site that attenuate transcription of viral replication protein gene.

[0125] “Chromosomally-integrated” refers to the integration of a foreign gene or DNA construct into the host DNA by covalent bonds. Where genes are not “chromosomally integrated” they may be “transiently expressed.” Transient expression of a gene refers to the expression of a gene that is not integrated into the host chromosome but functions independently, either as part of an autonomously replicating plasmid or expression cassette, for example, or as part of another biological system such as a virus.

[0126] “Production tissue” refers to mature, harvestable tissue consisting of non-dividing, terminally-differentiated cells. It excludes young, growing tissue consisting of germline, meristematic, and not-fully-differentiated cells.

[0127] “Germline cells” refer to cells that are destined to be gametes and whose genetic material is heritable.

[0128] “Trans-activation” refers to switching on of gene expression or replicon replication by the expression of another (regulatory) gene in trans.

[0129] The term “transformation” refers to the transfer of a nucleic acid fragment into the genome of a host cell, resulting in genetically stable inheritance. Host cells containing the transformed nucleic acid fragments are referred to as “transgenic” cells, and organisms comprising transgenic cells are referred to as “transgenic organisms”. Examples of methods of transformation of plants and plant cells include Agrobacterium-mediated transformation (De Blaere et al., 1987) and particle bombardment technology (Klein et al. 1987; U.S. Pat. No. 4,945,050). Whole plants may be regenerated from transgenic cells by methods well known to the skilled artisan (see, for example, Fromm et al., 1990).

[0130] “Transformed,” “transgenic,” and “recombinant” refer to a host organism such as a bacterium or a plant into which a heterologous nucleic acid molecule has been introduced. The nucleic acid molecule can be stably integrated into the genome generally known in the art and are disclosed in Sambrook et al., 1989. See also Innis et al., 1995 and Gelfand, 1995; and Innis and Gelfand, 1999. Known methods of PCR include, but are not limited to, methods using paired primers, nested primers, single specific primers, degenerate primers, gene-specific primers, vector-specific primers, partially mismatched primers, and the like. For example, “transformed,” “transformant,” and “transgenic” plants or calli have been through the transformation process and contain a foreign gene integrated into their chromosome. The term “untransformed” refers to normal plants that have not been through the transformation process.

[0131] “Transiently transformed” refers to cells in which transgenes and foreign DNA have been introduced (for example, by such methods as Agrobacterium-mediated transformation or biolistic bombardment), but not selected for stable maintenance.

[0132] “Stably transformed” refers to cells that have been selected and regenerated on a selection media following transformation.

[0133] “Transient expression” refers to expression in cells in which a virus or a transgene is introduced by viral infection or by such methods as Agrobacterium-mediated transformation, electroporation, or biolistic bombardment, but not selected for its stable maintenance.

[0134] “Genetically stable” and “heritable” refer to chromosomally-integrated genetic elements that are stably maintained in the plant and stably inherited by progeny through successive generations.

[0135] “Primary transformant” and “T0 generation” refer to transgenic plants that are of the same genetic generation as the tissue which was initially transformed (i.e., not having gone through meiosis and fertilization since transformation).

[0136] “Secondary transformants” and the “T1, T2, T3, etc. generations” refer to transgenic plants derived from primary transformants through one or more meiotic and fertilization cycles. They may be derived by self-fertilization of primary or secondary transformants or crosses of primary or secondary transformants with other transformed or untransformed plants.

[0137] “Wild-type” refers to a virus or organism found in nature without any known mutation.

[0138] “Genome” refers to the complete genetic material of an organism.

[0139] The term “nucleic acid” refers to deoxyribonucleotides or ribonucleotides and polymers thereof in either single- or double-stranded form, composed of monomers (nucleotides) containing a sugar, phosphate and a base which is either a purine or pyrimidine. Unless specifically limited, the term encompasses nucleic acids containing known analogs of natural nucleotides which have similar binding properties as the reference nucleic acid and are metabolized in a manner similar to naturally occurring nucleotides. Unless otherwise indicated, a particular nucleic acid sequence also implicitly encompasses conservatively modified variants thereof (e.g., degenerate codon substitutions) and complementary sequences as well as the sequence explicitly indicated. Specifically, degenerate codon substitutions may be achieved by generating sequences in which the third position of one or more selected (or all) codons is substituted with mixed-base and/or deoxyinosine residues (Batzer et al., 1991; Ohtsuka et al., 1985; Rossolini et al. 1994). A “nucleic acid fragment” is a fraction of a given nucleic acid molecule. In higher plants, deoxyribonucleic acid (DNA) is the genetic material while ribonucleic acid (RNA) is involved in the transfer of information contained within DNA into proteins. The term “nucleotide sequence” refers to a polymer of DNA or RNA which can be single- or double-stranded, optionally containing synthetic, non-natural or altered nucleotide bases capable of incorporation into DNA or RNA polymers. The terms “nucleic acid” or “nucleic acid sequence” may also be used interchangeably with gene, cDNA, DNA and RNA encoded by a gene.

[0140] The invention encompasses isolated or substantially purified nucleic acid or protein compositions. In the context of the present invention, an “isolated” or “purified” DNA molecule or an “isolated” or “purified” polypeptide is a DNA molecule or polypeptide that, by the hand of man, exists apart from its native environment and is therefore not a product of nature. An isolated DNA molecule or polypeptide may exist in a purified form or may exist in a non-native environment such as, for example, a transgenic host cell. For example, an “isolated” or “purified” nucleic acid molecule or protein, or biologically active portion thereof, is substantially free of other cellular material, or culture medium when produced by recombinant techniques, or substantially free of chemical precursors or other chemicals when chemically synthesized. Preferably, an “isolated” nucleic acid is free of sequences (preferably protein encoding sequences) that naturally flank the nucleic acid (i.e., sequences located at the 5′ and 3′ ends of the nucleic acid) in the genomic DNA of the organism from which the nucleic acid is derived. For example, in various embodiments, the isolated nucleic acid molecule can contain less than about 5 kb, 4 kb, 3 kb, 2 kb, 1 kb, 0.5 kb, or 0.1 kb of nucleotide sequences that naturally flank the nucleic acid molecule in genomic DNA of the cell from which the nucleic acid is derived. A protein that is substantially free of cellular material includes preparations of protein or polypeptide having less than about 30%, 20%, 10%, 5%, (by dry weight) of contaminating protein. When the protein of the invention, or biologically active portion thereof, is recombinantly produced, preferably culture medium represents less than about 30%, 20%, 10%, or 5% (by dry weight) of chemical precursors or non-protein of interest chemicals.

[0141] The nucleotide sequences of the invention include both the naturally occurring sequences as well as mutant (variant) forms. Such variants will continue to possess the desired activity, i.e., either promoter activity or the activity of the product encoded by the open reading frame of the non-variant nucleotide sequence.

[0142] Thus, by “variants” is intended substantially similar sequences. For nucleotide sequences comprising an open reading frame, variants include those sequences that, because of the degeneracy of the genetic code, encode the identical amino acid sequence of the native protein. Naturally occurring allelic variants such as these can be identified with the use of well-known molecular biology techniques, as, for example, with polymerase chain reaction (PCR) and hybridization techniques. Variant nucleotide sequences also include synthetically derived nucleotide sequences, such as those generated, for example, by using site-directed mutagenesis and for open reading frames, encode the native protein, as well as those that encode a polypeptide having amino acid substitutions relative to the native protein. Generally, nucleotide sequence variants of the invention will have at least 40, 50, 60, to 70%, e.g., preferably 71%, 72%, 73%, 74%, 75%, 76%, 77%, 78%, to 79%, generally at least 80%, e.g., 81%-84%, at least 85%, e.g., 86%, 87%, 88%, 89%, 90%, 91%, 92%, 93%, 94%, 95%, 96%, 97%, to 98% and 99% nucleotide sequence identity to the native (wild type or endogenous) nucleotide sequence.

[0143] “Conservatively modified variations” of a particular nucleic acid sequence refers to those nucleic acid sequences that encode identical or essentially identical amino acid sequences, or where the nucleic acid sequence does not encode an amino acid sequence, to essentially identical sequences. Because of the degeneracy of the genetic code, a large number of functionally identical nucleic acids encode any given polypeptide. For instance the codons CGT, CGC, CGA, CGG, AGA, and AGG all encode the amino acid arginine. Thus, at every position where an arginine is specified by a codon, the codon can be altered to any of the corresponding codons described without altering the encoded protein. Such nucleic acid variations are “silent variations” which are one species of “conservatively modified variations.” Every nucleic acid sequence described herein which encodes a polypeptide also describes every possible silent variation, except where otherwise noted. One of skill will recognize that each codon in a nucleic acid (except ATG, which is ordinarily the only codon for methionine) can be modified to yield a functionally identical molecule by standard techniques. Accordingly, each “silent variation” of a nucleic acid which encodes a polypeptide is implicit in each described sequence.

[0144] The nucleic acid molecules of the invention can be “optimized” for enhanced expression in plants of interest. See, for example, EPA 035472; WO 91/16432; Perlak et al., 1991; and Murray et al., 1989. In this manner, the open reading frames in genes or gene fragments can be synthesized utilizing plant-preferred codons. See, for example, Campbell and Gowri, 1990 for a discussion of host-preferred codon usage. Thus, the nucleotide sequences can be optimized for expression in any plant. It is recognized that all or any part of the gene sequence may be optimized or synthetic. That is, synthetic or partially optimized sequences may also be used. Variant nucleotide sequences and proteins also encompass sequences and protein derived from a mutagenic and recombinogenic procedure such as DNA shuffling. With such a procedure, one or more different coding sequences can be manipulated to create a new polypeptide possessing the desired properties. In this manner, libraries of recombinant polynucleotides are generated from a population of related sequence polynucleotides comprising sequence regions that have substantial sequence identity and can be homologously recombined in vitro or in vivo. Strategies for such DNA shuffling are known in the art. See, for example, Stemmer, 1994; Stemmer, 1994; Crameri et al., 1997; Moore et al., 1997; Zhang et al., 1997; Crameri et al., 1998; and U.S. Pat. Nos. 5,605,793 and 5,837,458.

[0145] By “variant” polypeptide is intended a polypeptide derived from the native protein by deletion (so-called truncation) or addition of one or more amino acids to the N-terminal and/or C-terminal end of the native protein; deletion or addition of one or more amino acids at one or more sites in the native protein; or substitution of one or more amino acids at one or more sites in the native protein. Such variants may result from, for example, genetic polymorphism or from human manipulation. Methods for such manipulations are generally known in the art.

[0146] Thus, the polypeptides may be altered in various ways including amino acid substitutions, deletions, truncations, and insertions. Methods for such manipulations are generally known in the art. For example, amino acid sequence variants of the polypeptides can be prepared by mutations in the DNA. Methods for mutagenesis and nucleotide sequence alterations are well known in the art. See, for example, Kunkel, 1985; Kunkel et al., 1987; U.S. Pat. No. 4,873,192; Walker and Gaastra, 1983 and the references cited therein. Guidance as to appropriate amino acid substitutions that do not affect biological activity of the protein of interest may be found in the model of Dayhoff et al. (1978). Conservative substitutions, such as exchanging one amino acid with another having similar properties, are preferred.

[0147] Individual substitutions deletions or additions that alter, add or delete a single amino acid or a small percentage of amino acids (typically less than 5%, more typically less than 1%) in an encoded sequence are “conservatively modified variations,” where the alterations result in the substitution of an amino acid with a chemically similar amino acid. Conservative substitution tables providing functionally similar amino acids are well known in the art. The following five groups each contain amino acids that are conservative substitutions for one another: Aliphatic: Glycine (G), Alanine (A), Valine (V), Leucine (L), Isoleucine (I); Aromatic: Phenylalanine (F), Tyrosine (Y), Tryptophan (W); Sulfur-containing: Methionine (M), Cysteine (C); Basic: Arginine I, Lysine (K), Histidine (H); Acidic: Aspartic acid (D), Glutamic acid (E), Asparagine (N), Glutamine (Q). See also, Creighton, 1984. In addition, individual substitutions, deletions or additions which alter, add or delete a single amino acid or a small percentage of amino acids in an encoded sequence are also “conservatively modified variations.”

[0148] “Expression cassette” as used herein means a DNA sequence capable of directing expression of a particular nucleotide sequence in an appropriate host cell, comprising a promoter operably linked to the nucleotide sequence of interest which is operably linked to termination signals. It also typically comprises sequences required for proper translation of the nucleotide sequence. The coding region usually codes for a protein of interest but may also code for a functional RNA of interest, for example antisense RNA or a nontranslated RNA, in the sense or antisense direction. The expression cassette comprising the nucleotide sequence of interest may be chimeric, meaning that at least one of its components is heterologous with respect to at least one of its other components. The expression cassette may also be one which is naturally occurring but has been obtained in a recombinant form useful for heterologous expression. The expression of the nucleotide sequence in the expression cassette may be under the control of a constitutive promoter or of an inducible promoter which initiates transcription only when the host cell is exposed to some particular external stimulus. In the case of a multicellular organism, the promoter can also be specific to a particular tissue or organ or stage of development.

[0149] “Vector” is defined to include, inter alia, any plasmid, cosmid, phage or Agrobacterium binary vector in double or single stranded linear or circular form which may or may not be self transmissible or mobilizable, and which can transform prokaryotic or eukaryotic host either by integration into the cellular genome or exist extrachromosomally (e.g. autonomous replicating plasmid with an origin of replication).

[0150] Specifically included are shuttle vectors by which is meant a DNA vehicle capable, naturally or by design, of replication in two different host organisms, which may be selected from actinomycetes and related species, bacteria and eukaryotic (e.g. higher plant, mammalian, yeast or fungal cells).

[0151] Preferably the nucleic acid in the vector is under the control of, and operably linked to, an appropriate promoter or other regulatory elements for transcription in a host cell such as a microbial, e.g. bacterial, or plant cell. The vector may be a bi-functional expression vector which functions in multiple hosts. In the case of genomic DNA, this may contain its own promoter or other regulatory elements and in the case of cDNA this may be under the control of an appropriate promoter or other regulatory elements for expression in the host cell.

[0152] “Cloning vectors” typically contain one or a small number of restriction endonuclease recognition sites at which foreign DNA sequences can be inserted in a determinable fashion without loss of essential biological function of the vector, as well as a marker gene that is suitable for use in the identification and selection of cells transformed with the cloning vector. Marker genes typically include genes that provide tetracycline resistance, hygromycin resistance or ampicillin resistance.

[0153] A “transgenic plant” is a plant having one or more plant cells that contain an expression vector.

[0154] “Plant tissue” includes differentiated and undifferentiated tissues or plants, including but not limited to roots, stems, shoots, leaves, pollen, seeds, tumor tissue and various forms of cells and culture such as single cells, protoplast, embryos, and callus tissue. The plant tissue may be in plants or in organ, tissue or cell culture.

[0155] The following terms are used to describe the sequence relationships between two or more nucleic acids or polynucleotides: (a) “reference sequence”, (b) “comparison window”, (c) “sequence identity”, (d) “percentage of sequence identity”, and (e) “substantial identity”.

[0156] (a) As used herein, “reference sequence” is a defined sequence used as a basis for sequence comparison. A reference sequence may be a subset or the entirety of a specified sequence; for example, as a segment of a full length cDNA or gene sequence, or the complete cDNA or gene sequence.

[0157] (b) As used herein, “comparison window” makes reference to a contiguous and specified segment of a polynucleotide sequence, wherein the polynucleotide sequence in the comparison window may comprise additions or deletions (i.e., gaps) compared to the reference sequence (which does not comprise additions or deletions) for optimal alignment of the two sequences. Generally, the comparison window is at least 20 contiguous nucleotides in length, and optionally can be 30, 40, 50, 100, or longer. Those of skill in the art understand that to avoid a high similarity to a reference sequence due to inclusion of gaps in the polynucleotide sequence a gap penalty is typically introduced and is subtracted from the number of matches.

[0158] Methods of alignment of sequences for comparison are well known in the art. Thus, the determination of percent identity between any two sequences can be accomplished using a mathematical algorithm. Preferred, non-limiting examples of such mathematical algorithms are the algorithm of Myers and Miller, 1988; the local homology algorithm of Smith et al. 1981; the homology alignment algorithm of Needleman and Wunsch 1970; the search-for-similarity-method of Pearson and Lipman 1988; the algorithm of Karlin and Altschul, 1990, modified as in Karlin and Altschul, 1993.

[0159] Computer implementations of these mathematical algorithms can be utilized for comparison of sequences to determine sequence identity. Such implementations include, but are not limited to: CLUSTAL in the PC/Gene program (available from Intelligenetics, Mountain View, Calif.); the ALIGN program (Version 2.0) and GAP, BESTFIT, BLAST, FASTA, and TFASTA in the Wisconsin Genetics Software Package, Version 8 (available from Genetics Computer Group (GCG), 575 Science Drive, Madison, Wis., USA). Alignments using these programs can be performed using the default parameters. The CLUSTAL program is well described by Higgins et al. 1988; Higgins et al. 1989; Corpet et al. 1988; Huang et al. 1992; and Pearson et al. 1994. The ALIGN program is based on the algorithm of Myers and Miller, supra. The BLAST programs of Altschul et al., 1990, are based on the algorithm of Karlin and Altschul supra.

[0160] Software for performing BLAST analyses is publicly available through the National Center for Biotechnology Information (http://www.ncbi.nlm.nih.gov/). This algorithm involves first identifying high scoring sequence pairs (HSPs) by identifying short words of length W in the query sequence, which either match or satisfy some positive-valued threshold score T when aligned with a word of the same length in a database sequence. T is referred to as the neighborhood word score threshold (Altschul et al., 1990). These initial neighborhood word hits act as seeds for initiating searches to find longer HSPs containing them. The word hits are then extended in both directions along each sequence for as far as the cumulative alignment score can be increased. Cumulative scores are calculated using, for nucleotide sequences, the parameters M (reward score for a pair of matching residues; always >0) and N (penalty score for mismatching residues; always <0). For amino acid sequences, a scoring matrix is used to calculate the cumulative score. Extension of the word hits in each direction are halted when the cumulative alignment score falls off by the quantity X from its maximum achieved value, the cumulative score goes to zero or below due to the accumulation of one or more negative-scoring residue alignments, or the end of either sequence is reached.

[0161] In addition to calculating percent sequence identity, the BLAST algorithm also performs a statistical analysis of the similarity between two sequences (see, e.g., Karlin & Altschul (1993). One measure of similarity provided by the BLAST algorithm is the smallest sum probability (P(N)), which provides an indication of the probability by which a match between two nucleotide or amino acid sequences would occur by chance. For example, a test nucleic acid sequence is considered similar to a reference sequence if the smallest sum probability in a comparison of the test nucleic acid sequence to the reference nucleic acid sequence is less than about 0.1, more preferably less than about 0.01, and most preferably less than about 0.001.

[0162] To obtain gapped alignments for comparison purposes, Gapped BLAST (in BLAST 2.0) can be utilized as described in Altschul et al. 1997. Alternatively, PSI-BLAST (in BLAST 2.0) can be used to perform an iterated search that detects distant relationships between molecules. See Altschul et al., supra. When utilizing BLAST, Gapped BLAST, PSI-BLAST, the default parameters of the respective programs (e.g. BLASTN for nucleotide sequences, BLASTX for proteins) can be used. The BLASTN program (for nucleotide sequences) uses as defaults a wordlength (W) of 11, an expectation (E) of 10, a cutoff of 100, M=5, N=−4, and a comparison of both strands. For amino acid sequences, the BLASTP program uses as defaults a wordlength (W) of 3, an expectation (E) of 10, and the BLOSUM62 scoring matrix (see Henikoff & Henikoff, 1989). See http://www.ncbi.nlm.nih.gov. Alignment may also be performed manually by inspection.

[0163] For purposes of the present invention, comparison of nucleotide sequences for determination of percent sequence identity to the promoter sequences disclosed herein is preferably made using the BlastN program (version 1.4.7 or later) with its default parameters or any equivalent program. By “equivalent program” is intended any sequence comparison program that, for any two sequences in question, generates an alignment having identical nucleotide or amino acid residue matches and an identical percent sequence identity when compared to the corresponding alignment generated by the preferred program.

[0164] (c) As used herein, “sequence identity” or “identity” in the context of two nucleic acid or polypeptide sequences makes reference to the residues in the two sequences that are the same when aligned for maximum correspondence over a specified comparison window. When percentage of sequence identity is used in reference to proteins it is recognized that residue positions which are not identical often differ by conservative amino acid substitutions, where amino acid residues are substituted for other amino acid residues with similar chemical properties (e.g., charge or hydrophobicity) and therefore do not change the functional properties of the molecule. When sequences differ in conservative substitutions, the percent sequence identity may be adjusted upwards to correct for the conservative nature of the substitution. Sequences that differ by such conservative substitutions are said to have “sequence similarity” or “similarity.” Means for making this adjustment are well known to those of skill in the art. Typically this involves scoring a conservative substitution as a partial rather than a full mismatch, thereby increasing the percentage sequence identity. Thus, for example, where an identical amino acid is given a score of 1 and a non-conservative substitution is given a score of zero, a conservative substitution is given a score between zero and 1. The scoring of conservative substitutions is calculated, e.g., as implemented in the program PC/GENE (Intelligenetics, Mountain View, Calif.).

[0165] (d) As used herein, “percentage of sequence identity” means the value determined by comparing two optimally aligned sequences over a comparison window, wherein the portion of the polynucleotide sequence in the comparison window may comprise additions or deletions (i.e., gaps) as compared to the reference sequence (which does not comprise additions or deletions) for optimal alignment of the two sequences. The percentage is calculated by determining the number of positions at which the identical nucleic acid base or amino acid residue occurs in both sequences to yield the number of matched positions, dividing the number of matched positions by the total number of positions in the window of comparison, and multiplying the result by 100 to yield the percentage of sequence identity.

[0166] (e)(i) The term “substantial identity” of polynucleotide sequences means that a polynucleotide comprises a sequence that has at least 70%, 71%, 72%, 73%, 74%, 75%, 76%, 77%, 78%, or 79%, preferably at least 80%, 81%, 82%, 83%, 84%, 85%, 86%, 87%, 88%, or 89%, more preferably at least 90%, 91%, 92%, 93%, or 94%, and most preferably at least 95%, 96%, 97%, 98%, or 99% sequence identity, compared to a reference sequence using one of the alignment programs described using standard parameters. One of skill in the art will recognize that these values can be appropriately adjusted to determine corresponding identity of proteins encoded by two nucleotide sequences by taking into account codon degeneracy, amino acid similarity, reading frame positioning, and the like. Substantial identity of amino acid sequences for these purposes normally means sequence identity of at least 70%, more preferably at least 80%, 90%, and most preferably at least 95%.

[0167] Another indication that nucleotide sequences are substantially identical is if two molecules hybridize to each other under stringent conditions (see below). Generally, stringent conditions are selected to be about 5° C. lower than the thermal melting point (Tₘ) for the specific sequence at a defined ionic strength and pH. However, stringent conditions encompass temperatures in the range of about 1° C. to about 20° C., depending upon the desired degree of stringency as otherwise qualified herein. Nucleic acids that do not hybridize to each other under stringent conditions are still substantially identical if the polypeptides they encode are substantially identical. This may occur, e.g., when a copy of a nucleic acid is created using the maximum codon degeneracy permitted by the genetic code. One indication that two nucleic acid sequences are substantially identical is when the polypeptide encoded by the first nucleic acid is immunologically cross reactive with the polypeptide encoded by the second nucleic acid.

[0168] (e)(ii) The term “substantial identity” in the context of a peptide indicates that a peptide comprises a sequence with at least 70%, 71%, 72%, 73%, 74%, 75%, 76%, 77%, 78%, or 79%, preferably 80%, 81%, 82%, 83%, 84%, 85%, 86%, 87%, 88%, or 89%, more preferably at least 90%, 91%, 92%, 93%, or 94%, or even more preferably, 95%, 96%, 97%, 98% or 99%, sequence identity to the reference sequence over a specified comparison window. Preferably, optimal alignment is conducted using the homology alignment algorithm of Needleman and Wunsch (1970). An indication that two peptide sequences are substantially identical is that one peptide is immunologically reactive with antibodies raised against the second peptide. Thus, a peptide is substantially identical to a second peptide, for example, where the two peptides differ only by a conservative substitution.

[0169] For sequence comparison, typically one sequence acts as a reference sequence to which test sequences are compared. When using a sequence comparison algorithm, test and reference sequences are input into a computer, subsequence coordinates are designated if necessary, and sequence algorithm program parameters are designated. The sequence comparison algorithm then calculates the percent sequence identity for the test sequence(s) relative to the reference sequence, based on the designated program parameters.

[0170] As noted above, another indication that two nucleic acid sequences are substantially identical is that the two molecules hybridize to each other under stringent conditions. The phrase “hybridizing specifically to” refers to the binding, duplexing, or hybridizing of a molecule only to a particular nucleotide sequence under stringent conditions when that sequence is present in a complex mixture (e.g., total cellular) DNA or RNA. “Bind(s) substantially” refers to complementary hybridization between a probe nucleic acid and a target nucleic acid and embraces minor mismatches that can be accommodated by reducing the stringency of the hybridization media to achieve the desired detection of the target nucleic acid sequence.

[0171] “Stringent hybridization conditions” and “stringent hybridization wash conditions” in the context of nucleic acid hybridization experiments such as Southern and Northern hybridization are sequence dependent, and are different under different environmental parameters. The Tₘ is the temperature (under defined ionic strength and pH) at which 50% of the target sequence hybridizes to a perfectly matched probe. Specificity is typically the function of post-hybridization washes, the critical factors being the ionic strength and temperature of the final wash solution. For DNA-DNA hybrids, the Tₘ can be approximated from the equation of Meinkoth and Wahl, 1984; Tₘ 81.5° C.+16.6 (log M)+0.41 (% GC)−0.61 (% form)−500/L; where M is the molarity of monovalent cations, % GC is the percentage of guanosine and cytosine nucleotides in the DNA, % form is the percentage of formamide in the hybridization solution, and L is the length of the hybrid in base pairs. Tₘ is reduced by about 1° C. for each 1% of mismatching; thus, Tₘ, hybridization, and/or wash conditions can be adjusted to hybridize to sequences of the desired identity. For example, if sequences with >90% identity are sought, the Tₘ can be decreased 10° C. Generally, stringent conditions are selected to be about 5° C. lower than the thermal melting point I for the specific sequence and its complement at a defined ionic strength and pH. However, severely stringent conditions can utilize a hybridization and/or wash at 1, 2, 3, or 4° C. lower than the thermal melting point I; moderately stringent conditions can utilize a hybridization and/or wash at 6, 7, 8, 9, or 10° C. lower than the thermal melting point I; low stringency conditions can utilize a hybridization and/or wash at 11, 12, 13, 14, 15, or 20° C. lower than the thermal melting point I. Using the equation, hybridization and wash compositions, and desired T, those of ordinary skill will understand that variations in the stringency of hybridization and/or wash solutions are inherently described. If the desired degree of mismatching results in a T of less than 45° C. (aqueous solution) or 32° C. (formamide solution), it is preferred to increase the SSC concentration so that a higher temperature can be used. An extensive guide to the hybridization of nucleic acids is found in Tijssen, 1993. Generally, highly stringent hybridization and wash conditions are selected to be about 5° C. lower than the thermal melting point Tₘ for the specific sequence at a defined ionic strength and pH.

[0172] An example of highly stringent wash conditions is 0.15 M NaCl at 72° C. for about 15 minutes. An example of stringent wash conditions is a 0.2×SSC wash at 65° C. for 15 minutes (see, Sambrook, infra, for a description of SSC buffer). Often, a high stringency wash is preceded by a low stringency wash to remove background probe signal. An example medium stringency wash for a duplex of, e.g., more than 100 nucleotides, is 1×SSC at 45° C. for 15 minutes. An example low stringency wash for a duplex of, e.g., more than 100 nucleotides, is 4-6×SSC at 40° C. for 15 minutes. For short probes (e.g., about 10 to 50 nucleotides), stringent conditions typically involve salt concentrations of less than about 1.5 M, more preferably about 0.01 to 1.0 M, Na ion concentration (or other salts) at pH 7.0 to 8.3, and the temperature is typically at least about 30° C. and at least about 60° C. for long robes (e.g., >50 nucleotides). Stringent conditions may also be achieved with the addition of destabilizing agents such as formamide. In general, a signal to noise ratio of 2× (or higher) than that observed for an unrelated probe in the particular hybridization assay indicates detection of a specific hybridization. Nucleic acids that do not hybridize to each other under stringent conditions are still substantially identical if the proteins that they encode are substantially identical. This occurs, e.g., when a copy of a nucleic acid is created using the maximum codon degeneracy permitted by the genetic code.

[0173] Very stringent conditions are selected to be equal to the Tₘ for a particular probe. An example of stringent conditions for hybridization of complementary nucleic acids which have more than 100 complementary residues on a filter in a Southern or Northern blot is 50% formamide, e.g., hybridization in 50% formamide, 1 M NaCl, 1% SDS at 37° C., and a wash in 0.1×SSC at 60 to 65° C. Exemplary low stringency conditions include hybridization with a buffer solution of 30 to 35% formamide, 1 M NaCl, 1% SDS (sodium dodecyl sulphate) at 37° C., and a wash in 1× to 2×SSC (20×SSC=3.0 M NaCl/0.3 M trisodium citrate) at 50 to 55° C. Exemplary moderate stringency conditions include hybridization in 40 to 45% formamide, 1.0 M NaCl, 1% SDS at 37° C., and a wash in 0.5× to 1×SSC at 55 to 60° C.

[0174] The following are examples of sets of hybridization/wash conditions that may be used to clone orthologous nucleotide sequences that are substantially identical to reference nucleotide sequences of the present invention: a reference nucleotide sequence preferably hybridizes to the reference nucleotide sequence in 7% sodium dodecyl sulfate (SDS), 0.5 M NaPO₄, 1 mM EDTA at 50° C. with washing in 2×SSC, 0.1% SDS at 50° C., more desirably in 7% sodium dodecyl sulfate (SDS), 0.5 M NaPO₄, 1 mM EDTA at 50° C. with washing in 1×SSC, 0.1% SDS at 50° C., more desirably still in 7% sodium dodecyl sulfate (SDS), 0.5 M NaPO₄, 1 mM EDTA at 50° C. with washing in 0.5×SSC, 0.1% SDS at 50° C., preferably in 7% sodium dodecyl sulfate (SDS), 0.5 M NaPO₄, 1 mM EDTA at 50° C. with washing in 0.1×SSC, 0.1% SDS at 50° C., more preferably in 7% sodium dodecyl sulfate (SDS), 0.5 M NaPO₄, 1 mM EDTA at 50° C. with washing in 0.1×SSC, 0.1% SDS at 65° C.

[0175] “DNA shuffling” is a method to introduce mutations or rearrangements, preferably randomly, in a DNA molecule or to generate exchanges of DNA sequences between two or more DNA molecules, preferably randomly. The DNA molecule resulting from DNA shuffling is a shuffled DNA molecule that is a non-naturally occurring DNA molecule derived from at least one template DNA molecule. The shuffled DNA preferably encodes a variant polypeptide modified with respect to the polypeptide encoded by the template DNA, and may have an altered biological activity with respect to the polypeptide encoded by the template DNA.

[0176] “Recombinant DNA molecule” is a combination of DNA sequences that are joined together using recombinant DNA technology and procedures used to join together DNA sequences as described, for example, in Sambrook et al., 1989.

[0177] The word “plant” refers to any plant, particularly to seed plant, and “plant cell” is a structural and physiological unit of the plant, which comprises a cell wall but may also refer to a protoplast. The plant cell may be in form of an isolated single cell or a cultured cell, or as a part of higher organized unit such as, for example, a plant tissue, or a plant organ.

[0178] “Significant increase” is an increase that is larger than the margin of error inherent in the measurement technique, preferably an increase by about 2-fold or greater.

[0179] “Significantly less” means that the decrease is larger than the margin of error inherent in the measurement technique, preferably a decrease by about 2-fold or greater.

II. DNA Sequences for Transformation

[0180] Virtually any DNA composition may be used for delivery to recipient plant cells, e.g., monocotyledonous cells, to ultimately produce fertile transgenic plants in accordance with the present invention. For example, DNA segments in the form of vectors and plasmids, or linear DNA fragments, in some instances containing only the DNA element to be expressed in the plant, and the like, may be employed. The construction of vectors which may be employed in conjunction with the present invention will be known to those of skill of the art in light of the present disclosure (see, e.g., Sambrook et al., 1989; Gelvin et al., 1990).

[0181] Vectors, plasmids, cosmids, YACs (yeast artificial chromosomes), BACs (bacterial artificial chromosomes) and DNA segments for use in transforming such cells will, of course, generally comprise the cDNA, gene or genes which one desires to introduce into the cells. These DNA constructs can further include structures such as promoters, enhancers, polylinkers, or even regulatory genes as desired. The DNA segment or gene chosen for cellular introduction will often encode a protein which will be expressed in the resultant recombinant cells, such as will result in a screenable or selectable trait and/or which will impart an improved phenotype to the regenerated plant. However, this may not always be the case, and the present invention also encompasses transgenic plants incorporating non-expressed transgenes.

[0182] In certain embodiments, it is contemplated that one may wish to employ replication-competent viral vectors in monocot transformation. Such vectors include, for example, wheat dwarf virus (WDV) “shuttle” vectors, such as pW1-11 and PW1-GUS (Ugaki et al., 1991). These vectors are capable of autonomous replication in maize cells as well as E. coli, and as such may provide increased sensitivity for detecting DNA delivered to transgenic cells. A replicating vector may also be useful for delivery of genes flanked by DNA sequences from transposable elements such as Ac, Ds, or Mu. It has been proposed (Laufs et al., 1990) that transposition of these elements within the maize genome requires DNA replication. It is also contemplated that transposable elements would be useful for introducing DNA fragments lacking elements necessary for selection and maintenance of the plasmid vector in bacteria, e.g., antibiotic resistance genes and origins of DNA replication. It is also proposed that use of a transposable element such as Ac, Ds, or Mu would actively promote integration of the desired DNA and hence increase the frequency of stably transformed cells. The use of a transposable element such as Ac, Ds, or Mu may actively promote integration of the DNA of interest and hence increase the frequency of stably transformed cells. Transposable elements may be useful to allow separation of genes of interest from elements necessary for selection and maintenance of a plasmid vector in bacteria or selection of a transformant. By use of a transposable element, desirable and undesirable DNA sequences may be transposed apart from each other in the genome, such that through genetic segregation in progeny, one may identify plants with either the desirable or the undesirable DNA sequences.

[0183] DNA useful for introduction into plant cells includes that which has been derived or isolated from any source, that may be subsequently characterized as to structure, size and/or function, chemically altered, and later introduced into plants. An example of DNA “derived” from a source, would be a DNA sequence that is identified as a useful fragment within a given organism, and which is then chemically synthesized in essentially pure form. An example of such DNA “isolated” from a source would be a useful DNA sequence that is excised or removed from said source by chemical means, e.g., by the use of restriction endonucleases, so that it can be further manipulated, e.g., amplified, for use in the invention, by the methodology of genetic engineering. Such DNA is commonly referred to as “recombinant DNA.”

[0184] Therefore useful DNA includes completely synthetic DNA, semi-synthetic DNA, DNA isolated from biological sources, and DNA derived from introduced RNA. Generally, the introduced DNA is not originally resident in the plant genotype which is the recipient of the DNA, but it is within the scope of the invention to isolate a gene from a given plant genotype, and to subsequently introduce multiple copies of the gene into the same genotype, e.g., to enhance production of a given gene product such as a storage protein or a protein that confers tolerance or resistance to water deficit.

[0185] The introduced DNA includes but is not limited to, DNA from plant genes, and non-plant genes such as those from bacteria, yeasts, animals or viruses. The introduced DNA can include modified genes, portions of genes, or chimeric genes, including genes from the same or different maize genotype. The term “chimeric gene” or “chimeric DNA” is defined as a gene or DNA sequence or segment comprising at least two DNA sequences or segments from species which do not combine DNA under natural conditions, or which DNA sequences or segments are positioned or linked in a manner which does not normally occur in the native genome of untransformed plant.

[0186] The introduced DNA used for transformation herein may be circular or linear, double-stranded or single-stranded. Generally, the DNA is in the form of chimeric DNA, such as plasmid DNA, that can also contain coding regions flanked by regulatory sequences which promote the expression of the recombinant DNA present in the resultant plant. For example, the DNA may itself comprise or consist of a promoter that is active in a plant which is derived from a source other than that plant, or may utilize a promoter already present in a plant genotype that is the transformation target.

[0187] Generally, the introduced DNA will be relatively small, i.e., less than about 30 kb to minimize any susceptibility to physical, chemical, or enzymatic degradation which is known to increase as the size of the DNA increases. As noted above, the number of proteins, RNA transcripts or mixtures thereof which is introduced into the plant genome is preferably preselected and defined, e.g., from one to about 5-10 such products of the introduced DNA may be formed.

[0188] Two principal methods for the control of expression are known, viz.: overexpression and underexpression. Overexpression can be achieved by insertion of one or more than one extra copy of the selected gene. It is, however, not unknown for plants or their progeny, originally transformed with one or more than one extra copy of a nucleotide sequence, to exhibit the effects of underexpression as well as overexpression. For underexpression there are two principle methods which are commonly referred to in the art as “antisense downregulation” and “sense downregulation” (sense downregulation is also referred to as “cosuppression”). Generically these processes are referred to as “gene silencing”. Both of these methods lead to an inhibition of expression of the target gene.

[0189] Obtaining sufficient levels of transgene expression in the appropriate plant tissues is an important aspect in the production of genetically engineered crops. Expression of heterologous DNA sequences in a plant host is dependent upon the presence of an operably linked promoter that is functional within the plant host. Choice of the promoter sequence will determine when and where within the organism the heterologous DNA sequence is expressed.

[0190] Furthermore, it is contemplated that promoters combining elements from more than one promoter may be useful. For example, U.S. Pat. No. 5,491,288 discloses combining a Cauliflower Mosaic Virus promoter with a histone promoter. Thus, the elements from the promoters disclosed herein may be combined with elements from other promoters.

[0191] Promoters which are useful for plant transgene expression include those that are inducible, viral, synthetic, constitutive (Odell et al., 1985), temporally regulated, spatially regulated, tissue-specific, and spatio-temporally regulated.

[0192] Where expression in specific tissues or organs is desired, tissue-specific promoters may be used. In contrast, where gene expression in response to a stimulus is desired, inducible promoters are the regulatory elements of choice. Where continuous expression is desired throughout the cells of a plant, constitutive promoters are utilized. Additional regulatory sequences upstream and/or downstream from the core promoter sequence may be included in expression constructs of transformation vectors to bring about varying levels of expression of heterologous nucleotide sequences in a transgenic plant.

[0193] A. Transcription Regulatory Sequences

[0194] 1. Promoters

[0195] The choice of promoter will vary depending on the temporal and spatial requirements for expression, and also depending on the target species. In some cases, expression in multiple tissues is desirable. While in others, tissue-specific, e.g., leaf-specific, seed-specific, petal-specific, anther-specific, or pith-specific, expression is desirable. Although many promoters from dicotyledons have been shown to be operational in monocotyledons and vice versa, ideally dicotyledonous promoters are selected for expression in dicotyledons, and monocotyledonous promoters for expression in monocotyledons. However, there is no restriction to the provenance of selected promoters; it is sufficient that they are operational in driving the expression of the nucleotide sequences in the desired cell.

[0196] These promoters include, but are not limited to, constitutive, inducible, temporally regulated, developmentally regulated, spatially-regulated, chemically regulated, stress-responsive, tissue-specific, viral and synthetic promoters. Promoter sequences are known to be strong or weak. A strong promoter provides for a high level of gene expression, whereas a weak promoter provides for a very low level of gene expression. An inducible promoter is a promoter that provides for the turning on and off of gene expression in response to an exogenously added agent, or to an environmental or developmental stimulus. A bacterial promoter such as the P_{tac} promoter can be induced to varying levels of gene expression depending on the level of isothiopropylgalactoside added to the transformed bacterial cells. An isolated promoter sequence that is a strong promoter for heterologous nucleic acid is advantageous because it provides for a sufficient level of gene expression to allow for easy detection and selection of transformed cells and provides for a high level of gene expression when desired.

[0197] Within a plant promoter region there are several domains that are necessary for full function of the promoter. The first of these domains lies immediately upstream of the structural gene and forms the “core promoter region” containing consensus sequences, normally 70 base pairs immediately upstream of the gene. The core promoter region contains the characteristic CAAT and TATA boxes plus surrounding sequences, and represents a transcription initiation sequence that defines the transcription start point for the structural gene.

[0198] The presence of the core promoter region defines a sequence as being a promoter: if the region is absent, the promoter is non-functional. Furthermore, the core promoter region is insufficient to provide fall promoter activity. A series of regulatory sequences upstream of the core constitute the remainder of the promoter. The regulatory sequences determine expression level, the spatial and temporal pattern of expression and, for an important subset of promoters, expression under inductive conditions (regulation by external factors such as light, temperature, chemicals, hormones).

[0199] A range of naturally-occurring promoters are known to be operative in plants and have been used to drive the expression of heterologous (both foreign and endogenous) genes in plants: for example, the constitutive 35S cauliflower mosaic virus (CaMV) promoter, the ripening-enhanced tomato polygalacturonase promoter (Bird et al., 1988), the E8 promoter (Diekman & Fischer, 1988) and the fruit specific 2A1 promoter (Pear et al., 1989) and many others, e.g., U2 and U5 snRNA promoters from maize, the promoter from alcohol dehydrogenase, the Z4 promoter from a gene encoding the Z4 22 kD zein protein, the Z10 promoter from a gene encoding a 10 kD zein protein, a Z27 promoter from a gene encoding a 27 kD zein protein, the A20 promoter from the gene encoding a 19 kD-zein protein, inducible promoters, such as the light inducible promoter derived from the pea rbcS gene and the actin promoter from rice, e.g., the actin 2 promoter (WO 00/70067); seed specific promoters, such as the phaseolin promoter from beans, may also be used. The nucleotide sequences of this invention can also be expressed under the regulation of promoters that are chemically regulated. This enables the nucleic acid sequence or encoded polypeptide to be synthesized only when the crop plants are treated with the inducing chemicals. Chemical induction of gene expression is detailed in EP 0 332 104 (to Ciba-Geigy) and U.S. Pat. No. 5,614,395. A preferred promoter for chemical induction is the tobacco PR-1a promoter.

[0200] Examples of some constitutive promoters which have been described include the rice actin 1 (Wang et al., 1992; U.S. Pat. No. 5,641,876), CaMV 35S (Odell et al., 1985), CaMV 19S (Lawton et al., 1987), nos, Adh, sucrose synthase; and the ubiquitin promoters.

[0201] Examples of tissue specific promoters which have been described include the lectin (Vodkin, 1983; Lindstrom et al., 1990) corn alcohol dehydrogenase 1 (Vogel et al., 1989; Dennis et al., 1984), corn light harvesting complex (Simpson, 1986; Bansal et al., 1992), corn heat shock protein (Odell et al., 1985), pea small subunit RuBP carboxylase (Poulsen et al., 1986), Ti plasmid mannopine synthase (Langridge et al., 1989), Ti plasmid nopaline synthase (Langridge et al., 1989), petunia chalcone isomerase (vanTunen et al., 1988), bean glycine rich protein 1 (Keller et al., 1989), truncated CaMV 35S (Odell et al., 1985), potato patatin (Wenzler et al., 1989), root cell (Yamamoto et al., 1990), maize zein (Reina et al., 1990; Kriz et al., 1987; Wandelt et al., 1989; Langridge et al., 1983; Reina et al., 1990), globulin-1 (Belanger et al., 1991), α-tubulin, cab (Sullivan et al., 1989), PEPCase (Hudspeth & Grula, 1989), R gene complex-associated promoters (Chandler et al., 1989), histone, and chalcone synthase promoters (Franken et al., 1991). Tissue specific enhancers are described in Fromm et al. (1989).

[0202] Inducible promoters that have been described include the ABA- and turgor-inducible promoters, the promoter of the auxin-binding protein gene (Schwob et al., 1993), the UDP glucose flavonoid glycosyl-transferase gene promoter (Ralston et al., 1988), the MPI proteinase inhibitor promoter (Cordero et al., 1994), and the glyceraldehyde-3-phosphate dehydrogenase gene promoter (Kohler et al., 1995; Quigley et al., 1989; Martinez et al., 1989).

[0203] Several other tissue-specific regulated genes and/or promoters have been reported in plants. These include genes encoding the seed storage proteins (such as napin, cruciferin, beta-conglycinin, and phaseolin) zein or oil body proteins (such as oleosin), or genes involved in fatty acid biosynthesis (including acyl carrier protein, stearoyl-ACP desaturase. And fatty acid desaturases (fad 2-1)), and other genes expressed during embryo development (such as Bce4, see, for example, EP 255378 and Kridl et al., 1991). Particularly useful for seed-specific expression is the pea vicilin promoter (Czako et al., 1992). (See also U.S. Pat. No. 5,625,136, herein incorporated by reference.) Other useful promoters for expression in mature leaves are those that are switched on at the onset of senescence, such as the SAG promoter from Arabidopsis (Gan et al., 1995).

[0204] A class of fruit-specific promoters expressed at or during antithesis through fruit development, at least until the beginning of ripening, is discussed in U.S. Pat. No. 4,943,674. cDNA clones that are preferentially expressed in cotton fiber have been isolated (John et al., 1992). cDNA clones from tomato displaying differential expression during fruit development have been isolated and characterized (Mansson et al., 1985, Slater et al., 1985). The promoter for polygalacturonase gene is active in fruit ripening. The polygalacturonase gene is described in U.S. Pat. No. 4,535,060, U.S. Pat. No. 4,769,061, U.S. Pat. No. 4,801,590, and U.S. Pat. No. 5,107,065, which disclosures are incorporated herein by reference.

[0205] Other examples of tissue-specific promoters include those that direct expression in leaf cells following damage to the leaf (for example, from chewing insects), in tubers (for example, patatin gene promoter), and in fiber cells (an example of a developmentally-regulated fiber cell protein is E6 (John et al., 1992). The E6 gene is most active in fiber, although low levels of transcripts are found in leaf, ovule and flower.

[0206] The tissue-specificity of some “tissue-specific” promoters may not be absolute and may be tested by one skilled in the art using the diphtheria toxin sequence. One can also achieve tissue-specific expression with “leaky” expression by a combination of different tissue-specific promoters (Beals et al., 1997). Other tissue-specific promoters can be isolated by one skilled in the art (see U.S. Pat. No. 5,589,379). Several inducible promoters (“gene switches”) have been reported. Many are described in the review by Gatz (1996) and Gatz (1997). These include tetracycline repressor system, Lac repressor system, copper-inducible systems, salicylate-inducible systems (such as the PR1a system), glucocorticoid- (Aoyama et al., 1997) and ecdysome-inducible systems. Also included are the benzene sulphonamide- (U.S. Pat. No. 5,364,780) and alcohol-(WO 97/06269 and WO 97/06268) inducible systems and glutathione S-transferase promoters. Other studies have focused on genes inducibly regulated in response to environmental stress or stimuli such as increased salinity. Drought, pathogen and wounding. (Graham et al., 1985; Graham et al., 1985, Smith et al., 1986). Accumulation of metallocarboxypeptidase-inhibitor protein has been reported in leaves of wounded potato plants (Graham et al., 1981). Other plant genes have been reported to be induced methyl jasmonate, elicitors, heat-shock, anaerobic stress, or herbicide safeners.

[0207] Regulated expression of the chimeric transacting viral replication protein can be further regulated by other genetic strategies. For example, Cre-mediated gene activation as described by Odell et al. 1990. Thus, a DNA fragment containing 3′ regulatory sequence bound by lox sites between the promoter and the replication protein coding sequence that blocks the expression of a chimeric replication gene from the promoter can be removed by Cre-mediated excision and result in the expression of the trans-acting replication gene. In this case, the chimeric Cre gene, the chimeric trans-acting replication gene, or both can be under the control of tissue- and developmental-specific or inducible promoters. An alternate genetic strategy is the use of tRNA suppressor gene. For example, the regulated expression of a tRNA suppressor gene can conditionally control expression of a trans-acting replication protein coding sequence containing an appropriate termination codon as described by Ulmasov et al. 1997. Again, either the chimeric tRNA suppressor gene, the chimeric transacting replication gene, or both can be under the control of tissue- and developmental-specific or inducible promoters.

[0208] Frequently it is desirable to have continuous or inducible expression of a DNA sequence throughout the cells of an organism in a tissue-independent manner. For example, increased resistance of a plant to infection by soil- and airborne-pathogens might be accomplished by genetic manipulation of the plant's genome to comprise a continuous promoter operably linked to a heterologous pathogen-resistance gene such that pathogen-resistance proteins are continuously expressed throughout the plant's tissues.

[0209] Alternatively, it might be desirable to inhibit expression of a native DNA sequence within a plant's tissues to achieve a desired phenotype. In this case, such inhibition might be accomplished with transformation of the plant to comprise a constitutive, tissue-independent promoter operably linked to an antisense nucleotide sequence, such that constitutive expression of the antisense sequence produces an RNA transcript that interferes with translation of the mRNA of the native DNA sequence.

[0210] To define a minimal promoter region, a DNA segment representing the promoter region is removed from the 5′ region of the gene of interest and operably linked to the coding sequence of a marker (reporter) gene by recombinant DNA techniques well known to the art. The reporter gene is operably linked downstream of the promoter, so that transcripts initiating at the promoter proceed through the reporter gene. Reporter genes generally encode proteins which are easily measured, including, but not limited to, chloramphenicol acetyl transferase (CAT), beta-glucuronidase (GUS), green fluorescent protein (GFP), beta-galactosidase (beta-GAL), and luciferase.

[0211] The construct containing the reporter gene under the control of the promoter is then introduced into an appropriate cell type by transfection techniques well known to the art. To assay for the reporter protein, cell lysates are prepared and appropriate assays, which are well known in the art, for the reporter protein are performed. For example, if CAT were the reporter gene of choice, the lysates from cells transfected with constructs containing CAT under the control of a promoter under study are mixed with isotopically labeled chloramphenicol and acetyl-coenzyme A (acetyl-CoA). The CAT enzyme transfers the acetyl group from acetyl-CoA to the 2- or 3-position of chloramphenicol. The reaction is monitored by thin-layer chromatography, which separates acetylated chloramphenicol from unreacted material. The reaction products are then visualized by autoradiography.

[0212] The level of enzyme activity corresponds to the amount of enzyme that was made, which in turn reveals the level of expression from the promoter of interest. This level of expression can be compared to other promoters to determine the relative strength of the promoter under study. In order to be sure that the level of expression is determined by the promoter, rather than by the stability of the mRNA, the level of the reporter mRNA can be measured directly, such as by Northern blot analysis.

[0213] Once activity is detected, mutational and/or deletional analyses may be employed to determine the minimal region and/or sequences required to initiate transcription. Thus, sequences can be deleted at the 5′ end of the promoter region and/or at the 3′ end of the promoter region, and nucleotide substitutions introduced. These constructs are then introduced to cells and their activity determined.

[0214] In one embodiment, the promoter may be a gamma zein promoter, an oleosin ole16 promoter, a globulinI promoter, an actin I promoter, an actin cl promoter, a sucrose synthetase promoter, an INOPS promoter, an EXM5 promoter, a globulin2 promoter, a b-32, ADPG-pyrophosphorylase promoter, an LtpI promoter, an Ltp2 promoter, an oleosin ole17 promoter, an oleosin ole18 promoter, an actin 2 promoter, a pollen-specific protein promoter, a pollen-specific pectate lyase promoter, an anther-specific protein promoter (Huffman), an anther-specific gene RTS2 promoter, a pollen-specific gene promoter, a tapeturn-specific gene promoter, tapeturn-specific gene RAB24 promoter, a anthranilate synthase alpha subunit promoter, an alpha zein promoter, an anthranilate synthase beta subunit promoter, a dihydrodipicolinate synthase promoter, a Thi1 promoter, an alcohol dehydrogenase promoter, a cab binding protein promoter, an H3C4 promoter, a RUBISCO SS starch branching enzyme promoter, an ACCase promoter, an actin3 promoter, an actin7 promoter, a regulatory protein GF14-12 promoter, a ribosomal protein L9 promoter, a cellulose biosynthetic enzyme promoter, an S-adenosyl-L-homocysteine hydrolase promoter, a superoxide dismutase promoter, a C-kinase receptor promoter, a phosphoglycerate mutase promoter, a root-specific RCc3 mRNA promoter, a glucose-6 phosphate isomerase promoter, a pyrophosphate-fructose 6-phosphatelphosphotransferase promoter, an ubiquitin promoter, a beta-ketoacyl-ACP synthase promoter, a 33 kDa photosystem 11 promoter, an oxygen evolving protein promoter, a 69 kDa vacuolar ATPase subunit promoter, a metallothionein-like protein promoter, a glyceraldehyde-3-phosphate dehydrogenase promoter, an ABA- and ripening-inducible-like protein promoter, a phenylalanine ammonia lyase promoter, an adenosine triphosphatase S-adenosyl-L-homocysteine hydrolase promoter, an a-tubulin promoter, a cab promoter, a PEPCase promoter, an R gene promoter, a lectin promoter, a light harvesting complex promoter, a heat shock protein promoter, a chalcone synthase promoter, a zein promoter, a globulin-1 promoter, an ABA promoter, an auxin-binding protein promoter, a UDP glucose flavonoid glycosyl-transferase gene promoter, an NTI promoter, an actin promoter, an opaque 2 promoter, a b70 promoter, an oleosin promoter, a CaMV 35S promoter, a CaMV 19S promoter, a histone promoter, a turgor-inducible promoter, a pea small subunit RuBP carboxylase promoter, a Ti plasmid mannopine synthase promoter, Ti plasmid nopaline synthase promoter, a petunia chalcone isomerase promoter, a bean glycine rich protein I promoter, a CaMV 35S transcript promoter, a potato patatin promoter, or a S-E9 small subunit RuBP carboxylase promoter.

[0215] 2. Other Regulatory Elements

[0216] In addition to promoters, a variety of 5′ and 3′ transcriptional regulatory sequences are also available for use in the present invention. Transcriptional terminators are responsible for the termination of transcription and correct mRNA polyadenylation. The 3′ nontranslated regulatory DNA sequence preferably includes from about 50 to about 1,000, more preferably about 100 to about 1,000, nucleotide base pairs and contains plant transcriptional and translational termination sequences. Appropriate transcriptional terminators and those which are known to function in plants include the CaMV 35S terminator, the tml terminator, the nopaline synthase terminator, the pea rbcS E9 terminator, the terminator for the T7 transcript from the octopine synthase gene of Agrobacterium tumefaciens, and the 3′ end of the protease inhibitor I or II genes from potato or tomato, although other 3′ elements known to those of skill in the art can also be employed. Alternatively, one also could use a gamma coixin, oleosin 3 or other terminator from the genus Coix.

[0217] Preferred 3′ elements include those from the nopaline synthase gene of Agrobacterium tumefaciens (Bevan et al., 1983), the terminator for the T7 transcript from the octopine synthase gene of Agrobacterium tumefaciens, and the 3′ end of the protease inhibitor I or II genes from potato or tomato.

[0218] As the DNA sequence between the transcription initiation site and the start of the coding sequence, i.e., the untranslated leader sequence, can influence gene expression, one may also wish to employ a particular leader sequence. Preferred leader sequences are contemplated to include those which include sequences predicted to direct optimum expression of the attached gene, i.e., to include a preferred consensus leader sequence which may increase or maintain mRNA stability and prevent inappropriate initiation of translation. The choice of such sequences will be known to those of skill in the art in light of the present disclosure. Sequences that are derived from genes that are highly expressed in plants will be most preferred.

[0219] Other sequences that have been found to enhance gene expression in transgenic plants include intron sequences (e.g., from Adh1, bronze1, actin1, actin 2 (WO 00/760067), or the sucrose synthase intron) and viral leader sequences (e.g., from TMV, MCMV and AMV). For example, a number of non-translated leader sequences derived from viruses are known to enhance expression. Specifically, leader sequences from Tobacco Mosaic Virus (TMV), Maize Chlorotic Mottle Virus (MCMV), and Alfalfa Mosaic Virus (AMV) have been shown to be effective in enhancing expression (e.g., Gallie et al., 1987; Skuzeski et al., 1990). Other leaders known in the art include but are not limited to: Picornavirus leaders, for example, EMCV leader (Encephalomyocarditis 5 noncoding region) (Elroy-Stein et al., 1989); Potyvirus leaders, for example, TEV leader (Tobacco Etch Virus); MDMV leader (Maize Dwarf Mosaic Virus); Human immunoglobulin heavy-chain binding protein (BiP) leader, (Macejak et al., 1991); Untranslated leader from the coat protein mRNA of alfalfa mosaic virus (AMV RNA 4), (Jobling et al., 1987; Tobacco mosaic virus leader (TMV), (Gallie et al., 1989; and Maize Chlorotic Mottle Virus leader (MCMV) (Lommel et al., 1991. See also, Della-Cioppa et al., 1987.

[0220] Regulatory elements such as Adh intron 1 (Callis et al., 1987), sucrose synthase intron (Vasil et al., 1989) or TMV omega element (Gallie, et al., 1989), may further be included where desired.

[0221] Examples of enhancers include elements from the CaMV 35S promoter, octopine synthase genes (Ellis et al., 1987), the rice actin I gene, the maize alcohol dehydrogenase gene (Callis et al., 1987), the maize shrunken I gene (Vasil et al., 1989), TMV Omega element (Gallie et al., 1989) and promoters from non-plant eukaryotes (e.g. yeast; Ma et al., 1988).

[0222] Vectors for use in accordance with the present invention may be constructed to include the ocs enhancer element. This element was first identified as a 16 bp palindromic enhancer from the octopine synthase (ocs) gene of ultilane (Ellis et al., 1987), and is present in at least 10 other promoters (Bouchez et al., 1989). The use of an enhancer element, such as the ocs element and particularly multiple copies of the element, will act to increase the level of transcription from adjacent promoters when applied in the context of monocot transformation.

[0223] Ultimately, the most desirable DNA segments for introduction into for example a monocot genome may be homologous genes or gene families which encode a desired trait (e.g., increased yield per acre) and which are introduced under the control of novel promoters or enhancers, etc., or perhaps even homologous or tissue specific (e.g., root-, collar/sheath-, whorl-, stalk-, earshank-, kernel- or leaf-specific) promoters or control elements. Indeed, it is envisioned that a particular use of the present invention will be the targeting of a gene in a constitutive manner or a root-specific manner. For example, insect resistant genes may be expressed specifically in the whorl and collar/sheath tissues which are targets for the first and second broods, respectively, of ECB. Likewise, genes encoding proteins with particular activity against rootworm may be targeted directly to root tissues.

[0224] Vectors for use in tissue-specific targeting of genes in transgenic plants will typically include tissue-specific promoters and may also include other tissue-specific control elements such as enhancer sequences. Promoters which direct specific or enhanced expression in certain plant tissues will be known to those of skill in the art in light of the present disclosure. These include, for example, the rbcS promoter, specific for green tissue; the ocs, nos and mas promoters which have higher activity in roots or wounded leaf tissue; a truncated (−90 to +8) 35S promoter which directs enhanced expression in roots, an alpha-tubulin gene that directs expression in roots and promoters derived from zein storage protein genes which direct expression in endosperm. It is particularly contemplated that one may advantageously use the 16 bp ocs enhancer element from the octopine synthase (ocs) gene (Ellis et al., 1987; Bouchez et al., 1989), especially when present in multiple copies, to achieve enhanced expression in roots.

[0225] Tissue specific expression may be functionally accomplished by introducing a constitutively expressed gene (all tissues) in combination with an antisense gene that is expressed only in those tissues where the gene product is not desired. For example, a gene coding for the crystal toxin protein from B. thuringiensis (Bt) may be introduced such that it is expressed in all tissues using the 35S promoter from Cauliflower Mosaic Virus. Expression of an antisense transcript of the Bt gene in a maize kernel, using for example a zein promoter, would prevent accumulation of the Bt protein in seed. Hence the protein encoded by the introduced gene would be present in all tissues except the kernel.

[0226] Expression of some genes in transgenic plants will be desired only under specified conditions. For example, it is proposed that expression of certain genes that confer resistance to environmental stress factors such as drought will be desired only under actual stress conditions. It is contemplated that expression of such genes throughout a plants development may have detrimental effects. It is known that a large number of genes exist that respond to the environment. For example, expression of some genes such as rbcS, encoding the small subunit of ribulose bisphosphate carboxylase, is regulated by light as mediated through phytochrome. Other genes are induced by secondary stimuli. For example, synthesis of abscisic acid (ABA) is induced by certain environmental factors, including but not limited to water stress. A number of genes have been shown to be induced by ABA (Skriver and Mundy, 1990). It is also anticipated that expression of genes conferring resistance to insect predation would be desired only under conditions of actual insect infestation. Therefore, for some desired traits inducible expression of genes in transgenic plants will be desired.

[0227] Expression of a gene in a transgenic plant will be desired only in a certain time period during the development of the plant. Developmental timing is frequently correlated with tissue specific gene expression. For example, expression of zein storage proteins is initiated in the endosperm about 15 days after pollination.

[0228] Additionally, vectors may be constructed and employed in the intracellular targeting of a specific gene product within the cells of a transgenic plant or in directing a protein to the extracellular environment. This will generally be achieved by joining a DNA sequence encoding a transit or signal peptide sequence to the coding sequence of a particular gene. The resultant transit, or signal, peptide will transport the protein to a particular intracellular, or extracellular destination, respectively, and will then be post-translationally removed. Transit or signal peptides act by facilitating the transport of proteins through intracellular membranes, e.g., vacuole, vesicle, plastid and mitochondrial membranes, whereas signal peptides direct proteins through the extracellular membrane.

[0229] A particular example of such a use concerns the direction of a herbicide resistance gene, such as the EPSPS gene, to a particular organelle such as the chloroplast rather than to the cytoplasm. This is exemplified by the use of the rbcs transit peptide which confers plastid-specific targeting of proteins. In addition, it is proposed that it may be desirable to target certain genes responsible for male sterility to the mitochondria, or to target certain genes for resistance to phytopathogenic organisms to the extracellular spaces, or to target proteins to the vacuole.

[0230] By facilitating the transport of the protein into compartments inside and outside the cell, these sequences may increase the accumulation of gene product protecting them from proteolytic degradation. These sequences also allow for additional mRNA sequences from highly expressed genes to be attached to the coding sequence of the genes. Since mRNA being translated by ribosomes is more stable than naked mRNA, the presence of translatable mRNA in front of the gene may increase the overall stability of the mRNA transcript from the gene and thereby increase synthesis of the gene product. Since transit and signal sequences are usually post-translationally removed from the initial translation product, the use of these sequences allows for the addition of extra translated sequences that may not appear on the final polypeptide. Targeting of certain proteins may be desirable in order to enhance the stability of the protein (U.S. Pat. No. 5,545,818).

[0231] It may be useful to target DNA itself within a cell. For example, it may be useful to target introduced DNA to the nucleus as this may increase the frequency of transformation. Within the nucleus itself it would be useful to target a gene in order to achieve site specific integration. For example, it would be useful to have an gene introduced through transformation replace an existing gene in the cell.

[0232] Other elements include those that can be regulated by endogenous or exogenous agents, e.g., by zinc finger proteins, including naturally occurring zinc finger proteins or chimeric zinc finger proteins (see, e.g., U.S. Pat. No. 5,789,538, WO 99/48909; WO 99/45132; WO 98/53060; WO 98/53057; WO 98/53058; WO 00/23464; WO 95/19431; and WO 98/54311) or myb-like transcription factors. For example, a chimeric zinc finger protein may include amino acid sequences which bind to a specific DNA sequence (the zinc finger) and amino acid sequences that activate (e.g., GAL 4 sequences) or repress the transcription of the sequences linked to the specific DNA sequence.

[0233] 3. Preferred Nucleic Acid Molecules of the Invention

[0234] The invention relates to an isolated plant, e.g., Arabidopsis, Chenopodium and rice, nucleic acid molecule comprising a gene having an open reading frame, the expression of which is altered in response to pathogen infection, as well as the endogenous plant promoters for those genes. However, the expression of these genes may also be altered in response to non-pathogens, e.g., in response to environmental stiumuli. The nucleic acid molecules can be used in pathogen control strategies, e.g., by overexpressing nucleic acid molecules which can confer tolerance to a cell, or by altering the expression of host genes which are required for pathogen infection, e.g., by “knocking out” the expression of at least one genomic copy of the gene. Plants having genetic disruptions in host genes may be less susceptible to infection, e.g., due to a decrease or absence of a host protein needed for infection, or, alternatively, hypersusceptible to infection. Plants that are hypersusceptible to infection may be useful to prepare transgenic plants as the expression of the gene(s) which was disrupted may be related to gene silencing.

[0235] Preferred sources from which the nucleic acid molecules of the invention can be obtained or isolated include, but are not limited to, corn (Zea mays), Brassica sp. (e.g., B. napus, B. rapa, B. juncea), particularly those Brassica species useful as sources of seed oil, alfalfa (Medicago sativa), rice (Oryza sativa), rye (Secale cereale), sorghum (Sorghum bicolor, Sorghum vulgare), millet (e.g., pearl millet (Pennisetum glaucum), proso millet (Panicum miliaceum), foxtail millet (Setaria italica), finger millet (Eleusine coracana)), sunflower (Helianthus annuus), safflower (Carthamus tinctorius), wheat (Triticum aestivum), soybean (Glycine max), tobacco (Nicotiana tabacum), potato (Solanum tuberosum), peanuts (Arachis hypogaea), cotton (Gossypium barbadense, Gossypium hirsutum), sweet potato (Ipomoea batatus), cassaya (Manihot esculenta), coffee (Cofea spp.), coconut (Cocos nucifera), pineapple (Ananas comosus), citrus trees (Citrus spp.), cocoa (Theobroma cacao), tea (Camellia sinensis), banana (Musa spp.), avocado (Persea ultilane), fig (Ficus casica), guava (Psidium guajava), mango (Mangifera indica), olive (Olea europaea), papaya (Carica papaya), cashew (Anacardium occidentale), macadamia (Macadamia integrifolia), almond (Prunus amygdalus), sugar beets (Beta vulgaris), sugarcane (Saccharum spp.), oats, duckweed (Lemna), barley, vegetables, ornamentals, and conifers.

[0236] Duckweed (Lemna, see WO 00/07210) includes members of the family Lemnaceae. There are known four genera and 34 species of duckweed as follows: genus Lemna (L. aequinoctialis, L. disperma, L. ecuadoriensis, L. gibba, L. japonica, L. minor, L. miniscula, L. obscura, L. perpusilla, L. tenera, L. trisulca, L. turionifera, L. valdiviana); genus Spirodela (S. intermedia, S. polyrrhiza, S. punctata); genus Woffia (Wa. Angusta, Wa. Arrhiza, Wa. Australina, Wa. Borealis, Wa. Brasiliensis, Wa. Columbiana, Wa. Elongata, Wa. Globosa, Wa. Microscopica, Wa. Neglecta) and genus Wofiella (Wl. ultila, Wl. ultilane n, Wl. gladiata, Wl. ultila, Wl. lingulata, Wl. repunda, Wl. rotunda, and Wl. neotropica). Any other genera or species of Lemnaceae, if they exist, are also aspects of the present invention. Lemna gibba, Lemna minor, and Lemna miniscula are preferred, with Lemna minor and Lemna miniscula being most preferred. Lemna species can be classified using the taxonomic scheme described by Landolt, Biosystematic Investigation on the Family of Duckweeds: The family of Lemnaceae—A Monograph Study. Geobatanischen Institut ETH, Stiftung Rubel, Zurich (1986)).

[0237] Vegetables from which to obtain or isolate the nucleic acid molecules of the invention include, but are not limited to, tomatoes (Lycopersicon esculentum), lettuce (e.g., Lactuca sativa), green beans (Phaseolus vulgaris), lima beans (Phaseolus limensis), peas (Lathyrus spp.), and members of the genus Cucumis such as cucumber (C. sativus), cantaloupe (C. cantalupensis), and musk melon (C. melo). Ornamentals from which to obtain or isolate the nucleic acid molecules of the invention include, but are not limited to, azalea (Rhododendron spp.), hydrangea (Macrophylla hydrangea), hibiscus (Hibiscus rosasanensis), roses (Rosa spp.), tulips (Tulipa spp.), daffodils (Narcissus spp.), petunias (Petunia hybrida), carnation (Dianthus caryophyllus), poinsettia (Euphorbia pulcherrima), and chrysanthemum. Conifers that may be employed in practicing the present invention include, for example, pines such as loblolly pine (Pinus taeda), slash pine (Pinus elliotii), ponderosa pine (Pinus ponderosa), lodgepole pine (Pinus contorta), and Monterey pine (Pinus radiata), Douglas-fir (Pseudotsuga menziesii); Western hemlock (Tsuga ultilane); Sitka spruce (Picea glauca); redwood (Sequoia sempervirens); true firs such as silver fir (Abies amabilis) and balsam fir (Abies balsamea); and cedars such as Western red cedar (Thuja plicata) and Alaska yellow-cedar (Chamaecyparis nootkatensis). Leguminous plants from which the nucleic acid molecules of the invention can be isolated or obtained include, but are not limited to, beans and peas. Beans include guar, locust bean, fenugreek, soybean, garden beans, cowpea, mungbean, lima bean, fava bean, lentils, chickpea, and the like. Legumes include, but are not limited to, Arachis, e.g., peanuts, Vicia, e.g., crown vetch, hairy vetch, adzuki bean, mung bean, and chickpea, Lupinus, e.g., lupine, trifolium, Phaseolus, e.g., common bean and lima bean, Pisum, e.g., field bean, Melilotus, e.g., clover, Medicago, e.g., alfalfa, Lotus, e.g., trefoil, lens, e.g., lentil, and false indigo.

[0238] Papaya, garlic, pea, peach, pepper, petunia, strawberry, sorghum, sweet potato, turnip, safflower, corn, pea, endive, gourd, grape, snap bean, chicory, cotton, tobacco, aubergine, beet, buckwheat, broad bean, nectarine, avocado, mango, banana, groundnut, potato, peanut, lettuce, pineapple, spinach, squash, sugarbeet, sugarcane, sweet corn, chrysanthemum.

[0239] Other preferred sources of the nucleic acid molecules of the invention include Acacia, aneth, artichoke, arugula, blackberry, canola, cilantro, clementines, escarole, eucalyptus, fennel, grapefruit, honey dew, jicama, kiwifruit, lemon, lime, mushroom, nut, okra, orange, parsley, persimmon, plantain, pomegranate, poplar, radiata pine, radicchio, Southern pine, sweetgum, tangerine, triticale, vine, yams, apple, pear, quince, cherry, apricot, melon, hemp, buckwheat, grape, raspberry, chenopodium, blueberry, nectarine, peach, plum, strawberry, watermelon, eggplant, pepper, cauliflower, Brassica, e.g., broccoli, cabbage, ultilan sprouts, onion, carrot, leek, beet, broad bean, celery, radish, pumpkin, endive, gourd, garlic, snapbean, spinach, squash, turnip, ultilane, and zucchini.

[0240] Yet other sources of nucleic acid molecules are ornamental plants including, but not limited to, impatiens, Begonia, Pelargonium, Viola, Cyclamen, Verbena, Vinca, Tagetes, Primula, Saint Paulia, Agertum, Amaranthus, Antihirrhinum, Aquilegia, Cineraria, Clover, Cosmo, Cowpea, Dahlia, Datura, Delphinium, Gerbera, Gladiolus, Gloxinia, Hippeastrum, Mesembryanthemum, Salpiglossos, and Zinnia, and plants such as those shown in Table 1.

TABLE 1

| | LATIN | COMMON | MAP REFERENCES | |
|---|---|---|---|---|
| FAMILY | NAME | NAME | RESOURCES | LINKS |
| Cucurbitaceae | Cucumis | Cucumber | | http://www.cucurbit.org/ |
| | sativus | | | |
| | Cucumis | Melon | | http://genome.cornell.edu/cg/c |
| | melo | | | |
| | Citrullus | Watermelon | | |
| | lanatus | | | |
| | Cucurbita | Squash - | | |
| | pepo | summer | | |
| | Cucurbita | Squash - | | |
| | maxima | winter | | |
| | Cucurbita | Pumpkin/ | | |
| | moschata | butternut | | |
| Total | | | | http://www.nal.usda.gov/pgdic/ |
| | | | | Map_proj/ |
| Solanaceae | Lycopersicon | Tomato | 15x BAC on variety | genome.cornell.edu/solgenes |
| | esculentum | | Heinz 1706 order from | http://ars-genome.cornell.edu/cgi- |
| | | | Clemson Genome center | bin/WebAce/webace?db=solgenes |
| | | | (www.genome.clemson.edu) | http://genome.cornell.edu/tgc/ |
| | | | 11.6x BAC of L. cheesmanii | http://tgrc.ucdavis.edu/ |
| | | | (originates | |
| | | | from J. Giovannoni) | |
| | | | available from Clemson | |
| | | | genome center | |
| | | | (www.genome.clemson.edu) | |
| | | | EST collection from | |
| | | | TIGR | |
| | | | (www.tigr.org/tdb/lgi/index.html) | |
| | | | EST collection from | |
| | | | Clemsom Genome | |
| | | | Center | |
| | | | (www.genome.clemson.edu) | |
| | | | TAG 99: 254-271, 1999 | |
| | | | (esculentum x pennelli) | |
| | | | TAG 89: 1007-1013, | |
| | | | 1994 (peruvianum) | |
| | | | Plant Cell Reports | |
| | | | 12: 293-297, 1993 | |
| | | | (RAPDs) | |
| | | | Genetics 132: 1141-1160, | |
| | | | 1992 (potato x tomato) | |
| | | | Genetics 120: 1095-1105, | |
| | | | 1988 (RFLP potato and | |
| | | | tomato) | |
| | | | Genetics 115: 387-393, | |
| | | | 1986 (esculentum x pennelli | |
| | | | isozyme and | |
| | | | cDNAs) | |
| | Capsicum | Pepper | | http://neptune.netimages.com/˜chile/ |
| | annuum | | | science.html |
| | Capsicum | Chile pepper | | |
| | frutescens | | | |
| | Solanum | Eggplant | | |
| | melongena | | | |
| | (Nicotiana | (Tobacco) | | |
| | tabacum) | | | |
| | (Solanum | (Potato) | | |
| | tuberosum) | | | |
| | (Petunia x hybrida | (hort.Petunia) | 4x BAC of Petunia hybrida | |
| | hort. | | 7984 available from | |
| | Ex E. Vilm.) | | Clemson genome center | |
| | | | (www.genome.clemson.edu) | |
| Total | | | | http://www.nal.usda.gov/pgdic/ |
| | | | | Map_proj/ |
| Brassicaceae | Brassica | Broccoli | | http://res.agr.ca/ecorc/cwmt/crucifer/ |
| | oleracea L. | | | traits/index.htm |
| | var. italica | | | http://geneous.cit.cornell.edu/ |
| | Brassica | Cabbage | | cabbage/aboutcab.html |
| | oleracea L. | | | |
| | var. capitata | | | |
| | Brassica | Chinese | | |
| | rapa | Cabbage | | |
| | Brassica | Cauliflower | | |
| | oleracea L. | | | |
| | var. botrytis | | | |
| | Raphanus | Daikon | | |
| | sativus var. | | | |
| | niger | | | |
| | (Brassica | (Oilseed | | http://ars-genome.cornell.edu/cgi-bin/ |
| | napus) | rape) | | WebAce/webace?db=brassicadb |
| | | Arabidopsis | 12x and 6x BACs on | http://ars-genome.cornell.edu/cgi-bin/ |
| | | | Columbia strain available | WebAce/webace?db=agr |
| | | | from Clemson genome | |
| | | | center | |
| | | | (www.genome.clemson.edu) | |
| Total | | | | http://www.nal.usda.gov/pgdic/ |
| | | | | Map_proj/ |
| Umbelliferae | Daucus | Carrot | | |
| | carota | | | |
| Compositae | Lactuca | Lettuce | | |
| | sativa | | | |
| | Helianthus | (Sunflower) | | |
| | annuus | | | |
| Total | | | | |
| Chenopodiaceae | Spinacia | Spinach | | |
| | oleracea | | | |
| | (Beta | (Sugar Beet) | | |
| | vulgaris) | | | |
| Total | | | | |
| Leguminosae | Phaseolus | Bean | 4.3x BAC available from | http://ars-genome.cornell.edu/cgi-bin/ |
| | vulgaris | | Clemson genome center | WebAce/webace?db=beangenes |
| | | | (www.genome.clemson.edu) | |
| | Pisum | Pea | | |
| | sativum | | | |
| | (Glycine | (Soybean) | 7.5x and 7.9x BACs | http://ars-genome.cornell.edu/cgi-bin/ |
| | max) | | available from Clemson | WebAce/webace?db=soybase |
| | | | genome center | |
| | | | (www.genome.clemson.edu) | |
| Total | | | http://www.nal.usda.gov/pgdic/Map_proj/ | |
| Gramineae | Zea mays | Sweet Corn | Novartis BACs for Mo17 | |
| | | | and B73 have been donated | |
| | | | to Clemson Genome Center | |
| | | | (www.genome.clemson.edu) | |
| | (Zea mays) | (Field Corn) | | http://www.agron.missouri.edu/mnl/ |
| Total | | | http://www.nal.usda.gov/pgdic/Map_proj/ | |
| Liliaceae | Allium cepa | Onion | | |
| | | Leek | | |
| | | (Garlic) | | |
| | | (Asparagus) | | |
| Total | | | http://www.nal.usda.gov/pgdic/Map_proj/ | |

[0241] Preferred forage and turf grass nucleic acid sources for the nucleic acid molecules of the invention include, but are not limited to, alfalfa, orchard grass, tall fescue, perennial ryegrass, creeping bent grass, and redtop. Yet other preferred sources include, but are not limited to, crop plants and in particular cereals (for example, corn, alfalfa, sunflower, rice, Brassica, canola, soybean, barley, soybean, sugarbeet, cotton, safflower, peanut, sorghum, oat, rye, rape, wheat, millet, tobacco, and the like), and even more preferably corn, rice and soybean.

[0242] According to one embodiment, the present invention is directed to a nucleic acid molecule comprising a nucleotide sequence isolated or obtained from any plant which encodes a polypeptide having at least 70% amino acid sequence identity to a polypeptide encoded by a gene comprising any one of SEQ ID NOs:1-953, 1954-1966, 2000-2129 or 2662-4737, or a gene comprising SEQ ID NOs:1001-1094, 2137-2661 or 4738-6813. Based on the Arabidopsis, Chenopdoium and rice nucleic acid sequences of the present invention, orthologs may be identified or isolated from the genome of any desired organism, preferably from another plant, according to well known techniques based on their sequence similarity to the Arabidopsis, Chenopodium and rice nucleic acid sequences, e.g., hybridization, PCR or computer generated sequence comparisons. For example, all or a portion of a particular Arabidopsis, Chenopodium and rice nucleic acid sequence is used as a probe that selectively hybridizes to other gene sequences present in a population of cloned genomic DNA fragments or cDNA fragments (i.e., genomic or cDNA libraries) from a chosen source organism. Further, suitable genomic and cDNA libraries may be prepared from any cell or tissue of an organism. Such techniques include hybridization screening of plated DNA libraries (either plaques or colonies; see, e.g., Sambrook et al., 1989) and amplification by PCR using oligonucleotide primers preferably corresponding to sequence domains conserved among related polypeptide or subsequences of the nucleotide sequences provided herein (see, e.g., Innis et al., 1990). These methods are particularly well suited to the isolation of gene sequences from organisms closely related to the organism from which the probe sequence is derived. The application of these methods using the Arabidopsis sequences as probes is well suited for the isolation of gene sequences from any source organism, preferably other plant species. In a PCR approach, oligonucleotide primers can be designed for use in PCR reactions to amplify corresponding DNA sequences from cDNA or genomic DNA extracted from any plant of interest. Methods for designing PCR primers and PCR cloning are generally known in the art.

[0243] In hybridization techniques, all or part of a known nucleotide sequence is used as a probe that selectively hybridizes to other corresponding nucleotide sequences present in a population of cloned genomic DNA fragments or cDNA fragments (i.e., genomic or cDNA libraries) from a chosen organism. The hybridization probes may be genomic DNA fragments, cDNA fragments, RNA fragments, or other oligonucleotides, and may be labeled with a detectable group such as ³²P, or any other detectable marker. Thus, for example, probes for hybridization can be made by labeling synthetic oligonucleotides based on the sequence of the invention. Methods for preparation of probes for hybridization and for construction of cDNA and genomic libraries are generally known in the art and are disclosed in Sambrook et al. (1989). In general, sequences that hybridize to the sequences disclosed herein will have at least 40% to 50%, about 60% to 70% and even about 80% 85%, 90%, 95% to 98% or more identity with the disclosed sequences. That is, the sequence similarity of sequences may range, sharing at least about 40% to 50%, about 60% to 70%, and even about 80%, 85%, 90%, 95% to 98% sequence similarity.

[0244] The nucleic acid molecules of the invention can also be identified by, for example, a search of known databases for genes encoding polypeptides having a specified amino acid sequence identity or DNA having a specified nucleotide sequence identity. Methods of alignment of sequences for comparison are well known in the art and are described hereinabove.

[0245] 4. Methods for Mutagenizing DNA

[0246] It is specifically contemplated by the inventors that one could mutagenize DNA having a promoter or open reading frame to, for example, potentially improve the utility of the DNA for expression of transgenes in plants. The mutagenesis can be carried out at random and the mutagenized sequences screened for activity in a trial-by-error procedure. Alternatively, particular sequences which provide the promoter with desirable expression characteristics, or a promoter with expression enhancement activity, could be identified and these or similar sequences introduced into the sequences via mutation. It is further contemplated that one could mutagenize these sequences in order to enhance their expression of transgenes in a particular species.

[0247] The means for mutagenizing a DNA segment of the current invention are well-known to those of skill in the art. As indicated, modifications may be made by random or site-specific mutagenesis procedures. The DNA may be modified by altering its structure through the addition or deletion of one or more nucleotides from the sequence which encodes the corresponding unmodified sequences.

[0248] Mutagenesis may be performed in accordance with any of the techniques known in the art, such as, and not limited to, synthesizing an oligonucleotide having one or more mutations within the sequence of a particular regulatory region. In particular, site-specific mutagenesis is a technique useful in the preparation of promoter mutants, through specific mutagenesis of the underlying DNA. The technique further provides a ready ability to prepare and test sequence variants, for example, incorporating one or more of the foregoing considerations, by introducing one or more nucleotide sequence changes into the DNA. Site-specific mutagenesis allows the production of mutants through the use of specific oligonucleotide sequences which encode the DNA sequence of the desired mutation, as well as a sufficient number of adjacent nucleotides, to provide a primer sequence of sufficient size and sequence complexity to form a stable duplex on both sides of the deletion junction being traversed. Typically, a primer of about 17 to about 75 nucleotides or more in length is preferred, with about 10 to about 25 or more residues on both sides of the junction of the sequence being altered.

[0249] In general, the technique of site-specific mutagenesis is well known in the art, as exemplified by various publications. As will be appreciated, the technique typically employs a phage vector which exists in both a single stranded and double stranded form. Typical vectors useful in site-directed mutagenesis include vectors such as the M13 phage. These phage are readily commercially available and their use is generally well known to those skilled in the art.

[0250] Double stranded plasmids also are routinely employed in site directed mutagenesis which eliminates the step of transferring the gene of interest from a plasmid to a phage.

[0251] In general, site-directed mutagenesis in accordance herewith is performed by first obtaining a single-stranded vector or melting apart of two strands of a double stranded vector which includes within its sequence a DNA sequence which encodes the promoter. An oligonucleotide primer bearing the desired mutated sequence is prepared, generally synthetically. This primer is then annealed with the single-stranded vector, and subjected to DNA polymerizing enzymes such as E. coli polymerase I Klenow fragment, in order to complete the synthesis of the mutation-bearing strand. Thus, a heteroduplex is formed wherein one strand encodes the original non-mutated sequence and the second strand bears the desired mutation.

[0252] This heteroduplex vector is then used to transform or transfect appropriate cells, such as E. coli cells, and cells are selected which include recombinant vectors bearing the mutated sequence arrangement. Vector DNA can then be isolated from these cells and used for plant transformation. A genetic selection scheme was devised by Kunkel et al. (1987) to enrich for clones incorporating mutagenic oligonucleotides. Alternatively, the use of PCR with commercially available thermostable enzymes such as Taq polymerase may be used to incorporate a mutagenic oligonucleotide primer into an amplified DNA fragment that can then be cloned into an appropriate cloning or expression vector. The PCR-mediated mutagenesis procedures of Tomic et al. (1990) and Upender et al. (1995) provide two examples of such protocols. A PCR employing a thermostable ligase in addition to a thermostable polymerase also may be used to incorporate a phosphorylated mutagenic oligonucleotide into an amplified DNA fragment that may then be cloned into an appropriate cloning or expression vector. The mutagenesis procedure described by Michael (1994) provides an example of one such protocol.

[0253] The preparation of sequence variants of DNA segments using site-directed mutagenesis is provided as a means of producing potentially useful species and is not meant to be limiting as there are other ways in which sequence variants of DNA sequences may be obtained. For example, recombinant vectors encoding the desired promoter sequence may be treated with mutagenic agents, such as hydroxylamine, to obtain sequence variants.

[0254] In addition, an unmodified or modified nucleotide sequence of the present invention can be varied by shuffling the sequence of the invention. To test for a function of variant DNA sequences according to the invention, the sequence of interest is operably linked to a selectable or screenable marker gene and expression of the marker gene is tested in transient expression assays with protoplasts or in stably transformed plants. It is known to the skilled artisan that DNA sequences capable of driving expression of an associated nucleotide sequence are build in a modular way. Accordingly, expression levels from shorter DNA fragments may be different than the one from the longest fragment and may be different from each other. For example, deletion of a down-regulating upstream element will lead to an increase in the expression levels of the associated nucleotide sequence while deletion of an up-regulating element will decrease the expression levels of the associated nucleotide sequence. It is also known to the skilled artisan that deletion of development-specific or a tissue-specific element will lead to a temporally or spatially altered expression profile of the associated nucleotide sequence.

[0255] As used herein, the term “oligonucleotide directed mutagenesis procedure” refers to template-dependent processes and vector-mediated propagation which result in an increase in the concentration of a specific nucleic acid molecule relative to its initial concentration, or in an increase in the concentration of a detectable signal, such as amplification. As used herein, the term “oligonucleotide directed mutagenesis procedure” also is intended to refer to a process that involves the template-dependent extension of a primer molecule. The term template-dependent process refers to nucleic acid synthesis of an RNA or a DNA molecule wherein the sequence of the newly synthesized strand of nucleic acid is dictated by the well-known rules of complementary base pairing (see, for example, Watson and Rarnstad, 1987). Typically, vector mediated methodologies involve the introduction of the nucleic acid fragment into a DNA or RNA vector, the clonal amplification of the vector, and the recovery of the amplified nucleic acid fragment. Examples of such methodologies are provided by U.S. Pat. No. 4,237,224. A number of template dependent processes are available to amplify the target sequences of interest present in a sample, such methods being well known in the art and specifically disclosed herein below.

[0256] Where a clone comprising a promoter has been isolated in accordance with the instant invention, one may wish to delimit the essential promoter regions within the clone. One efficient, targeted means for preparing mutagenizing promoters relies upon the identification of putative regulatory elements within the promoter sequence. This can be initiated by comparison with promoter sequences known to be expressed in similar tissue-specific or developmentally unique manner. Sequences which are shared among promoters with similar expression patterns are likely candidates for the binding of transcription factors and are thus likely elements which confer expression patterns. Confirmation of these putative regulatory elements can be achieved by deletion analysis of each putative regulatory region followed by functional analysis of each deletion construct by assay of a reporter gene which is functionally attached to each construct. As such, once a starting promoter sequence is provided, any of a number of different deletion mutants of the starting promoter could be readily prepared.

[0257] As indicated above, deletion mutants, deletion mutants of the promoter of the invention also could be randomly prepared and then assayed. With this strategy, a series of constructs are prepared, each containing a different portion of the clone (a subclone), and these constructs are then screened for activity. A suitable means for screening for activity is to attach a deleted promoter or intron construct which contains a deleted segment to a selectable or screenable marker, and to isolate only those cells expressing the marker gene. In this way, a number of different, deleted promoter constructs are identified which still retain the desired, or even enhanced, activity. The smallest segment which is required for activity is thereby identified through comparison of the selected constructs. This segment may then be used for the construction of vectors for the expression of exogenous genes.

[0258] B. Marker Genes

[0259] In order to improve the ability to identify transformants, one may desire to employ a selectable or screenable marker gene as, or in addition to, the expressible gene of interest. “Marker genes” are genes that impart a distinct phenotype to cells expressing the marker gene and thus allow such transformed cells to be distinguished from cells that do not have the marker. Such genes may encode either a selectable or screenable marker, depending on whether the marker confers a trait which one can ‘select’ for by chemical means, i.e., through the use of a selective agent (e.g., a herbicide, antibiotic, or the like), or whether it is simply a trait that one can identify through observation or testing, i.e., by ‘screening’ (e.g., the R-locus trait, the green fluorescent protein (GFP)). Of course, many examples of suitable marker genes are known to the art and can be employed in the practice of the invention.

[0260] Included within the terms selectable or screenable marker genes are also genes which encode a “secretable marker” whose secretion can be detected as a means of identifying or selecting for transformed cells. Examples include markers which encode a secretable antigen that can be identified by antibody interaction, or even secretable enzymes which can be detected by their catalytic activity. Secretable proteins fall into a number of classes, including small, diffusible proteins detectable, e.g., by ELISA; small active enzymes detectable in extracellular solution (e.g., alpha-amylase, beta-lactamase, phosphinothricin acetyltransferase); and proteins that are inserted or trapped in the cell wall (e.g., proteins that include a leader sequence such as that found in the expression unit of extensin or tobacco PR-S).

[0261] With regard to selectable secretable markers, the use of a gene that encodes a protein that becomes sequestered in the cell wall, and which protein includes a unique epitope is considered to be particularly advantageous. Such a secreted antigen marker would ideally employ an epitope sequence that would provide low background in plant tissue, a promoter-leader sequence that would impart efficient expression and targeting across the plasma membrane, and would produce protein that is bound in the cell wall and yet accessible to antibodies. A normally secreted wall protein modified to include a unique epitope would satisfy all such requirements.

[0262] One example of a protein suitable for modification in this manner is extensin, or hydroxyproline rich glycoprotein (HPRG). For example, the maize HPRG (Steifel et al., 1990) molecule is well characterized in terms of molecular biology, expression and protein structure. However, any one of a variety of ultilane and/or glycine-rich wall proteins (Keller et al., 1989) could be modified by the addition of an antigenic site to create a screenable marker.

[0263] One exemplary embodiment of a secretable screenable marker concerns the use of a maize sequence encoding the wall protein HPRG, modified to include a 15 residue epitope from the pro-region of murine interleukin, however, virtually any detectable epitope may be employed in such embodiments, as selected from the extremely wide variety of antigen-antibody combinations known to those of skill in the art. The unique extracellular epitope can then be straightforwardly detected using antibody labeling in conjunction with chromogenic or fluorescent adjuncts.

[0264] Elements of the present disclosure may be exemplified in detail through the use of the bar and/or GUS genes, and also through the use of various other markers. Of course, in light of this disclosure, numerous other possible selectable and/or screenable marker genes will be apparent to those of skill in the art in addition to the one set forth hereinbelow. Therefore, it will be understood that the following discussion is exemplary rather than exhaustive. In light of the techniques disclosed herein and the general recombinant techniques which are known in the art, the present invention renders possible the introduction of any gene, including marker genes, into a recipient cell to generate a transformed plant.

[0265] 1. Selectable Markers

[0266] Possible selectable markers for use in connection with the present invention include, but are not limited to, a neo gene which codes for kanamycin resistance and can be selected for using kanamycin, G418, paromomycin, and the like; a bar gene which codes for bialaphos or phosphinothricin resistance; a gene which encodes an altered EPSP synthase protein (Hinchee et al., 1988) thus conferring glyphosate resistance; a nitrilase gene such as bxn from Klebsiella ozaenae which confers resistance to bromoxynil (Stalker et al., 1988); a mutant acetolactate synthase gene (ALS) which confers resistance to imidazolinone, sulfonylurea or other ALS-inhibiting chemicals (European Patent Application 154,204, 1985); a methotrexate-resistant DHFR gene (Thillet et al., 1988); a dalapon dehalogenase gene that confers resistance to the herbicide dalapon; a mutated anthranilate synthase gene that confers resistance to 5-methyl tryptophan. Preferred selectable marker genes encode phosphinothricin acetyltransferase; glyphosate resistant EPSPS, aminoglycoside phosphotransferase; hygromycin phosphotransferase, or neomycin phosphotransferase. Where a mutant EPSP synthase gene is employed, additional benefit may be realized through the incorporation of a suitable chloroplast transit peptide, CTP (European Patent Application 0,218,571, 1987).

[0267] An illustrative embodiment of a selectable marker gene capable of being used in systems to select transformants is the genes that encode the enzyme phosphinothricin acetyltransferase, such as the bar gene from Streptomyces hygroscopicus or the pat gene from Streptomyces viridochromogenes. The enzyme phosphinothricin acetyl transferase (PAT) inactivates the active ingredient in the herbicide bialaphos, phosphinothricin (PPT). PPT inhibits glutamine synthetase, (Murakami et al., 1986; Twell et al., 1989) causing rapid accumulation of ammonia and cell death. The success in using this selective system in conjunction with monocots was particularly surprising because of the major difficulties which have been reported in transformation of cereals.

[0268] Where one desires to employ a bialaphos resistance gene in the practice of the invention, a particularly useful gene for this purpose is the bar or pat genes obtainable from species of Streptomyces (e.g., ATCC No. 21,705). The cloning of the bar gene has been described (Murakami et al., 1986; Thompson et al., 1987) as has the use of the bar gene in the context of plants other than monocots (De Block et al., 1987; De Block et al., 1989).

[0269] Selection markers resulting in positive selection, such as a phosphomannose isomerase gene, as described in patent application WO 93/05163, may also be used. Alternative genes to be used for positive selection are described in WO 94/20627 and encode xyloisomerases and phosphomanno-isomerases such as mannose-6-phosphate isomerase and mannose-1-phosphate isomerase; phosphomanno mutase; mannose epimerases such as those which convert carbohydrates to mannose or mannose to carbohydrates such as glucose or galactose; phosphatases such as mannose or xylose phosphatase, mannose-6-phosphatase and mannose-1-phosphatase, and permeases which are involved in the transport of mannose, or a derivative, or a precursor thereof into the cell. Transformed cells are identified without damaging or killing the non-transformed cells in the population and without co-introduction of antibiotic or herbicide resistance genes. As described in WO 93/05163, in addition to the fact that the need for antibiotic or herbicide resistance genes is eliminated, it has been shown that the positive selection method is often far more efficient than traditional negative selection.

[0270] 2. Screenable Markers

[0271] Screenable markers that may be employed include, but are not limited to, a beta-glucuronidase (GUS) or uidA gene which encodes an enzyme for which various chromogenic substrates are known; an R-locus gene, which encodes a product that regulates the production of anthocyanin pigments (red color) in plant tissues (Dellaporta et al., 1988); a beta-lactamase gene (Sutcliffe, 1978), which encodes an enzyme for which various chromogenic substrates are known (e.g., PADAC, a chromogenic cephalosporin); a xylE gene (Zukowsky et al., 1983) which encodes a catechol dioxygenase that can convert chromogenic catechols; an α-amylase gene (Ikuta et al., 1990); a tyrosinase gene (Katz et al., 1983) which encodes an enzyme capable of oxidizing tyrosine to DOPA and dopaquinone which in turn condenses to form the easily detectable compound melanin; a P-galactosidase gene, which encodes an enzyme for which there are chromogenic substrates; a luciferase (lux) gene (Ow et al., 1986), which allows for bioluminescence detection; or even an aequorin gene (Prasher et al., 1985), which may be employed in calcium-sensitive bioluminescence detection, or a green fluorescent protein gene (Niedz et al., 1995).

[0272] Genes from the maize R gene complex are contemplated to be particularly useful as screenable markers. The R gene complex in maize encodes a protein that acts to regulate the production of anthocyanin pigments in most seed and plant tissue. A gene from the R gene complex was applied to maize transformation, because the expression of this gene in transformed cells does not harm the cells. Thus, an R gene introduced into such cells will cause the expression of a red pigment and, if stably incorporated, can be visually scored as a red sector. If a maize line is carries dominant ultila for genes encoding the enzymatic intermediates in the anthocyanin biosynthetic pathway (C2, A1, A2, Bz1 and Bz2) (Roth et al., 1990), but carries a recessive allele at the R locus, transformation of any cell from that line with R will result in red pigment formation. Exemplary lines include Wisconsin 22 which contains the rg-Stadler allele and TR112, a K55 derivative which is r-g, b, P1. Alternatively any genotype of maize can be utilized if the C1 and R alleles are introduced together.

[0273] It is further proposed that R gene regulatory regions may be employed in chimeric constructs in order to provide mechanisms for controlling the expression of chimeric genes. More diversity of phenotypic expression is known at the R locus than at any other locus (Coe et al., 1988). It is contemplated that regulatory regions obtained from regions 5′ to the structural R gene would be valuable in directing the expression of genes, e.g., insect resistance, drought resistance, herbicide tolerance or other protein coding regions. For the purposes of the present invention, it is believed that any of the various R gene family members may be successfully employed (e.g., P, S, Lc, etc.). However, the most preferred will generally be Sn (particularly Sn:bol3). Sn is a dominant member of the R gene complex and is functionally similar to the R and B loci in that Sn controls the tissue specific deposition of anthocyanin pigments in certain seedling and plant cells, therefore, its phenotype is similar to R.

[0274] A further screenable marker contemplated for use in the present invention is firefly luciferase, encoded by the lux gene. The presence of the lux gene in transformed cells may be detected using, for example, X-ray film, scintillation counting, fluorescent spectrophotometry, low-light video cameras, photon counting cameras or multiwell luminometry. It is also envisioned that this system may be developed for populational screening for bioluminescence, such as on tissue culture plates, or even for whole plant screening. Where use of a screenable marker gene such as lux or GFP is desired, benefit may be realized by creating a gene fusion between the screenable marker gene and a selectable marker gene, for example, a GFP-NPTII gene fusion. This could allow, for example, selection of transformed cells followed by screening of transgenic plants or seeds.

[0275] C. Exogenous Genes for Modification of Plant Phenotypes

[0276] Genes of interest are reflective of the commercial markets and interests of those involved in the development of the crop. Crops and markets of interest changes, and as developing nations open up world markets, new crops and technologies will also emerge. In addition, as the understanding of agronomic traits and characteristics such as yield and heterosis increase, the choice of genes for transformation will change accordingly. General categories of genes of interest include, for example, those genes involved in information, such as zinc fingers, those involved in communication, such as kinases, and those involved in housekeeping, such as heat shock proteins. More specific categories of transgenes, for example, include genes encoding important traits for agronomics, insect resistance, disease resistance, herbicide resistance, sterility, grain characteristics, and commercial products. Genes of interest include, generally, those involved in starch, oil, carbohydrate, or nutrient metabolism, as well as those affecting kernel size, sucrose loading, zinc finger proteins, see, e.g., U.S. Pat. No. 5,789,538, WO 99/48909; WO 99/45132; WO 98/53060; WO 98/53057; WO 98/53058; WO 00/23464; WO 95/19431; and WO 98/54311, and the like.

[0277] One skilled in the art recognizes that the expression level and regulation of a transgene in a plant can vary significantly from line to line. Thus, one has to test several lines to find one with the desired expression level and regulation. Once a line is identified with the desired regulation specificity of a chimeric Cre transgene, it can be crossed with lines carrying different inactive replicons or inactive transgene for activation.

[0278] Other sequences which may be linked to the gene of interest which encodes a polypeptide are those which can target to a specific organelle, e.g., to the mitochondria, nucleus, or plastid, within the plant cell. Targeting can be achieved by providing the polypeptide with an appropriate targeting peptide sequence, such as a secretory signal peptide (for secretion or cell wall or membrane targeting, a plastid transit peptide, a chloroplast transit peptide, e.g., the chlorophyll a/b binding protein, a mitochondrial target peptide, a vacuole targeting peptide, or a nuclear targeting peptide, and the like. For example, the small subunit of ribulose bisphosphate carboxylase transit peptide, the EPSPS transit peptide or the dihydrodipicolinic acid synthase transit peptide may be used. For examples of plastid organelle targeting sequences (see WO 00/12732). Plastids are a class of plant organelles derived from proplastids and include chloroplasts, leucoplasts, aravloplasts, and chromoplasts. The plastids are major sites of biosynthesis in plants. In addition to photosynthesis in the chloroplast, plastids are also sites of lipid biosynthesis, nitrate reduction to ammonium, and starch storage. And while plastids contain their own circular genome, most of the proteins localized to the plastids are encoded by the nuclear genome and are imported into the organelle from the cytoplasm.

[0279] Transgenes used with the present invention will often be genes that direct the expression of a particular protein or polypeptide product, but they may also be non-expressible DNA segments, e.g., transposons such as Ds that do no direct their own transposition. As used herein, an “expressible gene” is any gene that is capable of being transcribed into RNA (e.g., mRNA, antisense RNA, etc.) or translated into a protein, expressed as a trait of interest, or the like, etc., and is not limited to selectable, screenable or non-selectable marker genes. The invention also contemplates that, where both an expressible gene that is not necessarily a marker gene is employed in combination with a marker gene, one may employ the separate genes on either the same or different DNA segments for transformation. In the latter case, the different vectors are delivered concurrently to recipient cells to maximize cotransformation.

[0280] The choice of the particular DNA segments to be delivered to the recipient cells will often depend on the purpose of the transformation. One of the major purposes of transformation of crop plants is to add some commercially desirable, agronomically important traits to the plant. Such traits include, but are not limited to, herbicide resistance or tolerance; insect resistance or tolerance; disease resistance or tolerance (viral, bacterial, fungal, nematode); stress tolerance and/or resistance, as exemplified by resistance or tolerance to drought, heat, chilling, freezing, excessive moisture, salt stress; oxidative stress; increased yields; food content and makeup; physical appearance; male sterility; drydown; standability; prolificacy; starch properties; oil quantity and quality; and the like. One may desire to incorporate one or more genes conferring any such desirable trait or traits, such as, for example, a gene or genes encoding pathogen resistance.

[0281] In certain embodiments, the present invention contemplates the transformation of a recipient cell with more than one advantageous transgene. Two or more transgenes can be supplied in a single transformation event using either distinct transgene-encoding vectors, or using a single vector incorporating two or more gene coding sequences. For example, plasmids bearing the bar and aroA expression units in either convergent, divergent, or colinear orientation, are considered to be particularly useful. Further preferred combinations are those of an insect resistance gene, such as a Bt gene, along with a protease inhibitor gene such as pinII, or the use of bar in combination with either of the above genes. Of course, any two or more transgenes of any description, such as those conferring herbicide, insect, disease (viral, bacterial, fungal, nematode) or drought resistance, male sterility, drydown, standability, prolificacy, starch properties, oil quantity and quality, or those increasing yield or nutritional quality may be employed as desired.

[0282] 1. Herbicide Resistance

[0283] The genes encoding phosphinothricin acetyltransferase (bar and pat), glyphosate tolerant EPSP synthase genes, the glyphosate degradative enzyme gene gox encoding glyphosate oxidoreductase, deh (encoding a dehalogenase enzyme that inactivates dalapon), herbicide resistant (e.g., sulfonylurea and imidazolinone) acetolactate synthase, and bxn genes (encoding a nitrilase enzyme that degrades bromoxynil) are good examples of herbicide resistant genes for use in transformation. The bar and pat genes code for an enzyme, phosphinothricin acetyltransferase (PAT), which inactivates the herbicide phosphinothricin and prevents this compound from inhibiting glutamine synthetase enzymes. The enzyme 5-enolpyruvylshikimate 3-phosphate synthase (EPSP Synthase), is normally inhibited by the herbicide N-(phosphonomethyl)glycine (glyphosate). However, genes are known that encode glyphosate-resistant EPSP Synthase enzymes.

[0284] These genes are particularly contemplated for use in monocot transformation. The deh gene encodes the enzyme dalapon dehalogenase and confers resistance to the herbicide dalapon. The bxn gene codes for a specific nitrilase enzyme that converts bromoxynil to a non-herbicidal degradation product.

[0285] 2. Insect Resistance

[0286] An important aspect of the present invention concerns the introduction of insect resistance-conferring genes into plants. Potential insect resistance genes which can be introduced include Bacillus thuringiensis crystal toxin genes or Bt genes (Watrud et al., 1985). Bt genes may provide resistance to lepidopteran or coleopteran pests such as European Corn Borer (ECB) and corn rootworm (CRW). Preferred Bt toxin genes for use in such embodiments include the CryIA(b) and CryIA(c) genes. Endotoxin genes from other species of B. thuringiensis which affect insect growth or development may also be employed in this regard.

[0287] The poor expression of Bt toxin genes in plants is a well-documented phenomenon, and the use of different promoters, fusion proteins, and leader sequences has not led to significant increases in Bt protein expression (Vaeck et al., 1989; Barton et al., 1987). It is therefore contemplated that the most advantageous Bt genes for use in the transformation protocols disclosed herein will be those in which the coding sequence has been modified to effect increased expression in plants, and more particularly, those in which maize preferred codons have been used. Examples of such modified Bt toxin genes include the variant Bt CryIA(b) gene termed Iab6 (Perlak et al., 1991) and the synthetic CryIA(c) genes termed 1800a and 1800b.

[0288] Protease inhibitors may also provide insect resistance (Johnson et al., 1989), and will thus have utility in plant transformation. The use of a protease inhibitor II gene, pinII, from tomato or potato is envisioned to be particularly useful. Even more advantageous is the use of a pinII gene in combination with a Bt toxin gene, the combined effect of which has been discovered by the present inventors to produce synergistic insecticidal activity. Other genes which encode inhibitors of the insects' digestive system, or those that encode enzymes or co-factors that facilitate the production of inhibitors, may also be useful. This group may be exemplified by oryzacystatin and amylase inhibitors, such as those from wheat and barley.

[0289] Also, genes encoding lectins may confer additional or alternative insecticide properties. Lectins (originally termed phytohemagglutinins) are multivalent carbohydrate-binding proteins which have the ability to agglutinate red blood cells from a range of species. Lectins have been identified recently as insecticidal agents with activity against weevils, ECB and rootworm (Murdock et al., 1990; Czapla and Lang, 1990). Lectin genes contemplated to be useful include, for example, barley and wheat germ agglutinin (WGA) and rice lectins (Gatehouse et al., 1984), with WGA being preferred.

[0290] Genes controlling the production of large or small polypeptides active against insects when introduced into the insect pests, such as, e.g., lytic peptides, peptide hormones and toxins and venoms, form another aspect of the invention. For example, it is contemplated that the expression of juvenile hormone esterase, directed towards specific insect pests, may also result in insecticidal activity, or perhaps cause cessation of metamorphosis (Hammock et al., 1990).

[0291] Transgenic plants expressing genes which encode enzymes that affect the integrity of the insect cuticle form yet another aspect of the invention. Such genes include those encoding, e.g., chitinase, proteases, lipases and also genes for the production of nikkomycin, a compound that inhibits chitin synthesis, the introduction of any of which is contemplated to produce insect resistant maize plants. Genes that code for activities that affect insect molting, such those affecting the production of ecdysteroid UDP-glucosyl transferase, also fall within the scope of the useful transgenes of the present invention.

[0292] Genes that code for enzymes that facilitate the production of compounds that reduce the nutritional quality of the host plant to insect pests are also encompassed by the present invention. It may be possible, for instance, to confer insecticidal activity on a plant by altering its sterol composition. Sterols are obtained by insects from their diet and are used for hormone synthesis and membrane stability. Therefore alterations in plant sterol composition by expression of novel genes, e.g., those that directly promote the production of undesirable sterols or those that convert desirable sterols into undesirable forms, could have a negative effect on insect growth and/or development and hence endow the plant with insecticidal activity. Lipoxygenases are naturally occurring plant enzymes that have been shown to exhibit anti-nutritional effects on insects and to reduce the nutritional quality of their diet. Therefore, further embodiments of the invention concern transgenic plants with enhanced lipoxygenase activity which may be resistant to insect feeding.

[0293] The present invention also provides methods and compositions by which to achieve qualitative or quantitative changes in plant secondary metabolites. One example concerns transforming plants to produce DIMBOA which, it is contemplated, will confer resistance to European corn borer, rootworm and several other maize insect pests. Candidate genes that are particularly considered for use in this regard include those genes at the bx locus known to be involved in the synthetic DIMBOA pathway (Dunn et al., 1981). The introduction of genes that can regulate the production of maysin, and genes involved in the production of dhurrin in sorghum, is also contemplated to be of use in facilitating resistance to earworm and rootworm, respectively.

[0294] Tripsacum dactyloides is a species of grass that is resistant to certain insects, including corn root worm. It is anticipated that genes encoding proteins that are toxic to insects or are involved in the biosynthesis of compounds toxic to insects will be isolated from Tripsacum and that these novel genes will be useful in conferring resistance to insects. It is known that the basis of insect resistance in Tripsacum is genetic, because said resistance has been transferred to Zea mays via sexual crosses (Branson and Guss, 1972).

[0295] Further genes encoding proteins characterized as having potential insecticidal activity may also be used as transgenes in accordance herewith. Such genes include, for example, the cowpea trypsin inhibitor (CpTI; Hilder et al., 1987) which may be used as a rootworm deterrent; genes encoding avermectin (Campbell, 1989; Ikeda et al., 1987) which may prove particularly useful as a corn rootworm deterrent; ribosome inactivating protein genes; and even genes that regulate plant structures. Transgenic maize including anti-insect antibody genes and genes that code for enzymes that can covert a non-toxic insecticide (pro-insecticide) applied to the outside of the plant into an insecticide inside the plant are also contemplated.

[0296] 3. Environment or Stress Resistance

[0297] Improvement of a plant's ability to tolerate various environmental stresses such as, but not limited to, drought, excess moisture, chilling, freezing, high temperature, salt, and oxidative stress, can also be effected through expression of heterologous, or overexpression of homologous genes. Benefits may be realized in terms of increased resistance to freezing temperatures through the introduction of an “antifreeze” protein such as that of the Winter Flounder (Cutler et al., 1989) or synthetic gene derivatives thereof. Improved chilling tolerance may also be conferred through increased expression of glycerol-3-phosphate acetyltransferase in chloroplasts (Murata et al., 1992; Wolter et al., 1992). Resistance to oxidative stress (often exacerbated by conditions such as chilling temperatures in combination with high light intensities) can be conferred by expression of superoxide dismutase (Gupta et al., 1993), and may be improved by glutathione reductase (Bowler et al., 1992). Such strategies may allow for tolerance to freezing in newly emerged fields as well as extending later maturity higher yielding varieties to earlier relative maturity zones.

[0298] Expression of novel genes that favorably effect plant water content, total water potential, osmotic potential, and turgor can enhance the ability of the plant to tolerate drought. As used herein, the terms “drought resistance” and “drought tolerance” are used to refer to a plants increased resistance or tolerance to stress induced by a reduction in water availability, as compared to normal circumstances, and the ability of the plant to function and survive in lower-water environments, and perform in a relatively superior manner. In this aspect of the invention it is proposed, for example, that the expression of a gene encoding the biosynthesis of osmotically-active solutes can impart protection against drought. Within this class of genes are DNAs encoding mannitol dehydrogenase (Lee and Saier, 1982) and trehalose-6-phosphate synthase (Kaasen et al., 1992). Through the subsequent action of native phosphatases in the cell or by the introduction and coexpression of a specific phosphatase, these introduced genes will result in the accumulation of either mannitol or trehalose, respectively, both of which have been well documented as protective compounds able to mitigate the effects of stress. Mannitol accumulation in transgenic tobacco has been verified and preliminary results indicate that plants expressing high levels of this metabolite are able to tolerate an applied osmotic stress (Tarczynski et al., cited supra (1992), 1993).

[0299] Similarly, the efficacy of other metabolites in protecting either enzyme function (e.g. alanopine or propionic acid) or membrane integrity (e.g., alanopine) has been documented (Loomis et al., 1989), and therefore expression of gene encoding the biosynthesis of these compounds can confer drought resistance in a manner similar to or complimentary to mannitol. Other examples of naturally occurring metabolites that are osmotically active and/or provide some direct protective effect during drought and/or desiccation include sugars and sugar derivatives such as fructose, erythritol (Coxson et al., 1992), sorbitol, dulcitol (Karsten et al., 1992), glucosylglycerol (Reed et al., 1984; Erdmann et al., 1992), sucrose, stachyose (Koster and Leopold, 1988; Blackman et al., 1992), ononitol and pinitol (Vernon and Bohnert, 1992), and raffinose (Bemal-Lugo and Leopold, 1992). Other osmotically active solutes which are not sugars include, but are not limited to, proline and glycine-betaine (Wyn-Jones and Storey, 1981). Continued canopy growth and increased reproductive fitness during times of stress can be augmented by introduction and expression of genes such as those controlling the osmotically active compounds discussed above and other such compounds, as represented in one exemplary embodiment by the enzyme myoinositol O-methyltransferase.

[0300] It is contemplated that the expression of specific proteins may also increase drought tolerance. Three classes of Late Embryogenic Proteins have been assigned based on structural similarities (see Dure et al., 1989). All three classes of these proteins have been demonstrated in maturing (i.e., desiccating) seeds. Within these 3 types of proteins, the Type-II (dehydrin-type) have generally been implicated in drought and/or desiccation tolerance in vegetative plant parts (i.e. Mundy and Chua, 1988; Piatkowski et al., 1990; Yamaguchi-Shinozaki et al., 1992). Recently, expression of a Type-III LEA (HVA-1) in tobacco was found to influence plant height, maturity and drought tolerance (Fitzpatrick, 1993). Expression of structural genes from all three groups may therefore confer drought tolerance. Other types of proteins induced during water stress include thiol proteases, aldolases and transmembrane transporters (Guerrero et al., 1990), which may confer various protective and/or repair-type functions during drought stress. The expression of a gene that effects lipid biosynthesis and hence membrane composition can also be useful in conferring drought resistance on the plant.

[0301] Many genes that improve drought resistance have complementary modes of action. Thus, combinations of these genes might have additive and/or synergistic effects in improving drought resistance in plants. Many of these genes also improve freezing tolerance (or resistance); the physical stresses incurred during freezing and drought are similar in nature and may be mitigated in similar fashion. Benefit may be conferred via constitutive expression of these genes, but the preferred means of expressing these novel genes may be through the use of a turgor-induced promoter (such as the promoters for the turgor-induced genes described in Guerrero et al. 1990 and Shagan et al., 1993). Spatial and temporal expression patterns of these genes may enable maize to better withstand stress.

[0302] Expression of genes that are involved with specific morphological traits that allow for increased water extractions from drying soil would be of benefit. For example, introduction and expression of genes that alter root characteristics may enhance water uptake. Expression of genes that enhance reproductive fitness during times of stress would be of significant value. For example, expression of DNAs that improve the synchrony of pollen shed and receptiveness of the female flower parts, i.e., silks, would be of benefit. In addition, expression of genes that minimize kernel abortion during times of stress would increase the amount of grain to be harvested and hence be of value. Regulation of cytokinin levels in monocots, such as maize, by introduction and expression of an isopentenyl transferase gene with appropriate regulatory sequences can improve monocot stress resistance and yield (Gan et al., Science, 270:1986 (1995)).

[0303] Given the overall role of water in determining yield, it is contemplated that enabling plants to utilize water more efficiently, through the introduction and expression of novel genes, will improve overall performance even when soil water availability is not limiting. By introducing genes that improve the ability of plants to maximize water usage across a full range of stresses relating to water availability, yield stability or consistency of yield performance may be realized.

[0304] 4. Disease Resistance

[0305] It is proposed that increased resistance to diseases may be realized through introduction of genes into plants period. It is possible to produce resistance to diseases caused by viruses, bacteria, fungi, root pathogens, insects and nematodes. It is also contemplated that control of mycotoxin producing organisms may be realized through expression of introduced genes.

[0306] Resistance to viruses may be produced through expression of novel genes. For example, it has been demonstrated that expression of a viral coat protein in a transgenic plant can impart resistance to infection of the plant by that virus and perhaps other closely related viruses (Cuozzo et al., 1988, Hemenway et al., 1988, Abel et al., 1986). It is contemplated that expression of antisense genes targeted at essential viral functions may impart resistance to said virus. For example, an antisense gene targeted at the gene responsible for replication of viral nucleic acid may inhibit said replication and lead to resistance to the virus. It is believed that interference with other viral functions through the use of antisense genes may also increase resistance to viruses. Further it is proposed that it may be possible to achieve resistance to viruses through other approaches, including, but not limited to the use of satellite viruses.

[0307] It is proposed that increased resistance to diseases caused by bacteria and fungi may be realized through introduction of novel genes. It is contemplated that genes encoding so-called “peptide antibiotics,” pathogenesis related (PR) proteins, toxin resistance, and proteins affecting host-pathogen interactions such as morphological characteristics will be useful. Peptide antibiotics are polypeptide sequences which are inhibitory to growth of bacteria and other microorganisms. For example, the classes of peptides referred to as cecropins and magainins inhibit growth of many species of bacteria and fungi. It is proposed that expression of PR proteins in plants may be useful in conferring resistance to bacterial disease. These genes are induced following pathogen attack on a host plant and have been divided into at least five classes of proteins (Bol et al., 1990). Included amongst the PR proteins are beta-1,3-glucanases, chitinases, and osmotin and other proteins that are believed to function in plant resistance to disease organisms. Other genes have been identified that have antifungal properties, e.g., UDA (stinging nettle lectin) and hevein (Broakgert et al., 1989; Barkai-Golan et al., 1978). It is known that certain plant diseases are caused by the production of phytotoxins. Resistance to these diseases could be achieved through expression of a novel gene that encodes an enzyme capable of degrading or otherwise inactivating the phytotoxin. Expression novel genes that alter the interactions between the host plant and pathogen may be useful in reducing the ability the disease organism to invade the tissues of the host plant, e.g., an increase in the waxiness of the leaf cuticle or other morphological characteristics.

[0308] Plant parasitic nematodes are a cause of disease in many plants. It is proposed that it would be possible to make the plant resistant to these organisms through the expression of novel genes. It is anticipated that control of nematode infestations would be accomplished by altering the ability of the nematode to recognize or attach to a host plant and/or enabling the plant to produce nematicidal compounds, including but not limited to proteins.

[0309] 5. Mycotoxin Reduction/Elimination

[0310] Production of mycotoxins, including aflatoxin and fumonisin, by fungi associated with plants is a significant factor in rendering the grain not useful. These fungal organisms do not cause disease symptoms and/or interfere with the growth of the plant, but they produce chemicals (mycotoxins) that are toxic to animals. Inhibition of the growth of these fungi would reduce the synthesis of these toxic substances and, therefore, reduce grain losses due to mycotoxin contamination. Novel genes may be introduced into plants that would inhibit synthesis of the mycotoxin without interfering with fungal growth. Expression of a novel gene which encodes an enzyme capable of rendering the mycotoxin nontoxic would be useful in order to achieve reduced mycotoxin contamination of grain. The result of any of the above mechanisms would be a reduced presence of mycotoxins on grain.

[0311] 6. Grain Composition or Quality

[0312] Genes may be introduced into plants, particularly commercially important cereals such as maize, wheat or rice, to improve the grain for which the cereal is primarily grown. A wide range of novel transgenic plants produced in this manner may be envisioned depending on the particular end use of the grain.

[0313] For example, the largest use of maize grain is for feed or food. Introduction of genes that alter the composition of the grain may greatly enhance the feed or food value. The primary components of maize grain are starch, protein, and oil. Each of these primary components of maize grain may be improved by altering its level or composition. Several examples may be mentioned for illustrative purposes but in no way provide an exhaustive list of possibilities.

[0314] The protein of many cereal grains is suboptimal for feed and food purposes especially when fed to pigs, poultry, and humans. The protein is deficient in several amino acids that are essential in the diet of these species, requiring the addition of supplements to the grain. Limiting essential amino acids may include lysine, methionine, tryptophan, threonine, valine, arginine, and histidine. Some amino acids become limiting only after the grain is supplemented with other inputs for feed formulations. For example, when the grain is supplemented with soybean meal to meet lysine requirements, methionine becomes limiting. The levels of these essential amino acids in seeds and grain may be elevated by mechanisms which include, but are not limited to, the introduction of genes to increase the biosynthesis of the amino acids, decrease the degradation of the amino acids, increase the storage of the amino acids in proteins, or increase transport of the amino acids to the seeds or grain.

[0315] One mechanism for increasing the biosynthesis of the amino acids is to introduce genes that deregulate the amino acid biosynthetic pathways such that the plant can no longer adequately control the levels that are produced. This may be done by deregulating or bypassing steps in the amino acid biosynthetic pathway which are normally regulated by levels of the amino acid end product of the pathway. Examples include the introduction of genes that encode deregulated versions of the enzymes aspartokinase or dihydrodipicolinic acid (DHDP)-synthase for increasing lysine and threonine production, and anthranilate synthase for increasing tryptophan production. Reduction of the catabolism of the amino acids may be accomplished by introduction of DNA sequences that reduce or eliminate the expression of genes encoding enzymes that catalyse steps in the catabolic pathways such as the enzyme lysine-ketoglutarate reductase.

[0316] The protein composition of the grain may be altered to improve the balance of amino acids in a variety of ways including elevating expression of native proteins, decreasing expression of those with poor composition, changing the composition of native proteins, or introducing genes encoding entirely new proteins possessing superior composition. DNA may be introduced that decreases the expression of members of the zein family of storage proteins. This DNA may encode ribozymes or antisense sequences directed to impairing expression of zein proteins or expression of regulators of zein expression such as the opaque-2 gene product. The protein composition of the grain may be modified through the phenomenon of cosuppression, i.e., inhibition of expression of an endogenous gene through the expression of an identical structural gene or gene fragment introduced through transformation (Goring et al., 1991). Additionally, the introduced DNA may encode enzymes which degrade seines. The decreases in zein expression that are achieved may be accompanied by increases in proteins with more desirable amino acid composition or increases in other major seed constituents such as starch. Alternatively, a chimeric gene may be introduced that comprises a coding sequence for a native protein of adequate amino acid composition such as for one of the globulin proteins or 10 kD zein of maize and a promoter or other regulatory sequence designed to elevate expression of said protein. The coding sequence of said gene may include additional or replacement codons for essential amino acids. Further, a coding sequence obtained from another species, or, a partially or completely synthetic sequence encoding a completely unique peptide sequence designed to enhance the amino acid composition of the seed may be employed.

[0317] The introduction of genes that alter the oil content of the grain may be of value. Increases in oil content may result in increases in metabolizable energy content and density of the seeds for uses in feed and food. The introduced genes may encode enzymes that remove or reduce rate-limitations or regulated steps in fatty acid or lipid biosynthesis. Such genes may include, but are not limited to, those that encode acetyl-CoA carboxylase, ACP-acyltransferase, beta-ketoacyl-ACP synthase, plus other well known fatty acid biosynthetic activities. Other possibilities are genes that encode proteins that do not possess enzymatic activity such as acyl carrier protein. Additional examples include 2-acetyltransferase, oleosin pyruvate dehydrogenase complex, acetyl CoA synthetase, ATP citrate lyase, ADP-glucose pyrophosphorylase and genes of the carnitine-CoA-acetyl-CoA shuttles. It is anticipated that expression of genes related to oil biosynthesis will be targeted to the plastid, using a plastid transit peptide sequence and preferably expressed in the seed embryo. Genes may be introduced that alter the balance of fatty acids present in the oil providing a more healthful or nutritive feedstuff. The introduced DNA may also encode sequences that block expression of enzymes involved in fatty acid biosynthesis, altering the proportions of fatty acids present in the grain such as described below.

[0318] Genes may be introduced that enhance the nutritive value of the starch component of the grain, for example by increasing the degree of branching, resulting in improved utilization of the starch in cows by delaying its metabolism.

[0319] Besides affecting the major constituents of the grain, genes may be introduced that affect a variety of other nutritive, processing, or other quality aspects of the grain as used for feed or food. For example, pigmentation of the grain may be increased or decreased. Enhancement and stability of yellow pigmentation is desirable in some animal feeds and may be achieved by introduction of genes that result in enhanced production of xanthophylls and carotenes by eliminating rate-limiting steps in their production. Such genes may encode altered forms of the enzymes phytoene synthase, phytoene desaturase, or lycopene synthase. Alternatively, unpigmented white corn is desirable for production of many food products and may be produced by the introduction of DNA which blocks or eliminates steps in pigment production pathways.

[0320] Feed or food comprising some cereal grains possesses insufficient quantities of vitamins and must be supplemented to provide adequate nutritive value. Introduction of genes that enhance vitamin biosynthesis in seeds may be envisioned including, for example, vitamins A, E, B₁₂, choline, and the like. For example, maize grain also does not possess sufficient mineral content for optimal nutritive value. Genes that affect the accumulation or availability of compounds containing phosphorus, sulfur, calcium, manganese, zinc, and iron among others would be valuable. An example may be the introduction of a gene that reduced phytic acid production or encoded the enzyme phytase which enhances phytic acid breakdown. These genes would increase levels of available phosphate in the diet, reducing the need for supplementation with mineral phosphate.

[0321] Numerous other examples of improvement of cereals for feed and food purposes might be described. The improvements may not even necessarily involve the grain, but may, for example, improve the value of the grain for silage. Introduction of DNA to accomplish this might include sequences that alter lignin production such as those that result in the “brown midrib” phenotype associated with superior feed value for cattle.

[0322] In addition to direct improvements in feed or food value, genes may also be introduced which improve the processing of grain and improve the value of the products resulting from the processing. The primary method of processing certain grains such as maize is via wetmilling. Maize may be improved though the expression of novel genes that increase the efficiency and reduce the cost of processing such as by decreasing steeping time.

[0323] Improving the value of wetmilling products may include altering the quantity or quality of starch, oil, corn gluten meal, or the components of corn gluten feed. Elevation of starch may be achieved through the identification and elimination of rate limiting steps in starch biosynthesis or by decreasing levels of the other components of the grain resulting in proportional increases in starch. An example of the former may be the introduction of genes encoding ADP-glucose pyrophosphorylase enzymes with altered regulatory activity or which are expressed at higher level. Examples of the latter may include selective inhibitors of, for example, protein or oil biosynthesis expressed during later stages of kernel development.

[0324] The properties of starch may be beneficially altered by changing the ratio of amylose to amylopectin, the size of the starch molecules, or their branching pattern. Through these changes a broad range of properties may be modified which include, but are not limited to, changes in gelatinization temperature, heat of gelatinization, clarity of films and pastes, Theological properties, and the like. To accomplish these changes in properties, genes that encode granule-bound or soluble starch synthase activity or branching enzyme activity may be introduced alone or combination. DNA such as antisense constructs may also be used to decrease levels of endogenous activity of these enzymes. The introduced genes or constructs may possess regulatory sequences that time their expression to specific intervals in starch biosynthesis and starch granule development. Furthermore, it may be advisable to introduce and express genes that result in the in vivo derivatization, or other modification, of the glucose moieties of the starch molecule. The covalent attachment of any molecule may be envisioned, limited only by the existence of enzymes that catalyze the derivatizations and the accessibility of appropriate substrates in the starch granule. Examples of important derivations may include the addition of functional groups such as amines, carboxyls, or phosphate groups which provide sites for subsequent in vitro derivatizations or affect starch properties through the introduction of ionic charges. Examples of other modifications may include direct changes of the glucose units such as loss of hydroxyl groups or their oxidation to aldehyde or carboxyl groups.

[0325] Oil is another product of wetmilling of corn and other grains, the value of which may be improved by introduction and expression of genes. The quantity of oil that can be extracted by wetmilling may be elevated by approaches as described for feed and food above. Oil properties may also be altered to improve its performance in the production and use of cooking oil, shortenings, lubricants or other oil-derived products or improvement of its health attributes when used in the food-related applications. Novel fatty acids may also be synthesized which upon extraction can serve as starting materials for chemical syntheses. The changes in oil properties may be achieved by altering the type, level, or lipid arrangement of the fatty acids present in the oil. This in turn may be accomplished by the addition of genes that encode enzymes that catalyze the synthesis of novel fatty acids and the lipids possessing them or by increasing levels of native fatty acids while possibly reducing levels of precursors. Alternatively DNA sequences may be introduced which slow or block steps in fatty acid biosynthesis resulting in the increase in precursor fatty acid intermediates. Genes that might be added include desaturases, epoxidases, hydratases, dehydratases, and other enzymes that catalyze reactions involving fatty acid intermediates. Representative examples of catalytic steps that might be blocked include the desaturations from stearic to oleic acid and oleic to linolenic acid resulting in the respective accumulations of stearic and oleic acids.

[0326] Improvements in the other major cereal wetmilling products, gluten meal and gluten feed, may also be achieved by the introduction of genes to obtain novel plants. Representative possibilities include but are not limited to those described above for improvement of food and feed value.

[0327] In addition it may further be considered that the plant be used for the production or manufacturing of useful biological compounds that were either not produced at all, or not produced at the same level, in the plant previously. The novel plants producing these compounds are made possible by the introduction and expression of genes by transformation methods. The possibilities include, but are not limited to, any biological compound which is presently produced by any organism such as proteins, nucleic acids, primary and intermediary metabolites, carbohydrate polymers, etc. The compounds may be produced by the plant, extracted upon harvest and/or processing, and used for any presently recognized useful purpose such as pharmaceuticals, fragrances, industrial enzymes to name a few.

[0328] Further possibilities to exemplify the range of grain traits or properties potentially encoded by introduced genes in transgenic plants include grain with less breakage susceptibility for export purposes or larger grit size when processed by dry milling through introduction of genes that enhance gamma-zein synthesis, popcorn with improved popping quality and expansion volume through genes that increase pericarp thickness, corn with whiter grain for food uses though introduction of genes that effectively block expression of enzymes involved in pigment production pathways, and improved quality of alcoholic beverages or sweet corn through introduction of genes which affect flavor such as the shrunken gene (encoding sucrose synthase) for sweet corn.

[0329] 7. Plant Agronomic Characteristics

[0330] Two of the factors determining where plants can be grown are the average daily temperature during the growing season and the length of time between frosts. Within the areas where it is possible to grow a particular plant, there are varying limitations on the maximal time it is allowed to grow to maturity and be harvested. The plant to be grown in a particular area is selected for its ability to mature and dry down to harvestable moisture content within the required period of time with maximum possible yield. Therefore, plant of varying maturities are developed for different growing locations. Apart from the need to dry down sufficiently to permit harvest is the desirability of having maximal drying take place in the field to minimize the amount of energy required for additional drying post-harvest. Also the more readily the grain can dry down, the more time there is available for growth and kernel fill. Genes that influence maturity and/or dry down can be identified and introduced into plant lines using transformation techniques to create new varieties adapted to different growing locations or the same growing location but having improved yield to moisture ratio at harvest. Expression of genes that are involved in regulation of plant development may be especially useful, e.g., the liguleless and rough sheath genes that have been identified in plants.

[0331] Genes may be introduced into plants that would improve standability and other plant growth characteristics. For example, expression of novel genes which confer stronger stalks, improved root systems, or prevent or reduce ear droppage would be of great value to the corn farmer. Introduction and expression of genes that increase the total amount of photoassimilate available by, for example, increasing light distribution and/or interception would be advantageous. In addition the expression of genes that increase the efficiency of photosynthesis and/or the leaf canopy would further increase gains in productivity. Such approaches would allow for increased plant populations in the field.

[0332] Delay of late season vegetative senescence would increase the flow of assimilate into the grain and thus increase yield. Overexpression of genes within plants that are associated with “stay green” or the expression of any gene that delays senescence would achieve be advantageous. For example, a non-yellowing mutant has been identified in Festuca pratensis (Davies et al., 1990). Expression of this gene as well as others may prevent premature breakdown of chlorophyll and thus maintain canopy function.

[0333] 8. Nutrient Utilization

[0334] The ability to utilize available nutrients and minerals may be a limiting factor in growth of many plants. It is proposed that it would be possible to alter nutrient uptake, tolerate pH extremes, mobilization through the plant, storage pools, and availability for metabolic activities by the introduction of novel genes. These modifications would allow a plant to more efficiently utilize available nutrients. It is contemplated that an increase in the activity of, for example, an enzyme that is normally present in the plant and involved in nutrient utilization would increase the availability of a nutrient. An example of such an enzyme would be phytase. It is also contemplated that expression of a novel gene may make a nutrient source available that was previously not accessible, e.g., an enzyme that releases a component of nutrient value from a more complex molecule, perhaps a macromolecule.

[0335] 9. Male Sterility

[0336] Male sterility is useful in the production of hybrid seed. It is proposed that male sterility may be produced through expression of novel genes. For example, it has been shown that expression of genes that encode proteins that interfere with development of the male inflorescence and/or gametophyte result in male sterility. Chimeric ribonuclease genes that express in the anthers of transgenic tobacco and oilseed rape have been demonstrated to lead to male sterility (Mariani et al, 1990).

[0337] For example, a number of mutations were discovered in maize that confer cytoplasmic male sterility. One mutation in particular, referred to as T cytoplasm, also correlates with sensitivity to Southern corn leaf blight. A DNA sequence, designated TURF-13 (Levings, 1990), was identified that correlates with T cytoplasm. It would be possible through the introduction of TURF-13 via transformation to separate male sterility from disease sensitivity. As it is necessary to be able to restore male fertility for breeding purposes and for grain production, it is proposed that genes encoding restoration of male fertility may also be introduced.

[0338] 10. Negative Selectable Markers

[0339] Introduction of genes encoding traits that can be selected against may be useful for eliminating undesirable linked genes. When two or more genes are introduced together by cotransformation, the genes will be linked together on the host chromosome. For example, a gene encoding a Bt gene that confers insect resistance on the plant may be introduced into a plant together with a bar gene that is useful as a selectable marker and confers resistance to the herbicide Ignite® on the plant. However, it may not be desirable to have an insect resistant plant that is also resistant to the herbicide Ignite®. It is proposed that one could also introduce an antisense bar gene that is expressed in those tissues where one does not want expression of the bar gene, e.g., in whole plant parts. Hence, although the bar gene is expressed and is useful as a selectable marker, it is not useful to confer herbicide resistance on the whole plant. The bar antisense gene is a negative selectable marker.

[0340] Negative selection is necessary in order to screen a population of transformants for rare homologous recombinants generated through gene targeting. For example, a homologous recombinant may be identified through the inactivation of a gene that was previously expressed in that cell. The antisense gene to neomycin phosphotransferase II (nptII) has been investigated as a negative selectable marker in tobacco (Nicotiana tabacum) and Arabidopsis thaliana (Xiang and Guerra, 1993). In this example both sense and antisense nptII genes are introduced into a plant through transformation and the resultant plants are sensitive to the antibiotic kanamycin. An introduced gene that integrates into the host cell chromosome at the site of the antisense nptII gene, and inactivates the antisense gene, will make the plant resistant to kanamycin and other aminoglycoside antibiotics. Therefore, rare site specific recombinants may be identified by screening for antibiotic resistance. Similarly, any gene, native to the plant or introduced through transformation, that when inactivated confers resistance to a compound, may be useful as a negative selectable marker.

[0341] It is contemplated that negative selectable markers may also be useful in other ways. One application is to construct transgenic lines in which one could select for transposition to unlinked sites. In the process of tagging it is most common for the transposable element to move to a genetically linked site on the same chromosome. A selectable marker for recovery of rare plants in which transposition has occurred to an unlinked locus would be useful. For example, the enzyme cytosine deaminase may be useful for this purpose (Stouggard, 1993). In the presence of this enzyme the compound 5-fluorocytosine is converted to 5-fluoruracil which is toxic to plant and animal cells. If a transposable element is linked to the gene for the enzyme cytosine deaminase, one may select for transposition to unlinked sites by selecting for transposition events in which the resultant plant is now resistant to 5-fluorocytosine. The parental plants and plants containing transpositions to linked sites will remain sensitive to 5-fluorocytosine. Resistance to 5-fluorocytosine is due to loss of the cytosine deaminase gene through genetic segregation of the transposable element and the cytosine deaminase gene. Other genes that encode proteins that render the plant sensitive to a certain compound will also be useful in this context. For example, T-DNA gene 2 from Agrobacterium tumefaciens encodes a protein that catalyzes the conversion of alpha-naphthalene acetamide (NAM) to alpha-napthalene acetic acid (NAA) renders plant cells sensitive to high concentrations of NAM (Depicker et al., 1988).

[0342] It is also contemplated that negative selectable markers may be useful in the construction of transposon tagging lines. For example, by marking an autonomous transposable element such as Ac, Master Mu, or En/Spn with a negative selectable marker, one could select for transformants in which the autonomous element is not stably integrated into the genome. This would be desirable, for example, when transient expression of the autonomous element is desired to activate in trans the transposition of a defective transposable element, such as Ds, but stable integration of the autonomous element is not desired. The presence of the autonomous element may not be desired in order to stabilize the defective element, i.e., prevent it from further transposing. However, it is proposed that if stable integration of an autonomous transposable element is desired in a plant the presence of a negative selectable marker may make it possible to eliminate the autonomous element during the breeding process.

[0343] 11. Non-Protein-Expressing Sequences

[0344] a. RNA-Expressing

[0345] DNA may be introduced into plants for the purpose of expressing RNA transcripts that function to affect plant phenotype yet are not translated into protein. Two examples are antisense RNA and RNA with ribozyme activity. Both may serve possible functions in reducing or eliminating expression of native or introduced plant genes.

[0346] Genes may be constructed or isolated, which when transcribed, produce antisense RNA that is complementary to all or part(s) of a targeted messenger RNA(s). The antisense RNA reduces production of the polypeptide product of the messenger RNA. The polypeptide product may be any protein encoded by the plant genome. The aforementioned genes will be referred to as antisense genes. An antisense gene may thus be introduced into a plant by transformation methods to produce a novel transgenic plant with reduced expression of a selected protein of interest. For example, the protein may be an enzyme that catalyzes a reaction in the plant. Reduction of the enzyme activity may reduce or eliminate products of the reaction which include any enzymatically synthesized compound in the plant such as fatty acids, amino acids, carbohydrates, nucleic acids and the like. Alternatively, the protein may be a storage protein, such as a zein, or a structural protein, the decreased expression of which may lead to changes in seed amino acid composition or plant morphological changes respectively. The possibilities cited above are provided only by way of example and do not represent the full range of applications.

[0347] Genes may also be constructed or isolated, which when transcribed produce RNA enzymes, or ribozymes, which can act as endoribonucleases and catalyze the cleavage of RNA molecules with selected sequences. The cleavage of selected messenger RNA's can result in the reduced production of their encoded polypeptide products. These genes may be used to prepare novel transgenic plants which possess them. The transgenic plants may possess reduced levels of polypeptides including but not limited to the polypeptides cited above that may be affected by antisense RNA.

[0348] It is also possible that genes may be introduced to produce novel transgenic plants which have reduced expression of a native gene product by a mechanism of cosuppression. It has been demonstrated in tobacco, tomato, and petunia (Goring et al, 1991; Smith et al., 1990; Napoli et al., 1990; van der Krol et al., 1990) that expression of the sense transcript of a native gene will reduce or eliminate expression of the native gene in a manner similar to that observed for antisense genes. The introduced gene may encode all or part of the targeted native protein but its translation may not be required for reduction of levels of that native protein.

[0349] b. Non-RNA-Expressing

[0350] For example, DNA elements including those of transposable elements such as Ds, Ac, or Mu, may be inserted into a gene and cause mutations. These DNA elements may be inserted in order to inactivate (or activate) a gene and thereby “tag” a particular trait. In this instance the transposable element does not cause instability of the tagged mutation, because the utility of the element does not depend on its ability to move in the genome. Once a desired trait is tagged, the introduced DNA sequence may be used to clone the corresponding gene, e.g., using the introduced DNA sequence as a PCR primer together with PCR gene cloning techniques (Shapiro, 1983; Dellaporta et al., 1988). Once identified, the entire gene(s) for the particular trait, including control or regulatory regions where desired may be isolated, cloned and manipulated as desired. The utility of DNA elements introduced into an organism for purposed of gene tagging is independent of the DNA sequence and does not depend on any biological activity of the DNA sequence, i.e., transcription into RNA or translation into protein. The sole function of the DNA element is to disrupt the DNA sequence of a gene.

[0351] It is contemplated that unexpressed DNA sequences, including novel synthetic sequences could be introduced into cells as proprietary “labels” of those cells and plants and seeds thereof. It would not be necessary for a label DNA element to disrupt the function of a gene endogenous to the host organism, as the sole function of this DNA would be to identify the origin of the organism. For example, one could introduce a unique DNA sequence into a plant and this DNA element would identify all cells, plants, and progeny of these cells as having arisen from that labeled source. It is proposed that inclusion of label DNAs would enable one to distinguish proprietary germplasm or germplasm derived from such, from unlabelled germplasm.

[0352] Another possible element which may be introduced is a matrix attachment region element (MAR), such as the chicken lysozyme A element (Stief et al., 1989), which can be positioned around an expressible gene of interest to effect an increase in overall expression of the gene and diminish position dependant effects upon incorporation into the plant genome (Stief et al., 1989; Phi-Van et al., 1990).

III. Transformed (Transgenic) Plants of the Invention and Methods of Preparation

[0353] Plant species may be transformed with the DNA construct of the present invention by the DNA-mediated transformation of plant cell protoplasts and subsequent regeneration of the plant from the transformed protoplasts in accordance with procedures well known in the art.

[0354] Any plant tissue capable of subsequent clonal propagation, whether by organogenesis or embryogenesis, may be transformed with a vector of the present invention. The term “organogenesis,” as used herein, means a process by which shoots and roots are developed sequentially from meristematic centers; the term “embryogenesis,” as used herein, means a process by which shoots and roots develop together in a concerted fashion (not sequentially), whether from somatic cells or gametes. The particular tissue chosen will vary depending on the clonal propagation systems available for, and best suited to, the particular species being transformed. Exemplary tissue targets include leaf disks, pollen, embryos, cotyledons, hypocotyls, megagametophytes, callus tissue, existing meristematic tissue (e.g., apical meristems, axillary buds, and root meristems), and induced meristem tissue (e.g., cotyledon meristem and ultilane meristem).

[0355] Plants of the present invention may take a variety of forms. The plants may be chimeras of transformed cells and non-transformed cells; the plants may be clonal transformants (e.g., all cells transformed to contain the expression cassette); the plants may comprise grafts of transformed and untransformed tissues (e.g., a transformed root stock grafted to an untransformed scion in citrus species). The transformed plants may be propagated by a variety of means, such as by clonal propagation or classical breeding techniques. For example, first generation (or T1) transformed plants may be selfed to give homozygous second generation (or T2) transformed plants, and the T2 plants further propagated through classical breeding techniques. A dominant selectable marker (such as npt II) can be associated with the expression cassette to assist in breeding.

[0356] Thus, the present invention provides a transformed (transgenic) plant cell, in planta or explanta, including a transformed plastid or other organelle, e.g., nucleus, mitochondria or chloroplast. The present invention may be used for transformation of any plant species, including, but not limited to, cells from corn (Zea mays), Brassica sp. (e.g., B. napus, B. rapa, B. juncea), particularly those Brassica species useful as sources of seed oil, alfalfa (Medicago sativa), rice (Oryza sativa), rye (Secale cereale), sorghum (Sorghum bicolor, Sorghum vulgare), millet (e.g., pearl millet (Pennisetum glaucum), proso millet (Panicum miliaceum), foxtail millet (Setaria italica), finger millet (Eleusine coracana)), sunflower (Helianthus annuus), safflower (Carthamus tinctorius), wheat (Triticum aestivum), soybean (Glycine max), tobacco (Nicotiana tabacum), potato (Solanum tuberosum), peanuts (Arachis hypogaea), cotton (Gossypium barbadense, Gossypium hirsutum), sweet potato (Ipomoea batatus), cassaya (Manihot esculenta), coffee (Cofea spp.), coconut (Cocos nucifera), pineapple (Ananas comosus), citrus trees (Citrus spp.), cocoa (Theobroma cacao), tea (Camellia sinensis), banana (Musa spp.), avocado (Persea ultilane), fig (Ficus casica), guava (Psidium guajava), mango (Mangifera indica), olive (Olea europaea), papaya (Carica papaya), cashew (Anacardium occidentale), macadamia (Macadamia integrifolia), almond (Prunus amygdalus), sugar beets (Beta vulgaris), sugarcane (Saccharum spp.), oats, duckweed (Lemna), barley, vegetables, ornamentals, and conifers.

[0357] Duckweed (Lemna, see WO 00/07210) includes members of the family Lemnaceae. There are known four genera and 34 species of duckweed as follows: genus Lemna (L. aequinoctialis, L. disperma, L. ecuadoriensis, L. gibba, L. japonica, L. minor, L. miniscula, L. obscura, L. perpusilla, L. tenera, L. trisulca, L. turionifera, L. valdiviana); genus Spirodela (S. intermedia, S. polyrrhiza, S. punctata); genus Woffia (Wa. Angusta, Wa. Arrhiza, Wa. Australina, Wa. Borealis, Wa. Brasiliensis, Wa. Columbiana, Wa. Elongata, Wa. Globosa, Wa. Microscopica, Wa. Neglecta) and genus Wofiella (Wl. ultila, Wl. ultilanen, Wl. gladiata, Wl. ultila, Wl. lingulata, Wl. repunda, Wl. rotunda, and Wl. neotropica). Any other genera or species of Lemnaceae, if they exist, are also aspects of the present invention. Lemna gibba, Lemna minor, and Lemna miniscula are preferred, with Lemna minor and Lemna miniscula being most preferred. Lemna species can be classified using the taxonomic scheme described by Landolt, Biosystematic Investigation on the Family of Duckweeds: The family of Lemnaceae—A Monograph Study. Geobatanischen Institut ETH, Stiftung Rubel, Zurich (1986)).

[0358] Vegetables within the scope of the invention include tomatoes (Lycopersicon esculentum), lettuce (e.g., Lactuca sativa), green beans (Phaseolus vulgaris), lima beans (Phaseolus limensis), peas (Lathyrus spp.), and members of the genus Cucumis such as cucumber (C. sativus), cantaloupe (C. cantalupensis), and musk melon (C. melo). Ornamentals include azalea (Rhododendron spp.), hydrangea (Macrophylla hydrangea), hibiscus (Hibiscus rosasanensis), roses (Rosa spp.), tulips (Tulipa spp.), daffodils (Narcissus spp.), petunias (Petunia hybrida), carnation (Dianthus caryophyllus), poinsettia (Euphorbia pulcherrima), and chrysanthemum. Conifers that may be employed in practicing the present invention include, for example, pines such as loblolly pine (Pinus taeda), slash pine (Pinus elliotii), ponderosa pine (Pinus ponderosa), lodgepole pine (Pinus contorta), and Monterey pine (Pinus radiata), Douglas-fir (Pseudotsuga menziesii); Western hemlock (Tsuga ultilane); Sitka spruce (Picea glauca); redwood (Sequoia sempervirens); true firs such as silver fir (Abies amabilis) and balsam fir (Abies balsamea); and cedars such as Western red cedar (Thuja plicata) and Ak. yellow-cedar (Chamaecyparis nootkatensis). Leguminous plants include beans and peas. Beans include guar, locust bean, fenugreek, soybean, garden beans, cowpea, mungbean, lima bean, fava bean, lentils, chickpea, etc. Legumes include, but are not limited to, Arachis, e.g., peanuts, Vicia, e.g., crown vetch, hairy vetch, adzuki bean, mung bean, and chickpea, Lupinus, e.g., lupine, trifolium, Phaseolus, e.g., common bean and lima bean, Pisum, e.g., field bean, Melilotus, e.g., clover, Medicago, e.g., alfalfa, Lotus, e.g., trefoil, lens, e.g., lentil, and false indigo. Preferred forage and turf grass for use in the methods of the invention include alfalfa, orchard grass, tall fescue, perennial ryegrass, creeping bent grass, and redtop.

[0359] Papaya, garlic, pea, peach, pepper, petunia, strawberry, sorghum, sweet potato, turnip, safflower, corn, pea, endive, gourd, grape, snap bean, chicory, cotton, tobacco, aubergine, beet, buckwheat, broad bean, nectarine, avocado, mango, banana, groundnut, potato, peanut, lettuce, pineapple, spinach, squash, sugarbeet, sugarcane, sweet corn, chrysanthemum.

[0360] Other plants within the scope of the invention include Acacia, aneth, artichoke, arugula, blackberry, canola, cilantro, clementines, escarole, eucalyptus, fennel, grapefruit, honey dew, jicama, kiwifruit, lemon, lime, mushroom, nut, okra, orange, parsley, persimmon, plantain, pomegranate, poplar, radiata pine, radicchio, Southern pine, sweetgum, tangerine, triticale, vine, yams, apple, pear, quince, cherry, apricot, melon, hemp, buckwheat, grape, raspberry, chenopodium, blueberry, nectarine, peach, plum, strawberry, watermelon, eggplant, pepper, cauliflower, Brassica, e.g., broccoli, cabbage, ultilan sprouts, onion, carrot, leek, beet, broad bean, celery, radish, pumpkin, endive, gourd, garlic, snapbean, spinach, squash, turnip, ultilane, and zucchini.

[0361] Ornamental plants within the scope of the invention include impatiens, Begonia, Pelargonium, Viola, Cyclamen, Verbena, Vinca, Tagetes, Primula, Saint Paulia, Agertum, Amaranthus, Antihirrhinum, Aquilegia, Cineraria, Clover, Cosmo, Cowpea, Dahlia, Datura, Delphinium, Gerbera, Gladiolus, Gloxinia, Hippeastrum, Mesembryanthemum, Salpiglossos, and Zinnia. Other plants within the scope of the invention are shown in Table 1 (above).

[0362] Preferably, transgenic plants of the present invention are crop plants and in particular cereals (for example, corn, alfalfa, sunflower, rice, Brassica, canola, soybean, barley, soybean, sugarbeet, cotton, safflower, peanut, sorghum, wheat, millet, tobacco, etc.), and even more preferably corn, rice and soybean.

[0363] Transformation of plants can be undertaken with a single DNA molecule or multiple DNA molecules (i.e., co-transformation), and both these techniques are suitable for use with the expression cassettes of the present invention. Numerous transformation vectors are available for plant transformation, and the expression cassettes of this invention can be used in conjunction with any such vectors. The selection of vector will depend upon the preferred transformation technique and the target species for transformation.

[0364] A variety of techniques are available and known to those skilled in the art for introduction of constructs into a plant cell host. These techniques generally include transformation with DNA employing A. tumefaciens or A. rhizogenes as the transforming agent, liposomes, PEG precipitation, electroporation, DNA injection, direct DNA uptake, microprojectile bombardment, particle acceleration, and the like (See, for example, EP 295959 and EP 138341) (see below). However, cells other than plant cells may be transformed with the expression cassettes of the invention. The general descriptions of plant expression vectors and reporter genes, and Agrobacterium and Agrobacterium-mediated gene transfer, can be found in Gruber et al. (1993).

[0365] Expression vectors containing genomic or synthetic fragments can be introduced into protoplasts or into intact tissues or isolated cells. Preferably expression vectors are introduced into intact tissue. General methods of culturing plant tissues are provided for example by Maki et al., (1993); and by Phillips et al. (1988). Preferably, expression vectors are introduced into maize or other plant tissues using a direct gene transfer method such as microprojectile-mediated delivery, DNA injection, electroporation and the like. More preferably expression vectors are introduced into plant tissues using the microprojectile media delivery with the biolistic device. See, for example, Tomes et al. (1995). The vectors of the invention can not only be used for expression of structural genes but may also be used in exon-trap cloning, or promoter trap procedures to detect differential gene expression in varieties of tissues, (Lindsey et al., 1993; Auch & Reth et al.).

[0366] It is particularly preferred to use the binary type vectors of Ti and Ri plasmids of Agrobacterium spp. Ti-derived vectors transform a wide variety of higher plants, including monocotyledonous and dicotyledonous plants, such as soybean, cotton, rape, tobacco, and rice (Pacciotti et al., 1985: Byrne et al., 1987; Sukhapinda et al., 1987; Park et al., 1985: Hiei et al., 1994). The use of T-DNA to transform plant cells has received extensive study and is amply described (EP 120516; Hoekema, 1985; Knauf, et al., 1983; and An et al., 1985). For introduction into plants, the chimeric genes of the invention can be inserted into binary vectors as described in the examples.

[0367] Other transformation methods are available to those skilled in the art, such as direct uptake of foreign DNA constructs (see EP 295959), techniques of electroporation (Fromm et al., 1986) or high velocity ballistic bombardment with metal particles coated with the nucleic acid constructs (Kline et al., 1987, and U.S. Pat. No. 4,945,050). Once transformed, the cells can be regenerated by those skilled in the art. Of particular relevance are the recently described methods to transform foreign genes into commercially important crops, such as rapeseed (De Block et al., 1989), sunflower (Everett et al., 1987), soybean (McCabe et al., 1988; Hinchee et al., 1988; Chee et al., 1989; Christou et al., 1989; EP 301749), rice (Hie et al., 1994), and corn (Gordon Kamm et al., 1990; Fromm et al., 1990).

[0368] Those skilled in the art will appreciate that the choice of method might depend on the type of plant, i.e., monocotyledonous or dicotyledonous, targeted for transformation. Suitable methods of transforming plant cells include, but are not limited to, microinjection (Crossway et al., 1986), electroporation (Riggs et al., 1986), Agrobacterium-mediated transformation (Hinchee et al., 1988), direct gene transfer (Paszkowski et al., 1984), and ballistic particle acceleration using devices available from Agracetus, Inc., Madison, Wis. And BioRad, Hercules, Calif. (see, for example, Sanford et al., U.S. Pat. No. 4,945,050; and McCabe et al., 1988). Also see, Weissinger et al., 1988; Sanford et al., 1987 (onion); Christou et al., 1988 (soybean); McCabe et al., 1988 (soybean); Datta et al., 1990 (rice); Klein et al., 1988 (maize); Klein et al., 1988 (maize); Klein et al., 1988 (maize); Fromm et al., 1990 (maize); and Gordon-Kamm et al., 1990 (maize); Svab et al., 1990 (tobacco chloroplast); Koziel et al., 1993 (maize); Shimamoto et al., 1989 (rice); Christou et al., 1991 (rice); European Patent Application EP 0 332 581 (orchardgrass and other Pooideae); Vasil et al., 1993 (wheat); Weeks et al., 1993 (wheat). In one embodiment, the protoplast transformation method for maize is employed (European Patent Application EP 0 292 435, U.S. Pat. No. 5,350,689).

[0369] In another embodiment, a nucleotide sequence of the present invention is directly transformed into the plastid genome. Plastid transformation technology is extensively described in U.S. Pat. Nos. 5,451,513, 5,545,817, and 5,545,818, in PCT application no. WO 95/16783, and in McBride et al., 1994. The basic technique for chloroplast transformation involves introducing regions of cloned plastid DNA flanking a selectable marker together with the gene of interest into a suitable target tissue, e.g., using biolistics or protoplast transformation (e.g., calcium chloride or PEG mediated transformation). The 1 to 1.5 kb flanking regions, termed targeting sequences, facilitate orthologous recombination with the plastid genome and thus allow the replacement or modification of specific regions of the plastome. Initially, point mutations in the chloroplast 16S rRNA and rps12 genes conferring resistance to spectinomycin and/or streptomycin are utilized as selectable markers for transformation (Svab et al., 1990; Staub et al., 1992). This resulted in stable homoplasmic transformants at a frequency of approximately one per 100 bombardments of target leaves. The presence of cloning sites between these markers allowed creation of a plastid targeting vector for introduction of foreign genes (Staub et al., 1993). Substantial increases in transformation frequency are obtained by replacement of the recessive rRNA or r-protein antibiotic resistance genes with a dominant selectable marker, the bacterial aadA gene encoding the spectinomycin-detoxifying enzyme aminoglycoside-3′-adenyltransferase (Svab et al., 1993). Other selectable markers useful for plastid transformation are known in the art and encompassed within the scope of the invention. Typically, approximately 15-20 cell division cycles following transformation are required to reach a homoplastidic state. Plastid expression, in which genes are inserted by orthologous recombination into all of the several thousand copies of the circular plastid genome present in each plant cell, takes advantage of the enormous copy number advantage over nuclear-expressed genes to permit expression levels that can readily exceed 10% of the total soluble plant protein. In a preferred embodiment, a nucleotide sequence of the present invention is inserted into a plastid targeting vector and transformed into the plastid genome of a desired plant host. Plants homoplastic for plastid genomes containing a nucleotide sequence of the present invention are obtained, and are preferentially capable of high expression of the nucleotide sequence.

[0370] Agrobacterium tumefaciens cells containing a vector comprising an expression cassette of the present invention, wherein the vector comprises a Ti plasmid, are useful in methods of making transformed plants. Plant cells are infected with an Agrobacterium tumefaciens as described above to produce a transformed plant cell, and then a plant is regenerated from the transformed plant cell. Numerous Agrobacterium vector systems useful in carrying out the present invention are known.

[0371] For example, vectors are available for transformation using Agrobacterium tumefaciens. These typically carry at least one T-DNA border sequence and include vectors such as pBIN19 (Bevan, 1984). In one preferred embodiment, the expression cassettes of the present invention may be inserted into either of the binary vectors pCIB200 and pCIB2001 for use with Agrobacterium. These vector cassettes for Agrobacterium-mediated transformation wear constructed in the following manner. PTJS75kan was created by NarI digestion of pTJS75 (Schmidhauser & Helinski, 1985) allowing excision of the tetracycline-resistance gene, followed by insertion of an AccI fragment from pUC4K carrying an NPTII (Messing & Vierra, 1982; Bevan et al., 1983; McBride et al., 1990). XhoI linkers were ligated to the EcoRV fragment of pCIB7 which contains the left and right T-DNA borders, a plant selectable nos/nptII chimeric gene and the pUC polylinker (Rothstein et al., 1987), and the XhoI-digested fragment was cloned into SalI-digested pTJS75kan to create pCIB200 (see also EP 0 332 104, example 19). PCIB200 contains the following unique polylinker restriction sites: EcoRI, SstI, KpnI, BglII, XbaI, and SalI. The plasmid pCIB2001 is a derivative of pCIB200 which was created by the insertion into the polylinker of additional restriction sites. Unique restriction sites in the polylinker of pCIB2001 are EcoRI, SstI, KpnI, BglII, XbaI, SalI, MluI, BclI, AvrII, ApaI, HpaI, and StuI. PCIB2001, in addition to containing these unique restriction sites also has plant and bacterial kanamycin selection, left and right T-DNA borders for Agrobacterium-mediated transformation, the RK2-derived trfA function for mobilization between E. coli and other hosts, and the OriT and OriV functions also from RK2. The pCIB2001 polylinker is suitable for the cloning of plant expression cassettes containing their own regulatory signals.

[0372] An additional vector useful for Agrobacterium-mediated transformation is the binary vector pCIB10, which contains a gene encoding kanamycin resistance for selection in plants, T-DNA right and left border sequences and incorporates sequences from the wide host-range plasmid pRK252 allowing it to replicate in both E. coli and Agrobacterium. Its construction is described by Rothstein et al., 1987. Various derivatives of pCIB10 have been constructed which incorporate the gene for hygromycin B phosphotransferase described by Gritz et al., 1983. These derivatives enable selection of transgenic plant cells on hygromycin only (pCIB743), or hygromycin and kanamycin (pCIB715, pCIB717).

[0373] Methods using either a form of direct gene transfer or Agrobacterium-mediated transfer usually, but not necessarily, are undertaken with a selectable marker which may provide resistance to an antibiotic (e.g., kanamycin, hygromycin or methotrexate) or a herbicide (e.g., phosphinothricin). The choice of selectable marker for plant transformation is not, however, critical to the invention.

[0374] For certain plant species, different antibiotic or herbicide selection markers may be preferred. Selection markers used routinely in transformation include the nptII gene which confers resistance to kanamycin and related antibiotics (Messing & Vierra, 1982; Bevan et al., 1983), the bar gene which confers resistance to the herbicide phosphinothricin (White et al., 1990, Spencer et al., 1990), the hph gene which confers resistance to the antibiotic hygromycin (Blochinger & Diggelmann), and the dhfr gene, which confers resistance to methotrexate (Bourouis et al., 1983).

[0375] One such vector useful for direct gene transfer techniques in combination with selection by the herbicide Basta (or phosphinothricin) is pCIB3064. This vector is based on the plasmid pCIB246, which comprises the CaMV 35S promoter in operational fusion to the E. coli GUS gene and the CaMV 35S transcriptional terminator and is described in the PCT published application WO 93/07278, herein incorporated by reference. One gene useful for conferring resistance to phosphinothricin is the bar gene from Streptomyces viridochromogenes (Thompson et al., 1987). This vector is suitable for the cloning of plant expression cassettes containing their own regulatory signals.

[0376] An additional transformation vector is pSOG35 which utilizes the E. coli gene dihydrofolate reductase (DHFR) as a selectable marker conferring resistance to methotrexate. PCR was used to amplify the 35S promoter (about 800 bp), intron 6 from the maize Adh1 gene (about 550 bp) and 18 bp of the GUS untranslated leader sequence from pSOG10. A 250 bp fragment encoding the E. coli dihydrofolate reductase type II gene was also amplified by PCR and these two PCR fragments were assembled with a SacI-PstI fragment from pBI221 (Clontech) which comprised the pUC19 vector backbone and the nopaline synthase terminator. Assembly of these fragments generated pSOG19 which contains the 35S promoter in fusion with the intron 6 sequence, the GUS leader, the DHFR gene and the nopaline synthase terminator. Replacement of the GUS leader in pSOG19 with the leader sequence from Maize Chlorotic Mottle Virus check (MCMV) generated the vector pSOG35. pSOG19 and pSOG35 carry the pUC-derived gene for ampicillin resistance and have HindIII, SphI, PstI and EcoRI sites available for the cloning of foreign sequences.

IV. Production and Characterization of Stably Transformed Plants

[0377] Transgenic plant cells are then placed in an appropriate selective medium for selection of transgenic cells which are then grown to callus. Shoots are grown from callus and plantlets generated from the shoot by growing in rooting medium. The various constructs normally will be joined to a marker for selection in plant cells. Conveniently, the marker may be resistance to a biocide (particularly an antibiotic, such as kanamycin, G418, bleomycin, hygromycin, chloramphenicol, herbicide, or the like). The particular marker used will allow for selection of transformed cells as compared to cells lacking the DNA which has been introduced. Components of DNA constructs including transcription cassettes of this invention may be prepared from sequences which are native (endogenous) or foreign (exogenous) to the host. By “foreign” it is meant that the sequence is not found in the wild-type host into which the construct is introduced. Heterologous constructs will contain at least one region which is not native to the gene from which the transcription-initiation-region is derived.

[0378] To confirm the presence of the transgenes in transgenic cells and plants, a variety of assays may be performed. Such assays include, for example, “molecular biological” assays well known to those of skill in the art, such as Southern and Northern blotting, in situ hybridization and nucleic acid-based amplification methods such as PCR or RT-PCR; “biochemical” assays, such as detecting the presence of a protein product, e.g., by immunological means (ELISAs and Western blots) or by enzymatic function; plant part assays, such as leaf or root assays; and also, by analyzing the phenotype of the whole regenerated plant, e.g., for disease or pest resistance.

[0379] DNA may be isolated from cell lines or any plant parts to determine the presence of the preselected nucleic acid segment through the use of techniques well known to those skilled in the art. Note that intact sequences will not always be present, presumably due to rearrangement or deletion of sequences in the cell.

[0380] The presence of nucleic acid elements introduced through the methods of this invention may be determined by polymerase chain reaction (PCR). Using this technique discreet fragments of nucleic acid are amplified and detected by gel electrophoresis. This type of analysis permits one to determine whether a preselected nucleic acid segment is present in a stable transformant, but does not prove integration of the introduced preselected nucleic acid segment into the host cell genome. In addition, it is not possible using PCR techniques to determine whether transformants have exogenous genes introduced into different sites in the genome, i.e., whether transformants are of independent origin. It is contemplated that using PCR techniques it would be possible to clone fragments of the host genomic DNA adjacent to an introduced preselected DNA segment.

[0381] Positive proof of DNA integration into the host genome and the independent identities of transformants may be determined using the technique of Southern hybridization. Using this technique specific DNA sequences that were introduced into the host genome and flanking host DNA sequences can be identified. Hence the Southern hybridization pattern of a given transformant serves as an identifying characteristic of that transformant. In addition it is possible through Southern hybridization to demonstrate the presence of introduced preselected DNA segments in high molecular weight DNA, i.e., confirm that the introduced preselected DNA segment has been integrated into the host cell genome. The technique of Southern hybridization provides information that is obtained using PCR, e.g., the presence of a preselected DNA segment, but also demonstrates integration into the genome and characterizes each individual transformant.

[0382] It is contemplated that using the techniques of dot or slot blot hybridization which are modifications of Southern hybridization techniques one could obtain the same information that is derived from PCR, e.g., the presence of a preselected DNA segment.

[0383] Both PCR and Southern hybridization techniques can be used to demonstrate transmission of a preselected DNA segment to progeny. In most instances the characteristic Southern hybridization pattern for a given transformant will segregate in progeny as one or more Mendelian genes (Spencer et al., 1992); Laursen et al., 1994) indicating stable inheritance of the gene. The nonchimeric nature of the callus and the parental transformants (R₀) was suggested by germline transmission and the identical Southern blot hybridization patterns and intensities of the transforming DNA in callus, R₀ plants and R₁ progeny that segregated for the transformed gene.

[0384] Whereas DNA analysis techniques may be conducted using DNA isolated from any part of a plant, RNA may only be expressed in particular cells or tissue types and hence it will be necessary to prepare RNA for analysis from these tissues. PCR techniques may also be used for detection and quantitation of RNA produced from introduced preselected DNA segments. In this application of PCR it is first necessary to reverse transcribe RNA into DNA, using enzymes such as reverse transcriptase, and then through the use of conventional PCR techniques amplify the DNA. In most instances PCR techniques, while useful, will not demonstrate integrity of the RNA product. Further information about the nature of the RNA product may be obtained by Northern blotting. This technique will demonstrate the presence of an RNA species and give information about the integrity of that RNA. The presence or absence of an RNA species can also be determined using dot or slot blot Northern hybridizations. These techniques are modifications of Northern blotting and will only demonstrate the presence or absence of an RNA species.

[0385] While Southern blotting and PCR may be used to detect the preselected DNA segment in question, they do not provide information as to whether the preselected DNA segment is being expressed. Expression may be evaluated by specifically identifying the protein products of the introduced preselected DNA segments or evaluating the phenotypic changes brought about by their expression.

[0386] Assays for the production and identification of specific proteins may make use of physical-chemical, structural, functional, or other properties of the proteins. Unique physical-chemical or structural properties allow the proteins to be separated and identified by electrophoretic procedures, such as native or denaturing gel electrophoresis or isoelectric focusing, or by chromatographic techniques such as ion exchange or gel exclusion chromatography. The unique structures of individual proteins offer opportunities for use of specific antibodies to detect their presence in formats such as an ELISA assay. Combinations of approaches may be employed with even greater specificity such as Western blotting in which antibodies are used to locate individual gene products that have been separated by electrophoretic techniques. Additional techniques may be employed to absolutely confirm the identity of the product of interest such as evaluation by amino acid sequencing following purification. Although these are among the most commonly employed, other procedures may be additionally used.

[0387] Assay procedures may also be used to identify the expression of proteins by their functionality, especially the ability of enzymes to catalyze specific chemical reactions involving specific substrates and products. These reactions may be followed by providing and quantifying the loss of substrates or the generation of products of the reactions by physical or chemical procedures. Examples are as varied as the enzyme to be analyzed.

[0388] Very frequently the expression of a gene product is determined by evaluating the phenotypic results of its expression. These assays also may take many forms including but not limited to analyzing changes in the chemical composition, morphology, or physiological properties of the plant. Morphological changes may include greater stature or thicker stalks. Most often changes in response of plants or plant parts to imposed treatments are evaluated under carefully controlled conditions termed bioassays.

V. Uses of Transgenic Plants

[0389] Once an expression cassette of the invention has been transformed into a particular plant species, it may be propagated in that species or moved into other varieties of the same species, particularly including commercial varieties, using traditional breeding techniques. Particularly preferred plants of the invention include the agronomically important crops listed above. The genetic properties engineered into the transgenic seeds and plants described above are passed on by sexual reproduction and can thus be maintained and propagated in progeny plants. The present invention also relates to a transgenic plant cell, tissue, organ, seed or plant part obtained from the transgenic plant. Also included within the invention are transgenic descendants of the plant as well as transgenic plant cells, tissues, organs, seeds and plant parts obtained from the descendants.

[0390] Preferably, the expression cassette in the transgenic plant is sexually transmitted. In one preferred embodiment, the coding sequence is sexually transmitted through a complete normal sexual cycle of the R0 plant to the R1 generation. Additionally preferred, the expression cassette is expressed in the cells, tissues, seeds or plant of a transgenic plant in an amount that is different than the amount in the cells, tissues, seeds or plant of a plant which only differs in that the expression cassette is absent.

[0391] The transgenic plants produced herein are thus expected to be useful for a variety of commercial and research purposes. Transgenic plants can be created for use in traditional agriculture to possess traits beneficial to the grower (e.g., agronomic traits such as resistance to water deficit, pest resistance, herbicide resistance or increased yield), beneficial to the consumer of the grain harvested from the plant (e.g., improved nutritive content in human food or animal feed; increased vitamin, amino acid, and antioxidant content; the production of antibodies (passive immunization) and nutriceuticals), or beneficial to the food processor (e.g., improved processing traits). In such uses, the plants are generally grown for the use of their grain in human or animal foods. Additionally, the use of root-specific promoters in transgenic plants can provide beneficial traits that are localized in the consumable (by animals and humans) roots of plants such as carrots, parsnips, and beets. However, other parts of the plants, including stalks, husks, vegetative parts, and the like, may also have utility, including use as part of animal silage or for ornamental purposes. Often, chemical constituents (e.g., oils or starches) of maize and other crops are extracted for foods or industrial use and transgenic plants may be created which have enhanced or modified levels of such components.

[0392] Transgenic plants may also find use in the commercial manufacture of proteins or other molecules, where the molecule of interest is extracted or purified from plant parts, seeds, and the like. Cells or tissue from the plants may also be cultured, grown in vitro, or fermented to manufacture such molecules.

[0393] The transgenic plants may also be used in commercial breeding programs, or may be crossed or bred to plants of related crop species. Improvements encoded by the expression cassette may be transferred, e.g., from maize cells to cells of other species, e.g., by protoplast fusion.

[0394] The transgenic plants may have many uses in research or breeding, including creation of new mutant plants through insertional mutagenesis, in order to identify beneficial mutants that might later be created by traditional mutation and selection. An example would be the introduction of a recombinant DNA sequence encoding a transposable element that may be used for generating genetic variation. The methods of the invention may also be used to create plants having unique “signature sequences” or other marker sequences which can be used to identify proprietary lines or varieties.

[0395] Thus, the transgenic plants and seeds according to the invention can be used in plant breeding which aims at the development of plants with improved properties conferred by the expression cassette, such as tolerance of drought, disease, or other stresses. The various breeding steps are characterized by well-defined human intervention such as selecting the lines to be crossed, directing pollination of the parental lines, or selecting appropriate descendant plants. Depending on the desired properties different breeding measures are taken. The relevant techniques are well known in the art and include but are not limited to hybridization, inbreeding, backcross breeding, ultilane breeding, variety blend, interspecific hybridization, aneuploid techniques, etc. Hybridization techniques also include the sterilization of plants to yield male or female sterile plants by mechanical, chemical or biochemical means. Cross pollination of a male sterile plant with pollen of a different line assures that the genome of the male sterile but female fertile plant will uniformly obtain properties of both parental lines. Thus, the transgenic seeds and plants according to the invention can be used for the breeding of improved plant lines which for example increase the effectiveness of conventional methods such as herbicide or pesticide treatment or allow to dispense with said methods due to their modified genetic properties. Alternatively new crops with improved stress tolerance can be obtained which, due to their optimized genetic “equipment”, yield harvested product of better quality than products which were not able to tolerate comparable adverse developmental conditions.

VI. A Computer Readable Medium

[0396] The invention also provides a computer readable medium having stored thereon a data structure containing nucleic acid sequences having at least 70% sequence identity to a nucleic acid sequence selected from those listed in SEQ ID Nos: 1-953, 1001-1095, 1954-1966, 2000-2129, 2137-2661, 2662-4737 and 4738-6813, as well as complementary, ortholog, and variant sequences thereof. Storage and use of nucleic acid sequences on a computer readable medium is well known in the art. (See for example U.S. Pat. Nos. 6,023,659; 5,867,402; 5,795,716) Examples of such medium include, but are not limited to, magnetic tape, optical disk, CD-ROM, random access memory, volatile memory, non-volatile memory and bubble memory. Accordingly, the nucleic acid sequences contained on the computer readable medium may be compared through use of a module that receives the sequence information and compares it to other sequence information. Examples of other sequences to which the nucleic acid sequences of the invention may be compared include those maintained by the National Center for Biotechnology Information (NCBI)(http://www.ncbi.nlm.nih.gov/) and the Swiss Protein Data Bank. A computer is an example of such a module that can read and compare nucleic acid sequence information. Accordingly, the invention also provides the method of comparing a nucleic acid sequence of the invention to another sequence. For example, a sequence of the invention may be submitted to the NCBI for a Blast search as described herein where the sequence is compared to sequence information contained within the NCBI database and a comparison is returned. The invention also provides nucleic acid sequence information in a computer readable medium that allows the encoded polypeptide to be optimized for a desired property. Examples of such properties include, but are not limited to, increased or decreased: thermal stability, chemical stability, hydrophylicity, hydrophobicity, and the like. Methods for the use of computers to model polypeptides and polynucleotides having altered activities are well known in the art and have been reviewed. (Lesyng et al., 1993; Surles et al., 1994; Koehl et al., 1996; Rossi et al., 2001).

[0397] The invention will be further described by the following non-limiting examples.

### EXAMPLE 1

### GeneChip Standard Protocol

Quantitation of Total RNA

[0398] Total RNA from plant tissue is extracted and quantified.

[0399] 1. Quantify total RNA using GeneQuant
[0400] 1OD₂₆₀=40 mg RNA/ml; A260/A280=1.9 to about 2.1

[0401] 2. Run gel to check the integrity and purity of the extracted RNA

Synthesis of Double-Stranded cDNA

[0402] Gibco/BRL SuperScript Choice System for cDNA Synthesis (Cat#1B090-019) was employed to prepare cDNAs. T7-(dT)₂₄ oligonucleotides were prepared and purified by HPLC. (5′-GGCCAGTGAATTGTAATACGACTCACTATAGGGAGGCGG-(dT)₂₄-3′ SEQ ID NO:2136).

[0403] Step 1. Primer hybridization:
[0404] Incubate at 70° C. for 10 minutes
[0405] Quick spin and put on ice briefly

[0406] Step 2. Temperature adjustment:
[0407] Incubate at 42° C. for 2 minutes

[0408] Step 3. First strand synthesis:
[0409] DEPC-water-1 μl
[0410] RNA (101 g final)-10 μl
[0411] T7=(dT)₂₄ Primer (100 pmol final)-1 μl pmol
[0412] 5× 1st strand cDNA buffer-4 μl
[0413] 0.1M DTT (10 mM final)-2 μl
[0414] 10 mM dNTP mix (500 μM final)-1 μl
[0415] Superscript II RT 200 U/μl-1 μl
[0416] Total of 20 μl
[0417] Mix well
[0418] Incubate at 42° C. for 1 hour

[0419] Step 4. Second strand synthesis:
[0420] Place reactions on ice, quick spin
[0421] DEPC-water—91 μl
[0422] 5× 2nd strand cDNA buffer-30 μl mM dNTP mix (250 mM final)—3 μl
[0423] E. coli DNA ligase (10 U/μl)—1 μl
[0424] E. coli DNA polymerase 1-10 U/μl-4 μl
[0425] RnaseH 2 U/μl—1 μl
[0426] T4 DNA polymerase 5 U/μl—2 μl
[0427] 0.5 M EDTA (0.5 M final)—10 μl
[0428] Total 162 μl
[0429] Mix/spin down/incubate 16° C. for 2 hours

[0430] Step 5. Completing the reaction:
[0431] Incubate at 16° C. for 5 minutes
   Purification of Double Stranded cDNA
[0432] 1. Centrifuge PLG (Phase Lock Gel, Eppendorf 5 Prime, Inc., PI-188233) at 14,000×, transfer 162 μl of cDNA to PLG
[0433] 2. Add 162 μl of Phenol:Chloroform:Isoamyl alcohol (pH 8.0), centrifuge 2 minutes

[0434] 3. Transfer the supernatant to a fresh 1.5 ml tube, add

| | |
|---|---|
| Glycogen (5 mg/ml) | 2 |
| 0.5 M NH₄OAC (0.75 × Vol) | 120 |
| ETOH (2.5 × Vol, −20 C.) | 400 |

[0435] 4. Mix well and centrifuge at 14,000× for 20 minutes
[0436] 5. Remove supernatant, add 0.5 ml 80% EtOH (−20° C.)
[0437] 6. Centrifuge for 5 minutes, air dry or by speed vac for 5-10 minutes
[0438] 7. Add 44 μl DEPC H₂O
   Analyze of quantity and size distribution of cDNA
   Run a gel using 1 μl of the double-stranded synthesis product
   Synthesis of Biotinylated cRNA

[0439] (use Enzo BioArray High Yield RNA Transcript Labeling Kit Cat#900182)

| | |
|---|---|
| Purified cDNA | 22 μl |
| 10X Hy buffer | 4 μl |
| 10X biotin ribonucleotides | 4 μl |
| 10X DTT | 4 μl |
| 10X Rnase inhibitor mix | 4 μl |
| 20X T7 RNA polymerase | 2 μl |
| Total | 40 μl |

[0440] Centrifuge 5 seconds, and incubate for 4 hours at 37° C.

[0441] Gently mix every 30-45 minutes

Purification and Quantification of cRNA

[0442] (use Qiagen Rneasy Mini kit Cat# 74103)

[0443] Determine concentration and dilute to 1 μg/μl concentration

[0444] Fragmentation of cRNA

| | |
|---|---|
| cRNA (1 μg/μl) | 15 μl |
| 5X Fragmentation Buffer* | 6 μl |
| DEPC H₂O | 9 μl |
| | 30 μl |

*5x Fragmentation Buffer

| | |
|---|---|
| 1M Tris (pH8.1) | 4.0 ml |
| MgOAc | 0.64 g |
| KOAC | 0.98 g |
| DEPC H₂O | |
| Total | 20 ml |

[0445] Filter Sterilize

Array Wash and Staining

Stringent Wash Buffer**

Non-Stringent Wash Buffer***

SAPE Stain****

Antibody Stain*****

Wash on fluidics station using the appropriate antibody amplification protocol

[0446] **Stringent Buffer: 12×MES 83.3 ml, 5 M NaCl 5.2 ml, 10% Tween 1.0 ml, H₂O 910 ml,
   [0447] Filter Sterilize
[0448] ***Non-Stringent Buffer: 20× SSPE 300 ml, 10% Tween 1.0 ml, H₂O 698 ml, Filter Sterilize, Antifoam 1.0.
[0449] ****SAPE stain: 2× Stain Buffer 600 μl, BSA 48 μl, SAPE 12 μl, H₂O 540 μl.
[0450] *****Antibody Stain: 2× Stain Buffer 300 μl, H₂O 266.4 μl, BSA 24 μl, Goat IgG 6 μl, Biotinylated Ab 3.6 μl
   Image Analysis and Data Mining
   1. Two text files are included in the analysis:
   [0451] a. One with Absolute analysis: giving the status of each gene, either absent or present in the samples
   [0452] b. The other with Comparison analysis: comparing gene expression levels between two samples

### EXAMPLE 2

### Analysis of the RPS2 Mediated Interaction in Arabidopsis

[0453] The identification and cloning of resistance genes is extremely important for the treatment of crops. For example, bacterial blight disease caused by Xanthomonas spp. infects virtually all crop plants and leads to extensive crop losses worldwide. Therefore, it is of interest to identify diverse and abundant plant resistance genes for use as future crop treatments for pathogen resistance, e.g., to identify particular pathogen resistance (R) genes in a plant.

[0454] Differential gene expression analysis was used to identify pathogen resistance (R) genes in a plant. This method takes advantage of the HR-associated disease resistance. One model plant-pathogen interaction is that of Arabidopsis thaliana and Pseudomonas syringae pv tomato. There are four possible genetic interactions of a P. syringae infection of Arabidopsis when analyzing HR-associated disease resistance (Table 2). However, there are only two possible outcomes: a compatible outcome occurs when there is disease, and an incompatible outcome occurs when there is no disease. An incompatible outcome, or disease resistance, occurs only when the plant possesses the resistance gene, e.g., RPS2, and the pathogen posesses the corresponding avr gene, e.g., avrRpt2. RPS2 belongs to the NBS-LRR class of R genes, which can confer resistance to a wide variety of phytopathogens. It has been suggested that AvrRpt2 is delivered to the plant via the bacteria's type III secretion system and recognized by a surveillance system involving RPS2 inside the plant cell. The plant response during an incompatible interaction includes a change in ion flux across the plasma membrane, generation of reactive oxygen species, induction of defense genes, induction of HR, fortification of the cell wall, accumulation of salicylic acid, and anti-microbial compounds.

TABLE 2

| | | | |
|---|---|---|---|
| Number | Plant | Pathogen | Outcome |

| | | | | |
|---|---|---|---|---|
| 1 | RPS2 | no avr | Disease | Compatible |
| 2 | RPS2 | avrRpt2 | No disease | Incompatible |
| 3 | rps2 | no avr | Disease | Compatible |
| 4 | rps2 | avrRpt2 | Disease | Compatible |

Methods

[0455] Differential Expression

[0456] Analysis of differential gene expression is a classic and very powerful tool in experimental biology not only to study large trends in gene regulation but also small differences among similar responses. Historically, methods for analysis only allowed the comparison of a very few genes in each experiment. However, with new methods to identify and quantitate differential mRNA profiles, such as long distance differential display PCR, cDNA microarrays, and gene chips, one can much more quickly and comprehensively identify and analyze differentially expressed genes.

[0457] By analyzing and comparing the expression profile of genes in the above 4-way matrix, a number of types of genes can be identified that are involved in the resistance pathway. Resistance genes would be highly expressed or strongly downregulated in outcome number 2 in the four way matrix and less oppositely expressed in outcome numbers 1, 3, and 4. Genes that are highly expressed or strongly downregulated in outcome numbers 1 and 2 and oppositely expressed or not expressed above baseline in outcome numbers 3 and 4 are of interest as being associated with the reaction of a plant having resistance genes to a bacterial infection, regardless of the avr genotype of the bacterium. Such a comparison is very useful in identifying strong candidates for different roles in plant/pathogen interactions, as are numerous other kinds of outcomes in the four-way plant/pathogen interaction analysis of gene expression. Such genes include those involved in recognition of pathogen (unrelated to virulence status); genes involved in recognition of pathogen having a virulence or avirulence gene (regardless of the status of the corresponding plant); genes related to the status of the plant, regardless of the status of the pathogen; and genes that do not change expression during plant-pathogen interaction.

[0458] Use of a Gene Chip to Study Gene Regulation in Arabidopsis in Response to Exposure to Pathogen

[0459] Initially isogenic strains of Arabidopsis thaliana ecotype Col-0 were used, one having the wild type RPS2 gene that confers resistance, and one having the rps2 mutant that confers susceptibility to attack by Pseudomonas syringae pathovar tomato (Pst). Subsequently, comparisons between ecotypes, mutant Arabidopsis, and infection with different pathogens were made. After infection, the RNA was isolated and a probe produced using the Affymetrix GeneChip™ protocol. A gene array representing approximately 8,100 Arabidopsis thaliana genes was used to carry out global gene expression profiling in response to exposure to a particular pathogen.

[0460] Initially, the analysis involved comparing all four of the interactions to a water control (plants “infected” with water). In the initial analysis, the mRNA levels of approximately 1,600 genes were significantly affected (>2.5-fold change in expression) by exposure to the bacterial pathogen. This suggested a dramatic change in the molecular biology of the cell and a more detailed analysis was performed.

Results

A. Comparison of Compatible To Incompatible Infections

[0461] Two different types of interactions between Arabidopsis and Pseudomonas syringae were analyzed. In one type of experiment, a gene for gene interaction conditioned by the plant resistance (R) gene RPS2 and the bacterial avirulence gene avrRpt2 at a relatively early stage was analyzed. When the pathogen has an avr gene and the plant has the corresponding R gene, the plant is resistant to the pathogen and the interaction is called incompatible. When the plant-pathogen system lacks either or both genes, the plant is susceptible to the pathogen and the interaction is called compatible. A hypersensitive response (HR, localized rapid cell death of the plant) is one aspect of resistance.

[0462] Isogenic strains of Arabidopsis thaliana ecotype Col-0 were used, one having the wild type RPS2 gene that confers resistance, and one having the mutant rps2 mutant that confers susceptibility to attack by Pseudomonas syringae pathovar tomato (Pst) carrying avrRpt2. Two strains of Pseudomonas syringae were used, one having the avr gene avrRpt2 and the other having no avr. The avr gene is carried on a plasmid.

[0463] A gene array having 8,700 probe sets representing approximately 8,100 Arabidopsis thaliana genes was used to carry out global gene expression profiling of each of the infection outcomes. The pairings were as follows:

[0464] 1. RPS2 WT plant; P. syringae (no avr)

[0465] 2. RPS2 WT plant; P. syringae/avrRpt2

[0466] 3. rps2-101C mutant plant; P. syringae (no avr)

[0467] 4. rps2-101C mutant plant; P. syringae/avrRpt2

Additionally, two controls were used:

[0468] 5. RPS2 WT plant; water control

[0469] 6. Rps2-101C mutant plant; water control

[0470] Data were processed such that genes having a difference in mRNA levels that was greater than 2.5-fold increased or reduced, compared with controls were selected. The fold change for each gene was log-scaled and normalized.

[0471] 1. Data Analysis: Identification of Expression Clusters

[0472] Data analysis was carried out by comparing expression of each gene in interactions 1-4 (Table 2), plotting that expression level, and identifying the genes of interest, i.e., those that show more than a 2.5× change in expression (about 1,600 genes). Classification of patterns, or expression clusters were as follows:

[0473] a) Genes strongly induced (>2.5× change in expression level) only in the resistant (incompatible) response;

[0474] b) Genes responding weakly only in the resistance response, but strongly induced in the compatible response;

[0475] c) Genes that show a high level of expression in all outcomes;

[0476] d) Genes that show a high level of repression in all outcomes;

[0477] e) Genes that show a very high level of repression only when the bacterial avr is expressed; and

[0478] f) Genes that show a very different level of expression in the presence of the plant resistance compared to the level in the absence of the plant resistance (the mutant rps2).

[0479] Genes that fall within groups 1a and 1b, i.e., those that are differentially expressed only when an incompatible interaction occurs, include genes directly involved in resistance to pathogens. These genes show a peak (either up or down) only during plant-pathogen interaction 2. The differential expression can be of two types: upregulated (increased expression of this gene is potentially important in the incompatible interaction) or downregulated (decreased expression of this gene is potentially important in the incompatible interaction).

[0480] 2. Heat Shock Proteins and Transcription Factors

[0481] All major heat shock proteins (HSPs) were identified to be upregulated only during the incompatible interaction. Heat shock factors (HSFs) are transcription factors which control the transcription of the HSP genes. Eight HSF genes are known in Arabidopsis. HSF4 and HSF21 were identified as being upregulated when the plant was infected with P. syringae. HSF4 showed strong induction that was restricted to resistance, and HSF4 was the only HSF specifically upregulated during the incompatible interaction. The data suggests that the upregulation of HSPs is downstream of upregulation of HSF4.

[0482] To analyze whether the response was a more general one, or specific to a given ecotype, expression of HSF4 was analysed in two different Arabidopsis ecotypes, A. thaliana, ecotypes Col-0 and Ws. HSF4 was also upregulated in the response of Ws ecotype to infection and, specifically, was upregulated during an incompatible response. HSF21 is thus a preferred protein for resistance applications, and HSF4, a protein which is expressed in all plants, is especially preferred for engineering resistance.

[0483] A transgene containing the ACT2 promoter and the HSF4 open reading frame was introduced to Arabidopsis and transgenic HSF4 Arabidopsis lines generated to overexpress and underexpress HSF4. The expression of HSF4 during pathogen infection may cause lower general resistance to P. syringae.

[0484] Conditional overexpression lines were also generated using the estradiol-inducible promoter system. Infiltration of 20 μM estradiol into the intercellular space of the leaves of transgenic plants induced expression of HSF4 mRNA for a short time (down by 4 hours). Addition of 20 estradiol to the hydroponic medium yielded sustained HSF4 mRNA accumulation.

B. Genes Involved in Arabidopsis Responses to Pathogens

[0485] A number of mutations in Arabidopsis thaliana that disrupt expression of pathogen-induced genes and cause enhanced disease susceptibility have been identified. Pathogen-induced genes whose expression is altered in these enhanced disease susceptibility mutants are likely to play important roles in conferring disease resistance.

[0486] To identify such genes, wild type and various mutant plants were infected with strain Psm ES4326 at a dose of 10,000 colony forming units per square centimeter of leaf tissue. Control plants were mock-infected. After thirty hours, tissue samples were collected and used to prepare RNA. Three sets of experiments were carried out. Each set of experiments included three independent replicate experiments. RNA from replicate experiments was pooled to reduce errors arising from the effects of variations in environmental conditions. Each RNA sample was used to prepare a fluorescently-labelled probe which was applied to an Affymetrix GeneChip™, allowing the expression level of each gene represented on the GeneChip™ to be determined for each sample. The plant genotypes included in each experiment were as follows:

Experiment #1

[0487] Wild-type (ecotype Columbia)

[0488] nahG

[0489] pad4-1

[0490] eds5-1

[0491] eds4

[0492] pad2-1

[0493] npr1-1

[0494] npr1-3

Experiment #2

[0495] Wild-type (ecotype Columbia)

[0496] coi1

[0497] ein2

[0498] pad1

[0499] FN1-3

[0500] eds3

[0501] eds8

Experiment #3

[0502] Wild-type (ecotype Columbia)

[0503] pad4-1

[0504] nahG

[0505] sid2

[0506] eds5-3

[0507] FN1-9

[0508] FN3-2

1. Data Analysis

[0509] Expression values that were less than 5 were set to five. This ensures that no values are 0 or negative. Such values interfere with subsequent analysis steps. To obtain a list of pathogen-induced genes, the ratios of infected wild-type to mock infected wild type were calculated for each experiment. Then genes were selected in which expression levels were infected wild-type/mock wild-type >2.5, and infected wild-type >50 for at least 2 of 3 experiments. The ratio of 2.5 was chosen because the false positive rate for the GeneChip™ is essentially 0 at this level of stringency, and the absolute value of 50 was chosen to eliminate expression values below the detection limit of the GeneChip™. The result of this analysis was a list of 745 probe sets representing genes that are induced by infection in wild-type plants (note that some genes are represented by more than one probe set, so the number of different genes is somewhat fewer) (see Table 3 below). Hence, the expression of genes comprising SEQ ID NOs:2-6, 16, 18, 22-23, 25, 28-29, 31-32, 35-37, 39-43, 45-47, 49-50, 52, 54-55, 57-58, 60-66, 70-72, 74, 76-77, 79, 81, 83, 85, 87-90, 92, 94, 97, 100-107, 111-115, 117-125, 127-135, 138-140, 142-153, 156-158, 160, 162-165, 168-170, 173-181, 183-184, 186-188, 190-198, 200-201, 203-211, 214-215, 218-224, 227-232, 234-249, 251-262, 264, 266-268, 270, 272-275, 277-281, 283, 286-294, 297-298, 302, 304-306, 308-326, 328-339, 341, 344-345, 347, 350-351, 353-358, 361-371, 373-377, 379-386, 388-390, 392, 394-400, 402-406, 408-410, 412-417, 419-427, 429-433, 435-443, 445-452, 454-457, 459-460, 462-464, 466-470, 473-475, 478-479, 481-482, 484-187, 489-494, 496-498, 500-501, 503-506, 508, 510, 512-515, 517-523, 526, 528-529, 531-538, 540, 544-548, 550-558, 560, 563-568, 570, 572-577, 579-580, 582-585, 588-594, 596, 598-600, 602-603, 605-606, 608-612, 614-617, 619-624, 626-630, 632-639, 642, 644, 646-651, 653-657, 659-665, 667-671, 673-678, 681-689, 691-693, 695-713, 715-717, 719, 721-727, 729-733, 736-738, 740, 742, 744, 746, 748-752, 755-756, 758-760, 762-769, 771, 774, 776-781, 783-788, 790-796, 798-799, 802, 804-808, 810-815, 817-831, 833-848, 850-855, 857-869, 871-880, 882-900, 903-907, 909, 911-915, 918-920, 922-925, 927, 929, 931-938, 940, 943-945, 947, and 950-953 is increased after infection of wild-type Arabidopsis with Pseudomonas syringae.

[0510] To identify pathogen-induced genes whose expression is affected by the mutations, genes for which the ratio of infected mutant/infected wild-type was <0.5 or >2 for at least one mutant were selected from the list of 745 pathogen-inducible probe sets. The limits of 5 and 2 were chosen because changes of at least 2-fold are likely to be significant for impact on disease resistance, and because the false positive rate for the GeneChip™ at 2-fold is 0.2%. This selection yielded a list of 530 probe sets corresponding to genes, the expression of which is induced by Pseudomonas infection in wild-type plants and perturbed in at least one mutant plant (see Tables 4a and 4b below). Thus, the expression of genes comprising SEQ ID NOs:2, 4-6, 11-13, 18, 22-23, 28, 31, 36, 39-43, 45, 47, 49-50, 52, 54-55, 57-58, 60-61, 63-66, 71-72, 74, 77, 81, 83, 85, 87-89, 92, 97, 100-107, 111-112, 114-115, 117-120, 122, 125, 127-128, 134, 138-140, 143-144, 148-151, 153, 156-157, 160, 165, 168-170, 173-174, 176-180, 183, 187-188, 191, 193-194, 197-198, 200, 203-210, 214, 219-224, 227, 230-232, 235-237, 239-240, 243-246, 248-249, 251-254, 256-258, 261, 264, 266-268, 270, 272-275, 277-278, 280, 283, 286-287, 290-293, 297, 302, 305-306, 308-310, 312-316, 321-326, 328-331, 333, 336-339, 341, 345, 351, 353, 355-358, 361-363, 365-366, 368-371, 373, 375, 377, 379-381, 384-385, 388-390, 392, 394-400, 402-406, 410, 412, 415-416, 419-420, 422-425, 429-433, 435-439, 441-443, 445-452, 454, 459-460, 463, 466, 468-470, 473, 481-482, 485-486, 489, 491-494, 497-498, 500-501, 503, 505-506, 508, 510, 513-515, 517, 520-521, 523, 528-529, 531, 533-538, 540, 545-548, 550-551, 553-554, 556-558, 560, 566-567, 575, 580, 582-584, 588-593, 596, 598-600, 602-603, 605-606, 608-610, 612, 614, 616, 620-622, 627-629, 633-634, 636-639, 644, 646, 648-651, 654-657, 659, 661-663, 667, 669, 673-674, 677, 682, 684-687, 689, 691-693, 697, 699, 701, 703-708, 713, 717, 719, 721-727, 730-733, 736, 740, 744, 746, 749-752, 755-756, 758-760, 762-764, 766-769, 774, 776-778, 780-781, 786, 788, 791-796, 799, 802, 804-808, 810-812, 815, 818-821, 823-825, 827-829, 831, 833-836, 838-843, 845, 847-848, 852-853, 855, 858, 860-869, 871-874, 876, 878-880, 884-887, 889, 892-894, 896-900, 904-907, 911-915, 918-920, 922-924, 931, 933, 938, 943-945, 947, and 950-952 is increased after infection of wild-type Arabidopsis, and altered after infection of at least one mutant Arabidopsis, with Pseudomonas syringae.

2. Data Interpretation

[0511] Genes that encode regulatory proteins such as transcription factors, protein kinases, calcium binding proteins and the like, are likely to play important roles in disease resistance, as they are likely to affect the expression of multiple defense effector genes. The list of 530 probe sets include 81 that correspond to genes encoding regulatory factors. These are likely to be useful for engineering plants to respond more quickly to pathogen attack by activating expression of defense responses (see Table 5 below). Thus, the expression of genes comprising SEQ ID NOs:39, 52, 60, 63, 81, 83, 106, 107, 115, 117, 118, 168, 174, 176, 179, 204, 207, 208, 220, 221, 248, 258, 268, 275, 280, 309, 323, 326, 329, 351, 419, 422, 429, 430, 432, 459, 460, 468, 469, 473, 500, 505, 506, 508, 529, 531, 533, 535, 538, 545, 553, 602, 606, 608, 610, 614, 616, 634, 654, 655, 684, 686, 687, 691, 717, 751, 752, 766, 777, 815, 831, 834, 835, 839, 841, 847, 876, 884, 906, 920, and 924 is increased after infection of wild-type Arabidopsis, and altered after infection of at least one mutant Arabidopsis, with Pseudomonas syringae.

[0512] The mutations nahG, pad4-1, eds5-1, eds4, pad2-1, npr1-1, npr1-3, pad1, FN1-3, eds3, eds8, sid2, eds5-3, FN1-3 and FN3-2 cause enhanced susceptibility to Pseudomonas syringae. Consequently, pathogen-inducible genes whose expression is reduced by one of these mutations are likely to be important for resistance to Pseudomonas syringae and possibly other bacterial pathogens. These 333 probe sets are shown in Table 6 (below). Therefore, the expression of genes comprising SEQ ID NOs:12-13, 18, 23, 36, 39-40, 43, 45, 50, 52, 57-58, 60-61, 64, 71-72, 81, 87-89, 97, 100, 102-105, 107, 111-112, 115, 119-120, 122, 125, 127-128, 140, 144, 148-150, 153, 165, 168-169, 176-177, 179, 183, 188, 191, 193-194, 197-198, 203-206, 208-209, 214, 219-222, 227, 230, 232, 237, 244-246, 248-249, 251-253, 258, 261, 264, 266, 268, 273-275, 283, 287, 290, 293, 297, 302, 305-306, 308, 312-315, 321-322, 324, 326, 330, 333, 338, 341, 345, 353, 356-358, 362-363, 366, 369, 371, 375, 377, 380, 384-385, 389, 392, 394-395, 398-399, 402-404, 406, 410, 415, 419, 422, 425, 429-430, 433, 435-439, 443, 445-452, 454, 463, 466, 468-470, 473, 486, 489, 491-492, 494, 498, 500-501, 503, 508, 513-514, 517, 529, 533-538, 548, 550, 553-554, 4556-558, 566, 575, 580, 582-583, 590-591, 593, 600, 602, 609-610, 612, 614, 620-622, 627-629, 637-638, 644, 649, 654-657, 659, 663, 667, 669, 673-674, 677, 684-685, 689, 691-693, 699, 703-705, 708, 719, 721, 724-726, 730-732, 744, 746, 749-750, 752, 755-756, 758, 760, 762-764, 767, 769, 774, 780-781, 786, 788, 791-792, 794-796, 799, 804-808, 810-812, 815, 818-819, 823, 828-829, 833, 840-841, 843, 847, 852-853, 858, 860, 862-865, 867-868, 872-874, 876, 885-887, 889, 892-894, 896-900, 904-905, 907, 911-914, 918-920, 922-924, 931, 933, 938, 947, 950, and 952 is increased after infection of wild-type Arabidopsis, and altered after infection of at least one mutant Arabidopsis having a mutation that results in enhanced susceptibility to Pseudomonas (nahG, pad 4-1, eds 5-1, eds4, pad2-1, np4 1-1, npr 1-3, pad1, FN1-3, eds3, eds8, sid2, eds5-3, NF1-3 and FN3-2).

[0513] The mutations coi1 and ein2 block jasmonate and ethylene signaling, respectively. Jasmonate and ethylene-dependent disease resistance responses are known to be important for resistance to the fungal pathogens Alternaria brassicicola and Botrytis cinerea, and may also be important for resistance to other necrotrophic fungal pathogens. Alternaria and Botrytis are distantly related, yet plant resistance to these fungi is controlled similarly, suggesting that jasmonate- and ethylene-dependent responses function to limit growth of a wide range of fungal pathogens. Consequently, pathogen-induced genes whose expression is reduced in coi1 and ein2 mutants are likely to be important for resistance to these necrotrophic fungal pathogens. These 296 probe sets are shown in Table 7 (see below). Hence, the expression of genes comprising SEQ ID NOs:2, 4, 6, 11-13, 18, 22-23, 31, 41-43, 49-50, 54, 57-58, 61, 64-66, 71-72, 74, 77, 85, 87, 89, 92, 97, 101, 103, 106-107, 112, 114, 117-119, 125, 128, 134, 138, 143, 149, 151, 156-157, 165, 169-170, 174, 176-180, 187-188, 191, 193, 206, 208, 219-220, 222, 224, 231, 236, 239, 243-245, 251-254, 256-257, 267, 272, 287, 290, 292, 297, 302, 312-313, 315-316, 321-322, 324-325, 328, 330, 345, 351, 353, 355-357, 362-363, 366, 368-371, 373, 375, 379, 381, 384, 388-390, 392, 395-400, 405, 410, 415-416, 419, 422, 424, 431-432, 435-436, 438-439, 447, 459-460, 470, 473, 481-482, 489, 491, 493-494, 500-501, 505-506, 513-514, 517, 520-521, 523, 528-529, 531, 535, 537-538, 540, 545-548, 551, 553-554, 557-558, 566, 575, 580, 582, 584, 589, 591, 593, 596, 598-599, 603, 605, 608-609, 612, 628, 633-634, 636-637, 639, 646, 648, 650-651, 656, 661, 663, 667, 674, 685-687, 689, 691, 693, 697, 699, 701, 705, 707, 713, 723-724, 726, 736, 740, 749, 751-752, 756, 758-759, 764, 766-768, 774, 776, 778, 780, 792-796, 799, 802, 806, 810-812, 818, 820-821, 825, 827-829, 833-836, 838-839, 841-843, 848, 855, 860-861, 866, 868-869, 871, 873-874, 876, 878-880, 889, 892, 898-900, 904-905, 907, 915, 918, 922, 924, 933, 943-945, 947, and 951 is increased after infection of wild-type Arabidopsis, and altered after infection of at least one mutant Arabidopsis having a mutation in a gene whose expression is important for resistance to necrotrophic fungi (a mutation that blocks or interferes with jasmonate and ethylene signaling such as col1 and ein2). Accordingly, these genes are useful to improve the resistance of plants to fungal infection.

[0514] The mutations nahG, pad4-1, sid2, eds5-1, eds5-3, and eds4 are known to interfere with salicylic acid dependent signaling. Such signaling is known to be important for resistance to the bacterial pathogen Pseudomonas syringae, the oomycete pathogen Peronospora parasitica, the viral pathogen tobacco mosaic virus, as well as various other plant pathogens. Consequently, pathogen-induced genes whose expression is reduced by one of the mutations that block salicylate signaling are likely to be important for disease resistance, and useful for engineering improved disease resistance. These 288 probesets are shown in Table 8 (see below). Therefore, the expression of genes comprising SEQ ID NOs: 12-13, 18, 23, 36, 39-40, 43, 45, 50, 52, 57-58, 60-61, 64, 71-72, 81, 87-88, 100, 102-105, 107, 111-112, 115, 119-120, 122, 125, 127-128, 140, 148-150, 153, 168-169, 176-177, 188, 191, 193-194, 197-198, 203-206, 209, 219-222, 227, 232, 237, 244-246, 248-249, 251-253, 258, 261, 264, 266, 268, 273-275, 283, 287, 290, 293, 297, 302, 305-306, 308, 312-315, 324, 326, 330, 333, 341, 345, 353, 356, 358, 366, 371, 375, 377, 380, 385, 389, 392, 394, 398, 402-404, 406, 410, 415, 419, 425, 429-430, 433, 435-438, 443, 445-447, 449-452, 454, 463, 466, 468-470, 473, 486, 489, 492, 494, 498, 500-501, 503, 508, 513-514, 517, 533-538, 548, 550, 553-554, 57-558, 566, 575, 582-583, 590-591, 593, 600, 602, 609-610, 612, 620-622, 627-629, 637-638, 644, 649, 654-657, 659, 667, 669, 673, 677, 684, 689, 692-693, 703-705, 719, 721, 724-726, 730-732, 744, 746, 749-750, 752, 755-756, 760, 762-764, 767, 769, 774, 780-781, 786, 788, 791-792, 795-796, 805-808, 810-812, 815, 818-819, 823, 828, 833, 840-841, 843, 852-853, 858, 860, 862-865, 867-868, 872-874, 876, 887, 889, 893-894, 896-898, 900, 905, 907, 911-914, 918-920, 922-923, 931, 933, 938, 947, 950, and 952 which is increased after infection of wild-type Arabidopsis and altered after infection of at least one mutant Arabidopsis having a mutation in a gene that interferes with salicylic acid dependent signaling (nahG, pad4-, sid2, eds5-1, eds5-3 and eds4). Thus, these genes are particularly useful to improve the resistance of plants to infection by more than one pathogen including bacteria, oomycetes and viruses, such as TMV.

### EXAMPLE 3

### Further Analysis of the Pathogen Response and Comparison of the Response in Different Ecotypes

Materials and Methods

[0515] Arabidopsis ecotypes (or accessions) (the wild-types of all the Arabidopsis ecotypes used here have wild-type alleles of RPS2 and RPM1).

[0516] Col, Columbia-0

[0517] Ler, Landsberg erecta

[0518] Ws, Wassilewskija

Arabidopsis Mutants and Transgenics

[0519] Col rps2-101C, a loss-of-function mutant of the resistance gene RPS2 in Col background.
[0520] NahG, transgene for salicylic acid hydroxylase (inactivating salicylic acid). Col background.
[0521] ndr1-1, null mutant allele of NDR1 (non-race specific disease resistance). The mutation strongly affects RPS2-mediated resistance and partially affects RPM1-mediated resistance. Col background.
   Bacterial Strains
[0522] Pst, Pseudomonas syringae pv. tomato DC3000 (virulent strain of Arabidopsis)
[0523] Psm, P. syringae pv. maculicola ES4326 (another virulent strain of Arabidopsis)
[0524] Psp, P. syringae pv. phaseolicola NPS3121 (very weak pathogen of Arabidopsis)
   Avirulence (avr) Genes of P. syringae

[0525] avrRpt2: corresponding to the Arabidopsis resistance (R) gene RPS2

[0526] avrB: corresponding to the Arabidopsis resistance (R) gene RPM1

Experimental Protocols

[0527] A. Gene for Gene Resistance (6 Hours After Treatment)

| plant | treatment |
|---|---|
| Col WT | H₂O |
| Col WT | Pst |
| Col WT | Pst/avrRpt2 |
| Col rps2-101C | H₂O |
| Col rps2-101C | Pst |
| Col rps2-101C | Pst/avrRpt2 |
| Ws WT | H₂O |
| Ws WT | Pst |
| Ws WT | Pst/avrRpt2 |

[0528] B. Differences in the Response to Bacterial Pathogens Among Ecotypes (3, 6, and 9 Hours After Treatment)

| Plant | treatment |
|---|---|
| Col | H₂O |
| Col | Pst |
| Col | Pst/avrRpt2 |
| Ler | H₂O |
| Ler | Pst |
| Ler | Pst/avrRpt2 |
| Ws | H₂O |
| Ws | Pst |
| Ws | Pst/avrRpt2 |

Note that overall results for Cvi were very similar to Ler.

[0529] C. Genetic Factors that Affect the Plant Response to Incompatible Interactions (3, 6, and 9 Hours After Treatment)

| plant | treatment |
|---|---|
| Col | H₂O |
| Col | Pst |
| Col | Pst/avrRpt2 |
| Col | Pst/avrB |
| Col | Psm |
| Col | Psm/avrRpt2 |
| Col | Psp (not 9 hours) |
| Col | Psp/avrRpt2 (not 9 hours) |
| Col NahG | Pst |
| Col NahG | Pst/avrRpt2 |
| Col NahG | Pst/avrB |
| Col ndr1-1 | Pst |
| Col ndr1-1 | Pst/avrRpt2 |
| Col ndr1-1 | Pst/avrB |

Results

[0530] Four hundred sixty-five genes were specifically/preferentially induced in the incompatible interaction (WT and Pst/avrRpt2), and 616 genes were specifically/preferentially repressed in the incompatible interaction. Examples of these genes are provided in Tables 10 and 13. Gene expression patterns in the incompatible interaction in Col and Ws were significantly different, indicating that the genetic diversity among ecotypes can affect gene regulation during the incompatible interaction significantly. In comparison, a relatively small number of genes (314 genes for induction, 167 genes for repression) were affected at this time point during the compatible interactions (but not preferential to the incompatible interactions). A comparison of the results in three genetically different compatible interactions (WT and Pst, rps2 and Pst, rps2 and avrRpt2) revealed that 25 genes were repressed in an avrRpt2-dependent manner (see Table 9). Thus, the expression of genes comprising SEQ ID NOs:1, 15, 19, 20, 24, 26, 27, 34, 38, 51, 56, 59, 67-69, 99, 116, 155, 159, 182, 212, 284, 372, 444, and 789 is down-regulated (repressed) in an avrRpt-2-dependent manner in Arabidopsis. These genes are good candidates to be involved in avrRpt2 virulence functions (in rps2 plants).

[0531] Genes that were induced in rps2 plants after infection irrespective of avrRpt2 indicate a function of RPS2 other than an interaction with avrRpt2. Thus, global gene expression profiling can identify large and minor trends in gene regulation and is useful in gene discovery.

[0532] One general phenomenon when plants are resistant to a pathogen is the early response of pathogen-responsive (induced or repressed) genes compared to plants that are susceptible to infection. This has been proposed based on observing expression of a very limited number of genes, but it has not been proven as a global trend. To examine the results from early incompatible interactions and late compatible interactions, 4 week old Col-0 plants with well expanded leaves were infected with a high dose (OD₆₀₀=0.02) or low dose (OD₆₀₀=0.002) of P. syringae and samples collected at 6 or 30 hours, respectively. The two expression patterns were similar. The correlation values between the late compatible and incompatible interaction at either 6 hours, 9 hours or the average of 3-9 hour time points was 0.71, 0.72 and 0.75, respectively.

[0533] The majority of genes that did not respond within 9 hours after infection of a virulent strain but that responded in 30 hours (Pst or Psm, for Pseudomonas syringae pv. tomato DC3000 and Pseudomonas syringae pv. maculicola ES4326, respectively; the plant is susceptible to these strains) responded within 6 hours after infection of an avirulent strain (Pst/avrRpt2; Pst carrying the avirulence gene avrRpt2; the plant is resistant to this strain). This strongly suggests that early response of the pathogen-responsive genes is crucial for the plant to be resistant.

[0534] A comparison of the differences in the expression patterns of the 2 primary ecotypes of Arabidopsis' response to infection provides a further way to identify which genes have a more universal role (unchanged expression pattern) and which may be very specific to a particular plant ecotype involved in a very specific gene-for-gene interaction. For example, responses that are common between two ecotypes may be important for resistance. Genes that show the same pattern in both ecotypes may be part of more universal, or commonly-used, mechanisms involved in plant-pathogen interactions. Responses that are different may indicate that the two ecotypes use different combinations of responses to achieve resistance. This implies that a variety of genes can participate in plant-pathogen interactions. Nevertheless, ecotype-specific responses are expected to have counterparts in other plant species.

[0535] The differences in resistance response between ecotypes can be used for improving resistance in plants. In responses that are different between ecotypes, using the methods and compounds of the invention, such a response can be added to (induced or repressed) the response seen in the ecotype which does not normally use that response. This will likely give the plant a more robust or a wider range of resistance.

[0536] Table shows a comparison of gene expression in 4 ecotypes, i.e., Col-0, Ws-2, Cvi and Ler in response to infection. Table 10A shows the expression data for 9 probe sets corresponding to genes that are specifically induced at 3 hours after incompatible infection of four different ecotypes of Arabidopsis with P. syringae pv. tomato DC3000. Table 10B shows expression data for 18 probe sets corresponding to genes that are induced by 6 hours but not at 3 hours after incompatible infection of four different ecotypes of Arabidopsis with three different bacterial strains, i.e., P. syringae pv. tomato DC3000. Table 10C illustrates the expression data for 6 probe sets corresponding to genes that are activated by P. syringae at 6 hours post-infection. Most of the genes are compatible interaction-specific or -preferential.

[0537] Four week old plants with fully expanded leaves were infected and samples collected at 3 or 6 hours post-infection (OD₆₀₀=0.02). Some common patterns were observed. At 3 hours after infection of an avirulent strain, Pst/avrRpt2, the overall qualitative gene expression patterns were very similar for all the ecotypes tested. Common responses to Pst/avrRpt2 could be important for gene-for-gene resistance and so may be useful to identify targets for reverse genetics. Quantitative and qualitative differences in the response were noted, indicating that there are qualitative and/or quantitative differences in the signal transduction mechanisms that regulate the response among the ecotypes. Such signal transduction mechanism differences are attributed to genetic differences among the ecotypes.

[0538] In particular, early inducible genes (3 hours) in the incompatible interaction were identified (70 genes are common in all the ecotypes, and 360 genes if selected for induced in at least one ecotype). One group of the early genes (38 genes in Col) were repressed to the control level by 6 hours. These genes did not respond in the compatible interaction at 3 hours and were repressed below the control level in the compatible interaction by 6 hours. This suggests that shutting down these genes in the incompatible interaction by 6 hours could be caused by defense response inhibiting factor(s) delivered by bacteria. Another group of the early genes were expressed even higher at 6 hours in the incompatible interaction. One hundred eighty-eight genes showed significant induction or repression at 3 hours in the compatible interaction in at least one of the ecotypes. Of these, 3 induced genes and 3 repressed genes were induced or repressed in all three ecotypes.

[0539] At 3 hours in the incompatible interaction, a major difference among the ecotypes was quantitative; overall expression patterns were very similar, but overall fold change amplitudes were clearly in the order of Ws>Col>Ler. Thus, in this type of analysis it is not appropriate to analyze datasets by comparing the genes from different datasets that are selected by a certain cut-off value (e.g., 2.5-fold difference). This fold change difference was mainly caused by differences in the basal expression of these genes. In fact, a strong negative correlation in each gene was found between the relative basal expression level in Ws (relative to the other ecotypes; Pearson correlation −0.78) and response in the incompatible interaction (especially at 3 hours) and a moderate positive correlation between the relative basal expression level in Ler and response in the incompatible interaction (Person correlation 0.38) (almost no correlation for the relative basal expression level in Col; Person correlation 0.10). These observations indicate that Ws has the tightest regulation of these incompatible interaction-responsive genes, and Ler has the loosest. Another interesting observation is that the relative susceptibility to a virulent strain (Pst) was in the order of Ws>Col>Ler. Although it is unknown whether these two phenomena are controlled by same gene(s), it is conceivable that leaky expression of early response genes (in Ler) confers relative resistance to a virulent strain. At 6 hours in the incompatible interaction, the gene expression pattern for Col was significantly different from the other ecotypes.

[0540] Moreover, different ecotypes may use a different but overlapping set of responses to achieve resistance against the same pathogen. Gene expression profiling can thus reveal ecotype differences. Therefore, it is possible to isolate the genes responsible for these differences in regulatory mechanisms using ecotype differences in gene expression as a phenotype, by a map-based cloning approach.

[0541] For example, a majority of the incompatible response-inducible genes have lower basal levels in ecotype Ws and higher basal levels in ecotype Ler. Among the numerous genes, a few genes that display large differences in the basal level in two ecotypes are chosen. The large differences in expression level constitute easy-to-score phenotypic markers. Ws and Ler are crossed to obtain F2 populations. The larger the F2 population is, the better resolution in the map position can be obtained. For each of the F2 plants, expression levels of the chosen phenotypic marker genes are measured and physical markers that distinguish these ecotype genomes are scored. The map position of the responsible gene is determined by analyzing the linkage between the phenotype and the physical markers. If more than a single gene is responsible for the ecotype difference and each of the genes has a quantitative effect on the phenotype, quantitative trait locus (QTL) analysis can be used for mapping. Instead of using F2 populations, the use of recombinant inbred lines (RILs) between the ecotypes of interest may facilitate the analysis, especially using RILs that are already mapped for recombination points. Once the gene(s) responsible for the phenotype is mapped, a combination of increasing the map resolution, sequencing the chromosomal region identified by mapping in both ecotypes, and gene transfer from one ecotype to the other leads to isolation of the gene.

[0542] If the phenotype of interest in gene expression depends on bacterial infection, such as expression of ecotype Col-specific inducible genes at 6 hours after infection of Pst/avrRpt2, expression of the corresponding phenotypic marker genes (e.g., genes that show good difference in induction between Col and Ler) can be measured at an appropriate time after bacterial infection.

[0543] Differences in gene expression patterns between two virulent strain backgrounds (Pst and Psm) are relatively small. Gene expression patterns for Pst/avrRpt2 and Pst/avrB were quite similar at 3 hours, but the difference increased at 6 hours. Psp (no avr) shows similar expression pattern to incompatible bacteria although the amplitude of fold difference was smaller in general. This suggests that Psp, which does not induce the HR in the plant, is still recognized by the plant and induce major part of the defense response seen during the incompatible interaction. It also suggests that plants monitor the effect of the defense response and that if it seems effective (bacteria do not grow like Psp), the plant does not go for a full-blown defense response.

Preferred Genes

[0544] Preferred early inducible genes were selected as induced >2.5 fold (except for 2 fold for Psp at 6 hours) in all of the following datasets: Pst/avrRpt2 at 3 hours in Col, Ws, and Ler; Pst/avrRpt2 at 3 hours, Psm/avrRpt2 at 3 hours, Psp at 6 hours, and Pst/avrB at 3 hours, relative to the water control, as well as estradiol-inducible (avrRpm1 at 0, 45, and 120 minutes and avrRpt2 at 0, 45, and 120 minutes, where the fold change was relative to the appropriate resistance gene mutant carrying the same transgenes. Among these genes, the genes were ranked according to genes that are not induced by SA or BTH and not induced in late time points with Psm. Regulatory genes were given higher rankings (see Table 11). Hence, the expression of genes comprising SEQ ID NOs:17, 70, 76, 81, 84, 109, 123, 144, 160, 230, 265, 268, 269, 271, 323, 333, 385, 427, 428, 430, 457, 505, 569, 597, 602, 606, 616, 708, 730, 741, 812, 862, and 942 is induced early after infection of different Arabidopsis ecotypes with Pseudomonas syringae pv tomato DC3000, P. maculicola ES4326 and P. phaseolica NPS3121 (at 3 or 6 hours) or is estradiol inducible (at 45 or 120 minutes).

[0545] Preferred early repressible genes were selected as repressed >2.5 fold (except for >2 fold for Psp at 6 hours) in all of the following datasets: Pst/avrRpt2 at 3 hours, Psm/avrRpt2 at 3 hours, Psp at 6 hours, and Pst/avrB at 3 hours) and Pst/avrRpt2 at 3 hours in Col (the fold change was relative to the appropriate water controls). Among them, the genes were ranked in order of expression (highest to lower levels of expression) (see Table 12). Thus, the expression for genes comprising SEQ ID NOs:30, 73, 282, 541, 640, 679, 761, 870, 917, and 930 is repressed early after infection of Arabidopsis with Pseudomonas syringae pv tomato DC3000, P. maculicola ES4326 and P. phaseolica NPS3121.

[0546] Other genes are induced/repressed during incompatible interactions at 3 and/or 6 hours after inoculation of bacteria. Preferred genes in this group were selected as induced/repressed >2.5 fold in the incompatible interaction compared to water inoculated control and 2> fold compared to the corresponding compatible interaction at 3 and/or 6 hours after inoculation with Pst/avrRpt2 and Pst/avrB, and Psm/avrRpt2 and Pst/avrRpt2, in all four ecotypes (see Tables 13a and 13b). Hence, the expression of genes comprising SEQ ID NOs:21, 44, 46, 60, 86, 91, 93, 106, 110, 119, 122, 130, 131, 161, 166, 167, 168, 171, 176, 200, 203, 213, 225, 227, 248, 261, 262, 266, 274, 285, 300, 301, 302, 320, 326, 341, 345, 348, 349, 360, 366, 378, 615, 618, 406, 409, 422, 425, 441, 443, 446, 449, 454, 461, 475, 476, 485, 500, 511, 512, 527, 533, 543, 545, 549, 550, 552, 567, 575, 590, 608, 611, 625, 643, 656, 659, 666, 668, 671, 680, 690, 704, 706, 711, 721, 728, 738, 757, 791, 807, 811, 813, 827, 857, 864, 868, 875, 881, 893, 901, 905, 908, 912, 939, 941, 951, and 952 is induced in an incompatible interaction at 3 and/or 6 hours after infection of four Arabidopsis ecotypes with Pseudomonas syringae pv tomato DC3000, P. maculicola ES4326 and P. phaseolica NPS3121, while the expression of genes comprising SEQ ID NOs:7, 33, 82, 136, 141, 154, 185, 189, 199, 202, 434, 471, 483, 499, 516, 530, 578, 586, 631, 658, 694, 714, 718, 734, 770, 772, 816, and 916 is decreased in an incompatible interaction at 3 and/or 6 hours after infection of four Arabidopsis ecotypes with Pseudomonas syringae pv tomato DC3000, P. maculicola ES4326 and P. phaseolica NPS3121.

[0547] Garlic T-DNA insertion lines corresponding to these genes are searched by BLAST. Global expression profiling after infection with one of two different pathogens (P. syringae and Alternaria brassicicola) may be employed as a phenotyping method. Transgenic plants for overexpression, underexpression, and conditional overexpression of selected genes are also prepared.

### EXAMPLE 4

### Promoters of Genes Responsive to Pathogen Infection

[0548] In many cases the major outcomes of plant-pathogen interactions are largely determined by how plants react in an early stage. Therefore, it is useful to isolate promoters that rapidly react to pathogen attack for use in expressing proteins that provide tolerance or resistance to pathogen attack.

[0549] Genes were selected according to the conditions described below based on the results of a GeneChip™ analysis. These genes were particularly selected for a high level of induction in the avrRpt2-RPS2 interaction and for a very low mRNA level in the absence of pathogen attack among four Arabidopsis ecotypes tested (Col, Ws, Ler, and Cvi). The genes were also analyzed to determine if their expression was similar in other combinations of incompatible interactions (three different bacterial strain backgrounds: P. syringae pv. tomato DC3000, P. syringae pv. maculicola ES4326, and P. syringae pv. phaseolicola NP3121; three different avirulence genes: avrRpt2, avrB, and avrRpm1; and direct expression of avirulence genes in plants using an estradiol-inducible system). For each gene, the 1.2-kb sequence upstream of the initiation codon is provided in SEQ ID NOs: 1047-1095.

Preferred Highly Inducible Promoters

[0550] Promoters were selected that had low basal expression level (i.e., uninduced level) in all the ecotypes (Col, Ler, Ws, and Cvi) and high inducibility in Col. Five such promoters of genes represented by the probe sets in Table 14 were identified: the promoters of germin precursor-like oxalate oxidase gene, extra-large G protein gene, PR-1, EREBP5 gene, and a C2H2-type zinc finger protein gene were chosen. The promoters for the germin-precursor like oxalate oxidase gene and PR-1 gene are relatively slow response promoters (no induction 3 hours after infection), but have high induction by 6 hours. The extralarge G protein gene is an intermediate in terms of response time, but maintains high expression over time. The other two are useful as early transient response promoters (good induction by 3 hours, but shut down by 6 hours) in the incompatible interaction (wild type plant infected with Pst/avrRpt2). Promoter sequences comprising SEQ ID NOs:1046-1095 and 1047-1055 correspond to genes comprising one of SEQ ID Nos: 17, 21, 80, 81, 109, 156, 174, 176, 221, 227, 296, 302, 303, 306, 333, 340, 360, 500, 505, 524, 575, 601, 602, 614, 628, 687, 733, 782, 811, 835, 862, 900, 905, 912, and 109, 306, 524, 600, 875, 912, 913, 941 and 942, respectively. Promoter-LUC reporter fusions are prepared and tested in a transient expression system using biolistic co-bombardment of avrRpt2 gene.

Promoters Responsive to Particular Pathogens

[0551] Proteins that are useful for protecting plants from pathogen attack may have deleterious effects on plant growth if expressed constitutively. Consequently, it is desirable to have promoter sequences that control gene expression in such a way that expression is absent or very low in the absence of pathogens, and high in the presence of pathogens.

[0552] Wild-type Arabidopsis plants (ecotype Columbia) were either mock-infected or infected with the bacterial pathogen Pseudomonas syringae pv. maculiola strain ES4326 (2×10⁴ cfu per square centimeter of leaf). After 30 hours, samples were collected, and RNA was purified. This procedure was repeated three times independently, and the RNAs from corresponding samples were pooled, in order to reduce the impact of variation due to uncontrolled variables. The two pools of RNA representing mock-infected and infected plants were then used for gene expression profiling using an Arabidopsis GeneChip®. This entire procedure was repeated three times, yielding three sets of GeneChip® data representing a total of nine independent experiments.

[0553] To identify promoter sequences that are likely to be useful for driving expression of transgenes in plants in response to pathogen attack, genes were selected whose expression level was less than 40 in all of the mock-infected samples and whose expression level was greater than 400 in all of the infected samples. The value of 40 was chosen arbitrarily as a low expression level and the value of 400 was chosen arbitrarily as a reasonably high expression level. Thirty-seven genes met these criteria and promoter sequences could be identified for 36 of them. Table 15 indicates the identifying probe set number for these 36 genes, the corresponding Arabidopsis gene, the mean expression level of each gene in mock-infected plants, the mean expression level of each gene in infected plants, and the fold induction in expression of each gene after infection. For 11 genes, expression in mock-infected plants was undetectable, so it was not possible to calculate fold induction. Therefore, the expression of genes comprising SEQ ID NOs:104-106, 119, 123, 129, 131, 151-152, 183, 191, 198, 200, 227, 249, 274, 302, 358, 415, 481, 547, 566, 582, 628, 633, 639, 656, 673, 793, 818, 827, 864, 874, 880, and 904-905 is induced in Pseudomonas syringae pv. maculiola-infected Arabidopsis.

[0554] It is possible that promoters that strongly activate gene expression in response to infection by a bacterial pathogen might be different from promoters that strongly activate gene expression in response to infection by a fungal pathogen. To test this possibility, a second GeneChip® experiment was conducted, in which wild-type Arabidopsis plants (ecotype Columbia) were mock-infected or infected with the fungus Botrytis cinerea. Samples were collected at 0, 12, 36, 60, and 84 hours after infection, RNA was purified and used for expression profiling using an Arabidopsis GeneChip®. To identify useful promoters, genes were selected whose expression level was less than 40 in mock-infected samples from all time points and whose expression level was greater than 400 in infected plants at 84 hours after infection. Twenty-three genes met these criteria, and promoter sequences could be identified for 21 of them. These genes are described in Table 16, with their identifying probe set number, the corresponding Arabidopsis gene, the mean expression level of each gene in mock-infected plants, and the expression level of each gene in infected plants at various times after infection. Among these 23 genes, 11 genes were previously identified in the search for genes whose expression was strongly induced by Pseudomonas syringae infection. These 11 genes correspond to identifying codes 12989, 13015, 13100, 13215, 13565, 14609, 16649, 16914, 19284, 19991, and 20356. Hence, the expression of genes comprising SEQ ID NOs:18, 71, 119, 123, 129, 151, 191, 244, 245, 302, 545, 547, 562, 566, 637, 653, 747, 756, 774, 793, 842, 864, and 905 is induced in Botrytis cinerea-infected Arabidopsis.

[0555] The promoter sequences for the 25 genes that were only identified in the P. syringae data set are shown in SEQ ID NOs:1001-1025. The promoter sequences for the 10 genes that were only identified in the B. cinerea data set are listed in SEQ ID NOs:1026-1035) The promoter sequences of the 11 genes that were identified in both data sets are listed in SEQ ID NOs:1036-1046. The 11 promoter sequences that were identified in both data sets are most likely to be useful for driving expression of transgenes in response to attacks by various pathogens, as these promoters are activated in response to attack by either Pseudomonas syringae or Botrytis cinerea, two very different pathogens. The other promoters may also be useful for driving expression of transgenes that are efficiently expressed in response to infection by certain types of pathogens.

[0556] Further, orthologs of the Arabidopsis promoters are also useful to drive expression of transgenes. To identify the orthologous promoter, a BLAST search for orthologous genes was conducted. To identify the ortholog, the alignments from the BLAST search are used to determine the range of nucleotides showing homology to the Arabidopsis gene. The coding sequences shown at the beginning of each search result that contain regions corresponding to the nucleotides showing homology are likely orthologous genes. Orthologous promoter sequences may be isolated by any method known to the art, e.g., cloning of genomic DNA 5′ to the ATG in orthologous genes identified in a computer assisted database search or hybridization of a probe comprising any one of SEQ ID NOs: 1001-1046 to genomic plant DNA.

### EXAMPLE 6

### Genes the Expression of which are Altered by Viral Infection

[0557] To identify host genes that are commonly up or down regulated during local RNA or DNA virus infection, gene expression profiling was employed. The host genes may include host factors that are induced by viral infection, e.g., activated host defense genes, suppressed by viral infection, e.g., suppressed host defense genes, genes involved in symptom development, as well as genes regulated by virus inducible promoters. Once the genes are identified, the function of each is then determined. Reverse genetics is then employed to examine the effect of mutations on these genes during virus infection.

Experimental Procedure

[0558] Arabidopsis thaliana (Columbia-0 (Col-0) were grown in a Conviron growth chamber to 4 weeks of age. The growth conditions were 22° C., 12 hour day length and 75% relative humidity. At least four rosette leaves of twenty plants were inoculated with one of five viruses or a mock control (120 plants total). The viruses were turnip vein clearing virus (TVCV), a tobamovirus, an oil seed rape mosaic virus (ORMV), a tobamovirus, tobacco rattle tobravirus (TRV), a tobravirus, cucumber mosaic virus strain Y (CMV-Y), a cucumovirus, and turnip mosaic virus (TuMV), a potyvirus. Each virus was diluted to approximately 0.5 to 1.0 μg/ml in 10 mM potassium phosphate buffer pH 7.2 (or 20 mM Tris-HCl pH 8.0 for the TuMV). The phosphate buffer was used as the mock infection control for the experiments. Inoculated Col-0 leaves were first dusted with carborundum then 10 μl of virus solution or phosphate buffer were pipetted onto the leaf surface. The virus solution or phosphate buffer alone were then rubbed into the leaf surface using a gloved finger, and the leaf surfaces were washed with distilled water at about 10 minutes post inoculation.

[0559] Inoculated leaf tissue was removed from each plant at 1, 2, 4 and 5 days post inoculation (dpi), weighed, snap frozen in liquid nitrogen and stored at −80° C. Total RNA was extracted from leaf tissue by the RNAwiz method (Ambion, Inc.) and further purified using the RNeasy method (Qiagen, Inc.). RNA was diluted to 1 μg/ml and labeled as a probe for Affymetrix GeneChip hybridization according to Affymetrix protocol for synthesizing labeled copy RNA (cRNA) (see Example 1). Labeled cRNA for each virus or mock treatment was hybridized to an Affymetrix GeneChip containing sequences corresponding to 8775 Arabidopsis genes. The hybridization data was then analyzed using Affymetrix GeneChip software.

[0560] Arabidopsis genes that were induced by at least 2-fold in all virus treatments were identified by importing the data into Microsoft Excel and then subjecting the data to selection criteria. Within each time point, the expression level of a gene exceeded 25 and the fold change was greater than 2 by comparison with the mock-infected treatment. Thus, for genes that were induced by all five viruses, the expression level exceeded 25 and the fold change was greater than 2 for all five viruses. For genes that were repressed by at least 2-fold, the expression level of the gene must exceed 25 in the mock-infected treatment and the fold change must be less than 2 in all of the five virus treatments.

Results

[0561] A gene chip from Affymetrix having oligonucleotides corresponding to approximately 8,100 Arabidopsis genes was used with labeled cRNA obtained from plant cells infected with a selected viruses at different days post-infection (dpi). For example, for Arabidopsis, the RNA may be obtained from Arabidopsis infected with potyvirus, tobamovirus, tobravirus, cucumovirus or geminivirus. After hybridization, laser scanning is employed to detect expression levels and the data obtained is then analyzed. For genes that are induced in response to viral infection, genes that are expressed at levels greater than, for example, 2 fold over control, are selected. Alternatively, for genes that are suppressed in response to viral infection, genes that are expressed at levels lower than control are selected. The advantages of a gene chip in such an analysis include a global gene expression analysis, quantitative results, a highly reproducible system, and a higher sensitivity than Northern blot analyses. Moreover, a gene chip with Arabidopsis DNA has a further advantage in that the Arabidopsis genome is well characterized.

[0562] Data obtained from probe sets which correspond to genes upregulated or downregulated in response to infection by all 5 viruses reveiled forty-six genes that were downregulated and 126 that were upregulated in response to viral infection (Tables 17 and 18). Once the induced and/or suppressed genes are identified, the functions of the genes are then characterized by standard methodology.

[0563] Therefore, the expression of genes comprising SEQ ID NOs:14, 48, 53, 98, 217, 226, 295, 327, 343, 352, 369, 404, 407, 418, 453, 458, 465, 472, 480, 488, 495, 507, 509, 513, 514, 559, 561, 581, 604, 607, 613, 641, 652, 672, 720, 735, 739, 743, 745, 754, 773, 803, 832, 849, 948, and 949 is downregulated after viral infection, and the expression of genes comprising SEQ ID NOs:3, 51, 54, 60, 61, 66, 75, 76, 78, 88, 95, 96, 101, 106, 108, 123, 126, 128, 129, 131, 137, 145-147, 150, 158, 169, 170, 172, 173, 197, 200, 216, 219, 224, 230, 233, 237, 249, 250, 263, 274, 275, 276, 299, 307, 323, 333, 342, 346, 359, 382, 383, 387, 391, 393, 401, 411, 415, 427, 442, 455, 459, 466, 477, 481, 485, 487, 502, 511, 515, 525, 534, 539, 542, 560, 571, 577, 579, 584, 587, 595, 600, 627, 638, 645, 654, 659, 668, 681, 688, 695, 696, 706, 708, 730, 742, 753, 775, 785, 786, 792, 797, 800, 801, 809, 817, 819, 820, 823, 827, 847, 856, 875, 885, 896, 902, 910, 921, 922, 923, 925, 926, 928, 946, and 952 is upregulated after viral infection.

[0564] The orthologs of these Arabidopsis sequences to other plant genes was determined.

[0565] A summary of the probe sets corresponding to genes, the expression of which is altered after infection of Arabidopsis with a pathogen is shown in Table 19.

### EXAMPLE 7

### Identification of Gene Products that are Modulated upon Infection of a Chenopodium Cell with a Virus

[0566] Of the many disease resistance mechanisms that can be studied, the HR (hypersensitive resistance) system of Chenopodium spp. is attractive because of the broad-spectrum virus resistance it confers. This is shown by the ability of members of the bromo-, como-, cucumo-, ilar-, alfamo-, nepo-, sobemo-, tombus-, tymo-, carla-, clostero-, hordei-, potex-, poty-, tobra- and tobamovirus groups to elicit local lesion HR on Chenopodium spp. (CMI/AAB Description of Plant Viruses, 1984; Cooper et al., (1995)). In many instances, the HR completely blocks viral spread. However, certain viruses can break through the hypersensitive response and move from one species of Chenopodium to another. The ability of some viruses to infect more than one species of Chenopodium provides an opportunity to isolate genes that provide a cell with resistance to viral infection.

[0567] The genetic mechanisms of Chenopodium spp. HR involve a number of factors. These factors can be studied to further understand the hypersensitive response and the mechanism through which the response acts. There are some similarities between the products of Chenopodium spp. genes and gene products involved in common defense signaling pathways in other plants. These similarities allow comparisons to be made between Chenopodium and these other plants. One example includes genes that are induced upon viral infection during HR in C. foetidum (Visedo et al., (1990).

[0568] Additionally, some circumstantial experimental evidence suggests that Chenopodium HR may be somewhat similar to tobacco N gene HR (Whitham et al., 1994). Movement defective tobacco mosaic tobamovirus (TMV) replicates within an inoculated cell of a tobacco plant with an N gene, but fails to move from cell to cell (Cooper et al., 1996). Hypersensitivity is not induced, thus replication alone is not sufficient to induce HR despite the N gene elicitor being mapped to the replicase gene of TMV (Padgett and Beachy, 1993). Therefore, the process of virus movement may trigger hypersensitivity, which implicates intercellular signaling in this type of HR. Support for this position comes from experiments in which cell-to-cell contacts were disrupted in N gene tobacco which resulted in the prevention of necrotic lesion formation in infected leaves (Gulyas and Farkas, 1978). Likewise, TMV will not induce HR cell death in NN tobacco protoplasts where plasmodesmata are not intact (Otsuki et al., 1972), although HR does occur in callus cultures where plasmodesmata are intact (Beachy and Murakishi, 1971). By comparison in C. quinoa, movement defective brome mosaic bromovirus (BMV) replicates but fails to move from cell to cell. Initial infection is not sufficient to induce HR since local lesions do not form (Schmitz and Rao, 1996). Similarly, in C. amaranticolor, cucumber mosaic cucumovirus (CMV) lacking a movement protein replicates within inoculated cells, fails to move and does not elicit cell death (Canto and Palukaitis, 1999). Therefore, like TMV on N gene tobacco, the process of viral spread of BMV and CMV in C. quinoa and C. amaranticolor may induce HR.

Methods and Materials

Inoculation of Plants

[0569] Leaves of 10-week old C. amaranticolor or C. quinoa were inoculated with in vitro transcripts of TMV-MGfus (Heinlein et al., 1995), TMV virions, tobacco rattle tobravirus (TRV), or they were mock-inoculated. TMV-MGfus encodes GFP (green fluorescent protein) fused to the viral movement protein. Infectious spread can be monitored through the detection of GFP. Using an Olympus stereomicroscope fitted with a U-ULH Olympus lamp, infected C. amaranticolor tissue accumulating GFP was excised at 4, 7 and 11 days after inoculation (dai). Leaves inoculated with TRV or TMV were collected at 4 dai, at which point local lesions were forming. Mock-inoculated tissue was collected at the same time. Tissue was frozen in liquid nitrogen and total RNA was purified from it. Three separate sets of plants were inoculated with TMV-MGfus and yielded three independent preparations of RNA.

cDNA-AFLP (Complementary DNA-Amplified Fragment Length Polymorphism)

[0570] Poly-A+ RNA was isolated from TMV-MGfus infected C. amaranticolor using Qiagen's Oligotex mRNA purification system (Qiagen, Valencia, Calif.) and cDNA was generated using cDNA synthesis reagents from Life Technologies (Rockville, Md.). cDNA was used to generate AFLP fragments with the AFLP reagents from Life Technologies and reactions were performed according to the manufacturer's instructions. cDNA made from one microgram of poly-A+ RNA was digested with EcoRI and MseI and the supplied compatible linkers were ligated to the ends of the digested molecules. A few modifications were introduced. EcoRI-NN primers (GACTGCGTACCAATTCNN; SEQ ID NO:2134), rather than EcoRI-NNN, were used with the 5′ fluorescent label NED (Applied Biosystems, Foster City, Calif.) and MseI-N and MseI-NN [GATGAGTCCTGAGTAAN(N); SEQ ID NO:2135), rather than MseI-NNN, primers were used (Genosys, The Woodlands, Tex.), to reduce the complexity of the primer sets evaluated. All possible primer combinations (256+64) were used for PCR amplification and products were separated on polyacrylamide gels and visualized using a Genomyx SC fluorescent scanner (Beckman Coulter, Fullerton, Calif.). Gene fragments that appeared to be upregulated in infected tissues compared to mock-inoculated tissues were tested to see if they were also upregulated by the same primers from a second preparation of cDNA from RNA from a second set of infected plants. Gene fragments that were upregulated in both RNA preparations were excised from the gel, eluted from the gel in water and reamplified by PCR using the appropriate MseI and EcoRI primers and sequenced with 377 ABI sequencers (Applied Biosystems) using dideoxysequencing methods.

Quantitative RT-PCR

[0571] DNase treated total RNA (2 ng per reaction) from the third independent preparation of TMV-MGfus infected C. amaranticolor, the first preparation of TRV infected C. amaranticolor, or the first preparation of TMV C. quinoa, was used with TaqMan One-Step RT-PCR reagents for quantitative analysis in an ABI 7700 (Applied Biosystems). Reactions were performed according to the manufacturer's instructions. Primers and 6-FAM 5′ end-labeled probes (6-carboxyfluorescein, Applied Biosystems or Genosys) were designed from the sequences from the C. amaranticolor upregulated gene fragments using Primer Express software (Applied Biosystems) and are listed in SEQ ID Nos:954-1000 and 2130-2135. Expression levels were interpolated from standard curves with a correlation coefficient of 0.99 or greater and the quantities were normalized to the expression level of actin in each sample.

Results

[0572] The interaction of the elicitor and the R gene product establishes a cascade of reactions and signaling events that is then manifested in a phenotypic HR. In essence, HR is the end result of disease activated signaling events. In order to detect the early expression of genes induced by viral infection, it was necessary to isolate—infected tissue before the onset of local lesion formation. Therefore, C. amaranticolor was infected with RNA transcripts of TMV-MGfus that express GFP (green fluorescent protein) in infected cells. This allowed the spread of viral infection to be monitored over time. Infection foci comprising over 100 cells could be detected at 4 dai and foci of more than 500 cells could be detected at 7 dai. There was no visible appearances of cell death or chlorotic local lesion formation at the infection foci at 4 and 7 dai. By 11 dai, the infection foci were associated with chlorotic local lesions. Virus infected tissue was excised from leaves at each time point and RNA was purified from the tissue and used for cDNA-AFLP as previously described.

[0573] cDNA-AFLP fragments were separated on polyacrylamide sequencing gels and imaged with a fluorescent scanner. Samples derived from mock-inoculated tissue at 7 dai were run next to samples derived from TMV-MGfus infected tissue at 7 dai for comparison. Ninety-eight bands having intensity in the TMV-MGfus lanes that was greater than that of analogous bands in the mock lanes were easily detected. Thirty out of the 98 bands were also upregulated in an independent set of experiments designed to reduce biological variation between experiments. These bands were excised from the gel, reamplified, and sequenced.

[0574] The hypothetical protein sequences derived from the reamplified fragments (Seq ID NOs: 1954-1966) translated from all six reading frames were compared to sequences in the GenBank protein sequence database. The results of the BLASTX search (Altschul et al., 1997) are summarized in Table 20a. To confirm that the expression levels of DESCA genes were upregulated in infected tissue compared to mock inoculated tissue, the relative amount of DESCA and actin transcript in a third independent set of samples at 4 dai, 7dai, and 11 dai was quantitatively measured (Table 20b).

[0575] The expression level of DESCA1 increased the most in the TMV-MGfus infected plants. The expression level of DESCA1 increased 200 times by 4 dai but tapered off drastically by 11 dai. DESCA1 is unrelated to any protein known at this time.

[0576] Two sequences, DESCA4 and DESCA10, are both related to pumps found in Arabidopsis and yeast (Sanchez-Fernandez et al., 1998; Smart and Fleming, 1996). DESCA4 is expressed highly at 4 dai but the expression drops off over time whereas DESCA10 is only moderately induced and its expression returns to normal by the time of the visible appearance of local lesions in C. amaranticolor.

[0577] DESCA7 is similar to a salicylate-induced glucosyltransferase gene in tobacco (Horvath and Chua, 1996). DESCA9 is similar to cytochrome P450-like proteins which can produce cytotoxic compounds including phytoalexins that are deployed by a plant to defend against invading microbes. DESCA12 is related to a proanthranilate benzoyltransferase from carnation that plays a direct role in the phytoalexin biosynthesis in carnation (Yang et al., 1998). DESCA11 is similar to the tryptophan biosynthetic enzyme phosphoribosylanthranilate transferase whose gene expression is induced in the presence of ozone in Arabidopsis (Conklin and Last, 1995).

[0578] DESCA3 is similar to endo-1,4-betaglucanases that have a role in fruit ripening, abscission, and cell elongation (Lashbrook et al., 1994). DESCA3 is highly expressed in the infected C. amaranticolor and remains highly expressed during the appearance of local lesions and necrosis.

[0579] Many disease responses are mediated by positive regulators such as transcription factors or kinases that initiate signaling cascades for the activation of defense responses. One gene, DESCA5, is loosely similar to a yeast potential transcriptional regulator. DESCA5 expression is twice as high at the early stages of infection compared to the late stages of infection illustrating an important role played by gene regulation at the early stages of infection. DESCA6 is related to kinases of Arabidopsis. Kinases have essential roles in programmed cell death during viral infection (Dunigan and Madlener, 1995). DESCA2 is the most highly expressed of the group suggesting that it is an important regulator at the onset of infection. It is similar to a receptor-like protein kinase in bean that responds to Fusarium solani attack (Lange et al., 1999).

[0580] Some R genes have kinase-like regions that may function in initiating a signal cascade during the onset of HR (Song et al.; 1995, Zhou et al., 1997). Global amino acid sequence alignment (Henikoff and Henikoff, 1992) of DESCA2 with Pto or Xa21, R genes with ser/thr kinase domains, reveals a 37% similarity. DESCA8 has a nucleotide binding site and a leucine-rich repeat that is common for many R genes. (Meyers et al., 1999; Leister et al., 1998).

[0581] To link DESCA genes to a multivirus resistance pathway, C. amaranticolor was inoculated with TRV (tobacco rattle virus), a virus that is taxonomically distinct from TMV. Local lesions appeared by 4 dai and RNA was purified from the infected leaves. DESCA gene expression levels in infected tissue were compared to mock inoculated tissue by quantitative RT-PCR and revealed that the same DESCA genes upregulated during a TMV infection are also upregulated during a TRV infection (Table 20b).

[0582] The gene expression levels in TMV infected C. quinoa were measured using the same C. amaranticolor-derived primers in quantitative PCR to determine if DESCA genes were up-regulated during HR in another Chenopodium species. Most of the DESCA genes were upregulated in C. quinoa and were expressed at levels many times higher than in C. amaranticolor (Table 20b). This may be a result of the infection of C. quinoa with the aggressive wild-type virus rather than slower moving TMV-MGfus.

[0583] The experimental procedure presented here can detect any similar gene involved in the aforementioned signaling pathways such as SA signaling. Except for DESCA 1, whose expression is increased the most at 200+ fold, many of the fragments have homology to other genes that have been placed in disease resistance pathways in other plants. DESCA12 and DESCA9 are respectively similar to hypersensitivity related gene 201, possibly a proanthranilate benzoyltranferase, and p450 monooxygenases, both which are expressed during the hypersensitive response in tobacco upon infection with Pseudomonas solanacearum but are not regulated by SA (Czemic et al., 1996). DESCA7 is similar to a salicylate-induced glucosyltransferase gene in tobacco (Horvath and Chua, 1996). Thus, the disease resistance response in C. amaranticolor involves pathways both dependent and independent of SA signaling.

[0584] The surprising discovery of DESCA4, DESCA7, DESCA9, DESCA10, and DESCA12, reveal the underpinnings of an endogenous detoxification system. Briefly, the activation phase involves cytochrome P450 monooxygenases introducing functional groups (e.g. aromatic rings) to potential toxins. The conjugation phase in plants involves the linking of glutathione or glucose to the toxin at which point the conjugated molecule can be recognized by an ATP-binding cassette transporter and pumped into the vacuole, or possibly the neighboring cells, during the elimination phase. The final phase includes either storage or breakdown of such molecules. DESCA9, similar to cytochrome P450, and DESCA12, similar to a gene associated with the production of phytoalexin, may produce potential toxins. In fact, C. amaranticolor produces many such compounds that are antiviral to TMV. DESCA7, similar to a glucosyltransferase, may conjugate such toxins to be transported by the ABC-transporters encoded by DESCA4 or DESCA 10. In this particular case, the transported compound could then be deployed by the infected plant cell as an antiviral agent or cytotoxic compound, stored by noninfected cells in anticipation of infection, or eliminated by noninfected cells neighboring infected cells. Since all of these genes are induced by TMV and TRV in C. amaranticolor, their induced expressions are a result of a specific or general multivirus or disease resistance pathway.

[0585] Possessing the R genes that allow C. amaranticolor to initially recognize multiple viruses provides an opportunity to use these genes, and the regulatory elements associated with these genes, to transfer viral resistance to other plants. In addition, possession of genes that produce and transport antiviral and cytotoxic products allows for the transfer of viral resistance through a mechanism involving induced cell death upon viral infection.

[0586] Two genes that may be used for early recognition of viral infection are DESCA8 and DESCA2, as these genes may act as signaling components to initiate the resistance cascade. DESCA8 has a nucleotide binding site and a leucine-rich repeat that is common for many R genes and that can be found in other plants (Meyers et al., 1999; Leister et al., 1998). DESCA2 is induced in both Chenopodium species and is similar to other R genes, Xa21 and Pto, which have similar ser/thr kinase domains.

[0587] Resistance to viral spread may be transferred between Chenopodium spp. For example, BMV (brome mosaic virus) induces local lesions in the green variety of C. hybridum, however lesion formation does not limit the systemic spread of the virus (Verduin, 1978). The systematic spread of the BMV virus may be restricted in the green variety of C. hybridum by transformation with a gene from the purple variety that does limit spread (Komari, 1990). Thus, genes that confer viral resistance may be used for complementation, reverse genetics, overexpression, and gene silencing. Furthermore, as indicated by the functionality of the R genes N and Pto after being transferred into heterologous species, (Whitham et al., 1996; Rommens et al., 1995), the Chenopodium genes may function to initiate hypersensitivity in crops, Arabidopsis or other useful plants.

### EXAMPLE 8

### Other Plant-Pathogen Interactions

[0588] The methods set out hereinabove can be used for any type of comparable resistance interaction. For example any of the following plant/pathogen interactions will be produced as compatible and incompatible interactions. The RNA from such an interaction is isolated and subject to a protocol such as one outlined in Example 1, e.g., using a Genechip with a specific plant's genes or microarray, differential display PCR or cDNA-ALFP (Example 7). A four-way analysis is performed and genes which are expressed differently are identified. The plant/pathogen interactions in Table 21 are well known in the art. However, any type of plant/pathogen interaction that involves this type of resistance can be used.

TABLE 21

| Plant | Pathogen |
|---|---|
| Tomato | Cladosporium fulvum |
| Maize | Rust fungus |
| Antirrhinium | Rust fungus |
| Flax | Melampsora lini |
| Lettuce | Downy mildew |
| Arabidopsis | Peronospora parasitica |
| Tomato | Nematode |
| Corn | Cochliobolus carbonum |
| Tomato | Pseudomonas syringae |
| Rice | Xanthomonas oryzae pv. Oryzae |
| Rice | Pyricularia oryzae |
| Tobacco | Tobacco Mosaic Virus |

[0589] Genes that are upregulated and cause resistance in a wide variety of plants are particularly useful in methods which upregulate or overexpress the gene. One method is to add an exogenous copy, thus providing more of the gene product or allowing for a different induction from that used by the plant. Alternatively, the endogenous gene can be upregulated using a known inducer or using artificial methods such as using an artificial induction signal in the endogenous promoter. Examples of the two methods are provided in Examples 9 and 10.

[0590] Accordingly, embodiments of the invention provide the sequences disclosed herein, which sequences can be used in genetic engineering of crops, as probes and markers to study the dynamics of plant/pathogen interactions, and as markers in marker-assisted breeding protocols to identify plants carrying particularly useful combinations of genes associated with pathogen resistance, as well as in plant defense.

### EXAMPLE 9

### Transformation of Resistance Genes into Plants

[0591] To produce resistant plants, resistance genes such as those identified herein can be introduced into plant cells to generate transgenic plants having enhanced resistance. While HSF4 is any preferred gene for this embodiment of the invention, the invention can be employed with other genes, alone or in combination, whose regulation is strongly responsive to plant/pathogen interactions, such as the genes identified herein. Since some genes are strongly induced and others are strongly repressed in plant/pathogen interactions, and since some genes that are strongly induced in one ecotype can be strongly repressed in another, the invention contemplates use of any of the genes and sequences, or fragments thereof, disclosed herein, in a construct adapted to cause overexpression, repression, or knock out, of the genes in a transgenic plant.

[0592] Transgenic downregulation of genes associated with pathogen resistance can have several useful applications. In one embodiment, transgenic downregulation of genes that are strongly repressed in resistance interactions can enhance resistance. Such transgenic downregulation can employ the genes disclosed herein, or fragments thereof, in an antisense orientation to interfere with accumulation of the products of those genes. Likewise, any other methodology capable of lowering expression of such genes is also included within these embodiments of the invention.

[0593] Plant transformation can be carried out by conventional means, and can include Agrobacterium-mediated transformation, electroporation, particle acceleration, abrasion, and any other useful means leading to expression of a transgene in a plant of interest. Transformed plant cell are then used to regenerate one or more plants in tissue culture. Subsequent generations of transgenic plants can be used directly or bred with other lines to generate plants having enhanced pathogen resistance.

### EXAMPLE 10

### Upregulation of Resistance Genes in Crops

[0594] Because many or most Arabidopsis genes have orthologs in other plants, the genes and sequences disclosed herein are generally useful in constructs to be up-regulated and cause resistance in a wide variety of plants. As examples, the heat shock proteins, and particularly HSF4, are found throughout the plant kingdom. For many such regulatory and responsive genes it is well known that there exist substances that can induce expression. Chemicals such as dexamethasone have been found to induce mammalian HSF proteins. Likewise, a chemical induction of key plant defense genes can be chemically induced. High throughput screening for chemical inducers of the plant HSF4 or other resistance gene is performed. Potentially useful substances are then tested on crop plants and eventually used as a soil additive or sprayed onto plants when needed to induce resistance. Accordingly, embodiments of the invention usefully employ the genes disclosed herein, or fragments thereof, for screening to identify useful chemical inducers and/or repressors of gene responsive to pathogenic infections.

### EXAMPLE 11

### Identification of Inducers and Repressors of Resistance Genes

[0595] The yeast two-hybrid method and many methods which use its basic idea, provide a technique to identify proteins which interact with a protein of interest. The method relies on the fact that a protein contains domains which can be separated. Thus the protein of interest is fused to the GAL4 DNA binding region of a known protein. The GAL4 (or another) activation signal is fused in a library to produce a library of fused proteins. If one of the proteins from the library interacts with the protein of interest the protein binds and a signal protein is produced, such as luciferase. There are a number of such systems presently, some of which can be used in mammalian cells, allowing for correct processing and folding of certain proteins and others which allow the interaction to occur in the cytoplasm allowing for the identification of other types of proteins.

[0596] cDNA from HSF4 and any other protein of interest is cloned in fusion to the yeast GAL4 DNA binding domain on a vector. A library containing cDNA from Arabidopsis is fused to the GAL4 or an activation domain of choice. Expression of luciferase correlates with identification of an interacting protein. This protein is then analyzed as to its action as an inducer or repressor.

### EXAMPLE 12

### Determination of the Minimal Promoter Fragment

[0597] The full-length promoter sequence as given in SEQ ID Nos: 1001-1095, 2137-2661 and 4738-6813, or the promoter orthologs thereof is fused to the β-glucuronidase (GUS) gene at the native ATG to obtain a chimeric gene cloned into plasmid DNA. The plasmid DNA is then digested with restriction enzymes to release a fragment comprising the full-length promoter sequence and the GUS gene, which is then used to construct the binary vector. This binary vector is transformed into Agrobacterium tumefaciens, which is in turn used to transform Arabidopsis plants (for further details of the binary vector construction see above Example 9).

[0598] The above plasmid can also be used to form a series of 5′ end deletion mutants having increasingly shorter promoter fragments fused to the GUS gene at the native ATG. Various restriction enzymes are used to digest the plasmid DNA to obtain the binary vectors with different lengths of promoter fragments. In particular, a binary vector 1 is constructed with a 1,900-bp long promoter fragment; a binary vector 2 is constructed with a 1,300-bp long promoter fragment; a binary vector 3 is constructed with a 1000-bp long promoter fragment; a binary vector 4 is constructed with a 800-bp long promoter fragment; a binary vector 5 is constructed with a 700-bp long promoter fragment; a binary vector 6 is constructed with a 600-bp long promoter fragment; a binary vector 6 is constructed with a 500-bp long promoter fragment; and a binary vector 7 is constructed with a 100-bp long promoter fragment. Like the binary vector comprising the full-length promoter fragment, these 5′ end deletion mutants are also transformed into Agrobacterium tumefaciens and, in turn, Arabidopsis plants (for further details of Arbabidopsis transformation and promoter assay procedures see Example 5 above).

[0599] The presence of the correct hybrid construct in the transgenic lines is confirmed by PCR amplification.

[0600] By using the above protocol it can be determined, which portion of the promoter sequences given in SEQ ID Nos: 1001-1095, 2137-2661 and 4738-6813, or the promoter orthologs thereof is required for gene expression.

[0601] Minimal promoter fragments having lengths substantially less than the full-length promoter can therefore be operatively linked to coding sequences to form smaller constructs than can be formed using the full-length promoter. As noted earlier, shorter DNA fragments are often more amenable to manipulation than longer fragments. The chimeric gene constructs thus formed can then be transformed into hosts such as crop plants to enable at-will regulation of coding sequences in the hosts.

### EXAMPLE 13

### Determination of Promoter Motifs

[0602] While a deletion analysis characterizes regions in a promoter that are required overall for its regulation, linker-scanning mutagenesis allows for the identification of short defined motifs whose mutation alters the promoter activity. Accordingly, a set of linker-scanning mutant promoters fused to the coding sequence of the GUS reporter gene are constructed. Each of them contains a 8-10-bp mutation located between defined positions and included in a promoter fragment as given in SEQ ID Nos: 1001-1095, 2137-2661 and 4738-6813, or the promoter orthologs thereof.

[0603] Each construct is transformed into Arabidopsis and GUS activity is assayed for 19 to 30 independent transgenic lines. The presence of the correct hybrid consstruct in transgenic lines is confirmed by PCR amplification of all lines containing the mutant constructs and by random sampling of lines containing the other constructs. Amplified fragments are digested with restriction enzyme (e.g. XbaI) and separated on high resolution agarose gels to distinguish between the different mutant constructs. constructs. The effect of each mutation on promoter activity is compared to an equivalent number of transgenic lines containing the unmutated construct. Two repetitions resulting from independent plating of seeds are carried out in every case.

[0604] The sequences mutated in the linker-scanning constructs, in particular those that showed marked differences from the control construct, are then examined more closely.

### EXAMPLE 14

### Identifying Orthologs

[0605] Orthologs were identified through use of BLAST and SCAN software with some additional filters. For the Arabidopsis search, a BLAST database was created that was a subset of GenBank ver 123.0 (released Apr. 15, 2001) that contained all of the plant translated regions excluding Arabidopsis thaliana sequences. The subset was created with PERL script. A BLAST search with all of the peptide sequences was performed against the GenBank subset. Each query was executed using the “blastall” command with the parameters” “-p blastp”, “-v 50”, “-b 50”, “-F F”. The BLAST search results were then processed with SCAN (Sequence Comparison Analysis program, version 1.0k, Los Alamos National Laboratories) using default settings and the orthologs were identified following implementation of an E-value cutoff of <=1e-4. The candidate orthologs were further filtered by comparing words in the description to the text of the annotation fields: product, function and note. The sequence was considered to have the same or similar function if any of the words matched. Words excluded from the filter included: the, like, protein, related, unknown, subunit, hypothetical, and, putative, precursor, clone, homolog, small, beta, class, dna, ma, alpha, gamma, has, not, been, from, to, by, long, type and induced.

[0606] For the rice search, amino acid sequences were used that resulted from FGENESH (version 1.C) gene prediction results. The peptide sequences were obtained from gene predictions and formatted into a BLAST database. A BLASTP comparison was then performed against the Arabidopsis sequences. The BLASTP results were then filtered through use of SCAN with the following parameters: “-a 60 60” with an E-value cutoff of 1e-4. This produced orthologs having 60 or more identities and where 60% of the alignments were made up of identities.

[0607] The following pages compile Tables 3 to 20 referred to in the examples above.

LENGTHY TABLE REFERENCED HERE
US20070016976A1-20070118-T00001
Please refer to the end of the specification for access instructions.

LENGTHY TABLE REFERENCED HERE
US20070016976A1-20070118-T00002
Please refer to the end of the specification for access instructions.

LENGTHY TABLE REFERENCED HERE
US20070016976A1-20070118-T00003
Please refer to the end of the specification for access instructions.

LENGTHY TABLE REFERENCED HERE
US20070016976A1-20070118-T00004
Please refer to the end of the specification for access instructions.

LENGTHY TABLE REFERENCED HERE
US20070016976A1-20070118-T00005
Please refer to the end of the specification for access instructions.

LENGTHY TABLE REFERENCED HERE
US20070016976A1-20070118-T00006
Please refer to the end of the specification for access instructions.

LENGTHY TABLE REFERENCED HERE
US20070016976A1-20070118-T00007
Please refer to the end of the specification for access instructions.

LENGTHY TABLE REFERENCED HERE
US20070016976A1-20070118-T00008
Please refer to the end of the specification for access instructions.

LENGTHY TABLE REFERENCED HERE
US20070016976A1-20070118-T00009
Please refer to the end of the specification for access instructions.

LENGTHY TABLE REFERENCED HERE
US20070016976A1-20070118-T00010
Please refer to the end of the specification for access instructions.

LENGTHY TABLE REFERENCED HERE
US20070016976A1-20070118-T00011
Please refer to the end of the specification for access instructions.

LENGTHY TABLE REFERENCED HERE
US20070016976A1-20070118-T00012
Please refer to the end of the specification for access instructions.

LENGTHY TABLE REFERENCED HERE
US20070016976A1-20070118-T00013
Please refer to the end of the specification for access instructions.

LENGTHY TABLE REFERENCED HERE
US20070016976A1-20070118-T00014
Please refer to the end of the specification for access instructions.

LENGTHY TABLE REFERENCED HERE
US20070016976A1-20070118-T00015
Please refer to the end of the specification for access instructions.

LENGTHY TABLE REFERENCED HERE
US20070016976A1-20070118-T00016
Please refer to the end of the specification for access instructions.

LENGTHY TABLE REFERENCED HERE
US20070016976A1-20070118-T00017
Please refer to the end of the specification for access instructions.

LENGTHY TABLE REFERENCED HERE
US20070016976A1-20070118-T00018
Please refer to the end of the specification for access instructions.

LENGTHY TABLE REFERENCED HERE
US20070016976A1-20070118-T00019
Please refer to the end of the specification for access instructions.

LENGTHY TABLE REFERENCED HERE
US20070016976A1-20070118-T00020
Please refer to the end of the specification for access instructions.

LENGTHY TABLE REFERENCED HERE
US20070016976A1-20070118-T00021
Please refer to the end of the specification for access instructions.

LENGTHY TABLE REFERENCED HERE
US20070016976A1-20070118-T00022
Please refer to the end of the specification for access instructions.

LENGTHY TABLE REFERENCED HERE
US20070016976A1-20070118-T00023
Please refer to the end of the specification for access instructions.

LENGTHY TABLE REFERENCED HERE
US20070016976A1-20070118-T00024
Please refer to the end of the specification for access instructions.

LENGTHY TABLE REFERENCED HERE
US20070016976A1-20070118-T00025
Please refer to the end of the specification for access instructions.

LENGTHY TABLE REFERENCED HERE
US20070016976A1-20070118-T00026
Please refer to the end of the specification for access instructions.

LENGTHY TABLE REFERENCED HERE
US20070016976A1-20070118-T00027
Please refer to the end of the specification for access instructions.

LENGTHY TABLE REFERENCED HERE
US20070016976A1-20070118-T00028
Please refer to the end of the specification for access instructions.

LENGTHY TABLE REFERENCED HERE
US20070016976A1-20070118-T00029
Please refer to the end of the specification for access instructions.

[0608] The material on the CD-ROM (filed in duplicate herewith; CD 010623_{—}1108, file 38236 created on Jun. 23, 2001, size 12,203 KB) is hereby incorporated by reference herein pursuant to 37 C.F.R. sec. 1.52(e)(5).

### REFERENCES

[0609] Aarts et al., Proc Natl Acad Sci 95:10306 (1998).
[0610] Alonso et al., Science, 284:2148 (1999)
[0611] Altschul et al., J. Mol. Biol. 215:403 (1990).
[0612] Altschul et al., Nucleic Acids Res. 25:3389 (1997).
[0613] An et al., EMBO J. 4:277 (1985).
[0614] Aoyama et al., N-H Plant Journal, 11:605 (1997).
[0615] Bachem et al., Plant J., 9:745 (1996).
[0616] Bailey and Elkan In: Proceedings of the second international Conference on Intelligent Systems for Molecular Biology (Altman, R., ed), pp 28-36, AAAI press (1994).
[0617] Ballas et al., Nucleic Acids Res. 17:7891 (1989).
[0618] Balzi et al., J. Biol. Chem., 269:2206 (1994).
[0619] Bansal et al., Proc. Natl. Acad. Sci. USA, 89:3654 (1992).
[0620] Batzer et al., Nucleic Acid Res., 19:5081 (1991).
[0621] Beachy and Murakishi, Phytopathology, 61:877 (1971).
[0622] Beals et al., Plant Cell, 9:1527 (1997).
[0623] Belanger et al., Genetics, 129:863 (1991).
[0624] Bevan et al., Nature, 304:184 (1983).
[0625] Blochinger & Diggelmann, Mol Cell Biol, 4:2929.
[0626] Bourouis et al., EMBO J., 2:1099 (1983).
[0627] Boyes et al., Proc Natl Acad Sci USA, 95:15849 (1998).
[0628] Byrne et al. Plant Cell Tissue and Organ Culture, 8:3 (1987).
[0629] Campbell and Gowri, Plant Physiol., 92:1 (1990).
[0630] Canto and Palukaitis, Virology, 265:74 (1999).
[0631] Cao et al., Plant Cell, 6:1583 (1994).
[0632] Cao et al., Cell, 88:57 (1997).
[0633] Century et al., Science, 278:1963 (1997).
[0634] Chandler et al., Plant Cell, 1:1175 (1989).
[0635] Christou et al., Biotechnology, 9:957 (1991).
[0636] Christou et al., Plant Physiol., 87:671 (1988).
[0637] Conklin and Last, Plant Physiol., 109:203 (1995).
[0638] Cooper et al., Virology, 206:307 (1995)
[0639] Cooper et al., Virology, 216:208 (1996).
[0640] Cordero et al., Plant J., 6:141 (1994).
[0641] Corpet et al., Nucleic Acids Res. 16:10881 (1988).
[0642] Crameri et al., Nature Biotech., 15:436 (1997).
[0643] Crameri et al., Nature, 391:288 (1998).
[0644] Creelman et al., Annu Rev Plant Physiol Plant Mol Biol 48:355 (1997).
[0645] Crossway et al., BioTechniques, 4:320 (1986).
[0646] Czako et al., Mol. Gen. Genet. 23 5 (1), 33-40 (1992).
[0647] Czemic et al., Plant Mol. Biol., 31:255 (1996).
[0648] Datta et al., Bio/Technology, 8, 736 (1990).
[0649] Dayhoff et al., Atlas of Protein Sequence and Structure, Natl. Biomed. Res. Found., Washington, C.D. (1978).
[0650] De Blaere et al., Meth. Enzymol. 143:277 (1987).
[0651] de Framond, FEBS, 290:103 (1991).
[0652] Delaney et al., Proc. Natl. Acad. Sci. USA 92:6602 (1995).
[0653] Della-Cioppa et al., Plant Physiology, 84:965 (1987).
[0654] De Oliveira et al., Microbios., 76:213 (1993).
[0655] Dennis et al., Nucleic Acids Res., 12:3983 (1984).
[0656] Dong et al., Curr Opin Plant Biol 1:316 (1998).
[0657] Dunigan and Madlener, Virology, 207:460 (1995).
[0658] Durrant et al., The Plant Cell, 12:963 (2000).
[0659] Dzelkalns et al., Plant Cell, 5:855 (1993).
[0660] Eisen et al., Trends in Plant Sci. 95:14863 (2000).
[0661] Ellis and Jones, Curr Opin Plant Bio 1:288 (1998).
[0662] Elroy-Stein et al., PNAS USA, 86:6126 (1989).
[0663] English, et al., Plant Cell 8:179 (1996).
[0664] Eulgem et al., Trends in Plant Sci. 5:199 (2000).
[0665] Falk et al., Proc Natl Acad Sci USA 96:3292 (1999).
[0666] Feys et al., Plant Cell 6:751 (1994).
[0667] Franken et al., EMBO J., 10:2605 (1991).
[0668] Fromm et al., Bio/Technology 8:833 (1990).
[0669] Gallie et al., Molecular Biology of RNA, 237 (1989).
[0670] Gallie et al., Nucl. Acids Res., 15:8693 (1987).
[0671] Gan et al., Science (1995), 270 (5244), 1986-8).
[0672] Gatz Current Opinion in Biotechnology, 7:168 (1996).
[0673] Gatz, C., Annu. Rev. Plant Physiol. Plant Mol. Biol., 48:89 (1997).
[0674] Gelfand, eds., PCR Strategies (Academic Press, New York (1995)).
[0675] Glazebrook, J., Curr. Opin. Plat Biology, 2:280 (1999).
[0676] Glazebrook et al., Genetics 143:973 (1996).
[0677] Glazebrook et al., Proc. Natl. Acad. Sci. USA 91:8955 (1994).
[0678] Gordon-Kamm et al., Plant Cell, 2, 603 (1990).
[0679] Graham et al., Biochem. Biophys. Res. Comm., 101:1164 (1981).
[0680] Graham et al., J. Biol. Chem., 260:6555 (1985).
[0681] Graham et al., J. Biol. Chem., 260:6561 (1985).
[0682] Guerineau et al., Mol. Gen. Genet. 262:141 (1991).
[0683] Gulyas and Farkas, Phytopath. Z., 91:182 (1978)
[0684] Hammand-Kosack and Jones, Ann. Rev. Plant Physiol. Plant Mol. Biol., 48:575 1997).
[0685] Heinlein et al., Science, 270:1983 (1995).
[0686] Henikoff & Henikoff, Proc. Natl. Acad. Sci. USA 89:10915 (1989).
[0687] Henikoff and Henikoff, Proc. Natl. Acad. Sci. USA, 89:10915 (1992).
[0688] Hiei et al., Plant J. 6:271 (1994).
[0689] Higgins et al., Gene 73:237 (1988).
[0690] Higgins et al., CABIOS 5:151 (1989).
[0691] Hinchee et al., Biotechnology, 6:915 (1988).
[0692] Hoekema, In: The Binary Plant Vector System. Offset-drukkerij Kanters B. V.
[0693] Horvath and Chua, Plant Mol. Biol., 31:1061 (1996).
[0694] Huang et al., CABIOS 8:155 (1992).
[0695] Hudspeth & Grula, Plant Molec. Biol. 12:579 (1989).
[0696] Huffman et al., J. Cell. Biochem., 17B: Abstract.
[0697] Hunt et al., Mol. Plant-Microbe Int. 9:261 (1998).
[0698] Ingelbrecht et al., Plant Cell, 1:671 (1989).
[0699] Innis et al., eds., PCR Protocols: A Guide to Methods and Applications (Academic Press, New York (1995).
[0700] Innis and Gelfand, eds., PCR Methods Manual (Academic Press, New York) (1999).
[0701] Jobling et al., Nature, 325:622 (1987).
[0702] John et al., Proc. Natl. Acad. Sci. USA 89(13):5769 (1992).
[0703] Jones et al., Adv Bot Res 24:89 (1997).
[0704] Joshi et al., Nucleic Acid Res. 15:9627 (1987).
[0705] Joshi, Nucl. Acid Res., 15, 6643 (197).
[0706] Karlin and Altschul, Proc. Natl. Acad. Sci. USA 87:2264 (1990).
[0707] Karlin and Altschul, Proc. Natl. Acad. Sci. USA 90:5873 (1993).
[0708] Keller et al., Genes Dev., 3:1639 (1989).
[0709] Klein et al., Bio/Technology, 6:559 (1988).
[0710] Klein et al., Nature (London) 327:70 (1987).
[0711] Klein et al., Plant Physiol., 91:440 (1988).
[0712] Klein et al., Proc. Natl. Acad. Sci. USA, 85:4305 (1988).
[0713] Kohler et al., Plant Mol. Biol., 29:1293 (1995).
[0714] Knauf, et al., Genetic Analysis of Host Range Expression by Agrobacterium In: Molecular Genetics of the Bacteria-Plant Interaction, Puhler, A. ed., Springer-Verlag, New York, 245 (1983).
[0715] Komari, Plant Cell Reports, 9:303 (1990).
[0716] Koziel et al., Biotechnology, 11:194 (1993).
[0717] Kridl et al., Seed Science Research, 1:209 (1991).
[0718] Kriz et al., Mol. Gen. Genet., 207:90 (1987).
[0719] Kunkel, Proc. Natl. Acad. Sci. USA, 82:488 (1985).
[0720] Kunkel et al., Methods in Enzymol., 154:367 (1987).
[0721] Lange et al., Plant Sci., 142:133 (1999).
[0722] Langridge et al., Cell, 34:1015 (1983).
[0723] Lashbrook et al., Plant Cell 6:1485 (1994).
[0724] Leister et al., P.N.A.S., (USA), 95:370 (1998).
[0725] Leister et al., Proc. Natl. Acad. Sci. USA, 95:370 (1998).
[0726] Liang et al., Science, 257:967 (1992).
[0727] Lindstrom et al., Der. Genet., 11: 160 (1990).
[0728] Lommel et al., Virology, 81:382 (1991).
[0729] Ly et al., Science, 287:2486 (2000).
[0730] Macejak et al., Nature, 353:90 (1991).
[0731] Mansson et al., Gen. Genet., 200:356 (1985).
[0732] Martin and Paz-Ares, Trends in Genetics 13:67 (1997).
[0733] Martinez et al., J. Mol. Biol., 208:551 (1989).
[0734] McBride et al., Proc. Natl. Acad. Sci. USA, 91:7301 (1994).
[0735] McCabe et al., Bio/Technology, 6:923 (1988).
[0736] McDowell et al., Plant J. 22:523 (2000).
[0737] McDowell et al., Plant Cell 10:1861 (1998).
[0738] McNellis et al., Plant J. 1998, 14:247-257.
[0739] Meinkoth and Wahl, Anal. Biochem. 138:267 (1984).
[0740] Messing & Vierra, Gene, 19:259 (1982).
[0741] Meyers et al., Plant J. 20:317 (1999).
[0742] Mogen et al., Plant Cell 2:1261 (1990).
[0743] Moore et al., J. Mol. Biol., 272:336 (1997).
[0744] Munroe et al., Gene 91:151 (1990).
[0745] Murray et al., Nucleic Acids Res., 17:477 (1989).
[0746] Myers and Miller, CABIOS 4:11 (1988).
[0747] Needleman and Wunsch, J. Mol. Biol. 48:443 (1970).
[0748] Odell et al., Nature, 313:810 (1985).
[0749] Odell et al., Nature, 313:810 (1985).
[0750] Ohtsuka et al., J. Biol. Chem., 260:2605 (1985).
[0751] Okamuro et al., Biochemistry of Plants, 15:1 (1989).
[0752] Otsuki et al., Virology, 50:45 (1972)
[0753] Paszkowski et al., EMBO J., 3:2717 (1984).
[0754] Pacciotti et al. Bio/Technology 3:241 (1985).
[0755] Padgett and Beachy, Plant Cell, 5:577 (1993).
[0756] Park et al., J. Plant Biol. 38(4):365 (1985).
[0757] Pearson et al., Meth. Mol. Biol. 24:307 (1994).
[0758] Pearson and Lipman, Proc. Natl. Acad. Sci. 85:2444 (1988).
[0759] Penninck et al., Plant Cell 8:2309 (1996).
[0760] Perlak et al., Proc. Natl. Acad. Sci. USA, 88:3324 (1991).
[0761] Pieterse et al., Plant Cell, 10:1571 (1998).
[0762] Pieterse et al., Plant Cell, 8:1225 (1996).
[0763] Proudfoot, Cell 64:671 (1991).
[0764] Quigley et al., J. Mol. Evol., 29:412 (1989).
[0765] Ralston et al., Genetics, 119:185 (1988).
[0766] Reina et al., Nucleic Acids Res., 18:6425 (1990).
[0767] Reina et al., Nucleic Acids Res., 18:7449 (1990).
[0768] Riggs et al., Proc. Natl. Acad. Sci. USA, 83:5602 (1986).
[0769] Rochester et al., (1986).
[0770] Rommens et al., Plant Cell, 7:1537 (1995).
[0771] Ronald, Curr Opin Plant Biol 1:294 (1998).
[0772] Rossolini et al., Mol. Cell. Probes, 8:91 (1994).
[0773] Roth et al., Nature Biotechnology, 16:939 (1998).
[0774] Ruiz et al., Plant Cell 10:937 (1998).
[0775] Ryals et al., Plant Cell 8:1809 (1996).
[0776] Ryals et al., Plant Cell 9:425 (1997)
[0777] Sambrook et al., Molecular Cloning: A Laboratory Manual (2d ed., Cold Spring Harbor Laboratory Press, Plainview, N.Y.) (1989).
[0778] Sanchez-Fernandez et al., Mol. Gen. Genet., 258:655 (1998).
[0779] Sanfacon et al., Genes Dev. 5:141 (1991).
[0780] Sanford et al., Particulate Science and Technology, 5:27 (1987).
[0781] Schemthaner et al., EMBO J., 7:1249 (1988).
[0782] Schindler et al., Plant Cell 4:1309 (1992).
[0783] Schmitz and Rao, Virology, 248:323 (1996)
[0784] Schwob et al., Plant J., 4:423 (1993).
[0785] Shah et al., Mol. Plant-Microbe Interact. 10:69 (1997).
[0786] Shimamoto et al., Nature, 338:274 (1989).
[0787] Shirasu et al., Plant Cell 9:261 (1997).
[0788] Shulaev et al., Plant Cell 7:1691 (1995).
[0789] Simpson, Plant Mol. Biol., 19:699 (1985).
[0790] Skuzeski et al., Plant Molec. Biol., 15:65 (1990).
[0791] Slater et al., Plant Mol. Biol., 5:137 (1985).
[0792] Smart and Fleming, J. Biol. Chem., 271:19351 (1996).
[0793] Smith et al., Adv. Appl. Math. 2:482 (1981).
[0794] Smith et al., Planta 168:94 (1986).
[0795] Song et al., Science, 270:1804 (1995).
[0796] Spencer et al., Theor Appl Genet, 79:625 (1990).
[0797] Staswick et al., Proc. Natl. Acad. Sci. USA 89:6837 (1992).
[0798] Staub et al., EMBO J., 12:601 (1993).
[0799] Staub et al., Plant Cell, 4:39 (1992).
[0800] Stemmer, Nature, 370:389 (1994).
[0801] Stemmer, Proc. Natl. Acad. Sci. USA, 91:10747 (1994).
[0802] Sukhapinda et al. Plant Mol. Biol. 8:209 (1987).
[0803] Sullivan et al., Mol. Gen. Genet., 215:431 (1989).
[0804] Svab et al., Proc. Natl. Acad. Sci. USA, 87:8526 (1990).
[0805] Svab et al., Proc. Natl. Acad. Sci. USA, 90:913 (1993).
[0806] Thomma et al., Plant Physiol., 121:1093 (1999).
[0807] Thomma et al., Proc. Natl. Acad. sci. U.S.A., 85:15107 (1998).
[0808] Tijssen, Laboratory Techniques in Biochemistry and Molecular Biology-Hybridization with Nucleic Acid Probes, part I chapter 2 “Overview of principles of hybridization and the strategy of nucleic acid probe assays” Elsevier, New York (1993).
[0809] Turner et al., Molecular Biotechnology, 3:225 (1995).
[0810] VanTunen et al., EMBO J., 7:1257 (1988).
[0811] Vasil et al., Biotechnology, 11:1553 (1993).
[0812] Verduin, J. Gen. Virol., 38:571 (1978).
[0813] Vemooij et al., Plant Cell 6:959 (1994).
[0814] Visedo et al., Physiologia Plantarum 78:218 (1990).
[0815] Vodkin, Prog. Clin. Biol. Res., 138:87 (1983).
[0816] Vogel et al., EMBO J., 11:157 (1992).
[0817] Walker and Gaastra, eds., Techniques in Molecular Biology, MacMillan Publishing Company, New York (1983).
[0818] Wandelt et al., Nucleic Acids Res., 17:2354 (1989).
[0819] Waterman, M. S. Introduction to Computational Biology: Maps, sequences and genomes. Chapman & Hall. London (1995). Weeks et al., Plant Physiol., 102:1077 (1993).
[0820] Weissinger et al., Annual Rev. Genet., 22:421 (1988).
[0821] Wenzler et al., Plant Mol. Biol., 13:347 (1989).
[0822] Weymann et al., Plant Cell 7:2013 (1995).
[0823] White et al., Nucl Acids Res, 18:1062 (1990).
[0824] Whitham et al., P.N.A.S., (USA), 93:8776 (1996).
[0825] Whitham et al., Cell, 78:1101 (1994).
[0826] Willits et al., Mol Plant-Microbe Interact 11:795 (1998).
[0827] Xie et al., Science 280:1091 (1998).
[0828] Yamamoto et al., Nucleic Acids Res., 18:7449 (1990).
[0829] Yang et al., Plant Mol. Biol., 38:1201 (1998).
[0830] Yang & Klessig, Proc. Natl. Acad. Sci. USA 93:14972 (2000).
[0831] Yu et al., Proc. Natl. Acad. Sci. USA 95:7819 (1998).
[0832] Zhang et al., Proc. Natl. Acad. Sci. USA, 94:4504 (1997).
[0833] Zhou et al., EMBO J., 16:3207 (1997).
[0834] Zhou et al., Plant Cell 8:2235 (1996).
[0835] Zhou et al., Plant Cell 10:1021 (1998).

[0836] All publications, patents and patent applications are incorporated herein by reference. While in the foregoing specification this invention has been described in relation to certain preferred embodiments thereof, and many details have been set forth for purposes of illustration, it will be apparent to those skilled in the art that the invention is susceptible to additional embodiments and that certain of the details described herein may be varied considerably without departing from the basic principles of the invention.

LENGTHY TABLE
The patent application contains a lengthy table section. A copy of the table is available in electronic form from the USPTO web site (http://seqdata.uspto.gov/?pageRequest=docDetail&DocID=US20070016976A1) An electronic copy of the table will also be available from the USPTO upon request and payment of the fee set forth in 37 CFR 1.19(b)(3).

What is claimed is:

1. An isolated polynucleotide comprising a plant nucleotide sequence that alters transcription of an operatively linked nucleic acid segment in a plant cell after pathogen infection, which plant nucleotide sequence is from a gene encoding a polypeptide that is substantially similar to a polypeptide encoded by a gene comprising a promoter selected from the group consisting of SEQ ID NOs: 1047, 1051, 1053, 4794, 4892, 5261, 5738 and 6469.

2. An isolated polynucleotide comprising a plant nucleotide sequence that alters transcription of an operatively linked nucleic acid segment in a plant cell after pathogen infection, which plant nucleotide sequence hybridizes under high stringency conditions to the complement of any one of SEQ ID NOs:1047, 1051, 1053, 4794, 4892, 5261, 5738 or 6469.

3. The isolated polynucleotide of claim 2, which plant nucleotide sequence hybridizes under very high stringency conditions to the complement of any one of SEQ ID NOs: 1047, 1051, 1053, 4794, 4892, 5261, 5738 or 6469.

4. The isolated polynucleotide of claim 1 or 2 which is selected from the group consisting of SEQ ID NOs: 1047, 1051, 1053, 4794, 4892, 5261, 5738, 6469, and a fragment thereof.

5. The polynucleotide of claim 1 or 2 wherein the plant nucleotide sequence is 25 to 2000 nucleotides in length.

6. The polynucleotide of claim 1 or 2 wherein the plant nucleotide sequence is from a dicot.

7. The polynucleotide of claim 1 or 2 wherein the plant nucleotide sequence is from a monocot.

8. The polynucleotide of claim 1 or 2 wherein the plant nucleotide sequence is from a cereal plant.

9. The polynucleotide of claim 1 or 2 wherein the plant nucleotide sequence is a maize, soybean, barley, alfalfa, sunflower, canola, soybean, cotton, peanut, sorghum, tobacco, sugarbeet, rice or wheat sequence.

10. An expression cassette comprising the polynucleotide of claim 1 or 2 operatively linked to an open reading frame.

11. A host cell comprising the expression cassette of claim 10.

12. The host cell of claim 11 wherein the cell is a yeast, a plant cell, a bacterium, a cereal plant cell, or an Arabidopsis cell.

13. The host cell of claim 11 which is a monocot cell.

14. The host cell of claim 11 which is a dicot cell.

15. A transformed plant, the genome of which is augmented with the expression cassette of claim 10.

16. The transformed plant of claim 15 which is a dicot.

17. The transformed plant of claim 15 which is a monocot.

18. The transformed plant of claim 15 which is selected from the group consisting of maize, soybean, barley, alfalfa, sunflower, canola, soybean, cotton, peanut, sorghum, tobacco, sugarbeet, rice, wheat and Arabidopsis.

19. A method for augmenting a plant genome, comprising:
a) contacting a plant cell with an expression cassette comprising a promoter from a gene encoding a polypeptide that is substantially similar to a polypeptide encoded by a gene comprising a promoter selected from the group consisting of SEQ ID NOs: 1047, 1051, 1053, 4794, 4892, 5261, 5738 and 6469 operatively linked to an open reading frame so as to yield a transformed plant cell; and
b) regenerating the transformed plant cell to provide a differentiated transformed plant, wherein the differentiated transformed plant expresses the open reading frame in the cells of the plant.

20. A method to alter the phenotype of a plant cell comprising: introducing an expression cassette comprising a promoter from a gene encoding a polypeptide that is substantially similar to a polypeptide encoded by a gene comprising a promoter selected from the group consisting of SEQ ID NOs: 1047, 1051, 1053, 4794, 4892, 5261, 5738 and 6469 operatively linked to an open reading frame into the plant cell and expressing the open reading frame in the cell so as to alter a characteristic of that cell relative to a plant cell that does not comprise the expression cassette.

21. The method of claim 19 or 20 wherein the plant cell is a dicot cell.

22. The method of claim 19 or 20 wherein the plant is a monocot cell.

23. The method of claim 19 or 20 wherein the plant cell a cereal cell.

24. The method of claim 19 or 20 wherein the plant cell is selected from the group consisting of a maize, soybean, barley, alfalfa, sunflower, canola, soybean, cotton, peanut, sorghum, tobacco, sugarbeet, rice, wheat and Arabidopsis cell.

25. The method of claim 19 or 20 wherein the open reading frame is in an antisense orientation relative to the nucleotide sequence which alters transcription.

26. The method of claim 19 or 20 wherein the expression inhibits transcription or translation of endogenous plant nucleic acid sequences corresponding to the open reading frame.

27. The method of claim 19 wherein the open reading frame is expressed in an amount that is greater than the amount in a plant which does not comprise the expression cassette.

28. The method of claim 18 or 19 wherein the open reading frame encodes a protein.

29. The method of claim 28 wherein the protein encodes a regulatory product.

30. The method of claim 28 wherein the expression of the open reading frame confers insect resistance, bacterial resistance, fungal resistance, viral resistance, or nematode resistance.

31. A transformed plant prepared by the method of claim 20.

32. A product of the plant of claim 31 which comprises the expression cassette or the gene product encoded by the open reading frame.

33. The product of claim 32 which is selected from the group consisting of a seed, fruit, vegetable, transgenic plant, and a progeny plant.

34. A method to confer resistance or tolerance to a plant to a pathogen, comprising:
a) contacting plant cells with an expression cassette comprising a polynucleotide encoding a polypeptide that is substantially similar to a polypeptide encoded by an open reading frame comprising any one of SEQ ID NOs: 50, 139, 609, 4210, 3311, 3791, 2699, 3463, 3584, 4451 or 4595 so as to yield transformed cells; and
b) regenerating the transformed plant cells to provide a differentiated transformed plant, wherein the differentiated transformed plant expresses the polynucleotide in the cells of the plant in an amount effective to confer resistance or tolerance to the plant to a pathogen relative to a corresponding plant which does not comprise the expression cassette.

35. The method of claim 34 wherein the cells are monocot cells.

36. The method of claim 34 wherein the cells are dicot cells.

37. The method of claim 34 wherein the open reading frame encodes a DNA binding protein, hormone response protein, membrane protein, metabolic protein, transposon, receptor/kinase, phosphatase, stress protein, cell wall protein, lipid transfer protein, heat shock protein, protein processing protein, RNA processing protein, non-cell wall structural protein or a non-kinase signaling protein.

38. A transformed plant prepared by the method of claim 34.

39. A seed of the plant of claim 38.

40. A progeny plant of the plant of claim 39.

41. A method to identify a plant cell infected with a pathogen, comprising:
a) contacting isolated nucleic acid obtained from a plant cell suspected of being infected with a pathogen with at least one oligonucleotide under conditions effective to specifically amplify a nucleotide sequence corresponding to one of SEQ ID NOs: 50, 139, 609, 4210, 3311, 3791, 2699, 3463, 3584, 4451 or 4595 or a portion thereof, so as to yield an amplified product; and
b) detecting or determining the presence or amount of the amplified product, wherein the presence or amount of the amplified product is indicative of pathogen infection.

42. A method to identify a plant cell infected with a pathogen, comprising:
a) contacting a sample comprising polypeptides obtained from a plant cell suspected of being infected with a pathogen with an agent that specifically binds to a polypeptide that is substantially similar to a polypeptide encoded by an open reading frame comprising one of SEQ ID NOs: 50, 139, 609, 4210, 3311, 3791, 2699, 3463, 3584, 4451 or 4595 so as to form a complex; and
b) detecting or determining the presence or amount of the complex, wherein the presence or amount of the complex is indicative of pathogen infection.

43. A method to identify a plant cell infected with a pathogen, comprising:
a) contacting nucleic acid obtained from a plant cell suspected of being infected with a pathogen with a probe corresponding to a sequence selected from the group consisting of SEQ ID Nos. 50, 139, 609, 4210, 3311, 3791, 2699, 3463, 3584, 4451 or 4595 or a portion thereof, under stringent hybridization conditions to form a duplex; and
b) detecting or determining the presence or amount of the duplex, wherein the presence of a duplex is indicative of infection.

The application's sequence listing, which the Patent Office published only in electronic form, follows.

SEQUENCE LISTING (6813 sequences)

SEQ ID NO: 1 - DNA, 636 bp, Arabidopsis thaliana
atgaggaaaacaccatctctcggagcggaactgctctgctcgtattctctctctgatccatctccatcaccatctccgttctccagtgaaatggagattccggaggggacaccaaaagattcagaaaaggccatcgaacaagatacagtatcatcaattggggtaaagaaacctccagtggactctccagccactactaatgctgctagcggtcgacttgtttatgtccggagaagagtggaggttgacacatccaaagccgctgctagcactactaatccgaatccgcctcctactaaggcaccaccccagataccttcatcacccgcacaggcacaggcacaggaaccaacccctaccagccataagttagactgggaagagcgttaccttcatcttcaaatgcttcttaacaagcttaatcaatctgatcggaccgatcatgttcagaatatgtttcctctgttattagtgctttggtcactttcctccgccgagcttagcaagcatgctgttgacttggaaaagaggtctattcagttctctctcgaggaagcgagagagatgcagcgcgtagcagctttaaacgtgttaggaaggtctgtgaatagtataaaatctacatcaaatgagtga

SEQ ID NO: 2 - DNA, 1400 bp, Arabidopsis thaliana
atggtggagatgatgagatcagagaatcatctaagacaagcttcgaagcatcggaacaacaattttccggtgaagttagagatcattgaagattctcttgaagaagaacacgctcctctcaacaaacgatccaagctatggagcaatggaacaagtgtctctaagtttagtctacttgaagagccaagtcctttggggttgagtttaaaaaagagcccatcttttcaagaactgattgagatgaaactttctcaaagtggtgatgactcaaattcggttaagaaagaaagttttggttttggtggtgtaggaaccgttgagaagcttaaagcttctaactttcctgctactattctcaggattggtcaatgggagtataagtcaaggtatgaaggtgatttggtggcgaaatgttactttgcaaaacataaacttgtgtgggaagtgttggaacaaggtcttaagagcaagattgagattcagtggtctgatattatggctttgaaggctaatttgccagaggatgaacctggaaccctgactattgtgctggctaggcggccattgtttttcagagaaactaatccgcagcctagaaaacatactttgtggcaggcgacatcggattttactgatggtcaagctagcatgaacaggcaacattttctgcagtgtcccccagggattatgaacaaacattttgagaagcttgttcaatgtgatcatcgcttgttctgtctaagccggcagccagagataaacttggccgcaccgttctttgattcacgactatctatatttgaggatccctcagtgtctggatctcataatattgcatctcctgttggggctcagtcatcatcagaacatgtgtctctatctcatgacgcactatcgcctagctcagtgatggatgctcgtgcaatcgaaggagttggtggttccattgattcgaggaatacaaacggttggagtcagataaaaatgcctggactacaccaatctatctcgatgaacgatttccttacgtttttgtcagatcaagcttgtgaaaacaaccaagagtttgaggaaatgaaacagttactgctaagtgacaacactcaaaccgatccatctgatgagaagtctgtcatgtcaaaggtgaattctttctgcaacctcttgcaatctgctgcaaactcacagctcaatatcgaaactgctgataccgaaagagttgttggggtcgataacaatagacacatgcccgaaggaggcaaaagagttgttgaccctgcttcaagcagcaagccactacaagggatgtcaaggaaagactcattcagtgatttgctggtgcaccttcctcgaatcacatcactcccaaagttcttgttcaacatttcagaagaagacta

SEQ ID NO: 3 - DNA, 1710 bp, Arabidopsis thaliana
atgacgattgcggcagcgccagcacgccagacagatcgatcagccactggtttcaaccctgcttacgtcacgacggcgaaggcggtgagcgttccggttcaagttcctccggcgactgtggtttccgaaggattaggtaaagatgcgttgatctcatggttcagaggagaattcgctgcggcaaacgcgataatcgacgcgatgtgctcgcatctaaggatagctgaagaagcggtatctggatcggagtacgaagctgtattcgcggcgatccatcgccgtcgtctgaattggatccctgttcttcagatgcagaagtatcattccatcgctgaagtagcgatcgagcttcagaaagtggcggctaagaaagcggaggatctgaaacagaagaaaacagaggaggaggcggaggaagatctgaaagaggtggtggcgacggaggaagaggaagtgaagaaagagtgttttaacggcgagaaagtaacggagaatgacgtaaacggagatgtagaagacgttgaagatgattcaccaactagtgatatcactgattcaggttctcatcaggatgttcaccaaactgttgttgcggatactgcacatcagattatatgccatagccatgaagattgtgatgcacgttcatgtgagatcaaacctatcaaaggtttccaagctaaagaacaagtcaaaggccacactgtgaatgttgtgaaaggactaaagctgtatgaagagttacttaaagaagatgagatatctaaattgttagactttgtggcagaactacgagaagctggcataaacgggaagcttgcaggtgagagctttatactgttcaacaaacagattaaagggaacaagagagagctgattcagcttggtgtccccatctttggtcatgtcaaggcggatgaaaactctaacgacaccaacaactctgttaacatcgagccaattccaccacttcttgagagtgtcattgatcactttgtcacatggagactcatcccagaatacaagagacctaacggctgtgtcatcaacttctttgaagagggtgaatactcacagcctttcctcaaaccacctcacttagaacaaccaatctccactcttgtcctctctgaatcaacaatggcctatggacgcattctctcaagtgacaacgaaggcaacttcagaggacctttgacactctctctcaaacaaggatctttgttggtgatgagagggaacagtgcagacatggcaagacatgtaatgtgtccatcacaaaacaaaagagtaagcatcacattctttcgtattcgacctgacacatatcataaccattcacaacccaacagtcctcgcaacgacggtgtcatgacaatgtggcaaccctaccaaatgacaccaactccattcctcaatggttatgatcattcaattgacatgatgccaaaacttggagtcctacgtcctccaatggtcatgatggcaccaccaccggttcaaccaatgatattaccaagtcccaatgtgatgggaaccggtggtggtaccggtgttttcttaccatgggcctctgttaatagctcaagaaaacatgtgaagcatttgcctccacgcgcgcagaagaagcgattacttccgcttcctcctgctgcttcttcttctccagctggaggatccacctctgagcctgtgatcactgtaggttaa

SEQ ID NO: 4 - DNA, 462 bp, Arabidopsis thaliana
atgggtgttcttgatcacgtctctgaatatttcgattgttctcatggaagctccaagagacacaaaagtctacagacggtggatgtgagggttttgatagattgtgaaggatgcgagaggaaagtaaggagagctttagaaggaatgagaggaataagagatgtaaccatcgagccaaatgctcagaaagtgacagtggttgggtacgttgaaccaaacaaagtggtggctcgtatcattcaccgaaccggtaaaagagcagagctatatcctttcgttccttacgacgttgtggctcatccttacgcgtctggtgtttacgataacagagccccgactgggtacgttaggaacaccgagtatgatccacatgtgtcacgtctcgcacgtgctagctccactgaggttcgttatactacggcgtttagcgacgagaacgcctccgcttgtgttgttatgtga

SEQ ID NO: 5 - DNA, 885 bp, Arabidopsis thaliana
atgttcagaagaaggaatgctcaccaactcgacaatgatgattctcaacaagataacaaggttagagaattgaaatccgcgataggaccattatcgggacatagtttagttttctgctctgatgcttccttgaggagatttctagatgctcgtaattgggatgtggaaaaagccaagaaaatgatccaagagactcttaaatggagatcaacttataaacctcaagagatccgttggaatcaagtagcacatgaaggtgagaccggaaaagcttcaagagctagttttcatgatcgacaaggtagagtagtgcttataatgagaccagccatgcagaactcaacatcacaagaaggtaatatcaggcatttggtgtatcttcttgaaaatgcaatcataaatcttcccaagggacaaaaacaaatgtcttggctcattgatttcactggttggtctatggctgttaatcctcctatgaaaacaacacgcgaaatcattcacattctacagaactattaccctgagagactcggtatcgcctttctctacaatccaccaagactcttccaagcagtctacagggctgctaagtacttcttggacccacgtacagctgaaaaggtgaaatttgtgtacccaaaagacaaagcaagtgatgaactgatgacgacacattttgacgttgagaatctccccaaggaattcggaggtgaagcaacactagagtatgatcatgaagatttctcacgacaaatgtatgaagacgatctcaaaaccgcaaaatactggggactagaggggaagcactatccgaaaacaaacggtttctctccatccgatgttgttcctgagccggcgatagaaatcgcatcagcagctagctga

SEQ ID NO: 6 - DNA, 1224 bp, Arabidopsis thaliana
atggaagtgtcgaaaaagaaaggtggagattttcagcaatgtcacgaattgattcccggtttaccttccgaactagctttggagtgtttggtcagagttccgttccaattccaatccgccatgagatccgtttgccgttcttggcgtagcttactctccgactcttcttttatccaagaacggcggagatgcggcaaaacagagcttctcctctgcctcgttcaaccgctaacgccgccaattccagcgtctaaatcggttgacgagacattaatggttgacgagaaaaaatcagaggatgagtcacacccgcgcgttttctgcacgccgcgttttggattgagcgtttacaacgctgcgatgtccacgtggcatcgcgttgcgtttccagaggaggagcagatcccgcttttctgcgagtgcgtcgtgcttcaggacgccgggaagattctgctcatcggcggttgggatccggagacgttacagccgacgagagacgtttacgttctggaattcgccggaaggaagtggagacgaggtgcgccaatgaaggaatcacgatcattcttcgcctgcgcctccgtaagtccaacgaaggtatacgtcgccggaggtcacgacgatcagaaaaacgctttacgctcggcggaggtgtacgacgtcgagaaagacgagtggtcgtcggttactccgatgacggaaggaagagacgaatgtcaaggattcgccgttggtatgggtctaaggttttgcgtgctgagcggttacggaacggaatctcaaggaagattccgatctgacggagaaatttacgatccagcgacagattcatggtcgagaatcgacaacgtctggcgatttccagatactagcccgagaggtcgcaccgccggagactttagaagctcctctacgttatggtgtttcacagacactgatttacagagtgaacgtcgatgggaaactaacgatgattcgagaaatttgaaactggatcttcaatctatacagcttccgatgacaggaagctcagttttcgccggaagcttaggaggtgaatcggtggtaatgattggcggtaaaagagagagtgaaggtgaaggtgaaggaggagtgatgatgaagatgacgactgagaagaaaatgggaaaatggagtcatcatgttcatataccttgtgatttctctactcttccattttcgcatgcttcaatctatgtttga

SEQ ID NO: 7 - DNA, 1040 bp, Arabidopsis thaliana
atgctttggataacgagatttgctggattattctccgccgcgatggcagtgatcgtgttatctccgtcgcttcagtcatttcctccggcggcggcaatccgttcttctccatcaccgatcttcagaaaagctccagcggtgttcaacaacggcgacgaatgtctctcctccggcggcgtctgcaatccgtcgttggtccacgtggcgatcacgttagacgtagagtacctgcgtggctcaatcgcagccgttaactcgatccttcagcactcggtgtgtccagagagcgtcttcttccacttcatcgccgtctccgaggaaacaaacctgttggagtcgctggtgagatcggttttcccgagactgaaattcaatatttacgattttgcccctgagacagttcgtggtttgatttcttcttccgtgagacaagctctcgagcagcctctgaactacgctagaagctacttagcggatctgctggagccttgtgttaaccgtgtcatatacttggattcggatcttgtcgtcgtcgatgacatcgctaagctttggaaaactagcctaggctcgaggataatcggagctccggagtattgtcacgcgaatttcacgaaatacttcaccggaggattctggtcggaggagagattctccggtacctttagagggaggaagccatgttacttcaacacaggtgtgatggtgatagatcttaagaaatggagaagaggtggttacacgaaacgtatcgagaaatggatggagattcagagaagagagaggatttacgaactaggctcgcttccaccgtttcttctagttttctccggtcacgtggctcccatctctcaccggtggaaccagcatggacttggtggtgacaatgttagaggtagctgtcgtgatttgcatcctggtcctgtgagtttgctgcattggtctggtagtggcaagccctggataagactcgattccaaacggccttgtcccttagacgcattatggacgccttacgacttgtatcgacattcgcattg

SEQ ID NO: 8 - DNA, 765 bp, Arabidopsis thaliana
atggcgatcgaggatcaagagaacacaatccgtgaaatcaaacctaagaacagaagaatcatgggagctggtggtccggaggaagaggagaaccggtggccgccatggttgaaacctttgcttaaagagcaattctttgttcattgcaagtttcatggagactctcataagagtgaatgcaatatgtattgcttagactgcaccaatggcccactttgctctctttgtcttgctcatcacaaggatcatcgcaccattcagataaggagatcttcttatcatgatgttataagggtgaatgagatacaaaagtatcttgatataggtgggatccaaacctatgtgatcaatagtgctaaagtcgtcttcctgaatgagaggcctcagcctaggcctgggaaaggagtgaccaatacctgcaaggtttgctatcgtagcctcgttgatgatagcttccgcttctgctctcttggctgcaagtttcacctaacttctccttgcatttcagtaaactcttttctgatacttactttctctatgtttttgggaaatgaaatcaagattgctggaacatcaagaggctttgaaaagggaagggagaacctgctaatggaaacagaggattcaagtagcagcattgcaattgggaagaacattacaaatctccagagtttcagcccatcaacacctccacttactacatctagtaactgcagaatcgtcaagcgaagaaagggaattcctcaccgatctccaatgggataa

SEQ ID NO: 9 - DNA, 1398 bp, Arabidopsis thaliana
atggatgacgttaaagataagctaaagggattcatgaaaaaagtcaatctctcttcttcttccggcaaattcaaaggccaaggtcgggttctcggatcttcttcttcttcctctgcaccacccgttaacccgattcagaaccggtttaactcttcccaagctcccaatccgactcctagacccaaacccaatccaaatccgttgcctgagaaacccttatcctcctccgatcagaagattagtgggtcaacgagaaacccggatcatgacccggttcgtgctccacaagatgggtttgacccgtacggtgctttcataacgtcttcgaacagatctcagaacggatattctctgagcatgttcgagtgtccgatttgtaaaaatccattcacgtcagaggaagaagtctctgttcatgtcgagagctgtcttggggacactaatggagacgaatcttcatttgagaaggataataatgataacgataaatccgaaatggagaaacttgtggttgtgtatctctctgggaagccaagtgagagctctattgatgttttgcttaggttgtttaagaacatagtgaaagaacctgagaatgctaagtttagaaaagttagaatgagtaatgctaagattaaagaagctattggtgatgttgctggaggtgtcgagcttcttgagttggttggttttgaattgaaagaggaaaatgatgagatttgggctgttatggatgttcctagtgaagaacaatctatattgatcaataaagttgtcggatatctagaaaagagaaagacagagagttcaggatcttcagctcaggttatggaacctgtggctccaaagaagattgatagagagaatggttgtttcttggttcagattcgtgtctttttctcggtttctgaaaacgtagcatcgagaatagaggtacctgattcgttctatagtctctcggcggatgaaataaagagagaagcggatttacggaggaaaaagattgcggagtcacagcttttgattccaagatcttataaggagaaacaagcgaaagcagctagaaagagatacaaaagaagtatgataagagtgcagtttcctgacggagttgtgcttcaaggtgtgtttgctccatgggaacctacttttgctctctatgagtttgtgagctctgctttgaaagaaccaagtttgcagtttgagcttctggatcctgtgctggttaaacggcgtgtgattccacatactccagccccgggacagaaaccgataacgttagaggacgaagagcttgttccgtcagcgctcatcaggttcagaccgatcgaaacagactctctcgtctttacaggactccgcaatgaactcctggagatcagtgaaccactctcgtga

SEQ ID NO: 10 - DNA, 410 bp, Arabidopsis thaliana
atggcggctccgggatcggttcagaaaggagatgaagagtggcgtgcgattctttcacctgaacagtttcggattcttcgtcaaaagggcactgaatatccaggaacaggggaatatgtcaacttcgacaaggaaggagtttacggttgtgtaggatgcaatgctcctctttataaatccaccacaaagttcaacgctggttgtggctggccagctttctttgaaggaatccccggtgccattacccgaacgacagacccagatgggagaagaatagagatcaactgtgcaacatgtggtggacatcttggtcatgttttcaaaggagaaggtttcgctactccaaccgatgaacgccattgcgtgaacagcgtttcgcttaagttcacacccgcagcgtcttccttgta

SEQ ID NO: 11 - DNA, 1010 bp, Arabidopsis thaliana
atgggtggcggcggaggtatgttacgcgccgccggtcgtgcgatgacgaggaccggtgtagccaacggtggtattcaagatccctttgcttcttcatcatcatcgtccacgtcgtctccggctggaaacgcctctgtttcgcatgtccagaaacagagatcttcttcttctgggtcgaataatctgacgtattccgcggcttctgggttgttgttgaatcttccggtggctgcaacctccggatggagcggcggcggtcctttttcctttgttaattctggaggttatgatgattttgagtgggtttctgaggaagaagatgattctctgtttggctctgttccttctgttgatgaagtccaagatgctgtttctgctctccagcaggttttcgatgctagttcatattcccagctggttagagacaaatacgagtgctatccggaaaatggtggtggaaaccagagccctatagccacagggatggttcatcaagttccttcattcgggtcggattcggactggatggagccatcaatgcatttatgccattcaagaacgttaaagcctcatgcttatgatcaggtttacaatgcttttgacctactacgaaccgaaccatctgtccagaaaatggtagtatcattgtcgtctgacaaagcagtttgggaggcggtgatgaacaacgatgtggtgcgagagattagggacttgtacaacaatggcataagtcaagatgaggaaaattcagaagacacccctagggagaataacgcagcaacggatttcataaagtgggtatttgacaacacaatggttaaggccacggaagtgtttgtgaaaataacaaaggtcgtgaccgagctcttcaattgttacaatggtgatggtgttaacaacaaggggaaagatgccaaattcaacaattggctcgaggaaaagctgaccacttcggtcctgctatccatcatcgttatgctggtcgtgatggtatcccgagcctgcaacta

SEQ ID NO: 12 - DNA, 1626 bp, Arabidopsis thaliana
atgggaaattcaaaaccactccctacaatttcttgtattatagtttcagtcttgtatttttcattctattgcataacaccaacttcttcatcagcctccatccaagatcaattcataaactgtgtcaaaagaaacacacatgtttcttttccactcgagaaaacgttattcacccctgcgaaaaacgtctctttgttcaaccaagtccttgaatcgacggctcaaaatctccagttcttggcaaaatccatgcctaaaccgggattcatattcagaccgattcaccagtctcaagtccaagcttccatcatttgttcaaagaaactcggaattcattttcgtgttagaagtggcggtcacgatttcgaggccttgtcttatgtttcacggattgaaaaaccgtttatattactcgacctgtcaaaattgaaacaaatcaatgttgatattgaatccaatagtgcttgggttcaacctggtgctacgcttggtgagctttactacagaattgcagagaagagcaagatccatggatttcccgcgggtttgtgcacaagtgtaggcataggtgggtatatgacaggcggtggatacggtaccttgatgaggaagtatggtcttgcgggagataatgttctagacgtaaagatggttgatgcaaatggtaaattactcgacagagccgcgatgggtgaggacctattttgggcgattagaggaggcggtggagcgagtttcgggatagttctagcatggaagatcaagcttgttcctgttcctaagactgttaccgtcttcactgtcaccaaaacgttagaacaagacgcaagattgaagactatttctaagtggcaacaaatttcatccaagattattgaagagatacacatccgagtggtactcagagcagctggaaatgatggaaacaagactgtgacaatgacctacctaggtcagtttcttggcgagaaaggcaccttgctgaaggttatggagaaggcttttccagaactagggttaactcaaaaggattgtactgaaatgagctggattgaagccgcccttttccatggtggatttccaacaggttctcctattgaaattttgcttcagctcaagtcgcctctaggaaaagattacttcaaagcaacgtcggatttcgttaaagaacctattcctgtgatagggctcaaaggaatattcaaaagattgattgaaggaaacacaacatttctgaactggactccttacggtggtatgatgtcgaaaatccctgaatctgcgatcccatttccgcatagaaacggaaccctcttcaagattctctattacgcgaactggctagagaatgacaagacatcgagtagaaaaatcaactggatcaaagagatatacaattacatggcgccttatgtctcaagcaatccaagacaagcatatgtgaactacagagatctagacttcggacagaacaagaacaacgcaaaggttaacttcattgaagctaaaatctggggacctaagtacttcaaaggcaattttgacagattggtgaagattaaaaccaaggttgatccagagaacttcttcaggcacgagcagagtatcccacctatgccctactag

SEQ ID NO: 13 - DNA, 618 bp, Arabidopsis thaliana
atggagaagaatatatcaataagcaagaagctagggaacattgtacgttttgtcttgtacatgttacacaaaggcatttctaagcaaaagctcctagccgactttaatgccactctcaaacgcggcaagaatctcatgttccacaaccgccgccgtgtcccaggctcggctgttgcgtcccatccacagaacgagtacgagtttagctgcagcgacactcctaactacacgttccccttcaacatggctgccttcaagaagaagagccaccacaacagcctcttctcctgtggtcaagcgccaccgacccttgatgacgacacttccgtctccagagccgttctagagctgctcaacagcggtggagatcatgatcagggaagtaacacgccggctttttccattgaggccttgacggcgttatctccctacctgccgggatttggacggagtacttcgtccgtgaggcctttacgggtaacggactcaccattcccgttaagagaagagggtgacgtggctaacggacatgtggacaaggcagcggatgagtttataaagaagttttacaagaacttgtatcagcaaaagaagatgattgagtcctcacctaattaa

SEQ ID NO: 14 - DNA, 750 bp, Arabidopsis thaliana
atggacacagcattgacctcagaatcaggctgtgccgttatagccgataagggattcaatgtggatccttttttggtcgaggctcttcaaaaccctcgacatcgtctaacgattttgcggatggaacttgatgttcagaggttcttgcagagccctgatcagcagcaattcgagttccagcatttccctacatcatacctccgttttgcggctcatcgtgttgctaatcactatggactaattacatcagttcgagatggtggtgcagatggtaatgagagcagaattgtcgtgactaaatctagtgatagcagatttcctgctgctcgactatctgaaatccctgtgaaacagtcagaaactggcaagtttgagcatatgaaagttgttataaagccaagacctactaaaggatctggaatggaaggtgatgaactgaaaggtggtcttctgaaaagtgttgaagagaggaaagaagattacgacagggctcgagcacgcatatttaacggtcttgtgaacattgattgtaacgattcttcatctgaaactaatccttggagggtgaattgtagttctagcagagatgaaaatcaagtgttgaagaatggtaatatcgaagcagacaagaacaatatctctaggaagagcaatcctgcatctcgtattgcaattctcagagacagagagaaagatcgatatgaccctgactatgaccgcagcaattacaggtatgtaaagcattgctaa

SEQ ID NO: 15 - DNA, 2420 bp, Arabidopsis thaliana
atggctgagtgcagcgtatgtcgttcaaggttggtttctcccagtagcaaagctatttcaagggcttatgacaactacaactacaagattagagtatcctcaaaacaacgagctctcaatgtctttttggtagtcggtgactgcatgctagttggtctacagcccgtcttagtgtacatgtctaaagtggatggaaagttcaactttagtcctattagcgtcaacttcttgacagaaatcgcgaaagttattttcgcgatggtcatgctattattccaggccaggcaccaaaaagttggagagaaacctctactatctctttccacgtttgtccaggcagctcggaacaatatgcttctcgctgttccagcagggttgtatgccattaataactatcttaagttcacaatgcagtttcacacagcaattcacttttctgctgtgccagctatatttcaatcctgctactgtgaagatgctcagcaatctaaaagttctggtgattgctgtactactgaagatgataatgaagcgtcggttttccatcatacagggattagtataaatcagctgcgttctcttcctgaaggagctacaactgtggctgttccaattgctacgggtgcatacatatgtacctttatctttagccttattcagcacgtcatcatgcaggttactgtcccatctttggcatctgtctacaacgagtatgctctaaagagtcagtatgacacaagcatttatctccagctggctgtgttaacactgtggtttgatacatttcttttggctcgtattgttgaacttgctctattctttggtctagtcatctctcttagcaatgttgttgaccatgatcctctcctgggttctgaatgtaaagctttaatttcccttgtgcagaacttatttctttatggttatggtgcgatattcaacttcctcggaatactaggaactgttatatataaaggtcctggcagttttgacatcctacaaggacattctagggctactatgtttctgatactgaacaacgcagcacaagggattctatcctcctttttcttcaaatatgcagatacaatcttgaagaaatattcgtccacagtagccacaatatttactggcatagcatctgcagcactctttggacatatattaacaatgaattttcttctgggaatttctatagttttcatttcaatgcatcagttcttttcacccctttcaaaagcaaaagacgaacaacaaaacggaaacatagagttagttgacgcaaaggatggccatagggctaaagactcattcatcaacatggcagcaggagcaactgaagagtccacaagtgagaaacattacacaatgaacatgacttcgtgttcttcttcatcttcttcttctttcccacgactcttcgccgccaaatcccaaatctataaagctccagttttatccttctccactcctaaacgccgtcgtcctcgtcctcgccggaaccggaaatctaatggctcatcctacgaccacaccgacggcaatcttctttctatctccacttcctctccctccggagccgacgaccaaagtctcagcttaaccctagacgttcaccgtatttcaactctagctaattaccgcttccaattgtttctcgattccagcaaagacgcgttctccgacttgcaaacactaatctcactcgacgataaccggagagtcgttgtctcgtgcaaaaaatcaactatgcaattcgtcggcggtgtggttatactaggattcgtatttggttttgcaattagggttcttgtgaaattaggatcagctttaaagggtaatttccaaagtaatcccaaatttgtagttaggagagataggagtcttggtgggaaggaagtggtcgtctctgttgataacattcgttcatcttcaagagattccaagagcttcatagcttctgatcaagcttctcgaagtaactctacgcctagaaatctccaccttaaagctcagaataatttgccgaaatggtggccgacttcattgactagccagagctttgatgtggtcgacaaagaagactatcagagggaagccaacagaatcgttcgagctccgtgggagtcttcttctgttgagatttgtagtgaagatgcccgagagttcattgctgggctcgctgagaacattggacttgcaaagatagatgctgctagaatggtttctgcagcagttgcagcacgcacacgttcatggtttctacaagcttgggctgagatggaaatggttgcaagagggttggagaaactcatgaagcttgaagagcgacagtctctactgaaaacgtttgttggaatgtgttgcagtgaagatagtcaaagaagcgcagctgaggctctgggtttggtgcactggta

SEQ ID NO: 16 - DNA, 966 bp, Arabidopsis thaliana
atggatctccaaccagaagagcttcaattcttgacaatacctcaactacttcaagaatcaatctcaatcaagaaacgatctccaagaaccttctacctcataaccctctccttcatcttccctctctccttcgctatcctcgctcactcactcttcactcaaccaatcttagccaaactcgacaaatccgacccaccaaactcagatcgttcacgtcatgattggactgttcttctaatcttccagttcagttacttgatcttcctctttgccttctctcttctctcaaccgctgctgttgtcttcaccgtcgcttctctttacaccggaaagcctgtttctttctcgtcaactctctctgcgattcccaaagtctttaaacgactctttataactttcctttgggttgctctgttgatgtttgcttataacgcagtcttctttgtcttcctcgtgatgcttctcgtagctcttgatttgaatagtttaggtttagctattgtagccggggttataatctctgttctatactttggtgttcatgtttatttcactgctttatggcatttaggtagtgtaatctctgttcttgaaccggtttacggaatcgccgctatgagaaaagcttatgagttgcttaaagggaagactaagatggctatggggttaatctttgtttatcttttcctctgtggattgattggagttgtttttggtgctgttgtggttcatggtggtgggaagtatggaacttttactaggactttggttggtggattgttagttggtgttcttgtgatggttaatcttgtgggtttgttggttcagagtgtgttttactatgtttgtaagagttatcatcatcagactattgataagaccgctttgtatgatcaacttggtgggtatcttggagattatgtgcctcttaagagcaacattcagttggaggatttagatatttga

SEQ ID NO: 17 - DNA, 567 bp, Arabidopsis thaliana
atggagatggactcaactactacgatcaaaccggagaccctatccaccgtgagttcctcacctccggagaaaatccatctccggccaatgactctttccgacgtcgacgatttcatggtttgggccactgactcaaacgtcacacgcttttgcacgtgggagccttacactagccgagaagccgcgatcgcgtacttaaacgacgctcttttgccacacccttggcttagagctatatgcttagataacgaccgtccgattggctcgatctccgtaacgccagtcgatgagatcagaggagagattggttatgtcctcggaagcaagtattgggggaaagggatcgccactgaagcggtgaggcttgtggcgggggagatattcaaggagaagccagagatgcagaggcttgaggcacttgttgacgttgacaatgttggatctcaaaaggttcttgaaaaagttgggtttgtgaaagaaggtgtgatgaggaaatttatgtatcttaaaggaaatgttagagatatggtcatgtttagtttcttgccttctgattcgttgcactga

SEQ ID NO: 18 - DNA, 1140 bp, Arabidopsis thaliana
atgcaatcaagaatggcctcaactactataatccttttcctctcattcagcatcattccattactcaccatcgttagagcagataaccattccgtttactgccctccaccaccaccttgtatttgtatttgtaatccgggaccacctccgccgcaacccgatccccaaccgccaactccaccaacatttcaaccagcaccgccagccaatgaccaaccaccgcctccaccacagagcacatcaccacctccagtagcgaccacaccaccagcacttcctccaaaacccttaccgccaccgttgtctcctccgcaaaccacaccacctcctccaccagctattacaccaccacctccaccagctattacacctccactatcacctcctccaccagctattacaccaccacctccactagcgaccacaccaccggcacttcctccaaaacccttaccgccaccgttgtctcctccacaaaccacgccacctcctccaccagcaatcacaccaccactatcacctcctctggttggaatatgttccaagaatgataccgaactaaagatatgtgccggaattctagcaattagtgacggtcttctaaccactggaagagcagaaccatgttgttccatcatccgaaatgtgtctgatcttgatgcagttacttgtttttgtaaatcggtaggagcaccacgtttttccctctctcccaatttcggcatcttctttaaagtttgtggtcgtaggattccacaaggctttagctgtcccggtccatcaccaacaatctcaccaccaccacttcctccacaaactttaaaaccgcctccgccacaaacaacaccacctcctccaccagctattacaccaccactatcacctcctctagttggcatatgctccaagaatgataccgaactaaagatatgtgccggaattctagcaattagtgacggccttctaaccactggtagggcagagccatgttgttccatcgtacgtaatgtgtctgatcttgatgcagttacttgtttttgtaagtcggtaggagcaagacgtttttccctctctcccaattttggcatcttctttaaggtttgtggtcgcaggattccacaaggctttagctgcccatga

SEQ ID NO: 19 - DNA, 780 bp, Arabidopsis thaliana
atggagttgctctcttcttcaccggctcagcttctgagaccaaatctcagctctagggctttgcttcctccacgaacatcaatcgcttcttctcatcctcctcctcctcgattcctggtaatgaattctcaatctcagcatcgtccatctatctcctgcgcttcgcctcctcccggagataacgctcgaataggtgaagtgaagagagaaacaaaggaaacaaatgtatcagtgaagattaatttggatggtcatggagtttcagatagctccactggaatccctttccttgatcatatgttagatcaacttgcttcacatggcttgttcgatgtacacgtaagagctactggtgatactcacattgatgatcatcatactaatgaagatgttgctcttgccattggaactgctttgttaaaggcacttggggaacggaaagggattaatcgttttggcgattttacagctcctcttgatgaagcactcatacatgtttccctggatctatctggtagaccatatcttggatacaacttagagattccaacgcagagagtaggaacatacgacactcagttggtggaacacttcttccagtcattggtgaatacttctggtatgactcttcacatccgacagcttgctggtaaaaactcgcatcacataatagaagcgacctttaaggcctttgcaagagctctccgacaagcaacagagtctgatccacgccgcggtgggacaataccaagctcgaaaggagtcttgtcacgttcataa

SEQ ID NO: 20 - DNA, 320 bp, Arabidopsis thaliana
atgaatactgacataactgccttggagaaggcacaatacccagtggttgatcggaatcctgcttttactaaagtcgtcggcaatttcaggactctcgattacctccgtttctctactatcaccggcatctccgtcaccgtcggctatctctctgggattaagcctgggattaagggaccgtcgatggttactggaggattgatcgggctcatgggaggtttcatgtatgcgtaccagaactctgccggtagactcatggggtttttccctaatgatggtgaagttgctagttaccagaagcgtggtggtttctccaaatg

SEQ ID NO: 21 - DNA, 717 bp, Arabidopsis thaliana
atggtgacttcggagggattagcaagcgttgattcttggttatatcgccaaggtttcaacgttgattcatggttgctttctgataccttctctcacgacaacgatttgctcgcaagagctctccataccaccgtcacagcccctcatactctcactccttcctctgctttcttcgattcctccgctgtttctcacccttcttccactaacacactctcctctaccgtctccggtgcttctgatccagaaatcatcggcggaggagctaaacggaaacgtaactgccttcttaccgacggtaaagccgccaagcgccgcgctcgtgcttccaagaaatctcagactactttcataacggcggatccgtccaactttcgtcagatggttcagcaagtgactggcgccaagtacatcgatgactcttcttcctttggtattttcgatccgattgtcaagccggagccgcttaggttcgttaacaaactgccttgtggtccttcggatcgatccacggcggttccaatgctcgacacatcagcatttttgtctaatcatcaccaggagaatctcgcagtgggaaatgctttctccggtaacagcagcagtgtaggattaccgtcggggaagccaagtgcaacggccgaccccggtggttctgccgtggagtttgataattacccaacatttccaacgcttgaatcgtggaaggttatgtga

SEQ ID NO: 22 - DNA, 327 bp, Arabidopsis thaliana
atggacaacatcaccttcccttcacaggggagcttatcatcatccaatcagacttttgattctcaatctgctgctagaaactctaatgctcctcctgaatatgtaaatcaaggtcttcttctttggaatcagacacgggagcgttgggtgggaaaggataaacccaacaacccggtggatcacaatcaaggagccaagttaaattggaacacagcaacgtatgatagcttgctggggagcaacaagttatttccccaacccattcctctcaccgaaatggtggattttctagtggacatttgggaacaagaaggtctatatgactga

SEQ ID NO: 23 - DNA, 336 bp, Arabidopsis thaliana
atggacgtgagaggagatcataaccggaaaaacacgagttttcgtggttcagctccagctccgattatggggaagcaagaattgtttcggacattgtcgtcgcagaacagtccaaggaggctaatatcagcgagttacttcagtttagaatcaatggttgtgcttgttggtctcacagcatctctcttgatcttaccgttgattcttccaccattgcctcctcctccttttatgctgcttttgattcctattgggattatggttttgcttatggttcttgctttcatgccttcttctaattccaaacatgtttcttcttcttccacttttatgtaa

SEQ ID NO: 24 - DNA, 396 bp, Arabidopsis thaliana
atggttcaaagtcagtcgttaagcacattaacaatctgtggaagtgtaaaagtttcaagcttgttgaggaatcgtttaaattcagtgaaagcttcaagcttgatcggtgatcgatgtgtttcgtgtcagtttttgcgtaaatcaccgtcctttagaagccattggaagtcattaaagcaaagaaatttgttgagggttgaagctagatggccatttcaaggaggtggtgaacaaggtttagacccgagctctgagagaagcgagagtgctaatgaagatatattgatctttttctttcagctggatttggctactcgtgtacaggttaagactaaatgcagggtttttatctctttcaagatggttgctaatggttttgatgtgttacaatattga

SEQ ID NO: 25 - DNA, 1458 bp, Arabidopsis thaliana
atgggaggttgcgtgtcgacgccgaagagctgtgttggagcaaaactgaggtcaagtaaacgaaggaagagtcgtagacgacgaaaaattcaaaggaagagagccgccgtctcttctcgtctctctgacggatctttcgacaatctcgatcatcatcatcgcaacttctctaatcccagttctcgagcaactggcgaagacgcatggtttgagtccaatgtcgcatttgaaacagactgtgatgatgatttccacagtgttcatgaagatgcattgtctttaaacggatctgagcgtgtatcactctcgagtacgacaaccacatcatcaacacgagacactgattcaaatgaagtgatgtctcaatcgaaatcagacggtgacttaaacgacacaaaccagcctgatttgattgattcatctgcagatgaaggtctcttggaaaactgcaggatcttaccgagtaattgtttgccttgtctgaatacaacaactgttccttctattgacaagagaaggtctcttagctctagccctcccagttccaggaaaaaatcatctcttagactttcttataaatggagagaaggtcatgcttcaggagccttgtttttgtcgaaaatgcagctgaagagaccgatagcgggttctcaggttcctttctgtccaattgataagaaaatgctcgattgttggtcaaccattgatccaaatagttttcgggttcgtggcaaaacatatctcagggagaagaagaaagagtttgcacctagccatgctgcgtacaatccttttggtgtcgatgttttcctatcggaacacaaaatacaccatgttgcacaatatgtcaaacttcctgttactaccacatccacaaaactcccatctatccttgttgtaaatgttcagattccgttatatccaactgcaatctttcaaggtgaatctgatggagaaggaatgaatattgtattatacttcaaactctcggataattattcaaaggaacttccgctccattttcaagaaagcattcggagattaatagatgatgaggttgagaaagttaaaggcttccctttggatacaacggcaccttttagagagcggcttaagatattgggacgtgttgcaaacgtggatgatctccatttgagtggtccggagaaaaaactgatgcaggcttataacgagaaacctgtactttcacgtccgcagcacgaattctacttgggtgacaattactttgagattgatatcgatatgcatagattcggttatatatcgcggaaagggtttgaaacattcatagacagactcaagatctgtgttcttgatgttggcctcacaattcaggggaacaaaccagaggagctaccggagcagattctgtgttgcgtcaggctaaatgggattgatttcatgaactatcatcaattaactcaagaactcctatga

SEQ ID NO: 26 - DNA, 186 bp, Arabidopsis thaliana
atgcccatggacgttgatggagctctagggcttctccgttttgggtatcttgctattggctctcatattccattgccttgcggagcggcgtcgctgcttttaccgtttgggaccggccatgagatctatattcccctgtattttggttttcagttttatctagttaggattgtatttagccaatga

SEQ ID NO: 27 - DNA, 885 bp, Arabidopsis thaliana
atgtatagcagtggtaacccgacaaacattgccaatccgataaaagatgcgagcgttcagattgatttaaaaacagttggtggaaagcttactttgtaccaaacgaccctatgcgagagaatctcaggggataacattgatctcgggctagatctcgggtctcaaagctttttgccaacatacaacaaaaatgacatccagctgatatgctgtcaagctgatgcaagtgttttatggcttgtccctgacacagttgtgaccagatttattcaatcccttgactgggacacagatatggacatcacctttacttgggttcttaacagagaccgccctaaaggcaaggagactgtgaaatatgaaagaagtgtcgaccctctggaccttccaaaacgctctgatatccaaatggttctcaatgggtcgatggatggatttagagtgcataatttgtacccaaagttcttccgtgttactggttctggtgatgtcaggtctttcgaggatcagacggatgaagtgagtgcagacatactcattaaccatgcaaatttcaagtggtggtggtcattccataatcttaaagcgtctgaaaatatcagcgcttgcgaggggatggatggaccagttgctatcataatgtctgaggaaacaccgccaccggtggggcgtttcatcaggcttcaatgctctgacctgcgtatgagaataccttacgagaacctgccttcgtgtgacagattaatagccatatgcgaggacttgtacgcggctagagcagagggtgagcttggagtagaagaagttctatactggacgcttgtgaagatctatagatccccgcacatgctgctcgagtatacaaagctagactatgatgcttag

SEQ ID NO: 28 - DNA, 666 bp, Arabidopsis thaliana
atggttggttcgtcgtttggaatcggcatggcggcgtacgttagagatcatcgcggtgtttcggcgcaggataaggctgttcaaacggctctgttcttggctgatgaatcaggacgtggtggatcacagatcgggattggattaaggatgagtaataataataataagtcgccggaggaatcttcggatagttcgtcgtctatcggagaaagcagtgaaaacgaggaggaagaagaagaagacgacgccgtttcgtgccaacgaggaacacttgattcgtttagttcttctcttgaagactctcttcctattaagagaggattatcgaatcattatgtcgggaaatcgaaatcgtttggtaatttaatggaagcagcgagtaaggcgaaggatttggagaaagttgagaatccatttaacaagaggaggagattggttattgctaataagttaaggaggagaggaagatctataacctatgaagaggatcatcacattcacaatgatgattatgaggatgatgatggtgatggtgatgatcataggaagattatgatgatgatgaaaaataaaaaagagttgatggctcagactcgaagttgtttctgtctaagtagtttgcaagaggaagatgatggtgatggtgatgatgatgaagatgaatga

SEQ ID NO: 29 - DNA, 369 bp, Arabidopsis thaliana
atggcaacattggcaccagttcatgctgtttctgttctgcattctcggaagaggggaggctgcaacggaaattttgtgtcgttttcaggagttcctttaccatatctgatccgacctcgtaggaaaattccccctgttgatacgtttgatttctacaacgattctgatgatgagagtggtgaaggtgataaaggtcattcagatgacgaatatgtagtcgtagacaaagctgaagctattatgcccaatgttaaaacagagaaaccaggagctattcaaatgatggaactctcaaaagatgcagtcggtgatgatgagtctaaagccaaagatgctggatacagcagtgatgagtggtttgttgtgtaa

SEQ ID NO: 30 - DNA, 345 bp, Arabidopsis thaliana
atggcggctctctccaccaccttctactaccacccactctgcactaaccaccgtacaaagagacaagcctcaagcagacacggagttagatctatgagagtgatgtcttgtcggaagcagaaattaccagaagagaatgaaggagtgatccagagaacattgagaaggatgatttcagaggctgggaagattgggaagaatctgaagccagagaagaagaaaggagacgtcaaggacctgatgcttatgagtctctcttttgctgtttatgtttatatctctcaactattggtttgtgcttacttctcctggcaacatctcagcttccccaaatcttcatggtag

SEQ ID NO: 31 - DNA, 315 bp, Arabidopsis thaliana
atggcttcccagacaaatcaaaccgtggtggataccaagaaaatcgaaaccgagaacccgccaaaaccgcaagtgcctgcatcatcatgcaggaagagggtgaaggatgataacgccactttctttgcaaacctcaaggatcacatggatgaattcatacatgcctcaatggatgaacacaagacttgtttcaaaaacaccatggacaagatattcgggagcttctccaaggcggaggcagttgcagagaagcaaattgaggctaaggaagtggtcgagattcactctcctcttcagacagcagtgactaagtag

SEQ ID NO: 32 - DNA, 1524 bp, Arabidopsis thaliana
atggcgatggcgagcttagctaggagaaaagcgtactttctcaccagaaacatctctaattctcccactgatgctttcagattctctttctccctcactcgcggcttcgcttcgtcaggatccgacgacaacgacgtcgtcatcatcggcggcggtcctggaggttatgtggcggcgattaaagcggcacagctcggtcttaagactacctgtatcgaaaagcgaggcgctctcggtggtacttgtcttaacgtcggctgtattccttcaaaggcccttcttcactcttctcacatgtaccatgaagcaaagcacgtttttgctaaccatggtgttaaggtctcttcggttgaggtagatcttcctgctatgttggcgcagaaagacacagccgtcaagaatttaacccgtggagtcgaaggtctgttcaagaagaacaaggtaaactatgttaagggctatggtaagtttctgtccccatcggaagtctctgtggacacaatcgatggagaaaacgtggttgtgaaaggcaaacatatcatagttgcaactggctcggatgtcaagtctttgcctggaatcaccatcgatgaaaagaagattgtctcatcaaccggggcactgtctctgacagagatcccaaagaaactcattgtcattggtgctggctatattgggctagagatgggttctgtatggggacggctaggatcagaggtcacagttgttgagtttgcagcggatatcgtaccagcaatggatggtgaaatccgcaagcagtttcaacgctcactagagaagcagaagatgaaatttatgctcaaaactaaagtcgttggggtagattcatctggagatggtgttaaactcatagtggaacctgctgaaggtggagaacagaccactctagaagctgatgtggtcctcgtctcagctggtagaactccgttcacatctggacttgatctagagaaaatcggagttgagacagacaaaggcgggagaattctggtgaacgagagattctcgacaaatgtttcaggcgtttatgcaattggagatgtgattccaggaccaatgctggctcacaaagccgaagaagatggtgttgcatgtgttgagtttatagcaggcaaacacgggcatgtggattacgacaaagtccctggggttgtctacacgtaccctgaagttgcgtcggttggtaaaaccgaggagcagctgaagaaagaaggtgtaagctacaatgttggaaaattcccattcatggccaatagcagagccaaggccatagacacagcagagggaatggtcaagattttggctgataaagagacagacaagatcttgggagttcacattatgtcaccaaacgcaggagaattgatccatgaggcggttctagctatcaactatgatgcatcaagtgaagacattgctcgagtctgtcacgctcatcccaccatgagtgaggctatcaaggaagctgccatggctacctatgacaagcccattcacatgtag

SEQ ID NO: 33 - DNA, 1434 bp, Arabidopsis thaliana
atgatgacattaaactcactatctccagctgaatccaaagctatttctttcttggatacctccaggttcaatccaatccctaaactctcaggtgggtttagtttgaggaggaggaatcaagggagaggttttggaaaaggtgttaagtgttcagtgaaagtgcagcagcaacaacaacctcctccagcatggcctgggagagctgtccctgaggcgcctcgtcaatcttgggatggaccaaaacccatctctatcgttggatctactggttctattggcactcagacattggatattgtggctgagaatcctgacaaattcagagttgtggctctagctgctggttcgaatgttactctacttgctgatcaggtaaggagatttaagcctgcattggttgctgttagaaacgagtcactgattaatgagcttaaagaggctttagctgatttggactataaactcgagattattccaggagagcaaggagtgattgaggttgcccgacatcctgaagctgtaaccgttgttaccggaatagtaggttgtgcgggactaaagcctacggttgctgcaattgaagcaggaaaggacattgctcttgcaaacaaagagacattaatcgcaggtggtcctttcgtgcttccgcttgccaacaaacataatgtaaagattcttccggcagattcagaacattctgccatatttcagtgtattcaaggtttgcctgaaggcgctctgcgcaagataatcttgactgcatctggtggagcttttagggattggcctgtcgaaaagctaaaggaagttaaagtagcggatgcgttgaagcatccaaactggaacatgggaaagaaaatcactgtggactctgctacgcttttcaacaagggtcttgaggtcattgaagcgcattatttgtttggagctgagtatgacgatatagagattgtcattcatccgcaaagtatcatacattccatgattgaaacacaggattcatctgtgcttgctcaattgggttggcctgatatgcgtttaccgattctctacaccatgtcatggcccgatagagttccttgttctgaagtaacttggccaagacttgacctttgcaaactcggttcattgactttcaagaaaccagacaatgtgaaatacccatccatggatcttgcttatgctgctggacgagctggaggcacaatgactggagttctcagcgccgccaatgagaaagctgttgaaatgttcattgatgaaaagataagctatttggatatcttcaaggttgtggaattaacatgcgataaacatcgaaacgagttggtaacatcaccgtctcttgaagagattgttcactatgacttgtgggcacgtgaatatgccgcgaatgtgcagctttcttctggtgctaggccagttcatgcatga

SEQ ID NO: 34 - DNA, 6147 bp, Arabidopsis thaliana
atggaagatccagatgggacattagcaagtgttgcccaatgcattgagcagctgcgccaaggttcatcatctgcacaagaaagagaatattgtctgaagcagttactggaccttatagaaatgcgtgagaatgcattcagtgctgtcggatcacactcccaagctgtgccagtacttgtctctcttctccgatcgggatcagttggagtgaagatacaagctgcaaccgtcttgggttcactctgcaaggagaacgaacttagagttaaggtgttacttgggggatgcattcctccattgcttggtcttctcaagtccagttcagtcgaagggcagatcgctgcagcaaagacaatctatgctgtttctgaaggtggggttaaagaccatgttggatcaaaaatattttccactgagggagttgtaccggttctgtgggaccaattgcgcagtggaaataaaaaaggagaggttgatggtttgttaactggtgcacttaagaacctttctagtaccacagagggattttggtctgagacaattcgagctgggggagtggatgtacttgtgaagctgctcacaagcgggcagtcaagtacactatctaatgtctgcttccttcttgcgtgtatgatgatggaagacgcctctgtttgttccagtgtattgactgcagacattacaaaacagcttctcaaattattaggatcgggtaatgaagccccagtgagggcagaggctgctgctgctctcaagtcgctttctgctcaatctaaggaagcaaagcgggaaatcgctaattctaatggtattcctgttttaataaatgcaacaatagctccatctaaagaattcatgcaaggtgaatatgcgcaagcattacaagaaaatgcaatgtgtgcccttgctaatatttccggtggtttgtcatatgtcatatcaagccttggtcagagccttgaatcttgctcttcgcctgctcagactgccgacacccttggggctttagcttcagcattgatgatatatgatggcaaggcagaaactacaagagcatcagatccattggtcgttgaacagactctgctgaagcagtttaagcctcgtctaccattcttggtgcaagaacgtacaattgaagcacttgcaagtttgtatgggaattccatactctctgtcaaactttccaactcggatgcaaaacgtttgcttgttggtctaataacgatggcggtgaatgaggttcaagatgagcttgtaaaggctcttctgatgctgtgtaaccatgaaggtagcctgtggcaagcactacagggccgtgaagggatccaattgctaatatctcttttgggtctttcatccgaacagcagcaagaatgtgctgttgcacttctttgccttttgtctaacgaaaatgatgaaagcaagtgggccatcactgctgctggaggtatacctccacttgttcaaattctagagactgggtcggccaaagccagggaagactctgcaactatccttaggaacttgtgcaatcatagcgaagatatacgtgcttgtgttgaaagtgcggatgctgtccctgctctcttatggctactaaagaatggtagtccaaatggtaaagaaattgccgccaagacattgaatcatttgattcataaatcagatactgcaactatcagtcagcttactgctttgctgaccagtgatctacctgagtctaaaatttacgttttggatgcattgaagagtatgctttctgtggtcccattcaatgacatgctacgtgaaggcagtgcttccaatgatgctattgagacaatgatcaagttgatgagctctggtaaagaagaaactcaagcaaattcagcatcagctcttgcagctatcttccagagcagaaaggatttgcgtgagagtgctctagccctcaaaactctcttgtcggccataaaactgttaaatgtggattcggagaggatccttgttgagtcttgccgctgcctggctgcaattttactttcaattaaggagaatcgcgatgtggccatttctgccagagaagcattgcctaccatagtatctctagccaactcttctgttctagaagttgctgagcaaggaatgtgcgctttggctaatcttatattggacagtgaagtgtcagagaaggtcattgtcgaagatatcatcttgtccgccactagaatcttacgtgaaggtacagtgtctgggaagacacttgctgctgcggcaattgcccgcctccttagtcgtcgccgaattgattctgcattgacagattctgtgaaccgagctggaacagtgcttaccttagtgtctcttctagaatctgccgatggaagatctgatgcaatatcagaggccctagatgcgcttgctatattctcaaggtcaggagctaatggaaatgtaaaaccagcttgggctgttttggctgaatctcccaacagtatggccccaatagtctcatctatagtgagtgttgctaatccttcactacaggacaaagctattgaagttttgtcaagactttgccgagatcagcctattgttttgggaaacatggtcaacaatgccagagattgcgtgtcatctatagctaaaagggtgataaataccagggacccgaaaataaaaattggtggagctgctattattatctgtgctgccaaagttgacgaccagaagatgatagaaaatctgaatgagacacaattgtgtgccaaattcgttcaagcacttgtggggatcctagattctgtgcaagatcaggaaaaggatgagaaagataaaatctgcatatgcattcatcccaaagaaaaggaagaagatgaagaagaagaggcaacagaaaatagggagggttccacgggggcaacagttatttctggagacaatttagccatctggttgctctcggttctttcttgtcatgatgaaaagagcagagcagtaatattggagtcagaaggcattgagttgattactgacagaataggcaaccgttttctccaggctgataatggagaagatgccaacatttgggtttgtgctttattgctggccatacttttccaagacagagaaatcactcgcgcacatgcaacaatgaaggctgttccagtgctctcaaatcttgtgaagtcagaggaatacgcagacagatattttgcagcacaagctctagctagtcttgtctgtaacggtagtcgcggaactcttctatctgttgcaaactccggtgctgcggctgggtttatatcattgcttggttgttctgatgatgacataaaagaacttctgcagctgtcgcaggagttcactttagtgcggtacccagaccaggttgcccttgaaaggcttttccgagttgaagatattagagttggggctacttctcgaaaggcgattcccttactagttgaacttcttaaaccaattccagaccgccccggtgctcctctactttcacttaatcttctaactcagcttgctggggactgtccacaaaatatgattgtcatggtagagtcaggtgctcttgagggtctctcgaaatatctttcccttggacctcaggacgagcaagaggaagctgcaacaggtcttttaggcatcttatttagcagtgctgaaattcgaaggcatgagtcagcatttggcgcggtcagccaacttgtagctgttttgcgtctaggtggaaggggggcaaggtacagtgccgccaaggcattggatagtctctttactgctgaccatataagaaatgcagagtcttctagacaagctgttcagccattggtagagattctcaacactggttcagagagggagcagcatgctgctattgctgcacttgttaggttgttgagtgataatccatcacgggctctggcagttgcagatgtggagatgaatgcggtggatgttctctgcaggatcctttcttcaaactatacgatggaactgaagggagatgctgcagagctgtgttatgttctgtttgcaaatacaaggattagatctacagttgctgcagcgcgttgtgttgagccacttgtctctcttcttgtgactgagttcagccctgctcagcattcagttgtgcgtgcactggacaagcttgtcgacgatgaacaactggctgaactagttgcagctcatggcgctgtggtacctcttgttggccttctctatggtaaaaactatgtgcttcatgaggctatatccagggctctagtaaagttgggtaaggacaggcctgcttgtaaactggaaatggtgaaagctggagttatcgactgcgtacttgatattctccacgaagctccagattttctatgtgctgcgttttcagaactgcttcgaatcctcacaaataatgctactattgccaagggacaatctgctgcgaaagtggtggagccacttttccatttgctgacgaggttggagtttggagctgatggacagcacagtgctctgcaagttctggtaaatatcttagaacatccacaatgccgcgctgattatacacttacaccgcaccaagtaattgagcctttaattccgctactggaatctccatccccagcagtccagcagttggcagctgagcttctatctcatcttctctacgaggagcatctgcagaaagatccattaacgcaacttgcgattggtcctctaatccatgtgctgggatccggcatacacctattacagcagagagctgtgaaagctctcgtcagcattgctctaacatggccaaatgaaatagctaaagaaggtggtgtgagtgagctgtcaaaggtgatactgcaagctgatccatcgctctccaatgtgttatgggagtctgcagcatcaattttggttatcatcttgcaatttagctccgaattttacctggaagttcctgttgctgttcttgtaagactgcttcgttctgcatctgaaaacaccgtggttggtgcacttaacgctcttctagtgttggaaagcgatgatggaaccagtgcagagtccatggctgaaagtggtgccatagaagctctgcttgatcttttaaggtctcatcagtgtgaggacacagcagcgagactgctcgaggtactgctcaacaacgtgaagattagagattcaaaagccaccaagactgcaatcttgccattgtctcagtacctcttggatccacaaactcaagctcagcaggcgcggttactagcaactttggcccttggtgatcttttccagaatgaagctcttgctagaagcaccgatgcagcttctgcttgccgtgctttagtcaatgtccttgaagaacaacccacagaagaaatgaaagtagttgctatatgtgctctgcaaaatctcgtcatgtatagccgatctaacaaaagagcagttgccgaggcaggtggtgtgcaggtcgtcttggatctgatcagttccagtgatcctgaaacgtctgttcaggctgcaatgttcgtaaaactactcttctctaatcacaccgttcaagagtacgcatctagcgaaaccgtcagagcaataactgctgccattgagaaagacttatgggccactggaaccgtgaatgatgaatacctaaaagccttaaactctttgtttaacaacttcccgcgtctaagagctacagagcctgcaacactaagtataccacatctagttacatccctcaagacaggatcagaagcaacacaagaagctgccttggatgcattgtttcttctcagacaagcttggtcagcctgtcctgccgaagtttccagggcccaatcagttgctgctgcagacgccatccccctacttcagtacctaatccaatcaggtccaccacggttccaggagaaagctgaattcctcttgcagtgtttgccaggtactctggtagtcactatcaaacgtggtaacaacatgaagcaatccgttggtaacccgagtgtgttctgcaagataacactcggcaacaatcctcctagacagaccaaggtaggaaaagacttatcaccctttcgtcaattcactgtgactagtaattcctttagatatcaaccgtatctttcgattttctcaggtgatatcgacaggtcctaa

SEQ ID NO: 35 - DNA, 750 bp, Arabidopsis thaliana
atggaatcgctaacatctatttctccttccataattcttcctccggccaccactactacgatccccgtttcaacttcacgatcagtgttgattcgtcttccttcacgccgttcttcttaccttttcggcttgtccagctccgggagacggatttcgatttctagaagaagacacttcgttagctgtaaatcgaccggcggcggaggaggaggatcagataagcttggtggcgatgaagaagagagcgaggaagttgagaaggcgcttcacttggatggtacgatccctgggacttccgatgagtttgtaaggcaagtttcgtcgcgtgcttacgacatgcgtcggaaacttgagcagacgtttgattccactagctatgacgcaatccttataaacagtgaagtagaaaaagagcttggactgttgttccctagtaggatcagcaaccagacaaagcaggctagacccaaaactaaattcgatatgctcgtagaagacattcgagatggagtactggttttcgaagatgtgaatgaggctgttagatactgtgacctattacaagggggagggaaagggtgtgaaggtgtcgctgagattgaggcctcctctgtttttgatctttgtcggaaaacaaggtctctggcagtgctcttccgccgtggaagaacaccacctacacctcagacgctggaacgtaatctcggatcccggaagcgttctcttgaggacttgagggataataaatag

SEQ ID NO: 36 - DNA, 1044 bp, Arabidopsis thaliana
atgtctagacaagtggcaaggcttatcggatctctgtcatcaaaagctcgccgttgttctaccggcggctcagaggtttttccgtcatgccagtctctcacttcgttgacccaatctcgctccttcgcgtcggatcctcatcctcctgcggcggttttcgttgacaaaaacacacgagtcctctgtcaaggcatcaccggaaagaacggcactttccacactgaacaagccattgagtacggcaccaaaatggtggcaggagtgacaccgaagaagggtggaacagaacacttgggtctcccagttttcaactctgttgctgaagctaaggctgacaccaaagccaatgcctctgtgatttatgttcctgctccttttgctgctgctgctattatggagggtattgaggctgagttagatcttattgtgtgtatcaccgaaggaatccctcaacatgacatggtacgtgtaaagcatgctcttaacagtcaatcgaaaactaggctgattggtccaaactgccctgggattatcaagcctggtgaatgcaaaattggaattatgccgggatacatccacaagcctgggaagattggaattgtctcacgatctggaaccttgacatatgaagctgttttccaaacaactgcagtgggtctaggccaatctacttgtgtaggaatcggtggggatccttttaacgggacaaactttgtcgactgcttggagaaattctttgttgatcctcaaacagaaggtatcgttctcattggagaaatcggaggcactgcagaagaagatgctgcagcattgataaaggcaagtggtactgagaagcctgttgttgcttttattgctggacttactgcaccaccgggtcgtcgaatgggtcatgccggagccattgtttccggtggtaaaggtacggctcaggacaaaattaagagtttgaatgatgctggagtgaaggttgttgaatctccggctaagattggatcagcgatgtatgagctctttcaagaaagaggtcttttgaagcagtga

SEQ ID NO: 37 - DNA, 1713 bp, Arabidopsis thaliana
atgaagcagaggatttcagcacaaacatgcacgacggacaaggggactttcagacccaacggtacttacgacgtaaatcgccgtctcatcctctcttctcttccttcaaatgtcacggaccaagacggcttatactacaacggttccataggacaacaaccgaaccgtgtctacgcaatagggatgtgcatcccaggatcaacttcagaagactgttctgattgtatcaagaaagagtctgaattttttttaaagaattgtcctaaccaaacagaggcgtattcatggccaggatctgctgatctgaacccgcgaaattggctcaccaacactggagacctagactcaaatctaacagagtttacgaaaatatgggaaggattaatgggtcgtatgatttctgcagcttccacagcaaaaagcacaccttcttcaagtgataaccattactcagctgattcagcagtcttgacacctctcctgaatatatatgcattgatgcaatgcacgccggatctttcctccggtgattgtgaaaactgtctgcgacaaagcgcaattgactatcagtcgtgctgtagccagaagcgaggaggtgttgttatgcggccaagctgctttttgcggtgggatttgtatacatattctaacgcttttgataatcttacggtggcttctcctcctccagaacctcctgtgactgtgccacaacctgcaggtgatcaggacaacccgaccaacaatgatagcaaaggaatctcagctggagttgttgtggcgatcaccgttcccactgttattgccatcttgatactgctggttttaggatttgttcttttccggagaagaaaatcctaccaaagaactaagactgaatgttacatgtatactcccgtagccaagacgggaaacacgaaactaatacacccattctttgcagctgaaagtgatatttcaactacagattcattggtatacgattttaagacaattgaagccgcaactaacaagttttcaacaagtaataagcttggtgaaggtggattcggtgcggtttacaagggtaagctttctaacggaactgatgtagctgtgaagcgactgtcgaaaaagtcaggacaaggcacaagggagttcaggaacgaggctgttcttgtgacaaaacttcaacataggaatctggttagacttcttggattctgtttggaaagagaggaacagattctgatctatgaatttgtccacaacaaaagccttgactactttcttttcgacccggaaaagcaaagtcagctagactggacccggcgatacaagatcattggaggaattgctcgagggattctatatcttcatcaagattcacggctcaaaatcatacatcgtgacctcaaagccagcaacattctcttagatgcagacatgaacccaaaaattgcagattttggattggcaactatttttggagtggagcaaactcaaggaaacacgaacagaattgctggaacctacgcttacatgtctcccgagtatgcgatgcatggtcaatactccatgaaatctgacatttatagctttggagtcttagttcttgagattataagcggcaagaaaaacagcggcgtctaccagatggatgaaactagtactgcaggaaacttggtcacttatgtgagcataaagtcctcaactttcaacaatttaacattttaa

SEQ ID NO: 38 - DNA, 1806 bp, Arabidopsis thaliana
atgggtctatgtacttcgaaaccgaattcatctaattccgatcaaactccggcgaggaatagtccacttccggcgtctgaatccgtcaagccttcgagctcttccgttaatggtgaagatcagtgtgtaacaacaacgaacaatgaaggcaaaaagtctccgtttttccctttttatagtccaagtccagctcactatttcttctccaagaagactccggcgagatctccggcgactaattcgactaattcgactccgaagcgattctttaaacggccgtttcctcctccgtctccggctaaacatatcagagctgttttagcgagaaggcatggttctgtgaagcctaattcgtcggcgatccctgaaggtagtgaagctgaaggaggtggtgttggattggataaaagctttggtttttccaagagttttgcgagtaagtatgagcttggtgatgaagttggtcgtggtcattttggttatacttgtgctgctaagtttaagaagggtgataataaaggtcaacaagtcgcggttaaagtcattcccaaagcaaagatgacgacggctattgcaattgaagatgtgagaagggaagtgaagatattgagggctttgtctggtcataacaatcttcctcatttctatgatgcttatgaggatcatgataatgtctatatagtgatggaactatgtgaaggaggagagcttttggatagaatactttcaagaggtgggaagtacacagaggaggatgcaaagaccgttatgatacaaatattgaatgtggttgctttttgtcatctgcaaggcgttgtacacagagatcttaaaccagagaattttctttttacctcaaaagaagacacctctcaattgaaggcaatagatttcggtttgtcagattacgtgagaccagatgagaggctcaatgacattgttggtagtgcatactatgtagcacctgaagttctgcatagatcttacagtacagaagctgatatttggagtgttggtgtgattgtatatattctattgtgtggaagccgaccgttttgggctaggacagaatcaggaatctttcgtgctgttctaaaagctgatccaagttttgatgaccctccttggcctttgttatcttcagaggcaagagattttgtaaagcggttgctaaacaaagatccgcgtaaaagattaacagctgctcaagccttaagtcatccatggataaaggactcaaacgacgcaaaggttccaatggatattctggttttcaaacttatgagagcttatttacgatcatcatctctccgtaaagctgcattaagagctttatcgaaaacacttacggttgatgaactgttttatctgagagagcagtttgctttgttagaacctagtaagaacggaaccataagtctagaaaacatcaaatcagctctgatgaaaatggcaacagatgcgatgaaggactcacgtattccagagttcttaggacaactgagtgctcttcaatatagaagaatggactttgaggaattctgtgcagcggcattgagtgttcaccagctagaagctcttgatcgatgggaacaacacgctcgttgtgcttatgagcttttcgaaaaggaagggaaccgaccaatcatgatcgatgaactcgcttcggaacttggtcttggcccttctgtaccggttcacgcagtgcttcacgattggcttagacataccgatgggaagcttagctttctcggatttgtgaaattgctacatggtgtgtctagccgcacgatcaaagctcattag

SEQ ID NO: 39 - DNA, 2630 bp, Arabidopsis thaliana
atggcgatgttaaaatctctttcatcgattttattcacaagctttgctcttctgttctttcttgttcatgctcaagatcaatctggtttcataagtatagattgcgggataccggatgattctagctacaacgatgagactacaggtataaagtatgtttcggattcggcgtttgttgattcaggaacaacaaagagaattgcagctcagtttcaatcaagtggttttgatagacacttgttgaacgtgagaagtttccctcaaagcaagagaagctgttacgatgttccgacgccgagaggcaaaggttttaagtatctaatcagaactcgtttcatgtacgggaactatgatgatcttggaagagtacccgagttcgatctctatctaggagtaaacttttgggactctgttaaactcgacgatgcaacaactatactcaacaaagagataatcaccattccacttttagacaatgttcaagtgtgtgttgttgataagaacgcaggaactccatttttgtctgtcttggagatacggctcttgttgaacactacttatgagactccttacgatgcacttaccctccttcggagattagattacagcaaaacgggaaaacttccatcgaggtacaaagatgacatatatgaccgtatatggacaccgcgtatagtgagttcagaatacaagatattaaatacatctctcactgtcgatcaatttcttaacaatggctaccaaccggcttctactgtcatgagcactgcagaaacagcgcgaaacgagagcctctacctaacgcttagtttcagaccgcccgaccctaacgcaaagttttatgtatacatgcactttgctgaaattgaagtactgaaaagcaaccagacgagagaattcagcatctggctaaatgaggatgtaatctctccttcgtttaagcttcggtacttgcttaccgacacattcgttacaccggatcccgtgagcggaattaccattaacttctctcttcttcaaccacctggtgaatttgtacttccaccgatcattaacgcccttgaggtctatcaagtcaatgagttccttcagatcccaactcatccacaggatgttgatgccatgaggaagattaaagccacgtatagagtgaagaagaactggcaaggagatccttgtgttcccgtagattattcttgggaaggtattgactgtatccaaagtgataacactactaatcctagagtcgtttcactaaatatatcttttagtgaattaagaggccagatagatccagccttctccaaccttacatctataagaaaattagatttatccggtaatactttaacaggagaaatacctgctttcctcgctaacttaccaaacttgaccgaattaaacgttgaaggaaacaagttaacgggcatagttccacaaagattgcatgaaagatcaaagaatggatctctttccttaagatttggtagaaatccggacctttgtctctctgattcctgttcaaacacaaagaagaagaacaagaatggatacatcattccattagtagtcgtaggaatcatcgtcgttcttttgacggctttagctttgttccggcgtttcaagaaaaaacaacaaagaggtacacttggtgagaggaatgggccgttgaaaactgcaaagcgatactttaagtactcagaagttgtgaatatcacaaataactttgagagagttattggcaaaggaggttttggtaaagtataccatggtgtcataaatggagaacaagttgctgtcaaggtactctctgaagaatcagctcaaggctacaaagagtttcgagcagaggttgaccttctcatgagagttcatcacacgaacctgacttctcttgttggatattgcaacgaaataaaccacatggtgcttatctatgagtatatggctaatgagaacttaggagactatttggcaggtaaaaggtcatttatcttgagctgggaagagaggttgaagatatcattagatgcagcgcaaggactagagtatcttcacaatggttgtaagcctcctatagttcacagagatgtgaagccaacaaacatcttactaaacgagaagctccaagcgaagatggcggacttcgggttatctagaagcttctctgttgaaggaagcggtcagatttcaacagttgtcgctggatccatcggttaccttgaccccgagtactattcgactcgccaaatgaacgaaaagagtgatgtttatagtcttggggttgttcttcttgaagtgattacaggccaacctgctattgcaagctcaaaaacagagaaggtgcatataagtgatcatgtcaggtcaatattagccaacggagacattagaggaatcgtggatcagcgtctaagagagagatatgacgttggctcggcttggaaaatgtcagagatcgctcttgcttgtaccgagcacacttctgcgcagaggccaacgatgagtcaggtcgttatggagctgaaacagattgtttatggcatagtgactgatcaggaaaactacgatgactcgacgaaaatgcttacagtgaatctagacaccgagatggttcctcgagcaaggta

SEQ ID NO: 40 - DNA, 1872 bp, Arabidopsis thaliana
atgcatcccgggaatgtatggggtgggtcgctagacgccgtagacagcgaccgtattgcggcagaggaggaagaacggctgaggaacacgacggagtgggacagaggagctattcactcacagagaagtgaattagacgaaacgcaacaaggctggttgcttgcaccgcaagataattggagaaagaagaagaagaaatatgtaaacctaggttgtgtttccgtgagccgcacggttttcttgtggaccgttggatctattgccgtcttgtttctcgtcgttgctcttccgatcattatcgtcaagtcgttgcctcgtcataagtctgcacctcctccgcctgataattacactcttgcccttcacaaagcacttcaatttttcgatgctcaaaaatctggtaagctgccgaagaagaataaggtttcatggagaggtgattcagggacgaaggatgggctgccggacgtggtaggaggattggtcgggggatactacgacggaggaagcaacgtcaagtttcattttccgatggcattctcaatgacaatgctaagttggagtctcattgagtatagccacaaatacaaagccatcgatgagtatgatcacatgagagatgttctcaaatggggcactgattatcttcttctcactttcaacaattctgctactcgccttgatcatatctacactcaggttggtgggggactaagagactcagaatcaccagatgatatctactgttggcaaaaaccagaagacatgtcctacgaccgtcccgtcctctcttccacttcggccgctgaccttggcgcagaagtttctgcagccttagctgctgcttcaatcgtattcactgacaaaccggactacgccaaaaagctcaaaaaaggcgcagaaactctatatcccttcttcagaagcaagtccagacgcaagcgctactcggacggacaaccaacggctcaagctttctacaattcaacaagtatgttcgacgagttcatgtgggctggtgcatggctttactacgccactggaaacaagacttacatacaattcgccaccacaccgagtgtacctcaaactgctaaagcttttgctaatcgacccgagttaatggtaccgagctggaataacaaattacctggagcaatgttgttgatgactcggtatagattgttcttgaaccctggtttcccttacgaaaacatgctcaataggtaccataacgctactggtatcaccatgtgtgcttatctcaagcagtacaatgtctttaaccgaacttcaggagggcttatgcaactcaacttggggaaaccaagaccacttgaatatgtggctcatgcttccttcttagcttccttgttcgcggattatcttaattctactggagttcctggatggtactgtggacctacatttgtagagaaccatgttctcaaggattttgctcagtctcagattgattacattcttggagacaaccccttaaaaatgagctatgtggttggattcggcaagaagtttccaagacgtgttcatcaccgaggcgccacgatcccaaacgacaaaaagaggagaagctgtagagaaggattgaagtatagagacacaaagaatccaaatccaaacaacatcacaggagctatggttggtggaccaaacaaattcgatgagttccatgacttgcgaaacaattataacgcaagcgagcctactctctctggtaacgcaggcctcgtagctgctctcgtttccttaaccagcagtggtggccaacaaattgataagaacacgatgttcaatagtgttcctcctctctactctccgactccaccacctcctaaagcctggaagccttga

SEQ ID NO: 41 - DNA, 1785 bp, Arabidopsis thaliana
atgagtgactcggtgtcgatctcggttccgtataggaatttgaggaaggaaattgaacttgagacggtcaccaagcatcgtcaaaacgaatctggttcttcgtcgttctctgaatctgcttctccttcgaatcattctgattcggctgatggtgaatctgtgtcgaagaattgtagtttagtgacgttggttcttagttgtacagttgccgctggagttcaatttggttgggcattgcaactttctcttcttactccttatattcagacccttggaatatcgcatgctttttcttcgtttatttggctgtgcggcccaattacaggccttgtggtccagccttttgttggcatttggagtgataaatgtacttcaaagtatggaagaagacgaccatttattctagttggatcattcatgatctcaatagcagtgataataatcggattttctgcagacattgggtatctgttaggagattcaaaggaacattgcagtactttcaaaggcacacgaaccagggcagctgttgtctttatcattgggttttggttgttggatctagcaaacaatacagtacagggacctgctcgtgctcttctagctgatctatcaggtcctgatcagcggaatactgcaaatgctgtgttctgcttgtggatggctattgggaacatccttgggttttctgccggtgctagcggaaaatggcaagaatggttcccttttttaactagtagagcatgttgtgctgcatgtggaaatctcaaagcagcgtttcttcttgcagtggtctttctcactatatgtactcttgtcacaatctattttgctaaagagattccttttacaagcaacaagcccacccgcatacaagattctgcacctttgttggatgatctccagtccaaaggccttgagcattcaaaattaaataatggtactgccaatggaatcaagtatgagagagtggaacgtgatacggatgaacagtttggcaattcagagaatgagcatcaagatgagacctacgttgatggccctggatctgttttagtgaatttgctaactagtttaaggcatttgccaccggctatgcactcagttcttatcgtcatggctcttacatggttatcctggttccccttctttctgttcgatacagattggatgggaagagaagtttaccatggggatccaacaggagatagtttgcatatggaactctatgatcaaggtgtacgtgaaggtgcacttggtttgctactaaactctgttgttcttgggatcagctcatttctcattgaaccaatgtgtcagcggatgggtgctcgggttgtatgggctttgagcaattttactgtatttgcctgcatggcgggaacagctgtaatcagcttgatgtctctcagtgatgacaaaaatggaattgaatacataatgcgtggaaacgaaacaacaagaaccgcagccgtaatcgtttttgcactccttggttttcccctagctatcacatacagtgtccctttctctgtcacagcagaagtcactgctgattccggtggcggtcaaggtttggctataggagtgttgaatctcgcaatcgttattccccagatgatagtatcacttggagcgggtccatgggatcaattgtttggaggaggaaacttaccggcgtttgttttggcgtctgttgctgctttcgctgctggagttattgcattgcaaaggcttcccacgctatcgagttctttcaagtccaccggtttccacatcggctaa

SEQ ID NO: 42 - DNA, 1155 bp, Arabidopsis thaliana
atggcttcacttcttgtcctcttcgttttcttcttcatctcttcttgttctgctcaatcctacaatgtattgtcttttggagctaagccggacggaaagacagacgcaaccaaagcttttatggcggtttggcaaaccgcttgtgcatcgtctcgtcctgttaccattgtggttcccaaaggccggttcttgttaagaagcgttactttcgatggttccaaatgcaagcccaagcccgttacgttccgtatcgacggtacattggtggctccagctgattatcgagttataggaaatgaagactattggattttcttccagcatctcgacggcatcaccgtatacggcggagttcttgacgctcgaggagcttctttatgggattgtaaaaagtccggcaagaattgccccagtggcgcaacgacaataggatttcagagctcaagcaacgtcgtggtctctgggctaacgtcactaaacagccaaatgttccacgtcgtcatcaacggttgtaacaacgtaaagcttcagggagtcaaagtattagctgccggaaacagccccaacaccgacggtatccacgttcagtcttcctcctccgtctctatattcaatactaaaatctccaccggagacgattgtgtctccattggtcccggcactaacggactatggatcgaaaatgtcgcatgcggccctggtcatggcatcagcattggtagtttgggaaaagatagcgtggagtcaggtgtacaaaacgtgacagtgaaaacggtgacgtttacgggaactgataacggagtaaggatcaaatcatgggccaggcccagtagtgggttcgctaaaaacatccgtttccaacattgtgtaatgaacaatgtcgagaaccctatcatcattgaccaaaactactgtcctgatcacgattgtcctcgccaggtttcggggatcaaaattagcgatgtgttgtttgttgatatacatggaacatcggcaactgaagttggagtgaaacttgattgtagttctaagaaaccatgtaccggaattagacttgaggatgtgaaattaacgtaccagaataaaccggctgcatcggcttgtactcacgccggagggatagaagctggattttttcagccaaattgtctatga

SEQ ID NO: 43 - DNA, 1008 bp, Arabidopsis thaliana
atgcctccacaaaaagaaaaccatagaacattgaacaaaatgaagactaatctttttctctttctcatcttttcacttctcctatcattatcctcggccgagcaatgtggtcgccaagctggaggagcactctgccccaacggtctatgctgcagcgagttcggctggtgcggtaacaccgaaccatactgtaagcagcctggctgccaaagccagtgcactcccggtggtactcctcctggacccaccggcgatctttcgggcatcatttcaagttctcagttcgatgatatgcttaagcataggaatgatgccgcttgtcctgctagaggtttctacacttacaacgcctttatcaccgctgcaaagtccttccccggttttggcaccaccggagacaccgccacgaggaagaaggaggtcgccgccttcttcggccagacttcccatgaaactacaggtggatgggctacagcaccagacggaccatattcatggggctactgtttcaagcaagaacagaatcctgcttcagactactgtgaaccgagcgccacgtggccatgcgcatctggcaaacgctactacggaagaggaccaatgcaactgtcgtggaactacaattacggtctatgcggtagagcaataggagttgacttactcaacaaccctgaccttgttgccaacgacgcagtgatcgctttcaaagccgcgatttggttctggatgactgctcagcctcccaaaccgtcttgccatgccgtgatagccggccagtggcagccttcagacgccgaccgtgccgccgggagattaccgggttatggagtgattacgaacatcattaacggtggattggagtgtggacgtggccaagacgggagagtcgccgatcgtatagggttttatcagaggtattgtaacatatttggtgttaatcctggtggtaatcttgattgttacaaccaaagatccttcgttaacggcctcctcgaagctgctatttag

SEQ ID NO: 44 - DNA, 1098 bp, Arabidopsis thaliana
atgagttgctttgggtgttgtggggaggatgatgatatgcataaaactgctgattatggaggtcgtcataaccaagccaaacactttcctccaggaaatgatgcaaggcaccaccaagcctctgaaactgcacagaagggtcctccagttgtgaagttgcagcctattgaagtacctattatcccttttagtgaactcaaagaagcaactgatgattttggatcgaattctctcatcggtgaaggctcttatggaagagtatactacggggtattaaacaatgatctgccttcagcgattaaaaagttggattctaacaaacagcctgacaatgaattccttgctcaggtttccatggtttctaggcttaaacatgataactttgttcaacttcttggctactgtgttgatgggaattcacggatactttcttatgaatttgccaataatggatctcttcatgatattcttcatgggagaaaaggtgtgaaaggagcacagccaggtcctgtcttgtcgtggtatcaacgagtcaaaattgcagttggagctgcaagaggccttgagtacttgcatgaaaaagctaatcctcacatcattcaccgtgacattaaatccagcaatgtcctcctctttgaagatgatgttgccaaaattgctgactttgatctctctaatcaagctcctgatatggcagctcgccttcattccacccgagttcttgggacttttggttaccatgcccctgaatatgcaatgaccgggcagttaaatgccaagagtgatgtctacagctttggagttgtcttactcgaacttcttacaggtcgaaagcctgttgatcatagactacccagaggccagcaaagtttagtcacatgggctacacctaaactgagtgaagacaaggttaaacaatgcgttgatgcaagactcggtggcgattaccctccaaaagctgttgctaagttagccgcggttgctgcgttgtgtgtgcaatatgaagcagattttaggccgaatatgagtatcgttgtcaaagctcttcaacctttgttgaatgctcgagccgtagctccaggggaaggagtacattag

SEQ ID NO: 45 - DNA, 1880 bp, Arabidopsis thaliana
atgggtttagtcaacgggagagcttcgttgacctttctcctcgcggcgttgaccatcatcgctatggtcgtcgaggctaggtttgtggtggagaaagaaagcataagcgtgctgaatccagaggagatgaggtcgaagcacgacggctcgatagccaatttcggtttacccgattacggtgggtttttaatcgggtcagtggtttatccggatagtaaaaccgatggatgctctgcttttggtaaaaccttcaagcccaagtttcctcgtcccactattctgcttcttgatcgtggaggttgctactttgccttaaaagcgtggcacgcgcagcaagcaggcgcggctgcagttcttgtggcggataatgtagacgagccattgttgacaatggattcaccagaggagagcaaagatgcggatggtttcatagagaagctaacaatcccatcggtgttaatcgataaatcatttggagatgacttaagacaagggtttcagaaagggaaaaacatagttataaaactagattggagagagtctgtgcctcatcctgataagagagtagaatatgagctgtggactaatagcaatgatgagtgtggtgcacggtgtgatgaacagatggactttgtcaagaactttaaaggtcatgctcagatactcgaaaaaggcggttataccgcgtttacgccgcattatattacttggttttgcccttttcagtttataaacagtccacattgtaagtctcagtgtataaaccatgggaggtattgtgctcctgaccctgaggataatttcagagaagggtatgaagggaaagatgttgtgcttgagaatctgagacagctttgtgtgcatagagttgcgaatgagagtagcaggccttgggtttggtgggattatgttaccgattttcattctcgatgttcgatgaaggagaagaaatacagcatagattgtgctgagagtgtcatcaaatctctgaatttacctattgagaagatcaagaaatgcattggtgatcctgaggctgatacagagaaccaagttctgagaactgagcaagtatctcagattggccgaggaaaccggggagatgttacgatattgccaacattagtcatcaataacgctcaatatcgagggagattggagagaaccgcggttttaaaggcgatatgcgctggttttaatgaaacatcggagcctgccatttgcttaaacacaggtctagagacaaatgagtgccttgaaaacaatggtggttgctggcaggatacaaaagcaaacatcactgcttgtcaagacacattcagaggaagactctgcgagtgtccggttgtaaaaggtgttcaatataaaggagacgggtacacttcatgtacaccttatgggcctgcgaggtgtactatgaacaatggaggttgctggtctgacacaaggaacggcttaactttctctgcttgctcagactctgtatctactggctgcaaatgtcctgaaggtttccaaggcgacggtttgacgtgtgaagcagatattaacgaatgtaaagagcgttcggtatgtcaatgtagcggttgcagatgcaagaactcatggggtggatacaaatgcagctgttctggtgaccggctttacataaacgatcaagatacttgtatagagagatatggatccaaaacggcatggtggctcacattcttgatactggctatcgttgcagtagccggtttagctggttatatattctacaaataccggttcaggtcttacatggactcagagattatgacgatcatgtcacagtatatgccacttgagagccaaagagctcgtgaagttccatcagaagccgagccttttacactcta

SEQ ID NO: 46 - DNA, 3642 bp, Arabidopsis thaliana
atggttcgatcgggtagttttagcgtcgattcttcggcgactcatcaacggactccgtctcgaacggttacgttgggtcatattcaaccacaggctccgacttatcgtaccgtttattgtaatgatcgggaatctaatcaacccgtccggttcaagggtaattcgatttctacaacaaagtataatgttttcacatttctgcccaagggtctgtttgaacagtttaggcgcatagcgaacatatactttcttggaatttcgtgtctatcaatgacaccaataagtcctgtgagtccaataacaaatgtagctccactgtcaatggtgcttcttgtttctctgattaaagaggctttcgaagactggaaacggtttcaaaatgatatgtccataaataatagcacagtggaaatcttacaagatcaacagtgggtatctattccgtggagaaagttgcaagttggagatattgtcaagataaaaaaagatggatttttcccagcagatattcttttcatgtccagtactaattctgatggtatctgctacgttgagactgcaaacctagatggagaaacaaatttgaaaataagaaaggcacttgaaaggacatgggattacttggtaccagagaaagcttatgagtttaaaggtgaaattcagtgtgagcaaccaaacaattctctgtacacttttactgggaaccttgtagtccaaaagcagacgttacctctctctccggaccagcttttattgcgtggatgcagtcttaggaacacagaatacatagttggagctgtagtttttactggtcatgagacgaaggtgatgatgaatgccatgaatgctccttccaaaagaagtacgctggaaaagaagcttgacaaactcattattacaatattttgtgtccttgtcacgatgtgtctgattggagctataggctgttcaattgtgacggatcgtgaggacaaatacttgggtcttcataactcagattgggaataccgcaatggactcatgataggatttttcacctttttcacgctagtcactctgttctcatcaattataccaatctccctttatgtttctattgagatgatcaagtttatccagtcgacccagtttatcaaccgcgatcttaatatgtatcatgctgaaacaaatacccctgcctcggccaggacttctaatttgaacgaggagcttggacaggtggaatacatattttccgataaaaccggaacactgacaagaaatttgatggagttcttcaaatgttcaattggaggtgtaagttatggatgtggtgtcactgaaatagaaaaaggaatcgctcagcgtcatggcttaaaagttcaagaggagcaaaggtccacgggtgcaataagagaaaaaggatttaattttgatgatccaaggctaatgcggggagcttggagaaacgaacctaatcctgatctttgcaaggaactgtttagatgcctggccatctgtcacactgtccttcctgaaggtgatgagtcccctgagaagattgtttatcaagctgcatctccagatgaagctgccttagttactgctgccaagaattttggattcttcttttataggcgtactccaactatggtgtatgttcgcgagtctcatgtggagaagatgggaaagattcaagacgtggcctatgagatcctaaacgttctcgagttcaacagtactaggaagcgccagtctgttgtatgtcgtttcccagatggaaggcttgtactctactgtaagggcgctgataatgttatctttgagagattggctaatggtatggacgatgttaggaaagtaacaagagaacatttggaacattttgggtcttctggattgcgtaccctttgcctagcctataaagatttaaatcctgaaacctatgatagttggaatgaaaagttcatccaagccaaatctgcattacgagaccgtgagaagaagttagatgaggtggcagaactcatcgagaaggatcttatcctcatcggatcaactgcgatagaagacaaacttcaggaaggggtgcctacctgcatagaaacattatcaagagctggaattaagatctgggtgttaacaggggacaaaatggaaacggctattaatattgcatatgcatgcaacttgatcaacaatgaaatgaaacaatttgtcattagttctgaaaccgatgcaatcagagaagctgaagaaaggggtgatcaagttgagattgctcgtgttatcaaagaagaagtaaagagggagctgaaaaagagtcttgaggaagctcaacactctttgcataccgtagctggaccaaaattgtctctcgttattgatggcaagtgtttaatgtatgcattagacccgagtttacgcgtgatgctgctcagcttgagcttgaactgtacttcagttgtatgctgtcgtgtatctccgttacagaaagcacaggtgacaagcttggtgagaaaaggggcacaaaagattactcttagtattggtgatggggccaatgatgttagcatgattcaagctgctcatgttggtataggaataagtgggatggagggaatgcaagctgtgatggctagtgattttgccattgctcagttcagatttcttacagatttacttcttgtccatggacggtggtcatatcttagaatctgcaaggttgtcatgtatttcttctacaagaatcttaccttcactttgactcagttttggttcacatttcgaactggattttctgggcaaaggttttatgatgattggttccagtcattgtttaatgttgtatttacagctcttcctgtcatcgtccttgggctgtttgagaaggatgtgagtgcatccctttcgaaaagatatccagaactgtatagagagggaatacgtaactcatttttcaaatggagagttgtagcagtatgggctacttctgctgtgtatcagtctcttgtctgctatctctttgtgacaacctcatctttcggtgctgtaaattcatcaggcaaagtatttggcctctgggatgttagcacaatggtcttcacatgtctggtgattgctgtgaatgtgcgcattcttttgatgagcaattccattaccagatggcattatatcacagtcggtgggagtattcttgcatggctcgtttttgctttcgtatactgcgggattatgacaccacatgataggaatgaaaatgtctactttgtcatatatgttctgatgagtacattctatttctacttcacattgttgcttgttcccattgtctctcttctaggcgatttcatcttccaaggggtggagagatggttcttcccgtatgattatcagatcgttcaagaaatacataggcacgagtcagatgcaagcaaggcagatcagctggaggtagagaatgagctcacacctcaagaggcgagaagctatgcgatatcacaattgcctcgggagctctcaaagcacactgggtttgcgtttgattcaccaggttatgaatctttctttgcgtctcagttagggatatacgcgccacagaaggcgtgggatgtggcaaggagagccagtatgagatcacggccaaaggtaccgaagaagtaa

SEQ ID NO: 47 - DNA, 2178 bp, Arabidopsis thaliana
atggagattaacggggcacacaagagcaacggaggaggagtggacgctatgttatgcggcggagacatcaagacaaagaacatggtgatcaacgcggaggatcctctcaactggggagctgcagcggagcaaatgaaaggtagccatttggatgaagtgaagagaatggttgctgagtttaggaagccagttgtgaatcttggtggtgagactctgaccattggacaagtggctgcgatctcaactattggtaacagtgtgaaggtggagctatcggagacagctagagccggtgtgaatgctagtagtgattgggttatggagagtatgaacaaaggcactgatagttatggtgttactactggttttggtgctacttctcatcggagaaccaaaaacggtgtcgcacttcagaaggaacttattagattccttaacgccggaatattcggaagcacgaaagaaacaagccacacattgccacactccgccacaagagccgccatgcttgtacgaatcaacactctcctccaaggattttccggtatccgatttgagattctcgaagcaattaccagtttcctcaacaacaacatcactccatctctccccctccgtggtacaatcaccgcctccggagatctcgttcctctctcctacatcgccggacttctcaccggtcgtcccaattccaaagctactggtcccaacggtgaagctttaacagcagaggaagctttcaaattagcaggaatcagctccggattctttgatctccagcctaaggaaggtctcgcgctagtcaatggcacggcggttggatctggaatggcgtcaatggtgttattcgaaacgaatgttctctctgttttggctgagattttgtcggcggttttcgcagaggtgatgagtggtaagcctgagttcaccgatcatctcactcacagacttaaacatcatcccggtcaaatcgaagcggcggcgataatggagcatatcctcgacggaagctcgtacatgaaattagctcagaagcttcacgagatggatccgttacagaaacctaaacaagatcgttacgctcttcgtacttctcctcaatggttaggtcctcaaatcgaagtgatccgttacgcaacgaaatcgatcgagcgtgagattaactccgtcaacgataatccgttgatcgatgtttcgaggaacaaggcgattcacggtggtaacttccaaggaacaccaatcggagtttcaatggataacacgagattggcgatagcagcgattggtaaactcatgtttgctcaattctcagagcttgtgaatgatttctacaacaatggtttaccctcgaatctaaccgcttcgaggaatccaagtttggattatggattcaagggagctgagattgcaatggcttcttattgttcagagcttcaatacttagctaatcctgtgactagccatgttcaatcagcagagcaacataaccaagatgtcaactctttgggactaatctcgtctcgcaaaacttctgaagctgttgatattctcaagcttatgtcaacaacgttcctcgttgcgatttgtcaagctgtggatttgagacatttggaggagaatttgagacagactgtgaagaacactgtctctcaagtggcgaagaaagttcttactactggagtcaatggtgagcttcatccttctcgcttctgcgaaaaggatttactcaaagttgtagaccgtgaacaagtctacacatacgcggatgatccttgtagcgcaacgtacccgttgattcagaagctgagacaagttattgttgaccatgctttgatcaatggtgagagtgagaagaatgcagtgacttcaatcttccataagattggagctttcgaggaggagcttaaggcagtgctaccgaaagaagtggaagcagcaagagcagcctacgataacggaacatcggctatcccgaacaggatcaaggaatgtaggtcgtatccattgtatagattcgtgagggaagagcttggaacagagcttttgaccggagagaaagtgacgtcgcctggagaagagttcgacaaggttttcacggcgatttgtgaaggtaaaatcattgatccgatgatggaatgtctcaacgagtggaacggagctcccattccaatatgttaa

SEQ ID NO: 48 - DNA, 1008 bp, Arabidopsis thaliana
atggctgtaacaaatcttcctacttgtgatggtttgttcattatcagtcttattgtcatcgtttcttcaatatttgggacatcatctgcgcaactaaacgcaacattttactctgggacttgtcccaacgcctctgccatcgtacgcagcactattcagcaagctcttcaatccgatacaagaatcggagccagcctcatccgccttcattttcatgactgttttgttaatggatgtgatgcatcgatcttgcttgacgacactggaagcatccagagcgagaagaacgctggtccgaatgtaaactcagctagaggattcaacgttgttgataatatcaagactgccctcgaaaacgcttgccctggtgttgtctcttgctctgacgttttagcccttgcctctgaggcttctgtgtctttggcaggagggccatcatggactgtattattaggaagaagagatagtctcacggccaacctcgccggtgcaaattcgtccattccttctcccatcgaaagcctaagcaacatcacatttaaattttcggctgtcgggcttaatacaaacgatctggtagccttatctggtgcgcatacgttcgggcgtgctcgatgtggagtattcaacaacagactatttaacttcagcgggacaggaaatcccgatccaactctaaactcaacgcttctgagcactcttcaacagctatgtcctcaaaacggtagcgcatcaacgatcaccaatcttgatttgagcacaccagatgcgttcgataacaattacttcgccaaccttcagagcaacgatggacttcttcagtcagaccaagagctgttctctaccaccggttcatccaccatcgcgattgttacttcgttcgcaagtaaccagactctgttttttcaggcctttgcacagtccatgatcaatatggggaatattagtcccttgactgggagtaatggagagattaggttagactgtaagaaggttaatggaagttga

SEQ ID NO: 49 - DNA, 1617 bp, Arabidopsis thaliana
atggcctcaattcttaatcaaacccaggagttgcaagaatcttctaaggttcttgggcatttaagatgtgaaaacttctttctattccccggagaaaacactttgtcagatggtttgaggggtgtgttatattttctcggtcttgcctactgctttattgggttgtcagccatcactgcacggttcttcaagtctatggagaatgtcgtgaaacattcccgtaaagtggttacaattgatcccattactaaagctgaagtcatcacatacaagaaagtttggaactttactattgcagacatcagtttgttggcgtttggaactagcttccctcagatttctttggctaccatcgatgcaatacggaatatgggggagcggtatgctggaggtcttggtcctggaacacttgttggctcagctgcatttgatcttttccccatccacgctgtttgtgtcgttgtgccaaaagctggagaactgaaaaagatatccgacttaggtgtttggctagttgagctcgtatggtctttttgggcttacatctggctatacataatcctcgaggtgtggtcaccaaacgtaattacacttgtggaggcattattgacagtactgcaatacggattgcttctagttcatgcgtacgcccaagacaagcgatggccttacttgtctttaccaatgtcaagaggtgataggccagaggagtgggttccagaggagattgatacatccaaagatgacaatgacaatgatgttcatgatgtgtattcggatgctgctcaagatgctgttgaatcgggaagcagaaacattgttgatatcttctctattcattcagctaacaatgatacagggatcacttatcatactgtggcagatactccacccgattctgcgactaagaagggtaaggcgaagaattctactgtttttgacatttggaaacatcaattcgtggatgcaataacggtaaaaatcttcaacttaccaatggatagcatttatcttcgaatcgcgaaatctttctggcatttactcctcgccccttggaaactgctttttgcatttgtgcccccctgcaacattgctcacggttggatcgctttcatctgctctctcctcttcatcagtggagtagcctttgttgtcacaagatttactgaccttataagctgtgtcactggaataaacccatatgtgatagcattcacagcactcgcaagtggaacttcatggccagacttagtagcaagtaaaatcgctgcagagcgacaactaaccgcagattcagctattgcaaacatcacctgcagtaactcggtgaacatctatgtggggattggagttccgtggctgataaacacagtctacaactactttgcatacagagagcctttatacatagaaaacgctaaaggattaagcttttcgcttctgatattctttgcgacatcagtgggatgtatcgtggtgcttgtgttgagaaggttgattataggagctgagcttggaggtccaaggctatgggcttggcttacttctgcctatttcatgatgctttgggtcgtcttcgttgttctttcttctttgaaagtttcaggcgtcatatag

SEQ ID NO: 50 - DNA, 966 bp, Arabidopsis thaliana
atgggaggacatgtcttgcttactgttttcactctttgtatgctttgttcaggggttagggcacagctaagccctgacatttatgctaaatcgtgccccaatctagttcaaattgtccgtaaacaagttgccatcgccctgaaggccgagatacggatggctgcttctctcattcgtcttcatttccacgactgctttgttaatgggtgtgatgcgtcgttattgttggatggagctgacagcgagaaactcgcgatcccaaacattaactctgctagaggatttgaagtaattgatacaatcaaagccgctgtggaaaacgcatgtcctggtgttgtttcttgtgctgatatcctcactttggccgctcgtgactccgttgtattgagtggagggcctgggtggagagtggcattaggaagaaaagatggattggtggcaaatcagaacagtgcaaacaatctaccatctccttttgaacctttagacgccattatcgccaaatttgtagccgtaaaccttaacatcaccgacgtcgtagctttatcaggagctcacacctttggacaagcgaagtgtgctgtcttcagcaaccgtctgttcaactttaccggcttgggaaatcccgacgcaacacttgagacatcactcttgtctaatctgcaaacagtttgtccgctcggaggaaatagtaacataacagcacctcttgacaggagcactacggacaccttcgacaacaattatttcaagaacctgcttgaaggaaaaggtcttttgagttctgatcagattctgttctcgagtgacttagccgtgaacaccacaaagaaactagtggaggcttatagtcggagccagagcttgtttttcagggacttcacatgtgcgatgatcagaatgggaaacatttcgaatggagctagtggggaggttaggacaaactgcagggttatcaataattag

SEQ ID NO: 51 - DNA, 1575 bp, Arabidopsis thaliana
atggaatctgcatcggatctgggcaagctcttcattggcgggatttcatgggacacagatgaagaacgactgcaagagtattttggcaagtatggagatttggttgaagctgtgatcatgagagaccgtactaccggacgtgcccgtggctttgggtttatcgtttttgcagatccttctgttgccgagagagtcatcatggacaaacacatcattgatggccgcacggtcgaggcgaagaaagctgtcccgcgggatgatcagcaagtgctaaaacgacacgccagtccaatgcaccttatctcacctagccatggtggtaatggtggtggagcacggacaaagaagatctttgttggaggtttaccgtctagcattactgaggccgagttcaagaactactttgatcagtttggtacaattgctgatgttgtggtaatgtatgatcataatacacagaggccaagaggctttggcttcatcacttttgattccgaagagtctgttgatatggttctccacaagacctttcatgagctaaacggaaaaatggttgaggttaaaagagcagtgccaaaggagctctcctcgactactcctaaccgaagcccacttattgggtatggtaacaactatggagtagtccctaataggtcttctgctaatagctacttcaatagttttcctcctggttataataataataatctaggctctgctggccggtttagtcctattggtagcggtagaaatgctttctctagcttcgggctcggattgaatcaagaactgaatttgaattcaaactttgatggaaacactcttgggtatagccggatccctggcaaccaatacttcaacagtgcttcaccaaaccgttacaactctccaattgggtacaacagaggagactctgcttacaacccgagcaacagagacttgtggggaaacagaagcgattcctctggtccaggttggaacttgggagtttcggttggtaacaacagaggaaactggggactttcttctgtggtgagcgataacaatggctatggaagaagctatggggctggttctggactttcggggttatcattcgcgggtaatacaaacggttttgatggctctataggggaattgtatagaggcagctcagtttatagcgactcaacatggcagcagtcaatgcctcatcatcagtcttctaatgagttagacggcttgtctcgctcttatggctttggtattgacaatgtaggctcagacccatcagccaatgcctcagaaggatactccggaaactacaatgtcggaaatagacaaacacatagaggtacactcatcgatgtattgaagcatagaaagaaatcgacgaagagaagtgagaattgtagatcaagaagaacagccatttccgttgcagagtttgaagagttgttatttcgatatcaagtagagaaagaaaccaactttcttcatcacagtgagtttcttgttttgtttttttcgtcgttagcatcacaaacacaaaaaagagaagtttatttttactttaaaaattcttacataagataa

SEQ ID NO: 52 - DNA, 654 bp, Arabidopsis thaliana
atgggagcctacagagccgacgacgactacgattatctcttcaaactagtcttgattggagattccggcgtcggaaaatccaatcttttgtctcgcttcaccagaaacgaattcagcatcgagtcaaagtcaaccatcggtgtcgagttcgccacaagaagtgttcatgtcgacgaaaaaatcatcaaagctcagctttgggacaccgctggtcaagaaagatacagagcaatcacgagtgcatactacagaggagcagtgggggcacttctagtatacgacataactcgacacataacgttcgaaaacgttgaaagatggctcaaggagcttcgtgaccataccgatgccaacgttgtaatcatgcttgttggaaacaaagccgatcttcgtcaccttcgtgcagttcccacagaagaagctagatcattctctgaaagagaaaacatgtttttcatggagacttctgctttggatgctacaaatgtcgaacaagctttcactcatgtcttgactcaaatctatcgtgtaatgagccgtaaagctcttgatggtactggagatccgatgtctttacctaaaggacaaaccattgatatcggaaataaggatgatgttactgctgttaaatcttctggttgttgctcaggttga

SEQ ID NO: 53 - DNA, 1983 bp, Arabidopsis thaliana
atgaagtcttttgcggctaaggtagaagagggagttaaaggaatagacggaaagccgtcggtaggtccggtgtaccggaatcttctgtcggaaaaaggttttcctccgattgattctgagatcaccactgcttgggacattttcagtaaatcagtggagaaattccctgacaataatatgcttggatggcgtcgaattgttgatgagaaggttggaccatatatgtggaaaacgtacaaggaagtatacgaagaagttttgcagattggctctgcactacgagccgccggagctgaacctgggagtcgagtggggatctacggtgttaattgtcctcagtggatcatagcaatggaggcttgtgcagctcacactctaatctgtgtacctctatatgatacattgggttcaggagcagtcgattacattgtagagcatgcggaaatcgactttgtgtttgtccaagacaccaaaattaaaggacttcttgagccagattgcaaatgtgctaaacggctaaaagctatagtttccttcactaacgtgagcgacgagcttagccacaaggcttcagaaattggagtcaaaacatactcctggatcgattttctccatatgggacgtgagaaaccggaagacacgaacccgcctaaggcgtttaacatatgcaccataatgtacaccagcggcacaagcggtgatcctaaaggtgtggttttgactcaccaagcggtcgcgacttttgttgttgggatggatctctatatggaccagtttgaagataagatgacacatgatgatgtgtatctctccttcttgcccttggctcatattcttgaccgtatgaacgaggaatacttctttcgcaaaggcgcttccgtcggctattaccatggaaatttgaacgtgttacgtgacgatattcaagaactgaaaccgacttatctagctggagtaccaagagtgtttgagagaatccatgaggggattcaaaaggctcttcaagaacttaacccaagaaggagattcatcttcaatgctctctacaaacacaagcttgcgtggttgaatcgtgggtactctcatagtaaagcttcacccatggctgatttcattgctttcagaaagattagagacaaattgggaggtcgcatccggttgctagtatctggaggagcacctttgagccctgagattgaagagtttttgagagttacttgttgttgctttgtcgttcaaggctacggtctaacggagacacttggaggaacggctttgggtttcccggacgagatgtgtatgctagggacagtcggtattccagcggtttacaacgagatacggcttgaagaggtgtctgaaatgggctatgacccgctcggagaaaatccggcaggagagatctgtataagaggacaatgtatgttttcagggtattacaagaaccctgaactcactgaagaagtcatgaaagatggatggttccacacaggagatataggtgagattcttccaaacggagtactcaagatcatcgatcgtaaaaagaatctgatcaaactttctcaaggagaatatgttgctctcgagcatttggaaaacatcttcgggcaaaactctgttgtccaagatatatgggtttatggagacagcttcaaatctatgcttgtcgcggtggttgttcccaacccagaaaccgtcaacaggtgggctaaagatctcggttttactaaaccattcgaagaactctgttctttcccggaactaaaagaacacatcatttcagaactgaagtccacggcagaaaagaacaagctaagaaagtttgagtacatcaaagcggtgacagtggagacaaaacctttcgacgtagagagagacttagtgactgcgacgctcaagaatcggaggaacaatcttctcaaatattatcaggtgcaaatcgacgaaatgtaccgcaaattggcctcaaagaaaatctga

SEQ ID NO: 54 - DNA, 2060 bp, Arabidopsis thaliana
atggaacctcagagaaaacactcgacagccctccacacgtgtcatccctgccggcgaaccattccatacagaatctacgccgtatttcacacgtgtggcatcatagctctcatgtatcaccatgtacactcaattgtcaacgcaaacaacactctaataacatgtcttcttctcctctccgatattgttctcgccttcatgtgggcaaccacaacttccctccggttaaacccgattcatcggaccgagtaccctgaaaaatatgctgctaaaccggaggactttccaaagctggacgtttttatatgcacggctgatccgtacaaggagcctccgatgatggtggttaacaccgctttatcggtgatggcttacgagtatccgtctcataagatctcagtgtacgtatcggacgatggaggatcttccttgactttgtttgctcttatggaggctgccaagttctctaagcattggttgcccttttgcaagaataacaatgttcaagatcgctctcctgaagtttatttttcttcaaagtcacattcttcgagtgatgaagctgaaaatcttaagatgatgtacgaagacatgaagagtagagtcgaacatgtggtcgagagcggaaaagttgagactgcgtttatcgcatgcgatcaatttagttgtgtgttcgatctgtggacagataaattcactcgtcatgaccatcctaccattattatgttacgtgtatctgccgtgatgacaaactcaccaatcattctaacactagattgtgacatgtactcaaacaatcctacaacaccacttcatgctctgtgctatttgtcagaccctaaaatcaattttgatttaggatttgtgcaatttcctcaaaaatttcaaggagtaaacaaaaatgatatttatgcatccgagctcaaacgcccatttgacatcaacacggttgggtttgatggacttatgggaccagttcatatgggaactgggtgtttcttcaatcgacgggcgttttatgggcctccgactactttgattttgcctgagatagaaacatttgggccaaatcggattgccgataagcccattaaagcccaagatattttggcgttggcacacgatgtagcaggatgtaactacgagtgcaacaccaattggggatccaagataggtttcagatatgggtcattagtagaagactacttcacaggatttatgctccattgtgaaggatggagatcaattttttgcagcccgacaaaagctgcattttatggagactccccaaaatgcctaacggatgtaataggccaacaaatccgatggtccgttggacttcttgaagtagctttttcaagatacaatccacttacctatggaatcaagccattgagcctattaatgagcttaggttattgccactatgcattttggccattttggtgtattcctctcgttgtctatggaattttaccccaagttgccctcatacatggagttagcgtctttcccaaggcatcggatccatggttttggctttacattatcttgtttctcggtgggtacgcgcaagatctatcagactttttattagaaggaggaacttatcggaaatggtggaacgatcaaagaatgtggatggtgagaggactctcttctttcttctttggttttacagagttcactctcaaaaccctaaacctctccactcaaggatataatgtcacgagtaaatccaacgacgataatgaacaaatgaagcggtatgagcaagagatcttcgattttgggccctcttcgtccatgttcttgcccattactacggtcgccatcatgaatctgctagcttttatgcgtggcctatatggtattttcacttggggagaaggacccgtccttgaactgatgctagcgagtttcgcggtggtgaattgcttaccgatctatgaagccatggtgttgaggatcgatgacggaaaattaccaaaaaggatttgtttcttagctgggctcctcagttttgttcttaccgggtcaggctacttcttcctcaagta

SEQ ID NO: 55 - DNA, 468 bp, Arabidopsis thaliana
atggcgactgtacgaatctcctccactagcatgaccaaggccgttcttagaagccagacaaccaacaagctcattactaacaagagctacaacttatctgttggatcaacgaaaagggtttcgagatcttttggtttgaaatgctcagcgaattctggtggtgctacgatgtcggcggtatacaaggtcaagctcttaggacctgatggtcaagaagatgagtttgaggttcaagatgatcagtacatcttggatgcagctgaagaggcaggagttgacttgccttactcttgcagagccggtgcgtgttctacttgcgcgggtcagattgtgtccggcaacgttgaccagtcggatggttcgtttctcgaggatagccacttggagaagggttatgttttgacttgtgtggcttacccacagtctgactgtgtgatccatacccacaaggaaactgaactcttctaa

SEQ ID NO: 56 - DNA, 960 bp, Arabidopsis thaliana
atggacggtgtcacctaccaaagattcccaacggtgaagatccgtgagcttaaagatgactacgccaagttcgagcttcgtgaaaccgacgtttcaatggccaacgctctccgtcgcgtaatgatctccgaagtccccaccatggcaatccatctcgtcaaaatcgaggttaattcctctgttctcaacgacgagttcattgctcaacgacttagtctcatccctctcactagcgagcgtgctatgagcatgcggttctgtcaagattgtgaagattgtaatggagatgaacattgcgagttctgctctgttgagtttccccttagtgctaagtgtgttactgaccaaaccctagatgttactagtagggatctctacagtgctgatcctactgttactcctgttgatttcactagtaactcatctacttctgattcaagcgagcacaagggaattatcattgcgaaactacgcaggggacaagagttgaagcttaaagcattagctaggaaaggaattgggaaagatcatgcgaaatggtctcctgcagctactgttacgtatatgtatgagcctgacattattatcaatgaagagatgatgaacactttgacagatgaggaaaaaattgacttgattgagagcagtcctaccaaagtgtttggcattgacccagtcaccggacaggttgtggtggttgatcctgaagcatacacttacgatgaagaagtgatcaagaaagctgaagcaatggggaaaccgggactcattgagatccatccgaaacatgatagttttgtattcactgttgagtccacaggtgcattgaaggcttctcagctggtactaaatgccattgatatcctgaagcagaagcttgatgcaatccgtctctcagataacactgtagaagccgatgatcagtttggtgaactcggtgcccatatgcgtgaaggatga

SEQ ID NO: 57 - DNA, 1077 bp, Arabidopsis thaliana
atggctgtaacaagctcttcttctacttgtgatggtttcttcatcatcagccttattgttatcgtttcttcattgtttgggacatcatctgcgcagttaaacgcaacgttttactcaggcacatgccctaacgcctctgccatcgttcgcagcactattcagcaagctcttcaatccgatgcaagaatcggaggcagcctaatccgccttcattttcacgactgttttgttaatggttgcgatgggtcgctcttgcttgacgacacttcaagcatccagagcgagaagaacgctcctgccaatgcaaactcaactagaggattcaatgttgtcgatagtatcaagacagccctcgagaatgcttgtccgggcattgtttcttgctctgacattttagctcttgcctcagaggcctctgtgtctttggcaggaggaccttcatggactgtgttattaggaagaagagatggtctcaccgcaaacttgtctggagccaattcgtctcttccctctcccttcgaaggccttaacaacatcacatcaaaatttgtagctgtcgggctaaagacaaccgatgtagtatccttgtctggagcgcatacgtttgggcgtggtcaatgcgtaacgttcaacaatagactattcaacttcaacgggacaggaaaccccgacccgactctgaactcaacacttctcagcagtcttcaacagctatgtcctcaaaacggcagcaatacagggatcaccaatctcgatctgagcacacctgatgcgttcgataacaattacttcacgaaccttcagagtaacaatgggcttctccagtcagaccaggaactgttctcaaacaccggttcagccaccgtcccgattgttaattcctttgcaagtaaccagaccctgttttttgaggcgtttgttcagtctatgatcaagatggggaacattagtcccttgactgggagtagtggagagattagacaagactgtaaggtggttaatggacagtcatcagccactgaagcaggggacattcagttacaatctgacggaccagtgagtgtagcagatatgtga

SEQ ID NO: 58 - DNA, 3860 bp, Arabidopsis thaliana
atggcttcagagagcggcttaaatggagatccaaatatactagaagaggtttctgagaccaaaagagacaaggaagaagaagaagaagtgaagaaaacagagaagaaagacgaggaacatgagaaaaccaaaacggtgccgttttataagctctttgcttttgcagattcctttgatttcctcttgatgatcctcgggacgcttggatctattggaaatggtcttggcttccctcttatgaccttactgttcggagatctcattgatgcttttggagagaatcagactaatacaacagacaaagtctccaaagttgctctgaagtttgtatggcttggaatcggtactttcgcagctgcttttctccaattgtctggctggatgatttctggagagagacaagcagcgagaataaggagtttgtatctaaagacaatcttaagacaagatatagcctttttcgacatcgatacaaatacaggagaagttgttggaagaatgtccggtgacactgtgctaatccaagatgccatgggagaaaaggtgggaaaagctatacaacttctagcaacatttgtaggaggctttgtgatagctttcgtaagaggatggcttctaacgttggtcatgttatcttcaattcctctacttgtaatggctggtgcacttctggctatcgtcattgctaaaacagcttctcgtggacaaactgcttacgccaaagctgccactgtagttgagcaaacaattggttctataagaacggttgcatcatttacaggagagaaacaagcgataagcaattacaataaacatcttgtcactgcttataaagcaggagtcattgaaggtggttcaactggattgggtcttggaacgctctttcttgtagtcttttgtagctacgctttagcagtatggtatggaggaaagttgatattggataaaggctacacaggaggacaagttctcaatatcatcatcgctgttttaactggatccatgtcgttaggtcaaacatcgccttgcttaagcgcatttgcagctggacaagccgcggcttacaagatgtttgagacaattgagagaagacctaacatagattcttatagtacaaatggtaaagttttggatgacattaagggagatattgagctcaaagatgtttactttacttacccagcgagacccgatgagcaaatatttcgcggattctctctgtttatctcgagtggtacaacggtggctttagttggacaaagtgggagcgggaaatctactgttgtgagtctgattgagaggttttacgatccacaagctggtgacgttctcatagatggtattaacttaaaagagtttcagctaaaatggattagaagcaagattggacttgtgagtcaagaaccagttttgttcactgcaagcatcaaggataacattgcgtacggcaaagaagacgcaacaaccgaagagattaaagcagctgcagagctagcaaacgcatctaaatttgtggataagctaccacagggtttggatacaatggttggagaacatggtactcagctttccggtggacaaaaacagagaatcgcggtggctagagcaatcttaaaagatccaagaatcttacttttagatgaagctacaagcgcgcttgatgcagaatctgagagagtggttcaagaagcgcttgatagaattatggttaaccggactactgttgtggtcgctcatcggttaagcactgtgcgaaatgcggatatgatcgctgtgatccaccaaggcaagatcgtcgagaaaggttctcacacggaactactaaaggacccggaaggagcttattctcagctgattcgtctacaagaagagaagaaatctgatgagaatgcagcggaggagcaaaagatgtcatcaattgaatcattcaaacaatctagtctgagaaaatcgtctctaggccggtctctaagcaaaggaggatcatccagaggaaacagcagccgccattctttcaatatgtttggttttccagcaggaattgacggaaacgtcgttcaagatcaagaagaggatgatactacacaaccaaaaaccgaaccaaaaaaagtctccattttcagaattgctgctctaaacaaaccagagattccggtgctaatacttggatcaatatccgcagcagcaaatggcgttatccttccaatctttggcatactaatctccagcgtaatcaaagcgtttttccaaccacctaaaaagctaaaagaagatacaagcttctgggcaatcatattcatggttcttggtttcgcatccatcattgcatacccagcacaaaccttcttctttgccatagctggatgtaaactagtgcagaggatcagaagtatgtgttttgagaaagtggttcacatggaagttggatggttcgacgagccagagaattctagtggaaccataggagcaaggctatcagcagatgctgccacaatccgtggtctagttggagactctttggctcagacagttcagaatctttcatctatattggctggtttgatcattgcatttttggcttgttggcaattagctttcgtggtcctcgcgatgctcccgcttatcgcactcaatggatttctttatatgaagttcatgaaaggtttcagcgctgatgcaaagaaaatgtacggggaagcaagccaagtagcgaatgacgcggtagggagcataagaaccgttgcttcattctgtgcagaagacaaggtgatgaacatgtactcaaagaaatgtgaaggtccaatgaagaatgggattcgtcaaggcatagtcagtggtattggtttcggcttctctttcttcgtcctcttctcttcttacgctgccagtttctacgttggagcacgccttgtcgatgatggcaaaacaaccttcgactctgttttcagggttttctttgctttgacaatggcggcaatggcgatatctcaatcgagttcgttatctccagattccagcaaagccgatgtagctgctgcctcgattttcgcaataatggacagggaatcaaagattgacccaagtgtggaatcaggaagagtgttggataatgttaaaggagacattgagcttcgtcatgttagtttcaaatacccagcaagaccagatgttcaaatcttccaagacctctgtctaagcattcgagctggaaagacagttgctttggttggagaaagcggtagcgggaaatcaacggtgattgcattgttgcagaggttttacgatccagattcaggtgagatcactcttgacggtgtagagatcaagagcctaagactaaaatggctaagacaacaaacgggacttgtgagccaagaaccaatcttgttcaacgagacaattagagccaacattgcttatggcaaaggaggagacgcgagtgaatccgaaatcgtatcttcagctgaattatcaaacgcccatggattcatcagtggtctgcaacagggttatgatacgatggtgggagaaagaggaattcaattatcaggcggacaaaagcaacgagtagctatagccagagccatcgtcaaagatccaaaggtgttgctgctcgacgaagccacgagtgctcttgacgctgagtctgagcgtgtggttcaggacgcgctagaccgtgttatggtaaaccggactacgattgtggtagctcaccggttatcgacgattaagaatgctgacgtaattgccgtcgttaagaacggcgtcatcgttgagaaaggaaagcacgacacgttgatcaatatcaaagacggagtttatgcttcgttagttcagcttcatctaaccgcggcttcttg

SEQ ID NO: 59 - DNA, 2340 bp, Arabidopsis thaliana
atggatgatcggcacgaaggagaccatcatgatatagaggttgaaggaggagctttacatggtttcgagaggaagatatctgggattctagacgatggatctgtcggatttcgacagcctcttctcgctaggaatcgaaagaacacaacttctcagatcgctattgtcggagctaatacttgtcccatcgaaagccttgattacgagatcttcgaaaatgattttttcaagcaagactggaggtctaggaagaagattgagatacttcagtatacgtttctcaaatgggcgcttgcttttcttattggtttagctactggacttgttggctttttgaataaccttggtgttgagaatatagctggatttaaactcttgctcatcggtaatctcatgctcaaggaaaaatatttccaggcattttttgcatttgctggttgtaacttaattttggcaactgctgctgcttcactctgtgcttttattgctcctgcggcggcaggatctggcatacctgaggttaaagcatatctcaatggtatagatgcttattcaatattagctccaagcaccctctttgttaagatctttggctctatatttggagttgctgccggatttgtagttggaaaagaagggcctatggttcatactggtgcttgcattgctaatttacttggacaaggtggttccaaaaagtaccggttgacttggaagtggctcagattcttcaaaaacgatagagacagaagagacctgatcacttgcggggctgctgctggtgtagcagctgccttccgtgctccagttggaggagtgcttttcgcccttgaagaagctgcttcatggtggaggaatgcccttctctggaggacattcttcactaccgcagttgtagcagtggtcttacgaagtttgattgagttctgtcgctctgggagatgtggactgtttgggaaaggaggtctcatcatgtttgatgtaaactcgggaccagtgctatatagcactccagatttgctagcaatagtattccttggagttattggtggtgtgcttggaagcctttacaactaccttgtggacaaagtcctccgcacatatagcattataaacgagaaaggtccgagatttaaaattatgcttgtaatggcagtttccattttgagctcgtgttgcgcatttggtctcccatggctttcacagtgtactccatgtcctattggcatagaggagggaaagtgccctagtgtaggtcgatccagcatctataagagtttccagtgtcctccaaaccattacaatgacctttcctccctacttctcaacaccaatgatgatgcaatccgtaatcttttcacatccagatctgaaaatgaattccatatctctacccttgccatcttctttgtcgcagtgtactgccttggcatcataacatacggcatagccataccctctgggcttttcattcctgtcattcttgctggagcctcttatggacgactagtgggtagactgctgggtccagtatctcagcttgatgtaggtctgttttctctgctcggagctgcttccttccttggaggcacaatgagaatgacggtctctctatgtgttatactgctcgaacttacaaataatctcctaatgctgccactggtgatgcttgtactccttatatcaaaaacggttgcagattgtttcaacaggggggtctatgaccagattgtaacaatgaaaggactgccttacatggaagaccatgcagagccgtacatgcgcaatttggttgcaaaggacgtagtttctggagctttgatatccttttcgagagttgaaaaggttggggtaatatggcaggctttaaaaatgacaagacataatggtttccctgtaattgatgagccacctttcacagaagcttctgagctatgtgggattgccttgagatctcatctccttgtgcttctccaagggaagaaattctcgaagcagagaacaacttttggttcacaaattctgagaagttgcaaagcccgtgactttggtaaagcagggttaggtaaggggctcaagattgaagatttggatctaagtgaggaggagatggagatgtatgttgatctccatcccatcactaacacatctccttacactgtgcttgagactctgtctctagctaaggcggctattcttttccggcaacttggtcttcgccacttgtgtgtggtgcctaaaacaccagggagaccgcctattgttggaatactgacaaggcatgatttcatgccggaacatgtcctgggactctaccctcacattgatcccctcaagtga

SEQ ID NO: 60 - DNA, 1926 bp, Arabidopsis thaliana
atggctgttcccacgggaagcgccaatctctttctccggcctctcatcctcgccgttctctcctttcttcttctctcttcattcgtctcctctgttgagtggctcgatatcgattcctcagatctcaaagctcttcaggtcatcgaaacagagctcggagtcaacagtcaacgttcttcggccagtgatgtcaacccttgcggtcgccgaggagttttctgcgagagacggcactctgccaccaccggagaatacgttctccgtgtcacgaggctcgtctaccgatccaggagcttgacggggactatctctccggtcatcggaatgttgtcggagctcaaggaacttactttgtctaataaccagttggtcaacgctgttccggtggatatcttaagctgtaagcaacttgaagttcttgatcttcggaaaaatagattttccggtcagattccgggaaacttttctagtttgagccgtcttcgaatccttgatctctcttcgaacaagttatccgggaacttgaatttcttgaagaatctacgcaatctggagaatctctctgttgcaaacaatctcttctcaggcaaaatcccggaacaaattgtgtcgttccacaatctccggttctttgatttctccggaaaccggtatttggaaggtccggctccggttatgagcagtatcaagcttcagacatctccacatcaaacaagacacattcttgctgaaactccaacttcaagtcccacgaacaaacccaacaacagcactacatcaaaagctccaaagggagctccaaaaccagggaagttgaagaagaagaagaagaagagcaagaagaagaaagtagcggcatggatcttagggtttgtcgttggagccataggaggaacaatctctgggtttgtcttctcggtgttgttcaaattgattattcaagcaataagaggatcagaaaaaccaccaggtccttccatattcagcccattgatcaagaaagctgaagatttagctttcttggagaatgaagaagcgttagcttctctggagatcataggaagaggaggttgtggagaagttttcaaagctgaactaccaggaagcaatgggaagatcatagctgtgaagaaagtgatccaaccgcctaaagacgccgatgaactaacagatgaagattccaagtttctgaacaagaaaatgaggcaaattagatccgagatcaacacagtcggccatatccggcaccggaatcttctcccattgttagcacacgtgtcaagacccgagtgccactacctcgtttacgagtacatggaaaaggggagtttgcaagatatattgactgacgtacaagctggaaatcaagaactaatgtggccagcgaggcacaagattgctttaggtatagctgcagggcttgagtaccttcacatggatcataacccacgaatcattcacagagacttaaagccagccaatgttcttcttgatgatgacatggaagccagaatttcagatttcggactggcaaaggcaatgccagatgcagtcacacatattacaacctcgcatgttgcaggtactgtgggatacatagcaccagagttttatcaaacccacaagttcacagataaatgtgatatctatagttttggagtgattcttgggattctggtgattgggaagcttccttcagatgagttttttcagcatactgacgagatgagtctgataaagtggatgaggaacataataacatcggaaaatcctagccttgcgattgatccgaagttgatggatcaaggattcgatgaacagatgcttctggttctgaagatcgcctgttactgtactttggatgatccaaaacagaggccgaacagtaaagatgtcaggaccatgttgtcccagatcaagcactag

SEQ ID NO: 61 - DNA, 1323 bp, Arabidopsis thaliana
atgagtttcttcaaatgggtttcttttgttttgatccttcacttgcttaatccgactctgatttcatgttcctctaatgggttatctcaaataccttcaaagtttcttactttggctaaaaggaatgattttttcgattggatggttggaatcagaaggagaatccatgagaatccagagttaggttatgaggaagtagagacatctaagcttgttagagcagagttggagaagatgggtgtttcttataagtacccagttgctgttactggtgttgttgggtatgttggaactggtcatgctccttttgttgctttaagggctgatatggatgcacttgctatgcaggaaatggtggaatgggaacacaagagtaaggttccagggaagatgcacgcttgtggacatgacgctcacactacgatgcttctcggtgctgcaaaattgctcaaagaacatgaagaagagctacagggcacagtggttctagttttccaaccagctgaggaaggaggaggaggtgcaaagaagattgtggaggctggagtgttggagaatgtgagtgcaatctttggattacatgtcacaaatcaattggcattaggtcaagtgagctcgagagagggtcctatgttggctggtagtggctttttcaaagctaagataagcgggaaaggaggccacgcagctcttccgcagcataccatagatccgatactggcagcttcaaatgttattgttagcttacaacacctcgtttcacgagaggcagatcctttagactctcaggtggttacagttgctaaatttgaaggcggtggtgctttcaatgtgattcctgactctgttactatcggtggtacattccgagctttttcaactaaaagctttatgcaactcaagaaaagaattgagcaggttatcacaaggcaagcgagcgtgaatatgtgtaatgcaacagtggatttcattgaagaggagaaaccttttttcccaccaactgtaaatgacaaagccttacaccagtttttcaagaacgtttcaggcgatatgttagggattgagaattacgtcgagatgcaaccattaatgggatcagaagatttctctttctaccaacaagcaatcccgggacattttagcttcgttggaatgcaaaacaaagctcgttcaccaatggcgagccctcactcgccgtactttgaagttaacgaagaattactaccttatggtgcttcccttcatgcttccatggccacaagatatcttcttgaactaaaagcttcaactctaaataagagtaacaaaaaagatgaactttga

SEQ ID NO: 62 - DNA, 1347 bp, Arabidopsis thaliana
atgggaagtatcgtggagccatgggcagcaatcgccgagaacggaaacgcaaacgtgaccgcgaaaggctcgagcagggagctgcgacatgggagaacagcacacaacatgtcttcatcgtcgctaaggaagaaatcagacctgagattggttcagaaagttccatgcaaaactctcaagaacattctctctaatcttcaagaagtcattcttggtactaagcttactctcttatttctcgccatccctctcgccattcttgccaattcttacaactacggactgacacctctagctgagcgagttagctttttgacagagcaactagctttctacactggtccaacagtgggcggtttgttgaacgcgacttgtggaaacgcgacagagctgataatcgcgatactagcgttggccaataacaaagtggcagtggtgaaatactctctattgggttcaattctctcaaaccttctcttggttcttggcacttccctcttctttggtggtatcgccaatatccgccgcgagcagcggttcgaccggaaacaagccgatgtgaacttcttcttgctgcttatgggcctgttgtgtcatttgctgccattattgttaaaatatgcagcaaccggcgaagtatcgacctctatgattaacaaaatgtcgctcactctgtcgcggacaagcagcatagttatgcttattgcttacattgcttatctcatcttccagctctggactcaccgccaattgtttgaggcacaacaggatgatgatgatgcatatgatgatgaggttagtgttgaagaaactccagtgataggattctggagcggatttgcttggctcgttgggatgacaatagtcatcgcattgctatcagagtatgttgtggacacgatcgaggatgcatcggactcatggggactatcagtgagtttcataagcatcatattgcttcccattgttgggaatgcggctgagcatgctggagccatcattttcgcattcaagaacaagctcgacatatctctaggggttgcgttgggctctgcaactcagatttctttgttcgtggtcccattgagtgttatcgttgcgtggatcctgggaataaaaatggatctcaactttaacatccttgaaactagctctctagctttggccattatcatcacagccttcactttacaggatggaacttctcattacatgaagggactggttctattgttatgctatgtcatcatcgcggcgtgtttcttcgtcgaccaaattccccaaccaaatgatttggacgtgggacttcaacccatgaacaatttgggagaagttttctcagcttaa

SEQ ID NO: 63 - DNA, 780 bp, Arabidopsis thaliana
atggaagaagaaatgaagaagaaagtatcaagaggagaattaggaggtgaagctcaaaattgtccaagatgtgaatctccaaacacaaagttttgttactacaacaactatagtctctcacaacctcgttacttctgcaaatcttgtcggagatattggactaaaggcggtactcttcgtaacgttcccgtcggtggtggttgccgtcgaaacaaacgatcctcttcctcagctttctccaagaacaacaacaataagtctattaatttccatactgatccacttcagaaccctttaattacgggaatgccaccatcatcttttggttatgatcactccattgatctcaacctcgctttcgctactctccaaaagcatcatttatcctctcaagctactacgccttcttttgggtttggaggtgatctttctatttatggaaactcaacgaatgatgtagggatcttcggagggcaaaacggtacttataacaatagtttgtgttatgggtttatgtccggaaatggtaataataatcaaaatgaaatcaagatggcttctacattggggatgtctttggaaggaaacgagagaaagcaagagaatgtgaacaataacaataataactcagagaatcctagcaaggtgttctgggggtttccatggcagatgaccggagattccgccggagttgtaccggagattgatcccggaagggaaagctggaatgggatggtttcatcttggaataatggtttactcaacactcctttggtctag

SEQ ID NO: 64 - DNA, 770 bp, Arabidopsis thaliana
atgaagcattatgtgctagttcacggaggctgccacggtgcgtggtgttggtacaaggtgaagccgatgcttgaacattccggccaccgtgtcacggtttttgatcttacggcgcatggtgtgaacatgagcagagtagaagatattcagactttggaggatttcgctaagccgttgcttgaggttcttgagtcttttggctcggatgataaagtagtcctcgtcgcgcatagcctcggtggaataccggctgctcttgcagccgacatgtttcctagtaaaatctctgttgctgtcttcgttacttcttttatgcccgacacaacgaatccaccttcttacgtgttcgaaaagtttctcggaagcattacagaagaagaacgtatggacttcgagttagggagctatggaacagatgaccatccactaaagactgcttttcttggacctaactacttgaagaatatgtatctactttctcctatcgaagattatgaattggccaaaatgttgatgagagtcacaccggctattactagtaatctgacggggactaaaagcttaacggcacaaggatatggatcgattagtcgtgtgtatatcgtatgcggagaagataagggtatacgtgtagatttccaacgatggatgattgagaactctccggttaaagaagtgatggagatcaaagatgcagatcatatgcctatgttttccaagcctcatgaactctgtgatcgtcttctaaagattgctgataaatatcccta

SEQ ID NO: 65 - DNA, 738 bp, Arabidopsis thaliana
atgacgtcatcccatcagagcaacaccaccggctttaaaccgcggcggatcaagacgacggcgaagccaccacgtcagatcaataacaaagaaccatctccggcgacgcagccggtgctcaagtgtccgagatgtgattcagtcaacaccaaattctgctactacaacaactacagcttgtctcagccacgtcactactgcaagaactgtcgtcgttactggacacgtggcggcgccctccgtaacgttcccatcggtggctccactcgaaacaagaacaagccttgcagcctccaagtcatctcttctcctcctttgttctcgaacgggacgtcatcggcgtctcgtgagcttgtaagaaaccatccatcgacggcaatgatgatgatgagttctggtggattctccggctatatgtttccgttggatcctaacttcaaccttgcctcgtcttctatcgagtctttgagttcttttaaccaagatttgcaccagaagcttcagcaacaaagactcgtcacttccatgtttctccaagattctcttccggttaacgagaaaacggttatgtttcagaacgtagagttgattcctccttcgacggtgacgacggattgggttttcgataggttcgccactggaggaggtgcaacaagtggcaatcatgaagataatgatgatggggagggtaatttgggaaattggttccataatgctaataataatgctctgctctaa

SEQ ID NO: 66 - DNA, 1674 bp, Arabidopsis thaliana
atgtctaattcaaaccaaccacttctttccaaaccaaagtctcttaagcacaagaatctatgccttgtcctctccttcgtagccattcttggctctgtggctttcttcacagcccaattaatctccgttaacaccaacaataatgatgattccttattaactacgagccagatttgccatggagctcacgaccaagactcatgccaagctctcttgtccgaattcacgacgttgtcgctctcaaagctcaaccgccttgacctattgcacgtgtttttgaagaactcggtgtggcggcttgagagcacgatgaccatggtgagcgaggctaggatccgctcgaacggtgttagagacaaggcaggttttgctgactgcgaggagatgatggacgtatcaaaggatcggatgatgagttcgatggaggaacttcgcggaggaaactataatcttgagtcatactcaaacgttcatacttggctgagcagtgtgcttacaaactacatgacatgtttagaaagtattagtgatgtctccgtcaactctaagcaaatagtcaagccacaactcgaggacttggtttctagggcaagagtggctctagccatctttgtctccgtcttgcctgccagagacgatctcaaaatgatcatttccaatcgcttcccgtcgtggctaactgctcttgacagaaagcttttagaatcttctcccaagacacttaaggtgaccgcgaacgttgtggtggcaaaagacggcaccggaaagttcaaaacagtgaatgaggcagtggcggcagcaccggagaacagcaatacaagatacgttatatacgtaaagaaaggggtttacaaagaaactattgacataggaaagaaaaagaagaacttaatgcttgttggtgatggcaaagacgcaacgatcataaccggtagtttgaatgtcattgatggatccaccaccttcagatcagccactgttgctgccaatggagacgggtttatggcacaagacatatggttccaaaacactgcagggccggcaaagcaccaggctgtggctctacgagtgagtgctgatcaaactgttataaatcgttgtcgcatagatgcgtatcaagacacgctctacactcacacgttgagacaattctaccgcgacagctacatcaccggtaccgtagatttcatcttcggaaactctgctgtggtattccagaactgcgacatcgtggcacgaaatcctggagctgggcaaaagaacatgttaacggctcaaggacgggaggatcagaaccagaacaccgccatttcgatccaaaaatgtaagataacggctagttcggatcttgctcctgtaaaaggatctgtgaaaacgttccttggtcgaccgtggaagttgtactcaagaacagtgatcatgcagtctttcattgacaaccacattgacccggctggttggttcccatgggatggtgagtttgcgctctccacattgtattatggagagtatgcaaataccggtcctggagcggatacgagtaagagagtgaattggaagggatttaaagttattaaagactcaaaagaggccgaacaattcactgtggcgaagcttattcaaggaggattatggttgaaacccactggagttactttccaagagtggctttga

SEQ ID NO: 67 - DNA, 963 bp, Arabidopsis thaliana
atggttttctcatccgtctcaagctttttagatccaccaattaattggccacagtctgcgaatccaaataaccatcctcatcatcatcagctacaagaaaatggaagtttagttagtggccaccaccaagtactctctcaccacttcccacaaaaccctaaccctaaccaccaccatgttgagacagcagccgccaccaccgttgatccgagcagtctcaatggccaggcggctgagagagcgaggctagctaagaactctcagccgccagagggagccctaaagtgtcctcgatgtgactcagccaataccaagttctgttacttcaacaactacaacctcacgcagccacgccacttctgcaaagcttgccgtcgctactggacacgtggcggtgccttgaggaacgtacctgtcggtggtggctgccggaggaataagaagggtaaatccggaaattcaaagtcttcctcttcctctcagaacaagcagtcaacgtctatggtcaacgctacaagccctactaatactagtaatgtccagctccaaacaaatagccaattcccatttttgcccactctacaaaacctcactcaacttggtggtattggtttaaacttagccgccattaatggaaataatggtggaaatggtccggtcatgggtaacaacaacgagaataacctaatgacttctcttggatcatccagccactttgctttgttcgatcgaaccatgggattatataatttccctaacgaggtaaatatgggattatcttctattggtgctactagggtttctcaaactgctcaggtgaaaatggaggacaaccatttgggtaatataagccgcccggtttcggggttgacatctccagggaatcaatccaatcaatattggaccggtcaaggtctccccggttcttcatctaacgatcatcatcaccagcatcttatgtga

SEQ ID NO: 68 - DNA, 3620 bp, Arabidopsis thaliana
atgggagatgggactgagtttgtggttaggtcagatagggaagataagaagcttgctgaggatagaattagtgatgagcaagtagtgaagaatgagttggtgagatctgatgaagtaagggatgataacgaggacgaggtttttgaggaagcgattggttcagagaatgatgagcaggaggaggaggaggatccaaaacgtgaattgtttgaatctgatgatttgcctttagtggaaactcttaaaagttctatggttgagcatgaagtggaggattttgaagaggcagtgggtgatttggatgaaacgagtagcaatgaagggggtgttaaagattttacggctgttggagagagccatggtgcgggagaggctgaatttgatgttttggctactaaaatgaatggtgataagggggaaggaggtggaggtggttcttatgataaagttgaatcgagcttggatgttgttgataccactgagaatgctacatcaactaatactaatggttccaatttagcagctgagcatgtgggtattgaaaacggaaagactcattcttttttgggaaatggaatcgcctctcctaaaaataaagaagtggtggctgaagttatccctaaagatgatgggattgaggaaccatggaatgatggcattgaagtcgataattgggaggaaagagttgatggcatacagacagaacaagaggttgaggaaggtgaaggaacaactgaaaatcaatttgagaaacggacagaagaagaggttgtagaaggtgaaggaacaagtaagaatctatttgagaaacagacagaacaagatgttgtggaaggtgaaggaacaagtaaggatctatttgagaatggttcagtatgtatggacagtgagtccgaggcagaaagaaatggtgagactggtgccgcctacacaagtaatatcgttactaatgcttcaggtgacaatgaagtatcaagtgctgtgacttcatctccattggaggaatctagttccggggaaaagggagagactgaaggggacagtacttgtttaaaaccagagcaacacttggcttcttcgccgcactcatatcctgagtcaactgaagttcacagcaatagtggctcccctggggtaactagtagagaacacaaaccagttcaaagtgctaatggaggacatgatgttcagagtcctcaaccaaataaggagcttgagaagcagcaaagcagcagagtacatgtagatccagagattacagaaaattcacatgtggaaacagaacctgaggtagtaagttctgtttcaccaacagagtctagaagtaatcctgcggcattaccacctgctcgtccagcaggtcttggtcgtgcttctcctcttttggaacctgcatcacgtgctcctcaacagtctcgcgtcaatgggaatgggtctcacaatcagtttcagcaagctgaagactctaccactacagaggctgatgagcatgatgagacccgcgagaagctccagttgatcagggtaaaatttttgaggcttgcacatagactagggcaaaccccgcataatgttgttgttgctcaggttttatacaggcttggattggctgagcagttgaggggcagaaatggaagccgtgttggtgcttttagttttgatcgcgctagtgccatggcagaacagcttgaggctgctggacaggatccacttgatttttcttgtacgattatggttctcggaaaaagtggggttggtaaaagtgcaacgatcaattctatatttgatgaagtgaaattttgtactgatgcattccagatggggacaaagagggttcaagatgttgagggtttggttcagggaattaaggtacgggtgattgacactcccggtctcttaccttcctggtctgatcaagccaagaatgagaagatcctgaattctgttaaggctttcatcaagaagaatccacctgacattgtactatatcttgataggttggatatgcaaagcagagattctggtgacatgcctctcctgcgcaccataagtgatgtttttggtccttcgatatggtttaatgccattgtgggtttgactcatgccgcttctgttccaccagatggcccaaatggcactgcttctagctatgatatgtttgttacacaacgttctcatgtcatccagcaggccattcgccaagcagctggagatatgaggctcatgaaccctgtttctttagttgagaatcactcagcttgcaggactaatcgggcaggccagagagtattaccgaatggccaagtgtggaagccacatttgttgctactctcatttgcatctaagattctagcagaagcaaatgctcttttgaagttgcaagataatattccagggagaccatttgcagctcggtccaaggctccgccattaccatttctcctttcatcgcttctgcaatcaagaccacaacctaagcttcctgaacagcagtatggtgatgaagaagatgaagatgatttagaagaatcatcagattcagacgaagaatcagagtatgatcagcttcctccgtttaagagtttgactaaagctcagatggctacgcttagtaaatctcagaagaagcagtatctcgatgaaatggagtaccgagagaaacttttaatgaagaagcaaatgaaagaggaaagaaagagacgtaagatgtttaagaaatttgctgcagagattaaagatttgcctgatgggtatagtgaaaatgtggaagaggagagtggtggacctgcatcagttccagttcctatgccagatttatctctacctgcgtcttttgactctgataaccctactcaccgctaccggtaccttgattcctccaatcagtggcttgttaggccagtcctggaaactcatgggtgggatcatgatattggttatgaaggtgtgaatgcagaacggctctttgttgtaaaagaaaaaataccaatatctgtctcaggtcaagtgacaaaagacaagaaggatgcaaatgtgcagctagaaatggccagctcggttaaacatggagagggtaaatcaacttccctaggtttcgacatgcaaactgttggaaaggaattggcttatactcttcgaagcgaaacgagatttaacaatttcaggagaaacaaggctgcagctggtctttctgtaacacacttgggtgattcggtttctgcggggttgaaagtcgaagataagtttattgctagtaaatggttcagaatcgtaatgtctggtggagctatgactagtcggggagattttgcttatggtggtactttggaagctcagttgagagataaagattatccgcttggtcggtttttgactactcttggactttctgtaatggattggcacggtgatcttgctattggagggaacatacagtctcaggttcccattggacgttcctctaatttaattgctcgtgctaatctgaacaatagaggagcagggcaagtaagtgttcgtgttaacagctccgagcagctccaacttgctatggttgcgattgttcctctcttcaagaagctacttagttattattacccgcaaacgcaatatggacaatg

SEQ ID NO: 69 - skipped

SEQ ID NO: 70 - DNA, 1400 bp, Arabidopsis thaliana
atgcaggcaacggctttatcatctgggttcaatcctctaacgaaacgtaaagatcacagatttcccaggtcatgctctcagagaaattctctgtctttgattcaatgcgatataaaagagagatctttcggagagtctatgacgatcacgaatcgtggattgagttttaagacgaatgtgtttgagcaagctcgttctgtgactggagactgttcttatgatgaaacttcagctaaagcacgttctcatgttgttgcagaagataagattggtgtcttgcttttgaatttaggtggtcctgaaactcttaacgatgttcaacctttcttgtataatctctttgctgatccggatattataaggcttcctagaccatttcagtttcttcaagggactatagctaagtttatatctgttgttcgtgctccgaaatctaaagaagggtatgctgctattggtggtggctctcctttgcgtaaaataactgatgagcaagcggatgctattaagatgtctttgcaagcgaagaacattgctgctaatgtctatgttggtatgcggtattggtatccgttcactgaggaggctgttcagcagataaagaaggacaaaattactagacttgttgtactgccattgtatcctcagtattctatctctacaacgggttcaagcatacgcgttctccaagatttattcaggaaagatccgtacctagctggagtgccggtagctattataaagtcctggtaccaaaggcgaggctatgtcaattctatggctgacctcattgagaaggagcttcaaactttctctgatcctaaggaggttatgatattcttcagtgcccatggtgttccggtcagctacgtagagaatgctggagatccgtaccagaagcagatggaagagtgtattgacttgataatggaagagctaaaagccagaggggttcttaacgaccataaattggcataccagagtcgtgttggccctgttcaatggctgaagccatacaccgatgaggttcttgtcgaccttggtaagagtggtgttaagagtctactagccgttccagtcagtttcgtgagtgagcacattgagacacttgaggagatagacatggagtatagggaattagctcttgagtcaggggtagagaactggggacgggtacccgcgctaggtctcacaccatccttcatcaccgacttagctgatgcagtgatagaatcacttccttcagcagaagcaatgtcaaacccaaatgcagtggttgactcagaagatagcgagtcgtcagatgctttcagttacattgtcaagatgttcttcggttcgattctggctttcgtcctacttctctccccaaagatgttccatgcgttccggaacctata

SEQ ID NO: 71 - DNA, 1734 bp, Arabidopsis thaliana
atggctaagggatcgtggttcttcattatcctttttatcatctcaatgttagaaaatatgatcaattctctagaattagatcggcatagttttcctgatgatttcatctttgggacagctgcctcggcgtttcagtacgaaggtgcaacaagtgaaggtggcaagtctccaactatatgggatcacttcagcctcacgtatccagaaaggaccaaaatgcataatgcagatgtagcaattgatttttatcatcgttacaaggatgacataaaattgatgaaggagctaaacatggacgctttccgattttcaatctcgtggtcaagattaatacccagtggaaagctaaaggatggagtaaacaaagaaggtgtacaattctacaaggatctcatagacgaacttcttgctaatgacatacaaccttcgatgacgctctatcattgggaccacccacaatctttggaggacgaatatggtggctttctaagccctaaaatcgtagaagattttcgagattttgcaagaatttgttttgaagagtttggagataaagttaagatgtggacaacaatcaacgaaccttatataatgactgttgcgggttatgatcaaggtaacaaggcggctggacgatgctcaaaatgggtaaacgaaaagtgtcaggctggagattcgagtaccgagccttacattgtttcacatcacactcttcttgcccatgccgctgcagtggaagaatttcgaaaatgtgaaaaaacttcgcatgatggccaaattgggatagtactatcaccaagatggttcgagccttatcattccgattcaactgacgataaagaagcagctgaacgagctcttgcctttgaaattggatggcatcttgatccagtcattcacggagattatccagagattgtaaaaaagtacgcgggaaataaattaccttcatttactgttgaacaatcaaagatgttacaaaattcatcagatttcgttggaattaattactacacggctcgcttcgctgctcatcttcctcacatagaccctgaaaaacctcgtttcaaaactgaccaccatgtggaatggaaactgactaatcacagtggtcacatcatcggacctggggaagaaaggggcttcttattttcacacccggaaggcttacgaaaagttcttaactatattaaagagagatacaataacatgccagtctacatcaaagaaaatggaattaatgacaacgacgacggtacaaaaccaagagaagaaattgtgaaggacacatttaggattgaataccataagacacatttcgaagaacttcacaaagctatagtggaagatgggtgtgacgtaagaggatattacgcatggtcattgatggacaattttgaatgggagcatggatacactgcaagatttggtctatactatgttgattttgtcaatggtctcaaacgttatccaaaagattcggtcaaatggtttaagcggttccttaagaaatcggtcgtcggagagagtaacaaagaggaggtagaggagatgtcacgcgcggaagggaataagacttttaagggtttcgaagaatcggcgggtttctttgcatctttcatggcaatgaaccaatcgaggagagatgaggagaataatcgttgctcctttgattttcctcatactcattttggtgttttgcaaggcatagagaacccatcttcattttattga

SEQ ID NO: 72 - DNA, 1722 bp, Arabidopsis thaliana
atggcgttatcgaaaaacagtaacagtaacagctttaacaagaagaaagtttcgtatatctcagtcccttctcagatcataaactctttatcatcttcctcattacaatctcttcttgtttctcccaagaaatcatcaagaagcaccaacagattcagcttctcttataggaaccctagaatctggttctttactctcttcctcgtctcactctttggaatgttgaaactcggtttcaacgttgacccaatctctctccctttctcacgttacccttgttcaacgacccaacaaccactaagcttcgacggagaacaaaacgctgcatcccatcttggtttggctcaagagccgattttgtctactgggtcatcgaattcgaatgcgattatacaattaaacggtggaaagaacgagactttgttaacggaaggtgatttctggaagcaacctgatgggttagggtttaagccctgtttgggatttacaagtcaatatagaaaagatagcaattcgattttgaagaacagatggaagtatttgcttgttgttgtctctggtgggatgaatcagcaaaggaatcagattgttgatgctgttgtgatcgctaggatccttggagcttctttagttgttcctgttttgcaggttaatgtcatttggggagacgaaagtgaatttgcggatatattcgatttggagcatttcaaggatgttttagcagatgatgttcatatagtttcgtctttaccttctacacatgttatgacgagacctgttgaagagaagaggactccacttcatgcttctcctcaatggattcgtgctcattatcttaagcgaattaacagagaaagagttttacttctccgtggactcgattcaagactctccaaagacctcccttcagatcttcagaaactccgatgcaaggttgctttccaagcgcttagattttctccgaggattcttgaactcggtaataaactagcttcaagaatgcgtaaccaaggacagtatctctcacttcatctaagaatggagaaagatgtttgggttagaactggttgtctccctggtttaactcccgagtacgatgaaatagtcaacagcgaaagagaacgacaccctgagcttcttaccggtagatcaaacatgacttatcacgagagaaaacttgccggtttatgccctttaactgctctagaagtcacaaggctgcttaaagcattagaagctccaaaggatgcgagaatctattgggcaggaggagagcctctaggaggaaaagaggttttggagccactaactaaagaattccctcagttctacaacaagcacgatcttgctttacctggcgagcttgaaccatttgccaacaaagcttcggttatggctgctatagactacattgtctgcgaaaagagcgatgttttcataccgtctcatggaggaaatatgggacacgcgttacaagggcaaagagcttacgctggtcacaagaaatacatcactcctaataagagacagatgcttccttatttcatgaactcgtcgcttcctgaatcggattttaacagaattgtgaaagatcttcatcgagaatcgctaggacagccggagttgagaatgagcaaagctggtaaagatgttacaaaacatcctgttccagagtgtatgtgctcggatagacaacaacaagaacaacagtccgatgcttaa

SEQ ID NO: 73 - DNA, 882 bp, Arabidopsis thaliana
atggctttgtctcttatctttctagctctcttagtgttgtgccctagtagtggtcacagccaacgttctccttcaccgggatactacccgagttcccgagtaccgacttcaccttttgatcgtgaattccgtactttatggggctctcaacaccaacgtagagagcaagacgttgtcactctttggctcgacaaatccactgggagtgggttcaagtctcttcgtccataccggtcgggctactttggtgcttccattaagctccaaccaggcttcactgctggagtggatacatccctctatctctcaaacaaccaagagcatcctggagaccacgatgaggtcgatatcgagtttctagggacaacgccagggaagccttattcccttcaaacgaatgtcttcgttaggggaagtggcgaccgaaatgtcattggaagagaaatgaaatttaccttgtggtttgaccctactcaagattttcaccattacgcaattttgtggaaccctaaccaaattgtattctttgtagacgatgtaccgatacgtacatataatagaaagaatgaagctatattccccacaagaccgatgtgggtttacggatcgatatgggatgcatcggactgggccacagaaaatggaaggatcaaagccgactatcgataccaaccatttgtggctaagtacaaaaactttaagctagcgggatgcacagcggatagctctagctcatgcagaccgccatcgcctgcacccatgcgcaaccgcgggttgagccggcagcagatggcggcattgacatgggcacagaggaacttcttggtctataactattgccatgatccgaaaagagaccatacccaaacaccagaatgttaa

SEQ ID NO: 74 - DNA, 1482 bp, Arabidopsis thaliana
atggagaaatacaacagtttatcagattttctcaaggagttctacatccctacgtacgtcctctcggcggaaacagaagaggaggaggaggaggagagtcgtcctacacctgcgagccccgtccttgtcttcatcaactccaaaagcggtggtcagttgggtggcgaactcattctcacctaccgatctcttctcaatcacaatcaggtctttgatctcgaccaggagactccagataaagtgctccgcagaatctatcttaacctggagaggctcaaagatgatgatttcgctcgtcagattcgggagaaattaaaaatcattgttgcaggaggtgatggcactgctgggtggctccttggagttgtatgtgaccttaaattgtcacatcctcctccaattgccactgtacctttgggtacaggaaacaaccttccctttgcttttggatggggaaagaagaatccaggaacagataggactgcagtggagtcgtttttggaacaagtgttgaaggcaaaagtgatgaagattgacaagatgaaaactcccaaagaaggtggttcttgtgatcctgttgctcctcttgagttaccacattctctacatgcatttcaccgtgtttctccaactgatgaactaaacaagaaacacaccctttatgtttttcaggaaggctgccacacttttcgaggagggttctggaattactttagcctcggaatggatgctcagatttcttatgcgtttcattctgagaggaagcttcaccctgaaaagtttaagaatcagctggttaatcagagtacgtatgtaaagcttggttgcacgcaaggatggttttgtgcctctcttttccaccctgcttcacggaatatagctcagcttgccaaggttaagattgcaactagaaatggccagtggcaggacctccacataccacatagcatcaggtccattgtatgtctgaatctgcccagcttttcgggaggattaaatccttggggcacaccaaatcccaggaaacaacgtgatagaggcttgactccaccatttgtagatgatggcctcattgaggttgttgggtttagaaatgcttggcatggtcttgttctgctcgctcccaatggacatgggacacgacttgcccaggcaaatcgtattcgcttcgaatttcacaaaggtgcaaccgaccatacattcatgaggatggatggggagccctggaaacagccactgccactggatgatgaaactgtgatggtagagatttcacaccttggccaagtgaacatgcttgcaactcatgactgccggtccagaagtgtgtttgacccttcaacaccccgccatcaggatggtgcagaagattatgatgataatgaagacgactcagtggctgaaggcgaagaatttagaaagtttggtgctgcggataccttcaagattcctgatgaggttgatatttctcaacttagttag

SEQ ID NO: 75 - DNA, 1470 bp, Arabidopsis thaliana
atggcgaatgtagtgggacagctaaaacgaggaatctcgagacaattctcaactggatcgcttcgtcgtacgcttagtcgtcaattcacgcgtcaagcttcacatgatcctcgccggaacaatatgcgatttagttttggtcgacaatcgtctttagatccgattcgtcggagtcctgatggttctaacggtccgcagcttgctgtaccggataatctcgacgctactatgcagcttctatttgtggcttgtagaggtgatgttgaaggtgttcaggatctgcttgatgaaggtattgatgttaatagtatcgatcttgatggtcgtacggctcttcatatcgctgcttgtgaaggtcatgtcgatgttgtcaagcttcttcttactaggaaggctaatattgatgctcgtgatcgttggggaagcacggcagctgctgatgctaagtattatggtaacatggatgttttcaacattttgaaagcccgtggagctaaagttccgaaaaccaaaaggacacccatggttgtggcgaatcctcgtgaagttcctgagtacgagttaaatccgcaggaacttcaaggaatatatcaagtggctaaatggaatgggactaaggtttctgtaaagatacttgataaggatctctacaaggattctgacactataaatgccttcaaacacgaacttactttattcgagaaggtacgtcatcctaatgttgtgcaatttgttggagctgttactcaaaatgtccccatgatgattgtgtccgagtatcatcctaaaggggaccttgggagctatcttcaaaaaaaaggtcgtctttctccagccaaagttctaagatttgccctcgatatagccaggcatgtgacttttttggcaagattgggaatgaattatcttcacgagtgtaaaccagaaccagtaatccactgtgatctaaaacccaaaaatattatgctcgatagtggaggacatctgaaggtggcgggatttggtttgataagttttgcaaagttatcatctgataaatcaaaaatccttaatcacggggcccatatagatccttcaaattactgtatggcacctgaggtttacaaagatgaaatatttgacaggagtgtggattcttactcttttggtgtcgtattatatgaggtagtaccttatggattcatacgttttggtgtcatcttatatccgatgattgaaggagtacaacctttccatcctaaacccccagaagaggcagtgaagctaatgtgtttagaaggaagaagaccttcgtttaaagccaagtccaaaagttgtccccaagagatgagagaattgattgaggaatgctgggatacggaaacttttgttagaccaacattttctgagatcatagttcgattggacaagatctttgtacactgctcaaaacagggatggtggaaagatacattcaagttcccttggtaa

SEQ ID NO: 76 - DNA, 1512 bp, Arabidopsis thaliana
atgttttgtcattcattgttagctcaaagaattctccttttgacctttttttttgttatatgttcagacgaatccgaaacaccggggcgggatagactaataggagggcttttaaccgcagatttcgatgaaggttcttgcttgagtaggtatcataaaactttcttgtatcgcaagccttcaccatacaagccgtctgaatatcttgtctcgaagcttagaagctatgagatgcttcacaaacgttgcggtccagggacaaaagcttacaaggaagcaacaaagcatcttagtcatgatgagaattataatgcaagcaaatcagatggtgaatgccgatacgttgtgtggctcgctgattacgggcttggaaaccgactactcactcttgcttctgtgttcctctacgctctcttgactgatagaatcattcttgttgacaaccgcaaggatattggtgatctcttatgcgagccatttccaggtacttcatggttgcttcctctcgactttccattgatgaaatatgctgatggataccacaagggatactctcgttgttacggaacaatgttggaaaatcattccatcaactcgacttcattcccgccacatctatatatgcataaccttcatgattcaagggatagtgataagatgttcttctgccaaaaggatcaaagtttgattgacaaagtcccttggttgatatttagagccaatgtttactttgttccatctttatggtttaatccaactttccaaaccgaactaacgaagctgtttccgcagaaagaaaccgtgtttcaccacttgggtcggtatctttttcaccctaaaaatcaagtttgggatatcgtcactaagtactaccatgatcacttatccaaagcagatgagagactcgggattcaaattcgggtttttcgcgatcaaggtggatactaccaacacgtcatggaccaggtcatatcctgcacacaaagagagaaacttttgcctgaattggctacacaagaagaatcaaaagtcaacatatcgaacattccaaaaagtaaagctgttcttgtcacttctttgtctcctgagtactctaagaaactagagaacatgttttcagagcgagcaaatatgacgggagagattattaaagtatatcagccaagtggagaaaggtatcaacaaacagacaagaaggttcacgaccaaaaggcgcttgctgagatgtatcttttgagcttaaccgataacattgttgcaagctcaaggtcaacatttggatatgttgcttatagtcttggaggattaaagccatggttactttatctgccaaatgataacaaagctcctgatccgccgtgtgttcgatccacgtcgatggagccttgtttccttactcctccgactcatggatgtgaacctgacgcatggggaactgaatcggggaaagttgttccttttgttaggtattgtgaggatatatgggggcttaagctttttgatgagttatag

SEQ ID NO: 77 - DNA, 933 bp, Arabidopsis thaliana
atggcgacggtacaattgtccacccaatttagctgccaaaccagagtttcaatctcaccgaactctaaatctatctccaagcctccgtttctggtaccggtgacctcaattattcaccgcccgatgatctccaccggaggaatcgctgtttccccccgtagagttttcaaagtccgagccacagatacgggagagataggatcagctctattggcggcggaggaagcaattgaagacgtggaagagacggagcggctaaagagatcgctcgtggattcgttgtacggaacagatcgaggtttaagcgcatcgagcgaaaccagagctgaaatcggagatctaatcacacagctcgagtctaagaaccctactccagctccgacggaagctcttttccttctcaacggcaaatggatcctcgcctacacatcgttcgtgaatttgttcccgttgctatcacgaggaatcgtaccgttaataaaagtcgatgagatctctcaaaccattgattcagataacttcaccgtccagaactctgttcgtttcgctggtcctttaggtacaaactcgattagcaccaacgctaaattcgaaatccgaagccctaaacgcgtccagattaagtttgagcaaggcgtaattgggacgcctcagctaacggattctattgagataccggaatatgtagaggttcttggtcaaaagattgatcttaacccgatcagagggttacttacctcggtgcaagacacagcctcgtctgtggctagaaccatatcaagccaaccaccgttgaaattctctttgccggcggacaatgcgcagtcttggctactcacgacttatctagacaaagacattcggatctctagaggagacggtggaagtgtctttgtgcttatcaaagaaggaagccctctcttgaatccttga

SEQ ID NO: 78 - DNA, 1803 bp, Arabidopsis thaliana
atggagaagggaaatggaaaaaatcagactaatcgaatctgtttgttggttgctttgtcactctttttctgggcattgttgttgtacttccattttgttgtcttagggactagtaacattgataaacagctccaattgcaacctagttatgctcaatctcagccatcatcagtctctcttcgtgttgataaattccctatagagcctcatgcagctccatcgaaaccacctcccaaagagcctttagttactatcgataagccaatactccctcctgcaccagtagccaattctagttccacctttaagccacctagaattgttgagagcgggaagaaacaggagttttcgtttataagagccttgaagacagtagacaacaagagtgacccttgtggagggaagtacatttatgttcacaatctaccctcaaagttcaatgaggatatgcttagagactgtaagaagcttagtctctggactaacatgtgtaagttcacaaccaatgctggccttgggccgccgcttgagaatgttgaaggtgtcttctctgatgaaggttggtatgcgactaatcagtttgctgttgatgtgatattcagcaaccggatgaagcagtacaaatgtttgacaaatgattcttcccttgctgctgccatctttgtgccgttctatgctggattcgacattgctaggtatctgtggggatacaatatctcgagaagggatgctgcttcgcttgagttggtcgattggctcatgaagcggcctgagtgggatataatgaggggaaaagatcatttccttgtggcgggtaggataacgtgggattttaggagattgtctgaagaagaaactgattggggcaacaagcttctcttcttaccggctgccaagaacatgtctatgcttgtggttgagtcgagcccatggaatgctaatgattttgggatcccgtacccaacctacttccacccagcaaaggactcagaggtttttgaatggcaagaccggatgagaaacctggaaaggaagtggcttttctcgtttgcaggagccccacgacctgacaatccgaaatctatcagagggcagatcattgatcaatgtcgaaactcaaatgttggcaaattattagaatgcgattttggggagagcaaatgccatgcaccaagcagcattatgcaaatgtttcaaagctctctcttctgcctgcagccacagggagactcttacacccgaagatcggcatttgactcaatgcttgccggttgtataccggtcttcttccatccgggttcagcctacacgcaatacacgtggcatctacccaagaactacacaacctactcggtattcatccccgaggatgatgttcggaagagaaacataagcatcgaggagcgactcctccagattccagccaagcaggtcaagataatgagagagaatgtcatcaacctcatcccaaggctgatctacgcagacccgagatcagaactggagacgcagaaagatgcatttgatgtctcggtacaggctgtgatagacaaggtgactcggttaaggaagaacatgatcgagggccgaaccgagtatgactacttcgtggaggagaacagctggaagtatgcgttgctggaggaaggccaacgggaagcagggggccatgtgtgggacccgttcttctccaaaccaaagcccggagaagatggcagcagcgatggtaatggaggcacgactatttcagcagatgcagctaagaattcatggaagagtgagcagagagataagacacagtga

SEQ ID NO: 79 - DNA, 1407 bp, Arabidopsis thaliana
atgtcggagaactcaagaaacttggaagctggtttgctactgaggaagaaccaaaacgacatcaacgaatgtcgtatcactgctgttgtacttttcagtactttcgtttctgtttgtggctctttctgcttcggttgtgcggcaggttattcatcagttgctcaaacagggatcataaatgatttaggtctctctgttgcacaatactccatgtttggttcaatcatgacttttggaggaatgattggtgccatcttcagcgggaaagttgcagatctcatgggtcgaaaagggactatgtggtttgctcaaattttctgcatcttcggttgggttgcagtagcattagcaaaagactccatgtggcttgatattggaagactatccacaggatttgcagttggtttattaagctatgtgataccagtttacattgcagaaataacaccaaaacatgttcgaggagcgtttgtatttgctaatcagctgatgcagagttgtggattgtctttattctacgtcattggaaattttgttcattggcgtaacttggccttaatcggtctcattccatgtgcgttgcaagttgtgactttgttctttattccagagtcccctagactactgggaaaatggggacatgaaaaagaatgtagagcttcattgcaaagtcttcgcggagatgatgcagatatctctgaagaagccaacactatcaaagaaaccatgatcttgtttgatgaaggaccaaaatcgcgggttatggatttgtttcagagaagatatgctccatctgttgttattggtgtgggactaatgcttctacaacaactctctggaagctcaggacttatgtactatgtcggtagcgtatttgataaaggagggtttccaagcagcattggctcaatgattcttgcagtgatcatgataccaaaagctctattgggtctgattttggttgagaaaatgggacgaagaccacttctattggcctctaccggtggaatgtgctttttcagcttgctcctcagtttttccttctgctttcggtcatatggcatgcttgatgagctcactccgattttcacatgtatcggtgtagtgggtttcatctcttcatttgccgtaggcatgggaggcttaccatggatcatcatgtctgagatattcccaatgaatgttaaagtttctgctgggactctggttaccttagccaactggtcctttggttggattgttgctttcgcctacaacttcatgctagagtggaacgcatcaggaacgttcttgatcttctttactatatgtggtgcgggtatagtctttatttatgcgatggtacccgaaactaaaggaagaacattggaagatatacaagcttctcttacagattttctacaatga

SEQ ID NO: 80 - DNA, 1737 bp, Arabidopsis thaliana
atgaagagacattcttgttgttacaaacaaaagctgagaaaaggtctttggtctcctgaagaagatgagaaacttctcaattacattaccaaacatggccatggttgctggagttctgtccctaaactcgcaggtctcgagagatgtggaaagagctgtagactcagatggatcaattacttaagacctgatttaaagagaggagctttctcttcagaggaacagaatctcattgtcgagcttcatgctgttcttggaaacagatggtcgcaaattgctgcgaggcttcccgggagaaccgacaacgagataaagaacttgtggaattcgtgcattaagaagaagctgatgaagaaaggcattgaccctattacacataaacccctctccgaggttggtaaagaaacaaacagaagcgacaataacaattccacaagtttttcctcagaaactaatcaagacttgtttgtcaagaaaacgtctgattttgccgagtattctgcgtttcagaaagaagaatccaactctgtttcactcagaaattcgctctcttccatgatcccaacgcaattcaacatcgacgatggttctgtctcaaatgcgggttttgatacacaagtatgcgtgaaaccctcgattattcttcttcctcctccaaacaacacttcaagcactgtctctggacaggatcatgtaaacgtgtcagagcctaattgggaatcaaacagtggaaccacaagccacctcaacaatcccggtatggaagaaatgaaatggtccgaggagtacctaaacgaatcgttattctctacccaagtttacgtgaaatcagagacggatttcaactccaacattgcctttccttggagccaaagccaagcttgtgacgtattccccaaggatcttcagagaatggccttctcttttggtggtcaaagttttttcccttgggttactactctacgacgaggtcgtcaacaagtcatcgggttctctgtagatcagattgatcgaacaaccaatagttttaaaatcgtcatcataaacgaggtgagaaacagcaatgagacaacatatgagtttgagattaacgtaggctattcatggaaactatcggaaacgacgttaacttgctgcacaagtaatcttgatgaccgtatgaaaaaacctgtttatatgaagggaggtcttcactggctaagaaatgacggagctatcgtagctttcaaccctgaaacagagaaagcacgactgatctcgatcagattccccaaagaactttgttctaaaacgttgttcacagccgcagataacaatttaatcttgatatcggcgacggaagaagtcttttacgtttatgcagtagagaacattcttactgatcccaagtgggtcgtcttgaagcaaatccggaacggggtactggacgagaagatgctatatagttggtacccggaggcttacgatggaaagtgtttaatgctgagggagatattgaagaaggaccattacaagcaagtgcttcatgggtacgacctgagagctaataagtgggaagtcataggttcgattccagggtggtacacttcagctctagacttttatcagtttacaccgtctttgtcttcggtaataggacctgatgccaaggaggaggaagaaatattggcttgtgatcataaaaaaatctcctctataaactcaattattagaatgcttgatggaatctcatcctag

SEQ ID NO: 81 - DNA, 1059 bp, Arabidopsis thaliana
atggtgcggacaccgtgttgcaaagctgaactagggttaaagaaaggagcttggactcccgaggaagatcagaagcttctctcttaccttaaccgccacggtgaaggtggatggcgaactctccccgaaaaagctggactcaagagatgcggcaaaagctgcagactgagatgggccaattatcttagacctgacatcaaaagaggagagttcactgaagacgaagaacgttcaatcatctctcttcacgcccttcacggcaacaaatggtctgctatagctcgtggactaccaggaagaaccgataacgagatcaagaactactggaacactcatatcaaaaaacgtttgatcaagaaaggtattgatccagttacacacaagggcataacctccggtaccgacaaatcagaaaacctcccggagaaacaaaatgttaatctgacaactagtgaccatgatcttgataatgacaaggcgaagaagaacaacaagaattttggattatcatcggctagtttcttgaacaaagtagctaataggttcggaaagagaatcaatcagagtgttctgtctgagattatcggaagtggaggcccacttgcttctactagtcacactactaatactacaactacaagtgtttccgttgactctgaatcagttaagtcaacgagttcttccttcgcaccaacctcgaatcttctctgccatgggaccgttgcaacaacaccagtttcatcgaactttgacgttgatggtaacgttaatctgacgtgttcttcgtccacgttctctgattcctccgttaacaatcctctaatgtactgcgataatttcgttggtaataacaacgttgatgatgaggatactatcgggttctccacatttctgaatgatgaagatttcatgatgttggaggagtcttgtgttgaaaacactgcgttcatgaaagaacttacgaggtttcttcacgaggatgaaaacgacgtcgttgatgtgacgccggtctatgaacgtcaagacttgtttgacgaaattgataactattttggatga

SEQ ID NO: 82 - DNA, 1017 bp, Arabidopsis thaliana
atgtcaaagagaccatattgtatcggagaaggactgaagaaaggagcatggactacagaagaggataaaaaactcatctcttatatccacgaccacggtgaaggaggctggcgtgacattccagaaaaagctgggctgaaacggtgtggaaagagttgtagattacggtggactaactatttgaaaccagatatcaagagaggagagtttagctatgaggaagagcagattatcatcatgcttcatgcatctcgtggcaataagtggtctgtcatagctagacatttgccaaaaagaacggataacgaggtcaaaaactattggaacacacatctcaagaaacgtttaatcgatgatggcattgatcccgtgacacacaagccactagcttcttctaaccctaatccagttgagcccatgaagttcgatttccaaaagaaatccaatcaggatgagcactcttcacagtctagttctacaactccagcatctcttcccctttcctcgaatttgaacagtgttaaatccaaaattagcagtggtgagacgcagatagaaagtggtcacgtgagctgcaagaaacgttttggacgatcgagctctacatcaaggttgttaaacaaagttgcagctagagcttcttccatcggcaacatcttatcaacatccatagaaggaaccttgagatctcctgcatcatcttcaggactcccagactcgttctctcaatcatatgagtacatgatcgataacaaagaagatctcggtacgagcattgatctcaacatccccgagtatgatttcccacagtttcttgagcaactcattaacgatgacgacgaaaatgagaacattgttgggcccgaacaagatctccttatgtccgatttcccatcaacattcgttgatgaagacgatatacttggagacataaccagttggtcaacttatcttcttgaccatcccaattttatgtatgaatcggatcaagattccgacgagaagaacttcttatga

SEQ ID NO: 83 - DNA, 740 bp, Arabidopsis thaliana
atggggagaagaccatgctgtgagaagataggattgaagaaagggccatggagtgctgaagaagatcgaatcttgatcaattatattagtctccatggccatcccaattggagagctctccctaaactagccgggctacttcggtgcggaaaaagttgcaggcttcgttggattaattatttgagaccagacatcaaacgtggcaatttcactcctcatgaagaagatactatcatcagcttacatcaactcttaggcaacagatggtctgcgatagctgcaaaattgcctggacgaacagacaacgaaattaaaaatgtttggcacactcatttaaagaaaagactccaccacagtcaagatcaaaacaacaaggaagatttcgtctctactacagctgcggagatgccaacctctccgcaacaacaatctagtagtagtgccgacatttcagcaattacaacattgggaaacaacaatgacatctccaatagcaacaaagactccgcgacgtcatccgaagatgttcttgcaattatagatgagagcttttggtcagaagtggtattgatggactgtgacatttcaggaaatgagaagaatgagaaaaagatagagaattgggagggctcactagatagaaacgataagggatataaccatgacatggagttttggtttgaccatctcactagtagtagttgtataattggagaaatgtccgacatttctgagttttg

SEQ ID NO: 84 - DNA, 858 bp, Arabidopsis thaliana
atgggaagagctccatgctgtgagaagatggggttgaagagaggaccatggacacctgaagaagatcaaatcttggtctcttttatcctcaaccatggacatagtaactggcgagccctccctaagcaagctggtcttttgagatgtggaaaaagctgtagacttaggtggatgaactatttaaagcctgatattaaacgtggcaatttcaccaaagaagaggaagatgctatcatcagcttacaccaaatacttggcaatagatggtcagcgattgcagcaaaactgcctggaagaaccgataacgagatcaagaacgtatggcacactcacttgaagaagagactcgaagattatcaaccagctaaacctaagaccagcaacaaaaagaagggtactaaaccaaaatctgaatccgtaataacgagctcgaacagtactagaagcgaatcggagctagcagattcatcaaacccttctggagaaagcttattttcgacatcgccttcgacaagtgaggtttcttcgatgacactcataagccacgacggctatagcaacgagattaatatggataacaaaccgggagatatcagtactatcgatcaagaatgtgtttctttcgaaacttttggtgcggatatcgatgaaagcttctggaaagagacactgtatagccaagatgaacacaactacgtatcgaatgacctagaagtggctggtttagttgagatacaacaagagtttcaaaacttgggctccgctaataatgagatgatttttgacagtgagatggacttctggttcgatgtattggctagaaccggcggggaacaagatctcttagccgggctctag

SEQ ID NO: 85 - DNA, 1356 bp, Arabidopsis thaliana
atggcgaaaaagttggaagctcaaggtggtcgtggaggagaagaatgggacgatggtggtgcttacgaaaacgtcaagaaagtgtatgttggtcaaggtgattctggtgttgtttacgtcaagtttgattacgagaaagatggaaaaatcgtatcacacgaacatgggaagcagacactacttggaacagaggagtttgtggttgatccagaagattacataacatcagtgaaaatttactacgagaagctctttggatcaccgatagagatcgtaacggctctaatctttaagacattcaaggggaaaacttctcagccttttggactaacctctggagaagaagctgagctaggaggtggcaaaatcgttggatttcatggaagttcaagtgatttgatccattctgttggagtttatataattccgtcgactacaccgctgactccgccggtatcaggtggtctgaccaaattggaagctcaaggtggtcgtggtggagatgtttgggacgacggtggtgcttatgacaatgtaaagaaagtttatgttggacaaggtgactctggtgttgtttatgtcaagtttgattacgagaaagatggtaagattgtatcacttgaacatgggaagcaaacactacttggaacagaggagtttgagattgatcctgaagactacatcacctatgtgaaagtttactacgagaaacttttcgggtcaccgatagagatcgtcacagctcttatattcaagacattcaaaggaaaaacttctcagccgtttggactaacctctggagaagaagctgagctaggaggcggcaaaatcgttggattccatggaacttcaagtgatctgatccattctctaggagcttatattattccttcgtccacaccattgactccttcttccaatactattccagcacaaggtggagatggtggagttgcttgggatgatggtgttcacgacagtgtcaagaagatatatgttggacaaggtgactcttgtgtgacctatttcaaagctgactatgaaaaggcttcaaagcctgtccttggaagtgatcatgggaagaagacattgcttggagcagaggagtttgtgcttggaccagatgagtatgtcactgccgtgtcgggctactatgacaagatttttagtgtagatgccccggcaatcgtctcgcttaagtttaaaacaaacaagagaacatctatcccgtatggactcgagggaggaactgaattcgtactggagaagaaagaccacaaaatcgttggtttctatggacaagctggtgaatatctttacaaacttggagtcaatgttgcgcccatagccaaatga

SEQ ID NO: 86 - DNA, 1305 bp, Arabidopsis thaliana
atggcgtcttctcgaatcatcatcttctccgttcttcttctctccatcttctcactctcatcatctgcccaaccatctttccgccccaaagctctccttctcccagtaacaaaagacccatctaccctccagtacacaaccgtcatcaaccaacgcacacctctcgtccccgcttccgtcgtattcgacctcggtggtcgagaattctgggtcgactgtgaccaaggctacgtctccaccacttaccgctctcctcgctgcaactccgctgtctgctcacgcgccggctccatcgcctgcggcacatgcttctctcctccgagacctggctgtagtaacaacacttgcggcgcttttccagataactccatcaccggatgggcaacctcgggcgaatttgctttagacgttgtgtctatccagtccactaacggatccaatccgggtcggttcgttaaaatccccaatctaatattcagttgcggatcaacgtctcttcttaaaggactcgctaaaggagccgttggtatggctggaatgggacgtcacaacatcggcttaccgttgcagttcgccgccgcgtttagcttcaaccgcaaattcgccgtgtgtcttacttccggtagaggcgtcgccttcttcggcaacggaccttacgttttcctccccgggatccagatctcaaggcttcaaaagacaccgcttctcatcaatccagggaccactgtttttgagttttcaaaaggcgagaagtcgccggagtattttatcggcgtgacggcgattaagatcgtcgagaaaacacttccaatcgatccaacgcttttgaagataaacgcaagtactggaataggaggaaccaaaatcagctccgtcaatccttacacggtgttggagtcatcgatctacaaagcttttacgtcggagtttattagacaagcagcggcgaggagcatcaagagagtagcgtcggtgaaaccgttcggcgcgtgtttcagcacgaagaacgttggcgtcacgcgcctaggatacgccgtaccggagattcagctcgtgcttcatagcaaagacgtcgtttggagaatctttggagctaactcgatggtgagtgtcagtgatgacgtcatctgtttgggtttcgttgacggaggagtcaacccaggagcctctgtggtgatcggagggttccagttggaggataatttgatcgaatttgatttggcgagtaacaaatttgggtttagttccacgttattgggccgtcaaactaactgcgccaactttaatttcacttccactgcttga

SEQ ID NO: 87 - skipped

SEQ ID NO: 88 - DNA, 639 bp, Arabidopsis thaliana
atggcaggtatcaaagttttcggacacccagcttccacttccaccaggagagtcctcatcgccctccatgagaaaaacctcgactttgagctcgttcatgttgaactcaaagacggtgagcacaagaaggagcctttcctctcccgcaacccttttggtcaagttccagcctttgaagatggagacctcaagctcttcgaatcaagagcgattactcagtacatagctcaccgatacgaaaaccaaggaaccaaccttctcccagctgactccaagaacatagctcagtatgcaatcatgtccattggaatacaagtagaagctcatcagttcgatcccgtggcttcaaagcttgcttgggaacaagtattcaagttcaactatggcttgaacacagaccaagccgttgttgcagaagaagaagctaagttagccaaggtccttgatgtctacgaggctaggctgaaggagttcaagtatttggctggtgaaactttcactttgaccgatcttcaccacattcccgtgattcaatacctgctcggaactcccaccaagaagctcttcacggagcgtccacgtgtcaacgagtgggtggctgagatcaccaagaggccagcttcagagaaggttctgtga

SEQ ID NO: 89 - DNA, 1302 bp, Arabidopsis thaliana
atggcgccttctccgatcatcttctccgttcttcttctcttcatcttctcactctcatcatctgctcaaacacctttccgtcccaaagctctccttctcccagtaacaaaagaccaatctaccctccagtacacaaccgtcatcaaccaacgcacacctctcgtccccgcttccgtcgtcttcgacctcggtggtcgagaactctgggtcgactgcgacaaaggctacgtctcctccacttaccagtctcctcgctgcaactccgccgtctgctcacgtgccggctccacaagctgcggcacatgcttctcccctccgagacctggctgtagtaacaacacttgcggcggcattccggataacaccgttaccggtaccgcaacttccggcgaatttgctttagacgttgtgtctatccagtccactaacggatccaatccgggcagggtcgttaaaatcccaaatttgatcttcgattgtggagcaacgtttcttcttaaaggactcgctaaaggaaccgttggtatggcgggaatgggacgtcacaacatcggtttaccgtcgcaattcgccgccgcgtttagcttccaccgtaaattcgccgtctgtctaacttccggtaaaggcgtcgccttcttcggcaacggaccttacgttttccttcccggaatccagatctcaagtctccaaacgacgccccttctcatcaatccggtcagcactgcttctgcgttttcacaaggtgagaaatcctcagagtactttatcggcgtgacggcgattcaaatcgtcgagaaaacagttccgatcaatccaacgctattgaagattaacgcaagtaccggtatcggaggaaccaaaatcagctccgtcaatccttacacggtgttggagtcatcgatctacaatgcttttacgtcggagttcgttaaacaagcagcggcgaggagcatcaagagagtagcgtcggtgaaaccgttcggcgcgtgtttcagcacgaagaacgtcggcgtgacgcgcctaggatacgccgtgccggagattgagcttgtgcttcatagcaaagacgtcgtttggaggatatttggagccaactcgatggtgagtgtcagtgatgacgtcatctgtttgggtttcgttgacggaggagtcaacgcaagaacctctgttgtgattggagggtttcagttggaggataatttgatcgaatttgatttggcgagtaacaaatttgggtttagttccacgttattgggccgtcaaactaactgcgccaacttcaatttcacttccactgcttga

SEQ ID NO: 90 - DNA, 3260 bp, Arabidopsis thaliana
atggcagaaactcgttcgcagatgttttatcgggaggtttcagctattcacgaaactatgtatccgtcattgaaagtggtttgtggtcacaaatctgatgtgcgttccggcaaagcggcgacgacgaatcagcaatttggtgttcaatcctcaccgtgcatcggagaatcaatgttggatacgagagcttacaacattggaagatcctcacagctgatatctacagctccgatcgtcactcctgacaccagcaaagagagagtcggtatgtcgaacaaatattttccattggaagagagatctgattttgcgagacttgagcatctcagatttaatggtgatagaattacagaatggttgttccagattgaacaatttttcttaattgatcgtactccggaggaattgaaagttggcttcgcttcactccatttcgatgacactgctgcgactttgcaccaatcaattgtacaatcgatgtggtggaagcatgttaggcatgattggtggagttacaaactgttgttgcaagtgagatatgatgagcatgttaatgactcgattgcaaaactgacacagttgcaggagactgaaggaatagaggagtatcatgctcgatttgagttgattagcactagattgaacttcgctgaagattacttggttagtgtttacttggcaggtttgagaactgatactcaactgaatgttaggatgtttggacctcagacaattcaacaatgtttaatgttgggaagattatatgagatggctcacccaaagagtgtgcttatcagaaaaaagagtgatgattatcagaaagaagctcaacatgtttcaagtaatgctgcaggaacttctatgattaatgatggtaattgcatgataggtaatgatggagatcgattccttagtggttcagacttggtagagaatgcggttgcgacggtgaagaaatatttggttgaaattgatgatgctatgtctagtgatgatgatcaaaattcggatgctggggacgtctttggattcaacatagaagagtgtgaaacagattcatggattgaacataagccgttgattcaagatcaagccgcgtttcactccatagacatagaaggtgtctcacaacttcagaaggttcgttcaaaccttaaggattttgataaagttgatgcaacaatgaatcaaatgctgtcatcaattggatttgttgttgatgaattacactctagttgtggaagtgctaccgtccatgtccagaagaagcctagtaagtctctcaaatcctggaagttcaaatttaaaaccagctcacaagaccaaggggatcatgaatcacttccaatagggttacatatcagattcaagtcctggaaatttaagttcgtgaatagaaatttacaaatgatgagagaacatggatatacaacacactttcagctaatgtctgataagagagaacatcaagagatgttcattgtggccaggattgttgatgtgagatgtttgcttagcatgatacttgggataacagagagtgatgcaggtcatggagaacaatttgtgtatgaccggattacaatggtaaagaggctgctgttgcaaaccagtttagtcattcaagaagtgatgagaaacaaaaagatcaagtttaccaaacggtggtggttcaagtataaatttggggaagagggtttcacgagactgaattctttcaatttgcgtatgacttatcattttgcggtttggcattgttggaagagcaagaccatggtgcatgttgaaatgagtggtgatcactggtcttggatggtcttagtcatgaaatctacaacatctagctttttgtcacttctctatgatcgaagaatgggagatccaagcagacatgaaacgggtcgggagattgtgtcacttcagggtcaaattcacactggttctcctatgattcagtgcataaagatgagcttcagcattctccttcttcagggtctgtttcagagtttgacaatgaagatgctcacatatatgcacttgtttggtagcaaaagttgtgtttcaactttgggaagacttctagatttccctcatcgttttaccggagctctcgtcgagtctcttgtaggtgagaagttgatatcgcgtctctttacgaacgttgtatcaaatggtgagagaagcagagttgcatgctcagaaagacaaagaaaagaattgatcgacaccaagaacacagctgacacaacaatttacagcatagagaagagtcttggtgaatacagagagaagatcccaagtgaaatcgccaaggagattgaagatgctgtggcagatctaaggagcgcttcctctggggatgatctcaacgagatcaaggccaagattgaggcggcaaacaaagctgtttctaagattggggagcacatgtctggtggttctggtggaggctctgcaccaggaggaggatctgagggaggcagtgatcaagctccagaggcagagtacgaggaagtgaaaaaggctgatttaatcgagatcccatttcttttgttggcttacttctctcgaatttacgcaggaagatcattagcagagaattctcatctgattcagtccatggctgccacggctcttttccgatcgattcgtcgacgcgacgtcgtctccgcgcctctttccgtttacaaatcccttgctggtaatgctcaaccttcctggggtagttcatacattggtcagaactatgcaagtttctccagagctttcgggtcaaaacctgttgtgaatgacattcttggtactggtttgggcactaacaatgccattagagaggagagagagaagtcaaaatctactgaagctgcaattgttggtgctcaattgactcgatctttccgtgctcttgatgtgggaacatcgaaacgattgttttctacaatctcaggggatataaagacaacacaggaggaaccaaaaatcaaaagctttcgccctttatctcctcacctttctgtttaccagcctcagatgaactccatgctatcgattttcaacagaatctcaggggtttacttgaccggtgtcactttcgctggctaccttctctacctgaagatgggtatgatctgcctcacctacccgagtttctaccaagtcctttaccatacacaacagcaacttccagtcatcacctcggttactgcattagccgctatttatcatactatcaagagtactcactcactcttgacccatta

SEQ ID NO: 91 - DNA, 1575 bp, Arabidopsis thaliana
atggaaacggcgtcttctaatttctctctctcgcagatcctcaatattgaggaaccctacagctccgtaatgctcggtgtcgccgctctcttggccgttgtttgctatttctggatacaggggaagtccaaatccaagaacggaccaccgttgcctccgggaccttggccacttccgatcgtcggcaacctcccgttcctaaactctgacgtcctccacacgcaattccaagccctaaccctaaaacatggccctctcatgaagatccacctcggttccaaacttgcgatcgtcgtctcttcccctgacatggctcgcgaggttctcaaaacccacgacatcactttcgccaaccacgatctccctgaagtcggaaagatcaacacttacggtggtgaagacatcctctggtctccttacggtacccattggaggagacttcgtaagctctgcgtcatgaagatgttcactaccccaactctcgaagcttcctactccactcgccgggaagaaacccgacaaaccattgtccacatgtcggaaatggctcgtgaaggatcaccagtcaacctcggagagcaaatatttctttccattttcaacgtcgtgacaagaatgatgtggggcgccactgttgaaggagacgagagaacgagcttaggaaacgagctcaaaaccctaatatctgatatctccgacatagaagggattcaaaactactcagatttctttccgttgttctcaagattcgatttccaaggattggttaagcagatgaaaggccatgtgaagaagcttgatctcttgttcgatagagttatggagagtcacgtcaaaatggtgggaaagaagagcgaagaagaagaagatttcttgcaatacttacttagagttaaagatgatgatgagaaagctcctctgtccatgactcatgtcaagtctctcctcatggatatggttcttggtggtgtcgacacatcggttaacgcatccgaattcgccatggcagagattgtgagcagaccggaagtgttaaacaagatccgactagaacttgaccaagttgttggcaaagacaacatcgttgaggaatcacatttacctaagcttccttacctacaagcggttatgaaagagactcttaggcttcaccctacgcttcctcttcttgttcctcacagaaacagcgaaacctcggtggttgcgggatacactgtgcctaaagactccaagattttcatcaacgtttgggcgattcatagagatcctaagaattgggatgaaccaaacgagttcaaacctgagaggtttttggagaattcgcttgatttcaatggaggtgattttaagtacttgccttttgggtcaggaaggaggatttgtgcggcgattaacatggctgagagacttgttctgttcaacattgcttcacttcttcactcttttgattggaaagcacctcaaggacagaagtttgaggttgaagagaagtttggtcttgttcttaagttgaagtctccacttgtggctattcctgttccaaggttgtccgatccaaaactctatacagcttaa

SEQ ID NO: 92 - DNA, 1182 bp, Arabidopsis thaliana
atggagactttcctattcacatctgagtctgtgaacgaaggacaccctgacaagctttgcgaccagatctctgatgcagtccttgatgcctgccttgagcaagaccctgatagcaaagttgcttgtgagacatgcaccaagaccaacatggtcatggttttcggtgagatcaccaccaaggctacgattgactacgagaagattgtccgtgacacttgccgttccattggattcatctctgacgatgttggtcttgatgctgacaaatgcaaagtccttgttaacattgaacaacagagcccagacattgctcaaggtgttcacggtcacttcaccaaacgtccagaagacattggagctggtgaccaaggacacatgtttggttatgccactgatgaaacccctgagctcatgcctttgagtcatgtccttgcaaccaagattggtgctcgtctcactgaagtcaggaagaatggaacttgccgttggttaagaccagatggcaagacccaagtcactgttgagtactacaatgacaatggcgctatggttccagtccgtgtccacaccgtcctgatctcaacccagcacgatgaaaccgttaccaatgacgagattgcgcgtgacctcaaggagcatgtgatcaaaccaatcatcccagagaaataccttgacgacaaaaccatcttccacctcaacccatcaggccggtttgtgatcgggggaccacacggtgatgctggtttaactggacgtaagatcatcattgacacatacggaggatggggagctcatggaggtggtgctttctcaggcaaagacccaaccaaagtcgacagaagtggagcttacatcgtgaggcaagcagcaaagagtgtggtggctaatggcatggctcgcagggctcttgtccaggtctcatacgccattggagtacccgagccattgtctgtcttcgttgacacttacggaacagggttgattccagacaaggagatcctgaagatcgtgaaagagacattcgatttcagaccaggaatgatgacaatcaacttggacttgaagagaggaggaaatggaaggtttcagaaaacggcagcgtatggacatttcggaagagacgaccctgacttcacctgggaggtcgtgaagccactcaagtgggacaaacctcaagcttaa

SEQ ID NO: 93 - DNA, 936 bp, Arabidopsis thaliana
atggctgccttgtcggataagttagcggatgcttaccagaacgcaaggccgagatatccgatcgattggttcacgaaacttgctgctcgaaccggtcagcacaaatcagcttgggatgttggtactggcaacggtcaagcagctattggtcttgcagagtatttcgagaaagttacagcaaccgacataaacgaagcacagttaaaacgagcggtaaaacacgaaagaatcagttaccatcacactcccacaacaatgtccgaagaccaaatggttgctctagtcggcggagataactccgttgatctaatcgtggcagcacaagccgttcactacttcgatctcgcaccattctacaacgtagcaaaacgtgttcttcgcaaagaaggaggattaatcgcagtttttgtctacaacgacataatcatctctcctgaagttgattccatcatgaaacgtcttgtggactccacgttcccgtttagaactcctgtaatgaatcttgctttcgacggttataaaacgttgccgtttccgtttgaaagtatagggatgggatcagaagggaagcctataatgcttgacattcctcataagctatcgcttaaagggtttatcggtttcttgagatcgtggcagcccgcaatgaaagctaaagaacgtggagttgagcttgtgactgaagatttgatctccaaatttgaagatgcttggggtgatgatgatgatgttaaagatattttctacaaagctcatatgattgttggaaaactttcggcttcagatatagagcggcatcgaaagagatttgatacgaactgcgtagttacaacactaaaggatcataacaactcggctgttattgcttcagtgactgctgctgcatttgctggagtggcggcttactgtgcttactctgcaaggaagaacagttag

SEQ ID NO: 94 - DNA, 486 bp, Arabidopsis thaliana
atgctttcttcatctccaacttcctttactcatccatttctctcttcttctccgcctctatctccgatatctccgccgtctcgcacggctcggatctctccacctctcgtctccgcctcttgctcatacacctacacggaagattcgccgagactgcatcagatcccgcggcgattgacgacggtgccagcttcgctttacgatgttcttgaggttcctttaggcgcgacgagtcaggatatcaaatcggcttaccggagattagccaggatctgccatccagacgtggcgggaactgatcggacttcttcttcatcggcggatgaattcatgaagatccatgccgcttactgtacgctttctgatcctgagaaacgctccgtttatgatcggaggatgttgcgacggagccgtcctttgaccgtcggaacctccgggttgggaagctacgtcggacggaactgggaaaccgatcagtgttggtag

SEQ ID NO: 95 - DNA, 1149 bp, Arabidopsis thaliana
atgcaaattttcgtgaaaacactcactggtaagaccatcactctcgaggttgagagctctgacaccatcgacaatgttaaggcaaagatccaggacaaggaaggcattcctcctgaccagcaaagattgatcttcgctggtaagcagctagaagatggccgcaccttggctgattacaacatccagaaagaatcaacactccacttggttctcaggttaagaggtggtatgcagatctttgtcaagactctgactggcaaaaccattaccttggaggttgaaagctctgacactattgacaacgtcaaggcaaagatccaggacaaggaaggaatccctccggaccagcaaagacttattttcgctggtaagcagcttgaagatggaaggactcttgctgactacaatatccaaaaggagtctactcttcaccttgtccttcgtctccgtggtggtatgcaaatctttgtgaagactctgacgggtaaaacaatcacccttgaggttgagagctcagacaccattgacaatgtcaaagctaagatccaagataaagagggaatcccaccggaccagcagaggcttatctttgccggtaagcagctagaggatggtcgcactcttgctgattacaacatccaaaaagagtcaacccttcatttggtgcttcgtctgagaggtggtatgcagatttttgtgaagaccttaactggcaagactatcactttggaggttgagagctcagacacaatcgataatgtcaaggcaaagattcaagacaaggaagggattccaccagatcagcagagactcatatttgctggaaaacagcttgaagatggacgcacactcgctgattacaacatccaaaaggagtctaccctccatcttgtgcttcgtctccgtggtggtatgcagatatttgtgaagacccttaccggaaaaaccattactcttgaggttgagagctcagacacaattgataatgtcaaggctaagattcaggacaaggaagggatcccaccggaccaacagagactcatcttcgctgggaagcagcttgaggatggtcggactcttgcagattacaacatccagaaggagtcgactcttcacttggttcttcgtcttcgtggtggaagcttctga

SEQ ID NO: 96 - skipped

SEQ ID NO: 97 - DNA, 1490 bp, Arabidopsis thaliana
atgggtcttccgggaaaaaataaaggtgcagttttgtcgaagatagcgactaacaatcaacacggagagaactcagagtactttgatggatggaaagcttacgacaaagatccttttcatctttcccgtaacccccatgggatcatccaaatgggtcttgcagagaatcagctttgcttagatttgatcaaagattgggtcaaagagaacccagaagcttctatttgcacccttgaaggtattcatcagtttagcgacatcgctaatttccaagactaccatggtcttaagaagtttagacaggcaattgcacatttcatgggaaaagctagaggtggaagagtgacttttgatccggagagggtggttatgagcggaggagccaccggagccaatgaaacaatcatgttctgccttgcggatcccggcgacgttttcctcattccctccccgtactatgccgcatttgatagagacttgaggtggcggacaggtgtcgagataatcccggttccttgttcaagctccgacaatttcaaattaaccgttgacgccgcggaatgggcttataaaaaagcccaagagtccaataaaaaagtcaaaggtctgattttgaccaacccatcaaatccactcggtacaatgttggataaggacacactcacgaacttggtccggtttgtcacgaggaagaacattcacctagtcgtcgacgagatctacgccgccacagtcttcgccggaggagatttcgtgagcgttgctgaggtggtcaatgatgtggacatctccgaagtcaacgttgacttgattcacattgtctatagtctttctaaagatatgggacttcctggttttagagtcgggatagtctattctttcaatgactcggtcgtgtcttgcgcaagaaaaatgtcaagtttcggacttgtttcgtctcagacacaactcatgcttgcttcgatgttgtccgatgatcagtttgtggataattttctaatggaaagctcgagaaggttggggataaggcataaagtttttaccacggggatcaagaaagcagatattgcttgtttgacaagcaacgctggtttatttgcgtggatggatttgagacatctactgagagatcgtaactcgtttgaatctgagatcgagctttggcatataatcatcgatagagttaagctcaatgtgtctcctggctcttccttccgttgcacggaacctggatggtttaggatttgctttgccaacatggacgatgatactctccatgtggcgcttggacggatccaagatttcgtgtctaagaacaagaacaagatcgtcgagaaagcatctgaaaatgatcaggtaatccagaacaagagtgctaaaaagctgaaatggacgcagaccaatcttcgactaagtttccgacgactttacgaggatggtctctcgtctccagggataatgtcaccacactcacctcttctccgagcatg

SEQ ID NO: 98 - DNA, 1467 bp, Arabidopsis thaliana
atgtctcagggtgcatgtgagaatcaacttctatccaaattagctttgagtgacaaacatggagaagcttcgccgtacttccatggctggaaagcttacgacaataatccttttcatccaactcataatccacaaggagttattcaaatgggtctcgccgaaaatcaactttgttcagatttgatcaaagaatggataaaggaaaatccacaggcatctatttgtacggcggagggaattgactctttctccgacattgctgtttttcaagattatcacggtctcaaacaatttagacaggcgattgcgacgtttatggagagagcgagaggcgggcgggtgaggtttgaggcggagagggtggtgatgagcggaggagccaccggagcaaatgagacgatcatgttctgtcttgctgatcccggcgacgcttttctcgtccctactccttattatgctgcattcgatagagacttaaggtggagaactggagttagaataatccctgtggagtgtagcagctcaaacaatttccagattacaaaacaagccctagaatcagcgtaccttaaggcccaagaaaccggtatcaagatcaaaggcctgatcatctcaaaccctcttggaacatctctcgatcgagaaactcttgaaagccttgtcagcttcatcaacgacaagcaaattcacttagtatgcgacgaaatatacgcagcaacggtttttgcggaaccgggattcatcagtgttgcagagatcatccaagagatgtattatgttaaccgtgatctgattcatatcgtctacagtctttcaaaggacatgggtcttcccggtttccgggttggagtggtttactcttacaacgatgttgttgtgtcctgcgcaaggaggatgtcgagttttggattggtctcgtcgcagacacaaagttttctagctgctatgttgtctgatcagagttttgtcgataactttcttgttgaggtttcgaaaagagtagcgaagagacaccatatgttcacggaagggcttgaagagatggggatttcttgcttgagaagcaacgcgggtttattcgttttgatggatttgaggcatatgcttaaggatcagacatttgattccgaaatggcgctttggcgagttattatcaataaggtcaagattaatgtctctcctggctcgtcgtttcactgctctgagcctggttggttccgagtctgctttgctaatatggacgaagacacactccaaattgcacttgaacgaatcaaagactttgtggttggagacagagccaacaagaacaagaactgtaactgcatttgcaacaacaaaagggagaacaagaaacgtaagagttttcaaaagaatctcaagctgagtttatcttcgatgaggtacgaggaacatgttaggtcaccaaagttgatgtctcctcattcaccattgcttcgagcttaa

SEQ ID NO: 99 - DNA, 1140 bp, Arabidopsis thaliana
atgtctaccaccggacagattattcgatgcaaagctgctgtggcatgggaagccggaaagccactggtgatcgaggaagtggaggttgctccaccgcagaaacacgaagttcgtatcaagattctcttcacttctctctgtcacaccgatgtttacttctgggaagctaagggacaaacaccgttgtttccacgtatcttcggccatgaagctggagggattgttgagagtgttggagaaggagtgactgatcttcagccaggagatcatgtgttgccgatctttaccggagaatgtggggagtgtcgtcattgccactcggaggaatcaaacatgtgtgatcttctcaggatcaacaccgagcgaggagggatgattcacgatggtgaatcaagattctccattaatggcaaaccaatttaccatttccttgggacttccacgttcagtgagtacacagtggttcactctggtcaggttgctaagatcaatccggatgctcctcttgacaaggtctgtattgtcagttgtggtttgtctactgggttaggagcaactttgaatgtggctaaacccaagaaaggtcaaagtgttgccatttttggtcttggtgctgttggtttaggcgctgcagaaggtgctagaatcgctggtgcttctaggatcatcggtgttgattttaactctaaaagattcgaccaagctaaggaattcggtgtgaccgagtgtgtgaacccgaaagaccatgacaagccaattcaacaggtgatcgctgagatgacggatggtggggtggacaggagtgtggaatgcaccggaagcgttcaggccatgattcaagcatttgaatgtgtccacgatggctggggtgttgcagtgctggtgggtgtgccaagcaaagacgatgccttcaagactcatccgatgaatttcttgaatgagaggactcttaagggtactttcttcgggaactacaaacccaaaactgacattcccggggttgtggaaaagtacatgaacaaggagctggagcttgagaaattcatcactcacacagtgccattctcggaaatcaacaaggcctttgattacatgctgaagggagagagtattcgttgcatcatcaccatgggtgcttga

SEQ ID NO: 100 - DNA, 1062 bp, Arabidopsis thaliana
atggccaacgatcagaagaatagtgagtcttttccagcgaaggaagatcataagaaggatgatgcggcagctccagcagaagtagaccataaggatgaattctcggcatcacagccacatccggtcgaaaacatagttttagttgggcgtacagggaacggcaaaagcgccacggggaacagcatcgtcagatcaaaggtgtttaagtcgaaaacaaaatcatcaggtgttacgatggaatgccatgcagttaaagcagtgacaccagaaggccctatactcaatgtgattgacactcctggtctatttgatttgtcggtatctgctgaatttatcggtaaagaaatagttaaatgcctaactctagcggatggagggctacacgctgtgctcttagttttatctgtaaggactcgaattagtcaagaggaagagatggtacttagtaccttgcaggttcttttcggtagtaagattgttgattaccttatcgttgttttcacggggggagatgtattggaagatgacggtatgacattggaggattacttgggtgataacatgccggacttcctaaagagagttctcatattgtgtggccaacgaatgattctgtttgataacaaaaccaaggatgatgagaaaaagacaaagcaagtccatgaacttctcaaacttatcgacttggtcagaaagcagaacaacaatattccgtataccgatgagatgtaccatatgataaaggaagaaaatgaaaggcacaagaaagaacaagaggagctagaatcaaaagggcattcagaagagcagctcgcagcattgatgaaggagttacagataatgaatgaacgaaacctcaaggcaatggcagagatgatggagaaaaatatgaaaatagctatggaggcgcaggagaagctctttgagcaaagagaaaaagctcaggagatgagctaccagcaaaaaatggaaatgcaggagaagttaaagcagatggaaggacgtatgcgtgctgaaatggaagcgcaaatgctcagccgtcagcagtgcagcattctctga

SEQ ID NO: 101 - DNA, 513 bp, Arabidopsis thaliana
atgacaagctccgatcaatctccatcgcacgacgtcttcgtctacggcagtttccaagaaccagccgttgttaatttaattctcgaatgtgctccggtcatggtttccgctcaactccacggctatcacttgtatagacttaaaggtcgtttgcatccatgtatttctccttccgacaatggattaatcaatggcaagatactaactggattaacagattctcagttagagagtttagatatgattgaaggaactgaatatgtgaggaagactgttgaagttgttttgactgatactttggagaagaagcaagttgaaacaattgtatgggcaaacaaggatgatcctaatatgtatggagaatgggatttcgaggaatggaagaggcttcatatggagaaatttatagaggcggcgacgaaattcatggagtggaagaagaatccgaatgggagaagtagggaagagtttgagaagtttgtacaagatgattcttctccggcttcggcttga

SEQ ID NO: 102 - DNA, 1119 bp, Arabidopsis thaliana
atggcagagcgtgtgtctctcacactcaacggaaccctcctttctcctcctcccacaacaacaacaacaacaatgtcttcttctctccgatctaccaccgccgcttctcttctcctccgctcctcctcctcctcctccagatccactctcactctctccgcttcctcctctctctccttcgtcagatctctcgtctcttctccacgtctctcttcttcttcatccctctctcagaagaaatatcgaattgcgtcggtgaatcggagtttcaactccaccaccgccgctactaaatcttcatcttcagatcctgatcagttgaagaacgctagagaagatatcaaagagcttctcagcaccaaattctgccatccgattttggttagattaggttggcatgatgctggtacgtataacaagaacattaaggaatggccacaaagaggtggagctaatggaagtttgagattcgatattgagcttaaacatgctgctaacgctggtcttgtgaatgctttaaacttgattaaggatatcaaagagaaatactctgggatcagttatgctgatttgttccagttagctagtgctactgctatagaggaagctggaggaccgaaaataccgatgaaatatggtagagttgatgcctctggtcctgaggattgtccagaagaaggaaggcttccagatgctggtcctccttcacctgctactcatctcagagaagttttttacagaatgggattagatgacaaggacatagttgcattatctggtgctcacacgttaggaagatctaggccagaacgtagtggttgggggaagcctgagacgaagtacacgaaagaaggacctggagcaccaggaggacagtcatggacaccagagtggctgaagtttgataattcttacttcaaggagatcaaggaaaagagagatgaagatctccttgtcctacccactgatgctgccatcttcgaagattcttctttcaaggtctatgctgaaaagtatgctgcagatcaggatgcatttttcaaggattacgctgtagcccatgcgaagctcagcaatcttggagcagaatttaaccctccggagggtatcgttatctaa

SEQ ID NO: 103 - DNA, 1788 bp, Arabidopsis thaliana
atgtcttcctctatgaacgtagcgacgatgcaagcactgactttctctcgccggcttctcccttctgttgcttctcgttatctctcttcttcttctgtgaccgttactggatactccggtagaagctcggcttacgcgccttctttccgttcgattaaatgcgtctctgtttctccggaagcttcaatagtaagtgatacaaagaagttggcagatgcttctaagagtacaaaccttataccaatttaccgctgtatattctctgatcagcttactcctgttcttgcttaccgttgtttggtcaaagaagatgaccgtgaagctcctagctttcttttcgagtccgttgagcctggttctcagatgtctagcgttggtcgttatagcgttgttggggctcagcctgcgatggagatcgtggcaaaggagaataaagttattgtaatggatcacaacaatgaaaccatgactgaggaattcgtcgaagatccaatggagatcccaagaaaaatctctgagaaatggaaccctgatcctcaactagttcaggaccttccagatgcgttttgtggtgggtgggttggttttttctcgtacgacactgttcgttatgttgagaagaggaaattgccattttcaaaggcccctgaggatgataggaacttgccagacatgcatcttggtctgtacgacgatgtagttgtatttgatcacgtggaaaagaaagcatatgtcattcactggattagactagatgggagccttccttacgaaaaggcatacagtaatggaatgcaacatttggagaacttggtggccaagttacatgatattgagccgccaaaactggctgcaggtaacgtgaatcttcagacacgacaatttgggccatctttggataattcaaacgtgacatgcgaagagtacaaggaggctgtggtcaaggccaaagaacatatacttgcaggagacatatttcagatcgtgctgagtcaacgttttgagcggcgaacatttgcagacccctttgaagtttatagagcactaagagttgtgaatccaagtccgtatatgggttatttgcaggctagaggatgcattttggtagcatcaagtccagaaattctcaccaaagtaaagcagaacaagatagtgaatcggccattggcaggaaccagcaagagagggaagaatgaagttgaggataagagattagaaaaggaactgctagagaatgaaaagcaatgtgctgagcacatcatgttggttgatctcggtcgcaacgatgttggaaaggttacgaaatacggatcagtgaaagtagagaagcttatgaacatcgaacgttattcccatgttatgcatataagctccacggtgacaggagaattacaagatggtttgacttgctgggacgtactacgtgcggctttaccagtgggaacagttagtggtgcaccaaaggtcaaagctatggaactaatcgatgagctagagccaacgaggcgtggaccatacagtggcggttttggtggagtctccttcactggtgacatggacattgctttatcccttaggacaatcgtttttccgacagcatgtcaatacaatacaatgtactcttacaaggatgctaacaaacggcgtgagtgggtggcttatcttcaagctggagctggtgtagtagctgatagtgacccgcaagacgaacactgtgagtgccagaacaaagccgctggtcttgctcgagccatcgacttggctgaatctgcatttgtgaaaaaatga

SEQ ID NO: 104 - DNA, 1488 bp, Arabidopsis thaliana
atggtggcttttgcaacagagaagaagcaagatctgaatctattgtctaaaatcgcctccggtgacggtcacggcgagaattcctcttatttcgatggttggaaagcttatgaagaaaacccatttcacccaattgatagacctgacggagttattcaaatgggtctcgctgaaaatcagctttgtggagatttgatgcgtaaatgggttttaaaacatccagaagcttcgatttgtacatcagaaggtgtgaatcaattcagtgacattgccatttttcaagattatcatggcttgcctgaattcagacaagctgtagcgaaatttatggagaagactagaaataacaaagttaagtttgatcctgaccggattgttatgagcggcggcgcaaccggagcacacgagacggttgctttctgtttagctaatcccggcgatggtttcttagttccaaccccttattatccagggtttgatagagatttgagatggagaaccggagtgaatcttgtaccggttacttgtcatagctctaatgggttcaagattacggtggaagccttggaagctgcttacgaaaacgcgagaaaatcgaatattccggttaagggtttacttgtaaccaatccttcaaacccgcttggtacgacgttagaccgggaatgtttgaagtctcttgttaacttcactaatgacaaagggattcatcttattgctgatgagatttatgctgctactacttttggtcaatccgagttcataagtgttgcggaagtaatcgaggagatcgaagattgtaaccgcgatttgatacatattgtgtatagtctatctaaagatatgggtctgcctggtttaagagttggtatagtatactcttacaatgacagggtggttcagatcgcaaggaaaatgtcgagtttcggtcttgtttcgtcacaaacgcagcatttgatcgctaaaatgttatccgatgaagagtttgtagacgagtttatccgcgagagcaaattgcggttagctgcaaggcacgctgagataaccaccggtttagatggtttagggattggttggttaaaggccaaagccggtttgttcttgtggatggatttaagaaatcttttgaagacagcaacgtttgattcggaaaccgaactatggcgtgtgattgttcaccaagtgaagctcaacgtgtctccaggcggttcgttccattgccatgaaccgggatggtttagagtatgttttgcgaatatggaccataagacgatggagacagctctagagaggattagagtgttcactagccaacttgaggaggagactaaaccgatggctgcaacaactatgatggctaaaaagaagaagaagtgttggcagagtaacctcaggttaagctttagtgacacgaggcggttcgatgatggcttcttctcgcctcattcgcctgtgccgccttctccgctagtccgtgcacagacttaa

SEQ ID NO: 105 - skipped

SEQ ID NO: 106 - DNA, 800 bp, Arabidopsis thaliana
atgacggcggattctcaatctgattatgcttttcttgagtccatacgacgacacttactaggagaatcggagccgatactcagtgagtcgacagcgagttcggttactcaatcttgtgtaaccggtcagagcattaaaccggtgtacggacgaaaccctagctttagcaaactgtatccttgcttcaccgagagctggggagatttgccgttgaaagaaaacgattctgaggatatgttagtttacggtatcctcaacgacgcctttcacggcggttgggagccgtcttcttcgtcttccgacgaagatcgtagctctttcccgagtgttaagatcgagactccggagagtttcgcggcggtggattctgttccggtcaagaaggagaagacgagtcctgtttcggcggcggtgacggcggcgaagggaaagcattatagaggagtgagacaaaggccgtgggggaaatttgcggcggagattagagacccggcgaagaacggagctagggtttggttaggaacgtttgagacggcggaggacgcggcgttggcttacgacagagctgctttcaggatgcgtggttcccgcgctttgttgaattttccgttgagagttaattcaggagaacccgacccggttcgaatcaagtccaagagatcttctttttcttcttctaacgagaacggagctccgaagaagaggagaacggtggccgccggtggtggaatggataagggattgacggtgaagtgcgaggttgttgaagtggcacgtggcgatcgtttattggttttata

SEQ ID NO: 107 - DNA, 732 bp, Arabidopsis thaliana
atgtacggacagtgcaatatagaatccgactacgctttgttggagtcgataacacgtcacttgctaggaggaggaggagagaacgagctgcgactcaatgagtcaacaccgagttcgtgtttcacagagagttggggaggtttgccattgaaagagaatgattcagaggacatgttggtgtacggactcctcaaagatgccttccattttgacacgtcatcatcggacttgagctgtctttttgattttccggcggttaaagtcgagccaactgagaactttacggcgatggaggagaaaccaaagaaagcgataccggttacggagacggcagtgaaggcgaagcattacagaggagtgaggcagagaccgtgggggaaattcgcggcggagatacgtgatccggcgaagaatggagctagggtttggttagggacgtttgagacggcggaagatgcggctttagcttacgatatagctgcttttaggatgcgtggttcccgcgctttattgaattttccgttgagggttaattccggtgaacctgacccggttcggatcacgtctaagagatcttcttcgtcgtcgtcgtcgtcgtcctcttctacgtcgtcgtctgaaaacgggaagttgaaacgaaggagaaaagcagagaatctgacgtcggaggtggtgcaggtgaagtgtgaggttggtgatgagacacgtgttgatgagttattggtttcataa

SEQ ID NO: 108 - DNA, 678 bp, Arabidopsis thaliana
atgaggagaggaagaggctcttccgccgtcgccggacctaccgtcgttgccgccatcaacggatctgtaaaagaaatcagattcagaggcgtaaggaagagaccttggggacgattcgcagctgagatccgtgatccatggaaaaaagctcgtgtttggttaggtactttcgattccgccgaagaagctgctcgcgcttacgactccgccgctcgtaacctccgtggtcctaaagccaaaactaatttccccatcgattcttcttctcctcctcctcctaatctccgatttaatcagattcgtaatcaaaatcaaaaccaagtcgatccgtttatggaccaccggttattcaccgaccatcaacaacagttcccgattgttaaccggcctactagtagcagcatgagcagcaccgttgaatcgtttagcggacccagacctacgacgatgaaaccggccacgacgaagagatatcctagaactccaccggttgttccggaggattgtcacagcgattgcgattcgtcgtcgtctgtaatcgacgacgacgacgatatcgcatcgtcttcacggcgacggaatccgccgtttcaattcgatcttaattttccaccgttggattgtgttgacttgttcaatggcgctgatgatcttcactgtaccgatctacgtctctaa

SEQ ID NO: 109 - DNA, 990 bp, Arabidopsis thaliana
atgtcgactatagatgagtcggtcattcgatccaacggctctgagtccacgaaacacgcaaccaagtgctttttgaaaattttatcaatggcgactcctaacgaagtatctgcactttggttcatcgagaaacatctactcgacgaggcttctcctgtggctacagatccatggatgaagcacgaatcatcatcagcaacagaatctagctctgactcttcttctatcatcttcggatcatcgtcctcttctttcgccccaattgatttctctgaatccgtatgcaaacctgaaatcatcgatctcgatactcccagatctatggaatttctatcgattccatttgaatttgactcagaagtttctgtttctgatttcgattttaaaccttctaatcaaaatcaaaatcagtttgaaccggagcttaaatctcaaattcgtaaaccgccattgaagatttcgcttccagctaaaacagagtggattcaattcgcagctgaaaacaccaaaccggaagttactaaaccggtttcggaagaagagaagaagcattacagaggagtaagacaaagaccgtgggggaaattcgcggcggagattcgtgacccgaataaacgcggatctcgcgtttggcttgggacgtttgatacagcgattgaagcggctagagcttatgacgaagcagcgtttagactacgaggatcgaaagcgattttgaatttccctcttgaagttgggaagtggaaaccacgcgccgatgaaggtgagaagaaacggaagagagacgatgatgagaaagtgactgtggttgagaaagtgttgaagacggaacagagcgttgacgttaacggtggagagacgtttccgtttgtaacgtcgaatttaacggaattatgtgactgggatttaacggggtttcttaactttccgcttctgtcgccgttatctcctcatccaccgtttggttattcccagttgaccgttgtttga

SEQ ID NO: 110 - DNA, 1056 bp, Arabidopsis thaliana
atggctacaccaaacgaagtatcagctcttttcctcatcaagaagtatctcctcgacgaattgtctccgttgcctactactgccaccaccaatcgatggatgaacgatttcacgtcatttgatcaaaccggtttcgagttttctgaatttgaaaccaaaccggaaataatcgatctcgtcactcccaaaccggagatttttgatttcgatgtgaaatctgaaattccatctgaatcgaacgattccttcacgttccaatcgaatcctcctcgcgttactgttcaatccaatcgaaaaccgccgttgaagatcgcaccaccgaaccgaaccaagtggattcaattcgcaaccggaaatcctaaaccggaacttcccgtaccggttgtagcagcagaggagaagaggcattacagaggagtgaggatgaggccgtgggggaaattcgcggcggagattcgagacccgactcgtcgtggaactcgtgtttggctcgggacgtttgagacggcgatcgaagcggctagagcttacgacaaagaagcgtttagactacgaggatcaaaggcgattctgaatttcccgcttgaagttgacaagtggaatccacgcgctgaagatggtcgtggcctgtacaacaaacggaagagagacggcgaggaggaggaagtgacggtggttgagaaagtgctaaagacggaggagagttacgacgttagcggcggcgagaatgttgagtcaggtttgacggcgatagatgactgggatttgacggagtttctgagcatgccgcttttatcgccgttatctccacacccacccttgttgtatgctgacgtggaattatgctatatcttttgcttattttatgttcacattcgagcaaaatttattcattcgtttatttgttttttaatacaactcttgatatttctaaattctaaccaatcaccttatttagcggctactgagacaaaaatcgcatgtaaaggcgaatcaatatggaaagaacagagaacacataacacgaagctccgatcaaatgactttttatcatag

SEQ ID NO: 111 - DNA, 1782 bp, Arabidopsis thaliana
atggcggctttgtcttcctccgtcaccacccgatcatatcattccggttatttggcttctttctcaccggttaacggtgaccgacatcgatcactctcgttcctgtctgcttctcctcaaggattgaatcctcttgacctctgtgttagattccagaggaagtctggtcgtgcttctgtctttatgcaagatgtcactaattcaaattcatcagagagtaaaacttctcttaagggattgaaagatgaggtgctatcagctttatctcaagaagcagccaaggttggagtagaatctgatggtcaaagccagtcaacagttagtattacggtggttggagcctctggtgatcttgctaagaagaagattttcccggctcttttcgccctttactatgaaggttgtctccctgagcattttacaatatttggatattctaggagtaagatgacagatgttgaacttagaaacatggtcagcaaaaccctcacttgcagaattgataagagggcaaactgtggtgaaaagatggaagaatttctcaagagatgtttttaccattctggtcagtatgattctcaggaacattttactgaattggataagaagctcaaggaacatgaggctggaagaatctcaaaccgcctcttttatttgtctatccctccaaatatatttgtagatgctgtgaaatgtgcaagcacttctgcttcatctgtcaatggatggactagggttatcgtcgagaaaccttttggtcgagattctgaaacctcggctgctttaacgaaatccctcaagcagtatttggaggaagatcaaatttttaggatagaccattacctaggaaaggagctagtcgagaacttatctgttcttcgattctcaaaccttatatttgagccgctatggtcaaggcagtacataaggaacgtgcaatttatattttctgaggatttcggcactgaaggacgtggagggtactttgacaattacggaataataagagatataatgcagaatcatctgcttcaaatcttagccctctttgccatggaaacgcctgttagtttggatgcagaggatatcagaaatgaaaaggttaaggtgttacgttcaatgaggccaattcgagttgaagatgtggtaataggacaatacaagagccacacaaagggaggagtcacatatcctgcctacaccgatgataaaactgtaccaaaaggtagtctgactccaacatttgcagctgctgctcttttcatcgacaatgcaagatgggacggtgtgccctttttaatgaaagcgggcaaagcactacacaccaggagtgcagagataagggtgcagttcaggcatgttccggggaatttgtataaccggaatactggttctgatcttgatcaagctacaaatgagcttgtgatccgtgtccaaccagatgaagcaatctatttgaaaatcaacaacaaggtccctggtttaggaatgagattagatcgcagtaacttgaatcttctatactcagcaaggtattcaaaggagataccagatgcatatgagaggcttctgttagatgcaatagaaggagaaagaagattgttcataagaagtgacgagcttgatgcagcttggtcgctattcactccattgcttaaagagattgaagagaagaagagaatccctgagtactatccttatggtagccgtggtcctgttggtgctcattatctagctgctaaacacaaggtgcaatggggtgacgtcagtattgaccagtaa

SEQ ID NO: 112 - DNA, 1779 bp, Arabidopsis thaliana
atggatctccgtcggaggcctcctaaaccaccggttaccaacaacaacaactccaacggatctttccgttcttatcagcctcgcacttccgatgacgatcatcgtcgccgggctacaacaattgctcctccaccgaaagcatccgacgcgcttcctcttccgttatatctcacaaacgccgttttcttcacgctcttcttctccgtcgcgtattacctcctccaccggtggcgtgacaagatccgttacaatacgcctcttcacgtcgtcactatcacagaactcggcgccattattgctctcatcgcttcgtttatctatctcctagggttttttggtattgactttgttcagtcatttatctcacgtgcctctggtgatgcttgggatctcgccgatacgatcgatgatgatgaccaccgccttgtcacgtgctctccaccgactccgatcgtttccgttgctaaattacctaatccggaacctattgttaccgaatcgcttcctgaggaagacgaggagattgtgaaatcggttatcgacggagttattccatcgtactcgcttgaatctcgtctcggtgattgcaaaagagcggcgtcgattcgtcgtgaggcgttgcagagagtcaccgggagatcgattgaagggttaccgttggatggatttgattatgaatcgattttggggcaatgctgtgagatgcctgttggatacattcagattcctgttgggattgctggtccattgttgcttgatggttatgagtactctgttcctatggctacaaccgaaggttgtttggttgctagcactaacagaggctgcaaggctatgtttatctctggtggcgccaccagtaccgttcttaaggacggtatgacccgagcacctgttgttcggttcgcttcggcgagacgagcttcggagcttaagtttttcttggagaatccagagaactttgatactttggcagtagtcttcaacaggtcgagtagatttgcaagactgcaaagtgttaaatgcacaatcgcggggaagaatgcttatgtaaggttctgttgtagtactggtgatgctatggggatgaatatggtttctaaaggtgtgcagaatgttcttgagtatcttaccgatgatttccctgacatggatgtgattggaatctctggtaacttctgttcggacaagaaacctgctgctgtgaactggattgagggacgtggtaaatcagttgtttgcgaggctgtaatcagaggagagatcgtgaacaaggtcttgaaaacgagcgtggctgctttagtcgagctcaacatgctcaagaacctagctggctctgctgttgcaggctctctaggtggattcaacgctcatgccagtaacatagtgtctgctgtattcatagctactggccaagatccagctcaaaacgtggagagttctcaatgcatcaccatgatggaagctattaatgacggcaaagatatccatatctcagtcactatgccatctatcgaggtggggacagtgggaggaggaacacagcttgcatctcaatcagcgtgtttaaacctgctcggagttaaaggagcaagcacagagtcgccgggaatgaacgcaaggaggctagcgacgatcgtagccggagcagttttagctggagagttatctttaatgtcagcaattgcagctggacagcttgtgagaagtcacatgaaatacaatagatccagccgagacatctctggagcaacgacaacgacaacaacaacaacatga

SEQ ID NO: 113 - DNA, 1614 bp, Arabidopsis thaliana
atgtcagtagttttactctcttctacttctgcaacaatcaccaaatcccaatccaaaaagattccctttttatctcccaccacaaaattcccattaaaggtctcaatttctccatcaagatcgaaacttttccacaaccctttacgcgtggcggcgccgccgtctgtacccacttcggattcgacggaggagaagcggatcgaagaagaatacggcggagataaggaagaagaagggtctgagtttaagtggagagatcattggtatccagtttctttggttgaggatttggatccgaatgtgccaaccccgttccagctcttgggtcgagaccttgtactctggtttgatcggaatgatcagaaatgggcagcctttgatgatctctgccctcaccggctcgctcctttatctgaaggaaggttggatgagaatggacacttgcaatgttcgtatcatggatggtcatttggtgggtgtggatcttgcactaggattcctcaggctgctacttcaggtcctgaagctcgtgctgttaaatccccgagagcttgtgctattaagttcccgacaatggtgtctcaaggtcttctctttgtgtggcctgatgaaaatggttgggatagagccaattcaattgaaccccctaggttgccggatgatttcgataaaccggaattttcgacggtgacaattcaaagggatcttttctatggatatgatactctcatggaaaatgtatctgatccttcccatatagattttgctcatcacaaggttacaggaagaagagacagagccaaaccattgccgttcaaggtggagtcaagtgggccttggggtttccaaggtgcgaatgatgacagtccaaggataaccgcaaaatttgttgctccgtgctattctatgaacaaaattgagttagatgcgaaactaccaatcgtcggtaatcaaaaatgggtcatttggatttgctcattcaatataccaatggctccaggaaagacccgttccatcgtttgcagcgcccgtaacttctttcagttctctgtaccaggaccagcttggtggcaggttgtaccaagatggtatgaacactggacttcgaacttagtctatgacggagacatgatcgtacttcaaggacaagagaaagtattcctcgctaaatcaatggagtcaccagactacgacgtgaacaaacagtacacaaagctcacattcactccaacccaggcagaccgttttgttctagcattcagaaactggctcagacggcatggtaagagtcagcctgaatggttcggctccaccccgtctaaccaacctctcccttccactgtcttaaccaagcgtcagatgctagatagatttgatcagcatacacaagtatgctcttcctgcaaaggagcttacaacagtttccaaatcctcaagaagtttctcgttggcgcgacggttttctgggccgccacggctggtgttccttctgatgttcagattcgactggttcttgctggtttatcactgatatcagctgcttctgcatatgctttacatgaacaagagaagaactttgtgtttagagattatgtacattctgaaatcgagtag

SEQ ID NO: 114 - DNA, 3567 bp, Arabidopsis thaliana
atgagctttcaagtcaggcgagataggagcgatgataggtctcatcgattcaatcatcagcaaacgtggattcctagaaactcatctacctcgagcgtggtggtaaatgagcctttgcttcctcctaatacagatagaaattctgaaacccttgatgctggttctgcatcccgtcctgtttatctgcaaaggcagcataacgcttctggtcctccgtcctataaccaccaccaaaggagtagtaacattggtccacctccacctaatcaacatagaagatataatgcgcctgataaccagcatcaaaggagtgataacattggtccacctcaacctaatcaacatagaagatataatgcgcctgataaccagcatcaaaggagtgataacagtggtccacctcaaccttatcgacatagaagaaataatgctcctgagaaccagcaccaaaggagtgataacattggtccacctccacctaatcgacaaagaaggaataatgcttctggaactctgccagataatcgccaaagagttgcatctaggacgcggcctgtgaatcaggggaaaagggtagcgaaggaggagaatgttgtgttgacagacccaaacttgcctcaacttgttcaagagttacaggagaagcttgtcaagagttctattgagtgtatgatttgttatgacaaggttgggaggtctgccaatatctggtcatgctccagctgttattccatcttccatatcaactgtatcaagaggtgggctcgagcaccaacttcagttgatttgctagctgagaaaaaccaaggtgataactggagatgtccaggttgccaatctgtacagttgacatcatctaaagagatttcctatcggtgcttttgtggaaagagaagagatccaccgtctgacccatatctcactccacactcatgcggggaaccatgtgggaaaccgctggagaaagagtttgcacctgctgagacgactgaagaggatctttgtcctcatgtatgtgttttgcagtgtcatcctggtccatgtcctccctgtaaagcctttgctccacctcgtagctgtccttgtgggaaaaagatggttactactagatgctccgagcggagatctgatcttgtttgtgggcagcgttgcgataagcttcttagttgcgggcgtcatcaatgtgaaaggacatgtcatgttggcccttgtgatccttgtcaggtactggtaaatgccacatgtttctgcaagaaaaaagtggagactgtcatttgcggtgatatgaatgtgaagggggaattgaaagcagaagatggtgtctattcatgcagttttaactgtgggaagcctcttggatgtggtaatcatttctgttccgaggtatgccatcctggaccttgcggggactgtgacttactgcccagtagagttaagacatgctattgtgggaatacgcgtttagaagaacagatcaggcagagttgcttggacccaattccttcttgttcaaatgtatgtaggaagcttcttccttgtaggttacatacttgcaatgagatgtgccatgcaggtgattgcccgccttgtttagtccaagttaaccagaaatgccggtgtgggtcaacatccagggctgtggaatgctacataacaacttcctcagaggcagagaagtttgtgtgcgctaagccatgtggacgtaagaagaactgtgggagacatagatgtagcgagcgttgctgccctctcttgaacgggaagaagaatgatttatctggcgattgggacccacatgtctgccaaataccttgtcagaagaagctaaggtgtgggcagcattcctgtgaatctttatgtcacagtggacattgccctccttgtctcgagatgatcttcactgatcttacatgtgcttgtggaagaacttcgattcctcctccactatcatgtgggacacctgttcctagctgtcagcttccatgcccgattcctcagccttgtggccattctgatacgcatggatgccattttggagattgtcctccttgttctacccctgtggaaaagaagtgcgttggtggtcatgtggttctcagaaacataccctgtgggttgaaagacattagatgtaccaagatttgtggaaagacgaggcgttgtggcatgcatgcttgtgccagaacttgtcacccggagccttgtgacagcttcaatgaatctgaagcaggtatgcgtgttacgtgtagacagaaatgtggtgctcctagaacagattgcagacacacttgtgcagcactctgccatccttctgcgccttgccctgacctaagatgtgaattttcagtcacaattacttgttcatgtggtcgtataaccgctacggtcccttgtgatgctgggggaagaagtgccaacggttctaatgtttactgtgcggcctatgatgaagcctctgttttacagaagcttccagctccacttcagcctgttgaatcgagcggaaaccgtatccccctcgggcagagaaagctttcgtgtgatgatgagtgtgcgaagctggagcgtaagcgggttcttcaagatgcatttgatataactcccccaaatctggaggcattacatttcagcgagaattctgctatgacagagattatttcagacctttataggcgtgatccaaagtgggtactggctgttgaagagcgctgcaagttcttggtacttgggaaagcaagaggaagcacaagtgcccttaaggtccatatcttctgcccgatgcagaaggataaacgagacacggttcgacttatagctgagaggtggaaacttggtgttagcaacgcagggtgggagccaaaacggtttacagtggttcacgtaacagcaaaatcgaaaccgccaacaaggatcattggagctaggggtggtgctatctcgataggagggccacacccaccgttctatgattcgctggtggatatggatcctggacttgtggtttcttttctggatcttccgagagaggcgaatatcagcgccttggtactgagatttgggggtgaatgtgagcttgtttggctgaatgacaagaatgctttagcggtgttccacgaccatgcccgagctgccactgccatgaggaggcttgagcacggttcagtatatcatggagctgtggttgtccagagcggcgggcaatctccatcacttaataatgtatggggaaaattacctggcagctcggcgtgggatgttgacaaaggaaatccatggaggagagctgtgattcaggagagtgatgactcctggggagctgaagattcccccattggaggatcatctacagatgctcaagcctctgcgctgagatcagcaaagagcaactctccaattgttacctcggttaaccgttggagtgttttagagcccaagaaggccagcacatccactttggagccaattgctcagatagaagagagcagtagttcaaaaactaccggtaaacaaccggtggaaggctccggtgaagaagtggtggatgactgggagaaggtatgtgagtga

SEQ ID NO: 115 - DNA, 1995 bp, Arabidopsis thaliana
atggctgcgtgtacactccacgcgctctcagtcaccttattcctccttctcttctttgccgtgtcaccggcgaaagctcagcaaccgtacgtcaacaaccaccagctcgcctgcgaggtccgtgtctacgacaacataaccaacggattcacatgtaacggcccaccttcttgccgctcatacctcactttctggtctcaaccaccgtacaacacggcggactcaatcgccaaactcctcaacgtctccgccgcagagatccaatcaatcaacaacctccccacagccaccaccagaatcccaacccgtgaattagtcgtgatcccagctaactgctcctgctcctcctccagcggaggattttaccaacacaacgccacttacaatctctccggtaacagaggagatgaaacctatttctcagtggctaacgatacttaccaagctttatccacgtgtcaagccatgatgtcacaaaaccgttacggcgagagacaactaacccccggcttaaacctccttgttcctctccgatgtgcttgtcccaccgccaaacaaaccaccgccggatttaaatatctcctgacttacttagtcgccatgggagatagtatctccggcatcgccgagatgttcaacagcacatccgccgccataaccgaaggtaacgagcttacatcagacaatatcttcttcttcacaccggttctagttcctctcacaactgaacctaccaaaatcgttatatctccgtcgcctcctcctccacccgttgttgctacgccgcctcaaacgccagttgatcctccgggatcttcttcttctcacaaatggatctacatcggaattggaatcggagctggtttgcttctcttactctcaatcttagctctctgcttctacaaacgaaggtctaagaagaagtcattaccgtcgtcgttgccggaggagaacaagctctttgattcatcaaccaaacaatctattcccacaacaacaacgactcaatggtcaatagatttatccaattcatcagaagctttcggtttaaaatccgccatagaatctctaacactatacagattcaacgatcttcaatcagctacttcgaatttcagcgacgaaaacagaatcaaaggctctgtttatcgcgcgacaatcaacggcgacgatgccgctgtgaaagtgatcaaaggagatgtttcttcctctgagatcaatcttttgaagaagctaaatcattctaatatcatccgtctctcaggtttctgtatccgtgaaggaacatcgtacctcgtcttcgagtattcagagaatggatcgatcagtgattggcttcactcgtcgggcaagaagagtttgacatggaaacagagagttgaaatagcaagggatgtggcagaggcgttagattatctccataactatataactccacctcatattcataagaacttggaatcaacaaacatacttctggattctaatttcagagccaagattgcgaatttcggtgttgcgaggattcttgatgaaggtgatcttgatcttcagttaacaagacatgttgaaggaacacaaggctacttagctccagagtatgtggagaatggagtcattacttcgaaactagacgtgtttgcttttggagttgcggttcttgagcttctttcggggagagaagcagtaacgatacataagaagaaggaaggagaagaagaagtggagatgttgtgtaaagtgataaacagtgtgcttggaggagagaatgtgagagagaagttaaaagagtttatggatccatctctagggaatgagtatccgttggagctggcttacaccatggctcagcttgctaagagctgtgtcgcaactgatcttaactcgcgtccatctgtcactcaggttctaaccacgctctcaatgatcgtctcctcctccatcgattgggagccttctgatgaccttcttcgttccggctctcttggcaactag

SEQ ID NO: 116 - DNA, 2376 bp, Arabidopsis thaliana
atggcgtccgtatctccatctccgtcgtgttccactatacccataccacttcgacgaacatctttcgccgttgctgagttgagacgattaaaacaaagaagagcgatcccacctgtgtccgtcggtctcggacacttcgctgatgttgtacgcaatgacgttgatttcctgaagaacaaaatcggtatcggactccgttgggctaacgaggcttttcgtgtaccggaagtgactaaatccgctgaggaactgttttggcttaggcatcttgaggatcatacttctcagaatttgaagtcacaatcttggcctcagccttcctactcagggctcactggggtggatttgttcatggctgatgtcaaagccttggagacatatgctggttacttttacagtctttctaagatgtggtcaagaccacttcctgaagtttatgattcacaagctgttgcagattactttaattgcaggcctcatgtcgttgcctttaggcttctcgaggtattttctgcgttcacgattgctgccatcagattacgaacatcagcatcagttaagggcaaaagtttagaagcttcagagcagatttttgggatggtgttgaaagaaaccatgctacatttgggcccaacttttatcaaagttggtcaatcgctttccacgaggccagatatcattgggactgaaatctccaaggcactatctgaactgcatgaccgaatccctccctttccctggcctgaggctgtaaaaatccttgaaggggaattaggtggtcctgtcgaatcattctttagtcagttttcgcaagaaactgtagcagcagcatcctttggtcaggtctaccgaggaaggaccctcgatggtgcagatgttgcagtgaaagttcagcgccctgatctgagacatgcagtgctacgcgacatctacattctgcgacttgggttaggtgtattgcgaaaggtagcaaagagagaaaatgacattcgtgtatatgctgatgagcttggaatgggtttggctggagaattggactttactttagaggctgccaatgcctctgaatttcaggaagctcacgcacgattttcctatatccgggttccaaaagtatatcagcatctaacgcgcaaaagagttttgaccatggaatggatggttggtgaaagcccaaccgatctactcgcaatatcttctggttactctgatcatgacaatgagagtcatgagaaacaaaaaattgaagcgagaaggcgtcttcttgatctggtgaacaaaggggtagaggcaactctagttcaactccttgatacaggtattttgcatgcagatccgcatcctggaaaccttcgttacacaacatcaagacaaatagggtttttggactttggtttagtttgtcggatgcaaagaaaacatcagcttgccatgctcgcatcaattgtgcatatcgtaaatggtgattgggcctgtcttgttgaatcgttgattgatatggatgtcatcacgccaggcgttaatacccgtcgttttactctggatctggaatatgcattgggagaggttaaacttataaacgggattcctgatatcgagttcaccaaggtgcttagtaaaatagtcaatgtggccctgaagtatcagctacgcatgccaccatacttcacacttgtcctccgttctcttgcttgcttggaaggtctggctgcagctggagatccaaattttaagacatttgaggcagcatacccttttgtggttcaaaagctcatcactgaaaattcagctgcaacaaggaagattcttcattcggcagtccttaaccgaaagaaggaattccgatgggaaagggttgctcttttcctgagtaaaagttctacgaggaaacaatcgccactgctaaagttatcaagggatgaaacttctgttgatagtagttccaatctaacggacaaagatgctgacaataacgggacttcactgatccggacatttatttcaagagaggcacttgtcatacgccagaaactttgcatgacgattgcaactacgatgtaccaatggatggttggaagccttggaattgaatcccttaaattcatttctctttcagacccaccaccatcttcaggaatcaacattacagtcaaagacttcaagattctaatcaatgacaagcgggtcagagtaatactgagaaagatactggagtctgcaaagagtgaccgagttttgatgctcagattctgctggacttcctttgtcatgtctctcaccaccactgcgcttgcttgccatcggtttgtgatctcggtctctgaaggttacgtcaactacttatctctgtctgctccagtcgcacttcgtacctga

SEQ ID NO: 117 - DNA, 1266 bp, Arabidopsis thaliana
atggcgccggagaagattccggagccgtcggttcactcagaagaagaggtgtttgaggatggagaagagatcgatggtggtgtgagactaatgtatttggctaatgaaggtgacattgaagggattaaggagcttattgattcagggattgatgctaattacagagacattgatgatcggactgctttacacgtggcggcttgtcaaggattgaaagatgttgttgagcttcttcttgatcggaaagctgaggttgatcctaaagatcgttggggaagcactccatttgcagatgcgatattttacaagaacattgatgttatcaagattcttgagatacatggagctaaacatccgatggctccaatgcacgttaagactgctcgtgaagtccctgagtatgaaataaatcctagtgagcttgatttcactcaaagcaaagagataacaaagggaacttactgtatggcaatgtggcgtggtattcaagttgcggtgaaaaagctggatgatgaagttttgagcgatgacgatcaagtgaggaagttccatgatgagcttgcattgctccaaaggcttaggcatccaaacattgtgcagtttcttggtgctgtaacccaaagtaacccaatgatgattgtgactgaatatttgcccaggggggatttgcgtgaattgctcaaacgaaaaggacaattgaaaccagctactgctgttagatatgcccttgatattgctagaaacattctgcgggatgattcagggcatctgaaagttgcagactttggagtaagcaagcttgttactgttaaagaagacaagccttttacatgtcaagacatttcttgtcgatatatagctcccgaggttttcactagtgaagaatacgatacaaaagctgatgttttctcatttgcattgatcgttcaggagatgatcgaaggccgaatgccgtttgctgaaaaggaagacagtgaagcttctgaagcttatgctggcaaacatcggccattattcaaagctccatcaaagaattacccacatggtcttaaaacgttgatagaagaatgctggcatgagaaacctgcaaagcgaccaactttcagagagatcattaaacgacttgagtccattcttcaccacatgggtcacaagcgacaatggaggatgaggccattgacatgctttcagaatttcgagcacaagaagaaacataattgggatttgagcagccatgacggctcatcatccggttcacatttgtga

SEQ ID NO: 118 - DNA, 480 bp, Arabidopsis thaliana
atggaatcgtcgtcgtcgggaacaacttcgtcgacgattcaaacgtcgtcaggatcggaggagagtctcatggagcagaggaaacgtaaacggatgctctcaaaccgtgaatctgcaaggagatcaagaatgaagaaacaaaagctcctagacgatctaacggctcaggttaatcatctgaaaaaagagaacacggagatcgtgacaagtgtcagcatcacaacgcaacactacctaaccgttgaagcagagaactctgttctcagagctcagcttgatgaacttaaccacaggctccaatctctcaacgacatcatcgagttcctcgacagtagcaacaacaacaacaacaacaacatgggcatgtgttcgaaccctctggttggtttggagtgtgatgatttcttcgtgaatcagatgaacatgtcttatattatgaaccagcctctcatggcgtcttctgatgctttaatgtattaa

SEQ ID NO: 119 - DNA, 1488 bp, Arabidopsis thaliana
atggttttctctgtttctatatttgcctctcttgcaccatacttaatctcagcatttcttcttttccttctcgtcgagcaactctcttaccttttcaagaaacgaaacatccctggccctttcttcgtccctccaatcatcggaaacgccgttgcactcgttcgtgaccccacttccttctgggacaagcaatcctccacggcgaacatctcaggcctctccgccaactacctcatcggaaaattcatcgtctatatcagagacactgagctttcccatcaaatcttctcaaacgttcgtcccgatgccttccaccttatcggacatccctttggtaagaagctcttcggtgaccacaaccttatatacatgttcggcgaggatcacaaatccgttcgccgtcagctagcacctaacttcactcccaaggcactgtccacttactctgccctccagcaattagttattctccgtcatctacggcagtgggaggggagtacctccggcggatctcgtccagtgtcactgcgacagcttgtccgtgaactcaacctagaaacttcgcagacggtttttgttggaccctaccttgacaaggaagccaagaacaggttccgtactgattataatttgttcaatctcggatccatggctctccccatagacctccctggctttgcgttcggcgaggctcgcagggctgtaaagaggctaggggagacgctcggcatttgcgcgggaaaatccaaagcgaggatggcagcaggagaagaaccagcatgcctaatcgatttctggatgcaggcgatcgtcgcggagaatccgcagccaccgcactcgggagacgaagagatcggtggtttgctcttcgattttctctttgccgctcaagacgcgtccacgtcatcactcctctgggccgtgacgcttcttgattcagagccagaggtgctgaacagagtaagagaagaagtagccaagatctggtcacctgagtccaacgccttgatcaccgttgatcagctcgcagagatgaagtatacacgctccgtggcgcgtgaggtcattagatacaggcctcctgcaactatggtcccacacgtcgctgctatagacttccctctcacggaaacgtacactatcccaaaaggtacaattgtctttccttcggttttcgactcctcgttccaagggtttactgaaccggaccggtttgatcctgaccggtttagcgagacaagacaagaggaccaggtgttcaaacgcaacttcctagcttttggatgggggcctcaccaatgcgtaggccagcgttacgcgttgaaccacctcgtactcttcattgcaatgttctcgtcgttgttggatttcaagaggcttcgatcagacggttgtgatgagatcgtgtactgccctactatatcgcccaaggatgggtgcaccgtgttcttgtctaggcgcgtcgcaaagtatcccaacttttcctaa

SEQ ID NO: 120 - DNA, 963 bp, Arabidopsis thaliana
atgggttgccaagacgaacaattggtgcaaacaatatgcgatctctacgaaaagatctcaaagcttgagagtctaaaaccatccgaagatgtcaacattctcttcaagcagctcgtttccacatgcataccaccaaaccctaacatcgatgtcaccaagatgtgtgacagagtccaagagattcgacttaatctcatcaagatttgtggtctagccgaaggtcacttagaaaaccatttctcttcgatcttgacctcttaccaagacaacccacttcatcatttaaacattttcccttattacaacaactatttgaaactcggaaagctcgagttcgacctcctcgaacaaaacctaaatggctttgtcccaaagagtgtggctttcattggatctggtcctcttcctctcacttccatcgttcttgcttcattccatctcaaagacacaatctttcacaactttgacatcgacccatcagcgaactcactcgcttctcttctggtttcctctgatccagacatctctcaacgcatgttcttccacaccgttgatataatggacgtgacagagagcttaaagagctttgatgtcgtgtttctagctgctcttgttggaatgaacaaagaggagaaagttaaagtgatcgagcatctgcagaaacacatggctcctggtgctgtgctcatgcttaggagtgctcatggtccgagagcgtttctttatccgatcgttgagccgtgtgatcttcaggggttcgaggttttgtctatttatcacccaacagatgatgttatcaactccgtggtgatctctaaaaagcatccagttgtttcaattgggaatgttggtggtcctaattcatgcttgctcaagccttgcaactgttccaagacccacgcgaaaatgaacaagaacatgatgatcgaggagttcggagctagggaggaacagttgtcttaa

SEQ ID NO: 121 - DNA, 2016 bp, Arabidopsis thaliana
atggcgtcgtcttcagcttcggcgacggtggctgttgataaagctaccagcgatcttttgttaggtcctgattggactacgaatatggaaatctgcgattctgttaattctcttcactggcaggcgaaagatgtagttaaagctgtgaaaaagaggctgcaacataagagttcgagagttcaactacttgctcttacgcttttggagacgttggtaaagaactgtggagattatttgcaccatcaagttgcagagaaaaacattttaggggaaatggtcaaaattgtgaaaaagaaggcagatatgcaagtaagagataagatattggtcatggtggactcttggcagcaagcttttgggggtccagagggaaaatatccacaatattattgggcatacgatgagttaaggcgttctggagttgaattcccccggcgttcacctgatgcgtcccctattataacaccaccagtgagtcatccaccgttaagacagcctcaggggggctatggagtacctccagctggctatggagtacatcaagctggttatggagtacctcaagcgggttatggaatacctcaagctggctatggagtacctcaagcggggtatggaatacctcaagtgggctatggaatgcccagtggttcttcgagaaggcttgatgaagcaatggcaactgaggttgagggcttaagcttgtcaagtattgaatccatgagggatgtgatggatctcttgggcgacatgctacaagctgtggatcccagtgaccgtgaggctgtgaaagatgaagtcattgttgacttggttgagcgttgtcgttccaatcagaaaaagctgatgcagatgctaacctccactggggatgatgaacttttaggccgggggctcgatctaaatgacagtcttcaaattctgctagctaagcatgatgcaatagcttctggttctcctctgcctgttcaggcttctggttctcctctgtcagttcaggcttcgaaacctgctgactcgagccccaaatcttctgaagctaaagattctagttccatagctggttccagttccccaataccagccactgtttctacaggaaaaagcccaattgatgaggagtacgaagaggaggaagatgagtttgcacaattagctcgaaggcattccaaaccgccagcatctgtgactacagaccctaccagtttagagtctcataatgctgcaagcaatgctcttgctcttgctctgcctgacccccctcctccagtgaacaccacaaaggaacaagacatgattgacctattgagtatcacactgtgtacaccgtcaactccaccggctccatcctctcagccttctcctcctcctcccgctggctcagatcaaaacacccatatctatccacagcctcagccacggtttgatagctatgtcgctccatgggcacagcaacagcaaccgcaacagcctcaagcacagcagggctattctcaacatcaacagcatcaacaacaacagggctattctcaacctcaacattctcaacaacagcagggctactctcaactgcaacagcctcaaccacagcagggctattctcaatcgcaaccgcaagcacaggtccagatgcaaccgtcaactcgacctcagaacccgtatgaatatccgcctccaccatgggcttcaacatcagcaaatgcatactatactccacgggctaatgcaagtgcgtcatacacagacacatcggccctagccggaagatcactacagcaatccaactcattccccacacgagctggagatcctcaggctacttcaactgcaagcaattcaggtgtatctgtaggacagaagccgtttgttccatcatacagattgtttgaagatctggatgtgtttgggagcgcagacgggaagcataataaaccggcgaacagtagtaatggttctcaaaacttgtctgggtctcagacgcagcagagtatgataggaggaaggaaaatgatttaa

SEQ ID NO: 122 - DNA, 1344 bp, Arabidopsis thaliana
atgacggcggaagatattcgccggcgagataaaaaaaccgaagaagaaagaagactaagagacacgtggcgtaagatccaaggagaagacgattgggccgggttaatggatccaatggatccaattcttagatcggagctaatccgttacggcgaaatggctcaagcttgttacgacgctttcgatttcgatcccgcttccaaatactgcggcacctccaggttcacgcgactcgagttcttcgattctctcggaatgatcgattccggttacgaggtggcgcgttacctctacgcgacgtcgaacatcaatctcccgaacttcttctcgaaatcgcggtggtctaaagtctggagcaaaaacgctaattggatgggatacgtcgccgtttcagacgacgaaacgtctcgtaaccgactcggccgccgtgatatcgcgattgcgtggagaggaaccgttacgaaacttgaatggatcgcggatctaaaggattatttaaaaccggtaaccgaaaacaagatccgatgccccgacccggccgttaaagtcgaatccggattcttagatctctacactgacaaagacacaacctgcaaattcgcgagattctcagcgcgtgaacagattttaacggaggtgaaacggttagtggaagaacacggcgacgacgatgattccgatttaagcatcaccgtgacgggacacagtctcggcggcgcgttagcgatattaagcgcgtacgatatagcggagatgagattgaatcggagtaagaaagggaaagtgattccggtgacggtgttgacatacggaggaccgagagttgggaacgttaggtttagggagaggatggaggaattgggagtgaaagtgatgagagtagtgaatgttcacgacgtggttcccaagtcgccgggattgtttttgaacgagagtagacctcacgcgctgatgaagatagcggaggggttgccgtggtgttatagccacgtgggggaggagctggcgttggatcatcagaactcgccgtttcttaaaccttccgttgatgtttctactgctcataatcttgaagctatgcttcatttacttgacgggtatcatggaaaaggagagagatttgtgctgtcgagtgggagagaccatgcgctagtgaacaaagcgtcggactttttgaaagagcatttacaaattccaccgttttggcgtcaagacgcgaataaaggaatggttcggaacagtgaaggtcgttggattcaagccgagcgtctccgttttgaggatcatcattctcctgatatccaccaccatctctctcagctccgtcttgatcatccttgttaa

SEQ ID NO: 123 - DNA, 489 bp, Arabidopsis thaliana
atggttgcgatatcggagatcaagtcgacggtggatgtcacggcggcgaattgtttgatgcttttatctagagttggacaagaaaacgttgacggtggcgatcaaaaacgcgttttcacatgtaaaacgtgtttgaagcagtttcattcgttccaagccttaggaggtcaccgtgcgagtcacaagaagcctaacaacgacgctttgtcgtctggattgatgaagaaggtgaaaacgtcgtcgcatccttgtcccatatgtggagtggagtttccgatgggacaagctttgggaggacacatgaggagacacaggaacgagagtggggctgctggtggcgcgttggttacacgcgctttgttgccggagcccacggtgactacgttgaagaaatctagcagtgggaagagagtggcttgtttggatctgagtctagggatggtggacaatttgaatctcaagttggagcttggaagaacagtttattga

SEQ ID NO: 124 - DNA, 1400 bp, Arabidopsis thaliana
atggatccgacggcgccgttgcttacacacggtggcgaagtagaggaggattatgctccggcgaggagctggaccgatgtgaaacgagtcttatctacagagtcggccaagttgtggatgatagctgctcctgtggggttcaacatcatctgccaatacggagttagctcagtcactaatatctttgtcggtcacatcggcgaagtcgagctctccgccgtctctatctctctttccgtcatcggtaccttctccttcggtttcttgcttggtatgggaagtgctcttgaaacattatgtggtcaagcatatggagctggtcaagtcaatatgttaggagtttatatgcagagatcttggattatcttgttcgtttcttgtttcttcctccttcctatttacatctttgccacgccggttctgagactactcggtcaagcagaggagatcgctgttccagctggacagttcactcttctaaccataccacagctcttctcactggcctttaatttcccaacctctaagttccttcaagcacagagcaaagtggttgctattgcttggattggatttgtggctctttcccttcacgttattatgctctggttgtttataatcgagtttggttgggggacaaatggtgctgctttggcgtttaatattacaaactggggaactgcaattgctcaaattgtttatgtgattggttggtgtaatgaaggctggactggtttatcttggttggcttttaaagagatttgggctttcgttagactctccattgcatctgctgttatgctttgtcttgagatctggtatatgatgagtatcattgttcttactggccgtcttgacaatgcagttatcgctgttgattccctttctatatgcatgaatatcaacggcttggaggctatgttattcatcggaataaatgcagctataagtgtccgtgtatccaatgagcttggcctaggccgtccacgagcagctaagtactctgtctatgtcacggtcttccagtctctcctcattggtcttgtctttatggtggctatcatcatagccagagaccattttgctatcatcttcacaagcagtaaagtacttcagcgtgcagtgtctaagctagcttatcttcttggtataaccatggttctcaacagtgtgcagccggttgtttctggtgtggctgttggaggcggttggcaaggcttagtggcctatatcaacttgggctgttactacatttttggccttccctttggatatcttcttggttacattgcaaactttggagtgatggttagagaatttagaaaatggcatgagttaagtcagttaatgctgaagctaaaacttatgtataatgttttcagggactttggtctggaatg

SEQ ID NO: 125 - DNA, 1137 bp, Arabidopsis thaliana
atgaaggcaattaagggatggcgtctaggcaaaattaattatatgcagtctttgcctggggctcgccatcgtgctcctacaaggaagcctatatggatcattgcagtgctttcactgatagcaatgtttgtaattggtgcttacatgttccctcatcacagcaaagcggcatgttatatgttttcatctaaagggtgcaaggggctaactgattggcttccaccatcactgagggaatattcggatgacgagattgcagctcgtgtagttattagtgaaattttgagctcccctcgtgttataaaaaagagttctaaaattgcatttatgttcttaactcctggtacattgccttttgaaaagctatgggacctctttttccagggtcatgaggggaaattctctgtttatatacatgcatcaaaggatactccggttcacaccagtcgttactttcttaaccgtgagattcgaagtgacgaggtggtctggggtagaatatcaatgattgacgctgaaagacgtttgttgaccaatgctcttagagatcctgaaaatcagcaatttgtattactctctgatagttgtgtgccacttcgaagttttgaatacatgtacaactatatgatgcacagcaatgtcagctatgttgactgctttgatgatcctggtccacatggaacgggcaggcatatggaccacatgttgccggaaattccaagggaagattttcgaaagggtgcacagtggttctctatgaagcgtcagcatgctgtagtaactgtggcagataatctttactactctaaattccgggactactgtgggccaggtgtagagggcaacaagaactgcattgcggatgaacactatctgccaacattcttctatatgcttgatcctactggcattgctaactggactgtgacatatgttgattggtctgagagaaagtggcatccaagaaaatacatgcctgaagatatcacgctcgagttaattaagaacatctcgtccattgacgcagtttcacgcgtaacaagcaatatcatggaacccctagaagctgtatctcactgtaaagtccttttacgagcagagaaaatccgaaatcgtgtgatctttgagaaagcttag

SEQ ID NO: 126 - DNA, 390 bp, Arabidopsis thaliana
atggccaagggaagaggcagtgcatcatggtcggctcgagccatagtgactctcatggctgtgtcagtgttgttgcttcaagctgactacgttcaagctgcaacgtacacggtcggtgactctggtatctggacctttaacgctgtgggttggcctaaaggcaaacactttagagccggcgacgttcttgtgtttaactataatccgaggatgcacaacgtagtgaaggtagatagcggaagttacaacaactgcaaaacaccgacaggggcaaaaccttacacttcaggcaaagatcgtataactttgtctaaaggacaaaactttttcatctgcaattttccaaaccattgcgaaagcgatatgaaaatcgcagtcaccgcggtttga

SEQ ID NO: 127 - DNA, 1395 bp, Arabidopsis thaliana
atgtccgtggctcgattcgatttctcttggtgcgatgctgattatcaccaggagacgctggagaatctgaagatagctgtgaagagcactaagaagctttgtgctgttatgctagacactgtaggacctgagttgcaagttattaacaagactgagaaagctatttctcttaaagctgatggccttgtaactttgactccgagtcaagatcaagaagcctcctctgaagtccttcccattaattttgatgggttagcgaaggcggttaagaaaggagacactatctttgttggacaatacctcttcactggtagtgaaacaacttcagttgaagaagttaaaggagatgatgtcatttgtatttcaaggaatgctgctactctgggtggtccgttattcacattgcacgtctctcaagttcacattgatatgccaaccctaactgagaaggataaggaggttataagtacatggggagttcagaataagatcgactttctctcattatcttattgtcgacatgcagaagatgttcgccaggcccgtgagttgcttaacagttgtggtgacctctctcaaacacaaatatttgcgaagattgagaatgaagagggactaacccactttgacgaaattctacaagaagcagatggcattattctttctcgtgggaatttgggtatcgatctacctccggaaaaggctgctctttacaagtgtaacatggctggaaagcctgccgttcttactcgtgttgtagacagtatgacagacaatctgcggccaactcgtgcagaggcaactgatgttgctaatgctgttttagatggaagtgatgcaattcttcttggtgctgagactcttcgtggattgtaccctgttgaaaccatatcaactgttggtagaatctgttgtgaggcagagaaagttttcaaccaagatttgttctttaagaagactgtcaagtatgttggagaaccaatgactcacttggaatctattgcttcttctgctgtacgggcagcaatcaaggttaaggcatccgtaattatatgcttcacctcgtctggcagagcagcaaggttgattgccaaataccgtccaactatgcccgttctctctgttgtcattccccgacttacgacaaatcagctgaagtggagctttagcggagcctttgaggcaaggcagtcacttattgtcagaggtcttttccccatgcttgctgatcctcgtcaccctgcggaatcaacaagtgcaacaaatgagtcggttcttaaagtggctctagaccatgggaagcaagccggagtgatcaagtcacatgacagagttgtggtctgtcagaaagtgggagatgcgtccgtggtcaaaatcatcgagctagaggattag

SEQ ID NO: 128 - DNA, 1035 bp, Arabidopsis thaliana
atggataattgtactggagaaaatcccatggcttctcagttgaacattctccgatgcccgttcttgaggaacatcaatgagcccactaacctctctttctcttcatccttgccttttcccatccctgcaagagctgggaaaggacctatatttgaagatggtcccaattttgatacggcgtttaggcttttccatggccaagatggagttgtccctctctctgacaccgctcgaactgaagcccagaagcctgtgcctgtattccatccacttgctgctaaggcggccactattagtctctcatcctttggatctggagggccttttggatttgatgcattttctgacatgtttaaaaatcaaaagaagaagtcagattcatccaaaaataagggaggaaaccacgaagccatgggcgacgaatggcttaaaacaggaaactgcccaatagcaaaatcatatcgagctgtaagtggtgtggcaccacttgtggcaaagatcctgcaaccccctccaggcatgaaatttaaatgccctcaagcaatagtcacagctcgagcagcgatatcaaaaacacctttcgccaagaacctccgtccacaacctttaccagctaaagtactagtgatcgggatgctgggcatggcgttaaatgtgcctttaggggtctggagagagcacactgaaaagttttcggcatcttggtttatagctcttcacgcagcggttccattcataggaatactgagaaagtcagtgttgatgcctaaaacagctatggtattcaccatagcagcatcagttttgggacaggtgattgggtcaagagcagagaggcggagactcaagtctgtagctgagaagaagttgacattggaggtaccaaatccgtcttctgttgaagcagatcagatgcaatttgccggagtttcatcagatggaagatgcggtgataaagtggtgatgaagtggaatcccatgatgcttgatgttgcaagccctgtgtcttccggagcagctactgttgtctgctaa

SEQ ID NO: 129 - DNA, 1539 bp, Arabidopsis thaliana
atggatatcatctttgaacaagctttgttccctctattttgctttgtcttatcatttttcataatcttcttcactacaacaagaccccggagctctcgcaaggtcgttccatctccgccgggacctccgcgactgcccatcatcggaaacattcaccttgtcggtagaaacccacaccattcattcgctgacctctcaaaaacatatggaccaatcatgagccttaaatttggaagtttaaacacagtggtcgtaacttcacctgaggctgcaagagaggttctaagaacatacgaccaaatcctctctagccgtacccccactaactcgatacggtccattaatcacgacaaggtttccgttgtctggcttccaccatcgtcgtctcgttggagacttttgagaaaactgtcggcgactcagctcttctcgcctcagcgtatcgaagccacgaaaacgttgagggagaacaaggtgaaggaactcgtgagcttcatgagtgaaagcagcgagagagaagaagctgttgatatatctcgtgctaccttcatcactgctcttaatatcatatcaaacattctgttttctgtcgatctcggtaactacgactcgaataaatccggtgtgtttcaagacacggtgattggtgtcatggaagctgtcgggaatccagacgctgctaacttctttccatttctggggttccttgatctgcaaggtaatagaaagactctgaaggcttgttccgagagattgtttaaggttttccgtgggttcattgatgctaaattagcggaaaaatcattgcgggatactaactctaaagatgtccgggagagagattttgtggatgtgcttctcgatcttaccgaaggagatgaagcagagctcaacactaacgatattgtacaccttctcttggacctgtttggagcgggcacagacacaaactctagtaccgtggaatgggcaatggcagagttacttcgaaaccctgaaacaatggtgaaagctcaggctgagatcgactgtgtgattggtcagaaaggtgttgttgaagagtctgatatctcggcacttccctatctacaagcagtggtgaaggaaactttccggttacatccggctgctccgctactagtcccccgaaaagctgaatcagatgtggaggttcttgggttcatggtgcctaaagacactcaggtatttgtgaacgtgtgggccataggaagagacccgaacgtgtgggagaattcgtcccggtttaagccagagaggtttttagggaaagatatcgacctgagaggtagagattatgagcttacaccattcggagccggacgtagaatatgcccgggattgcctttggctgtgaaaacagtgcctcttatgcttgcttctcttctttattcatttgactggaagcttccaaacggtgtcggttcagaggatttggacatggacgagactttcggtctcacattgcacaagaccaacccgttacatgccgtacccgtcaagaaacgtggccgtaattag

SEQ ID NO: 130 - DNA, 369 bp, Arabidopsis thaliana
atggagaagaactccttcaagctttctaatcctctggagatgagaatggctgagtctactcgtatcagagcgaaataccctgaaagagttcccgtgattgtggaaaaagctggacagagtgatgttcctgacattgacaagaagaagtatcttgtaccagctgatctaaccattggccaatttgtgtacgttgtgaggaaaagaatcaagcttggagctgaaaaagccatctttgtctttgtcaagaacacattaccaccaactgcggcattgatgtctgcaatctacgaagaacacaaagacgaagacgggtttctctacatgacatacagtggagagaacacatttggtggatctttctactgctaa

SEQ ID NO: 131 - DNA, 1640 bp, Arabidopsis thaliana
atggacagaggatggtctggtctcactcttgattcatcttctcttgatcttttaaaccctaatcgtatttctcataagaatcaccgacgtttctcaaatcctttggcgatgtctagaattgacgaagaagatgatcagaagacgagaatatcaaccaacggtagtgaatttaggtttccggtgagtctctcaggtattcgtgatcgtgaagatgaagatttttcatctggcgttgctggagataatgaccgtgaagttcccggcgaagtggatttcttctccgacaagaaatctagggtttgtcgtgaagacgacgaaggatttcgtgtgaagaaggaagaacaagatgatcgaacggacgtaaattgtggacgtgtcataatttggtttacatttgaaatatcaaataaaaataccaaattttgtttcatttttttttttttgataaagaccggtttgaatcttcgaacaactggtaatacaaagagtgatgagtcaatgatcgatgatggagaatcttccgaaatggaagataagcgtgcgaaaaatgaggtaagtttattggtgaaattacaagatgagttgaagaaaatgacaatggataatcaaaagcttagagaattgcttacacaagttagcaacagttacacttcacttcagatgcatcttgtttcactaatgcagcaacagcaacaacagaacaataaggtaatagaagctgctgagaagcctgaggagacgatagtaccaaggcaatttattgatttaggccctacgagagcagtaggtgaggccgaggatgtgtcaaattcttcatccgaagatagaactcgttcggggggttcttctgcagccgagaggcgtagtaacgggaagagacttgggcgtgaagaaagccccgaaactgagtccaacaaaattcagaaggtgaattctactaccccgacgacatttgatcaaaccgctgaagctacgatgaggaaagcccgtgtctccgttcgtgcccgatcggaagctccgatggttcaacgttgcgcggaagacagatcaattctgattacaacctacgagggaaaccataaccatccgttgccgccagccgcggtagccatggcttctaccaccacggcggcggctaacatgttgctatccgggtcaatgtctagtcacgacgggatgatgaaccctacaaatttactagctagggctgttcttccttgctccacaagcatggcaacaatctcagcctccgcgccgtttccaaccgtcacattagacctcacccactcacctccgcctcctaatggttccaatccttcctcttccgcggctaccaacaacaaccacaactcactgatgcagcggccgcaacaacaacaacagcaaatgacgaacttacctccgggaatgctacctcatgtaataggccaggcattgtataaccaatccaagttctcggggctgcagttctctggtggctctccctcgacggcagcgttttctcagtcacacgcggtggctgatacaataacggcactcacagctgacccgaatttcacggcggctcttgcagccgttatttcttctatgatcaatggtacgaaccaccacgacggcgaaggaaacaacaaaaatcaata

SEQ ID NO: 132 - DNA, 2010 bp, Arabidopsis thaliana
atggcttcgtacactcccaagaacattctcatcaccggagctgctggtttcattgcgtctcatgtcgccaacagactcatacgaagctatcctgattacaaaatcgttgtgcttgacaagcttgattactgttcaaatctcaagaatctcaatccttctaagcactctccgaacttcaagtttgtcaaaggtgatatcgctagtgctgacttggtgaatcatcttctcatcactgaaggtattgacaccatcatgcatttcgctgctcagactcacgtcgacaattccttcggtaacagtttcgagtttactaagaataatatctatggaactcatgtccttcttgaggcttgtaaagttactggtcagattaggaggtttattcatgttagtactgatgaagtttatggtgaaactgatgaggatgctcttgttggtaaccatgaggcttctcagctgcttccgacgaatccttactctgccacgaaagctggtgctgagatgcttgttatggcttatggtagatcttatggtttgcctgttattaccactcgtgggaataacgtctatggaccgaatcagtttcctgagaagttgattcctaagttcattttgctggcaatgagagggcaggttcttcccattcatggagatggatcaaatgtcaggagctacctctactgtgaagacgttgctgaggcttttgaagttgttcttcacaagggagaagttggccatgtttacaatattgggacgaagaaggagaggagagtgaatgatgttgccaaagacatctgcaaactcttcaacatggaccctgaggcgaacatcaagtttgtcgacaacagaccttttaacgatcagaggtacttccttgacgatcagaagctcaaaaagttgggatggtcagagagaaccacgtgggaagaagggttgaagaaaactatggattggtacacacagaacccggagtggtggggtgatgtttctggagcattgcttcctcatccaaggatgctgatgatgcctggtgggcgacactttgatggctccgaggacaattcgctggcagctactttatctgaaaaaccaagtcaaacccatatggttgttccaagccaaaggagcaacggcacacctcaaaagccttcgctgaagttcctgatatatggaaagaccggatggatcggtggtctgcttggaaagatatgtgataagcaaggaattgcttacgagtatgggaaaggtcggttggaggatcgatcttctcttctgcaggatattcagagtgttaagccaacccatgttttcaattccgctggtgtgactgggagacccaatgttgactggtgtgagtctcacaagaccgagactatccgtgccaatgtagctggcacattgactctagctgatgtctgcagagagcacggactcctaatgatgaatttcgctactggttgtatattcgaatatgacgacaagcatccggaaggttcaggaattggcttcaaggaggaagacacacccaacttcactggctctttctactcgaaaaccaaagccatggtcgaggagctgctaaaggagtatgacaacgtatgcacattgagggtaaggatgccgatctcctcggatctaaacaacccgcgcaacttcatcaccaagatctccaggtacaacaaagtagtgaacatcccaaacagcatgactgtgttggacgagttattaccaatctccatcgagatggcgaaaagaaacttgaaaggaatctggaacttcacaaacccaggtgtggtgagccacaacgagatcctagagatgtacagagactacatcaaccctgaattcaaatgggcaaacttcacattagaggagcaagctaaagtcattgtggctccaagaagcaacaacgagatggatgcttccaagctcaagaaagagttccctgagctactctctatcaaggagtctctgattaagtatgcatacgggccaaacaagaaaacctga

SEQ ID NO: 133 - DNA, 1074 bp, Arabidopsis thaliana
atgggtatatatctaagtactccaaaaacagacaagttctcagaagatggcgaaaatcataaactcagatatggtttatcctctatgcaaggttggcgtgcgtccatggaagatgctcatgctgcaatacttgatctcgatgataacacttccttcttgggtgtctatgatggtcatggaggtaaagttgtttctaagttctgtgccaagtatctacaccagcaggttcttagtgatgaggcgtatgcagctggagacgtagggacttctcttcaaaaagcatttttcagaatggatgagatgatgcaaggacaaagagggtggcgagagttagcagtacttggtgacaaaatcaataagttcagtgggatgattgaagggcttatatggtcaccaagaagtggggacagtgctaataaacctgatgcttgggcgtttgaggaaggtcctcattctgattttgctggacctaattctgggagcacggcatgcgtagctgttgttagagacaagcagctatttgttgcaaatgcaggtgactcacgttgtgtgatatccagaaagaatcaggcttataatctttctagagatcacaaaccagatcttgaagctgagaaagaaaggatattgaaagctggtggctttatacatgcagggcgagtcaatggaagcttaaatctatcacgagctatcggtgacatggaattcaagcagaataagtttttgccatctgaaaagcaaatagttaccgctagtccagatgttaacactgttgaactctgtgatgatgatgatttccttgttcttgcctgcgatggaatttgggattgcatgacaagccaacaactcgttgatttcatacatgaacaattgaattcagagaccaaactctcggtggtatgtgaaaaagttctcgatagatgtctggctccaaacacttcaggtggtgaaggctgtgataacatgaccatgatattggttcgattcaagaaccctactccatcagagaccgaactaaaaccagaagcaagccaggcagaaggaaaccacgatgagccgagctcatcaaactag

SEQ ID NO: 134 - DNA, 1035 bp, Arabidopsis thaliana
atggctccggggcttactcaaaccgctgatgctatgtccaccgtgacgataacaaaaccgtcactgccatcagtccaagacagcgatcgagcttacgtgacgtttcttgctggaaacggtgattacgtgaaaggagtcgttggtttagccaaagggttaaggaaagtcaaatcggcttatccactcgtagtagcgatgttacccgacgtcccggaggaacaccgtcgtatacttgtggatcaaggatgcatcgtccgtgaaatcgaacccgtttacccacccgagaaccaaactcagttcgccatggcttattacgtcatcaactactctaaactccgtatctggaagtttgtggagtatagtaaaatgatatatttagatggagacattcaagtttacgaaaacatcgatcacttgtttgacctaccagatggctatttgtacgcggtgatggattgtttctgtgagaaaacatggagtcacacgccgcaatacaagatcagatattgccaacaatgccccgacaaagtccagtggccaaaagcggagcttggagagccaccggctctttacttcaacgccggaatgttcttgtacgagcctaacctcgagacttacgaggatctactacgaacacttaaaatcactcctccgactcctttcgctgaacaggattttttgaacatgtactttaagaaaatctacaagccgattcctttagtgtacaatctcgtccttgcgatgttatggcgtcacccagaaaatgtagagcttggaaaagtcaaggtggttcactactgtgcagcgggttcgaagccgtggagatacacagggaaagaagcgaacatggagagggaagatataaaaatgttagtgaaaaaatggtgggacatttacgacgacgaatccttggattacaagaaacctgttaccgttgtggacacagaggtcgatctcgtgaatctgaagccgttcatcaccgctcttactgaagctggccggctcaactacgtgaccgcaccgtccgctgcttga

SEQ ID NO: 135 - DNA, 978 bp, Arabidopsis thaliana
atggcatccaacggtgataaaggactgatcgttagcttcggcgagatgctaatcgatttcgtccctaccgaatcaggcgtctctctcgccgaagctcctggattcctcaaagctccaggcggtgctcccgctaacgtcgcaatcgctgtttctcgtctcggtggacgatctgctttcgtcggaaaacttggagacgacgagttcggtcatatgttggctgggattttgaggaagaacggtgttgatgatcaggggattaacttcgatactggagctagaactgctttagctttcgttacgttacgtgctgatggagatcgtgagtttatgttttaccgcaatcctagcgccgatatgcttcttcgtcctgatgaactcaatctcgacctcatcagatccgcgaaagtgtttcactatggatcaataagtttgatagtggagccgtgtaggtcagctcatttgaaggccatggaagtggcgaaagaagcaggagctcttctttcctatgacccaaacctcagggagcctctgtggccatcaaaagaagaagccaaaacacagatcatgagcatttgggacaaagctgagatcatcaaggtgagcgatgttgagcttgagtttctaactggaagcaacaagattgatgatgagaccgcgttgaccttgtggcatcccaacttgaagctgttgttagtcactcttggtgaaaagggctgtcggtattacaccaagactttcaaaggagccgttgaccctttccatgtgaacgctgtggacacaaccggagctggagattcctttgtcggtgctcttctaaaccagattgtcgatgatcgatccgttctcgaggacgaagagagattgaggaaagtgctgagattcgcaaatgcttgtggagcaatcacaacgaccaaaaaaggagccattccagctcttccctcagatgctgaagttcggagctttctcgaaaagaaatag

SEQ ID NO: 136 - DNA, 1428 bp, Arabidopsis thaliana
atggattcctcctatggcgccacaaagttccttctcctcctcttcctcaccacctccattgcgaccgcattacccgataacaaaccagtaccgggtcaaataaactcaaactcagtcctcgtagctctcctggactctcactacacagagctagcagaactagtcgaaaaagctctccttctccagaccctcgaagaagcagttggtaaacacaacatcacaatcttcgcaccacgcaacgatgccttggaacgaaacttagacccactcttcaaatctttcttgctcgaaccaagaaacctcaaatctttacaatctttattaatgttccacattcttcctaaacgaatcacttctcctcaatggccttctctttctcatcaccaccgtactctctccaacgaccatctccacctcaccgtcgacgtcaacactcttaaagtagattccgctgagattatccgacccgatgacgtcattagacccgatggtatcattcacggcatcgaacgtcttctcatccctcgctctgttcaagaagattttaaccgccgtcgtagtctccgttcaatctccgccgttataccagaaggagctcctgaggttgaccctagaactcaccgtctcaagaaaccatctcccgccgttcccgccggagctcctccggttcttccaatctacgacgctatgtcaccaggtccttccctagctcctgctccagctcccggacccggtggtccacgtggccatttcaacggcgatgctcaagttaaagatttcatccacactctcttgcattacggtggctacaacgagatggctgatatactcgtcaacttaacctctttagccactgagatgggtcgactcgtgtcagaaggctacgttttaaccgttcttgctcctaacgacgaagccatggctaagctcacaacggaccagcttagcgagccaggtgctcctgaacaaattatgtattaccacatcataccggagtatcaaacagaggagagtatgtacaacgctgttcggagattcggaaaagtgaagtatgattcattgagattcccacataaagtgttggctcaagaagctgatggatctgtcaaattcggacacggtgatggttcagcttacttgtttgatcctgatatctacacggacggtcggatttcagttcagggtattgatggagtcttgttcccgaaggaggaaacgccggcgacggagattaaaccagctgctccggtcgttaagaaagtttctaaatcaagaagaggtaaagataaattttccatttctttactctttttgttacgattatttttagacgctaattattcggtcaataaatatttgacattgacatctaaacacaaaaattcatcattgttttgtgtcattgagtgtcaaaaattcttattctaa

SEQ ID NO: 137 - DNA, 1035 bp, Arabidopsis thaliana
atgggcccaaagatgcccaacacagaaacagaaaatatgaaaatattagtcaccggctctactggttacttaggcgcacgactctgccacgttctcctccgtcgtggccactccgtacgtgcattggtccgccgcaccagcgatctctctgacttacctccagaagttgagctcgcctatggagacgtaacggattaccgttctctaacggatgcttgctccggttgcgatatcgttttccacgccgcagctttagttgagccttggcttcctgacccatctcgattcatctcagtcaacgttggtggactgaagaatgtcttggaagctgtaaaggagacgaagaccgtgcagaagattatctacacttcttccttcttcgctcttggatctaccgatggatctgttgctaatgagaatcaagttcataatgagaggttcttctgcactgagtatgagagatccaaggctgttgctgataagatggctttgaatgctgcttctgaaggtgtgccgataattttgctgtatcctggtgttatttttggtccaggcaagctcacttcagccaatatggttgctagaatgttgatcgagcgctttaacgggaggttgcctggatatattggctctgggacggatagatactccttcagccatgttgatgatgttgtggagggtcatgttgctgcaatggaaaaaggtaggcttggtgaaagatacttactcactggggaaaatgcttctttcaagcttgtctttgacatggctgcactgattactggaaccaaaaagccaaactttagcattccattatgggccatcaacgcatacggatggttatctgttttaatctctcgggttacaggaaagcttccacttatcagtcctccgacagtgacagtgctgagacatcagtggtcatactcttgtgataaggctaagctggaacttggttataaccctcgaagcctaaaggaaggattggaggagatgctcccttggttgaagagtctgggcgtcattcactactga

SEQ ID NO: 138 - DNA, 972 bp, Arabidopsis thaliana
atggagagtttcccgatcatcaatctcgagaagcttaatggagaagagagagcaatcactatggagaagatcaaagacgcttgtgaaaactggggcttctttgagtgtgtgaaccatgggatttcactcgagcttttggacaaagtggagaagatgaccaaggaacattacaagaagtgcatggaagagagattcaaggaatcgattaagaacagaggtcttgactctcttcgctctgaagtcaacgacgttgactgggaatccactttctacctcaagcaccttcccgtctctaatatctccgatgtccctgatctcgacgacgattacagaacgttaatgaaagacttcgccggaaagatagagaagttgtcggaggagctactggatctgctgtgcgagaatctcggtttagagaagggttatttaaaaaaggtgttttacgggtcgaaaagaccgacttttggaaccaaagtcagcaattatccaccttgtcctaatccggacctagtcaagggtctccgagcccacaccgacgccggcggcatcatcctcctcttccaagacgacaaagtcagtggacttcagcttcttaaagacggcgagtgggtcgatgttcctccggttaagcattcaatcgtcgttaatctcggcgatcaacttgaggtgataaccaatgggaagtacaagagtgtggaacatagagtgctatctcagacagacggagaaggaagaatgtcgatcgcatcattctataatccgggaagcgactctgttatttttccggcgccggagctgatcggaaaagaagcagagaaggagaagaaagagaactatccgagatttgtgtttgaagattacatgaaactctactctgctgtcaagtttcaggccaaggaaccaaggtttgaagccatgaaagctatggagacaactgtggccaacaatgttggaccattggccactgcgtga

SEQ ID NO: 139 - DNA, 795 bp, Arabidopsis thaliana
atggctttcacaaaaatctccttagtccttcttctctgcctcttaggtttcttttctgaaactgtcaagtctcaaaactgcggttgcgctccaaacctctgttgcagtcagttcggttactgtggtaccgacgatgcatactgcggtgttggatgccgatcaggtccttgtagaggtagtggaaccccgaccggagggtcggtcggtagcattgtgacacaaggtttctttaacaatattatcaaccaagctggtaatggttgcgcggggaaaagattctacacccgtgactctttcgttaacgccgctaatactttccccaactttgccaattctgttaccagacgtgaaattgctaccatgtttgctcatttcactcacgagaccggacatttctgctacatagaagagattaacggagcaacacgtaactactgccagagcagcaacacacaatacccatgtgcaccgggaaaaggctacttcggtcgtggtccgatccaactatcatggaactacaactacggagcgtgtggtcaaagtctcggtcttgaccttctacgccagcccgaacttgtgggtagcaacccaactgtagctttcaggacgggtttgtggttttggatgaatagcgtaaggccggttctgaaccaagggtttggagccaccattagagctattaatggaatggaatgtaacggtggtaattccggtgcagtcaacgcaaggattggatactatagagactattgtggacagcttggtgtggaccctggtcctaaccttagttgctaa

SEQ ID NO: 140 - DNA, 1527 bp, Arabidopsis thaliana
atgtcgtggtttctaatagcggtggcgacaatcgccgccgtcgtatcctacaagctaatccaacggctaagatacaagttcccaccaggcccaagccccaagccgatcgtcggtaacctctacgacataaaaccggtccggttcagatgttactacgagtgggctcaatcttatggaccaatcatatcggtctggatcggttcaattctaaacgtggtcgtatctagcgccgagctagcaaaagaagttctgaaagaacacgaccagaaactcgccgaccggcaccggaacagatcgacggaagcatttagccgcaacggtcaggatcttatatgggccgattatgggcctcattacgtgaaggtgagaaaagtttgcacgcttgagctcttcacaccgaaacgactcgagtctctcagacctatccgtgaagatgaagtcaccgccatggttgaatccgtcttcagagactgtaaccttcctgaaaacagagcaaaaggtttacaactgaggaagtacttaggagcggttgcgttcaacaacataacgcggctagcctttgggaagcgttttatgaacgctgaaggtgttgtggacgagcaagggcttgagttcaaggccatagtatccaacggtctgaagctaggtgcttcactgtcaatagctgaacacatcccgtggctcaggtggatgtttccggctgatgagaaggcgtttgctgagcacggggctcgtcgtgaccgcctcactcgagctatcatggaggagcatactttggcccgtcaaaagtctagtggagcgaaacagcatttcgttgatgcgttgctaacgttgaaggatcagtatgatcttagtgaggatactatcattggtcttctatgggatatgatcacggcagggatggacacgacagcgataacagcggaatgggcgatggcggaaatgatcaagaatccaagagtgcaacaaaaagtgcaagaagagttcgacagagtggttggacttgaccggatcttaaccgaggcagatttctcccgcttaccttacttgcaatgcgtggtgaaagagtcattcaggctgcatcctccaacgcctctaatgctacctcaccgaagcaacgcagatgtcaagatcggaggctatgatattcccaaaggatcaaacgttcatgtgaatgtgtgggctgtggctagagacccggctgtatggaaaaatccatttgagtttagaccagagagattcttggaagaagatgttgacatgaagggtcatgattttaggctgcttccgtttggagctggaagacgggtttgtcccggtgcacaacttggtatcaatttggtaacttcgatgatgagtcatttgcttcaccattttgtttggacacctcctcaagggactaaaccggaggagattgacatgtctgaaaaccctggactcgttacttacatgcgtacccctgtgcaagcggttgcaacgcctcggttgccttcggatctgtacaaacgcgtgccttacgatatgtaa

SEQ ID NO: 141 - DNA, 2352 bp, Arabidopsis thaliana
atggatgcaatcaaatgcagttccagtttcctccatcacaccaagctcaacactctcttctctaatcacacctttcctaaaatctccgctcccaatttcaagcccctcttccgtccgatttcgatttccgcaaaggacagaagaagcaacgaagctgaaaatatcgccgtagtagagaaacctcttaaatcagatagattttttatctccgatggacttccttctccattcggacccaccgtcagagacgacggcgtcaatttctctgtttactctacaaactccgtttccgctaccatctgcttgatttctctctccgatctccgtcagaacaaagtgacggaggagattcagcttgatccatcaaggaatagaactggccatgtttggcatgtgttcttgagaggagatttcaaagatatgttgtatggttatagatttgatggcaagttttctcctgaagaaggtcattattatgattcctccaacattttattggatccttacgcaaaggcaattataagcagagatgagtttggagttttgggacctgatgataattgttggcctcaaatggcgtgtatggtacccactcgtgaggaagagtttgattgggaaggggatatgcatctgaagcttccacagaaagatcttgttatatatgaaatgcatgtgcgaggttttacaaggcatgagtctagtaaaattgaattccctggcacataccagggtgttgcagagaagcttgaccatttgaaggagcttgggataaattgtatagaattaatgccatgtcacgagtttaatgagctggagtattacagctacaatacgattttgggagaccacagggtaaatttttggggttactctaccattgggttcttctcgcccatgatcagatacgcatcagcaagctctaacaattttgctggacgagccataaatgaattcaaaattcttgttaaggaggcacataaacgaggaattgaggtaatcatggatgtcgtcttgaaccacacagccgaagggaatgaaaaagggcccattttctcatttagaggagttgataacagtgtctattacatgcttgctccaaagggcgagttctataattattcaggctgtggtaatacattcaactgcaatcatcctgtggtgcgtcaattcatattggattgcctgagatattgggttacagaaatgcatgttgacggcttccgctttgatcttggttcaatcatgtcaaggagcagcagcctttgggatgcagccaatgtttacggggctgatgtagaaggtgacttgctcacaactggtactcctattagctgccctccagtaattgacatgataagtaatgatccaatactccgcggtgttaagctaatagctgaagcatgggatgcgggtgggctgtaccaagttggcatgtttccacactggggtatttggtctgagtggaatggaaagtttcgggatgttgtgagacagttcataaaaggcaccgatggcttttctggtgcttttgctgaatgtctctgtggaagcccaaatctgtaccagggaggtaggaaaccttggcacagcatcaattttatatgtgcgcatgatggttttacgttggcagatttagtaacttacaacaataagaataacttggcaaatggagaagagaataatgatggagagaatcacaattacagctggaactgtggagaggagggagactttgcgagtatctcggtgaagagactaaggaaacgacagatgcggaatttctttgtttccctcatggtttcccaaggtgtcccaatgatttacatgggagatgaatatggccatactaaagggggaaacaacaacacgtattgccatgacaactatatgaactattttcggtgggataaaaaggaagaagcacattctgacttcttcagattctgccgtattcttatcaagtttcgtgatgaatgtgaatcacttggcttgaatgatttcccaacagcaaagcgtctgcagtggcatggtcttgctcctgagatcccaaattggtctgaaacaagtcgatttgttgcattttcactggtcgattctgtgaagaaagaaatctatgtggccttcaacaccagtcatttagccacacttgtttcgctaccgaataggccaggataccgatgggagccatttgtagacacgagcaaaccgagcccttacgactgcataacaccggatctcccagagagagaaacggcgatgaagcagtataggcacttcttagatgcaaatgtgtacccaatgctcagttactcatccatcattctccttctttcaccaattaaagacccctga

SEQ ID NO: 142 - DNA, 1716 bp, Arabidopsis thaliana
atgggaacgctacagtcatggagaaaagcctatggagccctaaaagactccaccaaagtcggacttgtccgtgtcaacagcgaatacgccgatttagatgttgccatagtcaaagctaccaatcatgttgagtgtcctcccaaagatcgccatctcagaaaaatcttcgctgcaacatcagtgactcgtgctcgagcagatgttgcttattgtattcacgccctttcacggcgtttgcataaaaccaggaattggacggttgctttgaaaacactaattgtgatacatcggcttctaagggaaggagatccaactttcagagaggaactattgaatttttcgcagagagggcggattttgcaactttctaattttaaggatgattcaagtcctattgcttgggattgttcagcttgggtacgtacttatgcattgtttcttgaggaacggcttgaatgcttcagggttttaaaatatgatactgaggccgaacgtcttccgaaatctaacccagggcaggataaggggtatagtagaaccagggatttagatggtgaagaactcttggagcagttgccagctttgcagcagcttctctatcgtctcatcggttgcaggccggaaggtgccgctaaccacaatcatgttatacaatatgcacttgctctggtgttgaaagagagttttaaagtctattgtgctattaatgatggaatcatcaatctcattgacaagttctttgaaatggcaaaacatgaagccatcacttcccttgaaatatacaagcgtgcgggtcagcaggctcgtagcctttctgatttctatgaagcctgcaaaggattggaacttgcaaggaattttcaatttcctgttctaagagagcctccacaatcttttctgacaacaatggaggagtatattaaagaagcaccgcgtgttgtcgatgtcccagcggaaccactgcttctaacatataggccggatgatggactgactaccgaagatactgaaccgtcgcatgaagaacgtgaaatgttaccttcagatgatgtcgttgttgtatctgaagaaacagaaccttctcccccgcctcctccttcagccaacgctcagaacttcattgataccgatgatctatggggtctgaatactggtgctcctgatacatcagtgatcgaagaccaaaatgcacttgctttagccattgtttcaacagatgctgatcctccaactcctcattttggtcaaccaaataattacgatcctacaggatgggagcttgccttggtgacagcacctagcagcgatatctctgcatccactgagagaaaactggctggagggttagatacgcttacacttagcagtctatacgatgatggagcctacatagcttcccaacgtcctgtctacggtgcaccagctcccaatccatttgcgtcccatgacccgtttgcatcgtccaatggcacagctcccccacctcagcagcaagcggtgaacaacccattcggtgcttaccagcagacatatcagcatcagccccagccaacgtatcagcatcagtccaaccctcccactaataatagtaatccatttggtgattttggggaattcccggttaacccggtttcacagcagccaaatacctccggttatggtgatttctcggtaaaccaacataacaacccgttccgtagcactggcctcatttga

SEQ ID NO: 143 - DNA, 1116 bp, Arabidopsis thaliana
atggcttcagcttctttctctgcggtttcttcgctctcgtatcaattccgttcaaaagaagcgatcttttcatcgaaagcttcctgttttagctcgacggctttatcaggaaggagagtgtttggatctatcaaagcagctcaagtgacaagccatgagaatcctagaagacgaactcagaacgtcgaaggagatatatttgttgacaatacttgtattgattgtgatacatgtcgttggatggttccgccaattcgtaaacagcttttctctgatttatcttcacaggatttattcactcgagtggacaacatgtctgcggttacaaagcaaccaacttgtaaggaggaaagactgaatgctcttcaggccttactatcttgtccgacgggctctattcgcactcaaactccacctgctgacataggggaagctcaagagacctttccacttgtagtggacaaagacacacttcctgtactttttaatcccttaagctttcatttttttaggatggttattaacaatcctaggtacgtggagaaacttgctggaaagatcgagatgaagggtggtgttcgctacatgtttttgacacacagggatgatgttgcagatcacaagaaatgggcagacagattcaagtctaccagaattctgcattctgatgatgttgaaccttcgacctctgatgtggagttaaagctggaaggaagtggaccatggagtatctatgaagatgtcgaacttatacacactcctggtcattcagaagtaagtttgtccaactgcaagaacatacataaaaacaaatgttcaatttttggatcagtgtgcatgttccataagtccctcaaggcattattcactggcgaccatgtaataatgaccgaatctggattgagcattttagagcagtacaatcacggttcagtgcctctccagctcgagaacgtagaaaaattgatcaacctggatttcaattggctaataccgggacatggaagaagagtacatttcaaagatggagacgagaaggcgaagaatctggaagcacttgttcagaagcacagagagaaacaacttgtttcctttagcaaatccgggaaagcttaa

SEQ ID NO: 144 - DNA, 849 bp, Arabidopsis thaliana
atgggtactagagctcagcagattcctttacttgaaggtgagactgataattacgatggtgttactgtaaccatggtggaacctatggattctgaggtttttactgaaagtcttagggcttctctttcgcattggagagaagaggggaagaagggaatttggataaagctgcctcttggattggctaatcttgtggaggctgcagttagtgaaggatttagatatcaccacgcggagcctgagtacttgatgcttgtatcttggatctctgaaactcctgatacaatcccagccaatgcttctcatgttgtaggtgctggtgctttggtcatcaacaaaaatactaaagaggtcctcgttgtccaggagaggagtgggtttttcaaagataaaaatgtgtggaagctgcctactggtgttatcaacgagggcgaggatatatggactggagtagctagggaagtggaagaagaaactggaattattgcagattttgtcgaagtactggctttcaggcaaagccacaaagccatcttaaaaaagaaaacagatatgtttttcctgtgtgtcttaagtccgcgctcttacgatattactgaacaaaaatctgagatcttgcaagctaagtggatgccgatccaagagtatgtagaccaaccatggaacaagaagaacgagatgttcaagttcatggctaacatttgccaaaagaagtgtgaggaagaatacttgggattcgccattgtgccaactaccacatcatctggtaaagagagctttatctactgcaatgcggatcatgccaagcgccttaaagtatcgcgtgaccaagcctctgcttctctctga

SEQ ID NO: 145 - DNA, 357 bp, Arabidopsis thaliana
atggccgcagaaggagaagttatcgcttgccacaccgttgaagattggaccgagaagctcaaagccgccaacgaatccaagaaactgattgtgatagacttcactgcaacatggtgcccaccttgccgtttcattgcacccgtctttgctgacttagccaagaagcacctcgacgtagtcttcttcaaggtcgatgttgacgaattgaacactgttgctgaggagtttaaagttcaggcaatgccaacgtttatcttcatgaaagaaggagagatcaaggagactgtggttggtgctgctaaagaagaaatcattgccaatctcgagaagcacaagacagttgttgctgctgcttga

SEQ ID NO: 146-147 - skipped (2 entries)

SEQ ID NO: 148 - DNA, 1152 bp, Arabidopsis thaliana
atgtgttggatctcaatgagccagtcaagattcattataaagtctttatttagcacagcaggaggtttcttacttggatctgctctctcaaatccgccgtctctagccaccgcgttttcttcttcttcctcgtcctcctccgccgccgccgccgtcgacatggaaactcacaaaaccaaggtttgcatcgtcggaagtggaccagcagcacacacggcggcgatctatgcatcgagagcggagcttaagcctcttctcttcgaaggatggatggctaacgacatcgctcccggcggtcaattaactacaacaaccgacgtcgaaaacttccctgggttccctgaaggtattctcggtattgatatcgttgagaaattcagaaaacaatcggagagatttggaactacgatcttcacggaaactgttaacaaagttgatttctcatcgaaaccgtttaagctattcactgattcgagaactgttctcgctgattctgtaatcatttctactggagctgttgctaaacgtcttagcttcactggatctggtgaaggtaatggtggtttttggaatcgtggtatctccgcttgtgctgtttgcgacggagctgctccgatttttaggaataagcctcttgtggttattggtggtggtgattcagctatggaggaagcgaattttctgactaagtatggatctaaggtttatattattcataggagggatacgtttagggcgtctaagattatgcagcagagagctttgtctaaccctaagattgaagtgatttggaactctgccgtggttgaggcgtatggtgatgaaaatggacgtgttcttggaggattgaaggtgaagaatgttgttactggggatgtttcagatctgaaggtgtctggattgttctttgctattggtcatgagccagctacgaagtttttggatgggcagcttgagcttgatgaagatggttatgttgtgaccaagccaggtactactaagacgagcgtggttggtgtatttgctgctggagatgttcaagacaagaagtatagacaggccatcactgctgcaggaactgggtgcatggcggcattggatgcagagcattacttacaagagattggatctcaggagggtaagagtgattga

SEQ ID NO: 149 - skipped

SEQ ID NO: 150 - DNA, 1020 bp, Arabidopsis thaliana
atgtctgaatcaaggagcttagcctcaccaccaatgttgatgattcttctcagccttgtaatagcttccttcttcaaccacacagctggacaaatcggagtatgctacgggatgctaggcgataccttgccaagtccatcggacgttgtggctctttacaaacaacaaaacatccagcgaatgcggctctacggccctgacccaggcgctcttgccgctctccgtggctctgacatcgagctcatcctcgacgttcccagttcagatcttgaacgtctcgcctccagtcaaacggaggccgacaagtgggttcaagaaaacgttcagagctacagagatggtgtcagattccggtacatcaacgttggaaatgaggtgaaaccctcagttggggggtttctcttacaagcaatgcagaacatcgagaacgcggtttctggagcagggcttgaagtcaaggtctcaacagctatagccactgacaccaccactgatacgtctcctccgtctcaaggaaggttcagggatgagtataagagctttctcgaaccagtgataggtttcttggcaagcaagcaatctcccttgctcgtgaatctctacccttacttcagctacatgggagacacggccaacatccatctagactacgctctgttcaccgcccagtccactgttgataacgatccagggtactcataccaaaacctattcgacgcaaatctcgactcggtttatgcagcattggagaaatcagggggcggatcgttggaaatcgtggtgtcggagaccggttggcccacagagggagcagtcgggacgagtgtggaaaacgcaaagacttatgttaacaatttgatacaacatgtgaagaatggatcaccgagaaggccagggaaagctatagagacttatatattcgctatgttcgatgagaataagaaggaaccaacgtatgagaagttttggggactgtttcatccagatcgacagtctaagtatgaagttaatttcaactaa

SEQ ID NO: 151 - DNA, 699 bp, Arabidopsis thaliana
atggccaatgaaattcctaccaaagggattctcaagagcgaagctctaaaacagtacatcatggaaacgtcagcgtatccaagagagcatgaattgctcaaggaacttcgaaaagctactgtccaaaaatacggaaatttaagcgagatggaggttccggttgatgagggtcatttcctatcgatgcttgtaaagatcatgaatgcgaaaaacactatcgagatcggtgttttcaccggttactcgcttctcactacagctcttgctttacctgaagatggccgtattaccgcgatagacattgataaagaagcttacgaagttggactagagtttattaagaaggctggtgttgatcacaagattaattttatccattccgatggtcttaaggccttagaccaattggtgaacgacaaatgtgagtttgattttgcatttgcggatgctgacaaatcaagctacgtcaacttccatgagaggcttctaaaattggtgaaggttgggggaatcattgcgttcgacaacaccttgtggtttggttttgtggcggaggatgaagatggagttccggagcatatgagagaatatagagcagctcttatagaattcaataagaaattggctttggatccccgagtcgaggtctctcagatttccattggagatggtatcacgctctgtagacgtcttgtttga

SEQ ID NO: 152 - DNA, 618 bp, Arabidopsis thaliana
atggcaactcaaaaagagaaaccttcctccaattctttcaaatggttttccaccaaaaccttaaagttaaaccttagtttccaaaaccgacgaagatcaccaaaatcaaactcttcgtcaaccttaaactctccaagaagcaacagtgatgacaacaacaacataaagagtcaccaggcctccaaagaagagctccgtcaagtcttcagccatttcgacagcgacggcgacggtaagatctcagcctttgagctcagacattacttcggctctgtcggtgagtatatatctcacgaggcagctcaagaggcgataaacgaagttgacactgacgcagacgggtctctagggtttgaggactttgttggattgatgacaagaagagatctttacggtgacggtgaagttgatggcgatggagagttgaagacagcgtttgagatgttcgaggtggaaaaaggatcaggctgcataacaccaaagggtttgcaaaagatgcttgtgaagttaggggaatcaagaacgtacggagagtgtgaagccatgataaagttttacgatatagatggtaatggaattcttgattttcatgagtttcgtcaaatgatgacggtttag

SEQ ID NO: 153 - DNA, 822 bp, Arabidopsis thaliana
atgttgactcccaccatttctaaatccatctctttagtaaccattctattagttctacaagctttctctaacacaacaaaggctcaaaattgcggttgttcgtcagagctatgttgtagtcagtttggcttttgcggtaacacttcagactattgtggtgtaggttgccaacaaggaccttgttttgctcctccccctgcaaatggtgtctctgtggctgagattgtaacgcaagaattcttcaatggaatcatcagtcaagccgcgtctagttgcgccggcaatagattttacagtcggggagcttttcttgaggccttagactcatattctcgtttcggtagagttggatcgaccgacgactctaggcgtgagattgcagcgttctttgctcatgtcacacatgaaacaggacatttctgctacatagaagagatagacggagcctcaaaggattactgcgacgagaatgcaacacaatatccatgcaatcctaacaaaggctactacggccgcggaccgatccaactctcttggaatttcaactacgggccagccgggacagcaattggtttcgacggcctgaatgcaccggaaacagtagccacggatccagtcatatccttcaaaaccgccttgtggtactggaccaatagggttcagcctgttatctctcaaggttttggtgcaacaatccgtgccattaacggtgctttggagtgtgacggggccaacacagccaccgttcaagctagagttcgttactacacggattattgtcgtcaacttggcgttgatcctggaaacaacctcacttgctaa

SEQ ID NO: 154 - DNA, 1188 bp, Arabidopsis thaliana
atggtgatggctggtgcttcttctttggatgagatcagacaggctcagagagctgatggacctgcaggcatcttggctattggcactgctaaccctgagaaccatgtgcttcaggcggagtatcctgactactacttccgcatcaccaacagtgaacacatgaccgacctcaaggagaagttcaagcgcatgtgcgacaagtcgacaattcggaaacgtcacatgcatctgacggaggaattcctcaaggaaaacccacacatgtgtgcttacatggctccttctctggacaccagacaggacatcgtggtggtcgaagtccctaagctaggcaaagaagcggcagtgaaggccatcaaggagtggggccagcccaagtcaaagatcactcatgtcgtcttctgcactacctccggcgtcgacatgcctggtgctgactaccagctcaccaagcttcttggtctccgtccttccgtcaagcgtctcatgatgtaccagcaaggttgcttcgccggcggtactgtcctccgtatcgctaaggatctcgccgagaacaatcgtggagcacgtgtcctcgttgtctgctctgagatcacagccgttaccttccgtggtccctctgacacccaccttgactccctcgtcggtcaggctcttttcagtgatggcgccgccgcactcattgtggggtcggaccctgacacatctgtcggagagaaacccatctttgagatggtgtctgccgctcagaccatccttccagactctgatggtgccatagacggacatttgagggaagttggtctcaccttccatctcctcaaggatgttcccggcctcatctccaagaacattgtgaagagtctagacgaagcgtttaaacctttggggataagtgactggaactccctcttctggatagcccaccctggaggtccagcgatcctagaccaggtggagataaagctaggactaaaggaagagaagatgagggcgacacgtcacgtgttgagcgagtatggaaacatgtcgagcgcgtgcgttctcttcatactagacgagatgaggaggaagtcagctaaggatggtgtggccacgacaggagaagggttggagtggggtgtcttgtttggtttcggaccaggtctcactgttgagacagtcgtcttgcacagcgttcctctctaa

SEQ ID NO: 155 - skipped

SEQ ID NO: 156 - DNA, 1080 bp, Arabidopsis thaliana
atgggaaaggttcttcagaaagaggcgttcggattagccgcgaaagacaattccggagttctctcgcctttcagtttcactagaagggaaacaggagaaaaggatgtgaggttcaaagtgttattttgtggaatttgtcactctgatttgcatatggtcaagaacgagtggggaatgtctacttatcctcttgtcccagggcatgagatcgtgggcgtggtgactgaagtcggagccaaagtgactaaattcaaaaccggagaaaaagtcggagttgggtgtttggtcagctcgtgcgggtcatgtgacagctgcaccgaaggtatggaaaactattgtccaaaatcaatccaaacgtacggattcccgtactacgacaacaccataacatacggtggttactccgaccacatggtttgcgaggaaggtttcgtcatccgtattccagacaatctccccttggacgccgccgcaccgctcctctgtgccggtatcacggtctattcccctatgaagtatcacgggctcgacaaacccggtatgcacatcggtgtggtaggattaggcggtttaggtcatgtaggagtgaaatttgccaaggctatgggtactaaggttacggttattagtacttcggagaaaaagagagatgaggcgattaatcggcttggtgcggatgctttcttggtgagccgtgacccaaaacagattaaggatgcaatgggtactatggatggtataattgataccgtctctgcgactcattcacttcttccgttgctcggtttgctgaagcataagggaaaacttgttatggttggtgcacccgagaagccactcgagctacctgtcatgcctctcatctttgagaggaagatggtaatgggaagtatgataggagggataaaagagacccaggaaatgatagatatggccgggaaacacaacatcactgcggatattgagcttatctctgccgattatgtcaacaccgccatggaacggctagagaaagccgacgttaggtaccgctttgtgattgatgttgccaacacattgaagcctaatcctaatttataa

SEQ ID NO: 157 - skipped

SEQ ID NO: 158 - DNA, 1674 bp, Arabidopsis thaliana
atggttttggggtgtttccctttgaaaagcaagaagaaacgtggctctgtttctatgaagcggttggatcttgaagaaagcaagccaactgctttacctgagccaccaaagattccaagtcgtaatttacaatcagctcctccgagtttcagaactcgtgtgaagccaattcaatctaacaacggtggaaccggagagatgagtagccgagcaagagtcatgtctgctccgtcaagcatccacggtgcagcggaacgggatttgcttgctggtgtttaccacgacgagcaagatgaacaaccaagagatccacgtacttctactaaagaatctagccctcaaccacttccgttaccgtcaccaagaactggttcttcattgaagaattggggaagctttaagtcgtttaacggaagcagcggtcggttatcatcatccgcagctgtatctggacctttacctttgccacctagcgggtcagttaggagcttttcatatgatgaagtaatggctgcgtgtaacgctttttcttcagaccgatgtgtcatggaaggtctttcatctgttatgtacatggcttcctttggtgatgaggcttcgacctcaggtttaaagaaggttgacgcaactgttgtacgacttcacgtaattactcagagtattagggagttcattaatgaagtcaacacattggcgtcgctgcaacaccagaacctttgtaagctggtaggctatcatgctcgtgacggttctgacacaagaatgttggtgtacgagaggcttgctctgggcagcttggaccgtttactgcatgggagatcagatgggcctcctcttgattggaacactagaatgaagattgcactatgcgcagctcagggtctaaccttcttgcacgaagaaggcccttttcaggcaatgtacaatgaattttcgacggcaaatatccaagtcgataaagatttcagcgccaagctatcaggatacggttgtgcaggccatgcgcctgagacagagacatctaatagttcggcacttgctaatctctctgtcgagactctagagagagggcttttgaccccgaagagcaatgtgtggagctatggaatagttcttcttgagatgttaacgggtcggaaaaatatggacgggtcttacccgaaagaagagaggaacttagtgaaatggagcagagcttttctagcagatgattgcaggctctcgcttataatggatcctcagcttaaaggtcggtttccggcaaaagcggctaggagcatagcagatatagcacagaaatgtctgcaggtggagccttcagagcgtccaaccatgagaaacatcgtggatcaactcaagatcatacaggacatgaagtactcgtgtaggttcccattgagagaacccgcaccggtcgtggcaaggaaacatatgggaagatcaagcagtctcaacacgattatttggaccccggcatcagtgccaccaaggtcgagtttttcaccgtcacctccaccacgacgaccgtctgtctcacccacaaggggacggacgctcgtgtttcccccagtgtttccgccgcgagcgtgttcatctttggaggaaatggctcgggaagaggttcgaagatcgtcttcagccagtggtaggagaactagcctcgaagggttttga

SEQ ID NO: 159 - DNA, 1155 bp, Arabidopsis thaliana
atgagtgtgagttgttgttgtaggaatctgggcaagacaataaaaaaggcaataccttcacatcatttgcatctgagaagtcttggtgggagtctctatcgtcgtcgtatccaaagctcttcaatggagaccgatctcaagtcaacctttctcaacgtttattctgttctcaagtctgaccttcttcatgacccttccttcgaattcaccaatgaatctcgtctctgggttgatcggatgctggactacaatgtacgtggagggaaactcaatcggggtctctctgttgttgacagtttcaaacttttgaagcaaggcaatgatttgactgagcaagaggttttcctctcttgtgctctcggttggtgcattgaatggctccaagcttatttccttgtgcttgatgatattatggataactctgtcactcgccgtggtcaaccttgctggttcagagttcctcaggttggtatggttgccatcaatgatgggattctacttcgcaatcacatccacaggattctcaaaaagcatttccgtgataagccttactatgttgaccttgttgatttgtttaatgaggttgagttgcaaacagcttgtggccagatgatagatttgatcaccacctttgaaggagaaaaggatttggccaagtactcattgtcaatccaccgtcgtattgtccagtacaaaacggcttattactcattttatctccctgttgcttgtgcgttgcttatggccggcgaaaatttggaaaaccatattgatgtgaagaatgttcttgttgacatgggaatctacttccaagtgcaggatgattatctggattgttttgctgatcccgagacgcttggcaagataggaacagatatagaagatttcaaatgctcgtggttggtggttaaggcattagagcgctgcagcgaagaacaaactaagatattatatgagaactatggtaaacccgacccatcgaacgttgctaaagtgaaggatctctacaaagagctggatcttgagggagttttcatggagtatgagagcaaaagctacgagaagctgactggagcgattgagggacaccaaagtaaagcaatccaagcagtgctaaaatccttcttggctaagatctacaagaggcagaagtag

SEQ ID NO: 160 - DNA, 1734 bp, Arabidopsis thaliana
atgtcgctggttcgaacagtgacgatcgttctttttataatcgcgtttctgcaaaacgctgcggctcagaaaagacagcaaagtattgttaagtctcgcggtgcggttgcgacagatgatggacggtgttctgttatcgggatgcgtgttcttcgtgaaggaggaaacgcgattgatgcgtctgtggctgctgctctgtgtttgggcgttgtaagtcccgcgtctagcggtataggcggtggagcgtttacagtggttaagatagctggtgggaaagaaattgcttatgattctagagaaaccgctcctctaagagccactgaggtaaaacgcgttttaaatatgtatggaggtaatgttgacctaaagaagaaaggagccttatcagtaggcgttcccggggaagttgcaggtctattcacggcttggaaacaacatgggaagctaccgtggaagcggttagtgactcctgcagagaaacttgcagagggattcaagatttccaagtatctttatatgcagatgaacgcgactagaagcgatatcttagcagacaaaggtctctctgacctatttgtttcaaatggagagctcaagaaaccagggacgatttgccataacccaaaattggctttaaccttgaagctaattggagagtacggtccaaaagcattttacaatggcacagttggggttaacctagcgagagatatcaaaaaatctggaggaataataactttgaaagatctgcaaagttatagagttaagattaaagaaccgttgtctgcagacattcttggatatagagtccttggtatgcctcctccttcatctggtggcgctgcaatgatgcttgttttgaacattctttctcaatatgggattccatcaggtgtttcaggccctctcggtgttcatcgactaatcgaggctctgaaacatgcattcgcagttagaatgaacctcggggatccagatttcactgatgttaccaaggttgtttcggatatgttgtcgccaaagtttgcaaaagacttgaagagcaagataaacgaccaaaaaacttttgatccaaaatattacgggggcatgtggaatcagatcgacgaccacgggacaagtcatttatcgatcatagaccgcgagaggaacgctgtgtctatgactagtacaataaatggttactttggggcattgatgctatctccgagcacaggaatagttctgaacaacgaaatggacgatttctcaatccctatgaaatctaacggtaacttagatgttccaccaccagcaccagctaacttcatccgtcctggaaaacgacctttgtcctctatgtcacccaccattgtactcaaggacggtaaagtgaaagccgctgtgggtgcgagcggaggagccaacattattgccgggacaacggaagtttacttgaatcattttttcctcaagatggatcctctttcttccgtcttagctccaagaatctaccatcagctgataccaaacagagcttcgtacgagaactggacaacagtattcaatgatcatttcgagattcctaaagcaacaagagttgtgttggagaagaaaggtcatgtcctatctcctattgccggagggacgattgctcagttcatagttcaagaatccggtgagaactccggtggaagaagtgagcttgtggcagttagtgatcctcgaaaaggagggttcccttcaggatattga

SEQ ID NO: 161 - skipped

SEQ ID NO: 162 - DNA, 510 bp, Arabidopsis thaliana
atggcggatgaatctccaaagtctatctacgacttcaccgtcaaggatatcggaggtaacgatgtgagtttggaccaatacaaaggcaaaactcttttggttgtaaacgttgcttccaaatgtggtctgacggatgcgaactacaaggaactgaatgttctgtacgagaaatacaaggagcaagggttggagatattagcattcccgtgtaatcagttcttaggacaagaaccaggaaacaatgaagagattcaacaaactgtctgcaccaggttcaaagctgaattccccatctttgacaaggtggatgtgaacggtaagaacacggcaccattatacaagtacttgaaagcagagaaaggaggtttgctcattgatgctatcaaatggaacttcaccaaattcttggtttctcctgatggcaaggtcttacagagatattctcccagaacctctcctcttcaattcgagaaggacattcaaactgcgttgggacaggcctcttcttaa

SEQ ID NO: 163 - DNA, 1500 bp, Arabidopsis thaliana
atggcgaggaagatgcttgttgatggtgagattgataaggtggcggctgatgaagccaacgcgacgcactatgattttgatttgtttgtcatcggtgccgggagtggcggtgttcgtgctgctaggttttcggctaatcatggcgctaaggttggtatttgtgagcttccatttcaccctattagctctgaggagattggaggcgttggtggaacctgtgttatccgtggttgtgttcctaaaaagattctcgtctatggagctacttacggtggtgaacttgaggatgctaaaaattatgggtgggaaataaatgagaaagtcgacttcacatggaagaagcttttgcaaaagaagactgatgagatactaagactgaataatatctacaagcggttattggcaaatgctgcggtgaaattgtatgaaggtgaaggaagagtagttggtcccaacgaagtggaggtgagacaaatagatggcacaaaaataagttataccgcaaagcacatattgattgccactggcagtcgggcgcaaaagcctaatattcctggacatgagctggctattacatctgatgaagctttgagcttggaagaatttcccaagcgtgctatagtgcttggaggagggtatattgctgtggagtttgcatcaatatggcgtggaatgggtgctactgtagatttattcttcaggaaggaacttccgctaaggggttttgatgacgaaatgagggcactagttgctagaaatcttgaaggaaggggcgttaatctgcatccacaaacaagtttgactcagttgacaaaaacagaccaggggatcaaagtcatatcgtcccatggggaggaattcgtggcagatgtcgtcctatttgctactggcagaagtcctaataccaaaagattgaatttagaagctgttggtgttgaacttgatcaggctggagctgtgaaggttgacgagtattcacgaactaatatacctagcatatgggctgtaggagatgccacaaaccgaattaaccttacacctgttgcgttaatggaggccacctgttttgcgaacactgcttttggtggaaagcctactaaagcagaatacagcaatgtcgcctgtgctgtattttgcataccaccactagctgtagtgggtctcagcgaagaagaagcagtagaacaagcaaccggtgatattctggtcttcacctcaggctttaatccaatgaagaacaccatttctggacgccaggaaaagacattgatgaagctaatagttgatgagaagagtgataaggttattggagcatccatgtgcggtcctgatgcagctgagatcatgcaggggattgcaattgcgctcaagtgtggagcaaccaaagcacaatttgatagcacggttgggatacatccatcttctgcagaggaatttgtgacaatgcgcagtgtgaccagacgcattgcccacaaacccaaacctaagacaaatctatga

SEQ ID NO: 164 - DNA, 693 bp, Arabidopsis thaliana
atggcgaacgaggtgattcttcttgatttctggccgagtatgttcgggatgaggacaaggatcgcattgagggagaaaggtgttgaatttgagtacagagaagaagatctaaggaacaagagtcctttgcttctccagatgaatccgattcacaagaagattcctgttctcatccacaatggtaaaccggttaacgaatctatcatccaggttcagtacattgacgaggtctggtctcacaagaaccctattcttccttctgatccttacctgagagctcaagctaggttctgggctgatttcattgacaagaagcttggtgttatgttactctgtgcaatgtttcagctgtatgatgctcagaggaaggtgtgggcgacaaagggtgaggaacaagaggcagggaagaaggatttcattgagatactcaagactcttgaatctgagcttggagacaaaccttactttagtggcgatgactttggctatgtagacattgcgttgattggattctacacatggtttccagcatacgagaagtttgctaacttcagtatcgaatctgaggttccgaaactgattgcttgggttaagaagtgtttgcagagggagagcgtggctaagtccttgcctgatcctgagaaggttactgaattcgtctctgagctcaggaagaaatttgtacctgagtaa

SEQ ID NO: 165 - DNA, 1620 bp, Arabidopsis thaliana
atgggcagtggctgctcttctctctcttactcatcatcttccacttgcaatgccactgttttctctatttcttcttctccatcatcttcttcttcgctgaaactcaatccaagtagcttccttttccagaaccctaaaactctgagaaatcagtcacctttgaggtgtgggagatcatttaagatggaatcacagaaacccattttcgatttggagaaattagatgatgagtttgttcagaaactggtttacgatgctctcgtttggtcttctcttcacggactcgtcgttggtgacaaaagttatcagaaatcaggaaatgttccaggggttggattgatgcacgcacctattgcattgctaccaactgcattcccagaagcttattggaagcaagcttgtaatgttactcctcttttcaatgaattgattgatcgtgttagcttggatggcaaattcttacaggatagtctctctagaacgaagaaagttgatgtctttacatctagacttcttgacattcactccaagatgctagaaagaaataagaaagaggacattcgtttgggtttacaccggtttgattatatgcttgacgaagaaacaaattcacttcttcagattgagatgaatactatctcgtgttcgtttcctggccttagtcgtcttgttagccagctacatcagtcattgcttcgatcttatggggatcagattggcatagactctgaacgtgtacctataaacacatccacaatccaatttgctgatgcattggctaaagcttggttggagtacagtaacccaagagcggtagtcatggtaattgtacagccagaagaacgcaacatgtacgatcaacatttgctgagcagtatattgagagaaaaacataatatagttgtcatcaggaagactctagcagaagtcgaaaaagaagggagtgtacaagaggatgaaacccttattgttggcggccaagcagtcgcagtggtttatttcagatctggctatactcctaatgatcatccgtctgaatcagaatggaatgctaggctgcttattgaggagtcttcagctgtcaaatgcccgagcatagcttaccatttaactggctccaagaaaatccagcaagaactggctaaaccaggtgttctcgagaggtttctggacaacaaagaggacattgctaagctgaggaaatgctttgctgggctttggagcttggatgactcagaaattgtcaagcaggctatcgaaaaacccggattgtttgttatgaagcctcagagagaaggcggaggaaacaacatctatggagatgatgtgagggaaaatcttttgagactgcagaaagaaggagaggaaggaaacgctgcgtatatcctgatgcagaggatattcccaaaagtctcaaacatgttcttggtgcgagaaggcgtttaccataagcatcaagctatatcagaactcggtgtctatggtgcttacctcaggagcaaagacgaagttatagtaaacgagcagagtggttatctaatgcgcacgaagatcgcatcatcagatgaaggcggcgttgcagctggttttggagtcttggacagcatatatctgatttga

SEQ ID NO: 166 - DNA, 1206 bp, Arabidopsis thaliana
atggatgagaataatcatggagtttcatcaagctcacttccacctttcctcaccaaaacatatgagatggttgatgattcttcatccgattctatcgtctcttggagtcagagcaataagagtttcatcgtttggaatccgccggagttttctagagatcttcttccgagattcttcaagcacaataacttctctagctttatccgccagcttaacacatatggttttagaaaagctgatcctgagcaatgggaatttgcgaatgatgattttgtgagaggtcaacctcatcttatgaagaacattcatagacgcaaaccagttcatagccactctttaccgaatcttcaagctcagttaaacccgttgacggattcagaacgagtgagaatgaataatcagattgagagattgacaaaagagaaagaaggattgcttgaagagttacataaacaagacgaggaacgagaagtgtttgagatgcaagtgaaagaacttaaagaacgattacaacacatggagaagcgtcagaaaacaatggtttcgtttgtttctcaagtattggaaaagccagggcttgctttgaacctatcgccgtgtgttcccgaaacaaacgagaggaaaagaaggttccctaggatcgagttctttcccgatgaaccgatgttggaagagaacaaaacttgtgttgttgtgagagaggaaggttctacaagcccttcttcacacacaagagagcatcaagtggaacagttagagtcatcgatagcgatttgggagaatcttgtatcggattcttgtgagagtatgttacaatcaagaagtatgatgacacttgatgtggatgaatcatctacttttccagagagccctcctctttcttgcatacagttaagtgtcgattcacgtctcaaatctcctccttctccaaggatcatcgatatgaactgtgagcccgatggttcgaaagaacagaacactgttgctgctcctcctcctcctccagtagcaggagcgaatgatggcttctggcagcagtttttctcagagaatcctggctcaaccgagcaacgggaagttcaattagagaggaaagacgataaagataaagccggagtacgtactgagaaatgttggtggaattcgagaaatgttaatgcaattacagaacagcttggacatctgacttcttcagagagaagttga

SEQ ID NO: 167 - skipped

SEQ ID NO: 168 - DNA, 855 bp, Arabidopsis thaliana
atgacggctgtgacggcggcgcaaagatcagttccggcgccgtttttaagcaaaacgtatcagctagttgatgatcatagcacagacgacgtcgtttcatggaacgaagaaggaacagcttttgtcgtgtggaaaacagcagagtttgctaaagatcttcttcctcaatacttcaagcataataatttctcaagcttcattcgtcagctcaacacttacggatttcgtaaaactgtaccggataaatgggaatttgcaaacgattatttccggagaggcggggaggatctgttgacggacatacgacggcgtaaatcggtgattgcttcaacggcggggaaatgtgttgttgttggttcgccttctgagtctaattctggtggtggtgatgatcacggttcaagctccacgtcatcacccggttcgtcgaagaatcctggttcggtggagaacatggttgctgatttatcaggagagaacgagaagcttaaacgtgaaaacaataacttgagctcggagctcgcggcggcgaagaagcagcgcgatgagctagtgacgttcttgacgggtcatctgaaagtaagaccggaacaaatcgataaaatgatcaaaggagggaaatttaaaccggtggagtctgacgaagagagtgagtgcgaaggttgcgacggcggcggaggagcagaggagggggtaggtgaaggattgaaattgtttggggtgtggttgaaaggagagagaaaaaagagggaccgggatgaaaagaattatgtggtgagtgggtcccgtatgacggaaataaagaacgtggactttcacgcgccgttgtggaaaagcagcaaagtctgcaactaa

SEQ ID NO: 169 - DNA, 470 bp, Arabidopsis thaliana
atgtctctagttccgagcttttttggaggccgaagaacaaacgtgttcgacccattttcactagacgtatgggatccgttcgaaggattcttgacgcccgggttgacaaacgcacctgccaaggacgtggcagcgttcacaaacgctaaagtggactggagggagacacctgaagcgcatgtgttcaaggcggacgtgcctgggcttaagaaggaagaggtgaaggtggaggttgaagatggtaacatacttcagataagcggtgagaggagcagtgagaatgaagagaagagtgacacatggcaccgtgtggagcggtcaagtgggaagttcatgaggaggtttcggttgccagagaatgcaaaggtggaggaagtaaaggcgagtatggagaatggggtgttgtcggttacggtgccgaaagttcaggagagtaagccggaggtcaagtccgttgatatctctggtta

SEQ ID NO: 170 - DNA, 470 bp, Arabidopsis thaliana
atggatttggagtttggaaggtttccaatattttcaatcctcgaagacatgcttgaagcccctgaagaacaaaccgagaagactcgtaacaacccttcaagagcttacatgcgagacgcaaaggcaatggctgctacaccagctgacgttatcgagcacccggatgcgtacgttttcgccgtggacatgcctggaatcaaaggagatgagattcaggtccagatagagaacgagaacgtgcttgtggtgagtggcaaaagacagagggacaacaaggagaatgaaggtgtgaagtttgtgaggatggagaggaggatggggaagtttatgaggaagtttcagttacctgataatgcagatttggagaagatctctgcggcttgtaatgacggtgtgttgaaagtgactattccgaaacttcctcctcctgagccaaagaaaccaaagactatacaagttcaagtcgcttg

SEQ ID NO: 171 - DNA, 468 bp, Arabidopsis thaliana
atggatttaggaaggtttccaataatctcaatcctcgaagacatgcttgaagtccccgaagaccacaacaacgagaagacccgcaacaacccttcacgagtttacatgcgagacgctaaggcaatggctgctacacctgctgacgtcatcgagcaccctaacgcatatgcattcgtcgtggacatgcctggaatcaaaggagatgagatcaaggttcaggtcgagaacgacaatgtgcttgtggtgagtggagagaggcagagagagaacaaagaaaacgaaggtgtgaagtatgtgaggatggagagaagaatgggtaagttcatgaggaagtttcagttgcctgaaaatgcagatttggacaagatctctgctgtttgtcatgacggtgtgttgaaggttactgttcagaaacttcctcctccggaaccaaagaaaccaaagacaattcaagttcaagttgcttga

SEQ ID NO: 172 - DNA, 1953 bp, Arabidopsis thaliana
atggcgggtaaaggtgaaggtccagctatcggtatcgatctcggtacaacctactcttgcgtcggtgtttggcaacatgaccgcgtcgaaatcatcgccaacgatcaaggcaaccgcaccactccttcctacgttgctttcactgacagcgagcgtctcatcggggatgctgccaagaatcaagtcgccatgaaccctaccaacaccgtcttcgatgctaagcgtctaatcggaagaagatacagtgatccctctgttcaagcggataagagtcactggccttttaaggttgtttccggtccaggtgagaagcctatgattgtggttaaccacaagggagaggagaaacagttctctgctgaggaaatctcgtcgatggttcttattaagatgcgggagattgcagaagctttccttggttctcctgttaagaacgctgtcgttacagttcctgcttatttcaacgactctcagcgtcaagcgactaaggacgctggagttatctctggtctcaacgtgatgcgtatcatcaatgagccaactgctgctgctattgcttacggtcttgacaagaaggcgtcgagtgttggcgagaagaatgttttgatctttgatttgggaggtggtacttttgatgtgtctttgcttacgattgaggaaggtatctttgaagtcaaggcaactgctggtgacacgcatcttggtggtgaggacttcgacaacaggatggttaatcattttgttcaggagtttaagaggaagaacaagaaggatattactgggaacccgagagctttgaggaggcttaggacagcttgtgagcgggcgaagagaactctttcttcgactgctcagacgactatagagattgactctctttttgagggtattgatttctacactaccatcactcgtgctaggttcgaggagctcaacatggatttgtttaggaagtgtatggagccagtggagaagtgtttgagggatgctaagatggacaagagcagtgttcatgatgttgttcttgttggtggctctacaaggattcccaaagtgcagcagcttttgcaagacttcttcaatgggaaagagctctgtaaaagcattaacccggacgaggctgttgcttacggagcagctgtgcaagctgcaatcttgagcggtgaagggaatgagaaggtccaggacttgttacttcttgatgtcactcctctgtccttgggtttggaaactgccggtggtgttatgactgttttgattccgaggaacaccacaattccgaccaagaaagagcagatattctctacctattcagacaaccagcccggtgtactgatccaggtctacgaaggagagagggcacgaacaaaggacaacaaccttttgggaaagttcgagctcagtggtataccacctgctccacgaggtgtaccgcagattactgtctgtttcgacatcgacgccaatggtatcctgaatgtgtcggctgaggacaagacgactggtcagaagaacaagatcacaatcacaaacgacaagggaaggttatcaaaggaagagatcgagaagatggtacaagaggcagagaagtacaaggctgaggatgaagaacacaagaagaaggtggatgcaaagaacgctctcgagaactatgcatacaacatgaggaacacgatcaaggacgagaagatcgcatctaagcttgacgcagctgacaagaagaagattgaggatgcaatcgaccaagctattgaatggttagatgggaatcaactggctgaggcagatgagttcgaggataagatgaaggagctcgagtctctttgcaaccctattattgcaagaatgtaccaaggagctgggcctgatatgggtggtgcaggaggaatggatgacgacacacctgctggtggtagcggcggtgctggcccaaagattgaagaagttgattaa

SEQ ID NO: 173 - DNA, 2118 bp, Arabidopsis thaliana
atggcggatgttcagatggctgatgcagagacttttgctttccaagctgagattaaccagcttcttagcttgatcatcaacacgttctacagcaacaaagaaatcttcctccgtgagctcatcagtaactcttctgatgctcttgacaagatccgatttgagagcttaacggataagagcaagctcgatggacagcctgaactcttcattagattggttcctgacaagtctaataagacgctctcaattattgacagtggtattggcatgaccaaagcagatttggtgaacaacttgggaaccattgcgaggtctggaacaaaagagtttatggaggcgcttcaagctggagctgatgtaagcatgataggacaatttggtgttggtttctactctgcttatcttgttgcagagaaggttgttgtcactacaaagcacaatgatgatgaacaatacgtttgggagtctcaagctggtggttccttcactgtcactagggatgtggatggggaaccacttggtagaggaactaagatcaccctcttccttaaggacgatcagcttgaatacttggaggagaggagactcaaagacttggtgaagaagcactctgagttcatcagttaccctatctacctttggaccgagaaaaccaccgagaaggagatcagtgacgatgaggatgaagatgaaccaaagaaagaaaacgaaggtgaggttgaagaagttgatgaggagaaggagaaagatggtaaaaagaagaagaaaatcaaggaagtctctcacgagtgggaactcatcaacaagcagaaaccgatctggttgaggaagccagaagagatcactaaggaagagtatgctgctttctacaagagcttgaccaatgactgggaagatcacttagccgtgaaacacttctcagtggagggtcagctagaattcaaggccattctctttgtaccaaagagagctccgtttgatctctttgacacgaggaagaagttgaacaacatcaagctttatgtcaggagggtgttcattatggacaactgtgaagagctaatcccagagtacctcagctttgtgaaaggtgttgttgactctgatgacttgccactcaacatctctcgtgagacgcttcaacagaacaagatccttaaggtgatcaggaagaatctagtgaagaagtgcattgagatgttcaacgagattgctgagaacaaagaggactacaccaaattctatgaggctttctccaagaatctcaaattgggtatccatgaagacagtcagaacaggggaaagattgctgatcttctacggtaccactccacaaagagtggtgatgaaatgacgagcttcaaagattacgtcacaaggatgaaggaaggtcaaaaggacattttctacatcactggtgaaagcaaaaaggcggtggagaattctcccttcttggagaggctgaagaagagaggatacgaggtactttacatggtggatgcgattgacgaatacgctgttggacaattgaaggagtatgacggtaagaaacttgtttctgcgactaaagaaggcctcaaacttgaagatgagaccgaagaagagaagaaaaagagggaagagaagaagaagtccttcgagaatctgtgcaagacgattaaggaaattctcggggacaaggttgagaaggttgtggtctcagacaggattgtggactctccctgctgtctagtaactggtgaatatggatggactgcaaatatggagaggattatgaaggcacaggcgttgagagatagcagcatgagtggttacatgtcgagcaagaaaacaatggagatcaaccccgacaacggtataatggaggagctcaggaagagagctgaagcagacaagaatgacaagtctgttaaagatcttgtcatgttgctgtatgagacagctttgttgacgtctggattcagtcttgatgaaccgaacacttttgctgctaggattcacaggatgttgaagttgggtctgagtattgatgaggatgagaacgttgaggaagatggtgatatgcctgagttggaggaggacgctgctgaagagagcaagatggaggaagtcgactaa

SEQ ID NO: 174 - DNA, 717 bp, Arabidopsis thaliana
atggcaatagcttcttcttctccttcttcttcttctaatgtatcagtgatcccaacgggacctcaagtgttcatcagttttaggggaaaagagctacgcaaaggcttcatcagttttcttgtgcctgccttgaagaaaaaaaacatcaacgtctttatagatgagcacgaggtgaggggaaaagacctaatcagcctgtttaggaggataggtgagtcaaaaatcgcgttggtaatcttctctgagggatacaccgagtcaaaatggtgtttggacgagctggtacagatcaagaaatgcgttgatcaaaagaaaatcatagcgattcccatcttctacaagcttgatcccgcagtggtgaagggtcttaaaggaaaattcggcgataaattcagggatctgattgagagatatcatcatgaaccagaaagataccagaaatggacggaagctttgacttctgtttcccgaacgtttgcattgtgcttaccagaacacaggttacgatttttcaatcataaaaattgtctgtttcttgtagcacaagataccaatgataaatctgagaaggatttcataaggtcaatcatcaaggaagttaagaaagccctgtcaaatatctccagagaaagaaatggagatagagaagaaattgacgactgtttcgtggtttctgaaaggaaactcactaccgatatgtacgatacaccagagtaa

SEQ ID NO: 175 - DNA, 1527 bp, Arabidopsis thaliana
atgttcatgatcaaaaacctcacacgaatttcaccaaatacatcatcaatcatcaccagattcagaaactccggatcatcatcattatcatacactctcgcttctcgtttctgcacagctcaagagactcagattcaatctccagctaaaattccaaatgatgtggatcggagtcagtattcaggtttgccaccgacgagagaaggagagaagccgagagtagtggttctcgggtcgggttgggcgggttgtcgattgatgaaagggatcgatacgaatctctacgacgtcgtttgtgtttctccgagaaaccatatggttttcactcctcttcttgcttctacttgtgttggtactctcgaatttaggtctgttgctgaacctatctcacgtattcaacctgcgatttctagagagcctggttcttttttcttcctcgctaattgctctcgtcttgatgctgatgctcatgaggttcattgtgagactttgactgatggattgaacacattaaagccatggaagtttaagattgcttatgataagcttgtgatagcaagtggtgcagaggcttctacgtttggaatccatggtgttatggaaaatgcgatcttccttcgtgaagttcaccatgctcaggagattcgtaggaagctacttttgaatctgatgctctctgatactcctggtatatcgaaagaggagaaaaggaggctgttacattgtgttgtggttggtggtggaccaactggtgttgagtttagtggtgaactgagtgactttattatgaaagatgttcgtcaacgatatgcccatgttaaggacgacattcatgttactttgatagaggccagggatattctttcatccttcgatgatcgtctcagacgttatgctatcaagcagttaaacaagtctggagtacggtttgtgcgagggattgtgaaagatgtgcagtctcagaagttaatacttgacgatggcacagaggttccctacggactcttagtgtggtccactggtgttggtccttctcctttcgttaggtctcttggtcttccaaaagatcctactggaaggattggcattgacgaatggatgcgtgtaccttcagtgcaagacgtgtttgccattggtgactgcagcggatatctggagaccaccggaaaaccgactcttcctgctctagctcaggtagctgagagagaaggcaaatacttggcgaatctactaaatgcgatcgggaaaggcaatggaggacgagccaacagcgcaaaggagatagaacttggagttccctttgtgtataagcaccttggaagcatggctactatcggtcgatacaaagccctagtcgaccttcgcgagagcaaggacgcaaaagggatatcaatgactggtttcgtgagctggttcatatggagatcggcgtacctgactcgagtcataagctggagaaaccgattctatgtcgctatcaactggttcaccactttcgtttttggtcgtgacattagccgtatctaa

SEQ ID NO: 176 - DNA, 1020 bp, Arabidopsis thaliana
atgaattggactagaggaaaaactttaggccgtggctcaacggccaccgtttccgccgccacttgtcacgaatccggcgaaacactcgccgtaaaatccgccgagtttcaccggtcggagttcttgcaaagagaagccaagattctctcctcattaaactctccgtacgtcatcggatacagaggatgcgaaattacgagagagcccttccacaacaacggagaagctacgacttacagtcttcttatggagtacgcgccgtacggaacgttgaccgacgtagcgaccaagaacggcggcttcattgacgaggctcgggtcgtgaagtacacgcgccagatacttcttgggttggagtacattcataactcaaagggaattgcgcattgcgacattaagggaagcaacgtgttggtcggagagaacggagaagccaagatcgctgatttcgggtgtgcgaaatgggttgaaccggaaataaccgaaccggttagaggaacgccggcgttcatggctccagaagcggcgcgtggagagagacaagggaaagagagtgatatatgggcggtgggttgtacggtgatagagatggttaccgggtctcagccgtggattggggcggattttaccgacccggtttcggttctttaccgggtcggatatttaggtgagttaccagagctgccttgctcgcttacggaacaagcaaaggattttttaggaaagtgtttgaaaaaagaagcgacggagagatggacagcgagtcaactactaaaccatccgttcttggttaataaagaaccggaattggtaaccggtttggttacgaactcaccgacaagtgtgacggatcaaatgttctggagatcagtggaagaggaggtgtcagaggaccgttcaagctggtgggaatgtcacgaggatgagagaattggagtgctaagctggattggtcatgttgtggtggagtccacatgggacttggacggtgaggattggatcacggttcgacggaattag

SEQ ID NO: 177 - DNA, 828 bp, Arabidopsis thaliana
atgagtggcgaaggtaacttaggtaaggatcatgaagaagaaaacgaagcaccacttcctgggttcaggtttcatccgacggatgaagagcttttaggatactatcttcgaagaaaagtagagaacaaaaccatcaaactcgaacttatcaaacagatcgatatctataagtacgatccttgggatcttccaagagtgagcagcgtcggagaaaaggagtggtacttcttctgcatgagaggtaggaaatacaggaatagcgttcgaccaaaccgagtgaccggttcaggtttctggaaagccactggtattgataaaccggtttactccaatcttgactgtgttggtctcaagaaatctctggtttactatcttggttcagccggtaaaggcaccaaaaccgattggatgatgcatgaattccgcctcccctccaccacgaaaaccgactctccagctcaacaagcagaggtatggacactttgcagaatcttcaaacgagtcacatctcaaagaaacccaaccatcttaccaccaaaccgaaaaccggttatcactttaaccgacacttgttctaagaccagcagcttagattccgaccacacgagccaccgtacagtagattccatgtcccacgagccgccgcttccacagccacagaatccttattggaaccaacatatagttggttttaatcaaccgacatatactggtaatgataataacctcctgatgagtttctggaacggcaacggtggagatttcataggagactcagcaagttgggatgaacttagatctgttatagatggcaacactaaaccctag

SEQ ID NO: 178 - DNA, 279 bp, Arabidopsis thaliana
atggctttcttaaggagttttttcgctaccaagcatatcattcgccggtcttttactacggaatcattatcaacgcctaaagggttctttgctgtgtatgttggagaaaatctgaagaagaagagatatcttgttccggtttgttacttgaacaagccatctttccaagctttgcttaggaaagcagaagaagagttcggttttaatcatccaacgggcggtttgagtttaccatgcgacgaagctttcttcttcactgtcacttctcagattcgttaa

SEQ ID NO: 179 - DNA, 530 bp, Arabidopsis thaliana
atggagacggaagcggcggtgacagcgacggttacggcggcgacgatggggattgggacgaggaagagagatctgaaaccgtataaaggaatacgaatgaggaaatgggggaaatgggtggcggagatacgggaaccgaataagagatcaaggatctggttaggttcttatgcgacgcctgaagcggcggcgagagcttacgacactgctgttttttacctccgtggtccttcagcgaggcttaattttccggagcttttggctggacttactgtttctaacggcggaggaagaggtggtgatttatcggcggcgtatattaggagaaaagcggcggaggttggtgctcaggttgatgcgcttggagcgacggtggttgtgaataccggcggcgagaatcgcggtgattacgagaagattgagaattgtcgtaagagcggtaacgggtcattggaacgggtcgatttgaataaattacccgacccggaaaattcggatggtgatgatgacgaatgtgtgaaaagaagata

SEQ ID NO: 180 - DNA, 1923 bp, Arabidopsis thaliana
atggcagagacactcatcaccaaacctcctctctccctctcatttacctctctttcctcaatgctcccttctctctctctctccaccgccaaccgccacctctccgtcaccgacaccatccctcttcccaactccaactccaacgccacccctcctctccgtatcgccatcatcggattcggaaactacggccaattccttgccgaaaccctaatttctcaaggccacattctcttcgctcactcccgatccgatcactcctccgccgctcgccgtctcggtgtctcatacttcaccgatcttcacgatctctgcgaacgtcatcctgacgtagtccttctctgtacttcaatcctctccatagagaatattctcaaaacgttgccgtttcagagactccgtcgcaacactctcttcgttgatgttctctccgttaaagagtttgctaaaactcttctccttcaatacttacctgaagatttcgatattctttgtacacatccaatgtttggtcctcagagtgtgagttcaaatcatggctggagaggattaagatttgtgtatgataaagttaggattggggaagagagattgagagtctcaaggtgtgagagttttcttgagatttttgttagagaaggatgtgagatggtggagatgagtgttactgatcatgataagtttgctgctgaatcacagtttataactcatactcttggtaggcttttggggatgttgaagttgatatcgacgccgattaatacgaaagggtacgaggcgttgcttgatttagctgagaatatttgtggggatagttttgatttgtattatgggttgtttgtgtataataacaactctttggaggtgttagagaggattgatttggctttcgaggctttgcgtaaggagctttttagtcggcttcacggtgttgtgaggaagcagtcttttgaaggtgaagcaaagaaagttcatgtttttccaaattgtggtgaaaatgatgcttctttggatatgatgaggtcagaagatgttgttgtgaagtatgaatataactcccaggtgtctggtagtgttaatgacggttcgaggctcaagattggtatcgtcgggtttggaaattttggacagtttctaggtaaaaccatggtcaagcagggtcacactgtgttagcttattccagaagtgactacactgatgaagcagcaaagctcggtgtttcgtatttttcagatcttgatgatctatttgaagagcatcctgaagttattattctctgtacgtcaatcctttcgactgaaaaagttctcgagtcactaccgtttcagagactgaagagaagcacactttttgtggatgtactctcagtaaaagagttcccgaggaatttatttcttcaaactctcccacaagattttgatattttgtgcacgcatcctatgtttgggccagagagtggtaaaaatggatggaacaatcttgcctttgtgtttgataaggttaggattggaatggatgatagaagaaaatcgaggtgtaacagttttcttgatatttttgcccgtgaaggatgtcgtatggtggagatgtcgtgtgctgaacatgattggcatgctgctggatcacagtttatcacacacacagtgggaaggcttctggagaagctgagcttggaatctactcctatagataccaaaggttatgagacattgctaaaactggtggagaatactgctggtgacagctttgatctgtactatggactatttttatacaatcctaatgcaatggaacagcttgagaggtttcatgtggcttttgaatcattgaagacacagctctttggacgactacattctcaacattctcatgagctagctaaatcatcttccccaaagacaactaagctattaactagctaa

SEQ ID NO: 181 - DNA, 1220 bp, Arabidopsis thaliana
atggacggtggagcggaaggatctcagcagcctcaccttattctagccaacaagctcttcctcctcactcatccagatgttccagacatcgagaaagtccagctcaagtctgaggttttggatttcatcagatcccatggtatggctcctttgtacgaaaccctaattgcctcttcggtgctggatttggatcaaagcttgttagagtctatgcgggccgctaatgaagaggagcttaagaagctcgacgagaagattgcagatgcagaagaaaatttgggtgaaagtgaagttcgtgaagctcatcttgctaaggctctgtatttcatcaggattagtgataaggagaaagctttggagcagctaaaactcactgaagggaaaactgttgctgttggacaaaaaatggacgtggtgttttatacgttacaacttgcttttttctatatggactttgatctggtatcaaagagcattgacaaagcaaaaaaattgtttgaagagggtggtgactgggagaggaagaaccggctaaaggtctatgaaggtttgtactgcatgtccaccagaaattttaagaaggctgccagcttattcctggattctatatcaaccttcacaacatatgaaatttttccatatgagaccttcatattctacaccgtcctgacaagcatcataactttggacagagtttcccttaagcaaaaggtcgttgatgcacctgagatcttaaccgtgcttgggaagattccattcctttctgagtttctgaactccttgtatgagtgccagtacaaggcgtttttctcagcatttggtaagttcattacaaggaccagaggtcatacatccgaatgcatgttgcttggcttttctggaatggcggtgcagataaagtatgaccgttacttgtacccgcatttccggttctacatgagggaagtcagaacagtggtgtactctcagtttttggaatcttacaaaagtgtgacagttgaagcaatggcaaaggcctttggcgtttctgtcgatttcatagaccaggagttgtcgcgcttcattgctgctgggaagcttcactgtaagatagacaaggttgcaggtgttttggagacaaaccgtcctgatgcaaagaatgcactttaccaggcaacaatcaagcaaggggatttcttgctaaaccgaatccagaagctgtctcgtgtgatcgatctgtg

SEQ ID NO: 182 - DNA, 369 bp, Arabidopsis thaliana
atgggtaacggagacaaagtcatgagccactggagcttccacatcccacgtctccatcatcatgagcatgatcatgaaaaggtaccaaaagggtgtttggcagtgaaggtaggacaaggagaagagcaagagagatttgtgattcccgttatgtactttaatcatcctttgtttggacaactcttgaaggaagctgaagaagagtttggttttgctcaaaaagggacaatcacgatcccttgtcacgttgaggagtttaggtatgttcaaggattgatcgatcgagaaaacactagatttctcggtactaatctccttgatcatcaccatcatcatcacaaccatctcatccggtgttttagggtttga

SEQ ID NO: 183 - DNA, 1542 bp, Arabidopsis thaliana
atggagaaaaaaccgatagggatacgattcttggaacgtatcaaaggctcaaagctctcttacagtgcttatcaagccatagtgttgatcgtgacgtttctcgcttacgctagctatcacgctgcaagaaaaacaacaagtattgtcaaaagtgctcttgatcctcaatctccagatacaggactaaactcacttcttttgagatttacttcgtttggttcctctgtaaaagaagaaggtggttgggctcctttcaatggtcctgatggtacggttttgctcggtgagatcgatgttgcgtttcttgcggtttacgctttcggaatgtatttcgctggacatttgggggataggatgaatcttaggatcttcttgactgttggaatgataggaactggattgtttacttctctgtttggagttggttattggggtaacattcatagcttttactatttcttgataatgcaaatgttagctggtttgtttcaatcttcgggttggccatcggttgttgctgttgttggaaactggtttaacaagaagaagagaggtttgatcatggggatatggaatgctcatacttctgttgggaacattactggctcgttgatcgctgctgctatgttgagatatggttggggatggtcttttgttgttcctggtgttatcattgtggtgattggtttggtgaattacgctttcttgcctgttagtccagagaatgttggagcagagcgagacgaggttcttgattcttcgtctgagaaaatcggaaactctgttaatgagccgttactattgagctcgtcggattcggaaaccgatgacaagaaacgagctgttggattcattgaagcgtggaggattcccggagttgcgcctttcgcgctctgtctcttctttgctaagttggtcgcttacactttcctctactggctcccattttacgttagccatacagcgattgaaggcgaatatttatcggacgaaacagcgggaaatctttcgacaatgttcgatgtaggaggtgtggttggtggaatcatggctggttacatttcagaccgaattggtgcaagagctattacggctgcgagtttcatgtactgctcaattccagctttgttcttctaccgtagctacggacatgtatcgttattagccaacgcgtctctcatgttcttgaccgggatgttggttaacggtccttacgctttgattacaacggcagtttcagctgatcttggaacacacagctcgttgaaaggaaactcgagagctttggctacggtaacggctattatcgatggaacgggatccgttggagcggcggtcggacccttactaacgggttacatatcgtcgaggggtagctggaccgcggttttcacaatgttgatgggagctgcgtttgtggctggactattgttgacgaggctggtaatggccgaagtagcggagaagatagctgagtctaggccatcggaagaatgtagatctccggtggactatgtccaagatcatgtgatggaagtgtga

SEQ ID NO: 184 - DNA, 1056 bp, Arabidopsis thaliana
atggaagaagcagttgtaacgaggtattggtgtcatatgtgttctcaaactgtgaatccagtcatggaagctgagatcaaatgtcccttttgtcaaagtgggtttgttgaagaaatggaagatgacgacgatcatgattcttctgatccggctgatgttagagcaaacaactctctttgggcgcctatcttgatggaacttatgaatgatcctgtgcgtcgtaggagaaaccagagtgttgagtctgttgaagataatcaaaacgaggtacagaccgagaacaatgaagacgatggagaaaatgatttggattggcagcttcaagagattctcaggagaaggagaagacattccgctgctgttttgcagttgcttcaggggatacgagcagggttgtctgtagaatctgagagtactggtaatggaggtaataatccgggacgggtgatcttgatcaatacctccaatcagactatcacggttcaaaactctgctgatatggattctgtacctgctggttctttaggtgactatttcattggtcctggatttgaaatgttgcttcaacgtctagctgagaatgatcccaacagatatggaacacctcctgctaaaaaagaagctgtcgaggctttggctactgtgaaaatcgaagagactctgcaatgttcggtttgtttagatgattttgagattggaactgaggcaaagctgatgccctgtacgcacaagtttcatagtgactgcttgttaccatggcttgagcttcacagttcatgcccggtttgcagatatcagttacctgcagatgaagccaagactgattcagtaacaacaacgagcgataacaatggaagcagtagtgcttctgctacaaccagccatggagctgagaacagcgatggaaaccggcgccaagaagaagaagaagaagaagaagaggaggaggaggaggagaacgagaacaatgacggaagcggattctcgatcccgtggccgtttagcaccttgttctcctcgtcgcaagatagcaatgcaccaacggattctagttaa

SEQ ID NO: 185 - DNA, 1074 bp, Arabidopsis thaliana
atggcatgtatgaagaaggcactaccattcattttaatggtattgttgcaaatagggtatgcaggaatggatattcttacaaaggatgtcctaaacaaaggcatgagcatttacgttctttccgtctaccgtcacggagttgccaccgttgttatggctccgttcgccttctacttcgacaagatagtgagaccgaagatgacagcgttgattttcttcaaaatagcgattcttggtttattagatccagtgattgctcaaaacttattcaatctcgggatgaaatacacgacagctacatttgcaattgccttgtacaacactttacctgcagtcacgttcatcctcgccttaatattcaggctcgaaagcgtgaagtttcaaagtatcaggagtgccgctaaggtggttggaacagtaactacagttggaggaatcatggtcatgacacttgtaaaaggtccagctcttgacctcttctggactaaaggaccctctgcacagaacacagttgggaccgatattcatagctccatcaaaggtgcagttttagtcacaattggttgcttcagctatgcatgtttcatgatactacaagcaatcacattgaagacttaccctgcagagctctctctcgcaacatggatatgcctaataggtacaatagagggagtagttgtagcattagtgatggagaaaggaaatcctagcgtgtgggccattggttgggacactaaacttcttacaatcacctatagtgggatagtgtgctcagcgcttggttactacattggaggagtggtgatgaaaaccagaggtcctgtgtttgtaacagctttcaaacctctttgtatgatcgttgtggcgattatgtcgagcatcatctttgatgagcagatgtacctcggaagggctcttggtgctacggtcatatgtgtaggtctataccttgtgatatggggcaaagccaaagattatgaatatcctagcacgccgcaaatagatgatgacttagcacaagcaaccacaagcaagcaaaaagaacaaagaagaacagtgatagaatcagtctaa

SEQ ID NO: 186 - DNA, 348 bp, Arabidopsis thaliana
atggaaaatcggtcagaaatgggtaaccggaggcagcagaatctcttcgtcatagcttctcccgacgagattgctaagatccatcgagccgaaacttccaaacaagccggagctattgccggagctaaggccgccgccgttgccgccgtcgccagtgcgattcccacagtagctgccgttcgtatgttcccgtgggctaaggcaaacctcaactacactgctcaagcactcattatttcttcagcttctatcgctgcgttcttcataaccgcggataaaacgattctacaaggcgcaagaagaaacaccgaggctcagttaaagaaagttcagcaagactctaaataa

SEQ ID NO: 187 - DNA, 1185 bp, Arabidopsis thaliana
atgggttggagatacaaagctggtctgttcttgattggcactgttgttatcatatgggtcacctccgctgaagttactcaggatatctttacagcctataagcagccatttgcagtcacatatcttggagcttctcttatgattgtttaccttcccgttgcattcctcaaagactggctttgtcgatatttagatcgacgctcttccaaatccaataaaattcccgctttgaccgatgattcctcggttgagctcggttctcctttgaggcataaaatcattgaaatgggacttcaagggactataactaagaaagatagtgaggaacacctttcatcccatgaagaagaagatgagagacccttgatcggtaaagttagagaagaagtgcagactctgaaacagaggaaagagatcacgactaagcagattgcaatgtacggcctttacctcgcaccaatttggtttgtaacagagtatctgtccaatgctgctcttgctcgtacaagtgtggcaagtactactgtattgtcttcaacctcgggactgtttactctgttcattggtgtatttttgggccaagataccttgaacctgtcgaaagtagtggctgtatttgtcagcatggctggtgtggtcatgacgacgctagggaaaacttgggcttctgatgagtcgcaattaaattcttcactcaacggggaacgatcccttatgggagatctttttgggcttctctctgcggtctcttatggactttttacagtgcttcttaagaagtttgccggtgaagaaggagaaggggttgatgtccaaaagctgtttggatacataggattatttacacttgttgctctctggtggcttgtgtggccattgacagcattagggatcgaaccaaagtttaccataccacactctgtgaaagttgatgaagttgtcttagccaacggtttcatcggaagtgtcctctctgactatttttgggcactttctgtggtgtggacaactccgctggtagcgacactgggcatgtctctcacaattccgcttgcgatggttgctgacatgatgatccatggtcgtcattattcagccatttacattcttggctctactcaggtgtttgctggattcgtaatagctaacatatcggatttgttctcaaagaagcttggattgtag

SEQ ID NO: 188 - DNA, 576 bp, Arabidopsis thaliana
atggagagtaacaacaacgagaagaagaaagttgcaagacaatcatcatccttcagactacgtagcccaagcctaaacgcacttcgtctccaacgaatcttcgacttattcgacaaaaacggcgacggattcataaccgtcgaagagctaagccaagctctaacacgtcttggtctcaacgctgatctctccgatctcaaatccaccgttgaatcatacatccaacctggtaacactggtctcaatttcgatgatttctcttctcttcacaaaacactcgacgattctttcttcggtggagcttgtggaggaggagaaaacgaagatgatccttcttccgcagctgaaaatgaatcggatctcgccgaggcgtttaaggtgtttgatgagaacggtgatggattcatctccgctagagaactgcaaactgttctgaagaaacttggtttacctgaaggtggagaaatggagagagtggagaagatgatcgtttccgttgaccggaatcaagatggtcgcgttgacttttttgaattcaagaacatgatgcgtactgttgtcatcccttcttcttga

SEQ ID NO: 189 - DNA, 770 bp, Arabidopsis thaliana
atggcgtattctcttcctacatttccccaagccttaccttgctcgtcaaccaaaacttcttcctccttggctaccttccgatctcctttcttaagattcaatggttccacttccttaatcccctcctctatctccatcacttcacgtggcacatcctccccgaccatcatcccacgtgctgccgcctcagaatccgactctaacgaagccctagccaacacaaccttccacggcctctgctatgtcttgaaagacaacatagacaccgaccagatcatcccagcaggagccgcttgcaccttcccatcgaaccagcaagagcgtgatgagatcgccgctcacgctctctctggtctaccagacttccacaaaacacggttcattgagccaggagagaacagatcaaagtactcaatcataatcggcggcgaaaactttggttgcggatcgtcacgtgaacatgctccggtctgtcttggagcagctggagctaaagccatagttgctgagtcttacgcaagaatctttttccgtaactcggttgctacaggagaggtgtttccgctcgagtcagaggttagagtctgtgaggagtgtaagacaggagatacggtgacgatcgagctgagtgatagtggtggtttattgactaatcacacgaccggtaaaaactataagctgaagtcgatcggtgatgctggaccggttattgatgctggtggtatttttgcttatgcgaggatgatgggaatgattccatcattagctta

SEQ ID NO: 190 - DNA, 666 bp, Arabidopsis thaliana
atggcgaattccggcgaagagaagttgaagctctactcttactggagaagctcgtgtgctcatcgtgtccgtatcgccctcgctttgaaagggcttgattatgagtatataccagtgaatttgctcaagggtgatcaattcgattcagatttcaagaagatcaatccaatgggaactgtaccagctctggtggatggagatgttgtgattaatgattcttttgcgataataatgtatctggatgagaagtaccctgagccacctttgttacctcgtgacctccataaacgagctgtgaattaccaggcaatgagtattgtcttgtctggcatacagcctcatcaaaatctggctgttattaggtatatcgaggaaaagataaatgtggaggagaagactgcctgggttaataatgctatcacaaaaggatttacagctctcgagaaactgttggtgaattgcgctgggaaacatgcgactggtgatgaaatttacctggctgatctctttctagcaccacagatccacggagcaatcaacagattccagattaacatggaaccgtacccaactcttgcaaaatgttacgaatcatacaacgaactgcctgcgtttcaaaatgcactaccggaaaagcagccagatgctccttcttccaccatctga

SEQ ID NO: 191 - DNA, 1812 bp, Arabidopsis thaliana
atggccgttgattcacctcttcaatctcggatggtttcagcgacgacttctgagaaagatgtgaaagctctcaagttcattgaagaaatgactcggaaccctgactcggttcaagagaaggttcttggagagatactgactcgtaactctaacaccgaatatctgaaacggttcgatcttgatggtgtcgttgatcggaaaacgttcaagagcaaagttccggtggttacgtacgaagatttgaagccggagattcaacgtatatccaacggcgattgttctccgatcttgtcttctcaccccatcaccgagtttctcacaagctcaggaacatctgctggtgagaggaaactaatgccaacaattgaagaagacttagaccgacgtcagcttttatacagtcttctcatgcctgtgatgaatctctacgtgccgggattagacaaaggcaaagggttatacttcttattcgtgaagtcggagtcaaagacgtcaggtgggttaccggctcgtccggttctcacgagttattacaaaagcgaccacttcaagagacgaccgtacgatccgtacaacgtctacactagtcctaacgaagccatcctctgctccgactcgtcccaaagcatgtatgctcaaatgctatgtggtctcttaatgcgccatgaagttctccgactcggcgcagtgtttgcttccggtctcctccgtgccataagcttcctccagaacaattggaaggaacttgctcgtgatatctcaaccggaaccctaagttctcgaatcttcgatcctgccattaaaaaccgcatgtccaagattttgaccaaacctgatcaagaactggctgagtttttggttggggtttgttcacaagagaattgggaagggataatcacaaagatatggcctaacacgaagtacctcgacgtgattgttactggagcaatggctcagtatatcccgacgttggagtactatagcggtggattaccgatggcttgcacgatgtatgcttcgtccgaaagttatttcgggattaacctaaagccgatgtgtaaaccctcggaggtttcttacacaatcatgccaaacatggcctactttgaattcctcccacataatcacgatggagatggagcagcagaagcatcattagacgaaacgtcacttgtggagcttgctaatgttgaggtaggaaaagagtacgaactcgtgatcacgacctacgcggggctctaccgttacagagttggcgacattcttcgtgtcacggggttccataattccgctccacagttcaaattcatacggagaaagaatgttctgctaagcgtagaatccgataaaaccgacgaggctgagctacaaaaagcagtggagaatgcgtcgaggttgtttgcagagcaaggaacacgtgtgatcgagtacacaagctacgcagaaacgaagactataccgggtcattacgtaatctactgggagctacttggtagagatcaaagcaatgctcttatgagcgaagaagtcatggctaagtgctgtttggagatggaggaatctttaaactcggtttatagacaaagccgggtcgctgataaatcgatcggcccgttggagatacgtgtggtacggaacggtacgtttgaggagctcatggactatgccatctcgagaggcgcatcgattaatcagtataaggtaccgaggtgcgtgagcttcacacctatcatggagctgcttgactctagagttgtgtctgctcatttcagcccttcgttgccgcattggtcaccagaacgacgtcgttag

SEQ ID NO: 192 - DNA, 1610 bp, Arabidopsis thaliana
atgggtggtgaagcagattcgaggcagccgctgactgctgaaggcgtagctgttgccgtgaacgtcagatgctccaatggcacgaaatttagtgtgacgacgagcctcgattccacggtggagtctttcaaagagttaattgcgcagaacagcgatgtgccggcaaatcagcagcgtttgatttacaagggacgtatcctcaaagacgatcagactctcctcagctatggtttgcaggctgatcacaccgttcatatggttcgaggttttgtgccttcttctccttctgctcccgctgcaaatgctggaaaccaaaccactgctcctcaagcggttggttcaaatgatagctcaaacctcggaggaggtgaatctttgttccctggccttggatttaatcctttgggtggtggaaatgctatggctggattatttggatctggtcttcctgatcttgagcaggcacagcaacaactagctcagaaccctaacatgattagagagatgatgaatactccagccatccagaatcttatgaacaacccagaatttatgaggagtatgattatgaataaccctcaaatgcgtgagcttgtagatcgcaatcctgagcttggtcatgtgctcaatgacccaagcatccttcgtcaaactctagaagcggcgagaaacccagagcttatgcgtgaaatgatgagaaatactgatagggctatgagtaatattgagtctatgcctgagggatttaacatgcttaggcgtatgtatgaaaatgtccaggaaccgttaatgaatgctaccactatgtccgagaatgctggaaacaatacgagctctaatccatttgctgctcttctgggaaaccagggggttactacacaaggaagcgatacttctaataatatttcggcaccgaatgctgaaacgggtacacctaatgcaaatccacttcctaatccttggggtgccacggctggccagacaactgcccctggaaggacaaatgctggacttggtggtcttggtgggcttggaggccttggtggactcggtatgctgggagcggactcacctcttggtgcgactccagatgcttctcaattgagccaaatactgcaaaaccccgctatgtcgcagatgatgcaaagcgtactttccaatccacagtacatgaatcagcttatgagtcttaacccacaactccgaagcatgctagatatgaatcctcagttgagggaaatgatgcagaaccctgatttccttcgccagtttagctctcccgagatgatgcagcaaatgatgtctctacaacaatcacttttctctcagaataggaacacggctggccaggatcctacgcaaactggtgctgcgacagccaataacggaggactagatttattgatgaatatgtttggcagccttggtgctggcggcctaagtggcacaaaccaacccaatgttcctcctgaagagcgatttgcgactcagttgcaacagttgcaagaaatgggattctacgacagagcagagaacataagggctttgcttgcaaccaatggtaacgttaacgctgctgtagaacgactcttggggagtattggccagta

SEQ ID NO: 193 - DNA, 1812 bp, Arabidopsis thaliana
atgtcagccaccgccgccgcctcctcctcgatcgccgttgccaccaactctctcaggaacgtgactctgtcttccagatcgccccttccatcagccatctccgtggctttcccttcccgtggacgcaatactcttcagcgacgcctcgttctcgtttcctgcagtactggagacggatctaagcctacgattctcgtggcggagaagctcggtgacgctggtattaagcttttggaggatgtcgcgaatgtcgactgttcgtataacatgactcctgaggagctcaacattaagatctcgctctgtgacgccttgatcgtgaggagtgggactaaggttggccgtgaggtgttcgaatcgtctcacggacggctcaaggttgttggtcgcgctggtgttgggatcgacaacgtggatctgagtgcagcgacggagtttgggtgtttggttgtcaacgctccgacggcgaacacgatcgctgccgctgagcacggaatcgctcttatggccgccatggctaggaacgtagctcaagctgatgcgtctgttaaggctggagagtggaagaggaacaagtatgtaggtgtttcacttgtgggaaagacccttgcagtgttgggattcgggaaagttgggacggaagttgctcgtcgtgctaagggtcttggtatgcgtgtcattgctcatgatccctatgccccagcagaccgtgcacacgccattggtgttgacttagtgagctttgatgaagcccttgccaccgcggatttcatttctcttcatatgcctcttacgccaacaacatcgaagatactaaacgacgaaacctttgccaaaatgaagaagggagttcgaattgttaatgttgctcgtggaggtgtcatagacgaagatgcgttagtgagagctctggatgctggtattgttgcgcaggctgcacttgatgttttcaccaaagagcctccggctaaagatagcaagctcgtgcagcacgagagggtcactgtgacacctcatcttggagctagtaccatggaggctcaggaaggagttgccatcgaaattgctgaagctgttgttggagctctgaatggagagcttgctgctactgcagtcaatgcacctatggtttctgctgaggttctgaccgagctgaaaccatatgtggtgctagccgagaaactaggaagactggcagtgcaactggtggccggaggaagcggtgtgaaaaacgcgaaaatcacatacgcctcagcaagagccactgatgatcttgacaccagacttctccgagccatgatcaccaagggaatcatcgagccaatctctgacgtatatgtcaatttggtcaacgctgatttcacagccaagcagagaggtctcagactctcagaggaacgtgtgcttttggatggttcaccagagagcccattggagacaataactgttcagctaagcaatgtggagtccaaattcgccagttccctgtctgaatcaggagaggttaaagtggaaggaaaggttaaagacggagtcccgcatttgacaaaggttggatcttttgaggtcgatgtaactcttgaaggtagtatcatactgtgcaggcaggtggatcaacctggtatgatcgggactgtcggaagcatccttggagagtctaatgtcaatgttaacttcatgagcgttgggagaattgcaccgaggaagcaagcgattatggcgattggagtagatgacataccaagcaaagagacactgaagaagattggggaaattccagcggttgaggagttcgttttcctcaagctctag

SEQ ID NO: 194 - DNA, 525 bp, Arabidopsis thaliana
atggatgtttcaggaagcttgaattgcgttgttgtggcggtagatggaagcgaggtgagtatggaagctctgaggtgggctctagacaacctcaagctctcttcgtcttcttccgattcatcattcgtcgtgctccacgtccagccgtcgccttctgtagccgccggcgtgagtcccggcaccatacctttcggtggtcccagtggtcttgaggttcctgctttcactgctgcaatcgagcaacaccagaagcggatcaccgacaccatcctcgaacacgctagtcaaatttgtgctgaaaaatctgtgagtagagtgaatgtgaaaacacaagtggttattggggatcccaagtataaaatctgcgaagctgtagagaatttgcatgctgatcttcttgtcatgggctcccgggcttatggccgcattaagagaatgtttctgggaagtgtaagcaactactgcaccaaccacgcccattgtcctgttgtgataatcaaaccaaaagaggattcttctgcataa

SEQ ID NO: 195 - DNA, 1407 bp, Arabidopsis thaliana
atggatcgtgtggttggtggtaagttcaagctcggacgaaagcttggaagtggctcatttggtgaaattttcctaggagtgaatgtacaaactggagaagaagtggctgttaagcttgaacctctccgagctaggcatcctcagcttcattacgagtcaaagctttatatgcttctccaaggaggaactggtattcctcacctcaaatggtttggtgttgagggtgaattcaactgtatggtgatcgaccttctcggtcctagtatggaagaatttttcaactattgcagtcgatccttctctcttaagacagttctaatgctcgcagatcaaatgataaatagagtggagtatatgcatgttaaaggcttccttcatcgtgatattaagccagataactttttgatgggtcttggacgcaaagcaaaccaggtgtacatcattgactatgggcttgccaagaagtatagagatcttcaaacacacaagcatattccatacagggaaaacaagaaccttactggaacagctcgatatgcaagtgttaacacccatcttggaattgagcaaagtagaagggatgatctggaatctctaggctatctgcttatgtattttcttcgaggaagccttccttggcaaggccttcgtgcaggtaccaaaaagcagaagtatgacaagatcagtgaaaagaaaagactaacaccagtggaggtcctctgtaaaaactttccacctgagttcacatcgtattttctctatgtgcgttcactacggtttgaagacaaaccagattattcatacctaaagaggcttttcagagacctatttatccgagaaggttatcagtttgactatgtatttgattggacaatattgaggtatccacagttcggctccagttccagctcgaattccaaaccaagaccaactttaagaccagctatgaatattccagtaccatctgccgacaaagcggaaaagcctccaattggacaggacagccgtgagaggttctcaggtgttttcgaggcatacaccagaagaaatggctcaggaaccggcgttcaagctgatcagtctagtagaccaagaacctcagagaatgttcttgcatccaaggacacgcaaaaccaggagagaccaaactctttatctaggaacctgagttcgtcaagaaaagcaattgctgggtcaagtgttcgagccacttcctcagctgatttcacagagaatcgattaagcagactcatcccaaacaatgatcggtcttctacaactctgaggacccagttcgctccttcgtcctcctcagtagccacaaaagctgcaccaacgagagccgctcgtgacattaccctccagagccttgagctcctcagtattgggaacagcaagaggaagtga

SEQ ID NO: 196 - DNA, 1332 bp, Arabidopsis thaliana
atgggacaaggaccatcgggaggattgaatcggcaaggagatcggaaacctgatggtggagataagaaagagaagaagtttgagccggcggcaccaccggctcgtgtagggaggaagcaaaggaagcagaaagggccagaggcggcggcgagacttccgacggtgactccgtctactaagtgtaagctccggttactgaaattggaacggatcaaggattatttgttgatggaggaagagtttgtggcgaatcaagagaggttgaaacctcaggaagagaaagctgaggaagatagatctaaggttgatgatcttcgtggtacacctatgagtgttgggaatttggaagagttgattgatgagaatcacgctattgtttcttcttctgttggacctgagtactacgttgggattttgtccttcgttgataaagatcagcttgaacctggatgttcgattttgatgcataataaggttctctctgttgttgggattctacaagatgaagtggatccaatggtgtctgtgatgaaagttgagaaagctcctttggagtcatatgctgatattggaggtttagaagctcagattcaggagattaaggaagctgttgagcttcctttgactcatcctgagttgtatgaagatattggtattaaaccaccaaagggtgtaattttgtatggtgagcctggaactgggaagacattgcttgctaaggcggttgcgaattcaacatcagctactttcttgagagttgttggtagtgagctgattcagaagtatttgggagatggtcctaagcttgtgagagaacttttcagagttgctgatgacctttcaccatcaatcgtcttcatagatgagattgatgctgttggtaccaagcggtatgacgctcactcaggaggtgaacgtgagatccaaagaactatgttggaacttctgaaccagcttgatggatttgattcaagaggagatgttaaggtcatccttgcaacaaacagaatcgagagtcttgacccagcactgcttcgacctggacggattgataggaaaatcgagttccctctcccagatatcaaaacaagaagacgtatcttccagatacacacatcgaagatgactctctcggaagatgtaaacctcgaagagtttgtgatgacgaaagacgagttctcaggagctgatataaaggctatatgcactgaggctggtctactagctctcagggagcgtcgtatgaaggtgacacatcctgatttcaagaaagcaaaggagaaggttatgttcaagaagaaagaaggcgtccctgaaggcctctacatgtaa

SEQ ID NO: 197 - DNA, 942 bp, Arabidopsis thaliana
atgggtctaaagggttttgctgaaggaggaatagcttcgattgttgcgggttgttcgacccacccgcttgatctaatcaaggtccgaatgcaacttcaaggcgaatcagctccgattcaaaccaatctccgaccagctcttgcttttcagacttcgaccaccgtcaacgcgcctcctctacgtgttggtgtaatcggagtcggatctcgtttaataagagaagaaggcatgcgtgctctgttttccggcgtctccgccaccgttcttcgtcaaactctgtattcaacgactcgtatgggtttatacgacatcatcaaaggagaatggaccgacccggaaacaaaaacgatgcctttaatgaaaaaaatcggtgccggagccatcgccggagcaatcggagccgccgttgggaatcctgctgacgtggcgatggtgaggatgcaagccgatggtcgtttaccgttgactgatagaagaaactacaaaagcgttttagacgcgatcacgcaaatgattcgcggtgaaggcgttacgtcgttgtggagaggatcgtctttgacgataaacagagcaatgcttgtgacgtcatcgcagttggcttcgtatgattctgttaaagagacgattttggagaaagggttgttgaaagatgggcttgggactcatgtgtcggcgagtttcgcggcggggtttgttgcgagcgttgcgagtaatcctgttgatgtgattaagacgagagtgatgaatatgaaggtggtggctggagttgctccgccgtataaaggagcggttgattgtgctttgaaaacggtgaaagcggaagggattatgtctttgtataaaggttttatcccgacggtttcgagacaagcaccgttcacggtggttttgtttgttacgcttgaacaagttaagaagttgttcaaggactatgacttttga

SEQ ID NO: 198 - DNA, 2463 bp, Arabidopsis thaliana
atgggaacaaacggtacaacatgtccaggaccaatgaaagcaacctctaatggagtctttcaaggagagaatcctctggaacacgcgttgcctcttctcatactccagatctgtatcgttcttcttctcactcgtcttcttgcttttctcctccgtcctctccggcagccacgtgtcatcgccgagattgtcggtggaatattacttggaccatcagcacttgggaaaagcactaagtttatcaacacagttttcccaccaaagagtctaacggttttagacacacttgcaaacttaggactcatcttcttcctcttcctcgttggtctcgagctcgatcccaaatctcttaagcgaaccggaaagagagctctctctatcgctctcgccggaatcactcttcctttcgtattaggcattggaacttcttttgctctccgcagttccatagctgatggagccagcaaagctcctttccttgtcttcatgggtgttgctctctccatcacagcgtttcccgtcttggcccgaatactcgctgagattaagcttctaaccactgatatcggaaagattgctttgtccgctgctgcggtcaatgacgtggctgcttggattctccttgctctcgcggtggctctttctggagaggggagctctccgcttacttctctttgggtgtttctctcgggttgcggttttgtcttgttctgtatctttgttgtgcaaccagggattaagttgattgctaaacgttgccctgaaggagaaccggtaaatgaactttacgtgtgttgcacgttaggtattgttcttgcagctagcttcgtcacagactttattgggattcatgcgctgtttggtgcttttgtgatcggggttattttccctaaagaaggcaatttcgcgaatgctttagttgagaaagttgaggatctcgtgtcaggtcttttcttgccgctctacttcgtctcaagtggtttaaagaccaatgttgcgacgatccaaggagctcagtcttggggactcttggttttggttatatttaatgcttgtttcggtaaaatcatcggtacagtcctagtttccctttactgcaaagttccgcttgaccagtctttagcgcttggtttcttgatgaacacgaaaggtcttgttgagctcatcgtcctcaacattggtaaagacagaggggttctgaatgatcaaattttcgctataatggttctaatggcgatattcaccacattcatgacgactcctctagttctggcagtgtacaaaccgggtaaatccttaaccaaagctgattataagaaccgaacggtggaggagacgaaccgttcaaacaaaccgctctgcctcatgttctgtttccagagcataatgaacatccccacgatcgtcaacctcatagaagcatcccgaggcataaaccgtaaagaaaatctatcagtctacgcgatgcatcttatggagctttcagagagatcatcggctatactcatggcacacaaggtcaggagaaacggtcttcccttctggaacaaagacaaatctgagaacaatagttcttcttccgacatggttgtggtcgcattcgaggctttccgaagactcagccgtgtctcagtgcgtcccatgacagcgatctcaccgatggcgactatacatgaggatatttgccaaagcgcggaacgcaaaaaaaccgctatggtgattcttccgtttcataagcacgttaggctggacagaacatgggagacgactaggaatgactaccgttggattaacaagaaggttatggaggaatctccatgttctgttgcgattttggttgatcgtggacttggtggtacgacacgtgtcgcgtctagtgatttctcgttgactataacagttttgttttttggagggaatgatgatcgtgaggcgttagcgtttgcggtgcgaatggctgaacatcccgggataagcttaaccgttgttcggtttatccctagcgatgaattcaaaccggaaaacgtgaggatcgagataaccgaagatcagctctgttcaggggcaactagattgattgatattgaagctataaccgaacttaaagcaaagattaaagaaaaagaaagttctcgttctaattcggattctgaatctcatatcatttacgaagagaaaatcgtgaaatgttacgaggaagttatcgaagttattaaagagtattctaaaagcaaccttttcttggtggggaagtcaccggaaggttctgtagcgtcagggataaacgtaagaagcgacacgcctgagcttggaccgatcgggaatttgttaacggaaagcgaaagtgtttcgacggtggcatcagtgttggtggtgcaacagtatatagcaagccgtccggtcggaatttcgaagaacgtcacgactgaagagtcgctggttgaggattctgagagtccttag

SEQ ID NO: 199 - DNA, 1089 bp, Arabidopsis thaliana
atggccaccgaaacccaaatccgaatcggagtaatgggttgcgccgatatcgctcgaaaagtctctcgagcaatccacctcgctcccaacgccacaatctccggcgtagcaagccggtctttagaaaaagccaaagcctttgccaccgccaataactacccagaatcaaccaaaatccacggctcttacgaatctcttctcgaagatccagagatcgatgcgctctatgttcctctccccactagtctccacgttgagtgggctattaaagcagctgagaaagggaaacatatccttttggagaagcctgttgctatgaacgtaactgagtttgataagattgttgatgcttgtgaagctaatggtgttcagattatggatggtactatgtgggttcataatcctagaactgctttgcttaaagagtttctttctgattctgaacgttttggtcagcttaaaactgtacagagttgtttctcatttgctggagatgaagattttcttaaaaacgatatccgtgtgaaacctggtcttgacgggcttggtgcgctaggagatgcggggtggtacgcgatcagagcaactcttttagctaataactttgagcttccgaaaactgtgactgctttccccggtgctgtgttgaatgaagcaggagtgatactttcctgtggagcatctttgagttgggaagatggacgaactgcaactatatattgttcattcttggctaacttaacaatggagataactgccattggaacgaaaggcacactccgtgtacacgacttcattatcccgtataaggagactgaggcgtcgtttaccacgagcactaaagcttggttcaatgaccttgtgactgcgtgggttagtcccccgagtgagcatacggttaagacagagcttccacaagaggcatgtatggtgagagagtttgctcgattggttggagaaatcaagaacaatggtgcaaagcctgatgggtactggcctagtattagccgaaagacgcagctagtggttgatgctgttaaagagtctgttgataaaaactatcaacagattagtctctctggtcgttga

SEQ ID NO: 200 - DNA, 219 bp, Arabidopsis thaliana
atgagccagtacgatcacaaccagtctgcaggagctaacccaccgccaccgatgtctacctgtacatcaccaccaccgccgattggttacccgactaaccaaccgagtcatggttcggtagctcagggtaaagtggaaaccaagtctaagggtgacggattcttcaaaggctgtcttgcggccatgtgttgctgttgtgccctggacatttgcttctaa

SEQ ID NO: 201 - DNA, 3396 bp, Arabidopsis thaliana
atggaggaagatcgtggggaagcgatcgttttagatatttcgccggagattaataatactccggcggtaatgatgagagttccacggaggattcgtgagaggcttttgtctgactgtagtaataagaagacagtatcttctgttcaagatattgaagacaagcttcttcatgcccatctacgaagacagcaattttatcataacgtttcgagaaaggctcgtgctaaacctagaagtccttcacgatcatctgatgaagaacttggccaacgaatcgaagcaagacttctggctgctgaacaaaaaaggttggagattcttgcgaaggcacagatgcgtttggcgaagttagatgagttaagacaagcagcgaaaacaagtgtggagatacggtcggagagggaacgtgtgaagcttggaactcaagtggagtctcgtgttcaaaaggctgaagctaatagaatgaagattctcaaggcgtctcatcagaaaagggcttgtgctaaagagagaacgtcacagtctatgatgaggaggatggctagagagagtaagtataaggaaagagttcgtgcttcgattaatcagaaacgtgtagctgctgagaagaaacgtcttgggttgcttgaagctgagaagaagaaagcacgtgctcgtgtccaacaagtacgtcatgttgccaactctgtttctaatcagcgtgagatagagagaagtaaaatgagggataaacttgaagacaaattgcaaagagcaaagagatatagatcggagtttcttcgtcagagaagaagacaacgtgattccattagtctctattgcgatatgatgcaggaagatgctgatcttctttctagaaagctgtcaaggtgttggaggtgctttgtaaggcagaagaggacaactttggatttggcgaaagcttatgatggtttgaagattaacgagtcattaccgtttgagcagcttgcgatgctacttgaatcgctgaacactcttaaaacggttaaatctttgcttgatcgccttgaaattcgcttagaagcttctaagaatgttaccacggtttctcaaccgtccatattggataatattgatcaccttcttaaaagagttgccacaccaaggagaaaggctacgccgagtactctgaggagcagaaagggaaagaaggtttcttctgttaggaatgtggctgggacatcagtgaagatgtctaggtatcctgtcagagttgttctttctgcctttatgatactcggccatccagatgctgtttttaatggtcaaggtgatcaagaggctgctctcaataacgcggctaaagggtttgtgagggagcttaagttattgataaacgttattcaagagggtcctgttcaggtttcgggtggagaatcaaaacatcggaccttaagatctcagttggacttattcgataaggcttggtgctcctttttgaactcatttgtgatttggaaagtcaaggatgctcggttgttggaagatgacctggttagagcagcttgtcagcttgagctttctatgattcaaaaatgcaagctaactccagaaggggttgacactatgctcactcatgataagaaagcaattcaaatgcaggtaacacaagatcaagaactcctaacagagaaagtacgacacctgagtggagttgcaggagttgagcgcatggaaagtgcgttgttggaaacacgaacaaagtactttcaggcgaaggaggatggaagccctatggctaatcagctcgcacatttcttttctccaagcccagcttcatctccagttcagtctgtgtctagttccagcagcagaagtaaagatagcataggtgttgaaggatcaaatcgtgttaatcgttctttattgaaggatgatactccaccctcatctggaccctctagagtcagtaatggcactgtggacgaggtttcaaatcagaatgagttgatggtgaatgagttcctgcatgatgggaacctcaactttcctggtggatccactgtcaaggatgaagaggacaatcttaagagaaggataaaggagactatggagagagctttctgggataatgtcatggaatccatgaaattggagaagccagactatagctgcatctctaaccttatgaaagaagtgagtgacgaactttgccagatggtaccagatagctggaaagtagaaataactgaaactattgatctggacattctctcacagttgctcaactccggcaccttggatatcgattaccttggaaagatgcttgagtttgcgttggctactctgcggaaactctctgccccagctaatgaccgtgagaatgaaagcacccaccgggatttactcaaggaacttcacaggttgtgtgaagctgaagatgagtctggtaacttccgtgctgttgcaatagtcaaggggatccgcttcattcttgagcaaattcaggaacttaagcgagagataggcataggtcgcatagcaatcatgaaaccctttttgcaaggaccagcaggctttgattaccttacaaaagcatttgaaaagcgttatggacctcccactcaagcctacgaatcactaccagtgacacgaaggtggatatcaactcttttgtctagcaaagaagagtgggaagaacacaacaatacgctttcagccttgaatgtggttgagagatcctccatgggtatttctctcaaaacgggtggaagctttctatccccagtcaataccacgtccaagtcaactgttatggacactgcaggtcaactatcagaatgcaagggagaaagagttgatttggcagtgaggcttgggttgttgaagctggtgaatcaggtagctggtttaacaccagaagttctaccggaaacttttcagctcaacctctttcgcgtgagggatattcaagctgaaattcagaatataattgtggtaaccacaagcttgctcatttggcgtcaaatgcttgcaaagagcgaaagcgaaacagaaagtatggcaaagaaattgttggagttgttagatgggaaggaaggagcaggactaacggagataatcgaaacaacaatgagtgaagaagatggagagaagaagaagatgatgagaggattattggggaagagtttgggagaaggtaacacagtgtatgagagagttacaagttgtatatacaaagcggctcgaggagctttattggctgggaatggagaaaatgggaagagaatggttgaaacagagatgaagaaagtaggaggaggtggaggattgaaagaaagggttttagagacagctcgagcccttggtgttgtagcttgtgtctcagtcagagttcatggtccatggttgactcagctcatgccacaacattga

SEQ ID NO: 202 - DNA, 1002 bp, Arabidopsis thaliana
atggaggtgacaaatacgagcagcatcatgtggttcttcagggacaaaggtttcgatgatccgagtatcgacaagatgttgagaaaatgcaaacagttggaaaaggctcaaagcgatgtggcatcagaaaactgggactacctgagtaacattgttggtatccaagagagaaaactcccttacatcgtctctcgatgccccaaaatcctgactttacgcctcgatgagagactcatcccgatggtcgagtgcctctccagtcttggaaggaatcctcgggaagttgcttccgccattaccaaatttcctccaatactctctcatagcgtggaggagaaactctgtccccttcttgctttctttcaagcgttaggtgtgcctgagactcaacttggcaaaatgatactttttaacccaaggcttatcagctacagcatcgacaccaagctgacagtgatcgtcagctttcttgctagccttggccttgatcaagatgggatgattggcaaagttctggtgaagaacccatttcttatggggtacagtgttgataaaaggttacggcctaccactgaattcttgaaatcatccgttggcctgagtgaggatggcattaagtcggtggtcatgaatttcccacaacttttgtgcagagacgttaacaagattctcaaaccaaattatgattatttgaaggagtgtgggtttggagattcccagatagcaaccatggtcactggttatccccaaatcttgattaagagtgttaagaattcactacagcctaggatcagattcctcgtccaggtgatgggaagaggcatggatgaagtggcttcttatcctgaattctttcaccatggattgaagaagaaggtcgaatcgaggtttaaacttgtcaaaaagaacaacattgactgcagccttagagaaatgctggactgtaacacaaagaaattccatgagaagtttggcttttcggaggtaactgcaagcttctag

SEQ ID NO: 203 - DNA, 1959 bp, Arabidopsis thaliana
atggaaactcccaaaggcactatcattttcaccaccgtcggtcgaactcactacggcttcgacgtcttctctctcaacatagccacctccgtcgaacgccgtttaacagacggcgtttccgtgaacttcaacgctcaattcgtcaacgataaaagcgatgatgtcgtctttgtttcggaaagaaacggatccgccaggatttacaaaacccgatccggaatttctaagcccgagcagattcccggagctccagagagctacttccacgaccgtcctatcatcactcaaaacaacagactctatttcatctctgctcacgagcaacctgatcgttatttcaagaattggtctgcgctttacaccgtggagctcaacagcgcaaagagagaagttacacgtgtcactccaccagacaccgccgactttagtccggcggtttctcaatctggagatttcttagccgttgcttcttatggaactcgctcttggggtggtgagtttcacgagatcaacactgatattactgttttcaaagcatcaaaaccagagacaagagtggttatctgcgagcgtggtggatggccgacttggtccggcgattcaactgttttcttccaccaccaagcagacgacggttggtggagcatcttccgggtagatataccggagaatttcacggaatataccgatttcccaatcacaccaatccgagtcactccatctggactccattgcttcactcctgcagctttccgcgacgggaaacgaatcgccttagcaactcgccgtcgcggcgtcaaccaccgtcacatcgagatttacgaccttgaaaacacaacgtttcagccggtgactgagtcactcaatccgagtttccaccattacaaccctttcgtgtctccagactccgagttcctcggctaccaccgattcagaggcgagtcaactcaaggcgagtcaatcgtacctaacatcgaatccatcgtttcaccaatcaaaaccctccgattactaagaatcaacggatcgtttccatcatcatctcccaacggtgatctaatcgcattgaactccgatttcgacatcaacggtggaatcaaagtatctaaatccgacggttcaaaacgatggacgttgatcaaagaccgtacagctttctacaattcatggagtccaacagagcgtcatgtaatctacacatctctaggtccaatcttctctccggcgagaatcgcggttcagatagctcgaatcaagttcgatccatcagatctcaccgctgataaagaagatcttccatgtgatgtgaagattctcactctagagaacactgggaataacgcttttccgtcttgctctccggacggtaaatcaatcgtgttccgatctggtagatcaggtcataaaaatctctacattgtagacgccgttaacggagaatctaacggcggtggaatacgacggttaacggatgggccatggattgacactatgccttgctggtctccgaaaggagatctcatcggattctcatctaatcgtcataatccagagaacacggccgtgttcggtgcttacgtggtgagacctgacggtactggtttgaggaggattcaaatttcgggaccggaagggtctgaggaagcggcgagggagagagttaatcatgtgagtttcaataaagatggtgattggcttgttttcgcggcgaatttgagcggagtaacggcggagccggtgacgatgccgaatcagtttcagccttatggggatttgtacgttgtgaaattagacggaacgggattgaggaggctgacgtggaatgggtatgaagatgggactcctacgtggcatactgctgatgaattggatttgagtcagttgaatttgaacggtcaagatggtgacaagcttgaaggtcagtttgaggagccgttgtggatttcttgcgatatctga

SEQ ID NO: 204 - DNA, 2037 bp, Arabidopsis thaliana
atgtcttctctcttccctttcatattccttttccttttctcattcctcactagcttcagagcttctgctcaagatcctcgtttcctagcctattattgtccaaatgcaacaacttactcaagtaacagcacttacttgaccaatcttaaaacccttttgtcctctctctcttcccgcaacgcctcttactccaccggattccaaaacgccacggtgggacaagcccttgacagggtcaccggacttttcctttgccggggagacgtctcgccggaaagagaagctgtgttctattacgaggagtgcatactcagatactctcacaagaatattctatcgacggccattacaaacgaaggagaatttatcttgaggaaccccaatcatatttctcctattcaaaatcaaataaaccagtttactaatttggtgttatctaatatgaaccaaattgccatcgaagcagccgacaatcctagaaaattctctacgataaagaccgaattgaccgcactccagactttctacgggcttgttcaatgcactcctgatctttcaagacaaaactgcatgaactgtctgacaagttccatcaatagaatgccattttctagaattggagcaagacagttttggccaagttgtaattcaaggtacgagctttacgatttctacaacgaaaccgccattggtacaccaccaccgccgctgcctccgttggcatctccttcactatctggtgaacagtttcttctacctttgccctgtttacttgatctttgcagtattaccaatatggaacgcagaatgatctgtttaaacgcagataaaagtgggaattcaaatgtggtcgtggtagccgttgttgtgcctatcatagtcgctgttctgattttcatagctggttattgtttctttgcaaagagggcaaagaagacttatggcacaacacctgctttagatgaagatgataaaacaaccatagagtcgctgcaacttgattatagagcaattcaagctgcaacaaatgatttttcagagaataataaaattggtcgaggaggttttggtgacgtttacaagggtacattttcaaatggaaccgaagttgcagtgaagagactgtcgaaaacatcagaacaaggtgacacagaattcaagaacgaggttgtagttgttgcaaatcttcggcacaaaaatcttgttaggattctcggattttctatagaacgagaagaaaggatattggtctacgagtatgtagaaaataaaagccttgataacttcctatttgatcctgcaaagaaaggtcagttgtactggacacagcgataccatatcattggtgggattgctagagggatcctatatcttcatcaagattcacgactcacaatcatacaccgtgaccttaaagcgagtaacattctcctggatgctgatatgaatcctaaaattgctgattttggaatggcaaggatctttggaatggatcaaacccagcagaacacaagcagaatagttggtacctacggttacatgtctcctgaatatgcgatgcgtggccagttctcaatgaaatctgatgtctatagtttcggagtgttagttcttgagattataagcggtaggaagaacaacagctttatcgagacagatgacgcacaggacttggtgacacatgtaagtttaaaggaaaggagttatatatatgcttggaggctttggagaaacggaacagcgttagacctcgtggatccattcattgcagatagttgccggaagagtgaagtggttcgatgcacccatatcggtcttttatgtgttcaagaagatcctgtaaaacgtccagccatgtcaaccatttccgtgatgctcactagtaatacaatggctttaccagcgcctcagcaaccagggttttttgttaggagtagacctggaacaaaccggcttgattcagatcaatcaacgaccaacaagtctgttacagtatctattgacgataagtcaatgtctgatttagatcctcgttga

SEQ ID NO: 205 - DNA, 1209 bp, Arabidopsis thaliana
atggagggactagttccggtacagagacttccaattaaagtggcttcaccttctctgtatcggtgtaacaattctgtctcaatcagacgttcaatttcaggttttgccatggacaggaagataaactttagggctccgtcgcaattctcgatccgagctcaacagtcggatttgaaggaaagcttagctgtgtcttcttcatcagtagaggataaaggaaatgttcttagaatcaaggaatgggaagtagagatgtatcaggaggaattagctattagtcaaggtattaggataaggagaaaaccaccaagtaaggctcctttgggatactctggaccatttgagttgagattgcataacaatgatgctgattctcctcgtaatatcttggaggagatcacatggtacaaagacgtagaagtttcccggatgaaggagctaaatccgcttgacgtgctgaagaaagctgtagaggatgctcctcctactagggattttgttggggctcttaggatggctcataaaagaactggcttccctggcttgatagctgaggttaagaaggcttctccaagtagaggaatcttaaaagagaattttgacccggtcgagattgctcaagcttatgaaaaaggcggagcagcatgcctcagcgttttgacagaccagaagtatttccagggaggctttgaaaacttggaagcaataaggagcgctggtgtgaagtgtccactattatgcaaagagtttgttgtagatccatggcagatctactatgctcggactaaaggcgcagatgcagtactgcttattgctgctgtattggctgacctagaaataaccttcttgcttaagatttgcaagaagcttagcttggctgcccttgttgaggtacatgatgagagagagatgggtcgtgtacttggaatagaaggaatcgagcttgttggcatcaataaccgaagtcttgaaacatttgaagtggacatcagtaatacaaagaagcttcttgaaggagagcatggtagacaaatccgtgagagagacatgattgtggttggcgaatctggtctgtttacaccagatgacattgcctatgtacaagcagccggagtcaaagcagttttggttggagaatccattgtgaagcagaacgaccctgagaaaggaatagctggactttttggcaggaacatttctcatacttag

SEQ ID NO: 206 - DNA, 2580 bp, Arabidopsis thaliana
atgttcggagaacttagggatctgctcaccggcggcggaaatgagacgacgacgaagaaggtgaaaggaacggtggttctgatgaagaagaacgtcctcgatttcaacgatttcaatgcttcgtttctcgatcgtcttcatgaatttctcggaaacaaaatcactcttcgtcttgtaagctctgatgttactgattcagaaaacggttctaaaggcaaactagggaaggctgctcacttggaggattggatcacaacaatcacgtcgttaaccgcaggcgaatccgctttcaaggtcacgttcgattacgaaaccgatttcggttaccctggagcattcttgatcagaaacagccatttcagtgagtttcttctcaaaagtctcacacttgaagacgttccaggccatggcagagtccattacatctgtaattcttggatttaccctgctaaacactacactacagaccgagtcttcttctccaacaagacttatcttccacatgaaacaccagcgacgctgctcaagtatagagaagaagagctagtgagtttgagaggaaccggcgaaggagagcttaaggaatgggacagagtatatgactatgcttactacaatgatttaggcgtcccaccaaagaacccacggcctgtacttggagggacacaggagtatccttacccaagaagaggaagaaccgggcggaaaccaactaaagaagatcctcaaaccgagagcaggctaccgatcacatcgagcctagacatatatgttccacgagatgagagatttggacacttgaagatgtctgatttccttgcttatgctctaaaagcgattgctcagttcatccaacctgcacttgaggctgtattcgacgatactcctaaagagtttgattcttttgaagatgttcttaagatctatgaagaaggaatcgatctaccaaaccaagctttgattgatagtatcgttaagaatataccgcttgagatgttaaaggagatattcagaacagatggccagaaattccttaagtttccagtgcctcaggtcatcaaagaggacaaaactgcatggagaacagatgaggaatttgctagagaaatgttggctggactaaaccctgttgttattcaacttcttaaggagtttcctccaaagagtaagcttgacagtgaatcatacggtaaccagaacagtacaatcactaaaagccacatagaacacaatttggatggactcactgttgaagaggctctggagaaggagaggttgtttatattagaccaccatgacacactgatgccatacttgggacgcgtaaacaccaccacgaccaagacttatgcaagcaggacacttctgttcttgaaagatgatgggaccttgaagccgttggtgatagagctgagcttgcctcatcctaatggagacaaatttggagcagtgagtgaagtatatacgcctggtgaaggtgtctacgactcgctatggcagttggctaaggcttttgtcggtgtaaatgactccggaaatcatcagcttattagccactggatgcaaacacacgcatcgattgaaccgtttgtgattgccacaaacagacagctgagtgttcttcacccggtctttaagctccttgaacctcacttccgtgatacgatgaatatcaatgcacttgctaggcaaatcttgatcaatggtggtggtatatttgaaatcactgtgtttccttctaaatacgccatggagatgtcatctttcatttacaaaaaccactggaccttccctgaccaagcattaccagcagaacttaaaaagagagggatggccgttgaggatccagaagcaccacacggattacgtctgaggataaaagactatccttacgcagtggatgggcttgaggtttggtatgctattgaatcatgggtccgagactacattttcttgttctacaagatagaggaggatatccaaaccgacacagagctccaagcctggtggaaggaggtgcgcgaggaaggtcatggagacaaaaagtcagaaccatggtggcctaaaatgcaaacccgtgaagaacttgttgagtcttgcaccatcattatttgggtggcttctgctcttcatgcagctgttaacttcggacagtatccagttgctgggtacctcccaaacagaccgactataagccgtcagtacatgccaaaggaaaacactccagagtttgaagaacttgagaagaatcctgataaagtgtttttgaagaccatcacagctcagcttcagacacttctagggatatctctgattgagattctctctactcattctagcgacgaggtctatttgggacagagagattctaaagaatgggcggctgagaaagaagcgttggaggcgttcgagaagtttggagagaaagtaaaggagattgagaagaacattgatgagaggaacgacgacgagactctcaagaacaggactggtttggttaagatgccatacactttattgtttccgagcagtgaaggcggagtcaccggcaggggaattccaaatagcgtctctatctga

SEQ ID NO: 207 - DNA, 1752 bp, Arabidopsis thaliana
atggcggatcaagttaaagaaaagacattggaggaaacttctacatgggccgtcgcggtggtttgcttcgtcttgcttctgatttcgatcgttattgaaaaacttattcataaaattggatcctggtttaaaaagaagaacaaaaaagctctatatgaagcacttgaaaaagtgaaagcagagcttatgctgatgggattcatatcactacttctaacaattggacaaggatatatctcaaatatttgcatccctaagaacatcgcagcatcgatgcacccttgtagtgcatccgaagaagcaagaaagtatggtaagaaagatgtcccaaaggaagatgaagaagaaaacttgcgtcgaaagcttctacagttagttgattctcttattcctcgaaggagtttggctactaaaggttatgataagtgtgcagagaagggaaaagtcgcttttgtatcggcttatggcatgcatcagctgcatatattcatctttgttcttgcggtttgtcatgtgatctactgcattgttacttatgctttgggaaagaccaaaatgagaaggtggaagaagtgggaagaggagactaagactatcgaatatcagtattcacacgatcccgagaggtttaggtttgcgcgggatacatctttcgggcgtagacatctgagtttctggagcaaatcaactattacgctgtggattgtatgtttcttcaggcagttctttagatctgtaaccaaagttgattacttaacactgagacatggtttcatcatggcccatttggctcctgggagcgacgcaaggttcgatttccgaaagtatattcagagatcactagaggaagacttcaaaaccattgtcgagatcaaccctgtgatctggttcatagctgtgctattcctcctgacaaacacaaacggattgaattcttacctctggctaccgttcattcccttcatcgtgattcttattgttggaacaaaacttcaagtgataataacaaaactaggacttagaatccaagagaaaggcgacgtagtgaaaggcacaccgctagttcaacccggtgatcatttcttctggttcggtcgtccacgtttcattctcttcctcattcacttagtcctcttcacgaacgcgtttcaactagctttctttgtctggagtacgtatgaattcggtctaaagaactgtttccatgaaagcagagttgacgtgatcatcagaatctcaatcggacttttagttcagattctttgcagctacgttactcttcctctatatgctcttgttactcaaatgggttcaaagatgaaaccaacagtgttcaacgagagagtagcaacagcgttaaagagttggcatcacacagctaagaaaaatatcaaacatggaagaacttcagaatcaacaacacctttctctagtagaccaacaacaccaactcatggttcttctccgattcatctccttcgtaatgctcctcacaaacgaagcagaagcgttgacgaaagctttgcgaattcgttttctccgagaaactctgatttcgattcgtgggatcctgagtctcaacatgaaactgctgagacttcgaattcgaatcatcgttctaggtttggagaagaagaatcggagaaaaagtttgtttcttcatcagtggaacttcctcctggacctggacaaatacgaacacagcatgagattagtactataagcttaagggatttttcgtttaagcgatga

SEQ ID NO: 208 - DNA, 2709 bp, Arabidopsis thaliana
atgatggcttcattgtcttgtgttgaagacaagatgaaaacaagttgtttggttaatggtggaggaactataacaacaacaacatctcaatctaccttgcttgaagagatgaagctgttgaaagaccagtcaggtacaagaaagccggtaataaactcggagctatggcacgcttgtgcaggccctttggtgtgtctccctcaagttgggagcttagtgtattacttctcacaaggtcatagcgagcaggttgctgtttcaaccagaagatcagcaacaacacaagttcctaattatccgaaccttccatctcagttgatgtgtcaagtccataatgttactcttcatgctgacaaagacagtgacgaaatctatgctcagatgagtcttcaacctgttcactctgagagagatgtgttccctgtaccagactttggaatgctgagaggaagtaagcacccgactgagtttttctgcaaaacacttactgcaagtgacacaagcacacatggaggtttctcagtgccacgtagagctgcagagaagctatttccaccattggactactcagcacagccgccaacgcaagagcttgtagttcgagatcttcatgagaatacttggacatttcgccatatctaccgagggcaaccaaagagacatctcctaactacaggatggagtttgttcgttggatcgaagagattgagagctggggattctgttttgttcatcagggatgagaagtcacaacttatggtcggtgttaggcgtgccaatcgccaacaaacagcacttccttcatcagttctctcagcggatagtatgcacatcggtgttcttgctgctgctgctcacgcaaccgccaaccgtactccttttttgatattctataatccaagagcttgtccagcagagttcgtgatccctctagctaagtaccgtaaggcgatatgcgggtctcagctctcagttggtatgagatttggaatgatgtttgaaactgaagattccgggaaacgaaggtacatgggaactattgttggaatcagcgatttggatccgttgagatggcctggttctaagtggcgtaaccttcaggtagaatgggatgagcctggatgtaatgataaacctactcgggtcagtccatgggatatcgaaacacctgaaagtctcttcatttttccttctctgacctcaggactcaaacgtcagctccatccatcttactttgctggtgaaactgaatggggtagcttgataaaacggccacttatacgtgttcctgattccgcgaatgggattatgccatatgcatctttccctagtatggcttcggagcagcttatgaaaatgatgatgaggcctcacaacaaccaaaatgtaccatctttcatgtctgagatgcagcagaatattgtaatggggaatggaggtttgctaggagatatgaagatgcagcaacccctgatgatgaaccagaaatctgagatggtgcagccacaaaacaagctaacagtgaacccatctgcttctaatacgagtggccaagaacagaatctttcacagagtatgagtgctcctgctaaacctgagaactctacactctctggttgcagctctggtagagtccaacatggacttgagcagtcaatggaacaggcaagccaggttactacatccacagtgtgtaatgaggaaaaggttaatcagctacttcagaaaccgggtgcttcgtcgcctgtacaagctgatcaatgtcttgacattactcatcagatttaccaaccacagtctgatccaataaatggattctctttcctggaaactgatgagctgacatcacaagtctcttccttccagtctcttgccggatcatacaagcaaccattcattctatcctcccaggattcttcagctgttgtgttaccggattccacaaactcaccgctgtttcatgatgtgtgggacactcagttgaacggtctcaagtttgaccagttcagtcccttgatgcagcaggacctttatgctagtcagaatatctgtatgagtaatagcacaaccagtaacattctagatcctccactctcaaacacagtccttgatgacttctgtgccatcaaagacactgatttccagaaccacccttctggttgtttggttggaaacaacaacactagctttgctcaagatgtccagtcgcagatcacatcagctagctttgcagactcacaggccttctctcgccaagattttccagataattctggaggcactggtacatcttcaagcaatgttgattttgatgattgtagtctgcggcaaaatagtaaaggctcatcatggcagaaaattgcgacaccccgcgtccgaacctacactaaggttcaaaaaaccgggtcagtcgggagatcaattgatgtcacaagctttaaagactacgaggagctaaaatctgctatcgaatgcatgtttggattggaaggactactaactcacccacaaagctcgggttggaagcttgtatatgttgattatgagagtgatgttctgcttgtaggagatgatccatgggaagagtttgtgggatgcgtaaggtgcataaggatattgtcgccaactgaggtccagcagatgagtgaagaagggatgaagcttttgaacagcgcaggcattaacgatcttaagacttctgtttcataa

SEQ ID NO: 209 - DNA, 2163 bp, Arabidopsis thaliana
atgatgaatggtttgagaagaacgttttggagttcgattcataaaaagaaagacaacaacagagtcgatgattcacttgatcgacaaaaaccaacaacaacttcaagattcgggtttttctctaacccgtctactccaaggtctgagacccgacccgattctgtaacctgctctcctaccattccttgtcagagttggtctgctacagctatctccactccttcaccgtctcttcccgctagtcccaagcttcaatgcgatacttccggggacgttactccgacgagaaacagaagtcctctctctttcctcagcgtttcttcttcttcttctacaccttcctcacctaaatctccggcgagcttttctctactcaaatcaaaactctgtttcaccaaagtaagaatcctaaatcgaaacaaccaaagtagcatcagtagtagcaaatgtggaatttgtttacaaagcgcgaaagctggaagaggaacggcgattttcacggcggaatgttcacatacgtttcatttcccttgcgtagcttcacgcgccggtgatcggaatctactctccgattgtcctgtttgtggtgcttcatggagagaaacttcgcttcttcctctgtctctctcttcttctctccacgaatctggatccgaatccgattccaagatccgagaatcaaagaacaataacaaatcgttaagagtttacaacgacgacgagcctttgatttcatctccaatctctcgtaccggtttcaacactataccggaatcaaacgaagacgaagaagaagaagataacgatgacggagaatttaaagggttttacgttaacacgccgtcaccgttaacgacgaagaaaatgttaacggattccgttactggacacgtggacgttaagctgtcttcagaagctgcaattgtggcggttgggagaggtaacgagacgtactcggtgctcatgaaaatcaaatctccgtcgttaccgacggcgcgtagatctccggtggatcttgtaacggttattgacgttagcggagggaatattgagatggtgaagcgagcgatgaggcaagttatatcgtctctacgagaaacggatcgtttatcgatggtctcgttctcgtcgagctcgaagcgattgacgccgttacggagaatgacggcgaacggaaggcgattagctagaagaatcgtcgacgatatttccggtgatggcgacggaatgagtgttaatgatgccgttaagaaagcggctaaagtgatcgaagatcgccggcagaaaaatctcttcaccaccatcttcgtgttaacggaccgtaatagaaactcggcccaccaagcccaattagcccaaccggattttgtgacttccacgcgcttctctcatttggaaatcccaacgcacactatttggcttggcgcgtgtaatcacgctctccccgaggacgtgtttgccaaacgtatcaagagtctgttgagtttatcggttcaagatcttactctaaatctcggattagtttccgggtcgggtcaaggaaaggtgacatcagtttattcactctcgggtcgacccgtttggctcggatccgggttgattcggttgggtgacatgtacggcgatgaagaaagagaagtgttggtggaactcaaatcaccttcgtctagtagatcccagagaatcatgaccgtccgatcacgccacgtggatcctacgactcaggaaatcaaaaactatgaagatcgcgcgctaatgataccacgtcccacgaccgttagatcatctgacccgagcatcgcaaggctacgaaacctccacgtcagcacacgagccgttgccgagtctcggcggttagtggaagtcaatgattactcgggggctgagcgaatgctgacatcagctagagccttgttggtgcaatacggtttgagctcaagtgattcgtgcttacgtggtttggaagctgagctggcagatttgaaccgtttgagaggtagacacgtggcggtgaagagtccagagccggtggttcagaagagtgagccgcttacaccgacttcagcgtggagagcggctgagagattggctaaagtggcgatcatgaggaagcatatgaatagagtcagcgacctccatggattcgaaaatgctagattttag

SEQ ID NO: 210 - DNA, 2480 bp, Arabidopsis thaliana
atgactgttccgggaatcatcaccgacgtagacggtgatacaacctccgaagtaacttctacctccggtggttcacgtgagaggaagatcattgtagctaacatgttaccactccaatctaaaagagatgcagaaactggtaaatggtgttttaactgggacgaagactctctccagttacaacttagagatgggttctcttcagaaacagagtttctctacgttggatcacttaacgtagacatcgaaactaacgaacaagaagaagtttcacagaagcttttagaggaatttaactgcgttgcaacgtttttgtctcaagagttgcaagaaatgttctatcttggtttctgtaaacatcagttatggccactctttcattacatgcttccaatgtttcctgatcatggtgatcgttttgatcgacgtctatggcaagcttatgtatcagccaacaagatattttcagatagagttatggaagttatcaaccctgaggatgattacgtttggattcaagattatcatcttatggttcttcctactttcttgaggaaacgttttaataggatcaaactcggtttcttccttcatagtccgtttccttcttcagagatttaccgcacattgcctgttcgtgacgagattttgagaggtttgttgaattgtgatctcattggtttccatacgtttgattacgcgaggcatttcttgtcttgttgtagtagaatgcttggtcttgattacgagtctaagcgcggtcacataggtcttgattactttggtaggactgtgtatatcaaaatacttcctgttggtgttcatatgggtagattggagtctgttttgagtcttgattctactgcggcgaagacgaaagagattcaagaacagtttaaagggaagaagcttgttcttggtatcgatgatatggatatatttaaagggataagcttaaagcttatagcaatggaacatctctttgagacttattggcatttgaaagggaaagttgttcttgttcagatagtgaaccctgcaagatcttctggtaaagatgttgaagaagcgaagagggagacgtatgagactgcgaggaggatcaatgagcgttacggtacttctgactataagccgatagttttgatcgatcgtcttgttccacgttctgagaaaaccgcgtattatgctgcagcagattgttgcttagtgaatgcagtgagagatggtatgaacttagttccttataagtatatcgtctgcaggcaggggactcgaagtaataaggccgttgtggattcatcgcctcgcacaagcactcttgtcgtgtctgagtttattggatgctcaccttctttgagtggtgccattagggtgaatccatgggatgtggatgctgttgctgaagcggtaaactcggctcttaaaatgagtgagactgagaagcaactacggcatgagaaacattatcattatattagcactcatgatgttggttattgggcaaagagctttatgcaggatcttgagagagcgtgccgagatcattatagtaaacgttgttgggggattggttttggtttggggttcagagttttgtcactctctccaagttttaggaagctatctgtggaacacattgttccagtttatagaaaaacacagagaagagctatatttcttgattatgatggtactcttgttcctgaaagctccattgttcaagatccaagcaacgaggttgtctctgttctgaaagctctctgtgaagatccgaataacacggtgtttattgttagtggaagaggtagagagtctctgagcaattggctatctccttgtgaaaatcttggaatagcagctgaacatggatacttcattagatggaagagcaaagatgagtgggagacttgttattcgcctacggatacagagtggaggtcaatggtggaaccggttatgagatcgtatatggaggcaacagatgggacgagtatagagtttaaagaaagtgctttggtgtggcaccatcaagacgcagatcctgactttggatcatgtcaagctaaggagatgcttgatcatctagagagtgttctcgccaatgagcctgtggttgtcaagagaggtcaacacatcgttgaagtcaaaccacaaggtgtaagcaaaggtctagctgcggagaaagtaatccgagaaatggtagaacgcggggagccaccggaaatggtgatgtgcataggagacgatagatcagacgaagacatgtttgagagcatattaagcacagtgacaaatccggaacttcttgtgcagccagaggtttttgcatgcacggttggaagaaaaccaagcaaagctaaatacttcttggacgatgaagccgacgtgcttaagctcctaagaggtcttggagactcatcatcgagcttaaaacctagttcttctcacacacaagttgcatttgaaagcatcgttta

SEQ ID NO: 211 - DNA, 2589 bp, Arabidopsis thaliana
atgtcgccggaatcttggaaagaccagcttagtctggtttcggctgatgattatcggatcatgggtcgaaatcggatccccaatgccgtcacgaagctttccggtctcgaaaccgacgatcctaacggcggcgcgtgggttacgaaaccgaaacgaatcgtggtttcgaatcagcttcctcttcgtgctcacagagacatttcgtcgaacaagtggtgctttgaattcgacaatgacagtctttacttacaactcaaagatgggtttcctccggagacggaagtcgtctacgtcggatctttaaacgccgacgtcttaccttcagagcaagaggacgtctctcagttcttgcttgagaagtttcagtgtgttcctactttcttacctagtgacttgctcaacaagtattaccatggtttctgtaaacactatctctggcccatttttcactatcttcttcctatgacgcaagctcaaggctctctctttgatcgttcgaattggagagcgtacacgactgttaacaagatcttcgctgataagatcttcgaagtgctaaacccggatgatgattacgtctggattcatgattatcacctcatgattttgcccacttttttgaggaacaggtttcatcggataaagcttgggattttcctccatagtccctttccttcgtcggagatttaccgtactcttcctgtgagagacgagattctcaaagggtttctgaattgcgatttggttggtttccacacgtttgattacgctaggcatttcttgtcttgttgtagtaggatgcttggtcttgattacgaatctaaaagaggctacattggtcttgaatattttggaagaacggtgagcatcaagatattgcccgttgggattcatatggggcagattgaatcgataaaggcttcggagaaaactgcagagaaagtgaagagattgagagaaaggttcaaggggaacattgtgatgttaggtgtggatgatttggatatgttcaaaggtattagcttgaagttttgggcgatgggtcagcttcttgaacagaacgaagagcttcgtgggaaagtggttctcgtgcagattactaatcctgctcgtagttcaggtaaggatgttcaagatgtagagaaacagataaatttgattgctgatgagatcaattctaaatttgggagacctggtggttataagcctattgtgtttatcaatggacctgttagtactttggataaagttgcttattacgcgatctcggagtgtgttgtcgtgaatgctgtgagagatgggatgaatttggtgccttataagtacacagtgactcggcaagggagccctgctttggatgcagctttaggttttggggaggatgatgttaggaagagtgtgattattgtttctgagttcatcggttgttctccatctctgagtggtgcgatccgtgttaatccgtggaacatcgatgcagtcactaacgccatgagctctgcaatgacgatgtccgacaaagagaaaaatctgcgccaccagaagcatcataagtacataagctctcacaatgttgcctattgggcgcggagttatgaccaagatcttcaaagggcgtgcaaagatcattacaacaagagattctggggagtcggattcggtctttttttcaaggttgttgcgttagatccgaatttcagaaggctctgtggtgaaaccatagtccccgcgtataggagatcaagcagtaggttgatcctattggactatgatgggacaatgatggatcaggatactctggataaaaggccaagtgatgatcttatctcgcttctcaatcgcttatgtgacgaccccagcaatctagtctttattgttagtggtcgaggtaaggaccctctcagcaaatggtttgactcttgcccaaatcttggtatctcagctgaacatggttatttcactagatggaactcaaattccccttgggaaacaagtgaattgcctgcggatttaagctggaagaaaatagctaaaccagtgatgaatcactatatggaagcgactgatggatcattcatagaggagaaagagagtgctatggtgtggcaccaccaagaagctgaccattcatttggttcttggcaagctaaggagcttcttgatcatctagagagtgttctcaccaatgagcctgttgttgtcaagagaggccagcacatagtagaagttaaacctcagggagtaagcaaaggaaaggtggtggagcatttgatagcaacgatgaggaacaccaaagggaagagaccggactttttgttgtgcataggtgatgaccggtctgatgaagacatgtttgatagcatagtgaagcaccaagatgtttcctctattggtctcgaagaggtctttgcgtgcacagttggtcagaaaccgagcaaggccaagtactatctcgatgataccccaagtgttatcaagatgcttgaatggttggcctcagcttcagatggatcaaagcatgagcaacagaagaaacagagcaagttcacttttcaacagcctatgggacaatgtcgaaagaaagcatag

SEQ ID NO: 212 - DNA, 1626 bp, Arabidopsis thaliana
atgttacattgtcattataaccgcagaaaagatggaactccgttcaatacatcgattataacaccaccgcctccgcctgtggttgatcctcctcccgctactcaccgtgctcctcctgttccccgtatccctcctgtttctggtgttcccccagcaccttttgctccttttgctccactgcaaccacaacaacatccaccaccatcaccacctctggtctggtcaccaccttcttctgataatggaggaggagatccctggaactctgtgtcagggcaacctaccttgcaaatatcacctccttcaggttcaggatcaggaaaattctggtccactcaaagaatcattctagtagtttcttcagtggccataattgttcttgtatccggtttgtgtgttacactttggagatgttgcagaagtaaaatatataaccgatattacagtggagctcgtaaagatttacaacgaccatacttcaataagcctccatctcaaccaacccccactatgggaaaagtttctcgggagcctatggttaagcctttcgatggatatggagctggagacaggaaatatgggtatccaatgccacagcgggctgaagagagccggagagcaatgcctcctacttcatattataataaggatgttaatacacctcaaaagccgctgcaacaaccaccgaggcagttccagtccaatgatactgcttcaaagagagcggctcatttccccccgggcttgaattcctcatcttctgctactgttttcaccattgcttcacttcagcaatacacaaataatttctcagaagagaatataatcggggaagggtcgattggtaatgtctacagagctgagcttcgtcatggaaagtttcttgcggtgaagaagctgagcaataccatcaacagaacacagagtgacggcgaattcctcaatctagtctccaatgtgttgaagcttaaacgcggtcatatattggagcttcttggttactgtaacgagtttggtcaaaggttacttgtgtatgagtactgtcctaatggatcacttcaagatgcactacatttggatcgcaagttgcacaagaagctcacttggaatgtacgtataaatattgcattaggagcttcaaaggcattgcagtttcttcatgaggtatgtcaaccgccggttgttcaccagaatttcaagtcttccaaggttcttcttgatggaaagctctcagtacgtgttgcagacagcggtttggcttatatgttaccaccacgcccaacgagtcagatggcgggttatgccgctcctgaggttgagtatggaagctacacttgtcagagcgacgtatttagccttggggttgtaatgttagaactgctcactggacgcagaccatttgacaggacaaggccgaggggacatcaaacactagctcagtgggcgattcctcggcttcatgacatcgatgcgttgacaagaatggttgatccgtcattacacggagcgtatccaatgaaatcattgtcacgttttgcagatatcatatcacgttcactgcagatggaaccaggatttagaccgccgatatcagaaatagtccaagatcttcaacatatgatctaa

SEQ ID NO: 213 - DNA, 1760 bp, Arabidopsis thaliana
atggaaaaagatagtattatgtgcagtggaccaaagagcaatctctgctcttcaagaaccttaacagaaatcgaatcaaggcaaaaggaagaagaaacaatgcttctcctcgaattcgctgcttgtgatgatcttgactcgttcaagagagaggttgaagagaaagggcttgatttggatgagtcagggttatggtattgcagacgtgtcggttctaagaagatgggtcttgaagaaagaacacctttaatggttgcagctatgtatggaagcataaaggttttgactttcatcgtttccactggaaaatctgatgtgaacagagcttgtggtgaagagagagttactccgcttcactgtgctgttgctggctgttctgtgaatatgattgaagtcatcaatgtcttgcttgatgcttctgctttggttaactctgttgatgctaatgggaatcaacctttggatgtgtttgttcgagtttcgaggtttgtggctagtccgaggaggaaagcggttgagttgttgctgagaggaggaggtgttggaggattgatcgatgaggcggttgaagaagagatcaagattgtctctaagtatccagctgatgcttctttaccggatataaacgaaggggtttatggaagtgatgagtttaggatgtatagctttaaggttaagccatgttctagggcttattctcatgattggaccgagtgtgcttttgttcatccgggagaaaatgcgaggaggagagatccgaggaagtatccttacacttgtgtcccctgtcccgagttccgtaaaggatcatgcccgaaaggagattcttgcgagtatgctcacggggttttcgagtcgtggcttcaccccgcgcagtataaaacccggctttgtaaagatgaaacgggttgtgcaaggaaagtttgtttctttgctcataaacgcgaagagatgagacctgttaatgcttcaactggctctgccgtggctcagtctccgtttagcagcttggagatgatgccagggttgtctcctcttgcttattcttcaggagtttcgactcctccggtttctccaatggctaatggtgttccttcctctccaagaaacggcggatcatggcagaacagagtcaatacccttactccaccggctttgcagctcaatggtggaagcagattgaagtccacactgagcgctagagatatcgatatggagatggagatggaattgagactccgcggttttggcaacaatgtggaagagacgttcgggtcttatgtttcctctccaagtaggaattctcaaatgggtcaaaacatgaaccaacattatccatcttccccggtgagacaaccgccatctcaacacgggttcgaatcttcagcagctgcagcggttgcagtgatgaaagcgagatcaaccgcctttgcgaaacgtagcttgagcttcaaaccagctactcaagcagcaccacagtcgaatctctcggattggggatctccaaacgggaagctggaatggggaatgaaaggagaagagctgaataagatgagaagaagtgtttcctttggaatccatggaaacaacaacaataacgcagctagagactacagggacgagccagatgtgtcatgggttaactctttagttaaagacagtactgtggtgtctgagagaagctttggaatgaatgagagggttcggataatgtcgtgggctgagcaaatgtacagagagaaggagcagactgtggtgta

SEQ ID NO: 214 - DNA, 830 bp, Arabidopsis thaliana
atgcagattcacaaactctgttttcttgttctgttcttagctaacgcagcttttgccgtcaaattcaacttcgattccttcgatggcagcaacttgttattcctaggagacgcagagcttggtccttcctctgatggtgtaagccgatccggagctttatccatgacccgagacgagaacccattctctcatggtcaaggtctttacatcaatcaaatcccattcaaaccttcaaacacttcttctcctttttcatttgaaacttctttcactttctccatcactcctcgcaccaaacctaactccggtcaaggtttcgccttcatcataaccccggaagctgataactccggtgcttcagatggcggatatctcggaatcctcaacaaaaccaacgatggaaagccagagaaccacatcttggctatcgaattcgatacttttcagaacaaagagtttctagacattagtggtaaccatgttggagttaacatcaactcaatgacttctcttgtcgctgagaaagctggttactgggttcagacaagagtcgggaaaaggaaagtttggtcgtttaaagatgtgaatcttagcagtggagagaggttcaaggcttgggttgagttcagaaacaaagactctacgattacggttacactcgcgcctgaaaacgttaagaaacctaagcgggctttgatcgaagctcccagagtgctcaatgaagttcttcttcaaaacatgtacgccggttttgctggttccatgggacgtgccgttgagcgtcacgatatttggagctggtcgtttgaaaacgccgccaaaaacaacta

SEQ ID NO: 215 - DNA, 2097 bp, Arabidopsis thaliana
atggaatttgcttcgccggaacaacgtcgtctcgaaaccattcgatctcacatcgatacttctccgaccaacgatcaatcatcatctctattcctcaacgccaccgcttcttctgcttcacctttctttaaagaggatagctacagtgttgtgcttccagaaaagcttgatactggaaaatggaatgtctacagatctaaaagatcgcctacgaaactcgttagtaggttcccggatcatcctgaaatcgggactttacatgacaattttgtacatgctgttgaaacatatgctgaaaacaagtatcttggtacacgagttcggtccgatggaaccattggagagtattcatggatgacatatggagaagcagcgtctgagcgacaagccattggttcaggactcttgtttcatggagttaaccaaggagattgcgttggactctattttattaacagaccagagtggttggttgtggatcatgcttgtgcagcatattcatttgtctctgttcctttatatgatacacttggtccagacgctgttaagtttgtggtgaatcatgctaatctgcaagctatattttgtgtaccacaaaccttgaatattgtaattgctaagcttcctagcggaaatcccatccattcgtctcattgtggggctgatgagcatttgccatcacttcctcgaggaactggagtcacaattgtatcataccaaaagctattgagtcagggtcgaagtagcttacatccattttcgcctccaaagccagaagacattgcaaccatatgctacacaagtggaaccacaggaacaccaaagggtgttgtgttgactcatggaaacttgatcgcgaatgtcgctggttccagtgtggaagcagaattctttccttcagatgtttacatatcatatcttcctttggcgcacatatatgaacgtgcaaatcagattatgggggtgtatggtggtgttgctgtcggtttctatcagggggatgtcttcaagctgatggatgattttgctgtgttaagaccaacaatattctgtagtgtccctcgcttatataatcgaatatatgatggcattacaagtgccgtaaaatcatctggggttgtgaaaaaaaggcttttcgaaattgcctataactcaaagaagcaagcgatcattaatgggcggactccttctgcattttgggacaagctggtgttcaacaaaataaaagaaaagcttggtggacgggttcggtttatggggtctggtgcttctcctttgtcacctgatgtcatggatttcttgagaatatgctttggatgttcggtgcgtgaagggtatggtatgaccgagacttcttgtgtcataagtgctatggatgatggtgacaatttatctggccatgtcggttcccctaatccagcttgcgaggtaaaacttgtggatgttcccgaaatgaattacacatcagacgatcaaccatacccacgtggtgaaatctgtgtaagaggaccaatcatcttcaaaggctactacaaagatgaagaacaaacgagagaaattcttgatggagatggctggctacacacaggagatatcgggttgtggttacctggtggtcggctcaagatcatagacaggaagaagaacatatttaagttggcgcaaggagaatatatagcaccagagaagatcgaaaatgtttataccaaatgtagattcgtttcgcagtgtttcattcacggtgatagcttcaattcctctctagtagctatagtttcagtcgaccccgaagttatgaaagattgggctgcatcagaaggcatcaagtatgagcatctaggacagctctgtaacgatccaagagtgcgaaagactgttcttgctgagatggatgaccttggaagagaagctcagttgagagggtttgagtttgcaaaggctgtgactttggtgccagaaccattcaccttggagaatggacttctcacaccaacattcaagataaagagacctcaagcaaaagcctactttgcagaagcaattagcaaaatgtatgcggaaatcgcagcctcgaaccccattccttctaaactgtga

SEQ ID NO: 216 - DNA, 1242 bp, Arabidopsis thaliana
atggcggaagaagctaaagttgatgtgaagacttcggcgaagaaggatatacgcaattatctatgccagtattgcggaatcagcagatctaaaaactatctcatcactaaacacatccaatctcatcatcagatggaacttgaagaggaaagagatgatgaagcttgtgaggttgatgaggagtcttcaagtaatcatacttgtcaagaatgtggtgctgagtttaagaaacctgctcacttgaagcagcatatgcagagtcattcgctcgaggttgggagacctcctgagaagctccagcaagtaagcctcgatcacgcaaaatgtttgaggtctgatagatcttttacttgctatgtggatgattgtgctgctagctataggaggaaggatcatctcaataggcatcttcttacacataaagggaagctctttaagtgtccgaaggagaactgcaagagtgaattctcagtacagggaaatgttggtaggcatgttaagaaatatcatagtaatgacaaccgtgataaggacaatactggtttgggcgatggtgataaggacaatacttgtaagggggatgatgataaggaaaaatctggtagtggcggttgtgagaaggaaaatgaagggaatggcggaagtggtaaggacaataatggtaatggcgattctcagcctgcggagtgttcaactggtcagaagcaggttgtctgcaaagaaattggttgtggaaaagcctttaagtatccttcacagcttcaaaagcatcaggattctcatgtgaaattagactctgtggaggcattttgttccgagcctgggtgtatgaagtactttaccaacgaagaatgcctcaagtcacacataagatcctgtcatcagcacatcaactgtgagatatgtggttctaagcatttgaaaaagaacatcaagagacatctacggactcatgatgaagattcctcaccaggagaaatcaagtgtgaagttgagggttgctcttcgactttctccaaggcttctaatcttcagaaacacatgaaagcagtgcacgatgatatacgtccctttgtctgtggctttcccggttgtggcatgagatttgcttacaaacatgtcagaaacaagcacgagaattccggaggtggactaaagaggaaacaagttactgcggaaatgctggtacgaaagagagtcatgcctcctcggtttgatgcagaagaacacgaaacttgctag

SEQ ID NO: 217 - DNA, 966 bp, Arabidopsis thaliana
atgtccatgaaagggatctcatcagcagagtcagataagctctctaggagaatatctttgacccacaagcgcaattccgaagagcttgacgtgtttgaagctgccgtgtacttcggctacaatgaagcctcctccggtgaccatggacatacacaaaagtatggctataacgcagcgagagaggagaatccgaggagatggggaatattaggaggtggaagaagaatcagcttggatttgcctattagatgctcagaacaagtgtaccatcttcaacaagatcatcatgagaagcacgaagttacaacaatcaaggagagacttggtaacgtgagacacaagcaaccgagttcaccaggtgggaaaatcgccagcttcttgaactccttgttccatcaagcaggttcgaagaaaaacaaatcaaagtcaaagtcaaagacaaagccaacagatccagaagtggaagaggagatccccggaggaggatggatgaggaggaggaggagaagcagtatcagccatttctttagctcaagcagatctacttcaacaaccaccactaccacggcgtcatcatcttcaaaatctctgatttcctcatcaagctcgggtttcagaactcctcctccttatttgaacactcccaccaagaactacaagcagttcttgaactacacttctgccacaaaacaagtgggagaagaggaaactaagaccaacaaagagtactcttggctggacgagaaactcaaggtgatggagagcctctcggagaatcagaggatttggtcggatgatgaagatatcgatgatgataggagaataaagagagaaggagaggatgatggaatggagagtgattcaagttctgatctcttcgagttgcaaaattacgaattatctcgtggaggcttgccagtctacgagactaccaatgtagctaacatcaacaagactcatatataa

SEQ ID NO: 218 - DNA, 1344 bp, Arabidopsis thaliana
atggatatgagttcaatggctggttcaatcggagtttcggtagccgtactccgattcctcctctgtttcgttgccacgatccctgtttcattcgcttgtcgaatcgtcccgagtagactcggtaaacacttgtatgccgctgcttcaggtgctttcctctcttacctctcctttggcttctcctccaaccttcacttccttgttccgatgacgatcggatatgcttcaatggcgatttatagacccaagtgtggaatcatcactttcttcctcggtttcgcttatcttattggctgtcatgtgttttatatgagtggtgatgcgtggaaagaaggaggaatcgattctactggagcgttaatggtgttgacgctgaaagtcatctcatgttcaatgaattacaatgatgggatgttgaaggaggaaggtctacgtgaagctcagaagaaaaacagattgattcagatgccgtctttgattgagtactttggttactgcctttgttgtggtagccattttgctggtcctgtttatgaaatgaaagattatcttgaatggaccgaagggaaagggatttgggatactactgagaaaagaaagaagccatcgccttatggagctacaatccgagctattttgcaagctgcgatttgcatggctctgtatctctatttagtgcctcaatatccgttaactcggttcacagaaccagtgtatcaagaatggggattcttgagaaaatttagttaccaatacatggctggattcacggctcgttggaagtattacttcatctgtggttggactgatgatgcttcaccaaagcccaaatgggaccgtgccaagaacgtagatattctcggtgttgaactagctaagagcgcggttcagattccacttgtgtggaacatacaagtcagcacgtggctccgtcactatgtgtatgagagacttgtgcagaacggaaagaaagcgggtttcttccagttactagctacacaaaccgtcagcgcggtttggcatggactgtatcctggatatatgatgttctttgttcagtcagctttgatgatcgcaggctcacgggttatttaccggtggcaacaagcgatcagtccgaaaatggcaatgctgagaaatataatggtcttcatcaacttcctttacactgttttggttctcaactactcagccgtcggtttcatggtgttaagcttgcacgaaacacttaccgcctacggaagcgtatattacattggaacaatcatacctgttggattgattctcctcagttacgttgtgcctgcaaaaccttcaagaccaaaaccgcgtaaagaagaataa

SEQ ID NO: 219 - DNA, 414 bp, Arabidopsis thaliana
atgcaaggaacgatttcttgtgcaagaaattataacatgacgacaaccgtcggggaatctctgcggccgctatcgcttaaaacgcagggaaacggcgagagagttcggatggtggtggaggagaacgcggtgattgtgattggacggagaggatgttgcatgtgtcatgtggtgaggaggctgcttcttggacttggagtgaatccggcggtccttgagattgatgaggagagggaagatgaagttttgagtgagttggagaatattggagttcaaggcggcggaggtacggtgaagttaccggcggtttatgtaggagggaggttgtttggagggttagatagggttatggctactcatatctccggtgagttagttccaattcttaaggaagttggggctctgtggttgtga

SEQ ID NO: 220 - DNA, 2154 bp, Arabidopsis thaliana
atgtctcaaagcgttgattaccaatattcttgccaaaacagtttcacagttaacgttccaacgagtttccatccagaagagagagggttgaatttgactaatttggaaagtgctctaagaaaaggttttgaggtgaagctggtgattgatgaaataccgtgtcaacaatgttcatccactcgtggaatctgtagtttcaacggtaccacacagagttgctgtaacgcaacctcaccgtcaggaggagttagttgcgtaccatatcaacatagtgctgatgaggtttatagacgatgcagtgaaagttttagctgtggcagtcagagagatctcaattaccccttatggaaacctggcagagaagaatgtggccaccccaacttcaagctcaactgtagcggaggattcgcagagattaacatcgcctctgttaaattcagaatcctagactcatatcgctctttaataagacttgcaagatcagattatattggcgatttgtgtcccgcaaacccactaactgcgccattcatcgaaaaattccttccagtcctcgaactcactggtgagacagagcttctaactttatactacggctgccgtttcaattcatcggatattcctgctaacatttacgttggagagcttggttgtgatgagggaagaagttactatgtcacgagaaacctgtcctctcctttacttgacagttctagaggcgttttgaacaacttgagggaaatgtgcaaaagaaacgtcagtgttcctgcgtctggacccgcgttattcgatctccagacaaggccaaatcaagataatctgaagatggctcttgatcaaggttttcggatgttgattacatcagattgtgagaggtgccgaggttctggcggtgcttgtggatataatcagacttcaagtgggttcgggtgctattgtaaagatggtaaatgcggatacgaatacgatgctctgggtgcattaacaggtgttgttatagtttttctagtgctactatgcccttgcttcagagtccaaattttccgaaagagaaaaacatcagatgaagtgagactacagaagctgaaggctctgattccactcaaacactacacttatgcggaagtgaagaaaatgacaaagtcattcacggaggtggttgggagaggcgggtttggaattgtttatagcggaacccttagtgatagcagtatggttgcggtaaaggtcttgaaagattcaaagggtactgatggtgaagacttcattaatgaagttgccagcatgagccaaacttctcatgtcaacattgtttcactgcttggattctgctgtgaaggttcaagaagagcaattatatatgaatttttgggtaatgggtcactcgataaattcatatcggacaagagctcggtgaatttagacttgaagacactgtatgggatcgcactaggagttgctcgtggtctagagtacttgcactatggatgcaaaacgaggatcgtgcatttcgacattaaacctcagaacgtgctgttagatgataatctttgccctaaagtttctgatttcggacttgctaagctctgcgagaagaaggagagcattttatcattgttggatacaaggggtacaataggatacattgcaccagagatgatctctcgactttatgggagtgtttctcataagtcggatgtgtatagctacggaatgttggtactcgaaatgataggtgcaaggaagaaagaacgatttgatcaaaactctcgatccgacggaagctcaatatattttccagaatggatctataaggatcttgagaaggccaacattaaggatatcgagaagacagaaaatggagggcttatcgagaatggaatcagcagcgaggaagaggagatagcaaggaagatgacattggtgggtttgtggtgtattcagtcttccccatcagatcgtccaccgatgaacaaagttgtagagatgatggaaggaagcttggatgctcttgaagtgccacctagacctgttttgcagcaaatttcagcttcgtcggtttccgactctttttggaattcagaggagagttcaagtgcctctgatatactggttttctccacaaactcaaagctggaatcttcaagtttgtga

SEQ ID NO: 221 - DNA, 1356 bp, Arabidopsis thaliana
atggcagggaagaggttatttcaagatcttgattctgaccaagaaaataagtccgagaaacggattaaatctgtactaccatcccttgcctcgccaatttccagtgtgtttggagcattgatctcagaaaacacccttcgttctgtcctagagcccgttattagaaaagttgtaagacaagaagtggaatatggaattagtaaacgatttcgattatctcggtcatcgtctttccgtatcgaagctccggaggcgactactccgacactgaagctaattttccgtaagaacttaatgacaccaatatttacagggagtaaaatcagtgacgtggacaacaatccacttgagattatccttgttgatgactcaaacaagccggtgaatctcaaccgtccaatcaaactagacatcgttgctcttcacggagattttccttcgggtgataaatggactagtgatgagtttgagagtaacatcatcaaagaaagagatgggaaacggccgttacttgccggagaagtaagtgtgacggtgagaaacggcgttgcaacaatcggagaaattgtgttcacagacaattcgagttggattcgtagccgtaagtttagaatcggtgcgaaagttgcgaaagggagtagcggtcaaggcgttgtggtttgtgaagcgatgactgaagcgattgttgttagagatcatcgtggagaattgtacaagaaacatcacccaccaatgttagaagacgaagtgtggcggctagagaagataggcaaagatggggcctttcacaagaagctctcctctcgccacatcaacactgtccaagactttttgaaactatccgtcgttgacgtcgacgaactccgtcagattctggggcctggaatgtctgatagaaagtgggaagtaacattgaaacatgctagagagtgtattttgggaaataagttatacatttctagaggaccgaattttttcatgattttgaatccgatatgcgaagttatgaaagcacttatcgatggtcatgttctctctagtcaagaatccctcaaccagccctacgttaagaacttagttcgagatgcttactcaaaggggaactttttagaagtgggcgaacgaacagcgaacgaggctgctcttttgacacaaggtgatgatttggaccaacaatatgctgcgagccactaccaaaacatcgaaatcgataaatcatatcaacaaaacggatatgttcaagagagatctacaaacaatttggagatagtaaacgaagggtatataacgactccagcggaattcaatatatgtttcaccggatcttcgtctcaaaatcatataaaccctttctaa

SEQ ID NO: 222 - DNA, 1062 bp, Arabidopsis thaliana
atgactactactccagattggatcatgattggaggagacggtcctgagagttataaccaacaatcctcgtatcagagagcattgttggaagcgacaaaggacaagatgaccaaggcgatctcagccaatctcgacctagacttgatttcgaatcgcttcattgtagcggatttcggttgtgcaagtggacctaacacttttgtggcagttcaaaacataatagatgcggtagaagaaaagtaccgtagagaaaccggacaaaacccggcagataacatcgagttccaagtcctcttcaatgatttcagcctcaatgatttcaacactctcttccagacacttccacccggaagaagatacttcagcgctggagttcctggttccttcttcgaacgtgttcttcctaaggagagtttccacatcggagtcatgagttacgcgttccatttcacctccaaaatccccaaagggattatggaccgcgactctcccttgtggaacaaagacatgcagtgcacggggttcaaccccgctgtcaagaaagcgtatcttgaccagtactctatcgacaccaaaattcttttagatgctagagctgaagagctcgtgcccggggggttgatgttgcttttaggatcgtgtctaagagacggagttaagatgtccgagacccctaaaggaactgtaatggattttattggagaatctcttagcgatcttgctaaacagggtgtcaccgagcaagagaaggtggacactttcagaacctcaatttactttgcagaacaaggtgagataaggcaaatcattgaggagaatgggaagttcacaatcgaggcttttgaagatatcattcacgctaaaaacgagtttccttttgaccccaagacattggccatctctttcaaggccttctatggtgctttcatttccgcacattttggagtcgaagtcatgaggaaagcctttgagcttgttgaggtcaaggcacgcgaacagatttctcgcctccataactccaaacccggaatgcagtacctcatcgtgcttcgcaagaactaa

SEQ ID NO: 223 - DNA, 1026 bp, Arabidopsis thaliana
atggtggttttgccacagccagtcactttagataaccacatctccctaatccccacatacaaaccggttccggttctcacttcccattcaatccccgtcgtcaacctagccgatccggaagcgaaaacccgaatcgtaaaagcctgcgaggagttcgggttcttcaaggtcgtaaaccacggagtccgacccgaactcatgactcggttagagcaggaggctattggcttcttcggcttgcctcagtctcttaaaaaccgggccggtccacctgaaccgtacggttatggtaataaacggattggaccaaacggtgacgttggttggattgagtatctcctcctcaatgctaatcctcagctctcctctcctaaaacctccgccgttttccgtcaaacccctcaaattttccgtgagtcggtggaggagtacatgaaggagattaaggaagtgtcgtacaaggtgttggagatggttgccgaagaactagggatagagccaagggacactctgagtaaaatgctgagagatgagaagagtgactcgtgcctgagactaaaccattatccggcggcggaggaagaggcggagaagatggtgaaggtggggtttggggaacacacagacccacagataatctcagtgctaagatctaataacacggcgggtcttcaaatctgtgtgaaagatggaagttgggtcgctgtccctcctgatcactcttctttcttcattaatgttggagatgctcttcaggttatgactaacgggaggttcaagagtgttaaacacagggtcttagccgatacaaggagatcgaggatttcaatgatatatttcggcggaccgccattgagccagaagatcgcaccattgccatgccttgtccctgagcaagatgattggctttacaaagaattcacttggtctcaatacaaatcttctgcttacaagtctaagcttggtgattatagacttggtctctttgagaaacaacctcttctcaatcataaaacccttgtatga

SEQ ID NO: 224 - DNA, 789 bp, Arabidopsis thaliana
atgggaggagaaggtggtgctgagcccgtaattcactttgtgtttgttcatggagccagtcacggagcttggtgttggtataaactcaccactcttctcgacgccgccgggttcaaatcaacctccgtagatctcaccggcgctggcatcagcctcatagactctaacatcgtcttcgactccgaccaatataaccgtcctctcttctctctcttgtccgatctccctcctcaccacaaagtcatactcgttggacatagcatcggtggaggaagtgtcaccgaagctctttgcaagttcactgacaaaatctccatggccatttacctcgcggcttccatggttcaacccggatccatcccttctccgcatctttcaaacatacatgtgggagaagaagatatatgggagtacacatatggtgaaggtaccgataaaccacccaccggagtcctcatgaaaccggagtttatacgccattattactatagccaaagccctcttgaggacgtaactttgtcatctaagctgttgcgtcctgctcctatgagggcctttcaagatcttgataagctacctccaaatcccgaggccgagaaagttcctcgagtttacatcaagactgctaaggataatctatttgattctgtgcgtcaagaccttttggtggagaattggccaccttctcagctgtatgtcttggaggatagtgaccattctgctttcttctctgtcccaactaccttattcgcgtatctcctccgtgcggtttcttttcttcaacgataa

SEQ ID NO: 225 - DNA, 830 bp, Arabidopsis thaliana
atgggaaaagatattgagctcccgggttttaggttccacccgactgaggaagagcttcttgatttctacctcaagaacatggtttacggtaagagatcgagtgtcgaagtcattggtttccttaacatataccgtcatgatccatgggacttacctggtttatcgagaatcggggagagggaatggtacttctttgtaccaagggaaaggaagcatgggaacggtgggaggccaagcaggacaactgaaaaaggatattggaaagcaactggatccgatcgtaaaatcataagcttgtctgagccaaaacgtgttatagggctcaagaagacgcttgtgttctatagaggaagagcaccaggaggaagcaagactgattgggtgatgaacgagtttcggatgcccgataattgctccttaccaaaggatgttgtgctttgtaagatatatagaaaagctacttcattgaaagtattggagcaaagggcagagatggaagctaagatgaatcaaacatgtcctaactctcctctttcgtcttccgagacgatttctttcgttggtaaagaagaaaacatgatgacttcgttccgtgctcctcaagtaatagctatggaagaagcaaacaagatccaaatgcatcaagaaaacgcgaaaaccgaagagaaacaaagagaagcagagaccaaagaaccttcttcatcactgaagctaccgtttggaagtttaccagagctacaattaccaaaaccaggagtagaatgggaccagttgttgagtataagcccatggctccagaatcttacaccaatagttaacatatattggta

SEQ ID NO: 226 - DNA, 1776 bp, Arabidopsis thaliana
atggaaactgtagaagcggggcatgatgatgttattggttggttcgagcatgtgtcggaaaatgcctgcaaggtccaaagcgagacgctacgaaggattcttgagctcaactccggagtggagtatctgaggaaatggcttgggactgttgatgtagaaaagatggacgattatactttggaaactctctttacttccttggtgcctattgtttcacatgctgatttagatccttatattcaaagaattgcagatggagagacttctccattacttacacaagaacccatcactgttctgtccctcagctctggaacaacagaagggagacaaaagtatgttccgtttactcgccatagcgcgcaaactactcttcagattttccgattatcagcggcttacagatcaaggttttatccaataagggaaggagggaggattcttgagtttatatacgccgggaaggaatttaagacgctaggaggattgacagtaggaacggccacaacacattactatgcgagcgaagagtttaaaactaagcaagagacaacaaaatccttcacttgtagcccacaagaggtcatctcaggaggtgatttcggtcagtgcacgtattgtcatctcctacttggtctccattactccagccaagtagagtttgtcgcctctgctttttcttacaccattgtccaagctttctcctttttcgaagaaatctggagagagatatgtgctgacatcaaggaaggtaatcttagctcaagaatcactctgcccaagatgagaaaagctgtattggctctgatcagaccaaacccgtctcttgcttctcatatcgaggagatctgcttagagctggaaacaaatctcggatggttcggtttgatttcaaagctttggccaaatgcaaaatttatctcctcaatcatgacgggttctatgctgccgtacctgaataagctgaggcattacgctggcggtttgcccctggtgagcgcagattacgggtcaaccgagagctggattggtgtgaacgttgatcctcatcttcccccagaagacgtgagctttgctgtgattcccacttttagttacttcgagtttataccactttacaggcggcagaatcaatcagacatatgcattgacggtgactttgtcgaagataaacctgtgccgctctctcaagtcaaactcgggcaggagtatgaacttgttctaaccactttcacaggtctttataggtacagattaggagacgtagttgaagtgaccagttttcacaaaggcacaccgaagctaagtttcatatacagaagaaaactcatcttaaccatcaacattgacaaaaacacagagaaggatcttcagagagttgttgacaaggcgtctcagcttctgagccgatccacacgagctgaagtcgttgactttacaagccacgcagacgttatagctcgtcctggtcactatgtaatctactgggaaatcagaggagaagcagatgataaggctcttgaagaatgttgcagagagatggatactgcttttgtggactatggttatgtagtgtcgaggcgcatgaactcgatcggaccgcttgagctacgagttgtggaacgaggaacgtttgggaaagtggcggaaaggtgcgttgggaaatgcggtggcttgaaccagtttaagactcctaggtgtacgaccaattctgttatgcttgacatacttaatgattctactatcaagagatttcgcagttcagcttatgactag

SEQ ID NO: 227 - DNA, 1290 bp, Arabidopsis thaliana
atgcttgcttcctcaggtggcagcacaaaacttgttcggaacgtgaatttggagaaactaaagaacaattatttgtttcctgaaatcaacagacgtgaacttgagcacattgaaaagcatccaaatgtacaattgataagccttgggactggtgatacaacagagcctattccagagcaaataacctcacatatgtctaacttcgcacatggcctatcgaccgtagaaggatatagagggtatgggttggaacaaggaaataagaccctgcgaaaagctattgctgaaacgttttatagagatttgcacgtaaaaagcaatgaagtttttgtatcagatggtgcacaaagtgatatttctcgtcttcagctactcttaggctccaacgtcacaattgctgtgcaagatcctaccttcccggcttacatagattcaagtgtgataatcggtcagactggtcatttccatgaaaaaaccaagaagtaccaaaatgttgtttacatgccatgtgggcctaacaatagtttcttccctgatctggctatgaccccaaggaccgatgtcatcttcttttgttctcctaataaccctactggttatgttgcatccagaaaacaactacatcaactagttgattttgcaaagaccaatgggtccattattatatttgactccgcatatgctgcttttatcgaagatggtagtccacgttctatatatgaaattcctggtgctagagaggtcgcgattgaagtttcatcattctctaagtttgcgggtttcaccggtgttcggcttggttggtctatcatccctgatgagctcttgtactctaatggttttcccattatcaacgatttccatcgtattgtgaccacttccttcaacggagcttcaaatattgctcaggctggtggattggcatgcctttcttctggtggccttaaggagatacggtcggtgaacaactactacaaagagaacaggaagatactgatggacactctagtctcgcttggcctcaaggtttatggtggtgtaaatgctccatacttgtgggttcactttaagggatcaaaatcgtgggacgtttttaatgagattcttgaaaacactcatataataacagtaccaggctcaggttttggacccggtggagaagagtatttgaggattagtgggtttggacgcagagatcacattgttgaagcatcaaagaggttgcagaatttctttaacacacgaaccaaacattttacttatctctcttccacttctaataccaattag

SEQ ID NO: 228 - DNA, 1872 bp, Arabidopsis thaliana
atgagttcgtggagcaagagctttaccaggctcgtcaatggtgtttcgcttgtagcgaaagagatctataatcagtcaccggagttacaaagagcgagaaatggagatctcgaaggtttaataacgtcttcagggaaaaaagctttggttgccgccaccgacttagtcggacttacctccgggaagcttcgcgaactctcgattcgtcgatctaaggaaccttccgttgtttatttcgacgaaggagataataaggataacgtcgtcgcaacgcctgaggttagatctgttaacaccaaacctagcgagaaaatcgttgattcgaaagtcctgagaaatgaatttagcgatgaagttaagaattcaaatagagaaggtgagattaaggtttcaggcgttgaagcgggagagattattggagttagagctgttgaatcaggtacggtaacggaagcatcatctccgtcggaggtagtacctccggtgaagagacggagacctagagagaggaaggttccttcaactcctatggcaagagcttatgggttttttaatttaggagctgctcttgcttggggagctgttaaagaatctacgtataggatggtaaatgggacaccaatgacaccagacaatcagcctgcgttatcgtctttgatgtctaaggaaaatgctgaaagattggctcttggattgtgtgaaatgcgtggagctgctcttaaagttggccaaatgttgagtatacaggacgagagtctcgttcctgctccgatcttgaatgctctggaatatgtgcgtcaaggtgctgatgtgatgccaaggagtcaacttaatccagttttggatgctgagttaggttccaattggcaatccaagttgactagttttgattatgaaccgctagcggcagcgagtattggtcaggtgcacagagctgttactaaagatggattagaagttgcaatgaagattcagtaccctggcgttgccaacagcattgaaagtgatattgaaaatgtcagacgcttgttaaattatacaaatctaattccaaagggactgtttctagacagagctataaaggttgccaaagaagagttggcgcaggagtgtgactatgaaatcgaagcagtcagtcaaaagcgctttcgtgatttgctttcagacactccagggttttatgtgccgcttgtggtagatgagacttcaagcaaaaagattctaaccactgaacttatatctgggatccccattgataaagtagcgttgttagatcagaaaacacgagattatgttgggaggaagatgctagaactcactttgaaggagctctttgtcttccgctttatgcagacggatccaaactggggtaacttcttatacaatgaagccacaaagacaataaatcttatcgatttcggagcagctcgtgattaccccaagaaattcgtcgatgactatctacgaatggtgatggcatgtgcagaaaaagacagtgaaggagtgattgaaatgtctaggagactcgggttcttaaccggagatgaatcagatgtaatgctagacgctcatgtccaagccggtttcatagtgggtctaccttttgcagaacccggtggctatgctttccgaaccaacaacattgcttctagtatctccaatttaggagcaaccatgttgaaacatagactcagtccaccacccgatgaagcctatagccttcaccgtaaattatccggcgctttcttggcttgtatcaagcttggagccaccgtcccttgccgtgatctattgctccaagtttacaacaagtatcagttcgatgatgagccacaagatcccgtagtagctacaagctctgtttcttcatag

SEQ ID NO: 229 - DNA, 2070 bp, Arabidopsis thaliana
atggcttttggccgcaacaatcgtgtaaggttcagagattggatttcagagggaacagagtatggttacggaagaaataaagctagaccatctctaaacacagttttgaagaatgttcgtagaggacttaagaaacctttaagttttggttcacataataagaagagagattctaattctagtaccactacacagaagaatattataaacccacaaggatcttttttacagaactggaacaaaatctttctttttgcttcagtgattgctttggctattgatccattgtttttctatattcctattgttgatggagaaagacactgtcttaatttgcatcgtaacttggagatagcagctagtgtgcttcgcacgtttatagatgctttctacatcattcacattgtgtttcagtttagaactgcttatatctctccttcttctcgtgttttcggaagaggcgagttggttgatgatcctaaagctatagccatcaagtacctctcctcctacttcatcatcgatcttctttctatccttccactcccacagcttgtagtcttagctgtcatccccaatgtcaacaagccggtctctttgatcactaaggactatttgataactgtcatatttactcaatacattccaaggattcttcgtatctatccactttacactgaagttacaagaacatctggcatagttactgaaaccgcttgggctggagctgcttggaacctatctctctatatgttagccagtcatgtgtttggagccttatggtacttaatatcagtagaacgagaagacagatgctggcgtgaagcttgtgagaagataccagaagtgtgtaactttagatttctctactgcgatggaaacagtagtgttagaaacgatttcctgactacctcgtgcccgtttatcaaccctgatgatataacaaattcaactgtcttcaactttggtatctttactgatgctttaaagagtgggattgttgaatcagatgatttctggaagaagttcttctactgcttctgtgcattgggacaaaatctcaatacaagcaaattcgttggggaaatcatatttgctgtatcaatttgtatatctggactagtcttattcgcactacttatcggcaatatgcagaaatacttggaatcaactacagtgagggaagaggagatgagagtgagaaaaagagatgcagagcaatggatgtctcatcgaatgttacccgatgacttgaggaaacgtatcagaaggtatgagcagtacaaatggcaggaaactagaggagtagaagaagaaaaccttctgcgtaatctccctaaagacctcaggagagacatcaaacgccatttctgcctcgatcttctcaagaaagtacctctgttcgagataatggatgagcaattgctagatgccgtgtgtgacaagctaaaaccagtgctctacaccgagaacagctatgcaattcgagaaggagatccagtggaagagatgttgtttgtcatgagaggaaaactgatgagcgccaccacaaacggtggccggaccggcttctttaacgccgtatacctaaaacctagtgacttttgcggcgaagatcttctcacatgggcattagatcctcaatcttcgtctcattttccgatatcgactagaacagttcaagctttaaccgaagtagaagcctttgctcttgcagcagatgatctcaagcttgttgcttcacagttcagacgactacatagcaaacagcttcaacatactttcaggttttattcggttcaatggagaacttggggtgcgtctttcatacaagcggcgtggcggagacattgccggaggaaactagctagatcattaaccgaagaagaagatcgattccgaaacgcgatcacaaaacgcgaacgcaatgcggcgtcttcgtctagcctggttgcaacgttatacgcgtcgcggtttgcttcaaacgcgcttcgcaatctgcgtacaaacaacctacctttgctacctcctaaaccctccgagcctgatttcagtctccgaaacccttaa

SEQ ID NO: 230 - DNA, 1134 bp, Arabidopsis thaliana
atggttttcttgttgttcttcgctccttctccagtctccgctggtttctatacaaactcctcagccattccgccgcagcttctccgaaacgccaccgggaacccctggaactcattcttgaatttcactggatgtcacgccggcaagaagtacgatggtctctatatgctcaaacaatattttcaacattttggctacatcaccgaaactaatctctccggaaacttcactgacgacttcgacgatattctcaagaacgccgtcgaaatgtaccagagaaacttccagctaaacgtcaccggagtactcgacgagctcactctcaaacacgttgtgatcccacgttgcggcaaccccgacgtagtcaacggcacctcaactatgcatagcggtaggaaaaccttcgaggtttccttcgccgggcggggacaacgcttccacgccgttaaacactactctttcttccccggagagccacggtggccgagaaatcgtcgtgatctaacctacgctttcgacccgcgaaacgcgttgaccgaagaggtcaagagcgtgttctcacgcgctttcactcgttgggaggaggtgactccactaacgttcacacgcgtggagaggttctcgacctctgacatcagcatcggattctactccggagagcacggagacggagaaccgttcgacggcccaatgagaacgctagcacatgcgttctcgcccccgacgggacacttccatctagacggagaagagaactggatcgtctccggcgaaggaggcgacggttttatctccgtgtctgaggctgttgatctagaatcggtggctgttcacgagattggacatcttctagggttaggccattcctcggtagaaggttcgatcatgtatccaaccatcaggacgggtaggcgtaaagttgatttaacgaccgatgacgtggaaggagtccaatatttgtacggtgcgaatcctaacttcaatggttctagatctccaccaccgtccactcaacaacgagacactggcgattctggtgctcctggtagaagcgacggttctagatcggttttgactaatctacttcagtattatttttggattatatttggattatttttgtatttagtgtag

SEQ ID NO: 231 - DNA, 3240 bp, Arabidopsis thaliana
atgggttcacggagtttcactagagctttggcattagcctttaatgagtggctactgatgttcatgctcttcgttaactccatattctcttacgtgatcgcgaggtttgcagattactctgagcttcaatctccatgtctgatgtgctcaaatcttgatcatattctcaggaggacaaaagatttgaagaaaactcattgggatattatttgctctaaacacaaatcagagatctcttcattggtttactgtcatgctcacggcaagcttgttgatgtccgtggaatgtgtgagacttgtcttttctcgtttgctacaaccaataagtccaatgctgaaacttacagattgttggttggtaaactgggtgaagattctcacttcggatccaagagtgatcgaagcaaatatccaaattgctctaagcttacagattgtacatgttgtaatcagttgtggacgcctcaaaccgctgctactcaggtggctgaacgggaaattctacccaagattggtttgcttggtaaaataagaaccgggaagcagtctgcgcccaagaaaagtgtcagcttcaatcatttgcctgatgttgggtacactgagctaaagattcattcagatactgaatcagaggctgtgttttcagatactgaaccaaagcaagaatcttcacttaaccatttgccacctgttgggtacaatgagcccaagattggtttggttggtgatgtgagaaccgggaaaccatctacacccaagaagagtgtcagctttaatcatttgcctgatgttgggtacactgagctcaagattcattcagatactgaatcagaagctgtattctcagaagatgaatgtgtcgtccttaaagatgaggatcataagtatcaaatagtggatcttcagactcatccgattatcaccttgccttatgatttggctaccgacaagctgctaaactttgatttccctttggagcccttcgtgactcgaaatgaccgagaggaagttcagttgcaagagaccaattggaggacttattcctcatttcctgtgcttattccagttaatgatgtgcctgaaacatcagagaaggtgttcaaggaggaagagatcaattcattagataatcttttcttaacatcacgcgccatgaaacattttgcagctgcaaaggtgaaagaagagccgattcgcctccaagatatttcctcaacaccagatgttaaggaaaatcctgcaaatgcctccttgatggaggagactgagcttatttgtctcagtgatgttactgcaacatcaggcgccatggaacattctgaagttattctaaaggaaagagaagaactgattcacctccaagatatttctgtaacaccagattttaaggaaaatcctgcaaatgcctccttattggaggagactgagcttatctgtctcaatgatgttacttcaccattacgcgccgtggaacattctgcagttcttttaaaggataaagtagagccgattcgcctccaagatggtggttctttaacaccagattttatggaaaattctgcaaatgcctccatattggaagagactgagcttatttgcgtcaatgatgttacttcaacatcacgcaccatgggacattcttcagttgttttaaaggagaatgaagagccgattcgcttccaagatagttctttaacaccagattttaaggaaaatcctgcaagtaccttcttagtggaggagactgagcttatctgcctcaatgatgattttatggaaaatccggcaaattcctccttaagggaagaaactgagcttatttgcctcaatgatgttacttcaacatcagaggttgctgaaactcctgaagatgtcttagagggaattgaacttatgtcaatccatgatatatctctagacgaggtttctgaatcagtcactacaaatcaaacctctgttgagatttcaaaggagagggacactgaccaagctgatattacctctctggaatctgaatatatagttgtaccatctccaaattccatgcctgaaaattcaaccgataattataaaaaggaaatgaaagagacatctcttaggatctcttcattgtctgaaatggctccacgggacgtcacttctcacacagaagcagctcttgagtcagaatcttcttccttcaactcaatgtcagtggcagcagaaacaaaccaatattcaggtgaattactggatcttgcagatgcatacaatatcgttgtaggaaacgaaggtcactatgatagtaatggaagacaacaaatagagaattggatgaagaaagatacgtctagagttagcgaagaccttaaagcacttcttactcaaatatcagcttctcgtgggatagagtttttgtcacctagagatgtaagccccaagatttctgttaacagtagcgatcaagagacaaagaacctagatcatgatatgcagctgctacttcaaaagagaatgcttgaaaggaacgagagtaacttatcgttggaaggagtttctgtgactgaaatcgagggtgaaagtgagggtgatcggttgaaaagacaggttgattatgataggaaactgctgactggtttatataaagaattggaggaagaaagaagcgcttcagcggttgctacaaatcaagcaatggctatgataacgaggttgcaggaagagaaggcgtcattccaaatggaggctttgcagaacctgaggatgatggaggagcaagcagagtacgatatggaagcaatacagagactgaatgatttacttgttgagagagaaaaactaatacaagatttagaagctgagattgaatacttccgggaccagacccctcagaagaagaataagctagatgttgcagaaaaagtgaccgagatggattcccctagtgagggaatgagcaacaagatacagagttgtttagttgggttcgacgaagagagattatacatcaccagttgtctggagaagattgaaaacagagtaaatggcaaggctcatgacgataatctaccagcacaagaatctgtttctgagctacatgagagagtagaaaggctgaagggagacttatacttcctagaacaagttatgaattctcttggccatggaaatgaaggcgtgcaatttgtaaaggaaatagcttctcatttgcaaactctgcggagtctcagcatgaaaagacaagatcagactgagtgttga

SEQ ID NO: 232 - DNA, 990 bp, Arabidopsis thaliana
atggggaataagcgaaatctcggatttgtgatcttcttctgggctctggtggttgcagtagtagccacggccatcgagcatcgtcgcaatgagaggactaaaggcgtcaatggtcttgacaagatcatcatccgcgaccgtcgtggccgatctgctgaggtttacttgtatggaggtcaagtcagttcttggaaaaatgagaatggagaggagttacttgttatgagtagcaaggctatattccagcctccaacaccgattcgtggaggaattccagtattgtttccgcaatacagtaacaccggtccacttccctcacatggatttgtaagacagaggttctgggaggttgagactaaaccacctcctttgccatcactttctactgctcatgttgacctgatcgtaagatcatccaatgaggatttgaagatctggccgcataagtttgagtatagactgagagtagcattgggacatgatggagatttgacgttaacatctcgtgttaagaatactgatacaaaaccatttaacttcacatttgctcttcacccctacttcgctgtttccaatatcagtgaaatccatgtcgaaggattacacaacttggattaccttgaccaacaaaagaacagaacacgtttcactgatcatgagaaggttataactttcaatgctcaatccatcactaaaaaaaaacacaccttgcaaaaaaagcttgacaggttgtacctaagcactccagatcaactaagaatcgtggaccataagaaaaagaagactattgttgtacacaaggagggacaagttgatgccgtggtgtggaatccatgggataagaaagtatccgatttgggagttgaagactataagcgttttgtaacggtggaaagcgcggctgtcgcgaaaccgatcacagtgaaccccggcaaagaatggaaaggaatactccatgtttctgtggttccatcaaatcggaaagcttga

SEQ ID NO: 233 - DNA, 957 bp, Arabidopsis thaliana
atgcaggcaagtgaaacagagaacatcaagtatgaagagagtttcatcaagaacactcgaggaatgaaactgttcacgtgcaaatgggtaccagcaaagcaagagccaaaggctttagtctttatttgccatggatatgcaatggaatgtagcatcaccatgaacagtactgcgaggaggctggtgaaagcaggatttgcggtatatggaattgattacgaagggcatggaaaatctgatgggcttagtgcttatgtcccaaactttgaccatctcgttgatgatgtctctactcactacacaagcatttgcgagaaagaagagaataaagggaagatgaggttcttgttaggagaatcaatgggaggagcagtgcttttgttgttacacagaaagaagcctcagttttgggatggggctgtcttggttgctccaatgtgtaagattgctgaagaaatgaaaccaagccctttggtaatttcgatattggccaaacttagtggagtgataccttcgtggaaaatcatccctggccaagatatcattgagactgcttttaagcagccagaaatcaggaaacaggttagggaaaatccctactgctacaagggacgtccacgtttgaagactgcttatgagcttttgagggttagcaccgatctcgagaagaggcttaatgaggtttcattaccgttcatagttttgcacggtgaagacgataaagtcacagataaagcggtgagtcgacaactgtatgaagttgcatctagttcggacaagactttcaagttgtaccctgggatgtggcatggtttactctatggagagacaccagagaatatcgagactgtttttgctgacatcattggctggttggataagaaagttgctgatgaaagtggaggctttgaatccgagcttaaacgtaaaaatgatggtattcctttgaaagggtag

SEQ ID NO: 234 - DNA, 2586 bp, Arabidopsis thaliana
atggggtcaaaatcatttggaaatctattagacttggcctctggggatcttttggacattcctcagactccgagatatcttccaagagtgatgactgttcctggcattatctctgacgttgatggatatggaattagtgatggcgattcagatgtcatttcattaccttgccgtgagcggaaaatcattgtggccaattttcttcctttgaatggtaaaaaggattcagaaactggaaagtggaaattcagtctcgacaatgattctcccctgttacatctcaaggatggtttttctccagagactgaagtcatttatgttggatcgctcaagacgcatgttgatgttagtgagcaagacgaggtttcccataatctttttgaggaattcaattgtgtagcgactttcctcccacaagatgtgcataaaaaattctaccttggcttttgtaaacagcaactatggccacttttccattacatgttacccatgtgtcctgatcatggtgaacggtttgatcgtggtctttggcaggcatatgtttctgccaacaagatatttgcagataaggtaatgggtgtgattaatcttgaagaagattatatctggattcatgactatcatttaatggttctcccaacatttttgagaaggcggtttcacagggttaagcttggtttcttcctccacagtccattcccttcttcagaaatttatcgaaccttacctgttcgagaggaactactaagagggctcttaaattgtgacttaattggttttcacacgtttgattatgcacggcatttcttgtcatgctgctgtagaatgcttggattggagtatgaatctaagagagggcatattgctcttgactacttgggacgtacagtttttctgaagattcttcctataggtattcacatgggaaggctggaatccgttctgaatcttcctgctacagctgaaaagctgaaagagattcaagaaaagtatcggggtaaaaagataattctcggtgttgatgacatggatatattcaaaggtttaagtcttaaaattttggcctttgaacacctccttcagcaatatcctagcatgctagggaaaatagttcttattcagattgtgaacccagccagaggctcaggtaaagacgttcaggaagcgaggaaagaaacgtatgatactgttaaaagaatcaacgagcgttatggttcacatgattatgagccagtggttctgattgatcgccctgttcctcggtttgagaagtctgcctattatgccctggcagaatgctgcatagtcaatgcagtgagggatgggatgaacttagttccgtacaagtacactgtttgtcggcagggaactcctagtatgaataagtctttgggagtaagtgatgatttgcctcgcacaagcacccttgttctgtccgagttcattggttgctcgccttctctaagtggtgcgattagggttaatccttgggacgttgacgcggtagccgattcactatattctgctattaccatgtctgattttgagaagcaactacgacataaaaaacactttcactacattagtacacatgatgtgggttattgggcgcgcagcttttcgcaggatttggagagggcatctcgagatcattacagtaaacggtgctggggtgtgggttggggtttgggtttcaggcttgtcgctctctctcctaatttcagaaggctatccattgagcaaactgttagtgcttacagaagatcgagcaagagagcaatatttcttgattatgatggtactttagttcctgagacctcgattgtaaaggacccaagtgctgaagttatatctgcgttgaaggcactgtgtagtgatcctaacaacactatatttattgttagcgggaggggaaaagtttctttgagcgagtggcttgcgccatgtgagaatcttggaatagcggctgaacatggttactttacaaggtggaataagtcttctgactgggaaacaagcggcttatctgatgaccttgagtggaagaaagttgtggaacctattatgagactttatacagagactactgatggatccaatatagaagcaaaagagagtgctttagtctggcatcaccaagatgctgacccagactttggttcttgtcaagccaaggaactactggaccatctagaaactgttcttgtgaatgaaccagttattgtgaacagaggccaccaaatcgttgaagttaagcctcagggagtaagcaaagggcttgtcaccgggaaaattcttagccgaatgcttgaagatgggatagcgccagattttgtggtatgcattggggatgatagatcagacgaggagatgtttgaaaacatatcaacaaccctctcagctcaatcatcgtcaatgtctacagagatattcgcgtgtactgtgggaagaaaaccgagcaaagccaaatacttcctcgatgaagtaagcgacgtggtgaagttgcttcaaggacttgccaacacttcgagcccaaagcctaggtacccttctcacctcagagtctccttcgaaagcgtggtatga

SEQ ID NO: 235 - DNA, 1593 bp, Arabidopsis thaliana
atgagagagctttttatgtatctatttcttcttttcttagttctatgtgtcaaatctgtttattctactccgacaagagaacaattccaaaattgcttgtccacaaaacaattcaattctaccctcaaaaaccctataaatctcaccactcatacactagattcccgagttcacaccgacttttccgagtcttcatctccaaattctagtttcctcaacttgaatttcacaagcttgaagccgattctcatcgttaagccaaaatccgaatccgaaataaaacaatcgattttatgcagcaggaaacttggagtgcaagtaagaacaatgagtggtggtcatgactacgaaggtctatcttacctctcactatcacctttcataatcgtcgacctcgttaacctcagatcaatcagcatcaacctcacagacgagaccgcttggatccaatcgggcgcaacactcggcgaagtctactacaagatcgccaaaaccagcaagatccatgcctttgccgcagggatatgtccaagtgttggtgttggtggacatattagcggaggaggattcggtacaataatgaggaaatacggtttagcgtctgataacgttgtggacgcacgtttgatggatgtaaatgggaaaactcttgaccggaaaacgatgggagaggatttgttttgggcgcttagaggcggtggagctgcgagttttggcgttgtcttgtcgtggaaggttaagcttgctagggttcctgaaaaggtaacttgtttcataagtcaacatccgatgggacctagcatgaacaagcttgttcatagatggcaatccataggatcagagctagacgaagatttattcatcagagtcattattgacaacagtctagaagggaatcaaagaaaagtgaaatcaacatttcaaactctatttcttggtggaatcgatagactgattcctctgatgaaccagaagtttccggaactcggcttacgatctcaagactgttcggaaatgagctggatcgaatcgataatgttcttcaactggagatcaggacagccgttagagattttgctcaacagagacctaagattcgaggatcagtatttcaaagcaaagtcagattatgttcaaaaacccgttcctgaaaacgttttcgaagaagtaaccaagagatttctcgagcaagatactccactgatgatctttgagccattgggtgggaaaatcagcaagatttcagaaacagaatctccatatccacacagaagaggtaatctgtataatatacagtacatggtgaaatggaaagtgaatgaagtcgaggagatgaacaaacatgtcaggtggatgagatcgttacacgattacatgactccgtatgtttctaaatcgccgagaggagcttatttgaattacagagatcttgatttgggctcgaccaaagggattaacacgagtttcgaagatgcaaggaaatggggtgagacttatttcaaaggtaatttcaagagattaggtttggttaaagggaagattgatccaacaaatttcttcaggaacgaacagagtattcctcctctgttttga

SEQ ID NO: 236 - DNA, 2829 bp, Arabidopsis thaliana
atgaagagtaactccaaggtcaacatcaacaacaacggagataatcataatcaaacgaagaataatggtactaatggctttttgcccaattcgttaaaattcatctctacttgcatcagaactgcttcctccggtgttcgctcagctagcgcctccgtcgctgcttccctctcttctgattctcacgagcttaaagatcaggtgttgtggtcttcatttgatagattgcacacaagtgaatcatctttcaagaacgttctattactaggttatacaaacgggtttcaagttcttgatatcgatgattcaaatgatgttaccgaattcgtgtcgaggcgggatgatccggttacatttttacagatgcagccattacctgctaaatgtgatggagttgaagggtttagatcatcacatcctatacttttagctgttgctgatgaagctaaaggttcaggtcctattgttactagtagagatggatctgttagaaatggttatgaggatcctcttgcactctctcccacggttgtgcgattttattcgcttagatcgcataactatgttcatgttttgaggtttagatctactgtttatatggttagatgcagtcctcggattgtcgctgttggcctcggttcgcagatatattgttttgatgcgctaactcttgaaaacaaattcagtgtcctctcgtatcctgtacctcagcttggaaaccaagggatatctggggttaatgttggatatggtccaatggctgtcggggctagatggttagcgtatgcttccaatagtcccttgtcttctagtataggtcgtctgagccctcagaatgttactcctcctggtgtcagtccatctacctcgccaaataatggtaatctggtggcaagatacgctatggaatctagtaagcatttggcagctgggttactcaatttgggtgacaagggttacaaaactatatctaaatactgtcaagatctcaagcatgacggtcctggtccttctctttcgtccagccctggccggaaagttggtcgggtcggttctcattcagctgagtcagatgttgttggaacggtaattgtcaaagattttgagtcccgagctattatagcacaattcagggctcacactagtccaatctctgctctctgtttcgaccctagtggcactttactagtaacagcctcaatccacggtaacaatattaacgttttccggattatgccgacacctacaaagaatggaccgggtgctcaaagctatgattggagctcttcccatgtgcctctttacaaactacatcgtggcatgacatcagctgtgatacaagatatttgctttagtagctacagtcagtggattgcaattgtttcatctaagagcacctgccatatttatgttttatccccgttcgggggagaaaatgttcttgaaatacgaaactctcaattcgatggaccgacgcttgctccaacattatccctgccatggtggtcaagtccgtcgtttatgaccacccatttttcatatccaccaccagcgtcagttactctttctgtggttagccgaatcaaatgcaacaatttcttccatgctgcaagttccgttgtaggaaaacccaccttcccctctggctgtcttgctgctgttttccatcaatctgtgccacaagaatcgcagtcgtcatctcctgccttggactacttactggtttacactccatcaggtcatgtagttcaatacaaactcattccatctcttggaggagaccaggctgagagcaatacgcgaaatggagcaacttctgggctgacctctgaagaggaactgagagtgaaagttgaaccagttcagtgttgggatgtctgtcgaagagcggattggccagagagggaggagaacatatgcgggcttacttatggtggacgaaaaaatgctgagttaactgttgatacttctgatagtgaagatcaaacaaagcctctggagaaacaccatgtttatcttgccaatgcagaggtgctgataaactccggaagaaaaccaatctggcaaaattcagaggtgccatctacgtctctgctgatatctttctatccgatgtatccaccagactctgatggcaagaacctgaattcgcatcaaggtggtggggagacagaaatcgggaaagtatctgcgaacgaggttgacattaggcgaaaggatcttctgccggtatatgataattttcacagtgtgtataccagtatgcgcaacagaggattttctggggaaagagattcagattcttcttcttcttctgaccctggacaagttaaagaaatgcatccattcaatggtatggtttaccccgaagatgaggaaagaagagggagtgcccattttgcactaactccaaaccaaaatcctcataccggaattgtaacatttaaacagcctgtagtttccatttcttctgctgtgaaagacactgattatatagacgacgacgctcatgtcttgccaaagaacgcctccctgcccgctgaaacaaaaattgaaaacagcagtgggataagtggagattcaaatgtaagttctaaccgttctgatatgagcatgaatgcagcagacgagggtgaaggacccattgacggctccccaaacttcgagcagtttttcgaggaggtggtctccaatgaaactgttacagaaactgagcataaggatgctccatctgatggaaaactcgatgatgatgaggacgatgacatgcttggtggtgttttcgctttctccgaagaaggtaagaagaatacatcccatagcctgtaa

SEQ ID NO: 237 - DNA, 888 bp, Arabidopsis thaliana
atggaggttgcttttccatcttcgccgccggtgaaatgcatcgccgatgaaagattaacagagatctccatggatttcaccaaattaggattcccagaagaagatgaagaaattaaaaaattggagagatcgtggagtaagctcgaagaatccgtcgaatttaacgaagacgatgaagaagaagaagaagagttttcgtttgcttgtgtaaacggagaaggatctccaattaccgctgatgaagcttttgaagatggtcagatccgtcctgtgtttcctctgtttaaccgtgatcttctcttcgagtacgaaaacgaagatgacaaaaacgacaacgtttcggtcaccgacgagaacagaccgcgtcttagaaaattatttgttgaggatcgtaacggtaacggtgacggagaggagacggagggttctgagaaagaaccgttgggaccgtattgttcgtggacaggaggaacggttgcagaagcgtcgccggagacttgccggaaaagtaattcgacgggattctcaaagctttggagatttagagatcttgttttgagaagtaacagtgatggaagagacgcgtttgttttcttgaataatagtaatgacaagactcggactcggtcttcttcgtcgtcgtcgtctacggcggcggaggagaatgataagaaggtaataacagagaagaaaaaggggaaggagaaaacttcgacgtcgtcggagacgaagaagaagacgacgacgactaaatcggcgcatgagaagctatacatgagaaacagagcgatgaaggaagaagtgaaacacagatcgtatcttccgtacaaacaagtcgggttcttcactaatgtgaatggtcttagcagaaatattcatcctttctga

SEQ ID NO: 238 - DNA, 1140 bp, Arabidopsis thaliana
atgtacccgccacctccctcaagcatctacgctcctccgatgctggtgaattgctccggttgccggacgcctctccagctcccatccggcgcccgatctattcgctgcgctctctgccaggctgttactcatatcgccgaccctcgcaccgcccctcctccgcaaccttcctccgccccttctccgcctccccaaatccacgcgcctcccggtcagctgcctcacccccatggcaggaagagggccgtgatctgtggcatctcgtatcgtttctctcgccacgagctcaaaggctgcatcaacgacgccaagtgcatgcgtcaccttctcatcaacaaattcaaattctccccagattcaattctcatgcttaccgaggaagaaactgatccatatcgtatcccgaccaagcaaaacatgaggatggcattgtattggctcgtacagggatgcacagcaggcgactcacttgtcttccactactctggtcatggttcgcgtcaaagaaactacaacggtgatgaagttgatggctatgatgaaacactctgtcctctggattttgaaactcaggggatgattgtagacgatgagatcaacgcaaccattgtacgccctcttccacatggtgtcaagctccattcaattatcgatgcttgccatagtggtaccgttctggatttacccttcctatgcagaatgaacagagctgggcagtatgtgtgggaggatcatcggcctaggtcaggtttgtggaaaggaactgctggtggagaagccatttcaattagtggatgtgatgatgatcagacttcggccgacacatcattggttcctcctctcatgattaaaacacatacacaggcgctgtcgaagatcacgtctacgggtgctatgactttctgttttattcaagcaattgaacgcagcgcacaaggcacaacctatggaagccttctgaattctatgcgcaccacaataaggaatacagggaatgatggtggtggtagtggtggagttgtgacgactgtgctgagcatgcttctgacagggggaagtgcgattgggggattaagacaggagcctcaactgactgcttgccaaacattcgatgtctatgcaaagcctttcactctctag

SEQ ID NO: 239 - DNA, 927 bp, Arabidopsis thaliana
atggagaagagtttccaaaggtctgctctccttgtgactttgtctctcttcttcttctccattccggtttcactctctgttccattcgttctgtttcacgggtttggaggtgaatgctccaatgacaaagtgagcaacttaacacagttcctcatcaaccactccggctaccctggaacttgcgtagaaataggagatggagtgaaagattccttattcatgccgcttaggcaacaagccagcatagcttgtgagaaaattaaacagatgccagagctgagtgaaggttacaacatagtggcagagtctcaaggaaacttggtcgctagaggcctaatcgagttttgcgataatgctccaccagtcatcaactatgtctccttaggaggacctcatgctggcgtcgctgcaatccccgaggggtgtgattcagcattttgcatactcatgaaggcgttttttgcagtgatttacagcgattttgctcaagatcatactgctccaagtggttatgtcaaaaaacctatggaaataaaaaattatttggaacactccaagtatctgccaaagctaaacaacgagagacctggcgagaaaaactccacttttaaagaccgtttcaccagcttgcaaaacttggttctcatcatgttccagaatgatacaatattggttccaagagaaacttcttggttcggatattacccggatggagcttcatcttcaacacctgttttgcctcctcaaaagacaaagctatacactgaggattggattggtctgaaaaccttggatgatgctggaaaagtgaggtttattagtgtccctggcggacacatcgaaataacggaagaagaccttgtcaaatacgttgtgccttacctccagaatgagtctttgttctcttctgaacacgagacaatatag

SEQ ID NO: 240 - DNA, 855 bp, Arabidopsis thaliana
atgacgtcggggactagaacgccgacttggaaagagagagagaacaacaaacggcgagagcggcgaagacgagcgattgcggctaagatcttcgcaggactaaggattcatggaaacttcaagctccctaaacactgcgacaacaatgaagtcctcaaagctttatgcaatgaagctggttggactgtagaagacgacggaactacttaccgcaagggatgcaaaccaatggatcgaatggacctcatgaatggttctacttcagctagtccatgctcatcgtatcaacatagccctcgtgcttcctacaatccaagcccttcgtcttcatcattcccgagtcctacaaacccatttggtgatgctaactcactaatcccatggctcaagaacctctcttcaaactcaccttccaagcttcccttcttccatggaaattcaataagcgctcccgtgactccgccattggctcgaagccctactcgtgatcaagtaaccatccctgactctggatggctctcaggaatgcaaactccgcagagcggaccgtcttctcctactttcagtttagtttcaagaaacccgtttttcgacaaagaggcttttaaaatgggagattgtaattcaccaatgtggactcctggacaaagtggaaactgctctccagctattcctgctggtgttgatcagaactctgatgtgccaatggctgatggaatgacggctgagtttgcgtttggttgtaacgcaatggctgcgaatggaatggtgaagccttgggaaggagaaaggatacatggagaatgtgtttcagatgatttagaacttacacttggaaactcaagaaccagatga

SEQ ID NO: 241 - DNA, 1323 bp, Arabidopsis thaliana
atggcttcgtcttccaaagcactgatcgaatccataggctctcttgacaaagactcatacgtttctctcttatcaaaactcataggcgaatctaaattcgtccagaacaatccgccggagctcatccctcaagaggacctaatcgtcaaacacgtccttgactctctccgtccttatagcacagaaactggtggtggtcctctggtgatcaatcatgtcgcgtatcattcaggtagaggtaatctcatcgttgagtacccaggatctgttcccggaaagatcttgtctttcgtcggaatgcatatggacgtcgtcactgcgaatcctgatgattgggaatttgatcctttctcgctaagcatagatggtgataagcttcgtggtcgtgggacaacagattgtcttggtcacgttgctcttgtcactgaactcatgaagaaactcgggcaagccaaaccggcgttgaaatcaacggtggtggcggttttcatcgctagcgaagagaactcttccattcctggtgttggtgtggacatgctggtgaaagacaaacttcttgataagctcaaatccggacccttgtattggattgatacagcggataagcagccgtgtgttggaactgggggtatgataccatggaagcttcagtttactggaaagcttttccatagcggtttagctcacaaggcgattaacgcgatggagttagcaatggaagggcttaaggaaatccaagctcggttctacagagactttccgcctcacccacaagaggaagtttatggttttgcaacaccatccaccatgaagccaacacagtggtgttatccagcaggtggaatcaaccaaatccccggagaatgtactgtttcgggtgatgtcaggttgactcctttctatgacgtgaaggaagtgataacgaagttgcaagagtatgttgacgacataaacggtaacatagagaggctcgaaacccgtggtcctgtttcaaaatatgtcttaccagatgagaatttacggggaaggctcacgttaagttttgatgaagcatcagctggagttgcgtgtaatcttgattctcccggctttcacgttctatgcaaagcaaccgaagaagttgttggacacgtgaagccttactcgatcaccggtactttacctctaatccgagacctccaggatgaaggttttgatgtgcaaacttcaggatacggtctcatggctacatatcatgcaaagaacgaatactgccttcttacagacatgtgccaaggctttgatgtcttcatcaggatcatttctcaacttgaacaagtataa

SEQ ID NO: 242 - DNA, 1160 bp, Arabidopsis thaliana
atggatttcaatagaaaagctcatccagattgcgtatatgcggataatcctttccatgaatgtgcttcagcttgtttagagaaaattgctcaaggccatgtcaagaagaacactaagaagcaaagttcaaggcttcttagcttctcagggagtttcggtaggaaaaagaaggagtcgaattcacaaccgcctacaccgctatccgcaaggccttatcaaaacggcagaggcggttttgcaaatggtaattccccaaaggttcatcattctgtagctccacctgcttccgtgaagaagaagattgtttctgaaacgaaaaattctttcacttcttcatcatccggtgatccggatgatttcttcaaccataaaccagagaagaaaccttctcaaaccattcccctttcatcaaacaatttggttgatcaaagcaaagtggtatcacctaaaccgggaatacaagaacacaatgggaagattggagaaggcggcgaaactagactctttagtttcctaagccttccaagatcgcctggaaaagagagcaatgatgatttttctgatgatgatgacgaaaacaacaatgagattggtgtagagctcgatctcgaatcagtaatgtctgacacttttgtctctgtcgggaaataccgagtcagatcgggttcatccactatactaagtgctgtcatcgaaaagcacggagacattgctcaaaactgtaagctggaatcggattcaatgcgatcacgttacctcgagtgtttatgctcactgatgcaggaacttaggtcaaccccggtagggcagttgagcaaagtcaaggtcaaagagatgcttgcggttctcaaagacttggagtctgtgaacattgaagtagcttggctacgttctgttcttgaagagtttgcgcagtctcaagaagatgtagaaaatgagaaagagaggcatgatggtttagtgaaggctaagagagaagagcttgaggctcaagaaacggatttggttaggatggagaaggaagtggtggaagtgaagcggcggattgaggagacgcgggctcagatggttgagatcgaagcagaacggttgaggatggagaaaatgggattcaaaatggagaaatttaaagggaaatcgtttatagatgagcttctgtg

SEQ ID NO: 243 - DNA, 1077 bp, Arabidopsis thaliana
atggtgtttggaaaagggtcaaaccttgacagattccttcattgcacaacacctgtagtgccaccccaatctctatccaaggcggagattaggagtttgaataggatttggcatccatgggagagacaaaaggttgagtttttcagattgagtgatctatgggattgttatgatgaatggagtgcttatggagctggtgttccaattcgtctctctaatggagaatctcttgttcaatattatgttccctatctctctgctattcagattttcacctctcgttcttccttgatccgcttaagggatgattctgaagatggggaaagcagagattcgtttagtgattcatatagtgatgagagtgaaagtgataaactttcgagatgtgcttctgatgaaggacttgaacatgacgctctcttgcatcctaatgatcggttgggatatctttatctgcaatactttgagagatcagctccttatgctcgagttcctctcatggataagatcaatgaattggctcaaaggtacccgggactaatgtcgttgcgaagcgtagatctttccccggcaagttggatggcggtagcgtggtaccctatttaccatattccaatgggaaggaccatcaaagatttgtccacttgtttcctcacttatcacactctttcatcttctttccaagatatggagccagaagaaaatggcggggaaaaggagaggatccggaaggaaggagaaggtgtaactttgcttccttttgggttagccacttataagatgcaaggcaatgtttggctctcggaagacgatcaaggtcaagatcaagagcgagttctttcgcttctaagtgttgcggattcttggctaaaacagctaagagtccaacaccatgacttcaactacttctcaagaatggctcacctggcaaggagattacttttttccctggtcgcaatataccgtgtttgtccagtggttggagtagcagtggcagccgtgaagaggactgagcgtttccttaacacacaagtacagcggtttcaacgttttgggtgtagaatagctttaaagtag

SEQ ID NO: 244 - DNA, 1584 bp, Arabidopsis thaliana
atgaaatatgcattgattcttgttctcttttttgttgtcttcatatggcaatcaagctcatcatcagcaaactcggagactttcacacaatgcctaacctcaaactccgaccccaaacatcccatctcccccgctatcttcttctccggaaatggctcctactcctccgtattacaagccaacatccgtaacctccgcttcaacaccacctcaactccgaaacccttcctcataatcgccgcaacacatgaatcccatgtgcaagccgcgattacttgcgggaaacgccacaaccttcagatgaaaatcagaagtggaggccacgactacgatggcttgtcatacgttacatactctggcaaaccgttcttcgtcctcgacatgtttaacctccgttcggtggatgtcgacgtggcaagtaagaccgcgtgggtccaaaccggtgccatactcggagaagtttattactatatatgggagaagagcaaaaccctagcttatcccgccggaatttgtcccacggttggtgtcggtggccatatcagtggtggaggttacggtaacatgatgagaaaatacggtctcaccgtagataataccatcgatgcaagaatggtcgacgtaaatggaaaaattttggatagaaaattgatgggagaagatctctactgggcaataaacggaggaggaggagggagctacggcgtcgtattggcctacaaaataaaccttgttgaagtcccagaaaacgtcaccgttttcagaatctcccggacgttagaacaaaatgcgacggatatcattcaccggtggcaacaagttgcaccgaagcttcccgacgagcttttcataagaacagtcattgacgtagtaaacggcactgtttcatctcaaaagaccgtcaggacaacattcatagcaatgtttctaggagacacgacaactctactgtcgatattaaaccggagattcccagaattgggtttggtccggtctgactgtaccgaaacaagctggatccaatctgtgctattctggacaaatatccaagttggttcgtcggagacacttctactccaaaggaatcaacccgtgaactacctcaagaggaaatcagattacgtacgtgaaccgatttcaagaaccggtttagagtcaatttggaagaaaatgatcgagcttgaaattccgacaatggctttcaatccatacggtggtgagatggggaggatatcatctacggtgactccgttcccatacagagccggtaatctctggaagattcagtacggtgcgaattggagagatgagactttaaccgaccggtacatggaattgacgaggaagttgtaccaattcatgacaccatttgtttccaagaatccgagacaatcgtttttcaattaccgtgatgttgatttgggtattaattctcataatggtaaaatcagtagttatgtggaaggtaaacgttacgggaagaagtatttcgcaggtaatttcgagagattggtgaagattaagacgagagttgatagtggtaatttctttaggaacgaacagagtattcctgtgttaccataa

SEQ ID NO: 245 - skipped

SEQ ID NO: 246 - DNA, 2343 bp, Arabidopsis thaliana
atgatgagatgcctcactatcaccatcatgttctttatgtttttttttctgtctgtgatccaaaagtgtaagtctgaaacaagtaaatctggagattatatcatatacatgggagcagcatcctctgatggctcaacagacaatgaccatgttgaacttctgagctcattgttacaacggagcggcaaaacccccatgcacagatacaaacatggattctctggattcgcagcccatttatcagaagatgaagctcatctcatagccaagcaaccgggagtactatctgtcttccctgaccagatgttacagctccacaccacacgttcatgggatttcttggtgcaagaaagttatcaaagagatacttacttcaccgaaatgaactatgaacaagaatccgaaatgcatgaaggagacaccattatcggcttccttgattcaggaatatggcccgaggcgcagagctttaacgacaggcacatgggtccagtcccagagaaatggaagggcacttgcatgagagggaagaagacacaacctgattctttccgttgcaataggaaactgataggagcaaggtattacaattcgtcattcttcttagaccccgattatgagacaccacgagactttttggggcacgggacacatgtggcatcaatagcagcagggcaaataatagcaaatgcgtcctactatggcctggcaagtggaatcatgagaggaggttcaccaagttcaagaatagctatgtacagagcgtgctcactcctgggatgtcgtggctcgagcatactagctgcatttgatgatgcaatcgcagatggggttgatgttatatccatatcaatgggcttatggccagacaatttacttgaagatccgctttccatcgggtcatttcatgccgtggaaagagggatcactgttgtttgctctgtaggaaattctggcccatcgagtcaaagtgtgtttaatgctgctccatggatgatcactgttgctgccagcactattgaccgtggctttgagtccaacattcttctgggaggagatgaaaacagattaatcgagggttttggaataaatattgccaatatcgataaaacacaggcttacccacttatacacgcacgatcagccaagaagattgatgctaatgaggaagctgctaggaactgcgcacctgatacactagaccaaaccattgttaagggaaagattgttgtgtgtgacagtgatcttgataaccaggtgatccagtggaaaagcgacgaggttaagagacttggaggtatcggtatggtacttgttgatgacgagtcaatggatctgtcttttattgatccctcctttctagtgacaataataaaaccagaggacggcatacaaatcatgtcctacataaattcaacaagagaaccaattgcaacaatcatgcctacaagatcacgaacaggacacatgttagctccatccataccatccttctcatcaagaggtccttacttgcttaccagaagcatcctcaagcctgatattgcagcaccaggggtcaacatactagcatcgtggttagtcggtgacagaaatgcagcaccagaaggcaagccaccgccactcttcaacattgaatcagggacttcaatgtcatgtccccatgtctccgggattgctgctcgtctcaaatccagatacccttcatggagtcctgcagcaatcagatctgccatcatgacaacagccgtgcaaatgaccaacacaggttcccatataactacagaaacaggagaaaaggccacaccttatgactttggtgctgggcaggttactatatttggaccttcatcaccaggactgatttatgaaaccaatcacatggactacctaaacttcctcggctactatggatttacatctgatcagatcaaaaagatatcaaaccgcataccacaaggttttgcttgtcctgaacaaagcaacaggggagacatatctaacatcaactacccatcaatctcgatttctaacttcaatggaaaagaaagcagaagggtaagcagaacagtgacaaatgtagcatcacgcctcattggagatgaagatacagtctacactgtgagtatcgatgcaccagaaggattactagtcagagttataccaagaaggctacacttcaggaagataggagataaactcagctaccaagtgatcttttcatctactacaacaatactcaaggacgatgcgtttggatctataacatggtctaacggaatgtacaatgtgagaagtccattcgttgtaaccagcaaagacgacaacgatagcgaacgttaa

SEQ ID NO: 247 - DNA, 1272 bp, Arabidopsis thaliana
atggcaacggcgatggcggaggatacgagcttcgagggagaccaactagcttccatgactactgatgacatcggtagagcttctcgtctcttagccaacgagattcgcatcctcaaggaagaatcgcagaggacaaaccttgatttggaatcagtgaaggagaaaataaaggagaaccaggagaagattaagcttaacaaacagcttccttacttagttggcaatatcgttgagattcttgagatgagtccagaggatgatgcagaggaagatggagcgaatatcgatctggactctcagaggaagggaaagtgtgtcgttctaaaaacatcaactcgtcagaccatcttcctccctgttgttggacttgttgatccagatacattgaagcctggggacttagttggagttaacaaagatagttacttgattctggatactttaccttctgagtatgattcaagagtaaaagcaatggaggtcgacgaaaaacctactgaagactacaatgatatagggggactagaaaaacagatacaagaacttgttgaagccattgtgttgccaatgactcataaagagcagttcgaaaagttgggtatccgtccaccaaaaggtgtactcttgtatggtcctcctggaaccggaaagacgttgatggcccgagcttgtgcagcacagacaaatgcaactttcctcaaactagcagggccacaacttgttcagatgttcatcggagatggagcaaaacttgtccgtgatgctttcctgcttgcaaaagagaaatccccttgtattatattcatagatgagattgacgcaatagggacaaagcgttttgatagcgaagttagtggagaccgtgaggtacaaaggacaatgttggagctgctcaaccagcttgatggattcagcagcgatgatcgcattaaggttattgcagcgacaaatcgtgctgatatactagatcctgcccttatgcgttctggtcgtttggatcgtaaaatcgagtttccgcaccccactgaagaagctagaggcaggatcttacagatacattcaaggaaaatgaatgtgaatgcagacgtcaattttgaagagcttgctcggtcaacggatgatttcaatggagctcaactcaaagcagtgtgtgttgaagcgggtatgcttgccctgcgccgggatgcaactgaggtgaaccatgaggatttcaatgaaggtataattcaagtacaagccaagaagaaagcaagcttgaattactacgcctaa

SEQ ID NO: 248 - DNA, 1389 bp, Arabidopsis thaliana
atggcggtgaagaagaaagtttcatggagatcactaatcgttggatgtttaggagatccagaaaccctaatggcatcttcaaagaaacctaaaagaaaaaatgacgtcatcaagaaacagagctcttttcaaagactatcgatacttgatatgagcaatccaagttccaacactttgtcagaagatctatcgatttctttggccggatcagatcttcatgtgtttaccctagcggagcttaaagtcattacacaaagcttttcatcgaccaattttctaggtgaaggtgggtttggtcctgttcataagggtttcattgatgataagctacgtcctggtcttaaagctcagcctgttgctgttaaattgcttgatcttgaaggtcttcaaggtcaccgtgaatggctgacggaagttatgtttttgggacaattgaagcacaaaaatttggtgaaattgattggttattgttgtgaggaagaacatagaactcttgtttatgagttcatgcctcgtggaagcttagagaatcaacttttcagaagatactctgcctcgcttccatggtcaacaagaatgaagatcgctcatggagctgcaacaggacttcaatttctacacgaagctgaaaatcctgttatctatcgggatttcaaagcctccaatatcttgttagattccgattacacggcgaaactctctgacttcgggttagccaaagacggaccagaaggagacgacactcatgtgtcaactcgagtgatgggcacacaaggctacgcagctcctgaatacatcatgaccggtcatttaacagcaagaagtgacgtatacagctttggagttgtgttgctagagcttttgaccggacggagatcagtagacaaaaagagatcatcgagggaacaaaaccttgtggactgggctcgtccaatgctcaatgacccacgtaaactatctcgaatcatggacccgagacttgaaggtcagtactcagagacaggagcaagaaaagcagcaacattggcttaccaatgcttaagccatcgacccaagaaccggccatgtatgagtgccgtcgtctctatactcaatgatcttaaagactataatgatattcctatggggactttcacttacacggtgccaaacactccggacaataaagaagatgatggtcgtgttggtaataagccacgtaagagtagtcatcatcatcatcatcaacaacaacaaagtaatcatccccggtcgtctccatctccgacaaccaagtctccatctcccacggccaagtcgccgaggaattcaacggaaaatcaccggagaacgttgagaaatggagtgaattcgccgttgagaagtgaggcaggtggggaacggtactaa

SEQ ID NO: 249 - DNA, 1494 bp, Arabidopsis thaliana
atggaaaccaaaaccctaattttctcaattctcttcgttgttctctctctcatttacttaattggaaaactcaagcgaaagccaaatctacctccgagtccggcatggtcattaccggtgattggtcatctccgccttctcaaaccaccgattcatcgcacattcctctccctctctcaatccctaaacaatgctccgatcttctccctccgactcggtaaccgactcgttttcgtgaactcgtcacactcgatcgccgaggaatgtttcaccaaaaacgacgtcgtactggcgaacagaccaaacttcatcctcgctaaacacgttgcgtacgattacacaaccatgatcgcagcttcctacggtgaccactggcgtaacctccgccgcatcggctccgtcgagatattctccaatcaccgtctcaatagctttttgtctattcgtaaagacgagatccgacgacttgtgtttcgtctttctcggaacttttcacaagagtttgtgaaagtggatatgaaatcaatgttatctgacttaacattcaacaacattttaagaatggtggccggaaaacgttactacggagacggtgttgaggatgatccggaggctaaacgtgtccggcagcttatagcggatgtggtggcttgtgctggtgctggaaacgctgttgattacttaccggttttgcggttggtttcagattacgagacacgggttaagaagttggcgggtaggctcgacgagttcttgcaaggattggttgatgagaaacgagaagctaaggagaaaggaaacactatgatcgatcacttgcttactctgcaagaatcccaaccggattacttcacggatcgtatcattaaaggaaacatgctcgctttgatactagcagggaccgacacatcagcggttacgttagaatgggcattgtcgaacgtgttgaaccatccggatgtattgaacaaggcgagagatgaaatcgatagaaagataggtttagacaggcttatggatgaatcagatatctcaaacctgccttatctccaaaacattgtgtctgaaacgttgcgcctttatcctgcggctcccatgcttcttcctcacgttgcctcggaagattgtaaagttgcaggatacgatatgccgcgtggcacgatactattgaccaatgtgtgggctatacacagagatcctcagctatgggatgatccaatgagcttcaagccagagaggtttgagaaagaaggagaagctcagaagctaatgccgtttgggttaggaagaagggcgtgtcctggttctggactggctcatcggcttataaacctgactcttggatcattgattcagtgtttggaatgggagaagattggagaagaagtggatatgagtgaaggcaaaggtgttacaatgcctaaagccaagcctttggaagccatgtgcagagcacgtccctctgttgttaaaatcttcaacgagtccgtttga

SEQ ID NO: 250 - DNA, 1700 bp, Arabidopsis thaliana
atggcttcgtcatctacaagtatctctctccttctcttcgtctctttcattcttcttctcgttaactcgcgtgcagagaatgcgtccagtggatcggatctcgacgaagaattggctttcctcgccgcggaggaatccaaggaacaaagccacggcggcggttcgtaccacgaggaggagcacgatcatcagcaccgagacttcgagaattacgatgatctcgagcaaggaggcggcgagtttcatcacggcgatcacggttacgaggaggagccgttaccaccagtcgacgagaaagacgtggcggttctgaccaaggacaatttcaccgagttcgtcggcaacaatagcttcgcgatggtggagttttacgctccgtggtgcggcgcttgtcaggctttgactccggagtacgccgcggctgcgacggagttgaaaggccttgcggcgctcgcgaagatcgacgcgacggaggaaggggatttggctcagaagtacgagattcagggcttccccaccgttttcttgtttgtcgacggagaaatgcgcaagacctacgaaggtgaaagaacaaaggatggtattgtgacttggctgaagaagaaggccagtcctagcatccacaacatcactactaaagaggaggctgaacgtgttttgtccgctgaacctaaacttgtctttggttttctcaactcattagtggggtcagagagtgaggagctcgcggctgcgtccagactggaagacgatctcagtttttaccaaactgcaagccctgatattgcaaagctatttgaaattgaaacccaagtcaagcgtcctgccttagttttactgaaaaaggaggaagagaaacttgcccgttttgatggaaacttcactaaaacggctatagcagagtttgtgtcagccaacaaagtcccattggtgatcaacttcacaagggaaggtgcatcactgattttcgagagctcagtgaaaaaccaagcaaatgaatcagagaagcaccttcccactctgagggaggtggcaaagtccttcaagggaaagtttgttttcgtttatgtgcaaatggacaatgaagattatggagaagcagtttctggattctttggtgttaccggcgctgcccccaaggttcttgtatacactggtaatgaagatatgaggaagtttattctggacggtgaattgaccgtaaataacattaagacacttgcggaagatttcctagcagacaaactgaagcctttctacaagtcagatccactaccggaaaataacgatggtgatgttaaggtcattgtgggaaacaattttgatgagattgttcttgacgagtcaaaggatgttcttctcgagcactgccaatcatttgagccgatttacaacaagcttggaaagtatttaaaaggcattgactcgttagttgtagcaaagatggatggtaccagcaatgagcatcctagagcaaaggctgatgggttcccaacaatcctgttcttccctggtggaaacaaaagcttcgatccgatcgctgtggatgttgaccgtacagtagtggaactgtacaaattcctgaagaagcacgcatcaatcccatttaaacttgagaaaccggcgacacctgaaccggtgatctcgaccatgaaatctgatgagaagatcgagggtgatagttccaaggatgagttgtg

SEQ ID NO: 251 - DNA, 1110 bp, Arabidopsis thaliana
atgatgcatgaaatggcatacaaagtgtgtgtggagaaagtgaagagtttgggaattgagttcactactcctatagaagaaaccctcagagacactattgttagccttatggaggattataaagagaggtcaaaggagattatgaacggcggaggaaagttggtctgcgtcaccggagcttccggttacatagcgtcttggattgtcaagcttttgctcctccgtggctacaccgtcaaggccactgttcgagatctaacggacaggaagaaaacagaacatcttcttgcacttgatggtgcaaaagaaagactcaaattgttcaaagcagatcttttggaagaatcttctttcgaacaagctattgaaggatgtgacgctgtcttccacaccgcatctccagttttcttcaccgtcaaagatcctcagactgagctgattgatccagccttaaagggtactatgaacgtccttaatacatgcaaagaaactccctctgtcagaagggtcattctgacatcatccacggctgcggttctctttcgtcagccacctgtggaggcaagcgatgtggtggacgagactttcttctccgatccaagtctatgcagggagacaaagaattggtatccactctccaaaattttggcagagaatgcagcgtgggaatttgccaaagacaacggaatcgacatggtcgtgttgaatccaggatttatattcggaccactcttgcaaccaactctgaacttttcggtagagctaattgtggatttcataaatggtaagaatcctttcaatagtagattctacaggttcgtggacgtaagagatgttgccttagctcatatcaaagctctggagactccttcagccaatggcagatacatcattgatggtccaattatgagtgtaagtgacattatagatattctgcgggagctacttccagacttgtgtattgctgatacgaatgaagaaagtgtgatgaatgaaatgttatgcaaagtgtgtgtggagaaagtgaagaatttgggagttgagttcactccaatgaaatcgagccttagagacactattgttagcctcaaggagaaatgtcttttatga

SEQ ID NO: 252 - DNA, 1167 bp, Arabidopsis thaliana
atgatcaaaacaatcacatctctacgcaaaactctggttctacctcttcatttacatattcgtacgctacaaactttcgccaagtacaacgcacaagctgcatcggctttgcgagaagagcgtaagaaacctctttatcaaaatggagatgatgtatatgcggatttggattgggataatctcgggtttggtctaaatccagctgattacatgtatgtcatgaaatgctcaaaagacggcgaattcactcaaggagaacttagtccctatgggaatattcagctaagtccttctgctggagtcttaaactatggacaggcgatatacgaaggtacaaaagcatacaggaaagaaaatgggaagcttcttttgtttcgtccggatcacaacgctatccggatgaagcttggcgctgaacggatgctcatgccttctccttcggttgatcagtttgttaatgcagttaaacaaaccgctcttgcaaacaaacgttgggttcctcctgcagggaaagggactttgtacattaggcctttgttgatgggaagtggtccaatacttggtttaggtcctgcacctgaatatacattcattgtctatgcatctccagttggtaactacttcaaggaagggatggctgctcttaacctctatgttgaggaagaatatgtccgagcggctcctggtggagctggaggcgtcaagagcatcacaaattatgcgccagttttgaaagcactgagcagagccaagagtcgggggttttcagacgttctttatctcgactctgtcaagaagaagtacttagaggaggcttcttcttgcaacgtctttgttgtcaagggtcggacaatctcaactcctgcaactaatggaacaattcttgaagggattacgcggaaaagtgtgatggagatcgcaagtgatcaaggttatcaggtagtagagaaggcagttcatgtggatgaagtaatggatgcagatgaagttttttgcaccggaactgctgtagtagttgctcccgtgggcactatcacatatcaggaaaaaagagtagagtataaaaccggggatgaatctgtctgccagaaactgcgttcagtcctcgtaggtatccagacaggattgattgaagataacaagggatgggtcacagatatcaactga

SEQ ID NO: 253 - DNA, 990 bp, Arabidopsis thaliana
atgcactgtgaaggctgcgctaagaagataaagcgaatggttaagcactttgatggagtgaaagatgtgacggcagatactggtggaaataagcttttggtggtcggaaagattgatccagtgaaactccaggagaagttggaggagaaaaccaagagaaaggtggttctcgcgaatccaccgccaaaggtagagggacctgttgctgccgccgttggagagaagaaagccgatggtggagataaggaggcggctcctcctgctcctgctccggcagctccaaaagagagcgtggtgcctttaaagatcagactacattgcgaaggatgtattcagaaaatcaagaaaataatattgaaaatcaaaggagtcgaaacagtggctattgacggagctaaagacgtggtgacggttaaaggaacgatagacgttaaagaacttgtgcctctactcactaagaagctcaaaagaaccgtcgagcctcttgttcccgccaaaaaagatgacggagccgccgagaataagaagacggaagctgccgctcctgacgcaaagaaagaggctccgtccgccggagttaacgaagcaaagaaggaaggaagtgacggtggagagaagaaaaaagaggttggagacggcggagagaagaagaaagaaggtggtgacggcggagagaaaaagaaagaagccggagacggaggagagaagaagaaagatggcggaggtgtgccggccccggtggcgatggtgaataagatggattattatgggtactcagcttatccaacggctcctatgcattggcaagaaggacacgtgtacggtcagagttattcgatgacaggtcagaattatccagtgggaggtcagagttatccaggttcaggatacaactacgcaagtgagagttacgtgccgtacgcgcagccaaacgtgaacgctcctggaatgttcagcgacgagaatcccaatggttgctctgttatgtaa

SEQ ID NO: 254 - DNA, 1910 bp, Arabidopsis thaliana
atgaagagcagagtcattcttaaccatagagacagaagagataagaatcataacaacaacaacaccaatcattacacacaggttgatactatggagagaaagcctcttgaggttgagccatctactacgacgactaacaccgatgtggtcgattctttcgaggaagagcagagaaaaatcgtttatagaggatggaaagtcatgccttttatcattggtaatgagacatttgagaagcttgggatcatagggacattatcaaaccttcttgtgtacctaacttctgtattcaaccttaagagctacacagctgcaactatcatcaatgcctttagtggtacaatcaatttcgggacttttattgctgcctttctttgcgacacttactttggtcgctacaagactctcagtgtcgctgtcatcgcttgttttctgggatcgtttgtgatactacttactgctgcaattccgtcgttgcaccccgttgcttgcggaaacaaaatctcgtgcgaagggccaagtgtgggacagatactgtttctgctcatgggtttaggctttcttgtggtaggcgctggtggtatcagaccgtgtaatttagcgtttggtgctgatcagttcaaccccaaatccgaatcaggaaagaaagggatcaacagtttcttcaactggtatttcttcactttcacgttcgcgcagatcatctcgctcacagcagttgtgtatatccagtcaaatgtgagttggacaatcggtttgatcattccggtggctcttatgttcttggcgtgtgtgattttctttgctggcgatagattgtatgtaaaagtgaaagcctcgggtagtccattggctggtattgctcgtgttatagcagccgcgatcaagaaacgaggtttgaagccggttaagcagccttgggtcaatctttacaaccatatcccgtctaactatgcaaatactactctaaaatacaccgaccagttcagatttctagacaaagcagcaattatgacccccgaggagaagttgaactccgatggaacggcttccgatccatggaaactatgcacgttgcagcaagtggaagaagtgaaatgcattgtaagagtgattccaatctggtttgcatccacgatatactaccttgcaataactatacaaatgacttatccggtcttccaagcgctccagagcgaccgacgattaggttctggtggcttcaggattcctgcggccacctatgtagtgttcttgatgactggcatgacagttttcatcatattctacgaccgtgtacttgtcccgtcgctcagaagagtgaccgggttagaaaccggtatatcactcttacaaagaatcggagctgggtttacatttgcgataatgagtttattagtttccgggtttatagaggaaaggagaagaaactttgcattgaccaaaccgacactcgggatggcgcctcggacaggagaaatctcatcaatgtcagcgttgtggctgattccgcagcttacacttgcaggcatagcagaagcttttgctgccattggacaaatggagttttactacaagcagtttcctgaaaacatgaagagcttcgcgggttctatcttttatgtcggtgcaggggtttcgagctacctcgctagcttcttgatatcaactgttcatcgaacaaccgcgcattcaccttcagggaattggttagctgaggatctgaacaaagcgaaattggattacttctacttcatgctcacaggactcatggttgttaacatggcttacttcttgttgatggctagatggtatagatacaaaggaggtaatgatgaagacatcactgagattgagaccaatgaagaagaaaccaagcaacagcagctacaagacaagaactctgtctg

SEQ ID NO: 255 - DNA, 810 bp, Arabidopsis thaliana
atggcgaaattattcatcaagcaagcagagcaatatgcagcagcccgacccagttaccccaccaaactcttcgaatatatcgcatcgaaaacaccgtgccacgaccttgcctgggacgttggcgccggaagcggccaagcctcacgatcgctagccggaatctacaagaacgtgattgctacagacacgagctcaaagcaacttgaatttgctgcaaagcttcccaacgtccgttacgagatcactccaccgacgatgtcttcatcggagatcgagaagctagtagcacctgaatcatcagttgatttagtcaccgtcgctcaagcccttcattggttcgacctcacgaacttttacagcaacgtgaaacacgtgctcaagaaacccaacggagtaatcgccgcctggtgctacaccaatccggaagttaacgacgccgtggacaaggtctttcaacggttttacgatgagaaacttggtcctcattgggatctagcgcgacggcttgtggaggatgggtacagaggaattgagtttccgttcgagaaagtggataatgatgagtcaacggaaagtcaaagttttccggtgaggtttgtaacggagaaagaaatggtgtttgaagagtatatgacgtatctgaggtcatcttcggcgtatcagacggctaaggagaaaggtttagagcttttgacggctgagatggaaggagagtttgctggttcgtggaaagaagatgggaaagagaagaaagttgttaggtatccgatttatctgttgatcggaagagttgcagaagaacgtgtataa

SEQ ID NO: 256 - DNA, 770 bp, Arabidopsis thaliana
atggatttctctccgatcaactgcctcattttcgatttggatgacacattataccctctaaaaactggaatagcgccagctgtcaagaagaatattgacgattttctagtggagaaatttggattctcagaaagtaaagcttcaagcttaagagttgaactcttcaagacttatggaagtactctcgctggtcttagggcgttaggtcatgatgttcatcctgatgaatatcacagtttcgtgcacggaaggttaccgtatgggtcgatcgaaccaaacaacaagctacgtaaccttctcaacaaaatcaaacagagaaaaattaatcatgcggtgaaggtcctcaagaaacttggtttagaagattgtttcgaagagatgatttgttttgagacaatgaacccaaatttattcgggtcaacaacccgacccgatgaatacccggttgttctcaagccttcgttgaccgcaatggatatttgcattcgtgtagccaacgttgatcctcgccgaacagtatttttggatgataatatccacaatattaccgcgggtaaatctgtcgggcttcgcacaatcctggtgggaagagcagaaaagacgaaagatgcggattatgcggtggagacggttactgagatagctacggcggtgccagagatttgggctacggcgacggcgacaggcggatttgacgttggtggtgagaggatcagacggagcaagagtgagctggagggtatggcttcaatagcagccgtcggtgcgtg

SEQ ID NO: 257 - DNA, 996 bp, Arabidopsis thaliana
atgtcggacgctttgatcaatggattggctggagctggtggtgggatcattgctcagcttctcacttatcctcttcaaactgtaaatacgcgccaacagacggagcgggatctgaagagggagaagaggaaacttggaactatcgaacacatgtgtcaggttgtcaaacaagaaggatgggagaggttatatggtggattggcgccgtctcttgctggaacggctgcatcacagggtgtgtactactacttctaccaagtgtttcggaatcgagctgaagccacagctcttgcacggaagaagaaaggtttgggtgacggatcagttgggatgtttgcttcacttttagtggctgcctttgccggatcggttaatgttcttatgacgaatccgatttgggtgattgttacgcgtatgcagacccacagaaaaatgacaaaagatcaaacagcggcccccgagtcaccttcttctaatgcagaagctctggttgctgttgagccgcgtccatatgggacctttaatacgattcgagaggtttacgatgaagctggaataactggcttctggaaaggtgtaattccaacattgatcatggtaagtaatccgtcaatgcaatttatgttgtacgagacaatgctaaccaagctgaagaaaaagcgtgccttgaagggtagcaacaacgttaccgctttggagacatttcttctcggagctgtggcgaaactcggagctacagtcacaacttaccctctcttggttgtaaagtcgcgacttcaagccaaacaggtcacaacaggggacaaaagacaacaatacaaaggaacattggacgcgattctgaaaatgattcgatatgaagggctttacgggttttataaagggatgagcacaaagattgtgcagagcgttttagctgctgcggttctgttcatgatcaaggaagagcttgtcaagggagctaagctgttgctctcaaacgctacctctagctaa

SEQ ID NO: 258 - DNA, 2508 bp, Arabidopsis thaliana
atgataacagtaaaatggagcttgtgtttaatcttctgcctttcaaactcaatacttgtttttgctaaacacttgtgtcttccagaccagagggattctctttgggggttcaagaacgaattccatgtcccaagcgagaagtggaggaacaacactgattgctgttcttgggatggtgtttcttgtgatcctaagacgggcaatgtcgttgggttagatctagcgggcagtgatctcaatggccctttgagatctaatagcagcctgtttagactacaacatcttcagaagctgtatcttggttgtaatacttcattcggaagtctttcttataatgatggtttgaagggtggtgagctactggattccatcggcaacctcaaatatttgaaggttttgagtcttcgtggttgcaatctctttggaaagattccttcttcactcggaaatctttcttatctcactcatcttgatctttcttttaatgatttcaccggtgtgataccagattcgatgggcaatctcaactatttgagggttttgaatcttggtaaatgcaatttctatggaaaggttccttcttcactcggaaatctttcttatctcgctcaacttgatctttcctataatgatttcacccgtgaaggaccagattcaatggggaaccttaaccgactaaccgatatgcttctcaagttgaactcgctcaccgatatcgaccttggttctaaccagttgaaaggtatgctcccatctaacatgagtagcctctccaaactggagtatttttatattggtggaaattcattttctggatccattccctcttctctcttcatgatcccttcgttggttgaacttgacctgcaaagaaaccacttcagcgctcttgagattgggaatatctcttcacaatctaaacttcaagtattaattcttggaggaaataatttcaatccggacattgttgatttgagtattttctcacctctcttgtcacttggttatttggatgtttcagggattaatttgaagatcagttcaaccgtcagtcttccctcacccatagaatacttggttttatcgtcgtgtaatatttccgagtttcccaaatttctacgtaaccaaaccaagttgtattctttagacatctctgccaatcaaattgaaggccaagtaccggagtggttatggagtctgccagagttgcagtctattaacatctctcataattctttcaatggtttcgaaggaccagcagatgttattcaaggaggtggagaactatatatgcttgacataagttcaaacatattccaggatccatttcctttgttaccagtagactctatgaatttcttgttcagctccaataatcgattttcgggagagattcctaaaacaatatgcgaattggataatcttgtgatgcttgttttgtcaaacaacaacttcagcggttctattcctcggtgttttgagaatttacatctttatgtcttgcatcttcggaataacaacctctctggtatttttccagaggaagctatcagtgatcgcttgcaatcacttgatgttggtcacaatcttttctcaggagaacttcccaaatcattgatcaactgcagtgcactcgagtttctatacgtggaagataaccgaatcagtgacacgtttccatcctggttggaattgttgcccaattttcagattcttgtccttcgttctaacgagttctatgggccaatattttctcctggagattctttgagtttccccaggttgcgaatctttgatatttcggaaaatcgcttcactggagtcttgccatcagattactttgcgccttggagtgcaatgtcgtcagtcgtggatagaataattcagcattttttccagggatactatcataactctgtggttctgacgaacaaaggattaaatatggagctggttgggagtggtttcacaatctacaaaaccattgatgtctccggaaacagactcgaaggagacatccccgagtccatcagtcttctcaaggaactgattgtgctcaacatgtcaaacaacgctttcacaggccatattccaccatctctatcaaacttgagcaatctccaatcattggatctatctcaaaacagattatccggcagtatcccaggagagctcggggaactcacatttctagcgcggatgaacttctcttacaacaggcttgaaggtccaataccacaaaccactcagattcaaacccaggatagttcttctttcacagagaatcctggactctgtggtcttcctctaaaaaaaaactgcggcggaaaagaagaagcaacaaagcaagagcaagatgaggaaaaggaagaagaagaacaagtatttagctggatcgcagctgcaataggctacgtacctggtgttgtgtgtggactcaccatcggccacattctggtttcacacaaacgtgactggttcatgagaattgtttccctctttacttaa

SEQ ID NO: 259 - DNA, 1580 bp, Arabidopsis thaliana
atgaccggaggaggatttgcgacttcggcgaacggagtagagtttgaggcaaagataactccaatagtcatcatatcttgcatcatggctgctaccggcggcctcatgtttggttacgacgtcggtgtctccggcggagtgacatcgatgccggactttctcgaaaagttttttcccgtggtttatcggaaagtagtagctggcgccgacaaagacagcaactactgcaaatacgacaaccaaggactacaacttttcacatcatctttatacttagccggtctaaccgcaacgttctttgcttcatacacgacaagaacgctcggaaggaggctaactatgctcatagccggcgttttcttcatcataggtgtggctctcaacgcgggggctcaagacctagccatgcttattgcaggcaggatattgcttggttgtggagttgggttcgctaatcaagccgttccgttgttcttgtcggagattgcacctactaggatccgtggtggtcttaatattctctttcagcttaacgtcactattggtatcctcttcgccaatcttgtcaactatgggaccgccaagattaaaggaggttggggatggaggttatcgttaggtttggcgggaattcccgcgcttcttctaacggtcggagctttattggtgacagagacaccaaacagtttagtcgaaagaggtcgtctcgatgaaggtaaagctgttcttcgtcgtattcgagggaccgataatgttgaaccagagttcgctgatctccttgaagctagtcgacttgctaaagaagttaaacacccttttagaaaccttcttcaacgtagaaaccgtcctcagctcgtcatcgccgtcgctttacagattttccagcaatgtactggaatcaacgcgattatgttctacgcgcctgttctgttcagcacattagggtttggtagtgacgcttcactttactcagcagtggtgaccggagcagtcaacgtcctctcaactttagtctcaatctactccgttgacaaagtcggtcgccgagttcttctcctagaagctggtgtccaaatgttcttctctcaagtcgtaatcgccattatccttggcgtcaaagtaacagacacttctacaaatctctccaaaggtttcgcaattctagtcgtggtaatgatctgcacatacgtcgctgctttcgcctggtcttggggaccgctcgggtggttaatccctagtgagacattccctctagagacacgttccgcgggacaaagtgtaacggtctgcgttaacttgctcttcacgttcattatcgctcaagctttcctctctatgctttgccatttcaagtttgggatattcatcttcttttctgcatgggttttgattatgtctgtctttgtgatgttcctacttccggagactaagaatattcctatcgaggagatgactgagagagtttggaagaagcattggttctgggctaggttcatggatgatcataatgatcacgagttcgtgaatggtgagaagagtaatggtaaatctaatggctttgatccttcaacacggcttta

SEQ ID NO: 260 - DNA, 2613 bp, Arabidopsis thaliana
atggtcaccaccacaccaataatacgtttctgtctcaatcttctctttgtctttgtttcatgtgcttcttccatagagtttgtttaccctaatttcacagcttctaacctcagattcgtcgatagctccaaaggagctttcctcttgtctcgtaattccatcttcaaagccggtttattcagtcccggcggcgatgattcctctaccggtttctacttctccgtcgtccatgtcgattccggttcaacaatctggtcatcaaatcgagattcccctgtttcaagctctggtacaatgaatcttactcctcaaggaatctctgttattgaagatggtaaaagtcaaataccagtttggtcaacgccggttttagcttctccggttaagtcccttcggttaaccgacgccggtaatctccttcttcttgatcacttgaacgtttctctatgggaaagctttgattttcctactgactcgatcgttcttggacaaagacttaagcttgggatgttcttgtccggatccgtctcgcggtctgatttctctaccggagattataagttcttggtcggtgaatccgacggtttgatgcagtggagaggacagaattattggaagctaaggatgcatatacgagctaatgttgattctaacttccctgttgagtatctaacggtcactacttcaggattagctcttatggcacggaacgggacggtggttgtagtccgcgtggctttaccaccgtcctctgatttccgagtggcgaagatggattcatcaggtaagttcatcgttagtagattctccgggaagaatcttgtgacggaattctctggtcctatggattcttgtcagattccgtttgtctgcggtaagctcgggctttgtaatcttgataacgcttcggaaaatcagagctgttcatgtccagatgagatgcgaatggatgctggtaagggtgtgtgtgttccggttagccaatcattgagtttacctgtttcttgtgaagcaagaaacatttcgtatctcgaactaggtcttggtgtgtcttacttctctactcatttcaccgatcctgtggaacacggtctcccgttattggcttgtcatgatatttgcagtaagaattgctcttgcctcggtgttttctatgagaacacgtctcggtcttgttatctcgtaaaggactcgtttggttctttgtctttagtaaagaactcaccagagaatcatgatcttattggatacgttaagttgtctatcagaaaaacaaacgctcagcctccgggaaacaataacagaggaggatctagcttccctgtgatcgcacttgtgctcttaccttgctctggtttcttccttttgattgcattagggcttctctggtggcgtagatgtgcagtgatgagatacagtagcatccgtgagaagcaagtaactagacccgggtcgttcgaatcaggagatctaggatctttccatatcccggggttacctcagaaattcgaattcgaggagctggaacaagcaactgagaatttcaagatgcagataggatcaggcggatttggatcagtctacaaaggaactctcccagatgaaacactcattgctgtcaagaaaatcacaaaccatggacttcacggtagacaagagttttgtacggaaatcgcgataattggaaatatcagacacacgaatctagtgaaactgcgaggcttttgcgctcgcgggaggcagttactcttagtctacgagtacatgaaccatggctcgttagaaaagactctgtttagtgggaatggtccggtgcttgagtggcaagaaaggtttgatatagcgctcgggactgctcgcgggctcgcgtatctccacagtggttgcgaccagaagatcatacactgcgatgtgaagccagagaacatcttactgcacgatcatttccaacctaagatatctgatttcgggttatcaaagcttcttaatcaagaagaatcaagtctgttcactacgatgagaggtactcgaggctatttagctccagagtggataacaaacgcagcgatctccgagaaagctgatgtgtacagctatggaatggttttgttagaactagtgagtggtaggaaaaactgttcttttcgatctcggagcaacagtgtgacggaggataataatcagaaccactcgtcgactacgaccactagtactggtttggtgtatttcccattgtacgctttggatatgcatgaacaagggaggtatatggagctcgctgatccgaggctagagggtcgggtaacgagccaagaggctgagaagttggttcggatagctttgtgttgcgtccacgaggagccagcattgaggccaacaatggcagcggtagtgggtatgttcgaaggaagtataccgttggggaacccgaggatggagtcgttgaacttcttgaggttttatgggctgaggtttgcggagtcttccatggttgaaggacaaaatggggagagtgaaactatggtcttccaccggcgagagagctctaatagtggcggctctaggcagtctgcgtcttacatagcgtctcaggaagtgtccggcccgcgatga

SEQ ID NO: 261 - DNA, 819 bp, Arabidopsis thaliana
atgacaggatcacaagaagaccaacctaagatcatcattgatcaagagcaacccaaaactctagaaacagagcaccaaccagaaccttcttcatcgtctccggatcagaagaaatggggtactcacgtgatgggagctccggcagctccagttgctcatcccgataaccaacaggcggcggcgtgggtcgctggagataaccagcagacgcagtaccaaccgtacgtcatctactctcctgtcgaacatccaacaactaacaaccctctcgagccagtcatcggaatgttccatacctggagtcgcaaggcagaaaccgtcgcacgtaacctctggcacaatctgaagacaggaccgtctatgtcggaaacggcgtgggggaaggttaatttgacggccaaagcgataacaaaaggaggattcgagtcgcttttcagacagattttcggaacagagccaaacgagacgctgaagaaaactttcgcttgttatctctcgacgacgacaggtcctgttgctggaactgtctatctttcgaatgctcgtgtcgctttttgtagcgatcgtcctctgtacttcacagcaccttctggtcaagaatcttggagctactacagggtggttgtacctttggcgaatgtagcgacggtgaatccggtggtggtgaaagagactccacctgagaagtatattcagttgacgacggtggatggtcatgacttctggttcatgggttttgtgaattatgagaaggctacgcatcatctgctgaccagtgtctccgattttcaaaccgcacacggctctgtgtctggttaa

SEQ ID NO: 262 - DNA, 480 bp, Arabidopsis thaliana
atggatttgaagaaagcatctttgtttttattccttcttctctgtctccacctgcaactgcaacaccactttgctcacgcggtctcgcgatcttcaacaagtttagccttcgttgatccaaaccatgatgatctcccgtttcaagaagtagaattgaagccagacggtgacgtaatcgaagccaatttaccgaaattaacagtcgttgttaagaaaggcggcggaggaggaggcagaggtggaggcggtttcggcggagggggacgcagtttcggcggaggagggagttctagcagaggcggtggaggaagttctagcagaggcggaggagggagttctagcagaggaggaggattacgtccgattccgatttatggcggtggaacgcaccgcagtggtcatcattcaagcggcggccgggaaactgctagtggttggttaggtctatcgattttagccggtttaggtttggttttttaa

SEQ ID NO: 263 - DNA, 1395 bp, Arabidopsis thaliana
atgagcataatgaggaatttcttgagtatgataattatgctttgcgtatgtctcaattggtgttttgctgaaggagctgagaaaagcgatagtggaaaggtacttgattcttacaccattcaagtcagctctctgttcccttcatcatcatcttgtgtcccttcttcaaaagcatctaataccaagtcgtcgctgcgcgtggtgcacatgcatggtgcgtgctcgcatcttagcagcgatgcgagagtcgaccatgacgaaatcatcagacgcgatcaagcacgtgtggagtccatctactcaaaattgtcaaagaatagcgcaaatgaagtcagcgaagccaagtcaacggagctaccggctaaaagtggaatcacactcggatcaggaaactacatcgtaacaatcggaatcgggacaccgaagcacgatctatcgctggtcttcgacaccggaagtgacctgacatggactcaatgtgagccatgtctaggaagttgctattcacaaaaggaaccaaaatttaacccttcttcgtcttctacttaccaaaacgtctcgtgctcatctccaatgtgtgaagacgctgagagttgttcggcttccaactgcgtatacagtatcgtttacggcgataagtcgtttacccaaggatttcttgcaaaggagaaatttaccctaacgaactctgatgttttggaggatgtttactttggttgcggtgaaaacaaccaaggacttttcgacggtgttgctgggcttctcggccttggccctggcaaactctcactaccggcgcaaacaacaacgacctacaacaatatcttctcctactgtctaccttctttcacaagtaacagtactggccatcttacctttggatccgctggaatctctgaatccgttaaattcacaccgatttcttccttcccaagcgcattcaattatggcatcgatatcataggtatcagtgtaggcgacaaggaattagcgattactccaaactcattctcgaccgaaggtgctataatcgactcaggcacagtgtttactcgcctccctaccaaagtctacgcggaactccgcagtgtttttaaggaaaagatgtcgagttacaagagtacgtcgggatacgggctttttgacacatgttacgatttcactggcttggatacggtgacatacccgacgattgcattctccttcgccggtagcactgtcgtagaacttgatggatcagggatttcgttgccgatcaagatatcacaggtttgtttggcgtttgcagggaatgatgaccttcccgccatctttggaaacgttcagcagacgacgctagatgttgtgtacgacgtggctggtggacgagtcggttttgctcccaatggttgttaa

SEQ ID NO: 264 - DNA, 456 bp, Arabidopsis thaliana
atggagtcatcatcgtcgacttttctcaccacgacaagcttagacaagaaaaaaccatctccggtttcaagaaaatcaccaaagcaaaagaagaagacgacttcgacgaataaacccatcaaagttcgttacatctcaaaccccatgagagttcaaacttgtgcttctaagttcagagagctcgttcaagaactcacaggccaagacgccgtcgatcttcaaccggagcccatctattccccttcctccgacgaccacaacctttctccaccggcggagaatcttgcgccacgtgttcttcatcaggagccgttcggtgagagagacagtgattgttatgagccgttgaatgcggaagacatgtttttacctgatcagatgtcggcaggtttttctgggtttttctctaatgggttttacaatgtcaatgactttggaagcatcgattctatgtga

SEQ ID NO: 265 - DNA, 1242 bp, Arabidopsis thaliana
atggctctttcaatcgttcttcttcccttcattctcattctcataccgacttttctcagttcggttttcgccgtttcaccactcaaaactgatacgttaaaaccggggcagcagctcagagactgggagcagttgatctctgcggatggtatcttcactctcggattctttacacctaaagactcatctacttccgaactcgggtcagctggtcttagatatcttggtatttggcctcaaagtattccaataaatctagtttgggtgggtaacccaaccgaatcagtttctgattcatctggttctctatccattgacaccaatggggttctaaagataacacaggcaaacgctattccaatcttggtgaaccaaagaccagccgcgcagctttcattggtcgggaatgtgtctgccattttactcgataccgggaactttgtggtccgagagatcaggccaggaggagttccgggtcgtgttctatggcaaagctttgaccatcccacaaacacattacttcccgggatgaagattgggtttaacctaagaaccaagaaagaagtatcagttacgtcttggataactgaccaagtcccagtcccaggagcattcagactaggactagacccatcaggagctaaccagttactcgtctggcgccgcggggaaatctactggtccagtggaatcttgacgaacaatggaagctctcatttgaacttagaagtatccagacactacattgattatgaattcaagttcgattcaaataagtacatgaagtacttcagctactcaatcaagaaagctaatagttcggtcttttccagctggttcttggatactctaggccaaatcactgtaaccttttctctcagcagtaacaatagcagcacctggatttccgaaagcagtgaaccctgcaagacggatttaaagaacagttcagcaatctgcatcacggagaagccaacggcttgtaggaaagggtcagagtatttcgaacccagaagaggatacatgatggaaaataataccggttattatccattttactatgacgatagtttgagcgctggtcttagcgactgtcatggaacctgctggagaaactgttcttgcatagctttccaagcctttcctgatggatgccaatattgggaaaaaggatcaaagtttgttccttatgatagcttcaactccaatttagtaacttatgttcttgattctgtaaagtga

SEQ ID NO: 266 - DNA, 573 bp, Arabidopsis thaliana
atgggtcgtgtcactactccatccgaggaggattcaaacaacggtttaccggttcagcaacccggtacaccgaaccagcgaaccagagttcccgtgagtcaattcgcgccgccgaattatcagcaagctaatgttaacctatctgttgggaggccatggagcactggtttgtttgattgtcaagcagaccaagccaatgccgttttgaccacaattgtaccttgtgtaacatttggacaaatagcagaagtgatggatgaaggagagatgacttgtcctcttggaactttcatgtacttattgatgatgccggctttatgctctcactgggtgatgggatcaaagtatagagaaaaaatgaggagaaaatttaatcttgtggaagctccatattcagattgtgccagtcatgtcctatgcccttgttgctctctttgtcaagaatacagagagctcaagattaggaatcttgatccttctctaggttggaatgggatacttgctcaaggacaaggacaatatgagagagaagcaccaagttttgctcctacaaatcaatatatgtctaagtaa

SEQ ID NO: 267 - DNA, 2598 bp, Arabidopsis thaliana
atggcggaggagcacttcgacgttctgactaaatccggtgagaagaccggtgtgtccaaacccaggcatgtttattgttcatctcttctttggagttgtttttccagtgaattaacctcaattcgtctctgtttggaaccatgtcattgtaggggagaggttcacagagatggagattaccatcgtgctgttcatgtctggatttttgtggagactactcaacagctacttctccaacttcgatctgatgataaagattcttggcctggtcaatgggacatctctagtgctggccatatatcagctggtgatacatcgcttctatctgcacagcgggagcttgaggaagagcttggcgtaaaactcccaaaggatgcatttgaaaagatcttcgtttttctgcaggaatgtgtcacaaacgatggcaaattcataaataatgagttcaatgatgtgtatcttgttactattctgcatccaatcccattagaagcctttactcttcaaaaagaggaagtctctgctgtaaagtacgtaccttacgaagaatacagaaactttctgtctaaggaagatcctgcttatgtgccatatgatgttaatggagagtatggaaaactatttgacataatcagacagaggtgccaagtgaacactgaggcccgtagtttatctctgcagaagcaactccagagatattctccagtcaccctcgaagccaaggtattaatttgttacatcttttcttgtgatttctttgtttcatatgcaccaaataaatcttattttgcaccgttccataaaagacattttgagacacctttcatttatatgcagttgacagaactttctgaagcagatcagaaagcgttgggtctaattgtgaaggctgcaaaaattatggacgatatattctatgagcaggtttggaacagcaatccagccctaagagattggctgaaggatcatgccaatgcatcaaaactggacaaactaaaatgggattacttcacgatcaacaaaagtccatggtcgtctcttgatgaaaatgaagcattcttgagtactgcggattcagctgtaaagttgcttcctggagcaacaaaagccatagctggctggaagggtcttgaatatagagcagcctttccagtgactaaaccacctggtgccaatttctatcctcccgatatggataaaatggagttcaccttatggctcaatggccttacggaagagcaaaagcatgctgcaacaggatttttcagtgttataaaaaggcgaagtgaagctaatttagatgcttctgatcatcttgccagcagcacaaagaagttaccagactctaattccgatctgtatagtattccttattcagagatatatcgacctttcctcaagaaagcttctgaattcttgcagaaagctggggacttggtcagttcgccaaggtatatatttcaaacagtttcttacccttaccatataaaatgtattcacccattcgattggcttagtatattgaagtattcacccacaatgctttctcatagtttgaagaagctactgcacagcaaagctgaagccttcctttcaaatgagtattatgagtcagacatcgcatggatggacttggattcaaagttagatattaccattggtccatatgagacgtacgaggatgaaatctttgggtataagctattggaagataatctcccgcttgagagtgtatacaaatcgacagatgtatctgctgctcctattcgggtcatccagttaatttacaattccggggtaagttcccctcggcatccatctgagataggaaaaggaagaaaatgtattgccgatgtgaagggtcctcagactgttgcttacaatttgccaaacgatgaaaaaatcgtgaaggatagaggaacatcaatggttatgctcaagaacgtccaagaggcaaagtttgaacatattttaaagcctatagctgaaatcaccatcagcaaggaacagagaggattagttgattttgattctttcttcactcacaccatttgccatgaatgttgccatggcattggtccccataccataacccttcctggtggtcaaacctcaacagtgagaaaggaactacaagaagtccattctgcaatggaagaagcaaaggcagatatagttggtctttgggcactgaagtttctcatcactaaggggttgctttcaaagagtatggtggagagtatgtatgtttcgttcctagctggttgctttagatcgatccggtttggtctcacagaagctcatgggaaagggcaagccttgcaattcaactatttatatgaaaaaggagccttcgtgttccacgaggactctacattctcggttgatttcgctaagatcgaaggtgcagttgagagcctgagccatgagatactaactattcaaggaaaaggtgacaaaaacgcagcaacattgcttctaaataagtactgcactatcaccggaccattgaaaaccgctctggagaatctcgaacgcgttaaggtaccggtggatatatctccgacatttccattagcagaagcattgatgaactga

SEQ ID NO: 268-269 - skipped (2 entries)

SEQ ID NO: 270 - DNA, 1782 bp, Arabidopsis thaliana
atggctactttgactgagccatcatcatctttgagtttcacatcttctcatttctcttatggttctattgggtccaatcacttctcatcaagctcagcttctaatcctgaagttgttagtctaaccaaactcagctccaatcttgagcagcttcttagtaattcagattgtgattacagtgatgcagagatcattgttgatggtgttccagttggtgttcatagatgcattttagctgcaagaagtaagtttttccaagatttgtttaagaaagaaaagaaaatttcgaaaactgagaaaccaaagtatcagttgagagagatgttaccttatggagctgttgctcatgaagctttcttgtatttcttgagttatatatatactgggagattaaagccttttccattggaggtttcgacttgtgttgatccagtttgttctcatgattgttgtcgacctgccattgattttgttgttcaattgatgtatgcttcctctgttctccaagtgcctgagctagtttcatcttttcagcggcggctttgtaactttgtggagaagacccttgttgagaatgttcttcccattcttatggttgctttcaattgtaagttgactcagcttcttgatcagtgtattgagagagtggcgaggtcagatctttacaggttctgtattgaaaaggaagttcctcccgaagtagcagagaagattaaacagcttcgacttatatccccgcaagacgaagaaaccagtcccaagatttcggagaaattgcttgaaagaatcggtaaaattctcaaggccttggattcagatgatgttgagcttgtgaagcttcttttgactgagtcagatatcactctagatcaagccaatggtctgcattattctgttgtgtatagtgatccgaaagttgttgccgagattcttgctctggatatgggtgatgtgaactacaggaattcccggggttacacggttcttcattttgctgcgatgcgtagagagccatcgatcattatatcgcttatcgataaaggcgccaatgcatctgagtttacatctgacggacgtagcgcagttaatatattaagaagactgacaaatccaaaggattatcataccaaaacagctaaagggcgtgaatctagtaaagccaggttatgcatcgatatcttggaaagagaaatcaggaagaaccccatggttctagatacaccaatgtgttccatttctatgcctgaagatctccagatgagactgttgtacctagaaaagagagtggggcttgctcagttgttctttccaacggaagctaaagttgctatggacattggtaacgtagaaggtacaagtgagttcacgggtttgtcacctccttcgagtgggttaaccggaaacttgagtcaggttgatttaaacgaaactcctcatatgcaaacccaaagacttcttactcgtatggtggctctaatgaaaacaggtaacaaaaagcttgctctctttgagactggtcgaaggttttttccatatggttcagaggttctagataagtacatggctgagtatatagacgacgacatcctcgacgatttccattttgagaagggatctacacatgaaagaagattgaaaagaatgagatatagagagcttaaggatgatgtccaaaaggcatatagcaaagacaaagagtctaagattgcgcggtcttgtctttctgcttcatcttctccttcttcttcttccataagagatgacctgcacaacacaacatga

SEQ ID NO: 271 - DNA, 909 bp, Arabidopsis thaliana
atggatcagtactcatcctctttggtcgatacttcattagatctcactattggcgttactcgtatgcgagttgaagaagatccaccgacaagtgctttggtggaagaattaaaccgagttagtgctgagaacaagaagctctcggagatgctaactttgatgtgtgacaactacaacgtcttgaggaagcaacttatggaatatgttaacaagagcaacataaccgagagggatcaaatcagccctcccaagaaacgcaaatccccggcgagagaggacgcattcagctgcgcggttattggcggagtgtcggagagtagctcaacggatcaagatgagtatttgtgtaagaagcagagagaagagactgtcgtgaaggagaaagtctcaagggtctattacaagaccgaagcttctgacactaccctcgttgtgaaagatgggtatcaatggaggaaatatggacagaaagtgactagagacaatccatctccaagagcttacttcaaatgtgcttgtgctccaagctgttctgtcaaaaagaaggttcagagaagtgtggaggatcagtccgtgttagttgcaacttatgagggtgaacacaaccatccaatgccatcgcagatcgattcaaacaatggcttaaaccgccacatctctcatggtggttcagcttcaacacccgttgcagcaaacagaagaagtagcttgactgtgccggtgactaccgtagatatgattgaatcgaagaaagtgacgagcccaacgtcaagaatcgattttccccaagttcagaaacttttggtggagcaaatggcttcttccttaaccaaagatcctaactttacagcagctttagcagcagctgttaccggaaaattgtatcaacagaatcataccgagaaatag

SEQ ID NO: 272 - DNA, 2754 bp, Arabidopsis thaliana
atggcgacctccgtcgataaccgccattatcccaccatgaacggcgtcgctcacgccttcaaacctcctctcgttccttctcctcgctcattcgaccgccaccgtcaccaaaaccaaactctcgacgtcatcctcaccgaaactaaaatcgtcaaagaaaccgaagtcatcaccaccgtcgtagacagttacgacgactcctcaagcgacgacgaagacgagagccataaccgtaacgtcccttactacaaagagctggttaaaaaatcaaacagcgatttagaaccgtcgattttagatccgagagatgaatcaacggctgatagttggattcaacgtaactcatccatgctccgtctcaccggaaaacatccattcaacgccgaagcacctcttcctcgtcttatgcaccatggattcatcactccagttccactccattacgtccgcaaccacggtgcagttcccaaagcgaattggtcagactggtcaatcgaaattaccggactcgttaaacgtccggctaaattcaccatggaagagctaatctccgagttccccagccgcgaattcccggtgacactcgtctgcgccggtaatcgccgcaaggaacagaacatggtgaaacaaacgatcggattcaattggggatccgccggagtatctacttctctatggaaaggtattccgttaagcgaaatcctccgtcgatgcgggatctatagccggagaggaggcgcgttaaacgtttgcttcgaaggagcggaggatcttcccggcggcggcggatctaaatacggaacaagtattaagaaggagatggcgatggatccggctagagatattatcttagcttatatgcaaaacggcgagcttttaacgccggatcatgggtttccggttcgggtcattgtaccgggtttcatcggtggtcggatggttaaatggttaaagagaatcatcgtcacgcctcaagaatctgacagttactatcactataaagacaatcgagtccttccttctctcgttgatgctgagctggcaaattccgaagcttggtggtataagcctgaatacataatcaacgagcttaatataaactcggtgattacaacacctggtcacgcagagattttaccgattaatgcattcactactcagaagccgtacacattaaaaggctacgcttattctggaggaggtaagaaggtaacgagggttgaggtgactctagacggaggagacacgtggagtgtttgtgagcttgaccaccaggagaaaccgaacaagtacggtaaattctggtgctggtgtttctggtcacttgacgttgaggttcttgatctgctcagtgctaaagacgtcgcggttcgagcctgggacgagtctttcaatactcagcctgataaactcatctggaacctcatggggatgatgaacaattgctggttcaggattaggaccaacgtgtgcaagcctcatagaggagagatagggatagttttcgaacacccgaccagacccggaaaccagtcgggtgggtggatggcaaaggagcgtcagcttgagatttcctcagaatccaacaataccttgaagaaatctgtctcatctcctttcatgaacactgcctcgaagatgtattcaatctctgaagttagaaaacacaacactgctgactctgcatggatcatcgtccacggtcacatctatgactgtacacgtttcttgaaagatcatccaggaggcacagattctatcctgataaacgcaggtacagattgcaccgaagagtttgaagccattcactctgacaaagccaagaagcttttggaagattaccgtatcggtgaactcatcaccactggctacgactcttcccctaacgtctcagttcatggtgcctcaaactttggtcctttgttagctccaatcaaagagctaactcctcaaaagaacattgctttggtcaacccacgtgagaaaatcccggttaggctcattgagaagacttcgatctcgcacgacgttcgtaagttccgattcgcattaccatcagaagatcaacagcttggtttacccgtggggaagcacgttttcgtttgcgccaacataaacgacaaactctgtctcagagcttatactcccaccagcgccatcgacgcggttggtcatatcgacctcgtcgtcaaagtttacttcaaagacgttcatccaaggtttcccaatggtggactcatgtctcaacacttagactcgttaccaatcgggtcaatgatagatatcaaaggtccactagggcacatcgagtacaaaggcaaaggcaacttcctggtcagcggcaaacctaagtttgccaagaaactagcaatgctcgccggaggaacaggcatcactcctatctaccagatcattcaatctatattgagtgatccagaggacgaaaccgagatgtatgtggtttacgcaaacagaaccgaggatgacattcttgtgagggaagagctagaaggatgggctagtaagcataaggagaggctaaagatttggtacgtcgttgaaatcgcaaaggaaggttggagttacagtaccgggtttataactgaagctgtgcttagggaacatatccctgaaggtttggaaggcgaatcgctagcactcgcatgcggaccaccgcctatgattcagtttgcgttgcagccaaatctagagaagatgggttacaacgtgaaggaggatctcttaatcttctag

SEQ ID NO: 273 - DNA, 2754 bp, Arabidopsis thaliana
atggcggcctctgtagataatcgccaatacgctcgtctcgagccaggtttgaacggcgtggttcgttcttacaaacctcccgttccaggccggtccgattcccctaaggcgcaccagaaccaaaccaccaaccaaaccgtgttcttgaaaccagccaaggttcatgacgatgacgaagacgtgtcgagcgaagacgagaacgagacacacaacagcaacgccgtgtactacaaggagatgataagaaaatccaacgccgagcttgaaccgtccgttttggacccgagggacgaatacacggctgatagctggatcgagcgtaacccttccatggtacgtctcacagggaaacatcccttcaactccgaggcgcctcttaaccgtttaatgcaccacgggtttatcacccctgtcccgttgcactacgttcgtaaccacggccacgtccctaaagcccaatgggccgaatggacggtcgaggtgaccggattcgtcaaacggcccatgaaattcaccatggaccagctcgtctccgagtttgcttaccgcgagttcgccgcgacgctagtctgcgcggggaaccgccgtaaggaacagaacatggtgaagaagtcaaagggattcaactggggatccgccggagtttccacctccgtgtggcgtggtgtccctctctgcgacgtactgcgtcgctgcgggatctttagccgaaaaggcggcgctctcaacgtctgcttcgaagggtcggaggatcttccgggcggtgccggaactgctggttccaaatacggaacgagcatcaagaaggaatatgccatggatccatcaagagacatcattttggcttatatgcaaaacggagagtatctaacaccagaccacggttttccggttcggatcatcatccccggtttcattggtggccggatggttaaatggttgaaacgaatcattgtcacaactaaagaatccgacaatttctaccatttcaaggacaacagagttttaccttctttggtagacgccgaactcgccgacgaagaaggttggtggtataagccagagtacataatcaacgagctaaacataaactccgtgattacgacgccatgtcacgaggagattcttcccatcaacgctttcacaacccaaagaccttatactttaaagggttacgcatattccggaggtggaaaaaaagtgacccgtgtggaggtcacggtagatggtggagagacatggaacgtatgtgcacttgaccatcaagagaagccaaacaagtatgggaagttctggtgttggtgtttttggtcacttgaggttgaggttttggacttgcttagtgccaaagagattgctgttcgtgcatgggacgagactctcaacacgcagcccgagaaaatgatatggaatctcatggggatgatgaataactgctggtttagagtgaagactaacgtgtgcaagccacacaagggagagattgggattgtgttcgagcatccaacgcttcctggtaatgaatctggtggatggatggcgaaggaacgtcacctcgaaaaatcggctgacgcgcctcctagtctaaagaagtctgtctcgacgccgtttatgaacacaactgcgaagatgtactcgatgtccgaggtcaagaagcataattcggctgactcttgctggatcattgtccatggacatatctatgattgtacacgattccttatggatcacccgggtggttcggattcaatcttgatcaatgctggtacggattgtacggaggagtttgaagccattcactcggataaagccaagaagatgcttgaggattaccgtatcggtgagctcatcaccactggttattcctctgactcttcctcgcctaacaactcggttcacggttcatccgccgtgttctcgctgttggctcccattggagaggcgactccggttaggaacctcgctttggttaatccccgggctaaagtcccggttcaactcgtcgaaaagacttccatttctcatgatgttcgtaaattccggtttgctttaccggttgaggatatggttctaggcttaccggttggtaagcacattttcctttgcgccaccatcaatgacaagctctgcctcagagcttacacaccaagcagcaccgttgatgtggttggctacttcgagctcgtggtcaagatttactttggcggtgtccacccaagattccctaacggcgggctcatgtctcagtacctagactctttgcctatagggtcaactttggagattaaaggaccattgggtcacgttgagtatctcggcaagggtagtttcacggttcacggtaaaccaaagtttgctgataaattggcaatgttggcaggtggaaccggaataactccggtttaccaaattatccaagccattctcaaggatccagaggatgagactgaaatgtacgtcatttatgctaaccggaccgaggaagatattctcctaagggaggaactggatggttgggcagagcaatacccggaccggttaaaggtttggtacgtagtggaatcagctaaggaaggttgggcatacagtaccgggtttatttccgaggcgattatgcgagaacatatccctgatggattagatggctcagcccttgccatggcttgcggaccaccaccgatgattcagtttgcggttcagccgaatttggagaagatgcaatataacatcaaggaggatttcttgatattctag

SEQ ID NO: 274 - DNA, 1473 bp, Arabidopsis thaliana
atgtcggttttcctctgtttcctcgtcctcttacccctgatcttaatcttcttgaacgttttgaaaccttcgaaatataagcttcctccgggtccaaagaagcttcccatcatcggaaacttacaccaacgcaggacactacatccgaggaatcgccgtaatctcgccgaaatgtatggaccagtggcgcttctccaatacggattcgtccccgtggtcgcgatctcttcgaaagaagcagcagaggaagtgctaaagatcaacgatcttgagtgttgtagtcgaccagaggcggccggaatgagagcaactttttacaacttcaaagacatcgggatggcacccttcggtgacgagtggagtctgatgcggaagctctcggtggtcgagctcttcagcgtgaaaaagcttcaatctttcaagtatatcatagaggaagagaataacttgtgtgtcaagaaactctctgagtttgctacgagacaatctccggtgaatcttgagagagccattttcactttagtcggaaatatagtgtgtcgtatcgggtacgggataaatctctatgagtgtgatttctttgaagctgatagagtcgtggatcttgtgctaaaggctgaagcggtcataagagaaactgtgttctctgatttctttcccggaagaatcggtaggttcatcgactgtatctccggtcagaacaggagattgaagaataatttctcggtagtagacactttctttcagaatgttcttaacgagcatcttaagcctggaagagagagctctactattgttgacttgatgatcgatatgaagaagaagcaagagaacgatggagatgctctcaagttcaccactgatcatctcaaaggaatgatctcggacatatttgtagcagggattggtggagtcgctggcataacactatggggaatgaccgagctgatcagaaacccaagagtgatgaagaaagtgcaagacgagattcggacaacacttggggacaagaaggagagaatcaaagaagaagatctaaaccaacttcactactttaagctcgtggtcaaggagacattaaggttacatccaacaactccactcttgctcccaagacagacaatgtctcatatcaagattcaaggctacgatgttcctgcgaaaacacagatcttagtcaacgtttatgcgatgggtcgtgatccaaaactctgggaaaacgcagatgagtttaaccctgacaggtttctcgacagttccgttgattttaaaggaaaaaactacgagtttataccgtttggatctggtaggagaatatgtccagggatgacaatgggtaccatacttgttgagatggcattgttgaatttgctttacttcttcgattggggattggcgaagcaggaggaagccaaagagatcatcaatggggaagaaaattttctagccttctttcaagttcttcaccactga

SEQ ID NO: 275 - DNA, 1626 bp, Arabidopsis thaliana
atggacgattgtcgattcgagacgagtgagttgcaagcttcggtaatgatatcgactcctttatttaccgattcttggagttcatgcaacaccgcaaattgcaacgggagtataaagatccatgacatcgccgggattacatacgttgctataccggcggtatcgatgattcagttggggaatcttgtgggcttgccagtcaccggagatgttcttttccccggcttatcctccgatgaacctctacctatggtcgacgctgccatactcaaactctttcttcagttaaagatcaaggaaggattggaattggaattgttaggtaaaaagctggtggtgataaccggccattcaaccggcggcgcattggccgctttcaccgcactttggcttctatctcaatcttctccgccgtcattccgcgtcttttgtatcacctttggctctcctctgctcggaaaccaatctctctccacctcaatttcacgatcacgtttagcacacaacttctgccacgtggtctccatccacgacctcgttcctagaagcagcaatgaacaattctggccctttggaacttacttgttctgttccgacaaaggaggtgtctgtctagacaacgctggttctgttcgtctgatgtttaatatcctcaacaccacagcaactcaaaacaccgaggaacatcagaggtacggacactatgtgttcacactttcacacatgtttcttaaatctagaagctttcttggtgggagtatccccgacaatagctaccaagctggtgttgcgttagccgttgaagctctaggtttctctaacgatgacacaagtggcgttttagtcaaagaatgtatagaaacagctacaagaattgttcgggctcctattctgaggtcagctgagttagccaatgagcttgctagtgtcttgccagcaagactcgagattcaatggtacaaagatcgttgcgatgcatcagaagagcagctaggttactacgatttcttcaaacgatattcgttgaagagagactttaaagtgaacatgagtcgcataagactagctaagttttgggacacagtgattaaaatggtggagacgaatgagttaccttttgattttcatttaggaaagaaatggatttacgcatctcaattttatcaactcttagccgagccactcgacattgcgaatttctacaaaaacagagatataaagactggcgggcattacttggaggggaatagacctaaaaggtatgaggtgattgataaatggcagaaaggagttaaagtgcctgaggagtgtgtgagaagcagatacgcgagcacaacgcaagatacttgcttttgggctaagcttgagcaagcaaaagagtggttggatgaggcgagaaaagagagtagtgatccccagaggagatctttgttacgggaaaagattgttccattcgagagttatgcgaatacattggtgacgaagaaggaggtttctttggatgttaaagcgaagaactcgagttatagtgtgtgggaggcgaatctgaaagagttcaagtgcaaaatgggttatgaaaatgaaattgagatggttgttgatgagagtgacgcaatggagacttag

SEQ ID NO: 276-278 - skipped (3 entries)

SEQ ID NO: 279 - DNA, 2154 bp, Arabidopsis thaliana
atggatcaaatcgaagcaatgttgtgcggcggaggagagaagacaaaagtggcggttactacgaagactttggcagatccattgaattggggtttagcagcggatcaaatgaaaggaagtcatttagatgaagtgaagaagatggtcgaagagtatcgtagaccagtcgtgaatcttggcggagaaacactgacgatcggacaagttgctgccatctccaccgtaggaggcagcgttaaggttgagttagcggagacttcaagagccggtgtgaaagctagcagtgattgggttatggagagcatgaacaaaggtactgacagttacggagtcaccaccggctttggtgctacttctcaccggagaaccaaaaacggcaccgcattacaaacagaactcattagatttttgaacgccggaatattcggaaacacgaaggagacatgtcacacactgccgcaatccgccacaagagccgccatgctcgtcagagtcaacactcttctccaaggatactccgggatccgattcgagatcctcgaagcgattacaagtctcctcaaccacaacatctctccgtcactacctctccgtggaaccattaccgcctccggcgatctcgttcctctctcttacatcgccggacttctcaccggccgtcctaattccaaagccaccggtcccgacggtgaatcgctaaccgcgaaagaagcttttgagaaagccggaatcagtactggattcttcgatttacaacctaaggaaggtttagctctcgttaatggcacggcggttggatctggaatggcgtcgatggttctattcgaagcgaatgtccaagcggtgttagcggaggttttatcagcgatcttcgcggaggttatgagcgggaaacctgagtttaccgatcatctgactcatcgtttaaaacatcatcccggacaaatcgaagcggcggcgataatggagcacatactcgacggaagctcatacatgaaattagctcaaaaggttcacgagatggatccattgcagaaaccaaaacaagatcgttacgctcttcgtacatctcctcaatggctaggtcctcaaattgaagtaatccgtcaagctacgaaatcgatagagcgtgaaatcaactccgttaacgataatccgttgatcgatgtttcgaggaacaaggcgattcacggtggtaacttccaaggaacaccaatcggagtttctatggataacacgagattggcgattgctgcgattgggaagctaatgtttgctcaattctctgagcttgttaatgatttctacaacaatggacttccttcgaatctaactgcttcgagtaatccaagtttggattatggattcaaaggagcagagattgctatggcttcttattgttctgagcttcaatacttggctaatccagtcacaagccatgttcaatcagctgagcaacataatcaagatgtgaactctcttggtttgatctcgtctcgtaaaacatctgaagctgtggatattcttaagctaatgtcaacaacgttccttgtggggatatgtcaagctgttgatttgagacatttggaggagaatctgagacaaactgtgaagaacacagtttctcaagttgctaagaaagtgttaaccactggaatcaacggtgagttacatccgtcaaggttttgcgagaaggacttgcttaaggttgttgatcgtgagcaagtgttcacgtatgtggatgatccttgtagcgctacgtacccgttgatgcagagactaagacaagttattgttgatcacgctttgtccaacggtgagactgagaagaatgcagtgacttcgatctttcaaaagattggagcttttgaagaggagcttaaggctgtgcttccaaaggaagttgaagcggctagagcggcttatgggaatggaactgcgccgattcctaaccggattaaggaatgtaggtcgtatccgttgtataggttcgtgagggaagagcttggaacgaagttgttgactggagaaaaggttgtgtctccgggagaggagtttgataaggtcttcactgctatgtgtgaaggtaaacttattgatccgttgatggattgtctcaaggaatggaacggagctccgattccgatttgctaa

SEQ ID NO: 280 - DNA, 710 bp, Arabidopsis thaliana
atgagctccaacgacagagatcatcgcaggttcaactctgaccaccactcattctggcctaatccgtctacttacgatcttaacagcaagatcatgcttgccgcagtggcttctttatctggagttatcctcatcgtcttcgctcttcatctttacgcaagattcgttctccgacgccgtagagaagctttccgtggcctccccgtcattttccgccacccttttgagatgcctaagcgtggcctcaatcccacagtcatcgcttctctccctactttcactgttggagccactgatggcgtggctgcctccgctactgaatgcgcagtgtgtctaagcgtgttaaaggagcaagacaaggcgagagagttgcccaactgcaagcacatcttccacgtcgactgtgttgacacgtggctcaccacttgctccacttgtcctgtttgtcggactgaagttgagccaagaccgagacttgagcctgagccaagggaaggaccagtcggtactgcaccgcagttgttggtggaaaccaggctgaacttgactgtagaagccgcatcctcttcttcctcagataacaaaacagttgtatccccggcttcgcgattaaattcgtttaggaaaatcttgacgagggaaagatcttcgaacaggatcaaccattcttgtcctgaccaagatcgtgtggcagatcttgagagacattg

SEQ ID NO: 281 - DNA, 999 bp, Arabidopsis thaliana
atggaggtccatggctccggattccgtcgaattctgttgttggcgttgtgtatctccgggatctggtccgcctacatctaccaaggcgttcttcaagagactctgtccacgaagagatttggtccagatgagaagaggttcgagcatcttgcattcttgaacttagctcaaagtgtagtctgcttgatctggtcttatataatgatcaagctctggtcaaatgctggtaacggtggagcaccatggtggacgtattggagtgcaggcattactaatacaattggtcctgccatgggaattgaagccttgaagtatatcagttatccagctcaggttttggcaaaatcgtcaaaaatgattccagttatgctaatgggaactttagtttacggaataagatacactttccctgaatacatgtgcacctttcttgtcgctggaggagtatccatctttgctcttcttaagacaagctctaagacaattagcaagctagcacatccaaatgctcccctcggttacgcactttgttccttaaacctcgcctttgacggattcacaaatgccacacaagactccattgcctcaaggtacccgaaaaccgaagcgtgggacataatgctgggaatgaacttatggggcacaatatacaacatgatctacatgtttggcttgccacaagggataggattcaaagcaattcagttctgtaagctacacccggaagcggcatgggacattctaaagtattgtatatgcggtgccgtgggacaaaacttcatcttcatgacaataagtaacttcgggtcactagctaacacgaccataaccacgaccaggaagtttgttagcattgttgtatcatcagtaatgagcggaaatccattgtcgttgaagcaatggggatgtgtttcgatggtctttggtggtttggcatatcaaatttatcttaaatggaagaaattgcagagagtggagaagaagaagcaaaagagttga

SEQ ID NO: 282 - DNA, 740 bp, Arabidopsis thaliana
atggcaacaaaggcagttcttctcccgtggcttatcccatcgccgagacacgtatcgctgttcccagtggttcaattgccggcgttggagaccgccgggtggtgtgtaagaaagaggagggcagaagacgtagcagtctccgtcgccttcaatccttctggcaatttcgacatctctgccttcgagaatgaccaagattcagataaagtggaacctccgatgcctccaacgaccggccggtacgaagtagtgatcgacaacgactcaattgggcggcttgacctatccccgtttcagagagccatcggcataacctcgcctgatgattttggtgtagctgaaccaaaacggtatttggatcgaaccatcggattcaccatcaattacaagagagaagaccccggggatccgcgggagctgtcagagtacccggacgtaagactatggttcgtgaggctcgacgcgatgtacccttggctgcctctgctgctggactggcgagctggagaacttgctcgatacgcagccatgttagtgccgcaccagatgagcttgagaatgggtgtcgttttcaatccggaggcgttggagcttttcgtaatgaacaaagtgtttgtggtttatccgtggctgaaacggcacggcgtcccaaagcccaggttgaagacgagcgacatggccaggatgctcggattcggtatcggcgatgagctcttcgacttgatcgatcacaatgaatg

SEQ ID NO: 283 - DNA, 1164 bp, Arabidopsis thaliana
atgattagtttgagattgtttgagtcctttagtcaagcaaaagaagctgtgaaggtgctcaagaagcggttaggaagtaaaaactctaaagtccagattcttgcactttatccggaactgaatgtgagggaaaagatactaactttgttagacacatggcaagaagcctttggtggacgtggaggtcgatacccacaatactacaatgcctataacgatctcaggtctgctggaattgagtttccgcctcgaacggaaagcagtctatcgttctttactccaccgcagactcagccagatgaagatgctgctattcaggcttcgttgcaaggagatgatgcttctagcctcagcctggaagagattcaaagcgctgagggatcagttgatgttttgatggacatgcttggagcacatgatcccgggaatcccgagagtttaaaagaagaagttatagtagacttggttgagcaatgtcgtacttatcaaagacgtgtaatgactcttgtgaacactacaacagatgaggaacttctgtgtcagggattggcattaaacgataatttgcagcatgttcttcagcgtcacgatgatatcgcaaatgtcggctctgttccttcaaatggaaggaatactagagctcctcctccagttcagattgttgacatcaatcatgatgatgaagatgacgaatcagatgatgagtttgctcggcttgctcacaggtcttcaacacctacaaggagaccagtacatggtagtgattcgggtatggtggatatccttagtggggacgtctataaacctcaaggcaactcctcctcacagggagtaaagaagcctcctcctcctcctccgcatacttcttcttcctcttcttctcctgttttcgatgatgcaagtccacaacaaagcaaatcctctgaggtaattaggaatcttccacctccgccttcaaggcacaaccagaggcaacagttctttgagcatcaccactcgagtagcggctcagattcctcttacgagggacagacccggaacctttctttgacaagtagtgaaccgcagaaagaagagaaaccagaggatttgcttttcaaagacctggttgagttcgccaaaaccaggtcctccaaagccaacaataataataggtcgctctga

SEQ ID NO: 284 - DNA, 603 bp, Arabidopsis thaliana
atggcgccggtcaacctccgtacgaatctctccgtgcgcaggaccgtacggtgtatggcgaacccgaggagagttaagatggtggctaagcagataatgagagaactctccgacatgcttctaacagacacggttttacaacacgctgtcttacctgaagctgcacttggagctgaccgctacctctcttctctcaccaccattagcgatgttgaagtctctaatgatttgcaggtgatgagaaaccctaattggaaactcttgtgtaatgtggttaaagtatatgtatccgtgtttggagatgatagagggaaagacgttgcaattgcggggttgaaatcgaaagctaagtacgttaggagtgagcttgggaagcgaatgaagttgagattgacgcctgaggtcaggtttattgaggatgaagccatggaaagaggaagcaggaaactgaattggagactgtttcaggtaattgcaatactggacaaaataaaagctgagaaaggaagcggtgaagggaaaacagaaccatctgactcaacagaagatgatcaagattgggaagtggatgaccccgacgaagacataatctatgtaaagtaa

SEQ ID NO: 285 - DNA, 975 bp, Arabidopsis thaliana
atggaaggaagagatatgttaagttgggagcaaaagacattgctaagcgagcttatcaatggatttgatgcggccaaaaagcttcaggcacgacttagagaagctccgtcgccgtcgtcatcattttcatcaccggcgacggctgttgctgagactaacgagattctggtgaagcagatagtttcttcctacgagagatctcttcttctgctaaactggtcatcctcaccgagcgtacaacttattccgacgccggttactgtagtcccggtggcaaatcccggcagtgttccagaatctccggcatcgataaacggaagtccgagaagtgaagagtttgccgatggaggaggttctagcgagagtcatcatcgccaagattacattttcaattcaaagaaaagaaagatgttaccaaagtggtcagaaaaagtgagaataagcccagagagaggcttagaaggacctcaagatgatgtctttagctggagaaaatatggtcaaaaagacattttaggcgccaaattcccaaggagttattacagatgcacacatcgtagcacacaaaactgttgggcaacgaaacaagtccagagatcagacggggatgctacggttttcgaagtgacgtacagaggaacacacacttgttcgcaggcgatcacaagaacaccaccattagcctcgccggagaagcgacaagacaccagagtcaaaccagccattacccaaaagccaaaggatattctcgagagtcttaaatccaacttaaccgttcgaaccgatgggcttgatgatggtaaagacgttttctcgttccctgatacgccgccgttttacaattacggaactatcaacggcgagttcggccacgtggagagttctccgatcttcgacgttgttgactggttcaatccaacggtcgagattgacacaactttccccgcgtttttacacgagtcgatttattattaa

SEQ ID NO: 286 - DNA, 489 bp, Arabidopsis thaliana
atgaggaagatcatagggtttagaatcgggagacgagtctcaagatggatctttcgcaaaacccggatccaacgttcaggatacaaccggatacactcgacccagcaagcttgcatgctgatgagaccattagccaaactcaaaagttggggccaacgtctcaagcaaagtttcagacgcaggtctacgagaagatccgcatacatacccgttgatcataagaaagccgacccggttccaaggggacacttagctatctacgtgggtcaaaaagacggcgactgtcatagagttttggtacccatcgtttactttaaccatcctttgttcggtgagctgcttcgagaagccgaaaaagagtacggattttgccacgaaggaggtatcactattccttgtctgtattcagatttcgaacgggtcaagacccggatcgcatcggggtcaagttctcgggtatttccatggggccgtcattgccgcaattga

SEQ ID NO: 287 - DNA, 708 bp, Arabidopsis thaliana
atggctgctgacgtcagctctctcgtacggttactaagcggttacaaagatgatcgagcggtggttaaagattctgccggagccaaatcctcggcggcgctgatgactcgtgaccttcttggaaacggcagaggaggaggaggcgatcggtctttagagcttgacctcgaccttcaagtccccaccggttatgaaaaacgcctcgacttgaagtcagggaaagtgtatttgcaacgatgcaattcaacgagctcgtcgtcaataacaaacgcagaccaaaccaatcaaacagtaccaacgtttcaggatttgaattttcctcctccgactttgaacaattctcctttgttgaacctcttcgacgatacaacgccggaactgaagctacttccgtcgtctcgttcttctcgtccgaacactagtaatttacagagtgtatgcacactggacaaggtgaaatcagctctagagagggcagagagagatcctgctatgttcaagaaacgtcaatcaccggatgatacggtttacgatcattataggacggaggctgtagcgtcaccggtggttgccggatgtcctggttgtttatcgtacgtgttggtgatgatgaataacccgaaatgtccgaggtgtgataccattgttcctttgcctacaaatcctatgaagaagaagcctaagattgatctcaacatatcaatctga

SEQ ID NO: 288 - DNA, 1359 bp, Arabidopsis thaliana
atgtgtagctacggcggtcatatccttcctcgccctcacgataagtctctctgctacatgggcggtgacactcgcatcgttgtcgtcgaccgtaactcctctctcccttctctcatcgctcgtctctccaacacgcttctcgacggtcgttccttcaccctcaagtaccagttacctagcgaagaccttgactctctcatctccgtcactaccgacgaagatctcgacaacatgatcgaagagtatgaccgtaccatttccgcttccaattccaccaaaccttcgcgtctccggttgtttctattcacctccaagcctgaggctactcaatctatgggtcagatccttgagagctctgccaagagcgacgattggttcctcaacgcactcaatagcgccggtcttctcaatcgaggattctcagattctgatactaacgtcaatcgtttacttgcaacagcaacctccaccgccgcagcagcaagaacaacagcaaggaggccaagatgtgaactgcttaccggattctccgatgttagatacatcctcttctttcggctccacttcttcgtctccctcgctcgccaatttgcctccgatccgtgtccatatccaagcacacttttgtcacagcatcagaatcaggacccagcctatatccttcacccccagtttgagcaacaatctgcacaatctcagccacagcagcagttcatacacactgctgctcctcctcaatacattcatcaccatccgtctagcggccttcctgtcccgacttacatccaggtttacccttcgcaacagcctcaacagtccttccatcaacacgcaggtcgactggatcagcagccttatcctgtttattatgtcactgctcctgtcccacctaggccctacagtatgcctgtgccacaatctccaagtgtgagcgatgctgcagggtctatcccctctaaccatcccaactctaccatgatgcctccacctcctaacaaccacatgagaagtgttagcagtggcaaacctgagatgggacaggctggggtttacacaacagccccaggtgtgggcggtgctcagatggttcaccagattcccacaaaccagcagcaattcatggggtattcgcagatccgtcaccctcctcagtctggttcagctgggaatccaaactatggatatgaatatgtcgacaatgctcatacacagatatactacactcaacctatgggacatgcacagtaccagacaatgactgggcctccacctgccatggtgatgcctgatggttctgctgctgctaagcttccagctgagaacatgactcaacagatccggagttcacagccattgtga

SEQ ID NO: 289 - DNA, 2409 bp, Arabidopsis thaliana
atgccggaaatcgatcttatgagagtcgatcattgtgtttccgatgttaaattagatgattcttcttcttctcctccgggattcttcgatggtggtggtgttccgttagattcggatgtgaagttagacgaagaagattccgattctttgaagaagagaggtagacgtggtcgtccgccgagaattttagctaaagcttcttcgcctccgatttcgaggaagagaagagaagatgaagatgtttgctttgtttgcttcgatggtggtagtcttgttctctgcgatcgtaggggatgtccaaaggcttatcacccagcttgtgttaagcgtactgaagcattcttcagatcgagatctaaatggaattgtgtttgtaagaggtgtgttagaagctcagagtatgtagttgtaagggagaacaaaggattctgtggaatttgtatgaagactataatgcttattgagaatgcagctgaagctaacaaagaaaaggttcaggttgattttgatgatcaaggcagctgggagtatctttttaagatttactgggtttctcttaaagaaaagctaggtttatcgttagatgatcttaccaaagcaaaaaatccatggaaatcttcttcttctactgccgctaagcgaagaactactagtcgggttcatgaaaaggatgatggaaattctcctggggttatgaaaatacgtcgtgctaaagtaaggaaaatggatgctgtttctgtgagtaatttgggtccttctttggattcaaactgttctttgggtgacagacttccacaattgactagtgctgctacttgggcaaccaatgagcttttggactttgtggggtatatgaaaaacggtgatatttctgtcttatcaaagtatgatgtccaaactctcgtgctagagtatgtgagacggaataatctacaaaactctcctcagaattctgaaataatgtgtgactccaagcttatgagattgtttggaaaggagcgagtggacaacttggaaatgttaaagcttcttgattctcacttcatcgatcaagttaggtctccagtcacagataattcagccggaggagtcactgaaactatgtcttaccaggttaatgcgggcagaagctgtgataggttaaatacatctgaacagcatcaagaaggggaatcacagcaattgaacgggcacagtattcaagttagaccttccagttctgatagcagaaaccatgcagttgtaaaacctgacacaagtgccactctgtccaataagccaattgatggtttggatacaaatatggtatggttatatggagatccagatgggaagattcatggaccattttcgttatataacctgcgacaatggaattcaagcgggcatttcccaccagagctgagaatatggaggttgggtgaacagcaacacagctccatacttttgactgacgcattaaatgggcagttccataaaacagggttattacagaatcattctatccccaagcaggaagtgacagctactatagctaacgatcaaaacaggtctgtggctgttcctaaaatagagagtagaatacttgacttcagccccaactcagtgtgcactgaccagagtgttatttctagcagtaacagtgtcatcacaaggagctcggatgtgagtaacaaaagcggaaacaattgtagccacgccgtgccattggatttttctctttctaatgaaagggatactgtgggttttatctctctctgggacaaaagaaaagttgaaagttctttgcttgtacaaagcccaataagctgttcactctcgctggctacattacctagaaactcaaactgctctctgccaccacatgaaagatggagtgctggtcagacagatggaaacagtgcagcaacgactgcttgcaatcaaaacggtagtcttagcggctcagctgagaaacaagtcacggctacagtccagtcatgtggacagaactggaatgctgcaactccaagcagtgcttcaaatgtgtgggattcgaactcgggtttgacgtctttcccagacaatcaagaaatagactttttagatctctttagtccaactttcaaattcaactttgcatctactaccactgattggcaacccattgtggctggacctgacgaatgcgacgaatcagtctcagatcttttggcagaagtggaagccatggagtcccaaaaacgtcttccttctccaacttcgacattccgtggtcctgaagaattattaatccggcactcaataaacgatagcttcagtcccgcagaaggacatagcccagcactagatgtaagcaaaggtgactccatgagctccacaaacgatcttcaaatgcattcacgatctaacagcaccgtgcatttttag

SEQ ID NO: 290 - DNA, 747 bp, Arabidopsis thaliana
atggatgaatatgtagaggatgaacacgaattcagctacgaatggaaccaagagaacgggccagcgaaatggggaaagctaagaccggaatggaaaatgtgcggaaaaggagaaatgcaatcgcctattgatcttatgaacaaaagagttagacttgttactcatcttaaaaagcttactagacactacaaaccttgtaacgccactctcaaaaatagaggccatgatatgatgctgaaatttggagaagaagggtcagggagtattacggtcaatggaactgagtataaactcttacagcttcattggcattctccctctgaacatactatgaatggaagaaggtttgctctcgagctacacatggttcacgaaaacattaacggaagtttggctgtagtcacagtcctctacaaaatcggaaggccagattcttttctcggattgctggaaaataaattgtcggcaattacagatcaaaatgaggcggagaaatatgtagatgtgattgacccaagggatattaagattgggagcagaaaattttatagatacattggatcacttactactcctccttgtacgcaaaatgttatttggaccgtcgttaaaaaggtaaggactgtgacgaaaaaccaagtgaagctactcagagtggcggttcacgataattcagacacaaatgcgagaccagttcaacctacaaataagcgcgtggtaaagttatacaaaccaaaatcactatga

SEQ ID NO: 291 - DNA, 540 bp, Arabidopsis thaliana
atgtcttctgagaatgatttcgttgagttttcttctatgttcgagagaattatacaaggaagaggtgatggtctctctcgatttttgccggtgattgtagctttagccgccagagaagacgatgatgaccaaggatctaccgatcaaacaacgagacggggagatccgttgagtccaaggttcgtgatgatcggatcgcgatcgggactcgacgatttctttagcgacggtggaaaacaagggaggtcgccggcgttgaagtcagaagtggagaatatgccacgtgtcgtgatcggagaagataaggagaaatatggtggttcttgcgcgatttgtttggatgagtggtctaaaggtgacgtggcggcggagatgccttgtaaacataagtttcactcaaagtgtgtggaggagtggttagggaggcacgccacgtgtcctatgtgtaggtatgagatgcctgttgaagaagttgaagaagagaagaagattgggatttggattggtttctccattaacgccggcgacagaagaaactaa

SEQ ID NO: 292 - DNA, 1782 bp, Arabidopsis thaliana
atggcttcaaagattattgctggcaagccggatgataccgagtatgaaatcattgaaggtgagtctgagagcgctttagcagcggggacaagcccttggatgaattcatcaacgttgaagcttcgacatcgaattggaagaggtcccttcggtgatgtttggctggctactcatcatcagtcaactgaggactatgatgagcatcatgaagtggccatcaaaatgctttatcccatcaaggaagatcaaagaagggttgtggtagataagggagtctctagtatcaatggaaagatatgtgtcgtcatgaaattctacgagggctctcttggtgacaagatggctcggcttaaaggaggaaagctttcactgccagatgttttgagatacggggttgatctggctacagggatcctggagttgcactcaaaagggtttctcattctcaatctcaagccctctaactttcttctcagtgataacgacaaggccatcctcggggatgttgggatcccttatctccttcttagtatccctttaccaagttctgatatgacagagagacttggaactccaaactatatggcaccagaacagtggcaaccggatgtcagaggtcccatgtcctttgagactgattcttggggatttggttgcagcattgttgaaatgctgactggtgtacaaccttggtctgggagatctgccgatgaaatatatgatttggtggtgagaaagcaagaaaagcttagtatccccagtagcataccgcctcctctcgagaacctacttcggggttgctttatgtatgatcttcgaagccgaccttcgatgactgacatcttactcgtcttaaagagcttgcagaactcggaggaggaacaggtcaggagaggcattgatagtagagaaatcaggaagagctcggctactcttggttatacagaatggtttctttcaaaggatcatctgcaagtgcgcgacaccgtgcgttcaagaaagcctgccaattcgtgtaagcatgagaacatggatgtgccagaaggaatggtggttggtttagaacgtgactccacagacccagatggatttgtgctagttaaagtccatggtgtacatgatccattaagggttcacgtatctgttcttgaacgggtaactaacggcttagcttctggagattgggtgcgtctgaaggtcaggaaagacaagaggcactctccggttggtgttctccattcaattgaccgtgagggaaatgtagctgttggatttattgggttgccaactctctggaaagggacatcatcgcagcttcagatggctaaagtatacagtgtgggtcaatttgtgaaactcaaagccaatgttgtcatcccgagattcaaatggatgcgtaaaggtagaggtatttgggcaactggcaggatctctcaggttctaccaaacggttgccttgaagtggacttccctggaatgttaccttttggagaggaacatggaagctatcttgcagatccggctgaagtagagattgtgaatttcaatacatgtcaaggagctgtggaaaaatatcaacatctggaggattttcattgggctgtgagacctttgcttattgctatgggtctattgacagcgatgaagttagggatctgtgtcaggaagaaaataggaaggtcaaaggatgggaaacaacgcgatggctcgactggacaaggtgactgtaagattccggatggtaagggctctgacaaatctaaatggcttgtgttcttttag

SEQ ID NO: 293 - skipped

SEQ ID NO: 294 - DNA, 276 bp, Arabidopsis thaliana
atggaaaaggtccatctttactggaatttgcggtataattgctggttccttgtatcggttgaacatctttggtattcgcaaggcaaagttcccggagttcatggcttcgttattctcccggttttccttaccctccttgagcagccattctcaaccaccaagaaggacatcacccaacttaggtcgccaagcagtgagagcttatcgagctccaatgccgtcaactacagagccatcagaggaagccatagctactttggtatctatgggatttga

SEQ ID NO: 295 - DNA, 1452 bp, Arabidopsis thaliana
atggtcattaccgctaacgatttatcaaaatgggaaaattttcctaaaggacttaaggttcttcttctcctcaacggctgtgacagcgacggagatggctcctcagccgccgagactcgatcagagctcgaatcaatggactatatcgttactacattcaccgatgaaactgaagcactctctgcggttgtcaagaacccggagagcttccacattgccatcgtcgaggtgaatatgagcgctgagagtgagagtttcaagtttcttgaggctgccaaagacgttcttcctactataatgatttcaaccgatcattgcatcactactacaatgaaatgcatagcgcttggtgcagttgagttcctacaaaaaccgctctcaccggagaaattaaagaacatttggcagcatgttgttcataaggcattcaatgatggtggaagtaatgtttcgatatcacttaagccagtgaaagaatccgttgtctcgatgcttcatcttgagaccgacatgacaatcgaggagaaagatccagcgccatcaacaccgcaattgaaacaagattcacggttactagacggtgattgccaagagaacataaatttctcgatggaaaatgtaaattcctcgaccgagaaagataacatggaagatcatcaagacatcggtgaatctaaatcagtcgacactacaaaccgcaaattagatgacgacaaagtggttgtcaaagaagagagaggagacagtgaaaaagaagaagaaggtgaaaccggagatctcataagcgagaagacagattcagttgatattcataagaaagaagatgagactaaaccgattaataaatcatccgggatcaagaacgtgtctggtaacaaaactagtcgaaagaaggtggattggacaccagagctgcacaagaagtttgtgcaagcagttgagcaactcggcgttgatcaagcgataccctcgcggattcttgagttgatgaaagtaggcaccttaacaagacacaatgtagctagtcaccttcagcataggaagaatattcttccaaaggatgatcataaccatagatggatacaatctagagagaaccatagaccaaatcaacgtaattataacgtttttcaacagcaacaccgtcccgtgatggcttatcccgtttggggtcttcccggtgtttatccgccaggagcgattccacctttgtggccaccgccgctgcagtccattggtcaaccacctccgtggcattggaaaccaccttatccaacggtgagcggtaatgcatggggttgtccggttggaccgcctgtgaccggatcatatattactccttcgaatactaccgccggcggatttcaatatcccaacggagctgaaaccggcttcaaaataatgccggcgagtcagccggttagtgtcaacaattctctattttctttttaa

SEQ ID NO: 296 - DNA, 465 bp, Arabidopsis thaliana
atgtcgctagacgcgaatacttgttctatcgtcttctttctattcttcactgtctctttcgccgtctccggccaaaagccaaccgcttacgacgccgtcaaactctataacttaccaccaggaatcctcccaaaaggagtggttgactatgagcttaacccaaaaacaggcaacttcaaagtctacttcaatgacacgtgtgaattcaccatccaatcctaccagctcaagtacaaatcaactatctccggcgttatatcacccggtcatgtcaagaatctgaaaggagttagtgttaaggttcttttcttctgggttaatattgctgaagtgtctcttgacggcgccgatctcgacttctccgtcggaatcgcgtcggcgagttttccggctgctaattttgaagagagtcctcagtgtggttgtgggtttgattgtaataatgggcttttattttcttcttga

SEQ ID NO: 297 - DNA, 393 bp, Arabidopsis thaliana
atggggaggctgtttgtggtgaatcttgaagggaagatctatagctgcaaacactgtaagactcatcttgctacttatgaagacatcatctccaagtcttttcactgcaagcatgggaaagcttatctcttcaataaggttgccaatgtttccattggagagactgaagaaagactgatgatgactggtaaacatactgtggctgatattttctgtgtctcgtgtggatcaatcgttggctggaaatacgagactgctcatgagaagaaccagaagtacaaagaaggaaaatcagtgcttgaaagatttaagatatcgggtcctgatgggagcaactattgggtgagtagccatggaaggcatataggtggaagtgatgcagatgatgcttga

SEQ ID NO: 298 - DNA, 1266 bp, Arabidopsis thaliana
atgtcgaacccaaacgaaccagccagggctcttctgccttacctgcaacgtgccgatgagctgcagaagcatgaaccacttgttgcttattactgtcggctatatgcaatggaacgaggattgaagattccgcagagcgagagaactaagaccaccaattcgattctcatgtctctcattaatcaactcgaaaaggataaaaaatcattgactctgtccccagatgacaatatgcatgtggaggggtttgcacttagtgtctttgctaaggcagacaagcaggatcgtgcaggaagagcagacttgggcactgccaaaactttttatgctgcgagcatcttctttgaaattctgagccagtttggtcccgtacctcctgatatagagcagaaacacaagtatgctgcttggaaggctgctgacataaggaaagccattaaagaaggaaggaagcccactccaggtgatcctgtggatgatgatactgatttatccatcccatcaagcggtcctagtggctcctatgatcacagtgcaagtgataccaacacaacaagtcatcatagaacagagcttgatccaccccatgactcgaatgatgactccagccaccatcaattccctgaagtgccacaacaccctctacctcccaggttttatgacaatccgaccaacgattatcccgcagatgtcccacctccaccaccgtcttcttacccttccaacgatcatcttccccctcccacaggaccatcagactccccttacccgcatccttacagtcatcaaccataccaccaagacccgccaaaacacatgccgccaccgcaaaactactcatctcatgagccttctccaaattctctccctaatttccaatcttatcctagctttagtgagagcagcctcccatccacttctccccactacccttctcactaccaaaacccagaaccttactattcttctccgcactctgcacctgctccttcttccacaagcttctcctctgctcctcctcctccaccttactcatcaaacgggcgtatcaatattgctcccgtgctagatcctgcaccgagttcagctcagaagtaccattacgatagcagctaccagccagggcctgagaaggttgcagaggcactcaaggctgctagattcgctgtgggagctttggcttttgatgaagtctcgactgctgtagaacatctcaagaagtcacttgagttgctaacaaatccatcggccggtgccggtcactga

SEQ ID NO: 299 - DNA, 828 bp, Arabidopsis thaliana
atgacgacgccgtgccggaccattaacgctaatgctatcgccgcaccgtcgccttcgggattgatctttaacgggtttcgtgatttcgtcccgattgaaaagaggcttgttatatcaagctttcgtggcttgaaactaccgtcgaggacgacgaagactattacgagctctgactggagttggagttataggtctccgggaagattggcgtctgcgtctacgtctacgtctgcgtctacgtctacgtctgcggctgtaacatcgaattctacgaatagatttgaagctttagaagaggggattgagaaggtcatttatagttgtcgatttatgacgtttcttggaacattaggatctttgctcggatcggttctctgtttcatcaaggtaaagccactacagattatctcattgctctttcttggatgtatgtatgttgtagactcgtttttgcagtattcggtgaatcgtgggaaagtgatattccttttggttgaggccatagtctttggattgggactttacgagttgttcatcagcaatctcgatacttcagagtcgcgcacacacgatattgtttccaataggtcgagcctctttggcatgttcaccttaaaggagcgacctcaatggttagaggtgaaatcggtaagcgagctgaaaacaaagttgggacatgtaatagtgatgctactattgattggtttgtttgacaagagcaagagagtagtcataacttctgtcacggatttgctatgtatctctgtttctatctttttttcttctgcttgtctcttcttgctctctaggctcaatggttcacactga

SEQ ID NO: 300 - DNA, 1143 bp, Arabidopsis thaliana
atggaaacacaaggcaaagtaatcacttgcaaagctgctgtggcatggggagctggagagcctctagtaatggaagatgtaaaagtggatcctcctcaaagattggaagtgagaattcgaatcctcttcacttccatctgtcacactgatctcagcgcatggaaaggcgagaacgaggctcagcgagcataccctcgaatccttggccatgaggcagcagggatagtggagagcgtaggggaaggtgtggaagagatgatggcaggagatcatgtgctccctattttcacaggagagtgtggagactgcagagtgtgcaagcgagacggagccaatctgtgcgagagattccgagtggatccgatgaagaaggtgatggtaaccgatggaaagaccagattcttcaccagcaaagacaacaaaccaatctaccattttctcaacacatccaccttctccgagtacacggtcatagactcggcctgcgtgctcaaggtggaccctctgtttcctctggagaagataagcctcctcagctgcggtgtctccactggagtcggtgcggcgtggaatgtggctgatattcaacctgcctccaccgtcgctatttttggacttggcgctgttggacttgccgtggctgaaggtgcaagagccagaggagcctctaaaatcattgggatcgacatcaaccctgacaagttccaactaggcagagaagcagggattagtgaattcataaatccaaaggagagtgacaaggcagttcatgagagagtaatggagataacagagggaggagtggagtacagcttcgagtgtgcaggaagtatagaagcacttagagaagcctttctgtctacaaactcaggagtgggagtgactgtcatgctgggcgttcacgcaagcccacagcttctccctatccatcccatggagctcttccaaggcagatccatcaccgcctctgttttcggaggcttcaaacccaaaacccaattaccctttttcatcacccagtgcctccaaggtcttctcaatctcgatctcttcatctctcaccagcttcccttccacgatatcaacgaagccatgcagctgcttcaccaaggcaaagctcttcgttgccttctccacctctaa

SEQ ID NO: 301 - DNA, 3612 bp, Arabidopsis thaliana
atgacaaagtgtcggagaagaagattacatctaagcaatatatacgcattcaaaggtcgtaaatcaaactttcaagaagatcattcacacataggaggacctggtttctcacgagttgtttactgtaacgaaccaaattctccggcggctgaacgacgtaactacgtcggaaactatgtccggtcaacaaaatacactctagcttctttcataccaaaatcactcttcgaacagttccgtcgtgtcgccaatttctacttcctcgtcaccggagtcttatcgctgactgctctctctccttacagccccattagtgctctcttacctctcaccttcgtcatcgccgcaagtatggttaaagaagctatcgaagattggggtcgcaaaaaacaggacatcgaaatgaataataggaaagtgaaggttcacgacggaaatggaatattccggcgagaagggtggagggatcttaaagtcggaaatatagtaagagttgaaaaagacgagttttttccggcggatcttttgctgttatcatctagctacgaagattcgatttgttatgtagagactatgaatctcgacggagaaacgaatctgaaagtgaaacaaggcttagaagcgacttcatcggctttacatgaagattcagatttcaaagagttaaaagctgttgtgaaatgtgaagatccaaatgcagatctttatacttttgttggaactttacattttgaagaacagagattaccattgtcgattacacagcttcttcttcgagattctaagcttagaaacactgagtatatttatggagttgttgtcttcactggacatgacacaaaggtgattcaaaattcaactgatccaccatcgaagagaagcagaatcgagaggaaaatggataaaatcatttacttgatgtttggtgttgtgtttttgatgtcgtttattggctccattgtctttggtattgagacaagagaagatagagtgagaaatggaggaagaacagagagatggtacttgagaccagataatgcagatatcttctttgatccagacagagctccaatggctgcggtttatcatttcttcactgcggttatgctatacagttacttcataccgatttcgctttatgtctctatcgaaatcgttaaagttcttcagagtcttttcatcaacaatgacattcttatgtactacgaggagaatgataaacctgcgcatgcaaggacgtctaatctcaatgaagagcttgggatggttgatacgattctatctgataaaaccggtaccttgacatgcaattcaatggagtttatcaaatgttctatcgcgggaacagcttatggacgtggtataactgaagttgaaagatctatggctatgagaagcaatggttcgagtttggttggtgatgatttggatgttgtagtggaccagtctggtcctaagatcaaagggtttaattttctggatgagagggttatgaaagggaattgggttaagcagcgagatgcagcagttttgcagaagtttttcaggttgttagctgtttgtcacacggcgatacctgaaaccgatgaagctacagggagtgtctcttatgaggctgagtctcctgatgaagctgcgtttgttgttgcggctcgagaattcgggtttgagttctttagccggacgcaaaacgggatatctttccgtgaattggatcttgcttcagggaaaacagttgaaagagtatatcggttgttaaacgttcttgagtttaacagcgcgagaaagagaatgtcggttattgtgcgcgacgaagatgggagacttctgttactgtccaaaggagctgataatgtgatgtttgaaagactagccaaaaacgggagaaagttcgaagagaagactcgagaacatgtaaatgaatatgcagatgcagggctaaggacattgatacttgcataccgtgaggttgatgagaatgagtatatagaattcagcaagaacttcaatgaagctaagaactcggtgacagcggatcgtgagagcttaatagatgaaatcacagaacagatggaacgtgatttgattctccttggtgctactgcagttgaggacaaacttcaaaatggggttccggattgtatcgacaagctagctcaagcagggattaagatttgggttctaaccggagacaaaatggagactgcaatcaatattggatttgcttgtagtttactaagacaagagatgaagcagatcatcataaatcttgagacaccacatatcaaagcattggagaaagctggagagaaagatgcaattgaacatgcatcaagagaaagcgtggtgaaccaaatggaagaagggaaagctctactcacagcatcaagcagcgcaagctcacatgaggcctttgcgttgatcattgacgggaagtcgctaacctatgctcttgaagatgatttcaagaagaagtttcttgatttagctacaggatgtgcctctgttatttgctgcagatcatcacctaaacaaaaggcattggttacgcggttggtcaaatctggaaccgggaagacaactttagcgattggagatggagcaaatgatgttggaatgcttcaagaagcggatattggtgttggaatcagcggtgttgaaggaatgcaagcggttatgtctagcgatatagccattgctcaattccgttacttagagcgtctcttgctcgtccatggtcactggtgctacagcagaatctcatcaatgatatgttacttcttctacaagaatatcacttttggtgtcaccgtgttcttatacgaagcctacacatcattctctgctcaacctgcatataacgactggtttttatcgcttttcaacgttttcttctcttcgcttcccgtcattgctctcggcgttttcgatcaagacgtctcagctcgttactgttacaagttcccgttgctataccaagaaggagttcagaatcttctcttcagctggaagagaatcatcggatggatgttcaacggagtctttaccgcactagccatattcttcctatgcaaggaatctctcaaacaccaactctataaccctaatggcaaaaccgccggcagagaaatcctcggcgggacaatgtacacttgcgtagtctgggtcgtcaatctccaaatggctctagccataagctatttcacttggctccaacacattgtaatatggggctcagtagcattctggtacatcttcctcatgatctatggagccatcactcctagcttctccacagatgcttacaaagtcttcattgaagccttagctccagctccatcttactggctcaccactctcttcgtgatgttcttcgctttgatccctttcttcgtcttcaagtcagttcagatgagattcttcccgggataccatcaaatgattcagtggattcggtacgagggtcattctaatgatcccgagtttgtggaaatggttaggcagagatcgattcggcccacgacggttggtttcactgcgagaagagccgctagtgtacggcggtccggtaggtttcatgatcagctcaacaagaatttcattgctttctga

SEQ ID NO: 302 - DNA, 1494 bp, Arabidopsis thaliana
atggaaatgatattgagtatctctttgtgcttaacgaccctcataacccttctcttgctgaggcgattcctcaaacgaaccgccactaaagtgaacctaccaccatctccatggaggcttccggtgatcggaaacctccaccagctgagcctccatcctcaccgttccctccggtccctcagtctcaggtacggaccactcatgctccttcattttggccgtgtccctatactcgtagtctcctccggtgaagcagctcaagaggtattgaaaacacatgatcataaatttgcgaaccgcccgagatcaaaagccgttcatgggcttatgaatggtggacgtgatgttgtgtttgctccctatggagaatactggagacagatgaagagtgtatgcattctcaatctgctcaccaacaaaatggttgaatcctttgagaaggtaagagaagacgaggtaaatgcaatgatcgagaagctggagaaagcaagttcttcttcttcatcagaaaatctgagcgaactctttataactctaccaagcgatgttacgagtagagttgcgttgggaagaaaacatagcgaggacgagaccgcaagggatctcaagaagcgagtgaggcagatcatggagcttttaggcgagttcccgatcggggaatatgtccccatattggcatggatagatgggatccgtggtttcaataataaaattaaggaagtgagtcgagggtttagcgatcttatggacaaagtggtgcaagaacatttagaggcgagtaacgataaagcggatttcgtggatatattgttatcaatcgaaaaagataagaacagtggattccaagttcaaagaaacgacataaaatttatgatcttggatatgtttatcggaggaacgtcaacaacttcgactctactagaatggacgatgacggaactgatcagaagtccaaagagtatgaagaaactccaagacgagattcggtcaactattaggccacatggttcatacataaaagaaaaagaagtggaaaatatgaaatacttaaaagccgtgattaaagaggtgcttcggttgcatccttctcttccaatgatacttcccagactcttaagtgaagatgtcaaagtaaagggatataacatagccgcagggacagaggtgataatcaatgcttgggcgatccaacgagacactgcgatatggggaccggatgctgaagaattcaaaccggagagacacttagattcaggtttagattatcacggaaaaaatctgaactacatcccattcggatcagggagaaggatatgccccgggataaatcttgctttgggtctggcagaggtgacagtggccaaccttgtaggccgatttgactggagggtagaggctggaccaaatggggatcaacctgatctaactgaagccattggtatcgatgtttgccgcaaattccctctcattgcatttccatcttcggttgtgtaa

SEQ ID NO: 303 - DNA, 1077 bp, Arabidopsis thaliana
atggcgggcaactatgatcgtgctggtgaggtaaaagcattcgaccagatgaagatcggcgtgaagggtcttgtcgacgccggaatcacaaaagttcctcgcattttccatcaccaagatgtggccgttacaaaccctaaaccttcctcaacgttagaaattccaacaatcgatgttggaggtggcgtgttcgagtccacggtcacgcgaaagagcgtgatcgcgaaagtgagagctgcggttgagaagttcgggttctttcaggtgattaaccatgggattccactcgaggtgatggagagtatgaaagatgggattcgtgggtttcatgagcaggactcagaagttaagaaaacgttctatagtcgtgacatcactaaaaaggttaagtataacactaatttcgatctctatagctctcaagctgcgaattggagagatactttaactatggttatggctcctgatgttccacaagcaggggacttacccgtgatttgtcgagaaatcatgttggagtactccaagcgaatgatgaagttaggggagctaatctttgagcttttatcagaagctcttggtttaaaacctaaccaccttaaagagctaaattgcgcaaagagtttgtcgttgctctcccattactacccgccttgtccagagcctgaccgaacctttggtatcagttcacatacagatatctcttttatcactattcttcttcaagaccacattggaggacttcaagttctccatgatggttactggatcgatgttcctcctaatcccgaagctctaatcgttaaccttggagatcttttacagcttataacaaacgataagtttgtaagtgtggagcacagggttttggcaaatagaggcgaagaacctcgcatttcaagcgcatctttcttcatgcacaccataccaaatgagcaagtatatggacctatgaaagagcttctatctaaacaaaaccctcccaagtacagaaacacaaccacgaccgagatggcgaggcattacttggctagaggactcgatgggacctcaccgttgctccatttcaggatctga

SEQ ID NO: 304 - DNA, 1368 bp, Arabidopsis thaliana
atggatccaaatgaatctccaccaaaccaatttcgccacgtggtggccatgccttatccaggtcgaggacacatcaaccctatgatgaacctctgcaaacgccttgtccgtcgataccctaaccttcacgtcaccttcgtcgtcacagaagaatggctcgggtttattggacccgacccgaaacccgaccggatccatttctccactctccctaatctcatcccttccgagcttgtcagggccaaagacttcataggcttcattgatgccgtctacacaagattggaagaaccattcgagaagcttcttgacagcctcaattcaccacctccgagtgtaatattcgccgacacttacgtcatttgggctgtgcgagtcggcagaaaaaggaatattccggtggtttctctctggaccatgtcagccacgattctctccttcttcctccactctgatctactcataagtcatggccatgctctgttcgaaccatcagaagaagaggttgttgattacgtccccggtttatctccgacgaaactccgagatttgccgccgatatttgacggttacagcgaccgagtcttcaagacagctaagttgtgtttcgatgaactaccaggagctaggtctttactcttcaccaccgcctatgagcttgaacacaaagctattgacgctttcacctccaagctcgatatcccggtctacgctattggtcctttaataccttttgaagaactttctgttcaaaatgataacaaggaacctaattacatccagtggcttgaggaacaaccggaaggctctgttctttacatatctcagggaagttttctttcggtctcggaagctcagatggaggaaatagtgaaaggactgagagaaagtggagtccggtttctttgggtggctcgtgggggcgagttaaagcttaaggaggctcttgaaggtagcttaggtgtagtggtgagctggtgtgatcagcttcgggtgctgtgtcacaaagctgtaggcgggttttggactcattgcgggtttaactcgacattggaagggatatattcaggagtaccaatgctagcgtttccgttgttttgggatcagattctgaacgctaagatgattgttgaggactggagagtcggaatgaggatcgagaggacgaaaaagaatgagttgttgatagggagagaggagatcaaggaagtagtgaagaggtttatggatagagagagtgaagaagggaaagagatgagaagaagggcttgtgaccttagtgaaatcagtcgaggagctgttgcgaaaagcggttcgtctaatgtaaacatcgatgagttcgttcggcatattaccaatacaaattaa

SEQ ID NO: 305 - DNA, 1335 bp, Arabidopsis thaliana
atggttattgcggtggcgacgacgagctccattgtttccggaatcaagctttcagggatcttaacttcgttcaacgccgtagatgatgcgtccagtagttgcggaagaagcaacttgaccggagttagaatttttccgacattgagtcggcgacgattctcatcgatcggagctgtttccccaattcgtggggatgctcaatcttcctttagtcgcagctctttcgcttgctctcagaatctcggtttgagcggtggatttagtgcagctgaagctctgccacctgcttgtgcaaatgctagcccttcttccattaaatctttcaaccagttgattgaaaccttgattgatcgggttgatctatctgaaactgaggctgaatcatctcttgagtttttgctgaatgaggcaaacgaggcgctgatcagtgcctttctagttcttctgagagctaaaggagagacatacgaagagattgtggggttagctagggcaatgatgaagcatgccaggaaagtggaaggattagttgatgctgtggacatagttggaacaggtggtgatggagcaaacacagtcaatatatcaactggatcttcaatacttgctgcagcttgtggtgcaaaagtagcaaagcaagggaatcgttcaagttcttctgcttgtggaagtgctgatgtactagaggcactaggagtggttctggacttgggaccagagggcattaaaagatgtgttgaagaaggggggatcggttttatgatgtcaccaatgtatcatccagctatgaagatcgttggtcctgttcggaaaaagcttaaaattaaaactgtttttaacatattgggacctatgcttaatcctgctagagtttcttatgctgtcgttggtgtataccacaaagatctggttgttaagatggcaaaggcactgcaacgatttggaatgaaaagagcactggtggttcattcatgtggtctagacgaaatgagtccgttaggaggaggactagtttatgatgtaactccggaaaagatcgaagaattctcattcgacccattggactttggtattcctcgttgtactcttgaggatttgcgaggtggaggtccagactacaatgcggatgtgctaagacgtgtgctttcaggggaaagtggagcaattgcggattcattgatcctaaacgcagctgcagctcttctggttagcaaccgagttcaaacgctagctgaaggagtaaccgtggcacgtgaagtacaatcgtctgggaaagctatcaagacgcttgattcttggataaacatctcaaacttagctcagaaatctcagtga

SEQ ID NO: 306 - DNA, 486 bp, Arabidopsis thaliana
atgaattttactggctattctcgatttttaatcgtctttgtagctcttgtaggtgctcttgttcttccctcgaaagctcaagatagcccacaagattatctaagggttcacaaccaggcacgaggagcggtaggcgtaggtcccatgcagtgggacgagagggttgcagcctatgctcggagctacgcagaacaactaagaggcaactgcagactcatacactctggtgggccttacggggaaaacttagcctggggtagcggtgacttgtctggcgtctccgccgtgaacatgtgggttagcgagaaggctaactacaactacgctgcgaacacgtgcaatggagtttgtggtcactacactcaagttgtttggagaaagtcagtgagactcggatgtgccaaagtgaggtgtaacaatggtggaaccataatcagttgcaactatgatcctcgtgggaattatgtgaacgagaagccatactaa

SEQ ID NO: 307 - DNA, 720 bp, Arabidopsis thaliana
atggcaaatatctccagtattcacattctcttcctcgtgttcatcacaagcggcattgctgttatggccacagacttcactctaaggaacaattgccctaccaccgtctgggccggaactctcgccggtcaaggacccaagctcggcgatggaggatttgaattgactccaggtgcttcccgacagctcacggctcctgcaggatggtcaggccggttctgggctcgtacaggctgcaactttgacgcctccggaaacggtagatgtgtaaccggagactgtggcggtctaagatgtaacggcggcggagttcctcccgtcactctggctgaattcactctagtaggcgatggcggcaaagatttctacgatgtgagcctcgtagatggttacaatgtcaagctggggataagaccatccggaggatcgggagattgcaaatacgcaggctgtgtctctgacctcaacgcggcttgccccgacatgcttaaggtcatggatcagaacaatgtcgtggcctgcaagagtgcctgtgagaggtttaatacggatcaatattgctgccgtggagctaacgataagccggaaacttgtcctcccacggactactcgaggattttcaagaacgcttgccctgacgcctatagctacgcttatgacgacgaaacgagcaccttcacttgtaccggagctaactacgaaatcactttctgcccttaa

SEQ ID NO: 308 - DNA, 1062 bp, Arabidopsis thaliana
atgcatttctcttcgtcttcaacatcgtccacttggacaatcttaatcacattgggatgtcttatgcttcatgcatctttgtccgctgctcaactcacccctaccttctacgataggtcatgtcctaatgtcactaacatcgtacgagaaaccattgtaaatgagttaaggtcggaccctcgtatcgctgcgagcatccttcgtcttcacttccacgactgctttgttaatggttgtgacgcatccatcttgttagacaacacgacatcatttcgaacagagaaagatgcgtttggaaacgcaaattcggctcggggatttccagtgattgatagaatgaaagctgcggtggagagggcatgcccaagaaccgtttcatgcgcagatatgctcaccattgcagctcaacaatctgtcactttggcaggaggtccttcttggagggttcctttgggaaggagagacagtttacaagcattcctggaactcgctaatgcaaatcttccagctccattctttacacttccacaacttaaagccagcttcagaaatgttggtctcgatcgtccttctgatctcgttgctctctccggtggtcacacatttggtaaaaatcaatgtcagtttattcttgacagattatacaatttcagcaacacaggtttacccgaccctacactcaacactacttacctccaaactcttcgtggactatgcccccttaatggcaatcgaagtgccttggtagattttgatctacgtacgcctacggttttcgacaacaaatactacgtgaatctcaaagagcgaaaaggtcttatccagagcgaccaagagttgttctctagccccaatgccactgacacaatccccttggtgagagcatatgctgatggcacacaaacattcttcaatgcatttgtggaggcaatgaataggatgggaaacattacaccaactacaggaactcaaggacaaatcagattgaactgtagagttgtgaactccaactctctgctccatgatgtggtggatatcgttgactttgttagctctatgtga

SEQ ID NO: 309 - DNA, 1713 bp, Arabidopsis thaliana
atggcaataaaagagcgatcactagaggaaacaccaacatgggctgttgctgtagtttgcttcgttctccttttcatttccatcatgatcgaatacttcttgcactttattggtcactggtttaagaagaagcacaagaaagctttatctgaagctcttgaaaaggttaaagcagaactgatgcttctgggattcatatcgcttctattggttgtattgcaaacaccagtctccgagatttgcattccaagaaatattgctgcgacttggcatccttgtagcaaccatcaagaaatcgccaaatatggtaaagattatatcgacgatggccgcaaaattcttgaagattttgactccaacgacttttacagtcctcgccgaaatttagccaccaagggttatgacaaatgcgcagaaaaggggaaagtagcattagtatctgcctatggtatccaccagctgcatatattcatctttgtgctcgctgtttttcatgttctctactgcattataacctatgctttaggaaagaccaagatgaagaaatggaagtcatgggagagagagaccaaaacaattgagtaccaatatgccaatgatccagagaggttcagatttgcaagagatacatcgttcggacgtagacatctgaatatatggagcaagtctacctttaccctctggattttctttggatcagtgacaaaagtagattatcttacactaagacatggctttattatggcacatttgccagcaggaagtgccgctcgtttcgatttccaaaaatacattgaaagatctttggaacaagatttcacggtggttgtcggtataagcccactgatatggtgcattgctgtcttattcatattgaccaatacacatggatgggactcatatctttggctgcccttccttcccttgattgtgatattgatagtaggagcaaaacttcaaatgataatatcgaaattaggattaaggattcaagaaaaaggagatgtggttaaaggagctcctgtggttgaaccgggcgatgatctcttttggtttggtcgtcctcgtttcattctcttcctcattcacttggttcttttcacgaatgcatttcaactggctttcttcgtttggagcacttacgaattcacactcaaaaactgcttccaccacaaaacagaagacattgcaattaggatcaccatgggggtattaatacaagttctatgcagctacatcactctacctctctatgctcttgttactcagatgggaacatcaatgaggccgacaatattcaacgacagggtagccaatgcattgaagaaatggcaccacacagccaagaaacagacgaaacatggacactcaggatctaacacacctcactcgagccgtcctactacgccaacacatggcatgtcaccggtgcatctcctccacaactacaataaccgcagcctcgaccaacaaaccagcttcactgcttctccttctcctcctagattctctgattatagcggccaaggccatggccatcagcatttcttcgaccctgaatctcagaatcactcttaccaacgtgagatcacagattctgaattcagcaatagtcatcatccccaagttgacatggcaagtcctgttagagaagagaaggagattgttgagcatgtcaaggttgatttgtctgagtttacgttcaagaagtga

SEQ ID NO: 310 - DNA, 980 bp, Arabidopsis thaliana
atgtcatcatcatcatcagttcctgcttacttgggagatgaagatctgacacaagaaacaagagctctgatctcttctcttcctaaagagaaaggttggttagtgagtgaaatatatgaattccaaggactttggcacacacaagctattttacaaggaatcttgatctgccaaaaacgctttgaagctaaagattccgacattatcctcgtcactaatcctaaatcaggtaccacttggttaaaagctcttgtctttgctctccttaaccgacacaagtttccagtttcttcttctggtaaccatcctcttctggtcaccaatccacaccttcttgtgcccttcttggaaggagtttactacgagtccccagatttcgatttctccagtttgccttctccaagactgatgaacacgcacatatcgcatctttcgctccccgagtctgttaagagctcgtcttgtaagattgtgtattgttgtaggaaccctaaggacatgtttgtgtccttatggcattttgggaaaaagctagctcctgaggaaaccgcggattatcctatcgaaaaagcggttgaagcgttttgtgaagggaagtttataggtggacccttttgggatcatatattggagtactggtatgcaagccgcgagaatccgaacaaggtcttgtttgttacttacgaggagctaaagaagcagaccgaagttgagatgaagcggatcgcggagttcttggaatgtggctttattgaagaagaagaagtgagagagattgtgaagttgtgtagctttgagagtttaagtaatttggaagttaacaaagaagggaaattgccaaatggaatagagactaaaactttctttagaaaaggagagattggaggatggagagatactttgagtgagtcattggcagaggaaattgatagaaccattgaagagaagtttaaaggttctggtcttaaattttcttcttg

SEQ ID NO: 311 - skipped

SEQ ID NO: 312 - DNA, 1880 bp, Arabidopsis thaliana
atgaaatcatacaaacttaataaccctaatttactcatctccacgcacacacataataaactcttcttatcctcttctccattcaatctcttattctcttttccttccttcatataccttaaacagcaacgttctctgttcttcttcttctttttcttcctctgtttttctttcacaacttccatgttggactcggacacagacacggactcaggtcctgtggttgcaacaaccaaactcgtcactttcctccagcgtgtgcagcacacggcacttcgatcataccctaaaaaacaaacgcctgatcccaaatcctacattgatctatctctcaaacgtccctacagtctctccaccatcgaatcagccttcgatgatctcacgagcgagtcacatgaccagccagtgccagtggagacgcttgaaaagttcgtcaaggaatattttgacggtgcaggggaggatctgctgcaccacgaaccagtagatttcgtctcagatccctccggcttcctctccaacgtggagaacgaagaagtcagagaatgggcgcgtgaggtacacggtctttggagaaatctgagctgcagagtctctgactcagtaagagagtctgccgaccggcacacgcttctaccgttgccggaaccggttatcattcccggttcgagattcagagaagtctattactgggattcttattgggtcatcaaaggacttatgacgagtcaaatgttcactaccgccaaaggtttagtgacgaatctgatgtcacttgtggagacttatggttacgctttgaacggtgctagagcttattatactaacagaagccaaccacctttgttgagctccatggtctatgaaatttataatgtgacaaaagatgaagaacttgtgaggaaagcaatccctctgcttctcaaagagtacgagttttggaactcaggaaaacataaagtggttattcgagacgctaatggttatgatcacgttttgagccgttattatgctatgtggaacaagccaaggcctgaatcctctgttttcgatgaagaatctgcttcagggttctcgactatgttagagaaacaacggttccatcgagatatagccacggctgctgaatcaggatgcgatttcagcacgcgatggatgagggatcctcctaatttcacaacgatggctacaacatcagtggttcctgttgatctaaatgtttttcttctcaagatggaactcgatatagcgttcatgatgaaggtttctggagatcaaaatggttcagaccgttttgtgaaagcgtcaaaagcgagagagaaagcgtttcaaaccgtgttttggaacgagaaagcagggcaatggctggattactggctttcctccagtggtgaggaatctgagacatggaaggctgagaaccaaaacaccaacgtctttgcgtctaactttgcaccaatctggattaattccatcaattcagatgaaaatcttgtcaagaaagttgtgacagctcttaagaactcagggctcattgctcccgctggaatcctaacttctttgacaaactcaggacaacaatgggattctccgaatggatgggcaccgcaacaagagatgatcgtcacagggctcggaagatcgagtgtaaaagaagctaaagagatggcagaggatattgcaaggagatggatcaaaagcaactatcttgtctacaagaaaagtgggactatacatgagaagctcaaagttacagagcttggtgaatatggtggtggaggagaatatatgccacagaccggattcggatggtcaaatggagttatcttagcattcttggaggaatatggatggccctctcatcttagcattgaagccta

SEQ ID NO: 313 - DNA, 1413 bp, Arabidopsis thaliana
atggcagcctcaggcacctctgctactttcagagcctccgtttcttcagctccttcctcttcttcccaattgacccatttgaaatcacccttcaaagctgtcaaatatacgcctctgccatcgtctcgctccaagtcatcatccttctccgtctcctgcaccatcgccaaggacccgcctgttctcatggccgccggatctgacccggccctgtggcaacgacccgattcgttcggtcggtttgggaagtttggtgggaagtatgtacctgaaacccttatgcacgctctatctgagcttgaatccgctttctatgctcttgccaccgacgatgatttccagagagagttggctggaatcttgaaggactatgtgggtagagaaagtcctctgtattttgcagagaggcttacggagcattacaggcgcgagaatggcgaagggcctcttatatacttgaagagagaagacttgaatcacacaggagctcacaagattaacaacgctgtggctcaggctcttcttgctaagcggttggggaagaagaggattattgctgagacaggagcgggtcaacatggtgtggctacagctactgtgtgtgcccgttttggtttggagtgtattatctatatgggtgctcaagatatggagagacaagcactcaatgtgttcagaatgcgacttcttggtgccgaggtgagaggagtccactctggaacagcgacattgaaggatgcgacatctgaagcgataagagattgggtgacaaatgtggagactacccattacatattgggatctgtggcgggtcctcatccttaccccatgatggtcagagactttcacgctgtgattggtaaagaaacaaggaaacaagcgttggagaaatggggcgggaagccggatgtcttggtggcttgtgtcggtggtggttcaaacgctatgggactcttccatgaatttgtgaatgacacagaggtccggatgatcggtgtggaagcagcgggattcggattggacagtggcaaacacgctgctacattgacaaagggagatgttggtgtcctccatggagctatgagttacttgctgcaagatgatgatggacaaatcattgaaccacactccatcagtgcaggattggactaccctggagtcggacccgagcacagtttctttaaagacatgggacgggctgaatactatagcataaccgacgaagaagcgttggaagcgttcaagagagtgtcgcggttagagggaatcattccagcactggagacctcacacgcactagcttacctcgagaagctatgtcccacattatcagacgggacgagagtggtcttgaacttcagcggaagaggagataaagatgttcagacagtggctaaatatcttgatgtttga

SEQ ID NO: 314 - DNA, 939 bp, Arabidopsis thaliana
atggcgattgctttcaaatccggcgtcttcttcctccaatccccaaaatctcaaattggattccgccattcttctcctcctgattcatcgctttctttcaagagattcactcccatggcttctctctccacctcttctcctactctcggtctcgctgatactttcacacagctcaaaaaacaaggcaaagtagcattcataccatatatcacagctggtgatccggatctctctactactgctgaagcattgaaagttcttgatgcttgtggttctgacataatcgaattgggtgttccttactctgaccctttagctgatggacctgttattcaggctgcggcaacaaggtcgttggagaggggaacaaacctcgatagcatccttgagatgttggataaggttgttccacaaatatcttgtccgatttcgttgttcacgtattacaacccgattcttaaacgtgggttggggaagttcatgtccagcatcagagctgttggtgtacagggacttgtggttcccgatgttcctcttgaggaaactgagatgctgagaaaagaagccctcaacaacgacattgagctggtcctactcactacaccaaccacaccaacagagcgaatgaagctaattgttgatgcgtcagaaggatttatttaccttgtgagctcaattggagtgactggtgcacgatcatctgtaagcggaaaggttcagtcgctcttgaaggatatcaaagaggcgacagacaagccggtggcagtcggttttggaatatcaaagccggagcatgtgaaacagatagctggatggggagctgatggagtgatcgtaggcagtgcaatggtaaagctattgggtgatgcaaagtcgccaactgaaggacttaaggagcttgagaaactaaccaagtctcttaaatctgctcttctttga

SEQ ID NO: 315 - DNA, 1428 bp, Arabidopsis thaliana
atggccaccgcaagcaccgctgctactttcagaccctcctccgtttcagcttcttccgaattaacccatctgagatcaccctccaaactccccaaatttacgcctctgccatcggctcgctcacggtcctcttcttcgttctccgtctcctgcaccatcgctaaggacccagctgttgtcatggcggactcggagaagattaaggccgctggatctgatccgactatgtggcaacgacctgattcattcggtcgtttcgggaagtttggcggcaagtacgtccccgaaactctaatgcacgccctctctgaactcgaaacggctttctattcgctcgccaccgacgaagatttccagagagaattagcagagatcttgaaagactacgttggtcgggaaagtcctctttactttgcagagaggctcacggagcattaccgccgtgaaaacggtgaagggccgctcatatacctcaaaagggaagacttgaaccacaccggtgctcacaagatcaacaacgctgtggctcaggctcttctcgccaagcgtctaggaaagaaacgaattattgctgagacaggggctggtcaacatggtgtagccacagctactgtgtgtgcacgtttcggtttgcagtgcattatctacatgggtgctcaagacatggagagacaagctcttaatgtgttcagaatgcgtcttctcggtgctgaggtaaggggagtccactctggaacagccactttaaaggacgcaacttctgaagctataagggattgggtgaccaatgtggagactacacattacatattgggatccgttgcgggtcctcatccttatcctatgatggtcagagactttcacgcggtgattggtaaagaaacaaggaaacaagcgatggagaaatggggcgggaagcctgatgttctggttgcttgtgtcggtggtggttcaaatgctatgggactcttccatgaatttgtcgatgacacagaggttcgaatgattggtgtggaagccgctggatttggattggacagcggcaaacatgctgccacattgacaaaaggagatgtcggtgtactccacggagctatgagttacttgctgcaagatgatgatggccaaatcattgaaccacactccatcagtgccggattggactaccctggagtcggacctgagcatagtttccttaaagacgtgggaagggctgaatactttagcgttactgatgaagaagcattagaagctttcaagagagtgtctcggttggagggaataatcccggcattggagacatcgcacgcattggcccatctggagaagctttgtccgacgttacctgatggagccagagtggtattaaacttcagtgggagaggcgacaaggatgttcagactgcaatcaagtatctcgaagtttaa

SEQ ID NO: 316 - DNA, 798 bp, Arabidopsis thaliana
atgaaaatcctctcactttcacttctcttgctcttggccgctacggtctcggcatccgttccagggctcatcgaactcgtcgattcgaaaaccatctttgggaacgtagccgaactcttagagaaagagaaactttccatcaactacgccaactgcagaagctggcaccttggtgttgagacctctaacatcatagacttcgacacggtgcccgcaaattgcaaagactatgttgaagactacttgatcacttccaaacagtaccaatacgactccaaaaccgtgtgcaaagaggcttatttctatgccaaaggacttgccctaaagaacgacaccgtcaatgtttggatctttgacctagatgataccctcctctctagtattccctactacgcaaaatatggatacggaacagagaagaccgacccgggggcgtactggttgtggttagggaccggagcatcaacccctggactcccggaggccttgcatctttaccaaaacatcatagagctcgggattgaacccatcatactcagtgaccgttggaagttgtggaagaatgtcactctcgacaatctcgaagctgctggcgtgacctactggaagcatctcatattgaagcctaatggttcgaacttgaggcaagtggtgtacaagtcaaaggtgaggaagagtctcgtgaagaaaggatacaacatcgttggcaatatcggagatcaatgggctgatttggttgaggatacccctgggagggtttttaagctcccaaatccactctactacgtaccttcttaa

SEQ ID NO: 317 - DNA, 282 bp, Arabidopsis thaliana
atgaatcaagaagctgcgagtaaccttggacttgatctgaaactaaatatttcaccgtcgttggattcatctttgctcactgagagttcatcgtcatcgttatgctcggaggaagctgagggtggaggaggagaggctaaatcaatggtggtcgttggctgccctaattgcatcatgtacatcatcacttctttagagaatgaccctagatgccctagatgcaacagccatgttttgcttgattttctcacaggaaaccatagcaagaagagcactagttaa

SEQ ID NO: 318 - DNA, 2766 bp, Arabidopsis thaliana
atggctccgtcgttaaggaatttcaacttctttcaccgcttctccaccttcctcgtcttctctctattctccgtcgtttcttccgacgatctccaagtcttactcaagctcaaatcatcattcgccgattccaatctcgccgtgttcgattcctggaaactgaactccgaggcaacgttacagagattgatctctctcgtcgagagtctcgagaaactctctctcggattcaattcactatctggaataatccccagcgatttgaaaaactgcacgagtttgaagtatttggatctcggcaacaatttattctccggtgctttccctgagttctcatctttaaatcagttacagtttctgtatctcaacaacagcgctttttccggcgtctttccgtggaaatcgctccgaaacgcaacgagtctcgtcgttttgagcctaggcgataatccgtttgatgcgacggctgatttcccggtggaggttgtttctctgaagaaactctcgtggctttacttgtcgaattgcagtatcgccggaaaaattccaccggcgattggagatttgacggagcttcggaatttggagatttccgatagcggattaaccggagagattccgtcggagatttcgaaacttactaatctctggcagttagagctttacaacaactccttgaccggaaaacttcctaccggattcggaaacttgaagaatctgacttacttggacgcttcaacaaatcttctacaaggcgatttatcggagcttaggtctctgactaatctcgtttcactacaaatgttcgaaaacgaattctccggtgagattccgctggagtttggtgaattcaaggatctcgtgaatctctctctgtatacaaacaagttaaccggttctctgcctcaaggactcggttcacttgctgattttgatttcatcgacgcatcagagaatctcttaaccggaccgatccctccagatatgtgcaagaacgggaagatgaaagctctgcttctcctgcaaaacaacctcactggctctatccctgagtcctacgctaactgtttgactctgcaacggttcagagttagcgagaacaacctcaacggaactgttcccgcgggactttggggattaccgaagctcgagatcatcgatatagagatgaataacttcgaaggtccaatcaccgcggatataaagaacggtaaaatgctcggagcgttgtatctagggttcaacaagttgtctgatgagctgcctgaagagataggtgacactgaatctttgactaaggttgagcttaacaataaccggtttaccgggaagattcctagctccattgggaaactcaaaggacttagcagtctaaagatgcagagcaatggcttctccggtgagatacctgactcgattggttcgtgctcgatgctcagcgatgtcaacatggctcaaaactcgatatccggagaaatcccccacacgcttggatcactcccgacgctcaacgctttgaatctttcggacaataagttgtctgggagaatcccagagagtttgtcgtctttaaggcttagccttcttgatctgtctaacaacagattatcaggtcgtatccctctgagtttgtcatcatataatggtagcttcaatggcaatcctggcctctgtagcacgacgatcaaatcgtttaaccggtgcataaatccttcgagatcgcatggagacactcgcgtgttcgtgttgtgtatagttttcgggttactgatcttgctagcgtctcttgtgtttttcttgtacctgaagaaaacagagaagaaggagggacgttcgcttaaacacgaatcttggagtataaagtcattccgaaagatgagtttcactgaagatgatatcattgattcaatcaaagaagagaatttgattggtagaggaggttgtggggatgtgtacagagtagtacttggtgatggtaaagaagttgcggtcaaacacatccggtgtagtagtactcagaaaaacttcagcagtgcaatgccgattctcactgaacgggagggaagatcgaaagagtttgaaacagaggtgcaaacgcttagttcgatacgacacttaaacgtggtgaaactctattgtagcatcacgagcgatgactcgagcttgctggtgtacgagtacttgcctaatggaagcttatgggacatgcttcactcttgcaagaagtcgaatcttggttgggaaacacggtatgatatagctcttggtgcagcaaaagggcttgagtacttgcatcatgggtatgagagaccggtgattcaccgtgatgttaagtccagtaacatattgctagatgagttcttgaaacctagaattgcggattttggtcttgccaagattcttcaggccagcaatggcggtccagagtccacgcatgtcgttgcgggaacctatggctacatagctccagggaaaaaaccgatagaggcagagtttggagagagcaaagacatagtgaattgggtgagcaacaatctgaagagcaaagagagtgtgatggagattgtggacaagaagataggagaaatgtatagagaagacgcggtcaagatgctgaggattgcgatcatctgcaccgcaagacttcctggactaagaccgacgatgaggagcgtggtgcagatgatcgaggacgcggaaccttgcagattgatggggattgtgatcagcaaagagagtgatgtcaaggtcaaagaaataagttga

SEQ ID NO: 319 - DNA, 555 bp, Arabidopsis thaliana
atggaggctttgccggaggatgaagagtacagtttcagggaagtagtgttgccgtctttgattccggtagtgccggagccggaacttgagagagagagcggagagaggagaagaggaagagatgttatcgtagccgttgatcatggtcccaatagcaaacacgcttttgattgggctcttgttcatttctgtcgtctcgccgatactctccatcttgtccacgccgtctcaagttcgttctctcttcaatgtgttaagaacgatgttgtgtatgagacgagccaagccctcatggagaaacttgctgttgaggcgtatcaagttgccatggtaaagagtgtggctcgtgttgttgaaggcgatgctggtaaagtaatctgcaaggaagcagagaaagtgaagcctgctgctgtgattgtaggcacacgaggcaggagcttagtaagaaggttgcgtgctacaggggagcgtaagcgagtattgtttccacaattgcaaatctgctcctgtcataatcgttcctggaaaaggtacattactaatcaatcatggtaa

SEQ ID NO: 320 - skipped

SEQ ID NO: 321 - DNA, 1428 bp, Arabidopsis thaliana
atgccttcttgttcggtaactgaaatttcaaaatgtatcgtctatccggagaagaagtccaccgtctccgatctccgtctctccgtctccgacctccctatgctctcatgtcattacattcaaaaaggcgtcctcctcaccagccctcctccttccttctccttcgacgaccttgtctcctctctccgccgttctctctcctccactctttccctcttccctgctttagccggccgtttctccaccactcccgccggtcacatttccattgtctgcaacgacgccggagttgatttcgtcgccgcttccgctaaacacgtcaaactctctgatgttctcttaccaggtgaagacgttcctctgcttttccgtgagtttttcgtcttcgagcgtctcgttagttacaacggtcatcataagcctctcgccgccgttcaagtgacggagctccacgacggtgtcttcatcggatgtaccgtgaatcattccgttactgacggaacttccttctggcacttcttcaacacctttgctgacgtcactagcggtgcttgtaagatcaaacaccttccagatttctcccgccacaccgtcttcgattctccggtcgttcttccagtccctcccggtggtccacgtgtcactttcgacgccgaccaacctctacgggagagaatttttcatttcagcagagaggcgattaccaaactgaaacagaggacgaataacagagttaacggaattgagactgccgttaacgatggaaggaaatgtaacggagagattaacggaaaaataacaaccgttttggatagttttttgaataataagaagagttatgatcggacggctgagatttcatcgttccaatctctcagcgctcagctatggcgatccgttacacgagcgaggaatctcgatccgagcaagacgacgacgtttcgaatggcggttaattgccggcaccggcttgagccgaagatggatccgtactacttcggaaacgcgatacagagcataccgacgttggcgtctgcgggagatctgctaagcaaagatctcaggtggtccgccgaacagttacacaggaacgtggtggcgcacgacgacgcgacggtccgccgtggaatcgccgcttgggaaagcgatccgaggctgtttcctctcggaaatccagatggagcttcgatcacgatggggagctcgccgagattcccaatgtacgacaatgatttcggatggggaaaaccgttagctgtgagaagcggcggagcgaataaattcgacgggaagatctcggcgtttcccggtagagaaggaaacggaagcgtggatctggaagtagttctggcgccggagactatgactgggattgagaacgatgctgagtttatgcaatacgtatcagaagtcacttacgattgttga

SEQ ID NO: 322 - skipped

SEQ ID NO: 323 - DNA, 1794 bp, Arabidopsis thaliana
atgtgcggtgcaaagagcaacctttgctcatctaaaaccctaacagaagtcgaattcatgaggcagaaatcagaagacggagcttccgccacgtgtctcctcgaattcgccgcctgtgatgatctttcatcgtttaagagagagatcgaagagaatccatcggtggagattgatgagtcagggttttggtattgcagacgggtcgggtctaagaagatgggttttgaagaaagaacaccacttatggttgctgctatgtatggaagcatggaagtgttgaattacataattgccacaggaagatccgatgtgaacagagtttgcagtgacgagaaagtcactgctcttcactgtgcagtttctggctgttctgtttctatcgttgagatcatcaagatcttgcttgatgcttctgcttcacctaattgtgttgacgctaatgggaacaaaccggttgatttgttggctaaagattctcggtttgttcctaaccagagtagaaaggcggttgaggttttactgaccgggattcatggttcggttatggaagaagaggaggaggaactgaagagtgttgtgactaagtatccagctgatgcatcacttcctgatattaacgaaggtgtttatggaactgatgattttaggatgtttagctttaaggttaagccatgttctagggcttattcacatgattggactgaatgtccttttgttcatcctggtgagaatgcaaggaggagagatcctaggaagtatccttacacttgtgtgccttgtcccgagtttcgtaaagggtcttgtcctaaaggagattcgtgtgagtacgcgcacggtgttttcgagtcttggcttcacccggcgcagtataggacacggctttgcaaagatgagactggttgtgctaggagagtttgtttctttgctcatagacgggatgagttaagaccggttaatgcttctactggttctgcaatggtttcaccaaggtcgtctaatcagtctcctgagatgtctgttatgtctcctttgacgctgggatcatcgccaatgaactctcctatggctaatggtgttcctttgtctccaagaaatggtggtttatggcagaacagagttaatagccttacaccaccaccgttgcagcttaatggtagcagattgaagtcgactttgagtgctagagatatggatatggagatggaacttaggtttcgcggtttggataaccggagacttggtgatctcaagccatccaacctcgaagagactttcggatcatatgactcagcttctgtgatgcaacttcaatcaccaagcaggcattctcagatgaaccactatccgtcttcacctgtgaggcagcctcctcctcatggattcgaatcttcagcagccatggcagctgcagtgatgaatgcaagatcctcagcgtttgcgaaacgcagcttgagtttcaaaccagctccagtagcttctaatgtctccgattggggatcaccaaatgggaagcttgagtggggaatgcaaagagatgagctgaacaagttgaggagaagtgcctccttcggcattcatggaaacaacaacaacagtgtgtcacgccctgctagagactacagtgacgagccagatgtgtcgtgggtgaactcactggtgaaagagaatgcaccagagagagtgaatgagagggttgggaatacggtgaatggtgcagcgagtagagacaagtttaagctgccgtcgtgggcagagcaaatgtatatagaccatgagcagcagattgtggcataa

SEQ ID NO: 324 - DNA, 4869 bp, Arabidopsis thaliana
atggggtttgagccgttggattggtattgcaagccggtgccgaatggtgtgtggactaaaactgtggattatgcgtttggtgcatacacgccttgtgctattgactcttttgtgcttggtatctctcatctggttctgttgattctgtgtctttatcgcttgtggctcatcacgaaggatcacaaagtggataagttctgcttgaggtctaaatggtttagctattttctggctcttttggctgcttatgctactgcggagcctttgtttagattggtcatgaggatctctgttttggatttggatggagctgggtttcctccctatgaggcgtttatgttggtccttgaggcttttgcttggggttctgctttggtcatgactgttgtggaaactaaaacgtatatccatgaactccgttggtatgtcagattcgctgtcatttatgctcttgtgggagacatggtgttgttaaatcttgttctctctgttaaggagtactatggcagttttaaactgtatctttacataagcgaggtggcagttcaggttgcatttggaaccctcttgtttgtgtatttccctaatttggacccttaccctggttacacaccagttgggactgaaaattccgaggattacgagtatgaagagcttcctggaggagaaaatatatgtcctgagaggcatgcaaatttatttgacagtatcttcttctcatggttgaacccattgatgactctgggatcaaaacgacctctcaccgagaaggatgtatggcatctggacacttgggataaaactgaaactcttatgaggagcttccagaagtcctgggataaggaactagaaaagcccaaaccgtggcttttgagagcactgaacaacagccttgggggaaggttttggtggggtggcttttggaagattgggaatgactgttcacagttcgtggggcctcttctactgaatgagctcttaaagtcaatgcaacttaatgaaccagcgtggataggttacatctatgcaatctcaatctttgttggagtggtattgggggttttatgtgaagctcagtatttccaaaatgtgatgcgtgttggttaccggcttaggtctgcactgattgctgctgtgttccgaaaatctttgaggctaactaatgaggggcggaagaagtttcaaacaggaaaaataacaaacttaatgactactgatgctgagtcgctgcagcaaatctgccaatcacttcataccatgtggtcggcgccatttcgtataattgtagcactggttctcctctatcaacaattgggtgttgcctcgatcattggtgcattgtttcttgtccttatgttccccatacagactgttattataagcaaaacgcagaagttaacaaaagaagggttgcagcgtactgacaagagaattggcctaatgaatgaggttttagcggcaatggatacagtgaagtgttacgcttgggaaaacagttttcagtccaaggttcaaactgtacgtgatgatgaattatcttggttccggaaagcacaactcctgtcagcgttcaatatgttcatactaaacagcattcctgtcctcgtgactgttgtttcatttggtgtgttctcattgcttggaggagatctgacacctgcaagagcgtttacgtcactctctctattttctgtgcttcgcttccctttattcatgcttccaaacattataactcagatggtaaatgctaatgtatccttaaaccgtttggaggaggtactgtcaaccgaagagagagttctcttaccgaatcctcccattgaacctggacagccagctatctcaataagaaatggatacttctcctgggattcaaaggcggataggccaacattgtcaaacatcaacctggacatacctcttggcagcctagttgcggtagttggcagcacaggagaaggaaaaacctccctgatatctgctatgcttggggaacttcctgcaagatctgatgcgactgttactcttagaggatcagtcgcttatgttccacaagtttcatggatctttaacgcaacagtacgtgacaatatattgtttggggctccttttgaccaagaaaaatatgaaagggtgattgatgtgacagcactccagcatgaccttgagttactgcctggaggtgacctcacggagatcggagaaaggggtgttaacatcagtgggggacaaaagcagagggtttctatggctagggccgtttactcaaattcagacgtgtgcatcttagatgacccattgagtgcccttgatgcgcatgttggtcagcaggtttttgaaaaatgcataaaaagggaactagggcagacaacgagagtacttgttacaaatcagctccacttcctatcacaagtggataaaatcctacttgtccatgagggaacagtaaaagaggaaggaacatatgaagaattatgccatagtggcccgttgttccagaggttaatggaaaatgcagggaaggttgaagattattcagaagaaaatggagaagctgaagtagatcaaacatctgtaaaaccagttgaaaatgggaacgctaataatctgcagaaggatggaatcgagacaaagaattccaaagaaggaaactctgttcttgtcaagcgagaagaacgtgaaactggagttgtgagttggaaagtcctggagaggtaccagaatgcacttggaggtgcatgggtagtgatgatgctcgttatatgctacgtcttgactcaagtatttcgggtttcaagcagcacttggttgagtgagtggactgattcaggaaccccaaagactcatggacccctattctataatattgtctatgcgcttctttcgtttggacaggtctctgtgacattgatcaattcatattggttgattatgtccagtctatatgcagctaaaaagatgcatgatgctatgcttggttccatactaagggctccaatggtgttctttcaaaccaatccattaggacggataatcaatcgatttgcaaaagatatgggagatattgatcgaactgtggcagtctttgtaaacatgtttatgggttcaatcgcacagcttctttcaactgttatcttgattggcattgtcagcactctgtccctgtgggccatcatgcccctgttggtcgtgttctatggagcttatctgtattaccagaacacatctcgggaaattaaacgtatggattccactacaagatcgccagtttatgctcaatttggtgaggcattgaatggactatctagtatccgtgcttataaagcatatgacaggatggctgaaattaatggaaggtcaatggacaataacatcagattcacacttgtaaacatggctgcaaatcggtggctgggaatccgtttggaagttttgggaggtctcatggtttggttgactgcgtcattagccgtcatgcagaacggaaaggcagcgaaccaacaagcatatgcatctacgatgggtttgcttctcagttatgcgttaagcattaccagctctttaacagctgtactgagactcgcgagtctagctgagaatagtttaaactcggttgagcgtgttggaaattatatcgagataccatcagaggctccattggtcattgaaaacaaccgtccacctcccggatggccatcatctggatccataaaatttgaggatgttgttcttcgttaccgccctgagttacctcctgttcttcatggagtttcgttcttgatttctccaatggataaggtgggaattgttgggaggacaggcgctgggaaatcaagcctcttaaatgccttattcaggattgtggagctggaaaaaggaaggattttaattgatgaatgcgacattggaagatttggactgatggacctacgtaaagtgctcggaattataccgcaagcgccagttcttttctcaggtaccgtgagattcaatcttgacccatttagtgaacacaacgacgccgatctctgggaatctcttgagagggcacacttgaaagatactatccgcagaaatcctcttggtcttgatgctgaggtaactgaggcaggagagaatttcagtgttggacagagacagttgttgagtcttgcacgtgcattgttacgaagatctaagatacttgttcttgatgaagcaactgctgcagttgacgtaagaactgatgttctcatccaaaagaccatccgagaagaattcaagtcatgcacaatgctaatcatcgctcatcgtctcaatactatcatcgactgtgacaaagttcttgtccttgattctggaaaagttcaggaattcagttcaccggagaatcttctttcaaatggagaaagttctttctcgaagatggttcaaagtacaggaactgcaaacgcggagtacttacgtagtataacactagagaacaaacgtaccagagaagctaacggtgatgattcacaacctttagaaggtcaaaggaaatggcaagcttcttctcgttgggctgcagctgctcaatttgcattggctgtgagcctcacttcatctcacaacgacctccaaagccttgaaatcgaagatgataacagtattttgaagaaaacaaaggacgccgtcgtcactctacgcagtgtccttgaagggaaacatgataaagagattgaagactctctaaaccaaagtgacatctctagagagcgttggtggccatctctttacaaaatggtcgaagggcttgccgtgatgagcagattggcgaggaacagaatgcaacacccggattacaatttagaagggaaatcgtttgactgggacaatgtcgagatgtaa

SEQ ID NO: 325 - DNA, 909 bp, Arabidopsis thaliana
atgatgaaagatccgactgggtatagatttagtccgacgggagaggaagtgataaaccattacctaaagaacaaaattctgggtaagacttggctcgttgatgaagccattagcgagatcaacatcttgaatcacaaacccagcaaggatttgcctaagttagctaggatccaatcggaagatcttgagtggtactttttctctccgattgagtacacgaacccgaataagatgaaaatgaagaggacgacaggttctgggttttggaaacctagtggtgttgatcggaaaattagggataaaagaggaaatggtgttgtgatagggattaagaagacgcttgtgtaccatgaaggtaagagtcctcatggagttagaactccttgggttatgcacgagtatcacatcacttgcttgcctcatcataagaggaaatatgttgtctgccaagtaaagtataagggtgaagctgcagaaatttcatatgagccaagtccctctttggtatccgattcgcataccgtcatagcgattaacggagaaccggaacctgagcttcaggttgagcagccaggtaaagaaaatctcttgggtatgtctgtagatgatttgatagaaccaatgaaccaacaagaggagccacaaggtcctcacttagctccgaatgatgatgagtttatacgtggattgagacatgttgatcgagagccggttgaatatttgtttgccaatgaagaaaacatggatggtttgtctattatgaatgacttgacaatcccaatgatcgcccaacaagaggatctcattctctctgagtgggagggatttatcgcagccacctttttcagcgacaacaacaataacaataaccttaacgtgcatcaactaacgtctttcttaccgggatga

SEQ ID NO: 326 - DNA, 1152 bp, Arabidopsis thaliana
atgtgcaacggaagtgatcgtcttggacaaagagaagctgaagagatttgcaccaacaatgtgagggtcttttcatataattcattaagatcagccactgatagtttccatccaacgaacagaatcggaggtggtggctatggcgttgtctttaagggagttttgagagatggcacacaagtagctgtgaaatcactatcagcagaatctaaacaagggacacgcgagttcttgaccgagattaacttgatatcaaacattcatcatcctaaccttgttaaactcatcggttgctgcatcgaagggaacaatcggattcttgtctatgagtaccttgagaacaacagtcttgctagtgttttgcttggttcaaggagtagatatgtaccgcttgattggtccaaaagagctgcgatttgcgttgggacagcttcgggtttagctttccttcacgaggaagtcgaacctcatgttgttcaccgtgacatcaaggcgagtaatatcttactagactcaaacttttctcccaaaattggtgatttcgggttggctaagctttttccagacaatgtcactcatgtcagtacccgagtcgctggaacagtgggatacttggctccagaatatgcacttcttggtcaactgacaaaaaaagcagacgtttacagcttcgggatacttgtgcttgaggtcattagtggtaatagtagcaccagagccgcctttggagacgagtacatggttcttgttgaatgggtgtggaagctgagagaagaaaggaggctactagagtgtgtagatccagaactaaccaagttccccgcagatgaagtgacccgtttcatcaaggtggctcttttctgcactcaagccgcggcgcaaaagagaccaaacatgaagcaagtgatggagatgcttcgcaggaaagagcttaacctcaacgaggatgccttaacggaacctggcgtctacagaggtgtcaacaggggacgcaaccaccgtggaatcggtcttagggtcggccaaggaggcagctcacaggagagctcgtcaacgcaacgtgacaaagggaaaagctcagccgttcctcaagggtcgacgtccaactctaatatttccttccagagcatcacagagttggctcctagatga

SEQ ID NO: 327 - DNA, 387 bp, Arabidopsis thaliana
atggataataccaaccgtcttcgtcttcgtcgcggtcccagtcttaggcaaactaagttcactcgatcccgatatgactctgaaggtctctcttcaattcattactctacactcatcctcctaactcgtcagcaagtgagtagcatcgaatgggagtttatcagtatgaccgaacaagaagaagatctcatctctcgaatgtacagacttgtcggtaataggtgggatttaatagcaggaagagtcgtaggaagaaaggcaaatgagattgagagatactggattatgagaaactctgactatttttctcacaaacgacgacgtcttaataattctccctttttttctacttctcctcttaatctccaagaaaatctaaaattgtaa

SEQ ID NO: 328 - DNA, 1197 bp, Arabidopsis thaliana
atggcggctgttcaatgtctcactttcctcttcttgtttcttctccaaaacgcgacgtcagcttcacctctccctctcttccggcggccgatccaaagcaaccacagcaacttcgtgaagcatcctcgccgaagtcaggtggttttcccggtgaatcatagtagttgtgatctgttcgccggcgagtgggtgcgggatgagacttacccactttaccggtctaaagaatgcggccgaggaatcatagatccgggattcgactgccagacttacggcagacctgactccgactatctcaagttccggtggaaacctttcaactgcaatgtccctagattcaatggagtgaagtttctacaagaaatgagagacaaaaccataatgttcgttggtgattcgttgggtagaaaccaatgggagtcgttgatatgtatgatctcttcatcagcaccgtccattaatactcacatcattcatgaagatcctctctctaccttcaagatccttgactacaacgtgaaggtatcattctatagagctccttatcttgtagacatcgacaaaattaacggaaagacaactcttaaactcgacgaaatctctgtggatgcatcgaatgcttggcgcacagccgacgttctattgttcaacactggtcactggtggagccacacaggttctttacgagggtgggagcagatggagacaggtgggagatattacggcgacatggataggttagtggcgttgagaaaaggactaggaacgtggtctagttgggtccttcgttatatcaattctcctctcactagagttttcttcctctcggtctcacccacacactacaacccaaatgagtggacttcaagatcaaaaacttcaacaataactcaaggaggtaaaagctgctacggacaaacgacaccgtttagtggaacaacgtatccaacaagttcatacgtgaaccagaagaaagtgatagacgacgtggttaaagagatgaagtctcatgtctcattgatggatataactatgctctctgctcttcgtgtcgacggtcatccttcgatatatagtggagatctcaacccttctttgaaaagaaatcctgaccgttcatctgattgtagccattggtgtcttccgggtcttcccgacacttggaaccaattgttttatgctgctttgttgtactga

SEQ ID NO: 329 - DNA, 735 bp, Arabidopsis thaliana
atggaaaaggaagataacggatcgaaacagagctcctctgcttctgttgtatcctcgagaagacgaagaagagtggttgagccagtggaagcgacgttacagagatgggaggaagaaggattggcgagagctcgtagggttcaagccaaaggttcgaagaaaggttgtatgagaggaaaaggtggaccagagaatcctgtttgtcggtttagaggtgttcgacaaagggtttgggggaaatgggttgctgagatacgtgaaccagtgagtcaccgtggtgcaaactctagtcgtagtaaacggctttggcttggcacgtttgctactgcagctgaagctgctttggcttacgacagagctgctagtgtcatgtacggaccctatgccaggttaaatttcccggaagatttgggtgggggaaggaagaaggacgaggaggcggaaagttcgggaggctattggttggaaactaacaaagccggtaatggcgtgattgaaacggaaggtggaaaagactatgtagtctacaatgaagacgctattgagcttggccatgacaagactcagaatcctatgactgataatgaaatagtgaacccagcagtgaaatcagaggaaggttacagctatgatcgattcaaattggataacggattgttgtataatgaacctcaaagctccagttatcaccagggaggtggattcgattcatattttgagtatttcagattctag

SEQ ID NO: 330 - DNA, 500 bp, Arabidopsis thaliana
atggcatcagcggatgaaaaggtggtggaagagaaggcttcggtgatttcaagcttgttggacaaagccaaaggtttctttgcggagaagctggcgaatattccgacgccggaagcaaccgtggacgacgttgatttcaaaggcgtgacacgtgatggagtagattatcacgccaaggtctccgtcaagaatccttactctcaatccatccctatctgccagatctcttacatcctcaagagtgccacaaggacgatcgcgtcaggcacgataccggacccgggttcgttggttgggagcggcacgacggttctggacgtaccggttaaggtggcttatagcatagcggttagtctgatgaaggatatgtgtacggactgggacattgactatcaactagacattgggctaaccttcgacattcctgttgttggtgatatcaccattcctgtctctactcagggagagatcaagctcccttcccttcgcgacttctttta

SEQ ID NO: 331 - DNA, 648 bp, Arabidopsis thaliana
atggaggtcaacaatgaaaccatgcaaaagtcaaagtttggaagaatctgtgtgttttgtggaagcagccaaggcaagaagagtagttaccaagatgctgctgtggatctaggcaacgaattggttttaaggaacattgatctagtctatggaggtggaagcataggtttgatgggtttggtttcgcaagctgttcatgatggtggtcgccatgttattggagttattcccaagacactcatgcctagagagttgaccggtgaaacagtaggagaagtaagagcagttgcagatatgcatcaaagaaaagcagagatggctagacactctgatgcttttattgctttaccaggtggatatggaacacttgaagagcttttggaggtcataacatgggctcagcttggaatacatgataaaccggtgggtttgctcaatgttgatggatactacaactctttgctctctttcattgataaagccgttgaagaaggcttcatcagtacaaacgcacgccagatcataatttctgcacctactgccaaggagcttgtaaagaagctggaggaatattcgccttgccatgaaagtgttgcgactaagctttgttgggagatagagcggattgactactcttctgaagactga

SEQ ID NO: 332 - skipped

SEQ ID NO: 333 - DNA, 645 bp, Arabidopsis thaliana
atggaagcagaagtagaagaggaagaagaagacatgttcgaagacgccgtgtgtaccacgcaagcaagagtcaacacgccattgtccgtaatcacagaggccttcgaagatctcgcggatctggtgaaaccgcaacgatctgatgagatcgatgaagacgaattaaggcttgatgatttctgcagtgcgtgtactcacgtctctgttctcttcaattgtcttggattcgctttcaaatttgcggaaatggagtacatcgccaaggttaaggatttggtggaagcgtcgaaaacgttcgaaacgttacacaacattcttgacctagacgtggagaaagaaacggttaaaacaccggggagccattcgcgtaacctaagacgtgtgagacaagatgactattcgttgaaagacgctgcgacaacggcttacacggaagtgtgtgcaccgttccatacgtgggccgttagaaccgcggtttacgccggaatgtatacacttccgacgagggatcaacttctcttacggctcaatgaaactgatcaatcggttgagaagaacatgaggaggtacatggaagcatcgcgacctatcatagaatatattgacaagctttacattgaaaggaatattaaactcgattggtaa

SEQ ID NO: 334 - DNA, 774 bp, Arabidopsis thaliana
atggttgagaatggggaagaagaagctagctcgatgcctcatggtgttactggagaagaatctattggatcgattccttttcaggtacttagttggagacctagggctatatattttccgaattttgcaactgcagaacaatgccaagctattattgagagagcaaaggttaatctgaaaccttctgctttggctctccggaaaggagaaactgctgagaacactaagggcactagaacaagctcaggaacttttatcagtgcttcagaagagagtactggtgctctggattttgttgaaaggaaaatcgcaagagctacgatgatcccaaggtcccatggagagtcattcaatattttacggtatgaacttggccaaaagtatgattcccactatgatgttttcaacccaacagaatatggaccacaatcaagccaaaggattgcctccttcctgttgtacttatctgatgttgaagaaggcggtgaaaccatgttcccatttgagaacggttctaatatgggcatcggatacgattacaagcaatgtattgggttgaaagtaaagcctcggaaaggagatggtcttcttttttattccgtgtttccaaatggaacgattgatcaggtaaacaaattcatgctaataggagctctttgctgtggttccaatgcttctgcagacttcgcttcacgggagctgcccggtgaccaaaggagagaaatgggtggcaaccaaatggatcagagaccaagaccaggaagaataagttag

SEQ ID NO: 335 - skipped

SEQ ID NO: 336 - DNA, 1662 bp, Arabidopsis thaliana
atggagctattcacaaaaggtaacaacgttaagttacgtagccacctagataagtttttagtcgccgacgatgaccaagaaaccatccgtcaaagccgtaaaggagatgcacggcgtgccgtttggacggtggagcccgtcgtcgataaacctaatctgataaggttaaagagcagccacggcacgtacttaacggcgagcaacaaaccgttattgttaggtatgaccggtgagaaagtgactcaaacggcgtcgtttaacaagctgatggattggcaaacgcagtgggaaccggagcgagatgggtttcaggtgaagctaaaatcttggtgcggtaagtggatgagggctaacggtggaacgccgccgtggagaaactctgttactcacgatgagcctcatacgtcaaagacaaagaactggttgatttgggatgttataactattgatggttctgatcttgaaaacatgtctgatggtgatgaaagctctgtttcttctccggtcgggtctgaattcggatcagaacccgggtcacctgtttctgccaggtctacgaagagtagtattagccggtttgcttctcttggtttatctacgtctccgagatggtcctcaaaaccgaagtcgacggcgagtagcttcaaccaaaaagaaacaccagtatctgtctcagcaatggaatttttccagaaagcaaaagctattcgaatgcgtaacagtcacaacaagtatctaacagcagacgacgatgaagaaaccgtaactcaaaaccgtaacggatctaccaaaaacgctcgatggaccgtcgaaccggttcgtgattctttccatgttattcgtcttaaaagctgttacggtaagtacttaaccgcttctaacgagcggttcttgctcggggctacggggaagaaagtgattcagttgaaactgagtcgggttgattcgtctgttgagtgggaaccgcttagagaagggtctaagattaagcttaggactagatctggtaactatttacgaggtaatggtggtcttcctccttggagaaactcggtcacacacgacgttcctcatttgtctgctactcaggattcgatttcttgggatgttgatgttgttgagatcttgactgattccgaattcaagacggagtctgcgaaagcgccgccaccgaagacgacgtctccaccgccgcatcggagaccgacgagttcgccgttgtcggctgagtctccaaggacttcgtcttctctttcagacagatccgattcagatgtgagtacttttcctaaattcctaaaacacctttggttttgtttaaaattacagttgtaccgttttccggttattgaaaattttgattttgattttgaccagtcggttgagtctccgcctaaatctgatggacgaaccatatattaccatgtcgctgacgaggaaggacacgtggaagatgaaacaaccgttggatatgctttcacgtttaaaggaaatagcgtggcggagctgactcagacattgcgagaagaaacgtgcatggaagacgctgtggtgtgtactcgtagtcctttaaacggcaagctgtttcctcttcgtttgcaacttcctcctaacaacggaacattgcatgtcattttactaccctccagcgcgagcctctag

SEQ ID NO: 337 - DNA, 1340 bp, Arabidopsis thaliana
atgacttcacagtgggatgatcatccggctattatggctgttggtgttgttgatggaacctcagaaactattttccaaacgcttctttctcttggaccctcaagatcagaatgggatttctgtttttatcaaggcagtgtggtcgaacatcttgatggtcacactgatataatccacaaacagctatacagcgattggttaccttgggggatgaagagaagagatttttcgctacggcgttactggagaagggaagacgatggcacatatggtggcggttatgtgatttctcccatagacaacggaaaacaatcagttgtgaagcacatgcttgctgttgattggaagtcctggagatcttatgtgaagccgtccttagctagatctattaccgtgaaaatgcttggaagaatttctggggagttgtcaagaagtgcaagattgactcagaacgaagatggtgtgtttggtgattcttccctgagggaaaacgaaatgtttaaggacactgcaaatgaagagagagacaaatttccctcagagcgctctagccttgtagacttggatgagtttttcgacgttccagaaccatcagataatgacaatttggatgacagctggacctcagattttgatttggatacatgctgtcagagcagcccacatgctacctgcaacccgccttgctgctatggaaccacgcttccaactgatcctagttgtgatttgccttgtagttggacaacaacggacccatctacttttctcattcgaggaaaaacttatcttgatgaccagaagaaggtcaaggcaaagggtacactgatggaaatggtagctgcagactggctaaaatctgacaagcgggaagatgatttggggtcccgtccaggaggcatagttcaggttcctggatcaacaacgtacagccttgtgctttattacatgatgagcactcctattgaagagcatcctttgctagttagctttgttaatggtgatgacgcatataggaattcaaggttcaagctcattccctacatatccaagggctcttggatagttaagcaaagtgtgggaaagaaagcatgccttattggtcaagccctggagatcaactacttcaggggaaagaactatattgagctgggcgttgatattgggtcatcaactgttgcaagaggagttgtgagtcttgttcttggttacctcaacaaactcgtgattgaaatggccttcttaatacaggcgaataccgaagaggagctcccagaatatcttcttggaacatgtcggtttaaccatctcgacgcttccaaagcaatttcaattattccatg

SEQ ID NO: 338 - DNA, 489 bp, Arabidopsis thaliana
atggcgacgagcaagtgctactatccacggccaagccaccgtttcttcaccactgaccaacacgtcaccgccacttccgatttcgagctagacgaatgggatcttttcaataccggttcagattcctcttcaagtttcagctttagtgaccttacaatcacatccggtcgaaccggaactaaccggcaaattcacggtggttctgactccggtaaagctgcgtcttctctaccggttaacgtaccggactggtctaagattcttggagacgagagtcgacgacagaggaagatttcgaatgaggaagaagttgacggagatgaaattttatgcggcgaaggtacacggcgagttccaccgcatgaattgcttgcgaaccggaggatggcttcgttttcggttcatgaaggtgctgggaggactttgaaaggaagagatctgagtagggtgcgaaatactatttttaaaattagagggatcgaagattaa

SEQ ID NO: 339 - DNA, 2930 bp, Arabidopsis thaliana
atgcagggagacgttttggctgttcatcgagatgatatattaggatacccgaagaagaccgatgttgaagattttagggatggagatgaaaatggatggacaacttcgagtaggaggaatacgttggacatggttaaggaaggtatgttgttgaatgcagaggagttgactacatcttgcgaggagaaggtatcgataagtagagacgaattcggtaccttgaggagtgaagcacagattatggtggaaagagatggtgtgaggagtcctgtaactagtaagtgtaaaacaggtgatgaacaaattacatcttggaaaaatgaaaatggacatgagtcttttaagctgtatgaacaaggtgtgttggagagagatgaaaaggtactcgattttgtgtcaagggataatgaagaatctgcttcaggttcaccagagagggatgacattactcttagtaaagagattaaagaactggatacacaagtggtaaatggtcatctgaaggtaggtggaaccgaagaagatacagcagcatgtgatagatgtgaaaatagggatgagaacagattgttggaaaagaacagtgaagataatgaactgcagagtccaagatgcgagacacaagttaataatacaagtattagaaagatggaaatgagagaagttataggagagcaagactcttcgccatgtactgcggatgcagttaaagtagctggagagacatatcaaaacgtatacttcaatggaccagtcttaccgcagtcacctacacaaggacataggcgcacccaaagtgagatagggactcctggacacagacgcacaaacagtttccagagattgaaaacacagatgcaaaaggcttggcgtggtgtcagcaatctgcgtgaggataaccggcccactttcaatcctgaggtcttagcaaaccaaaaaagacagtggtaccagctccactcttcaaaagctctggatcaaacaaaattgaaggagccagcgtcactgtttgaacattttatcatcgtggggcttcatccggaaacgaatttgaggccagtggaagaggctttccgtagaagaaagaaatgggagatggagatgtcaagattgagttgctttctttcttctctttatcaacttttcttccatgcacagattctttttaaataccctcccggaaagaaggtagcaatgcgtccaaaggatctagcaactttctgctttcctggtggtgtcaaggcacgacttttggagaggaccccatctctcagtgatctaaatgagcttgtgtatggacaggaacatttaggcactgatgattcgtcattcatattttcgttcaagtgtcagatatccactagtcatgtaaaatctaacacgaggcaaatcaaaattatctgtcaggtagcagatgatgcgacattgtatggtgtttgcttacatgtctcggagattgttcagagaccccctggtgtattaagcactgcgtcacccttgcattcatctggaggaggcagtcgttttttggtttctgcacctcgatgctactgcttgttgaccagagtccctttttttgaactacactttgagatgttaaacagtatgattgcacaagagcgtctaaaacgaataaccgaatttgttagtgagatgtctcttgctgctgcatgctatcttccatcaatatccaggaggaatgatcaaattgatagccgtgtttcatcacctcgtagcaaccctgatgattggatggcttctgcaatacctgttgatggagtcatggcactcactgccgcagctgcaggactgataacggatagtgacattgcgaattttgcagaacctcaatctccagatagtgttgtcaccagtgatacttcagatgttagccagatcaaggaaatagaaagagacggaagaaaagttttccattgttacgatgaaaattctcctgaagtatttgagaaccacttggatacccccgaaagaacgtcccagagctatgacaatggccacacttctccagaggttacatgttctgatcctaggacccaaccgatagagcgtaatgaaagctgtgagtctgtgttcagttcagctagaagtgtgttgtcagatgatgttgatgaattatcgaatagcgaaaatgattttggagatgatttaatactggaatgggctaaagaccacaacaatgattccttacaattagtttgcggctaccattcattggcaattccttcccgtggaagtgaagtagttttccaccccctggaacatttacaatcaatctcgtatacccgtcctccagtttcagctctaggattgtcagaagaatatatttgctcttctgattctaaagagataaatgcaaggttggcagctgctgaggaggccatgggtctctcaatgtggacaacggcaacagtttgtcgtattctctcacttgaaactggtgttttgtcagcaatagtactgtctcttgtaccaatgattcggccatttcagtggcagagtttattgcttccggttctgcctggaaggatgtttgatttcctcgaggcaccggttcccttccttgtaaaaatatgtaacatgccagcattgcctcagtgtagagaacttatggctcagttggctccaatccatgcaacattggctcatcagagctcgaacgctagaagacacccggtttataaatgcaatgaagtgcaagcagaagccgcgactaagttcttgagagtaatgagagattacatggagtctctttgctcagatttacactctcacaccataacaagtgttcaatccaatagcgacagggtttctctacttctaaaggacagttttatcgattcatttcctggtagagatcgacccttcattaaggtacaaaatcctaatcccaatcgtggcatcagtttttg

SEQ ID NO: 340 - DNA, 852 bp, Arabidopsis thaliana
atggacggtgaagcttttgaaatctcattacttgatggagaagaagacagatttggaggtactgtggtgaacttgatggaagtggaatccatgactattggtgattttgattcaaagcttgatgtttcacttaaggcttggaaggatcaggggaagaaggggatttggataaagctgcctagtgagctatctagtcttgttgatactgcaattaagaaagggtttacataccaccatgccgagaatgagtatgtgatgcttacattttggcttccagagccacctagcactcttccttgcaatgcttctcatcgtattgggatcggtgcttttgtcctaaacaagaacggagagatgcttgtggttcaggagaatagtggatatttcaaagataaaaatgtctggaaggtgcctaccggtactattaaagagggtgagagtatctgggctggagcagttagggaagtgaaagaagaaactgatattgatgcagagtttgtagaagtcttgtctttcatggaaagtcaccaagcagtgtggcaaagaaaaacggatatatttttcgtctgcgagttggaagcaagaacttttgaaatccagaaacaagattctgagatccatgctgctaagtggatgccggttgaggaatacgtaaaccaaccctatcacaacaaggaggggaacgagatgttcaagttaatagctaacatctgcttaaaaaggtcgcgggagaagtacacgggcttcgttcttactacgaattcagccaaaaagagcctttactgcagcgtcgatcacgccaacctcctgaaggaaacagctgaccaagcctccacctctctctctgactag

SEQ ID NO: 341 - DNA, 1053 bp, Arabidopsis thaliana
atgagttccaccgcggcatcttccaccgtcggaggaggcggatcgtctgagatttccggtgtcaaaaaaacctccaagcgaccaaaatattctaggtttactcagcaagagcttccagcgtgcaagccaattcttactccaagatgggtgatcttgacatttcttgtcgctggggttgtcttcattccccttggagtgatctgcttatttgcttctcagggagtagtcgagattgttgatcgatatgacacagactgtattccaacatcttctagaaacaacatggtcgcttacatacagggtgaaggagataagatctgtaagagaacaataacggtgacaaaagctatgaagcatcctgtctatgtatactaccaacttgagaatttctaccaaaaccatagacggtatgtgaaaagtcgaaacgatgcacaactaagaagtccaaaagaagagcatgatgtgaagacctgtgcacctgaggataatgtgggtggagaaccaattgtgccatgtggtcttgttgcttggagtttgttcaacgatacttatagcttttcaagaaatagccaacaacttcttgtgaataagaaaggtatctcatggaagagtgacagagaaaacaagtttgggaaaaatgtcttccctaaaaattttcagaaaggagcaccaataggcggtggaactcttaatatttctaaaccgttgagtgagcaagaagacctcatagtctggatgcgaaccgcggctttgccaacgtttaggaagctgtatgggaagattgagacagacctacacgcgggtgataccataacggtcttgttgcagaacaactacaacacttacagcttcaatgggcagaagaagctagtgctgtcaacaactagctggctcggcggaaggaatgatttcctcgggattgcttatctgactgtaggcagtatttgcttgttcttggctgttacatttgccgtattgtatctagttaagccaaggcaactcggagacccctcgtacctttcgtggaacagaagtgctggaggtttacagtaa

SEQ ID NO: 342 - DNA, 260 bp, Arabidopsis thaliana
atgggtatgaagtctccaaatattgctgcatttatgttaccactgcttcttatacttttcacgctttcctctcagcttaaagtcgtggaatctacaggccgcaaacttgcgtgggggttttcgggaacacctatcgtgtacacaccaccttcaaggtcatgtggaacttctccagcagtattcacttcgaagtggaggagaccccgaccatgcaggcttcctccaggcagttatattcctgcttctgaccaatctcctta

SEQ ID NO: 343 - DNA, 420 bp, Arabidopsis thaliana
atgagctcctcaattatgaaaacccttcaaattcgtaaaccaacttctctccctatctcttccaccaccacagatgagccagggcttctccgtcgtcgtctctcttctctttctctaaatctctcacgtaaccaaccttccaccgtctcaagatccaagtctgtctctgacatgggagagcaaggagggagctccgtgaaagaatggtgggaatggagttggtcatggattcttttaaagaagttaccaatctttttcacagatcttgaggttaacaagaacgaaaccaaatcatcattggggaatcaacaaagaggtagcttcattcacgtcttttttaagctccgatctgaaatccgccgtctcctccgtccttcctcagactctcttcctctctcttgcaaacatggacagcgatga

SEQ ID NO: 344 - DNA, 660 bp, Arabidopsis thaliana
atgctatggaaccttgctattactcagtttcaagctctcgtgtcaatcaattttgtttctttctatcattcgcagattggttttaacaatggtgtcccaatcgatgagaaattctttgttgagaacattgctggaaaacacaattctgaaattgctctacttctgttccctgatgatgtttcaagagggttaaaattctgtgatgaaaaggaagctctttaccgcaaaattgttgcagagaagataaagccacttgatgggcttataaaactgaccaaatggatcgaagatcgtggattgaaacgagctgcggtaacaaacgctccaaaagaaaacgcagagctcatgatatcgaaacttggtctgactgatttctttcaagcagtgattcttggctctgaatgtgaatttcccaaaccacaccctggaccttacttgaaggctcttgaagtgcttaacgtgtcaaaggagcacacgctagttttcgaagactcgatctctgggataaaagctggagttgcagctggaatgccagtgattggactgactacagggaatccagcaagcctgcttatgcaagcaaaacccgcttttctcatcgagaactatgcggatccaaaactgtgggctgtgttggaagaacttgataacaagtcttaa

SEQ ID NO: 345 - DNA, 1350 bp, Arabidopsis thaliana
atggagcataagagaggacatgtattagcagtgccgtacccaacgcaaggacacatcacaccattccgccaattctgcaaacgacttcacttcaaaggtctcaaaaccactctcgctctcaccactttcgtcttcaactccatcaatcctgacctatccggtccaatctccatagccaccatctccgatggctatgaccatgggggtttcgagacagctgactccatcgacgactacctcaaagactttaaaacttccggctcgaaaaccattgcagacatcatccaaaaacaccagactagtgataaccccatcacttgtatcgtctatgatgctttcctgccttgggcacttgacgttgctagagagtttggtttagttgcgactcctttctttacgcagccttgtgctgttaactatgtttattatctttcttacataaacaatggaagcttgcaacttcccattgaggaattgccttttcttgagctccaagatttgccttctttcttctctgtttctggctcttatcctgcttactttgagatggtgcttcaacagttcataaatttcgaaaaagctgatttcgttctcgttaatagcttccaagagttggaactgcatgagaatgaattgtggtcgaaagcttgtcctgtgttgacaattggtccaactattccatcaatttacttagaccaacgtatcaaatcagacaccggctatgatcttaatctctttgaatcgaaagatgattccttctgcattaactggctcgacacaaggccacaagggtcggtggtgtacgtagcattcggaagcatggctcagctgactaatgtgcagatggaggagcttgcttcagcagtaagcaacttcagcttcctgtgggtggtcagatcttcagaggaggaaaaactcccatcagggtttcttgagacagtgaataaagaaaagagcttggtcttgaaatggagtcctcagcttcaagttctgtcaaacaaagccatcggttgtttcttgactcactgtggctggaactcaaccatggaggctttgaccttcggggttcccatggtggcaatgccccaatggactgatcaaccgatgaacgcaaagtacatacaagatgtgtggaaggctggagttcgtgtgaagacagagaaggagagtgggattgccaagagagaggagattgagtttagcattaaggaagtgatggaaggagagaggagcaaagagatgaagaagaacgtgaagaaatggagagacttggctgtcaagtcactcaatgaaggaggttctacggatactaacattgatacatttgtatcaagggttcagagcaaatag

SEQ ID NO: 346 - DNA, 1143 bp, Arabidopsis thaliana
atggaggagatagaaggaacaaacagagcagctgttgagagttgtcatagagttcttaatcttttacatagatcacagcaacaagatcatgttggttttgaaaagaatttagtatctgaaactagagaagctgtgattaggttcaagagagttgggagtttgttaagcagtagtgttggtcatgctaggtttagaagagctaagaaacttcagagtcatgtctctcaaagtctcttacttgatccatgtcaacaaaggacaacagaagttccatcatcatcttctcagaaaacaccggtactccggtctggtttccaggaattgagcttgagacaaccttcagattcactcactttagggactcgctcttttagtttaaactcaaatgctaaagctcctctccttcagcttaatcagcagacaatgcctccttcgaattatcctactttgtttccagtacaacaacaacaacaacaacaacaacaacaacaacagcaggagcagcagcagcagcagcagcagcaacagcaacagtttcatgaacggttacaagctcaccatcttcatcagcaacagcagctacagaaacatcaagctgagcttatgcttaggaaatgcaatggtgggataagtttgagtttcgataactctagttgtactccaactatgtcatccactaggtcctttgtttcttcacttagcatagatggtagtgttgctaatatagagggaaagaactccttccattttggggttcctagttcaactgatcagaattcactacattctaagaggaaatgccccttgaaaggagatgaacatggaagcttaaaatgcgggagctctagccgatgccactgcgctaagaagaggaaacatcgggttaggagatcgattagagtaccggctataagtaacaaggttgcagatatccctcctgatgattattcatggcgaaaatatggtcagaagcccatcaagggctctccttatcccagaggatattacaaatgtagtagcatgagaggttgtccagcgaggaagcatgttgagagatgtttggaagatccggcaatgcttattgttacttatgaagcagagcataaccacccgaaattgccatctcaagctataacaacttaa

SEQ ID NO: 347 - DNA, 870 bp, Arabidopsis thaliana
atggctaatcgttatgatccaaatcctttcgctgaggaagaagaagtcaatcctttcgctaatgctagaggagttccacctgcgtcgaattcgagactttcgcctttgcctccagagcctgttggtttcgattatggtcgaaccgtagacattcctcttgacagagctggtacacaggatttgaagaagaaagagaaggaactccaagccaaagaagctgagctaaaacgacgagagcaggacctcaaacggaaagaagatgctgctgcacgagctggaatcgttattgaagtgaaaaactggccgcctttcttcccacttatccaccatgacatcgcaaacgaaattccggttcatctccaaagactacagtatgttacctttgcaacgtatttggggttggttctttgtcttttctggaatatcatcgccgttactacagcttggatcaaaggagaaggagtgacgatatggcttcttgccttaatttacttcatagcgggtgttccaggaggctatgtgttatggtatcgaccactctaccgtgccttcagaactgatagtgcattgagctttggatggtttttcttgttctatatgctccacattgctttctgcgtctttgctgcagttgctccacctgtcgtcttcaaaggaaaatctcttgctgggatcttacctgcaatagatgtcttaagtggtcaagcaattgttgggatattctacttcattgggtttgcatttttctgcctcgaatcagtggttagcatctgggttattcagcaagtgtatatgtacttccgaggcagcgggaaacaagatcaaatgagacgggaagcagcgagaggagccttgagagccgctgtttga

SEQ ID NO: 348 - DNA, 645 bp, Arabidopsis thaliana
atggaagaagatttgttgggcatttgtgggtttgattcgtcgaagaaatatcgattagaagaacttgccaagtatcagtcgggttcatgtattgagtttgaagatgatgatgaaatggcagtggattatccatgcccgttttgctcagatgattatgatttagttgaattgtgtcaccatatcgatgaggagcatcaactagacgccaacaatgggatatgtccggtttgtagcagacgagtgaagatgcatatggttgatcacattaccactcagcatagagatgtcttcaagagactttacaaggatgagtcatattcagcattttctccagggactaggaaatacttacagtctctaatcgatgagccgttgtctactaatcatacatctaaaagtgttctggacccattattatcatttatatacaatccgccgtcaccaaagaagtccaagcttgtacaacctgattcatctagtgaagcaagcatggaagacaatagcttaataagggattcaacagaaaaagactgggaatcgccgtctcccttgtcagatacagagctactagagaaggcaaagaagagagagtttgtacaaggtttaatatcatcagccatatttgatcacatttacaacttctaa

SEQ ID NO: 349 - skipped

SEQ ID NO: 350 - DNA, 1074 bp, Arabidopsis thaliana
atgggaataatggaggcagagaggaaaacaacaggctgggctgccagagacccatctgggatcctctctccttacacttacactcttagagagactggaccagaggatgtgaacataagaatcatttgctgtggaatctgccacaccgatcttcatcaaactaaaaatgatcttggcatgtctaattaccccatggttcctgggcatgaagtggtaggggaagtagtggaggtgggatcagatgtgagcaagttcaccgtaggggacatagttggagttggttgcctcgttggatgttgcggaggttgtagcccctgcgagagagatctggaacagtattgtccaaagaagatttggagctacaatgatgtttacatcaatggtcaacctacacaaggcggcttcgctaaagccaccgtcgttcaccaaaagtttgtggtcaagattccagaaggaatggcggttgagcaggctgcgccgctactgtgcgctggtgtgactgtgtacagtccactgagccactttggtctgaaacaaccaggcctaagaggaggtatactagggttaggtggagtcggtcacatgggtgtgaaaatagccaaagcaatgggtcaccatgtgactgtcataagctcatcaaacaagaagagagaagaggcattgcaagatcttggagctgatgattacgtgatcggatccgaccaagcgaagatgagcgaattggctgattcgttggattacgtaattgacacggtgcctgttcatcatgcacttgagccatatttgtctctgcttaagcttgatggtaaactcattctcatgggagttatcaacaatccattacagtttctcactcctctgcttatgcttgggaggaaagtgataacggggagcttcatagggagcatgaaggagacagaggagatgcttgagttctgtaaagaaaagggtttgagttcgattatcgaagttgtgaagatggattatgttaacactgcgtttgagagactcgagaagaacgatgtgcgttataggttcgtcgttgatgtcgaaggaagcaatctcgacgcttga

SEQ ID NO: 351 - DNA, 710 bp, Arabidopsis thaliana
atggcaggagaggcagaggctttggccacgacggcaccgttagctccggtcaccagtcagcgaaaagtacggaacgatttggaggaaacattaccaaaaccatacatggcaagagcattagcagctccagatacagagcatccgaatggaacagaaggtcacgatagcaaaggaatgagtgttatgcaacaacatgttgctttcttcgaccaaaacgacgatggaatcgtctatccttgggagacttataagggatttcgtgaccttggtttcaacccaatttcctctatcttttggaccttactcataaacttagcgttcagctacgttacacttccgagttgggtgccatcaccattattgccggtttatatcgacaacatacacaaagccaagcatgggagtgattcgagcacctatgacaccgaaggaaggtatgtcccagttaacctcgagaacatatttagcaaatacgcgctaacggttaaagataagttatcatttaaagaggtttggaatgtaaccgagggaaatcgaatggcaatcgatccttttggatggctttcaaacaaagttgaatggatactactctatattcttgctaaggacgaagatggtttcctatctaaagaagctgtgagaggttgctttgatggaagtttatttgaacaaattgccaaagagagggccaattctcgcaaacaagacta

SEQ ID NO: 352 - DNA, 1575 bp, Arabidopsis thaliana
atggagaatgagacagaattgagggttgttcatcaggaagaacaacaacgcgaagaaggagaagatgaatcacagccacaaaacccaccaccagccttacgacgtcgtttcgtgatatatctttacgttggatattttcttgcaagatggagtgccagaacatgggaattctctgttgcattgtatatgatccacttgtggccaaactctctgcttctcgctgccatttatggtgctatagaatctggttctactgcaatctttggtcccattgtggggcaatgggtcgagggaatggactacgttaaagttcttagactctggctcctgttccagaacctctcctacactattgctggtggtgcagtcatcaagttgttgctagtttctgatcttaagtcccggaatctcccggtgtttgcaatcttgattgtgttaacgaatcttgctggcgccattggagttctttcgactcttgctggcaccattctgatcgaacgagactgggctgtggttatgtctgaaggtcatccaccagcagtattgacaaaaatgaattctgtcattagaggcattgatttgagctccaagctactgtctccagtcattactggtctgatcatcagttttgtctcacttaaggcttcagcgatcacttttgcagcttgggctactataacagcttgggttgaatattggctcttcatttctgtgtatagcggtgttcctgcaataacacgaagcaatgagagacggatcttgcgttcccggacaaagcaagtagaaggaagagatgcacctgtttctgtttctattgttccgggaacagaggagggttatactggaaaccctccgtctagaaccggaatcttggtgatactggatagaatgtccaagtcctcttttgttggcgcatggagaatttatttcaatcaagaagttgtcctccccggggtttctctagctctcttgttcttcaccgtcctcagctttggaacattgatgacggctacattgcagtgggaaggtatacctacatatatcatcggtataggcaggggaataagtgcaacggttggactagcggctacattagtgtatccgctaatgcaatcgcgtctctcaactctgagaaccggcctctggtccttctggtctcagtggagctgccttttggtctgcgttggatcgatttgggttaaaaaggataaaatagcatcttacatgctaatggctggagttgctgcttcaaggcttggcttgtggatgtttgatcttgccgtcatccaacaaatgcaggatcttgtttcagaatccgaccgttgtgtggttggaggtgttcagaactcactgcaatcggctcttgacttgatggcatatcttttaggtatcattgtctccaatccaaaggatttttggatattgacgttgatctcattctccacagtatcgttggcaggaatgctctatacaattcacctctaccgcataagaaaccatatttttcatcttgagaagattcctttgttgaacaaatgtatattcaagttgctcccttctcgtggaaacgtgtaa

SEQ ID NO: 353 - DNA, 1056 bp, Arabidopsis thaliana
atggatagcttgagagatgttaagcctatcaaactcatattttctattttctgtctagttattatactatccgcctgtaattcaacggcagagctaccgcggttcgtccaaccaccagaacccgatggttcactcagttttctcgttgtcggcgactggggaagaagaggttcttataatcagtcccaagtagctcttcagatgggaaaaatagggaaggacttaaatattgatttcctcatttcgactggagataacttttatgatgatggaataatcagtccatatgattctcaatttcaagattcgtttaccaatatttacacagcaactagcttacaaaaaccatggtacaatgtattaggaaatcatgattatagaggtaacgtctatgcgcaactcagccccatactcagggatttggactgccgttggatttgtttaagatcttatgttgttaacgccgagattgtcgatattttcttcgtggatacaacaccgttcgaccatgtatatgattggagaggcgtattaccgagaaataaataccttaacagtctcttaacggtaactttttttttcttactctaccataagctagtcatatcatcaaattcattgaaaattagaataattaaattggatgtggatgtggcattgcaagaatcaatggctaaatggaaaatagtggtaggccatcacacgatcaaaagtgcaggtcaccacggaaataccatagagcttgagaaacaacttttacctatcctcgaggctaatgaagtggatctctatataaacgggcatgatcattgcttggagcacataagcagcatcaacagtggaatacaatttatgacaagtggaggtggctccaaggcgtggaaaggagatgtgaatgattggaacccacaagagatgaggttttactatgatggacaaggattcatgtcggtttacacatccgaagctgaactacgcgtcgttttctatgatggtcttggtcacgttttgcatcgatggagcactcttaagaatggggtttattccgatatctaa

SEQ ID NO: 354 - DNA, 1089 bp, Arabidopsis thaliana
atgaaggaggaacaaacaagatctctgtttggaatctctttgtctgataaaccaacttggcaacagtttctcatttgcacttctggtttcttttttggttatctcgttaacggtgtttgcgaggaatatgtttataatcgtcttcaatttagctttgggtggtatttcacgtttatacaaggatttgtctacttgtttctaatctaccttcaaggctttaccacaaagcatatagttaatccgatgagaacttatgtcaaactctctgctgttctcatgggttcacatggtttaaccaaaggatctttggcttatctcaattatccagctcaaatcatgttcaaatccaccaaggtgttaccggtgatgataatgggagcgtttatacccggtcttagaagaaaatacccagtccatgaatacatttcagcgttcttgcttgttcttggtttgatcctattcacattagccgatgcgcaaatgtctccaaatttcagtatgattgggattatgatgataaccggtgcattgatcatggatgctttcttgggtaatctgcaagaagctatcttcacaatgaatcctgagacaactcaggcaaggaaactaaagaaaacacgattaactcttgttatgtgtgttgtgcagatggagatgcttttctgctcaacagttgttggattaccgttcttgttcgttcccatggttttaaccggagaggtttttcgtgcgtggactgcgtgtgcacaacatccgtatgtgtatggagtgcttgtatttgaagccatggccacatttatcggtcaagtctccgttctctcgcttattgctctctttggagccgccacaactgccttgataacaacggctaggaaaggggttacattgttgctgtcgtatttgatattcacaaagccgttaacggaacagcacggatcaggcttgctgttgatagcaatggggattgtattgaagatggttccaatggatagtaaagctccggccaagattccggcgagaccagcggttaggatcgcaggaggcgatggtgatagagaagaggacgaagaaaggaagtcattggtttga

SEQ ID NO: 355 - DNA, 435 bp, Arabidopsis thaliana
atgccgggaaattctcaccgccggggatccgacgtcatattcaccgtgatgatgatcgccttgctgacgtgtccaacactcatcaacggttcatcatcatcagatgcttctttagaagcaagaaagctcgatgaggtcgatcccataaagtgctctccaagctgcatccaaaaccctcctccgccatctcctccaccaccgtctccgccaccacctgcatgtcctccacccccggctcttccaccgcctccgcctaagaaagtcagttcctactgcccaccgcctccgccggctaatttcttgtacatcacgggtccgccgggaaatctctaccccgttgatgagcaattcggagcggccgccggaaaaagttttatggtggtgaagctctccggtctaatcgcgtttggaattatggcgttcctgattctttga

SEQ ID NO: 356 - DNA, 663 bp, Arabidopsis thaliana
atggcttcctcagcaccaccagtcctcccaatctccaatccccaaaccgttccatccgccgctccttcctccgtcgaatctcaaccaccgatcgctactccagctttccgcaatttcatcaatcagatcaccgaaaccgttaaaaacggtctctctaagcgtcgtccttgggctgagctcgcggatcgttccgcattatccaaacctgagtcgatctccgacgctgctgttcgtatccgcaagaattactcgtatttcaaggttaattacctcaccgtcgctacagcgatcgtcggattctctctcgtcactcatcctttctctctcgtcttcctcctctgtctcctcgcgtcgtggctcttcctctacttgttccgtcccacggatcagccgatcgttctattcggtcgtacattctccgatcgtgagacgttagggtgtttgattttgttcagtatctttgtgatcttcctcaccgatgttggatctgttctggtttcggctatgatgattggtgttgcgttgatctgtgctcatggtgcttttagagctccggaagatcttttccttgatgagcaagagcctgctgctaccggattcctctctttcctcggtggtgccgcctcttcagccgcgcctgctgttatcgccgctcgcgtgtaa

SEQ ID NO: 357 - DNA, 549 bp, Arabidopsis thaliana
atggaaaccactgcttttaacacaacatcacgaattggaaactggtcatcggctatttctccacctctacaaacatgtggatctttcaagtgccaattaccaacacgaagaggtgttattgtagctgatcttcgaaactcaaacttccgatggaggaaagcaacgacaacaagcagaggaaatgttgcagcagaggcagttaaaattcctacgtcagtaccagtaagagtggcgcgtgagctagctcaagcaggataccgctatctcgacgtgaggacaccagacgaattcagcatcggacatccgactagagccatcaacgtaccttacatgtacagagtcggatcaggaatggttaagaacccgagttttctaagacaggtctcgtcccacttcaggaaacacgatgaaatcataatcggttgtgagagcggtcaaatgtcatttatggcctcaactgatcttctcactgctggcttcacggcgatcacagacattgctggaggatacgtcgcttggacagagaatgagctgccggtagaagagtga

SEQ ID NO: 358 - DNA, 489 bp, Arabidopsis thaliana
atggctccaattactgtcggcgatgttgtaccagacggaactatctctttcttcgatgaaaatgatcagcttcagaccgtctccgttcactctatcgccgccggtaaaaaagtcattctctttggtgttcctggtgctttcactcccacatgcagtatgagccatgtgcctggattcattgggaaagcagaggagctgaagtcaaagggtattgatgagatcatttgctttagtgtgaatgatccatttgtgatgaaggcatggggaaaaacatatccagagaacaagcatgtgaagtttgtagcagatgggtctggagaatacacgcatcttcttggacttgagcttgaccttaaggacaagggtcttggtattaggtcaaggagattcgctttgttgcttgataaccttaaggtgactgtagccaatgttgaatctggtggcgagttcacggtttccagcgcagaggatattctcaaggctctttaa

SEQ ID NO: 359 - DNA, 639 bp, Arabidopsis thaliana
atggcaggtatcaaagttttcggacacccagcttccattgccaccaggagagtcctcatcgccctccacgagaaaaacctcgactttgagctcgttcatgtcgaactcaaagacggtgagcacaagaaggagcctttcctctcccgcaacccttttggtcaggttccagcctttgaagatggagacctcaagctcttcgaatcaagagcgattactcagtacatagctcaccgatatgaaaaccaaggaaccaaccttctccaaaccgactccaagaacatatctcagtacgcaatcatggccattggaatgcaagtagaagatcaccagttcgacccagtggcttcaaagcttgcttttgaacaaatattcaagtccatctacggcttgaccacagacgaagccgttgttgcagaagaggaggctaagttagccaaggtccttgatgtctacgaggctaggctcaaggagttcaagtatttggctggtgaaactttcactttgactgatcttcaccacattcccgcgattcaatacctgctcggaactcccaccaagaagctcttcaccgagcgtccacgtgtcaatgagtgggtggctgaaatcaccaagaggccagcttccgagaaggttcagtga

SEQ ID NO: 360 - DNA, 1509 bp, Arabidopsis thaliana
atggtgctctcccacgccgtatcggagtcggacgtctccgtccactccacattcgcatcacgttacgtccgtacttcacttcctaggttcaagatgccggaaaactcgattcctaaggaagcggcgtatcagatcatcaacgacgagctgatgcttgacgggaatccacggttgaacttagcctcctttgtgacgacatggatggagcctgagtgtgataaactcatcatgtcctccatcaacaagaactatgttgacatggacgagtaccccgtcaccaccgaacttcagaaccgatgtgtgaacatgattgcacatctattcaatgcaccgttagaagaggcggagaccgccgtcggagtaggaaccgttggatcatcggaggccataatgttggccggtttggccttcaagcgtaaatggcagaacaagcgcaaagctgaaggcaaacccgtcgataaacccaacattgtcaccggagccaatgttcaagtgtgttgggagaaattcgctaggtactttgaggttgaacttaaggaagtgaaattgagtgaaggatactatgtgatggaccctcaacaagctgttgatatggttgatgagaacaccatttgtgttgcggccattcttggttccactcttaatggagaattcgaagatgttaaactcttgaacgatctcttggtcgaaaagaacaaagaaaccggatgggatacaccaatccacgtggatgcggcaagtggaggattcattgcaccgtttttgtatccggaattggaatgggactttagacttcccttggtgaagagtatcaatgtgagtggtcacaagtatggacttgtgtacgcagggattggttgggtgatctggagaaacaaagaggatttgcctgaggaactcatcttccatatcaattatcttggtgctgaccaacccacctttactctcaatttctccaaaggttcaagtcaagtcattgctcaatactaccaacttatccgattgggccacgagggttacagaaatgtgatggagaattgcagagagaatatgatcgtcctaagggaaggacttgagaagacagaaaggttcaacatcgtctcaaaggacgagggagtgccacttgtcgctttctccttgaaagatagcagctgtcacactgagttcgaaatctccgacatgcttcgcaggtatggatggatagtgccggcctacacaatgcctccaaatgcacaacacatcactgttcttcgtgtggttatcagagaagatttctcgagaacactcgctgagagacttgtgatcgatatagagaaagtgatgcgtgagctcgatgagcttccttcgagagtgattcacaaaatatcacttggacaagagaagagtgaatctaacagcgataacttgatggtcacggtgaagaagagcgatatcgacaagcagagagatatcatcactggctggaagaagtttgtcgccgacaggaagaagacgagtggtatctgctaa

SEQ ID NO: 361 - skipped

SEQ ID NO: 362 - DNA, 1500 bp, Arabidopsis thaliana
atggcaacccgtcttctccgaacaaactttatccggcgatcttaccgtttacccgcttttagcccggtgggtcctcccaccgtgactgtttccaccgccgtcgtcccggagattctctcctttggacaacaagcaacggaaccacctcttcaacacccaaaacccaccgagcaatctcacgatggtctcgatctctccgatcaagcccgtcttttctcctctatcccaacctctgatctcctccgttccaccgccgtgttgcatgcggcggcgataggtcctatggtcgacctagggacgtgggtcatgagctctaaacttatggacgcttcggtgacgcgtggcatggttttagggcttgtgaaaagtacgttttatgaccatttttgcgccggtgaagatgccgacgcagccgctgagcgcgtgagaagcgtttatgaagctactggtcttaaagggatgcttgtctatggcgtcgaacacgccgatgacgctgtatcttgtgatgataacatgcaacaattcattcgaaccattgaagctgccaaatctttaccaacatctcactttagctcagtggttgtgaagataactgccatttgtccaattagtcttctgaaacgagtgagcgatctgctgcggtgggaatacaaaagtccgaacttcaaactctcatggaagctcaaatcgtttccggttttctccgaatcgagtcctctctaccacacaaactcagaaccggaaccgttaaccgcggaagaagaaagggagctcgaagcagctcatggaaggattcaagaaatctgtaggaaatgccaagagtccaatgtaccattgttgattgatgcggaagacacaatcctccaacccgcgatcgattacatggcttattcatcggcgatcatgttcaatgctgacaaagaccgaccaatcgtttacaacacgattcaggcgtacttgagagacgccggtgagagactgcatttggcagtacaaaatgctgagaaagagaatgttcctatggggttcaagttggtgagaggggcttacatgtctagcgaagctagcttggcggattccctgggttgcaagtcgccagtccacgacacaattcaggatactcactcttgttacaatgattgtatgacattcctgatggagaaagcatcaaacggttctggtttcggtgtcgttctcgcaacacataacgctgattcggggagacttgcgtcgaggaaagcgagtgacctcgggatcgataaacagaacgggaagatagagtttgcacagctatatggtatgtcagatgcattgtccttcgggttaaagagagcagggttcaatgttagcaagtacatgccgtttggacccgtcgcaaccgctataccgtatcttctccgacgcgcttatgagaaccggggaatgatgcccaccggagctcatgaccgtcaactcatgaggatggaacttaagaggagattaatcgccgggattgcgtaa

SEQ ID NO: 363 - DNA, 813 bp, Arabidopsis thaliana
atgaaaatcctctcactttcactactcttgctcttggccgctacggtctcccacgtccagtcttcggcatccgttccagggctcatcgaactcctcgaatcgaacaccatctttgggaacgaagccgaactcttagagaaagagggactgtccatcaactaccccaactgcagaagctggcaccttggtgttgagacctctaacatcataaacttcgacacggtgcccgcaaattgcaaagcctatgttgaagactacttgatcacttccaaacagtaccaatacgactccaaaactgtaaacaaagaggcatatttttacgccaaaggacttgccctaaagaacgataccgtcaatgtttggatctttgacctagacgacactctcctctctagtattccctactacgctaaatatggatatgggaccgagaacacagccccgggggcgtactggtcgtggttagagtccggagaatcaactccaggactcccggagaccttgcatctatacgaaaacctcttggaactcgggattgaacccatcataatctctgacagatggaaaaaattgtcagaagtcactgtcgagaatctcaaggctgttggtgtaacaaaatggaagcatctcatactcaagccaaacggatcgaagttgacgcaagtggtgtacaagtcaaaggttaggaatagccttgtgaagaaagggtacaacatcgttgggaatattggagaccaatgggctgatttggttgaggatactcctggaagggtttttaagctcccaaatccactctactacgtaccttcttaa

SEQ ID NO: 364 - DNA, 240 bp, Arabidopsis thaliana
atgtcggacaaaggtcgtcccttgccaaaatttggtgaatgggatgtgaatgatccagcatcagcagaaggttttacagtgatattcaacaaagctagggatgagaaaaagaccggtggcaaaccgggatcacccggtaaatccagtgagggtcatgttaaatctggaggaggagatcctagtaaacctcagcctaaaaaatggctctgctgcatgcaagctccagctgtggactcttga

SEQ ID NO: 365 - DNA, 906 bp, Arabidopsis thaliana
atggataagccaagcttcgtaatccaatccaaagaagcagaatccgccgcgaaacaactcggcgtttccgtcattcagctcctcccgtcgctagtcaaaccagcacaatcctacgctcgaactccgatttcgaaattcaacgtcgcagtcgtcggactcggatcatcaggtcggatcttcttaggcgtcaatgtcgaattcccaaatctccctctccaccactcaatccacgccgaacagttcctcgtcaccaatctcacactcaacggtgaacgtcatctcaatttcttcgccgtctccgccgcaccatgtggccattgccgtcaattcctccaagaaattcgcgacgcacctgaaatcaaaatccttatcaccgatccaaacaactccgccgattccgattccgccgccgattcagacggattcttacgtctcggaagcttcttgccacacagattcggtcccgacgatcttctcgggaaagatcatcctcttcttctcgaatctcacgataaccatctcaaaatctcagatctggattcgatttgtaacggaaacaccgattcatccgccgatttgaaacaaacggctttagcggcggcgaatagatcgtacgcgccgtatagtttatgtccatcgggagtttcgctggtggattgtgacgggaaagtgtacagaggttggtatatggaatcggcggcgtataatcctagtatgggaccagtacaggcggcgttggttgattatgtggctaatggtggtggaggaggatacgagaggatcgtcggagcggttctggtggagaaagaagatgcggtggtgaggcaagagcacacggcgaggttgttattagagactatatcgccgaaatgcgaattcaaagtgtttcattgctatgaagcttag

SEQ ID NO: 366 - DNA, 609 bp, Arabidopsis thaliana
atggcaatgaatggtttgtccaagatggctgtagccgccgcaactgctcttctcctagttctgaccattgtcccgggcgcagtagctgtgacttacactattgaatggaccactggtgtggactactcaggttgggctaccggaaagactttcagggttggtgacattctagagttcaagtatggttcttcccacacggtggatgtggttgacaaagccggatatgatggctgcgacgcctcctcctcgactgagaaccattccgatggagacaccaaaatcgatcttaagactgtaggaataaactatttcatctgttctacacctggtcactgcagaaccaatggcggcatgaagctagccgttaatgtcgtagccggttctgccggacctccggccactcccacgccaccttcttcaactccgggaactcctaccacaccggaatcacctccgtctggcggatcacccacacccaccacacccacacctggtgcaggttcaacttctcctcctcctccaccaaaggcaagtggtgcgtctaagggagtgatgagttacgttttggtgggagtctcgatggttttgggttatggtttgtggatgtaa

SEQ ID NO: 367 - DNA, 3186 bp, Arabidopsis thaliana
atggggaaaggatcagaagaccttgtgaagaaggaaagcttaaattctacacctgtaaattcggatacgtttcctgcttgggctaaagatgtcgcggaatgtgaagaacatttcgttgttagtcgtgagaaaggtttgagtagtgatgaggtgttgaagcggcatcagatctatggtttgaatgagttagagaagcctgagggtacttctatttttaagctgattttggagcagtttaatgatacattggttcgtattcttttggcggctgctgttatttcctttgtcttggccttctttgatggcgacgaaggtggtgagatgggtatcactgcatttgttgagccgcttgttatttttctcatcttaattgttaatgccattgttggcatctggcaagaaactaatgctgagaaggcgttggaagctttgaaagagattcagtctcagcaagcaactgtcatgcgtgatgggactaaggtttccagtttgcctgcaaaggagcttgttcctggtgatattgtggaactgagggttggtgataaggtacctgctgatatgcgtgtggttgctttgatcagttcaactttgagagtcgagcaggggtccttaacaggagagagtgaggcagtgagcaaaaccaccaagcacgtggatgagaatgctgatattcaaggaaagaaatgcatggtgtttgcaggaaccactgtcgtgaatgggaactgcatatgtttagttacagatactgggatgaatactgagattggaagggttcactcacagatccaggaagctgcacaacacgaggaagatacccctctgaagaaaaaacttaacgagtttggggaagttctgactatgatcattgggttaatttgtgcgttagtgtggctcatcaatgtcaaatactttctgtcatgggagtatgttgatggctggcccagaaactttaagttctccttcgagaagtgcacatattactttgagattgctgttgcactggcggttgctgcaattcctgaaggtctgccagcagttattaccacatgtttggctcttggcacacggaagatggctcagaagaatgctctggttaggaagctacccagtgtggagactcttggatgcaccaccgtgatatgctctgacaaaactggaactctcacaaccaatcagatggctgtttctaagctcgttgctatgggttcgaggatcggtactcttcgatctttcaatgttgaggggacctcgtttgatcctcgagatggaaagattgaagattggccaatgggtcggatggatgcaaatcttcagatgattgcaaaaattgctgccatttgcaacgatgctaatgtcgagcaatctgatcagcaatttgtgtctaggggcatgcctactgaggcagctttgaaggttttggttgagaaaatgggatttcccgaaggattgaatgaagcttcgtccgatggcgatgtcttacgttgttgtcggctatggagtgaactagaacaacggattgccacccttgagtttgaccgtgaccggaaatcaatgggagttatggtggattccagctcaggaaacaaactgctactggtcaagggtgcggtagaaaatgtattggaaaggagtacacatattcagctacttgatggttcaaaacgagagcttgaccaatactcaagggatctgattttacaaagcctacgtgatatgtccttgagtgcattaagatgtctcggatttgcttactcagatgttccatcagattttgccacttatgatggcagtgaagaccatcctgctcaccagcaacttctcaacccatccaattattcatcaattgagtccaatctaatattcgttggatttgttggtttaagggatcctccaaggaaagaggtgcgtcaagccattgcagattgcagaacagcaggtattcgggtcatggtcattactggagacaacaagagcacagcggaagcgatctgccgtgaaattggcgtatttgaagcagatgaagatatctcctcaagaagcttgacgggaatagaatttatggatgttcaagatcagaagaatcatctacgacagactggagggctcctgttctcaagggctgaaccaaaacacaaacaagagattgtcaggttactgaaagaagatggagaagtggttgccatgactggagacggagtcaatgatgctcctgctctgaagttggctgatattggtgtggctatgggcatttccggcacagaggtagcaaaggaggcatctgacatggttttggcagatgataatttcagcaccattgttgcagctgtaggtgaaggcaggtccatctataacaacatgaaggccttcatcaggtacatgatctcttccaacatcggcgaggttgcatcgatatttttgacagctgctcttggaatcccagaaggcatgatcccggttcagcttctgtgggtaaatctcgtaacagacggtcctccagctactgctttggggttcaacccccctgacaaagatattatgaaaaagcctcctcgtaggagcgatgactcgcttatcactgcctggatcctcttccgctatatggtgattggtctgtacgtgggagtagcaacggtgggagtattcatcatatggtacacacacagtagcttcatgggcatagacttgagccaagacggtcacagccttgtgagctattcacagctcgcacattggggccaatgctcttcatgggaaggcttcaaagtgtctcctttcacagcaggctctcagactttctcgttcgactcaaacccttgcgactatttccagcaggggaaaatcaaggcgtccacactctccctctcggtgttggtggccattgaaatgttcaactccctgaacgcactctcagaagacggcagcctggtaacgatgccgccgtgggtgaacccgtggttactcctggctatggctgtctcattcgggctccactttgtgatactgtacgtgccattcctggctcaggtatttgggatagtgccactgagcttgaacgagtggctgctggtactggctgtttcgcttccagtgattcttatagacgaagtgctcaagtttgtaggaaggtgtacgagtggctaccgctactcacctcgcactctttccacgaagcaaaaggaggagtaa

SEQ ID NO: 368 - skipped

SEQ ID NO: 369 - DNA, 1755 bp, Arabidopsis thaliana
atgtgtggaatacttgccgtgttaggatgttccgatgattctcaggccaagagagttcgtgttcttgagctttctcgcagattgaggcacagaggacctgactggagtggcttatatcagaacggagataattacttggcccatcaacgtcttgccgtcatcgatcctgcttccggtgatcaacctcttttcaacgaggacaagaccattgttgtcacggtgaacggagagatttataaccatgaggagctgagaaaacgtctgaagaatcacaagttccgtactggtagtgattgtgaagtcattgctcacttgtacgaggagtatggtgtggattttgttgatatgttggatggaatattctcctttgtgttgctcgacacacgagataactctttcatggtggctcgtgatgcgattggtgtcacttcgctctacattggttggggactagacggatctgtgtggatatcttcagagatgaaaggcctaaacgatgactgtgagcatttcgaaacgtttcctccaggtcatttttattcaagcaaattaggagggtttaagcaatggtataatcctccttggttcaatgaatctgttccttcaacgccttatgagcctcttgcgataagacgcgcctttgaaaacgctgtgattaagcggttgatgactgatgttccatttggagttttgctctctggtggtcttgattcttcccttgttgcctccatcactgcacgtcacttggccggtactaaggcggctaagcaatggggtcctcagctccattccttttgcgttggtcttgagggctcaccggacttgaaggcagggaaagaggtggcggaatatttggggacggtgcaccacgagttccacttctcggtgcaggacgggattgatgcgatagaggatgtgatttaccatgttgagacctatgatgtgacgactatcagagcgagcacaccgatgttcttgatgtcccggaaaatcaagtctctaggggtcaagatggttctctccggcgaaggtgcggacgagatctttggagggtacctctatttccacaaggcacctaacaagaaagagtttcaccaagaaacttgtcgcaagatcaaggctcttcacaagtatgactgtctaagagccaacaaatctacctctgcctttggactagaggcacgtgttcctttccttgacaaagacttcatcaacacagctatgtctctcgaccctgaatccaagatgatcaagccagaggaaggaaggatcgagaaatgggttctaaggagagcctttgacgacgaagaacgtccttatctaccaaaacacattctctacagacagaaagaacagttcagtgatggtgttggctacagttggatcgatggcctgaaagatcacgctgctcaaaatgtcaatgacaagatgatgtcgaacgcggggcatatcttccctcacaacactccaaacactaaagaagcttactactacagaatgatctttgaaaggttcttcccgcagaactctgcgagactaacggttcctggaggtgccaccgtggcttgttcgactgcaaaggcagtggagtgggatgcaagctggtccaacaatatggatccatcaggaagagccgctatcggagttcacctttcggcctacgatggcaagaacgtggcattgaccataccaccacttaaggcaattgacaacatgccgatgatgatgggtcaaggagttgtgattcagtcataa

SEQ ID NO: 370 - DNA, 3195 bp, Arabidopsis thaliana
atgaattcaaatggccatgaggaggagaagaagttggggaatggagttgtggggattctagctgaaacagttaacaaatgggagagacgaacaccattgacgccatcgcattgcgctcgccttttacacggtgggaaagacagaaccggcatttcccgcattgtggttcagccatctgctaagcgtatccatcatgatgccttgtatgaagatgttgggtgtgaaatttctgatgatttgtctgattgtgggcttatacttggaatcaaacaacctgagctagaaatgattcttccagagagagcatacgctttcttttcacatactcataaggcacagaaagagaacatgcctttgttggataaaattctttctgagagagtgactttgtgtgattatgagctcattgttggggatcatgggaaacgattattggcgtttggtaaatatgcaggcagagctggtcttgttgacttcttacacggacttggacagcgtaagctcattctaggatactcaacacctttcctctcgctcggtgcatcgtatatgtattcctcattggctgctgcaaaagccgctgtaatttctgttggtgaagaaattgcaagccagggactgccattaggaatctgccctcttgtatttgtcttcaccggaacaggaaatgtttctctgggggcgcaagaaattttcaagcttcttcctcacacttttgttgaaccaagcaaacttcctgaactatttgtaaaagacaaaggaattagtcaaaatgggatttcaacaaagcgagtctatcaagtatatggttgtattattaccagccaagacatggttgaacacaaagatccatcaaagtcattcgacaaagccgactattatgcacacccggaacattacaatccagttttccacgaaaagatatcgccatatacgtctgttcttgtaaactgtatgtactgggagaagaggtttccctgtcttctgagcacaaaacagcttcaagatttaacaaaaaaaggactcccactagtaggcatatgtgatataacttgtgacatcggtggctccattgaatttgttaaccgagctactttaatcgattcccctttcttcaggtttaatccctcgaacaattcatactacgatgacatggatggggatggcgtactatgcatggctgttgacattttacccacagaatttgcaaaagaggcatcccagcattttggagatattctttccggatttgtcggtagtttggcttcaatgactgaaatttcagatctaccagcacatctgaagagggcttgcataagctataggggagaattgacatctttgtatgagtatattccacgtatgaggaagtcaaatccagaagaggcacaagataatattatcgccaacggggtttccagccagagaacattcaacatattggtatctctgagcggacacctatttgataagtttctgataaacgaagctcttgatatgatcgaagcggctggtggctcatttcatttggctaaatgtgaactggggcagagcgctgatgctgaatcgtactcagaacttgaagttggtgcggatgataagagagtattggatcaaatcattgattcattaactcggttagctaatccaaatgaagattatatatccccacatagagaagcaaataagatctcactgaagattggtaaagtccagcaagaaaatgagataaaagagaagcctgaaatgacgaaaaaatcaggtgttttgattcttggtgctggacgtgtgtgtcgcccagctgctgatttcctagcttcagttagaaccatttcgtcacagcaatggtacaaaacatatttcggagcagactctgaagagaaaacagatgttcatgtgattgtcgcgtctctgtatcttaaggatgccaaagagacggttgaaggtatttcagatgtagaagcagttcggctagatgtatctgatagtgaaagtctccttaagtatgtttctcaggttgatgttgtcctaagtttattacctgcaagttgtcatgctgttgtagcaaagacatgcattgagctgaagaagcatctcgtcactgctagctatgttgatgatgaaacgtccatgttacatgagaaggctaagagtgctgggataacgattctaggcgaaatgggactggaccctggaatcgatcacatgatggcgatgaaaatgatcaacgatgctcatatcaaaaaagggaaagtgaagtcttttacctcttattgtggagggcttccctctcctgctgcagcaaataatccattagcatataaatttagctggaaccctgctggagcaattcgagctggtcaaaaccccgccaaatacaaaagcaacggcgacataatacatgttgatgggaagaatctctatgattccgcggcaagattccgagtacctaatcttccagcttttgcattggagtgttttccaaatcgtgactccttggtttacggggaacattatggcatcgagagcgaagcaacaacgatatttcgtggaacactcagatatgaagggtttagtatgataatggcaacactttcgaaacttggattctttgacagtgaagcaaatcaagtactctccactggaaagaggattacgtttggtgctcttttaagtaacattctaaataaggatgcagacaatgaatcagagcccctagcgggagaagaagagataagcaagagaattatcaagcttggacattccaaggagactgcagccaaagctgccaaaacaattgtattcttggggttcaacgaagagagggaggttccatcactgtgtaaaagcgtatttgatgcaacttgttacctaatggaagagaaactagcttattccggaaatgaacaggacatggtgcttttgcatcacgaagtagaagtggaattccttgaaagcaaacgtatagagaagcacactgcgactcttttggaattcggggacatcaagaatggacaaacaacaaccgctatggccaagactgttgggatccctgcagccattggagctctgctgttaattgaagacaagatcaagacaagaggagtcttaaggcctctcgaagcagaggtgtatttgccagctttggatatattgcaagcatatggtataaagctgatggagaaggcagaatga

SEQ ID NO: 371 - DNA, 639 bp, Arabidopsis thaliana
atgaagatcagacttagcataaccatcatacttttatcatacacagtggctacggtggccggacaacaatgcggtcgtcaaggcggtggtcgaacttgtcccggtaacatctgctgcagtcagtacggttactgtggtaccaccgcggactactgttctccgaccaacaactgtcagagcaattgttggggaagtgggcctagcggaccaggggagagcgcgtcgaacgtacgcgccacctaccatttctataatccggcgcagaataattgggatttgagagccgtgagtgcttattgctccacgtgggatgctgataagccgtacgcatggcggagcaagtatggctggaccgccttctgcgggccggcaggacctcgtggtcaagcttcttgcggcaagtgtttaagggtgaagaacacaagaacaaatgctgcagtaactgtgagaatagtggaccaatgcagcaacggaggcttggatttggatgtagcaatgttcaatcaaatagacaccgatggttttggctatcaacaaggccatctcattgttgactaccaatttgtcgactgtggcaatgagctcattgggcagcctgattccagaaacatgcttgtttcggccattgatcgcgtttga

SEQ ID NO: 372 - DNA, 1509 bp, Arabidopsis thaliana
atgggtaaagtggcagttgcaacgacggtagtgtgttcggtggcggtatgtgcggcggcggcgttgatagtacggaggagaatgaaaagcgcagggaaatgggcaagagtgatagagatattgaaagcctttgaagaagattgtgcaacgccaattgccaaattgagacaagtggctgatgctatgactgttgagatgcatgctggtcttgcttctgaaggtggcagcaagcttaagatgcttattagctacgttgataatcttccttctggggatgagactggttttttctatgcgttggatctaggcggaacaaacttccgtgttatgcgtgtgcttcttggtgggaagcacgaccgtgttgttaaacgagaattcaaagaagaatctattcctcctcatttgatgaccgggaagtcacatgaattattcgattttatcgttgatgttcttgccaagtttgtcgctacagaaggcgaggactttcatctcccacctggtagacaacgggaactaggttttactttctcatttccggttaagcagctatctttatcctctggcactctcatcaactggacgaagggcttttccattgacgatacagttgataaagatgttgttggagaacttgttaaagctatggaaagagttgggctggacatgcttgtcgcagcgcttgttaatgataccattggaacacttgcgggtggtagatacactaacccggatgtcgttgtcgcagttattttgggcaccggcacaaatgcagcctatgtcgaacgtgcacatgcaattcccaaatggcatggtttgctacccaaatcaggagaaatggtgatcaacatggaatggggaaacttcaggtcatcacatcttccattgacagagtacgaccactctctagatgtcgatagtttgaatcctggtgaacagattcttgagaaaatcatttccggaatgtatctgggagaaatcttgcgtagagttcttctgaagatggctgaagaagctgccttctttggcgatatcgtcccacctaagctgaaaataccattcatcataaggaccccgaacatgtctgctatgcacagtgatacttccccggatttgaaggttgtaggaagcaagttaaaagacatattggaggtccagactagttctctgaagatgaggaaagttgtgatcagcctatgtaacatcattgcaagccgaggagctcgtttatctgctgcggggatctatggaatcctcaagaaaataggaagagacgcaacaaaagatggagaagctcagaaatctgtgatagcgatggacggtgggctattcgagcattacactcagttcagtgagtcgatgaagagttcattgaaagagttgcttggagatgaagtttcagagagtgttgaagtgatactgtcgaatgatggttcaggtgttggagctgcattacttgctgcttctcactctcagtatctcgaacttgaagatgactctgaaacaagttaa

SEQ ID NO: 373 - DNA, 2868 bp, Arabidopsis thaliana
atgtcaacaaaagtgttggatcctgcatttcaaggagctggccagaaaccagggactgaaatctggagaattgagaattttgaggcagttcctgtaccaaagtctgagcatggaaagttctatatgggagatacttacattgtcttgcagacaacacagaataaagggggtgcttatttgtttgatatacatttctggattggtaaagatacaagccaggatgaagctggaacagcagctgttaaaacagttgaactcgatgcagttcttggaggccgtgctgtccaacaccgggaaattcagggtcatgaatctgacaaattcttgtcttacttcaagccatgtattatacccttagagggtggtgttgcgtctggtttcaaaacagttgaagaagaggtgtttgagacccggttatatacttgcaaaggaaaacgtgcaatccgtttgaagcaggttccttttgcccgctcatcactgaatcatgatgatgtatttatcttggacaccgaggaaaagatctatcagttcaatggtgcaaattcaaacattcaggagagagccaaagctttggaagtcgttcagtatttaaaagacaagtatcacgaaggaacttgtgatgttgcgattgttgatgacggaaaattagatacagaatcagattctggtgcattttgggtcctctttggtggttttgctccaatcggaaggaaagttgccaatgatgatgacattgtcccggagtcaactccacctaagctttattgcatcactgatggtaagatggaaccaatagacggtgacctatccaaatctatgctggaaaacactaaatgctacctcttggactgtggcgctgagatatatatctgggttggccgtgtcactcaagtagatgagaggaaagctgctagtcaatctgctgaggaattccttgctagtgaaaataggccaaaggcaacacatgtaactcgtgtaatccaaggttatgagtcccattctttcaagtctaactttgactcttggccatcaggctcggccactcctggtaacgaagaaggacgaggaaaagtcgctgctttactgaagcaacaaggcgttgggctcaagggcattgcaaaaagtgcaccagtgaatgaggatattccacctctgcttgaaagtggtggaaaattggaggtttggtacgttaatggtaaagtcaagactcccttacctaaagaagatattggaaagctctattctggggactgctatttggtcctttatacctatcattctggggaaaggaaagacgaatatttcttgagttgttggtttggaaagaaaagcattccggaggaccaagatacagcaattcgactggcgaatacaatgtcaaactcgttaaaaggaagacctgtgcagggccgtatatacgagggtaaagagcctccacaatttgttgccctttttcaacctatggtggtcttaaagtcagagtcaacagacgaaacctacacgccagaatcaattgcactagttcaagtatctggaaccggagttcacaataataaggctgtgcaagttgaaacggtggcaacatctttgaactcttatgagtgcttccttctgcaatctggtacttccatgttcctttggcatggaaatcaaagtacgcatgaacagctagaactggccactaaagttgctgaattcttgaagcccgggattactctcaagcatgccaaagaaggaacagagagctcaaccttttggtttgcacttgggggaaaacagaatttcaccagcaagaaggcttcctctgagacgatcagggatcctcacttattctcatttgttgaggagatttacaactttgctcaagatgacctcttgactgaggatatatatttcctagacacccatgctgaagtttttgtctgggttggtcaatgtgtggagcctaaggaaaagcaaactgtatttgagattggccaaaaatacatagatcttgctggatccttggaaggcttgcatcctaaagtcccaatctacaaaatcaatgaagggaacgaaccatgcttcttcaccacttacttttcttgggatgccactaaagctatcgtacaaggaaattcattccagaaaaaggcatcgttgttatttggcactcaccacgttgtggaggataagtctaacggtgggaaccaaggactaaggcaaagggctgaagcactagctgccttaaattcggcatttaactcttctagtaacaggcctgcctattcgagccaggacagattaaacgaaagtcacgacggcccaagacagagagctgaagctttagccgccttgtcatccgcattcaactcttcttcgtcatcaactaaatcgcctccaccaccaaggccagtggggacgagtcaggcttcacagagagcagcagcagtggctgctctttctcaagttcttgttgcggaaaataagaaatcacctgatacctctcctacaagaagatccactagctccaacccagcagatgacatccctctgacggaagcaaaagatgaagaagaggcttcagaggtagctggtcttgaagccaaggaagaagaggaagtttcacctgcagcagatgaaacagaagcaaagcaggaaacagaagagcaaggtgattctgaaatacaaccaagtggagcaactttcacctatgaacagctgagagctaaatctgagaacccagtgactggaatcgatttcaaacgcagagaggcttatctatctgaggaagagttccaaagtgtgtttgggatcgagaaagaagcattcaacaacttaccacgttggaagcaagatctgcttaagaagaagttcgacttgttctag

SEQ ID NO: 374 - DNA, 2838 bp, Arabidopsis thaliana
atggaggtgttatctacttcctcacctctaacgcttcactcccaccgactcctctctgcttcttcttcttcttcacatgtcacctccatcgccgcttcttcactttcttcattcgcttcttcatatctcggaatctccctttctaaccgcacgatccaccgcttctccacaactccgacgaacttaagacgatttcctcaaagaaaacggaagaaattcactccgatttcagcggttttcgaacggttcaccgaacgagcgatcagagctataatcttctctcagaaggaagctaaatcgttgggaaaagatatggtttacacgcagcatcttctcttaggtttgatcgctgaggatcgtgatcctcaaggcttccttggatccggtatcaccatcgacaaggctcgtgaagctgtttggagtatttgggacgaagctaattccgattcgaaacaggaggaagcttcttctacttcgtattcaaaatcgacggacatgcctttctctatcagcacgaaacgagtctttgaagctgcggttgagtactctaggactatggattgtcaatatatcgcaccggagcatatagccgttggactcttcaccgttgatgatggtagcgccggcagagttctcaagagattgggagcaaatatgaatttgctcacagctgcagcacttacaagacttaaaggagagattgctaaagatggaagagagccatcttcttcatctaaagggagcttcgagtctcctcctagtggtcgaattgctggttctggacctggtggaaaaaaagcgaaaaatgtactggaacagttctgtgtggatctgacagcacgtgctagtgagggtcttattgatcctgttattggtcgggaaaaagaggttcaaagagttatccagatactttgccgcagaactaaaaacaacccaattcttcttggtgaagctggtgttgggaagactgccattgctgaaggactagcgattagtattgcagaagccagtgctcctggatttctcttgacgaaacgcatcatgtccctggatataggattgctaatggccggtgcaaaagaaaggggagagctggaggctcgagtcactgctttgataagcgaggttaaaaaatcaggtaaggtcattctcttcatagatgaagtgcatacacttattgggtctggcacagttggaagagggaacaaagggtctgggcttgacattgctaacctcttgaaaccatcacttggaaggggtgaacttcagtgcattgcatccacaacccttgacgaatttaggagtcagtttgagaaggacaaagcccttgcaaggagatttcagccagtgttgattaacgagccaagcgaggaagatgcggtgaagattttgttgggccttcgtgaaaaatatgaagcccatcacaattgcaaatatactatggaagccatagatgctgcagtgtacctttcatcacgatatatcgctgatagatttcttccagataaagctattgatctcattgacgaggcaggaagcagagctcgtattgaagcttttaggaagaaaaaggaggatgcaatctgtatcctatcgaagccacctaatgattactggcaagagatcaaaacagttcaggccatgcacgaagtggttctctcaagcaggcaaaagcaggatgacggtgatgccatttcagatgagtctggtgaactagttgaagagtcttctttgccacctgcagcaggcgacgatgagcctatactggtgggacctgatgatattgcagccgttgcatcggtttggtctggaattccagttcagcagatcactgcagatgaaagaatgcttcttatgagtctagaagatcagcttagaggcagagttgttggtcaagatgaggcggtagctgccatatctagagctgtgaagaggtcccgggttggcttaaaagatcccgaccgtccaattgctgctatgcttttctgtggaccaacaggggttggaaaaacggagcttacaaaagctctggcagcaaattattttggctcggaagaatccatgctgagattggacatgagtgaatacatggagcgtcatactgtgagcaagctgataggctctcctcctggttatgttggctttgaagaaggtggaatgcttacagaagctatcaggagacgtccttttacagtggttttgttcgatgaaatagagaaagcacatccggatatcttcaatattcttctccagctgttcgaagatggccatctaactgattcacagggaaggagagtatcttttaagaacgcattgatcataatgacctctaatgtcggatcattggccattgcaaagggaagacatggttcaatagggtttatcctcgatgatgatgaagaggcagcatcttataccggaatgaaagctttggtagtcgaagaactcaagaactatttccgtccagagttgttgaaccgaatagacgaaatcgtcattttccgacagctagagaaggctcagatgatggagatcttgaacctgatgctacaagacttgaagtcgaggctcgtggcactcggagttggtttagaggtgtctgaacccgtcaaggagctcatatgcaaacaaggctatgatccagcttacggtgcacgaccactccggagaactgtcacagagattgttgaagatccactcagtgaagcctttcttgccgggagcttcaagcctggtgatacggcttttgtagttcttgatgataccggaaacccatcggttcggaccaaaccagattcttccactatacgagttacagacaaaacatcgatcgcatag

SEQ ID NO: 375 - DNA, 1398 bp, Arabidopsis thaliana
atggcaatgtctgtaaatgtttcttcttcttcgtcttctgggatcataaactctcgtttcggtgtttcattggagccaaaagtttcgcaaattggttcgttgaggttattggatcgtgttcatgttgctcctgtgtctctgaatctatctgggaagcgatcatcatctgttaaacctttaaacgctgaaccaaagacaaaggattcaatgattcctcttgcggcaacaatggtagcagaaattgcagaggaagttgaagtggttgagattgaggattttgaagagcttgctaagaagttagagaatgcttcacctcttgagattatggacaaagctcttgagaaatacgggaacgatatcgccattgcatttagtggtgcagaagatgttgctcttattgagtacgctcatttgactgggaggccatttagagtatttagtttggatacagggaggttgaatcctgagacgtatcggtttttcgatgcggtggagaagcactatgggattaggattgagtatatgtttcctgattctgttgaggttcaaggtttggttaggagcaagggattgttctctttttatgaggatggtcatcaggagtgttgccgtgttcgaaaggtgagacctttgaggcgtgctctcaagggtttaaaggcttggattactggtcagaggaaagatcaatctccggggacaaggtctgagattccggttgttcaggttgatccggtgtttgaaggtttggatggtggagttggtagtttggtgaagtggaatccggttgcgaatgttgaagggaatgatgtttggaacttcttgaggactatggatgttccggttaacacattgcatgcggcagggtatatatcgattggatgtgagccttgcacgaaagcggttttaccgggtcagcacgagagagaagggagatggtggtgggaagatgctaaagccaaggaatgtggacttcacaaagggaatgtcaaagaaaactccgatgatgctaaagtgaacggggaatcgaaatccgctgttgcagatatctttaagagtgagaatcttgtgactttgagcaggcaggggattgagaatttgatgaagttggagaaccgtaaagagccttggatcgtcgtgctttatgctccgtggtgccccttttgtcaagccatggaagcatcgtatgatgaactggcggataaattggctggaagtgggattaaggttgccaaattcagagcagatggtgaccagaaggagtttgctaagcaggaattgcagctcggtagcttccctaccattctggttttccctaagaactcatcgagaccgatcaagtatccgtctgagaagagagatgttgagtctttgacttcgttcttgaatcttgtccgataa

SEQ ID NO: 376 - DNA, 2109 bp, Arabidopsis thaliana
atgcctgctctagcttttgttgatactcccatcgataccttttccagtatctttacaccgtcgtctgtttccaccgccgttgttgacggttcctgccattggtctccgtccctctcctcctctctttaccgtatcgacggatggggagctccgtatttcgcagcgaattcctccgggaacatctctgttcgtcctcatggctcaaacactttacctcaccaagacatcgatctgatgaaagttgtgaagaaagttacagatccgagtggtttaggattacagcttccgcttattgttcgtttccctgatgttctgaagaatcgtcttgagtgtcttcaatccgcgtttgattacgcgattcagagtcaaggatatgattctcattaccaaggtgtgtatcctgtgaaatgtaatcaagatcggtttatcatcgaagatattgtcgaattcggatccggttttcgattcggtttagaagctggttccaagcctgagattcttcttgctatgagttgtttgtgtaaaggtaatcctgaagcttttcttgtgtgtaatggttttaaagactctgagtatatctcattggctttgtttgggaggaaacttgaattgaatactgttattgttcttgagcaagaagaagagcttgatttggttattgatttgagccagaagatgaatgttaggcctgttattgggttaagagctaagcttagaactaaacattctggtcattttggttctacttctggtgagaaggggaagtttggtttgactacggttcagattcttcgtgtggtgaggaagctgagtcaagttggtatgcttgattgtctccagcttctgcattttcacattggttcacagattccgtccacggctttgctttccgacggtgtggctgaggctgcgcagctttactgtgagcttgtccgtcttggtgctcatatgaaggtgattgatattggtggtgggttggggattgattacgacgggtctaaatcgggggagtcggatctctctgttgcttatagtctcgaggagtatgctgcagctgttgtggcttcggttaggtttgtttgtgatcagaagtctgtgaagcatccggtgatttgcagcgagagcggtcgagccattgtgtctcatcactcggtgttgatctttgaagctgtctcagctggtcaacaacatgagacccctactgatcatcagtttatgcttgaagggtactctgaggaagttcgaggtgattacgagaatctttatggtgctgctatgcgtggtgatcgtgaaagctgcttgctttatgttgatcagctgaagcagagatgtgttgaagggttcaaagaaggttccttgggcattgaacagttagctggtgttgatggattatgcgagtgggtgattaaggcgattggtgcatcggatccggttcttacttaccatgtcaatctatcggttttcacttcgattcctgatttctgggggattgatcagctgtttcctattgttccaatccataaacttgaccaaaggcctgccgcgagagggatcttatcggatttgacgtgtgacagcgacggaaagatcaacaagttcataggcggagaatcgagcttgccattgcacgagatggacaacaatggctgcagcggtgggcggtactatttgggaatgttcctaggtggagcttatgaggaagctctcggtggagtccacaatctgttcggtggaccaagcgtggttcgcgtattgcagagcgatggacctcacggattcgcagtgacccgtgctgtgatgggccaatcctctgcagatgtcctcagagcaatgcagcatgagcctgagctcatgtttcagactcttaaacaccgagccgaggagccgaggaacaacaacaacaaagcttgtggtgataaggggaacgacaaactagtagtcgcatcgtgtcttgctaagtcattcaacaacatgccttatctttccatggaaacgtcaacaaacgctctcaccgcagcggtcaataaccttggcgtttactactgcgatgaagctgcagctggtggcggcggcaagggcaaagatgagaattggtcttatttcggttga

SEQ ID NO: 377 - DNA, 4107 bp, Arabidopsis thaliana
atgggtgagaaagcgattgacgaagacaaagtagaagcgatgaagagcagcaagacctctcttgttttcgccattaacggacaaagattcgagctcgagctctcttctattgatccttccaccacactcgtcgatttcttgcgcaacaagactcctttcaagagcgtcaagcttggttgtggcgaaggtggttgtggcgcttgtgttgttcttctttcaaagtatgatccattgctcgaaaaagtcgatgaattcacaattagctcgtgtctcacgcttctctgtagcattgatggctgttccatcactacctcagacgggctcggcaacagcagagtcggtttccatgccgtccacgagcgtatcgccggttttcatgccacacaatgcggtttctgtactcctggaatgagcgtttcgatgttttctgctctcttgaacgctgataagtctcatccacctcctcgcagcggtttctcaaatctcacggctgtagaagctgagaaggctgtgtcagggaatctttgccggtgtactggatatagaccgcttgtggatgcttgtaagagttttgcagcggatgtggatatcgaagatctcggattcaatgccttttgcaagaagggagaaaacagagatgaggttttaagaaggttgccatgttatgatcatacatcatctcatgtctgtacatttccggagttcttgaagaaggaaatcaagaacgatatgagtcttcattcaagaaagtatcgatggtcaagcccggttagtgtctcagagcttcaagggttattagaagtcgagaatggtttgtcggttaagttagttgcgggtaacacgagcaccgggtattacaaagaagaaaaagagaggaagtacgaaagatttatcgatatcaggaagattccggagtttactatggtgagaagtgatgagaaaggagttgaattaggagcttgtgtcactatatcgaaagctattgaggttctaagagaggaaaaaaatgtttctgtgttggcgaaaatcgctactcatatggagaaaattgcaaacagattcgtgaggaacacgggaacgataggtggaaacattatgatggctcagagaaaacagtttccttcggatcttgcaaccatacttgttgctgctcaagcaacggtgaagatcatgactagcagctcgagtcaagaacagttcacattggaggagtttctacaacaacctcctcttgatgcaaaatctcttcttttgagcctcgagattccatcttggcactccgcgaagaagaacggttcttcagaagatagtattttgctatttgaaacttacagagcagcgcctcgtcctctaggaaacgcattggcatttctgaatgcggctttctcagctgaagttactgaagcacttgatggcattgttgtaaatgattgccaattagtttttggagcttatgggaccaaacatgcacacagggcaaagaaagtagaagagtttcttacaggaaaagtgatatctgatgaagttttgatggaagctattagcttacttaaagatgagatagtacctgataagggtacttcgaatcccgggtatagatcaagcttggctgttacttttctcttcgagttcttcggatctttaactaaaaaaaacgctaaaacgacaaacggttggctcaatggaggatgcaaagagattggttttgatcagaatgttgaatctttgaaacctgaagctatgctgtcatctgcacaacaaatagttgaaaatcaagagcatagtccggtcgggaaaggcattacaaaggctggagcttgtctccaagcatctggtgaggctgtttatgtagacgacattcctgctccggaaaattgtctatacggcgcatttatttacagtacaatgccgctagcgcgaattaagggtataaggttcaagcaaaacagagttccagaaggagttcttggcattattacttacaaagatattcccaaaggcgggcaaaatatcggtaccaacggtttctttacctcggatcttttgttcgcagaagaagtcactcattgtgcgggtcagataatcgcctttttggttgcagatagtcaaaagcatgcagatattgcagcaaatcttgttgtgatagattacgacaccaaagatttaaaaccacctatactgtccttagaagaagctgtcgaaaactttagccttttcgaggtccctccacctctgcgtggttacccggttggtgatatcaccaagggaatggatgaagctgaacataagattcttggatcaaagataagtttcgggtcacagtacttcttctatatggagacacaaacagctcttgcagtgccggatgaagacaactgtatggtggtttatagctcgactcaaacccctgagtttgtacatcaaaccatcgctggatgtcttggagttcctgagaacaatgtgcgtgtcatcactagaagagttggaggcggattcggtgggaaagccgtgaaatcaatgcctgttgctgcagcttgtgcacttgcagcatccaaaatgcagcgtcctgtgaggacatatgtgaaccgaaaaacggatatgataactaccggaggaagacatccgatgaaagtcacatatagtgttggattcaaatccaatggaaagattactgctttagatgtagaggtgttacttgatgcagggttaaccgaagatataagcccgcttatgccgaagggaatacaaggagcactaatgaagtatgattggggtgctctgtctttcaatgtgaaagtatgcaaaacaaacactgtgagcagaaccgcgctgagagctcctggggatgtacaaggatcatatataggagaagccatcattgaaaaagtagcttcatatctttcagttgatgttgatgagatcaggaaggttaatcttcatacatatgagagcttaaggttgtttcacagtgccaaagctggtgaattttctgagtatacgttaccattgctttgggacagaatcgatgagttctcgggatttaacaagcggaggaaggtggttgaggagtttaatgcatcaaacaagtggagaaagagagggatttcacgtgtgcctgcggtttatgcagtgaacatgcgatcaacaccgggaagagtaagcgttttgggagatgggtcaatagttgtggaggttcaagggattgagataggacaagggctttggacaaaggtgaaacagatggctgcatattcccttggtttgatccagtgcggtactacaagtgatgaactgcttaaaaaaatcagggtcattcaatccgacacactaagtatggtgcaaggctcaatgactgctggtagtacaacctctgaagcgagtagtgaagcggtaaggatttgctgtgatggcttagttgaaaggcttttaccagtcaagaccgctttggtggagcaaacaggaggacctgtgacttgggatagtctcatcagtcaggcttatcagcaatcgataaacatgtccgttagtagcaaatacatgcctgactccactggcgaatacctgaactatggaattgcagcgagcgaggttgaagtaaacgttttgacgggagaaacaacgatcctgcgtacagatattatctatgattgtgggaagagtctcaatcccgctgttgatttaggacagattgaaggagcctttgttcaaggacttggtttcttcatgcttgaagagttcctaatgaactcagacggtctcgtggtaacagacagcacatggacttacaagatcccaacggttgacacaatcccaagacagtttaatgtggagattctcaacagtggacaacacaagaatcgtgttctttcatccaaagcttcgggtgaaccgccattgcttttagcggcttctgttcactgcgcggtacgagcagctgttaaagaagctaggaaacagatcctgtcatggaatagtaataaacaagggactgatatgtacttcgaattgcctgttccagcaacaatgcctattgtgaaggagttttgtggacttgatgttgtcgagaaatacttggaatggaaaatccagcaaaggaaaaatgtttga

SEQ ID NO: 378 - DNA, 1059 bp, Arabidopsis thaliana
atggattctagttgcatagacgagataagttcctccacttcagaatctttctccgccaccaccgccaagaagctctctcctcctcccgcggcggcgttacgcctctaccggatgggaagcggcgggagcagcgtcgtgttggatcccgagaacggcctagagacggagtcacgaaagctaccatcttcaaaatacaaaggtgttgttcctcagcctaacggaagatggggagctcagatctacgagaagcaccaacgagtatggctcgggactttcaacgagcaagaagaagctgctcgttcctacgacatcgcagcttgtagattccgtggccgcgacgccgtcgtcaacttcaagaacgttctggaagacggcgatttagcttttcttgaagctcactcaaaggccgagatcgtcgacatgttgagaaaacacacttacgccgacgagcttgaacagaacaataaacggcagttgtttctctccgtcgacgctaacggaaaacgtaacggatcgagtactactcaaaacgacaaagttttaaagacgcgtgaagttcttttcgagaaggctgttacacctagcgacgttgggaagctaaaccgtctcgtgatacctaaacaacacgccgagaaacactttccgttaccgtcaccatcaccggcagtgactaaaggagttttgatcaacttcgaagacgttaacggtaaagtgtggaggttccgttactcatactggaacagtagtcaaagttacgtgttgaccaagggatggagtcgattcgtcaaggagaagaatcttcgagccggtgatgttgttactttcgagagatcgaccggactagagcggcagttatatattgattggaaagttcggtctggtccgagagaaaacccggttcaggtggtggttcggcttttcggagttgatatctttaatgtgaccaccgtgaagccaaacgacgtcgtggccgtttgcggtggaaagagatctcgagatgttgatgatatgtttgcgttacggtgttccaagaagcaggcgataatcaatgctttgtga

SEQ ID NO: 379 - skipped

SEQ ID NO: 380 - DNA, 660 bp, Arabidopsis thaliana
atggcttcaccaactcttactctcctcctcctcctcaccaccgtctccttcttcatctcctcctccgcagatcctgacatgcttcaagatctctgcgtcgctgatcttccctctggaatcaaaatcaatggcttcccttgcaaagacgcagctacagtcacatcagccgatttcttctcacaaggattagctaaaccaggtcttaccaacaacacattcggtgccttagtcacaggagctaacgttatgacaatcccaggactcaacacacttggtgtctccctctctcgtatcgactacgcaccaggaggcttaaacccacctcacacccacccacgtgccactgaggtcgttttcgtcctcgaaggaacacttgacgttgggtttctcactactgccaataagctaatctctcaatctctcaagaaaggagatgtctttgctttccccaaaggacttgtccatttccagaagaacaatggtgatgtccctgcttctgttattgcagctttcaatagtcagcttcctggaactcaatctcttggtgctactttgtttggttctactcctcctgttcctgacaacatcttggctcaagcctttcagacttctccaggaactgttaaacacatcaaatccaagttccaacccaagaaatga

SEQ ID NO: 381 - DNA, 2598 bp, Arabidopsis thaliana
atgagcagtgggcataagggtccaaatgtacgtaacttttttaaatggcaacgtggtgaatcatcatcgtctttgactactggattgcttcataatgagtcacacgagattgagctatctaactacggaggaataccaagtcctggtagtgagagcccatcgggacttcttaatggagagagtttaaatgttcaaccaattgctgatttggatctttttgtcgaaaggctctacagctactacagagacaaaggactttggtgtattatagtaaagtgggctgttgagcttctaagtctgggcttcatcatatgcttctctgggtttttcttgctgtatgttgattggaatggtcttcagaatgcaaaatgtggaatggatgcagttgaatcaggaactaaaccatgtgatcttgtcaaagaagctatccatccgcatcctttatcccctttcacgctcacaactgctataattgttggatatttggccctcttctctgtgtactggctcttctgcttcttaaggttttttgcccagttgaaagatactttggactttcggcacttttattacaacaatctccatgtcacagacaatgaaatccttactatgccatgggcaacagtccttgagaaggttgttcagttacaaagctcacaatgcctttgtgtggttaaggatctttctgctcatgatatggttatgcgccttatgcggaaagaaaactacttgattggaatgctcaacaaaggtttgctttctttcccaatttcccattggatccctggtgctggtccagcagtcaaatccgcaccagatgggacacagtatcaccttgtattgacaaagacccttgagtggacccttaactggtgcatattgcagagcatgtttgactgcaattttcgtgttagaagggactttgtttcaaatcctacaacactgaagaaacgactatttgtggttgggcttgctatgcttctgctgtcaccgtttcttgtcatctttatgttggtgtatttattcctaaggcatgctgaacagttctacaatcatccaagtactgcatcttctcgaagatggtccaatttgtcaaagtggctcttcagggaattcaatgaggttgaccatttattcaagcatcggattaatagcagtgtagtacatgcatccgaatatctaaagcaatttccctcgcctatcatctccattattgcaaagtttgtctcgtttgtttctggcggctttgctgctgtcttaatcatcattgcgtttcttgaagaatctctacttgagggacatatattcggccgcaatctgttctggtatgccgctgtttttggaacaattacagctattagtagagctgccatatcggatgaacttttggtcctcgacccagtaggaactatgtctttggtggtccaaaacactcattatatgcctaagagatggcgtggaaaggagaacaaggatgatgtccgcttggagttagagactctgtttcagtatactggaatgatgctattggaggagatagcttcaatcttcatcacaccatttttgctgatgtttgtcgtgccaaagcgggtggatgacatcttgcaattcattaaggatttcacagttgatattgaaggtgtaggccatgtttgcagctttagtgctttctactttgagaaccatggaaatatcaaatatggttcaccacataatgcaactcgtcgtgagcagagaagctcacaagggaaaatggagaaatcattcttgagtttccagagtagttatccttcttgggagtcagattctcttgggaagcagtttctgtcaaatctcagaactttccgggaccgaaagcttcatgaaataaacacaagacactcatctcctagtagggcgtggcgagaaagcactaatacccctgctttatacagagacattccaagaaatccgcttgcgagcggcaatcacactgattcaatgtggctgattgatccagatcagaggaatcatccttatcttcttgactggtattacacttctcaggctcacaacagaactgatcacccaatagagagagcaaatgaaatcttaaccgcaaatcagaacgctacagattgttggcctcctgatttgggaatccgtggtgaagatagcagagatctgctcaacatggaggcaagcacatcaggtcagtttttcagagagagcattctgcgccatgaccaacccgagggagaggatagttatgggagtcagcatcctcttgatggtaggaaccagtggtggggaagaggcaaccactctcagatcagcacagctcatcccgcaaccaccaatagcttcatcgagccacctgattttataaaccgctacacagcaggaaacttattagacaactcttggagcagaagaagcatagaagaagaagatgaagaagaagaagaattggattgggaagagaatgcaagaagaaatttgtcgagaactacattcatggacgataacgatatcgaagctgggattgatctccatttcgacgatgtatatagttcaagacctcaagaaacttcaacatcaagcaccacattacggtga

SEQ ID NO: 382 - DNA, 510 bp, Arabidopsis thaliana
atggggatatcgggttcaaagcgagttacgacgattctatctaactcgcccgagtttgactcggcttgtgactcagcatacgacgaatctctctctcttgcacagcatgctttcgccggagttcgtccttaccagctcgtctccgccgccgcccacatccaccggaatctttccgctcttcgtttccctctaatcaccagatggctctcttctcctccgagtcaatcccaagtcgactcagctctccgagtcaccgtctctcgagtcacggcggcggatgaggaggagatcctcgggcaagaggagttcaagaaatgggccgtcgaggttttcgcggaagccgttgtgggaaacgcgaggaagacaatagcgagtcggattccgttaggaatcgtcggaatcggtgggatcggcgccgtgactcggtcgggtcaaaacttgatcggagctgcgattggtgtgtacgcgataggagttgctacttccgtttttctaagcctcactgattag

SEQ ID NO: 383 - DNA, 264 bp, Arabidopsis thaliana
atggcaaacgtctccgctttgctcaccatagctcttctcctttgctccacgctaatgtgcactgcccgccccgaaccggccatctccatctctatcacgactgctgccgatccatgtaacatggagaagaagatagaaggaaaattagatgacatgcatatggtagacgaaaactgtggtgcagacgacgaagattgcttaatgaggaggactttggtcgctcatactgattacatctatacccagaagaagaagcatccttga

SEQ ID NO: 384 - DNA, 804 bp, Arabidopsis thaliana
atggctggagaggagttgttgaaactgttcgagcaaaactggtcagagaggccaatcttcaagaaagacaaagagaatctgaatggaaaaagtagagagaagcgtggagaaaaagagattctagaggaacgacgagaagaagaagcactgaagaattttccggtgagctttcttgtagagagggctatgagtgacgagacgatgatgacgacgagttccaagacaagtttgtttagttcttcatcagatgatttgttcttgtctcctagatcggtcttacccgttaaaccaacgccgatgaagcttcagacgatcctctccggaaaagaagtcaacgcgttcacgattgcggaaagagagagactactttcagagaaggaagagcagaggaagaagaagaagaagaagagtaatgtgagaacaagaaagggaaagagtatgtcggatttggagtacgaggagcttaaagggtttatggatctaggttttgtcttttccgaggatgaccataaagactccgatctagtttcgattcttcctgggttacagagattggtgaagaaagatgatggagtaacaaaagaagaagaagaagaagaagaagaagacaaaatcggtggaaacagagcagcgagaccgtatttgtcggaagcgtgggatcattgtggaggaagaaaaggaaaaaaacaaatcacgccggagattaagtggagagttccggcgccggcggcggctagcgaagttgacttaaaagataatctaaggctttgggctcatgctgtggcctcgactattcgaagttaa

SEQ ID NO: 385 - DNA, 393 bp, Arabidopsis thaliana
atggcgtcaccaaagtcacccacaagaccaacccaacaaaacccacaacccaatttccacgattttcttcctaccatggccggaaacctaggcggtgaaggtctgatcggagagctatgcaacggcttcgagcttttgatggacagagagaaaggtgtcatcacgttcgagagtctccgacgtaacgctgcggcggttctgggtttaggagatttgactgatgaagatgtccggtgtatgattaaagaaggtgattttgactgcgacggtgcgttgaatcagatggagttttgtgtgttgatgtttaggcttagccctgatttgatggaagcgtcgcggtgtctcgtcacggaggtcattgaggaggagtttggcttcacgcgccggcattga

SEQ ID NO: 386 - DNA, 258 bp, Arabidopsis thaliana
atggaaatggacaagagggacggtaagttcgggccacagccaatggcagtgcctccggctcagcaaatgtcacggtttgatcaagccaccccacccgcagtcggttatcctccacaacaaggttatccaccttctggttatcctcaacaccctccacaaggttatccaccttctggctatcctcaaaaccctcctccctcagcttattctcaataccctcctggggcttatcctcctcctcccgcttacccaaagtga

SEQ ID NO: 387 - DNA, 680 bp, Arabidopsis thaliana
atgattattgaaagagctcgagttccgttgagccgatggcaacaagcggccgtggcgatgggatctgctctcggtgcgttggttgatcctcgtagagcggatctaatcgctgctctcggcgaaactaccggtaaaccagcttttgaaatggttcttgagagaatgaagaagagcgaagaaggaagagctatattattggagcgtcctcgagttgtgtcagagcaagtaggtcatgcttgggatctaccagaaaacacatttggagctgcatatgctaaattcatgggatctagaaacttctctcccgatgatcgtccgcccgtaagattcatggagacggatgaattggcttacgtagcgacacgggcacgcgaagttcacgacttatggcacactctgtttggccttcctacgaatcttatcggcgagtcgtctttgaaagttatcgagtttgagcaaatgtatcttccgatgtgtatgctctctgtgattggaggtactgtgaggttcaacgagaagcaaagatcaatgttcttgaagcattaccttccttgggctgttcgtgctggaagacaatgcactgacctcatgtgtgtgtactatgagcgtcactttagtgaagacttggagcaagttcgtagaaaatggggaatcatccctgctcctcaacatcctaaatg

SEQ ID NO: 388 - DNA, 402 bp, Arabidopsis thaliana
atgggagaaactgttaaagagcgtggtgatggaagtgcagagctggttaaatccgtagctgataagcatgccggtctcgtgagaccagttgctaaatattactctgcagttaaagatgctatggtgtgtgggaaaggaagatatacgcttgtaaaagacgtagacgaggtggaaaatggagtgtatgacaagcctcttccatgctttggttgtggaatcggatggttctcctttctcttgggttttgtgttccctttcttatggtactatgcaacacttttatatttcgggaactactaccgcaaggatcctagagaaagagccggccttgctgcttccgcaatcactgcgatgggattctccctcttgctactagtgattgttgttttctggtggctctaa

SEQ ID NO: 389 - DNA, 399 bp, Arabidopsis thaliana
atggcgaatctaatttcgtttcacgatgtggctaaacataagtgcaagaacgattgttggattctcatccatggaaaggtctatgacatcagcactttcatggacgaacatcccggaggtgacaatgttctcctcgccgtcaccgggaaagacgcgtcgatcgatttcgaagatgtgaaccatagcaaagatgccaaggagctaatgaagaaatactgtatcggtgacgttgaccagtcaacggttccggtgacgcaacagtatattccgccgtgggagaaggaatctacggcggcggaaacaactaaagaagaatctggaaagaagctgcttatctacttaattcctctcttgatactcggcgttgctttcgctctcagattctacaacaacaagtag

SEQ ID NO: 390 - DNA, 1014 bp, Arabidopsis thaliana
atggcaaccgtcgatgtcatcaacggtgattcaatctcaactcttcattctgacataatccaaacccaaatcttgacccgactcgatggtccgacgctagcctccaccgcaacaacctcttcttacctccaaactctatgcacggaagagaaactctggcaagaactctccatcgacacgtggccttcgatcaatgatccacgtgttgtccaagctatctcctctttcccttccggttaccgttctttctttgctgactcgtacccgttcactgaacacacgtggcagtctgaaaaacatgatccaccgacgggattaatctcagccgttgatttatactacagaggagagattatatactcgaaggtacaagagatggaaacagagaaaggtaaatcaggatggttcttgtcatcaccgtttcgggtcgatatactcgacccgaaagagtcggtccaaacccggattcgatatccgggtggggactacgaagcgtgggtgaaagatatggaagagagcatgaaacttaattggatactaatcgatccgatcaagaaacgagcggcgaatatatctagtcgaaaggcggtgtcggcgcggcggaactggctaacgggggatttagaaatacggttttcaacggtagtgacggcggaggcggcggaagtggcggcggttgtgtcatgcgggtcagcggaagcgtggaaagaggtggatgaggaagtgggaggagaaatacacgtgagggacgtgaggctacaagtagaggacatagaaggaaaatgtatgaaaggtagggatagtttggtaattttacaagggttgttagatggaaagagatcgtgtaaagatgatgaagagagaagagctaaagaaaggtatgaagaatacgtgcgaatgaagatacaatggagagagaataaagagaggagagaaaaagctcaagacacaatttgtatgatctttgggttctctatgtttgtgcttttgtggagttttattttgttaaggtaa

SEQ ID NO: 391 - DNA, 1260 bp, Arabidopsis thaliana
atggataagcctctgctttcaggatcagagaaaacgaatgaatccgagaggttggattcataccaatacctgcagagaaatagctcatctgctcgtaacccatctttcgccggagctggcgtcgtcaccgtcgaagaaatccgtaccgcttctgctgtttcttctgatcctccgtctctttatcctcccgttatcaagacccctgtttcgttacccattcctcaagctattggttatccaagtgcatctggagcaggtcatgaattgcaacaaaggcagtttcttgatgagattgaaataagagagctgcttattgatcatattggtcatcgttgctgttggggaagccgtcctgctcgtacatggaagattcatgctgttgaagactgcaatgtttatgtcggaactcttgatactttcattgaggagagggaagctttgacacagactgtgcctttcactggtggtgaattcaatggaaagaaacatggatctgaaccggggttatgggaactggacctgagaccgcagtttcctactctgtttgtcccgtataaagaaactcaagtcctggttcctaattctgagactgttgagaagtgcacaggttgcaccggaagaggagatgtagtatgtccaacatgcaatgctgatggagagccaggattttacaaggagaatcagatgatgaagtgttccacttgctatggaagaggcttggttgctcataaagatgggtccgacacaatatgcaccaactgtaacggtaagggaaagcttccttgcccaacttgccaatctcgcgggttaatcaaatgtcagacttgtgacagtactggttctcttctgacaagtagtatcgcagttgtaaaatggaagactctgtcgaagcgaaaggtgagtgcaacaagaggagctgggtcagtaccagaagaagtatttgacagagcagaaggagttcagctttgcaacacacaagcttaccagtgcacgccagcttactttgcagactcatatttcctcaacagattctcctcagaagttatctcgttaagagctgaagttccaccgacagcgaatgtagtatgtgagagacacaccatatctgttgtgcctgtgactcgtgtcaccatggaagatcgtgggaaagcgttcagcttttacataatcggttttggtaaggagatatacttgaaagattattacccagcaagattctgttggggtttgtgtccctgtcttgagtggttaaaggtttga

SEQ ID NO: 392 - DNA, 1488 bp, Arabidopsis thaliana
atggtttccgaaacaaccaaatcttctccacttcactttgttctcttccctttcatggctcaaggccacatgattcccatggttgatattgcaaggctcttggctcagcgtggtgtgatcataacaattgtcacgacgcctcacaatgcagcgaggttcaagaatgtcctaaaccgtgccattgagtctggcttgcccatcaacttagtgcaagtcaagtttccatatctagaagctggtttgcaagaaggacaagagaatatcgattctcttgacacaatggagcggatgatacctttctttaaagcggttaactttctcgaagaaccagtccagaagctcattgaagagatgaaccctcgaccaagctgtctaatttctgatttttgtttgccttatacaagcaaaatcgccaagaagttcaatatcccaaagatcctcttccatggcatgggttgcttttgtcttctgtgtatgcatgttttacgcaagaaccgtgagatcttggacaatttaaagtcagataaggagcttttcactgttcctgattttcctgatagagttgaattcacaagaacgcaagttccggtagaaacatatgttccagctggagactggaaagatatctttgatggtatggtagaagcgaatgagacatcttatggtgtgatcgtcaactcatttcaagagctcgagcctgcttatgccaaagactacaaggaggtaaggtccggtaaagcatggaccattggacccgtttccttgtgcaacaaggtaggagccgacaaagcagagaggggaaacaaatcagacattgatcaagatgagtgccttaaatggctcgattctaagaaacatggctcggtgctttacgtttgtcttggaagtatctgtaatcttcctttgtctcaactcaaggagctgggactaggcctagaggaatcccaaagacctttcatttgggtcataagaggttgggagaagtacaaagagttagttgagtggttctcggaaagcggctttgaagatagaatccaagatagaggacttctcatcaaaggatggtcccctcaaatgcttatcctttcacatccatcagttggagggttcctaacacactgtggttggaactcgactcttgaggggataactgctggtctaccgctacttacatggccgctattcgcagaccaattctgcaatgagaaattggtcgttgaggtactaaaagccggtgtaagatccggggttgaacagcctatgaaatggggagaagaggagaaaataggagtgttggtggataaagaaggagtgaagaaggcagtggaagaattaatgggtgagagtgatgatgcaaaagagagaagaagaagagccaaagagcttggagattcagctcacaaggctgtggaagaaggaggctcttctcattctaacatctctttcttgctacaagacataatggaactggcagaacccaataattga

SEQ ID NO: 393 - DNA, 1083 bp, Arabidopsis thaliana
atggcgtcgatgatgtttaccgattgctcctccaccacgacgtcgcgtctcatccatttgaaccgaagcagcggtactttcctcctccgtcaatgcgtcggccaactccgtttacagaccactgcttctggccgtggctgctgcattcgctcctcttcttctcccatttcttccatttccgctgatacaaaatcagagggtggcgcaattgtaatagatggaaaggctgtggcaaaaaagattagagatgaaatcacaattgaagtttcaagaatgaaggaatcaattggtgtgattcctggtttagcagtaatccttgttggtgacagaaaagattctgcaacttatgtgaggaacaagaagaaagcttgtgactccgttggaatcaaatcgttcgaagttcgtctagctgaagattcatcagaagaagaggtgttgaaatctgtatcaggattcaatgatgatccttctgtccatggaatccttgttcagttgcctctgccatcgcatatggatgaacagaacatactgaatgcggttagtatagagaaagatgttgacggatttcatccgctaaatattggacggcttgccatgcgtggaagagaacccttattcgttccttgtactccaaaaggatgcattgagttgttgcatagatacaacattgaaatcaaaggaaagagagcggttgttatcggaaggagtaacattgtcggtatgccagctgctcttttactgcagagggaggatgcaaccgttagcattatccattcaagaaccaagaaccctgaagaaatcacaagagaagctgatattataatctcagctgttggacagccaaacatggtcagaggaagctggataaaaccgggcgcagtcctcatcgatgttgggattaatcctgttgaggatccaagtgctgcgcgtggatatcgattggttggagacatttgctacgaggaggctagcaaagttgcatcagccatcacacctgttcctggcggtgtaggaccaatgaccatagccatgcttctatccaacactttaacatcagctaagaggattcacaacttccagtga

SEQ ID NO: 394 - DNA, 648 bp, Arabidopsis thaliana
atgaagcttgtggagaagacgactactacagagcaggacaatggagaagatttctgccgcaccatcatcgaggtttccgaggttaacagaaacgtgtttcaggctccgggcggtgaagctgatccctttcgagttgtctccggcgaagaacttcacctaattccgccgctcaacttctccatggtcgataacggtatattccggtctggattccctgattcagctaacttctcctttctccagactctcggtctccgctcaatcatatacttgtgcccggagccctacccagagagcaatctccagttccttaaatccaatggaatcaggcttttccagtttggtattgaaggcaacaaggagccatttgtgaatattccagaccataaaatccgcatggcactgaaagtgcttctagatgagaaaaaccatcctgttctgattcattgtaagcgaggcaagcatcggaccggttgtcttgttggttgcttgaggaagctccagaaatggtgtttgacatcgatattcgacgagtaccaacgatttgcagcagcgaaagctagagtttcagatcaaagattcatggagatattcgatgtttccagcttcagtcatattccaatgtcattctcttgttccatcaggtaa

SEQ ID NO: 395 - DNA, 336 bp, Arabidopsis thaliana
atggagctatcgcagtgtgtaaatgcaagtttgtgtcttccaaagaaaccaaaattggtagttggattgaaagcagccactgcttacatatttgtggataatgcagcctatagaaatttcttatacgatacttttggagtctcctcctctgatatggagagttctgcagtagccatgacatgcgcatcaaatgggtatccgataattgtgataaggggtttatcagatttagctggagaaggaggagataacactgttcataagtttggatctttggctgccactaacactgccaaagctgttttagagttcattaggaagctcccaccgtactaa

SEQ ID NO: 396 - skipped

SEQ ID NO: 397 - DNA, 1215 bp, Arabidopsis thaliana
atgccaagccataaagaaacgaaatggagctttttggtttctgggaaacgatcttttctcaacaacgatgagtctgatcttcacttcaagaagatgtacaagcttactactgattcaagtgaaggagaagacaatggatcttcttcagattcaggaacacttatcccagggatgaacagagatgattcgttaagctgtttgattcgttgctctagagctgattactgctccattgcttctgtgaatcgtagcttacgttctttgattcgaagtggagagatttatagactcaggagactacaagggacgcttgagcattgggtttatttctcgtgccatctcaatgaatgggaagcttttgatccaagatcgaaacggtggatgcatttgccgagtatgccacagaacgagtgtttcaggtatgcagataaagagtctttggctgtaggaactgatttgcttgtgtttggttgggaagtgagttcttacgtaatctatagatacagtcttttgactaactcttggtctactgcgaagagtatgaacatgcctagatgtttgtttggctctgctagttacggagagattgcggttttagcgggtggttgcgattcgagcggtaggattcttgatactgcggagttgtataactacgaggatcagacttggttggtgttacccgggatgaacaagaggaggaaaatgtgttccggtgtgtttatggatgggaagttttatgtcattggtgggattggtgttggggaagagaatgagccaaaggttttgacttgtggggaagagtttgatttgaagactaggaaatggacagagatccctgagatgtcaccaccgcggtctaaccaggggaacggaatgtctgcagctgcgatggctccaccgcttgtagcggttgtgaatgaccagctttatgcagctgatcatgctggtatggcggttagaaggtatgataaagagaaacgtgtttggaataaagttgggaacttgcctgagcaagcgggttcgatgaacggttggggtttagcttttagagcttgtggggatcggattatagtgattggtggaccaaaggctccaggtgaaggattcattgagcttaactcatgggtaccaagtgttacaacaccggaatggcatttactaggcaagaaacagtcggttaatttcgtgtataattgcgccgtgatgagttgttga

SEQ ID NO: 398 - DNA, 1140 bp, Arabidopsis thaliana
atggaggaagaagatagcgtgattcctaagaatacagaaggagatgggcgtgttggaagtgatcttgaaggaatccgtaagccaaagaagatgaagaagatgagaagcaggaagagtgatgataaagagacgaagaagaagaagaaaaagtattggatgggttgtctcagagctgaatcagacgaaagtggaaacgtcgatttgactgttgatttccctggcgaacgcactgagccgactcacctagtcgtcatggtcaacggtctcatcggcagtgctcagaattggagattcgccgctaagcagatgcttaagaagtatcctcaggatctcctcgttcactgcagtaaacgcaaccattccacacagacatttgatggtgttgatgttatgggagaaagattagctgaagagaagatttcctttgtaggacattctttaggtggcctgattgctaggtatgctattgggcgtctttatgagcaagaatcccgagaagagcttccacataatagtgacgacattggtgataaatgctcgatagaggaaccgaaagcaagaatcgctggattagagcctgtgtattttataacttctgcaacaccacaccttggttcaagaggacataaacagagattagctacgcgtatgtcgggttgtcttggtaaaacgggaaaacatctttttctggctgatagtgatggtggaaagcctccattactcctccggatggttaaagattctagagatcttaaattcatttctgctttgcaatgcttcaaacggcaccttgttgggtggagtacatcgtctatccggcgtcacaatgagcttcctaagcttcaacgtggtccagtcaatgagaagtatcctcacattgtgaatgttgaagcaccggatactgcaagtaactatgaggaagatcattcaaggaccaaagcagacaggttcaagaacttagatatggaagaggagatgataagagaattaacaaaactgagctgggaacgagttgatgttagtttcagaggaacgctgcaaagatttctcgctcacaataccattcaggtgaaaacaaagatgatcaattcagctggagcagatgttatacaacacatgattgacaattttgagccatag

SEQ ID NO: 399 - DNA, 990 bp, Arabidopsis thaliana
atggatcacaatcattttctttttcctctcctcttcatcatcatcatctcttccttgcacgttttgcgtgcttcgaccacaccttcacactcacacaaactaaaatccgccactaccattagaaaaatcaaccgtagaggaccttacattggccttgtgacggtctttgagaccgaagaagatgcttttctcggcagtgttgatttcagactcgatcctacgcatcctttcctcgatctctctgggaagattcatggaaagaaggttgtgtatgtcagatgtgggataggaatggtgaacgcagcagcagcaacacaacaaatgatagatgtgttcagtgtgaaagggattgtgcattttgggattgctggaaatataaacaactcgatgtccataggagatgtgagcatccctaagcaaatcacgaatgctggcttgtgggattggctgaatccaggcaaagcaaaaggaaatgaggatgtagcgtacttagatgtcgggaactataatgttccacaaggaaacaataagttaggaactattggatacagttacgaggaattatattcagtcagtggtcacatcaattcaccaaagaaagtgttttggattaatacaactcaagagtggcttcatcttgcagctgatcttgagaagatggagctattgcagtgtgtgaatgcaagtctgtgtcttccaaataaacccaaagtagtagttggattaaaagcagccactgctgacatatttgtggataatgcagcctatagaaatttcttatacgatacttttggagtttcctcctcagacatggagagttctgctgtggccatgacttgcgtgtcaaatgggtatcccctaattgtgataagaggattatcagatttagcaggagtaggagataacactgttcgaaagtttggatctttggctgccactaacactgccaaagctgttttagagttcattaaaaagctcccaccgtcataa

SEQ ID NO: 400 - skipped

SEQ ID NO: 401 - DNA, 156 bp, Arabidopsis thaliana
atggccggaatagggaacggtctgagtaaaaacatgttcctcgtcgttcccattatacttatagcatcttctcgggcatgctcgttgtttttatcatcagaagctctctgcccgttactaccaattttttggacgcagaagaatgaaagaggatga

SEQ ID NO: 402 - DNA, 132 bp, Arabidopsis thaliana
atgctttgccaggttccctcaaggaatacttcatgtgtaatctgctctggacagggttctgctagctgtagcgattgcaaaggaacggggtttcgtgccaagtggttggaaaaacctccagtgccaacataa

SEQ ID NO: 403 - DNA, 1610 bp, Arabidopsis thaliana
atggcttatcgtcaaattttggccatagttttgtttctttgtgtgtttcaattcttggactgcactgttagctccgccgtagaagagaatgggactgtgtttgtgtacggaagagccgccgttggaacaatagatgaagacttcatttgcgccaccttagactggtggccaccggagaaatgtgactacggcagttgtagttgggaccatgcttcaattctcaatctggatttgaccattgttgttccaatttccaaaaacacagcatttgctccgttgaaaataagaataggaggaacattacaagacatagtgatatatgagacaccagattcgaagcaaccatgtcttccttttaccaaaaactcttcaattctttttggttacacacaaggatgtctacctatgcgtcgatgggacgagctcaatgccttctttcgcaaaaccggaactaaagtcatcttcgggctgaatgcactttctggacgttccataaaatctaacggtgaagccataggagcctggaattacaccaatgctgaatcgttcatccggtttacagcagagaacaattacaccatcgacgggtgggagctcggcaatgagctgtgtggaagtggtgttggtgcacgagttggtgcaaatcaatatgctatagacaccataaatctgcgaaacattgtgaaccgggtttacaagaatgtgagtcccatgccgttggtgataggtccgggtggcttctttgaagttgattggttcacagaatacctgaacaaagcagaaaactctctcaatgctactactcgacatatctacgatctcggtccaggagtcgatgaacatctgatagaaaagattctaaacccttcatatctggaccaagaggcaaaaagttttcgcagtctcaagaacataatcaaaaactcctcaacaaaggctgtggcatgggttggtgagtccggtggtgcctacaacagtgggcggaatcttgtctctaatgctttcgtgtatagtttctggtacctggaccagcttggtatggcatcgctttatgatacaaaaacatactgtagacagtctctgatcggaggaaactatgggctgctaaatactactaacttcacaccaaatccagactattacagtgctctgatctggcgacaacttatgggaagaaaggcattgttcacaaccttttccggaaccaaaaagatacgttcgtacacccattgtgcaagacaatcgaaagggatcacagttttactgatgaaccttgacaatactacaacggttgtagcgaaagtagagttaaataacagtttcagtctgagacatacaaagcacatgaagtcttataaaagagcaagttcccaactttttgggggtcctaatggagtaatccaaagagaagagtaccatttgacagcaaaggatggaaacctacacagtcagactatgctactcaacggaaatgctcttcaggttaattcgatgggtgatttacctcctatagagccgatacatataaattcaacagagccaataacaatagctccatattccattgtgtttgtgcatatgcggaatgttgttgtacctgcatgtgctta

SEQ ID NO: 404 - DNA, 753 bp, Arabidopsis thaliana
atggtgatgtgggtctttggctatggctctcttgtgtggaacccaggatttcactacgatgagaaagtgttaggtttcatcaagggatataaacgtgtctttgatcttgcttgcattgatcatagaggtacaccagaacaccctgcaagaacttgcaccctcgagaaagctgaagaagccatatgctggggtactgcattctgtgtccgtggaggaccagaaaaagaacgtctggctatggaggaagatgatcctctaaagccagctgtaactggagtgatagtattcacttctactcctgacaaggtctccaacaagtattatctcggacctgcgccattagaagacatggcaagattcttgtcctcacacttagctgttattttgtatattcaaagacaaatcgcgacagccaatggaccatgtggtaacaacagagattatctcttcctgctcgagaaggcaatgcacgacattggctttgtagtcaaaggttctgaccttgatggttttaagagagacattgtttttgatgtgttaagccattttttatttcacacagggcatgaggaggactatgttatagagctggcaaacgaggtgaggaaggttctggccgagtcctcgactaagaaggtgacaccggtgaaggaatcaagagcaagccgtgtagctaacaagtcgaagaacaatgtccccacggctcatcagatactacctcatcatccagaagctgttgccactacaatataa

SEQ ID NO: 405 - DNA, 576 bp, Arabidopsis thaliana
atgaaagcagtggtgagcaagttgtattgttcctcgatggaggaagtgatggtggtgagacgacggccacacgtggttaacggcggtggctttgtggtgacagattacaaagaaaagatagttttcaagatcgacggttgtggagttcttggaaccaaaggagagttagttctcagagatagtgatggcaacgatttgcttctcatccacaaaaagggaggagtggtgcaggctttgagcattcataacaagtggaaaggttatagttacgactaccaaggaagtcctaaaccggttttcacgttgagggatcccaaacactcttgcttctccataaccagttcaatccgcatctcggttggaccggggaattgctactttgatgttaaagggtatttcccggatagggattgtagcatcgttgattccaaaggaaatgtcattgcacaagtaaaagaatggattgggagtagagatatatataaggtggtgacaaaaccaagtgtggataaagcttttgtttttggagtaatcgcggttcttgactatatatatggtgaatctacaagttgttga

SEQ ID NO: 406 - DNA, 1536 bp, Arabidopsis thaliana
atgatgatgcgtgctgttataaggagagctgccagtaatggctcttctccttcgttattcgcaaaatcactgcagtcttctcgtgttgctgcatcttcccctagcttgctatcaggttcagaaacagggatttctatgtatctgcttattttcgatgaacaatctaataaagttttatttgagaatctgaacaggcatatctgcatcgtggaaatcatgctcatagctttcataaccttgctttgccagtttcttaagatttttgtgctcttattttgtttgtatcccactagcagggaactcgggcatctcgaggtcggcgagtttagtttcttcaaccctgcaaagatgggagataccgtggaagcagttgtgcctcatatgggggaatcaattactgatggcaccttggccacctttctgaagaaacctggtgagagagtccaggctgatgaggctattgcacaaattgaaactgataaggtgacaatagatattgctagcccagcaagtggtgtaatccaagaggtaaatatgtttgctctttgtgttgtttattcagtcgttattgttgttctctttctgtttctagtcaacgaaggagatactgtagaaccaggaaccaaggtcgctattatatcaaagtctgaggatactgcatctcaggttaccccctctcagaagataccagagacaactgataccaaaccttctcctcctgctgaagataagcagaagcccagagtggaaagtgctcctgtagcagagaaacccaaagcaccatcctcaccacctccacccaaacagtctgctaaagaaccgcagcttcctcctaaggaaagagaaagacgggttccgatgacaagacttcggaaacgagttgcaacaagattgaaagactctcaaaatactttcgcgttgctgacaactttcaatgaagttgatatgacaaatttgatgaagctccgatcccaatacaaggatgcattttatgaaaagcatggagtgaagttggggcttatgtctggatttattaaagctgctgttagcgcccttcagcatcaaccagttgtaaatgcagttattgacggggatgatatcatatacagagactatgtggatatcagtatcgctgttggtacctctaagggacttgtagtaccagtcataagaggtgctgataaaatgaactttgccgagatagagaagacgataaactcacttgccaagaaggcaaatgaaggaaccatatccatagatgagatggctggcggatcattcaccgtttcaaatggcggtgtctatggaagtctcataagcactccgatcattaatcctcctcagtctgccatactcggcatgcactcgattgtgtcacgtccaatggtagtaggaggaagcgtagtgcctagaccaatgatgtatgtcgcacttacgtatgatcacaggctgattgatggtagagaggctgtgtacttcctgcgccgtgtcaaggatgttgtggaggatccacaaaggcttcttcttgacatataa

SEQ ID NO: 407 - DNA, 1755 bp, Arabidopsis thaliana
atgatgatgtttaacgagatgggaatgtatggaaacatggatttcttctcttcctccacatctctcgatgtgtgtccattaccacaagctgaacaagaacctgtagttgaagatgtcgactacaccgatgatgagatggatgtggatgagcttgagaagaggatgtggagagacaaaatgcgtttgaaacgtctcaaggagcaacagagtaagtgtaaagaaggcgtcgatggttcgaaacagaggcagtcgcaagagcaagctaggaggaagaaaatgtctagagcccaagatgggatcttgaagtatatgttgaagatgatggaagtttgtaaagctcaaggctttgtttatggtattattcctgagaagggtaagcctgtgactggtgcttcggataatttgagggaatggtggaaagataaggttaggtttgatcgtaatggtccagctgctattgctaagtatcagtcagagaataatatttctggagggagtaatgattgtaacagcttggttggtccaacaccgcatacgcttcaggagcttcaggacacgactcttggttcgcttttatcggctttgatgcaacattgtgatccaccgcagagacggtttcctttggagaaaggagtttctccaccttggtggcctaatgggaatgaagagtggtggcctcagcttggtttaccaaatgagcaaggtcctcctccttataagaagcctcatgatttgaagaaagcttggaaagtcggtgttttaactgcggtgatcaagcatatgtcgccggatattgcgaagatccgtaagcttgtgaggcaatcaaaatgcttgcaggataagatgacggcgaaagagagtgctacttggcttgccattattaaccaagaagaggttgtggctcgggagctttatcccgagtcatgccctcctctttcttcttcttcatcattaggaagcgggtcgcttctcattaatgattgtagcgagtatgacgttgaaggtttcgagaaggaacaacatggtttcgatgtggaagagcggaaaccagagatagtgatgatgcatcctctagcaagctttggggttgctaaaatgcaacattttcccataaaggaggaggtcgccaccacggtaaacttagagttcacgagaaagaggaagcagaacaatgatatgaatgttatggtaatggacagatcagcaggttacacttgtgagaatggtcagtgtcctcacagcaaaatgaatcttggatttcaagacaggagttcaagggacaaccaccagatggtttgtccatatagagacaatcgtttagcgtatggagcatccaagtttcatatgggtggaatgaaactagtagttcctcagcaaccagtccaaccgatcgacctatcgggcgttggagttccggaaaacgggcagaagatgatcaccgagcttatggccatgtacgacagaaatgtccaaagcaaccaaacgcctcctactttgatggaaaaccaaagcatggtcattgatgcaaaagcagctcagaatcagcagctgaatttcaacagtggcaatcaaatgtttatgcaacaagggacgaacaacggggttaacaatcggttccagatggtgtttgattcgacaccattcgatatggcagcattcgattacagagatgattggcaaaccggagcaatggaaggaatggggaagcagcagcagcagcagcagcagcagcaagatgtatcaatatggttctga

SEQ ID NO: 408 - DNA, 2079 bp, Arabidopsis thaliana
atggaatcgcggcgagagaagaatccgatgacggaggaggaatctgatgggctaattgcggcgaggcggatccaacgattgtctttacacctatctccctccttgacgccgtcgccgtcgttaccgttggtgcagacggagacgtgttcggcgaggtcgaagaagctggatgtcaacggcgaagctttgtcgctgtatatgagaggaaaacatatagatatacaagagaaaattttcgactttttcaattcccgacccgatttgcagacgccgatcgagatctccaaggatgatcatcgggaattgtgtatgaatcagcttatagggcttgttagagaagctggggtaaggccgtttaggtatgttgctgatgatcctgagaagtatttcgcaatcatggaagctgttggaagtgttgatatgtcccttgggattaagatgggcgttcaatacagtctctggggaggctctgtgatcaatttagggactaagaagcatagagacaagtattttgatggcattgacaatcttgattacaccggttgctttgccatgactgaattacaccatgggtcaaatgtgcaaggtcttcagaccacggcgacattcgatccacttaaagacgaatttgtgatcgatacacctaatgatggagctatcaaatggtggattggaaatgctgcagttcatgggaagtttgccactgtttttgccaggcttatacttccaactcatgattccaaaggagtctcggatatgggtgttcacgccttcattgttccgataagggatatgaaaacacaccagacactccctggtgttgaaatccaagattgtggacataaagtgggacttaatggagtggataatggtgcgttgagattccgttctgtgagaataccccgtgataatcttctcaatcgttttggagatgtgtcccgagatgggacgtatacaagtagtttgccaacaatcaataaaagatttggtgcaacactcggtgagcttgtaggtggtcgagttggccttgcctatgcatctgttggcgtccttaaaatctctgcaacgattgccattcgttattctcttctaagacaacaattcgggcctccaaagcaacctgaggtcagtattctcgattaccagtctcaacaacacaagctcatgccgatgttagcctccacctatgcataccattttgcaactgtataccttgtggagaaatattcagagatgaagaagactcacgatgagcaattggttgctgatgtccatgcactctctgctgggctcaaatcttatgtgacgtcttacaccgccaaggcgctctcggtctgcagagaagcctgtggaggtcatggttacgcagctgttaaccgatttggaagcttgagaaatgatcatgacattttccaaacatttgaaggagacaacactgtacttctgcaacaggtggctgctgatttattgaagcgttataaagaaaagttccaaggcgggacattgacagttacatggagctacttgagagaatcaatgaacacttatttgtctcagccaaatcccgttacagcgcgttgggaaggtgaagatcatctaagagatcctaaattccaactagatgctttccggtatcgaacatcgcgattgctacaaaatgtggcagcgagattgcagaagcattcaaagactcttggtggtttcggggcatggaacagatgcttgaatcatcttttaacgcttgcagaatctcacattgaaacagtcattcttgccaagttcatcgaagctgttaaaaactgcccggacccaagtgcaaaagctgctctgaaactagcatgtgatctttacgcattggaccgaatctggaaagatataggaacgtaccgtaacgtggattatgtggcgcctaacaaagctaaggcgattcataaactgacagagtatttgagttttcaagtaaggaatgtggccaaggaactagtggatgcgttcgagctccctgatcatgttactcgagcaccaattgctatgcagtccgatgcttattcccagtatactcaagttgttggattctaa

SEQ ID NO: 409 - DNA, 1065 bp, Arabidopsis thaliana
atgatgataactcgcggtggagccaaggcggcgaaatcgctgttagtggcggctggaccacgtttgttctcgacggtccgtacggtttcgtctcacgaggctttatcagcaagccatattttgaagcctggtgttacatctgcttggatatggactagagctccgacgattggaggtatgagattcgctagcacgatcactctgggagagaaaactccgatgaaggaggaggacgcgaatcagaagaaaacagagaacgaatccaccggtggagacgccgccggaggtaataacaagggagataaaggaatcgcgagctattggggtgttgaacctaataagattactaaagaagatggttctgaatggaagtggaactgtttcaggccatgggaaacgtataaagctgatataacgatagatctgaagaagcatcatgttccaacgacgtttcttgatagaatagcttattggactgttaaatctcttcgttggcctaccgatttgttcttccagaggagatatggatgtcgagctatgatgcttgaaactgtagcagcagtacctggaatggttggaggaatgttactacactgcaaatcgcttcgacgttttgagcaaagtggaggatggattaaggctcttcttgaggaagcagagaatgagagaatgcatcttatgacattcatggaagtcgcgaaaccgaaatggtacgagagagcgctcgtgatcactgtgcaaggagtcttcttcaacgcttatttccttggttacttaatctctcccaagtttgctcatcgtatggttgggtaccttgaagaagaagcgatccattcttatactgagtttctcaaggaacttgacaaaggtaacattgagaatgttcctgctccggctattgctattgattactggaggcttcctgctgatgcgacacttcgtgatgttgtgatggttgttcgtgctgacgaggctcatcaccgtgatgtaaaccattttgcatctgatattcactaccaaggtcgtgaactaaaggaagctccagctccaattgggtatcattga

SEQ ID NO: 410 - DNA, 1236 bp, Arabidopsis thaliana
atgaatgctttagctgcaacaaacagaaacttccgtcatgcatctcgaatcctgggtttggattcgaagatcgagagaagtcttatgatcccatttagagaaatcaaggttgagtgtacgattcctaaagacgatggcactctggtttcatacatcggatttagggttcaacatgacaatgctcgtggacccatgaaaggtggaatcagatatcatcctgaggttgatccagatgaagttaacgcactagctcagctgatgacttggaagactgctgtagcagatattccatatggtggtgctaaaggtggaattggatgtagtcctcgtgacttgagtttgagcgagcttgagaggttgactcgtgtgtttacacagaagattcatgatcttatcggtattcataccgatgtgcctgctcctgatatgggcactaacgctcaaaccatggcttggattcttgatgagtactccaagtttcatggtcattcccctgctgttgtcactggaaagcccattgatcttggtggttcattaggtagggaagctgccacaggtcgtggtgtagtatttgccaccgaagctcttcttgctgagtacgggaaatcgattcagggtttgacatttgttattcaaggttttgggaatgttggaacatgggctgcgaagctgatccacgagaaaggcggtaaagtggttgcagtaagcgacattactggtgcaatcaggaaccctgaaggtatcgacatcaacgctctcataaaacacaaggacgcaactggaagtctcaatgatttcaatggtggagacgctatgaattcagatgaattgctcattcatgagtgtgatgttctcattccatgcgctcttggtggtgtcctgaacaaggaaaatgctggagatgtgaaggcaaagtttatagtagaggcagctaaccatccaacagatccagatgctgatgagattctgtcgaagaaaggagtgattatacttccagatatctacgcaaacgcaggaggagtgacagtgagttacttcgagtgggtgcagaacattcaaggattcatgtgggaagaggaaaaagtgaacttggagctgcaaaaatacatgactcgagcctttcacaacatcaagacaatgtgccatactcattcttgcaacctccgtatgggagctttcactcttggagttaaccgagtcgctcgagccacccagttgcgtggttgggaagcttaa

SEQ ID NO: 411 - DNA, 963 bp, Arabidopsis thaliana
atggcatcaattctcaggtcagtggcaacgacttcagccgtcgtagccgccgcctctgcgattcccatcgcgatcgccttctcttcttcttcttcttcttcctctaccaaccccaaatctcaatctctcaatttctccttcctctcccgatcgtctccacgtctcttgggactttcacgaagcttcgttagctctccgatggcgactgctctcacttctgatcgtaatctccatcaggaggatcgagccatgcctcagcttcttactgagtttatggtggatatgacatgtgagggttgtgttaatgctgtgaagaacaaattagaaaccattgaaggtattgagaaagtggaggtggatttgtccaatcaagttgtgaggatacttggatcttcccctgttaaggctatgactcaagctttggagcaaactggtcgaaaagctcgcttaattggacaaggtgttcctcaagatttcttagtctcagctgcagtagcagaattcaaaggccctgacattttcggggtagtccgatttgctcaggtcagtatggaacttgcaagaatcgaagccaactttaccggtttgtcacccggaacccacagctggtgtatcaacgagtatggagatctcacaaacggagcagccagcacagggagcttgtacaatccatttcaagatcaaactggcacagagccattgggagacctgggaacactagaggcagacaaaaacggagaggccttttattcgggaaagaaagagaaactcaaggttgcagaccttatcgggagagccgtcgtggtgtacaagaccgatgataataagtcaggccccggattgaccgccgcagtgattgctagaagcgcaggggttggagaaaactacaaaaaactttgttcttgtgatggtactgtcatatgggaagctacaaacagcgatttcgtggccagtaaggtttaa

SEQ ID NO: 412 - DNA, 855 bp, Arabidopsis thaliana
atgatgttcgagaaagacgatctgggtctaagcttaggcttgaattttccaaagaaacagatcaatctcaaatcaaatccatctgtttctgttactccttcttcttcttcttttggattattcagaagatcttcatggaacgagagttttacttcttcagttccaaactcagattcgtcacaaaaagaaacaagaactttcatccgaggaatcgacgtgaacagaccaccgtctacagcggaatacggcgacgaagacgctggagtatcttcacctaacagtacagtctcaagctctacagggaaaagaagcgagagagaagaagacacagatccacaaggctcaagaggaatcagtgacgatgaagatggtgataactccaggaaaaagcttagactttccaaagatcaatctgctattcttgaagagaccttcaaagatcacagtactctcaatccgaagcagaagcaagcattggctaaacaattagggttacgagcaagacaagtggaagtttggtttcagaacagacgagcaagaacaaagctgaagcaaacggaggtagactgcgagttcttacggagatgctgcgagaatctaacggaagagaaccgtcggctacaaaaagaagtaacggaattgagagcacttaagctctctcctcagttctacatgcacatgagcccacccactactttgaccatgtgcccttcatgtgaacacgtgtcggtcccgccaccacaacctcaggctgctacgtcagcgcaccaccggtcgttgccggtcaatgcgtgggctcctgcgacgaggatatctcacggcttgacttttgacgctcttcgtcctaggtcctaa

SEQ ID NO: 413 - DNA, 810 bp, Arabidopsis thaliana
atgtctcctttcaaaatattcttcttcacgactcttctcgtggcggcgttttcagtgtcggctgctgatttcaacactgacgtcaacgtagcttggggaaatggccgtgggaagatactcaacaacggccagcttcttactctctccttagacaaatcctctggttccggttttcaatccaaaacagagtatttgtttggaaagattgatatgcagattaagcttgttcctggtaactctgcaggaacagtcacaactttttacctaaaatccgaaggatccacttgggatgagattgattttgagttcttgggtaatatgagtggagatccttatactttacacactaatgtttacactcaaggtaaaggtgacaaagagcaacaattccatctctggttcgacccaaccgccaatttccacacttactcaatcctctggaaccctcaaagaatcatattgaccgtcgatgacacacccattagagagtttaaaaactatgagtctctcggtgtcttgtttccaaagaacaagccgatgaggatgtacgcgagtttatggaacgcagacgattgggcaacaagaggcggtcttgttaaaactgattggtctaaagctccattcatggcttcttacagaaacattaagattgactcgaaaccaaactccaattggtacactcaagaaatggattcaacaagccaagctagactcaaatgggttcagaagaattacatgatctacaattattgtactgaccataggaggtttccacagggagctcctaaggaatgcacaacaagctcatag

SEQ ID NO: 414 - DNA, 666 bp, Arabidopsis thaliana
atggcgcaacaatcgttgatctacagtttcgtcgctcgtggtaccgttatcctcgttgagttcacagatttcaaaggcaatttcacatcaatcgctgctcagtgccttcagaagcttccttcttctaacaacaagtttacctacaactgcgatggtcacacgttcaattacctcgtcgaaaatggattcacctattgtgttgttgcagttgattctgctgggaggcagattcctatggctttcttggaacgagttaaggaggatttcaacaagagatatggtggtggaaaggctgcaactgctcaagcaaacagcttgaataaagaatttgggtcgaaactgaaagagcatatgcagtattgcatggatcatcctgatgagattagcaagcttgctaaggttaaagctcaagtgtctgaagttaaaggtgttatgatggaaaacattgagaaggttcttgaccgtggtgagaagattgagcttttggttgacaaaacagaaaaccttcgctcacaggcgcaagattttagaacacaaggaactcaaatgagaagaaagatgtggtttcagaacatgaagataaagctcattgtccttgcaattatcattgccttgattctcatcatcatcctctcaatttgtgggggattcaactgcggtaaataa

SEQ ID NO: 415 - DNA, 1008 bp, Arabidopsis thaliana
atgacgtcgttttgctccatgatttctcttcttcttcttctctctctttcatcggcggttttctccgatgacgcttctttccagaaacttccggtgccggaaactaggtcaggtcccgaagctttcgcttttgattccaccggtaaagggttctataccggtgtctccggtggtaaaatcctcaagtacctccccgagacgggttatgttgactttgcccagatcactgaatcctcgaactcttcatggtgcgatggtactattggaacggctttagccggacgctgtggtcgaccagcaggaatagcattcaacgagaaaacaggtgatctttacgtcgccgatgctccgttgggtcttcacgttatttctcccgccggtggtttggctacgaagatcaccgacagtgttgacggaaagcctttcaagtttcttgacggtcttgacgttgatcccactactggtgtcgtctacttcacttccttcagctcacgcttctccccaatccaagtgttgattgcattggggttaaaggacgcgaccggaaagctctacaaatacgacccatcgaccaaagtcgtgactgtactgatggaagggctaagtggttcagccgggtgtgcagtgagctcagatggttcgtttgtgctggttagtcagttcacaaaaagtaacatcaagaggtattggatcaagggacccaaagctggttcttctgaagacttcaccaactcagtctcaaaccctgacaatatcaaaagaattggctctactggaaacttttgggtcgcttcagtggtgaacaagatcatcgtacctacgaacccatcagcagtcaaagttaactctaatggtgaagttcttcaaacaattcctctcaaagataaatttggagacactctgctcagcgaagtcaacgaattcgagggcaatttatatataggaactctcaccggaccatttgctggaattcttaagctcgaaaagggttcttgtcctgccacttag

SEQ ID NO: 416 - DNA, 770 bp, Arabidopsis thaliana
atgggttcgtcttcttctttctcctcttcttcctcgaagcttctctttcgtcaactctttgagaacgaatcttccacctttacttatcttctcgccgacgtttctcatcctgataaacctgctttgttgattgatccggtggacaagactgtggatagagacttgaaactgattgatgagttaggactaaagcttatctatgctatgaacactcatgttcatgctgatcatgtcactggtactggacttcttaagacgaagctcccgggtgtgaaatccgttatttcgaaagcaagtggttccaaagctgatttgtttcttgaacctggtgacaaagtatctattggtgatatataccttgaggttcgtgctacacctggacacactgcaggatgtgttacatatgtgactggtgaaggagctgatcagccccaaccaagaatggcttttaccggggatgctgtactcatccgtggttgtgggaggactgactttcaggaaggaagctcagatcaactctacgagtctgtacattcacagatatttacattgccaaaggacacattgatctatcctgctcacgactacaaaggtttcgaggtaagtacagttggagaagagatgcaacacaacccgcgtctaactaaagataaagaaacattcaaaaccattatgtcaaatctgaatctgtcgtatccgaagatgattgatgttgcagtaccagcaaatatggtctgtgggttacaagatgtgccttctcaagccaacta

SEQ ID NO: 417 - DNA, 1875 bp, Arabidopsis thaliana
atggcattttcatcttcgtgttcgtccgtcaaagccgtcaactcacggtggacgtctccgtctccgtcaccgtcttctagattcgccgtcctccctgctttccttcaccgccgttacgcaacaagcgtcaaactaacggccataagcgccgccttaaaaaccgtcgagcaaacgacgttaacagaggataacagattctcaaccgtcggatctgactctgatgaatacaatccaactcttccaaagccgaggatcctcgtcaccgagaaactgggagaagccggcgtgaatctcctcagggaattcggcgacgttgactgctcttacgatctttcgccggaagatctgaagaagaaagtggcggagagtgacgctctgatcgtgagaagcggaactaaagtgacgagggaagtgtttgaggcggcgaaggggaggttgaaagtggtcggaagagccggagttgggattgacaatgttgatctgcaggcggcgacggagcacgggtgtttggtggttaatgctccaacggctaatacggtggctgctgccgaacatggaattgctttgcttgcttctatggcacgtaacgttgctcaggccgacgcttctattaaagccggaaaatgggagaggagcaagtacgtcggtgtatctctcgtcggaaaaaccttggccgtgatgggtttcgggaaagttgggacggaggtggcgagaagagccaaaggtctaggcatgaccgttatctcccacgacccttacgcgccagctgacagagccagagctctcggtgtcgatcttgtttcattcgatcaagctatctccaccgccgatttcgtctccctgcacatgcctttaactccggccaccaaaaaggtcttcaacgacgaaactttctctaagatgaagaaaggtgtgcgtctcattaatgtcgctagaggtggcgtcatcgacgaggatgcactcgttagagctctcgatgccggaatcgttgctcaggcagcattagatgtgttctgtgaggaaccaccatcgaaagatagcagactaattcagcatgaaaatgttactgtgacacctcatcttggagctagcacaaaagaagctcaggaaggtgtagccattgagatagcagaggctgtagcaggggcattgaaaggagagttatcagctactgccgtcaatgctccaatggtggctcctgaggtcttgtctgagttgactccttatattgtcttagctgagaagcttgggaggttagctgtgcagttagcatctggaggtaaaggagtacagtccattagggtggtctatcggtcagctcgtgaccgagatgatttggatactagactacttcgtgcaatgatcacaaagggaatcattgaaccgatctcagattcatatgtcaacttggtgaatgctgatttcatagctaaacaaaagggtcttcgtattagtgaggaacgaatggttgttgattcatcaccagagtaccctgttgattccatccaagttcagattttgaatgtggagtcaaatttcgctggtgctgtctctgatgctggtgatataagtattgaagggaaggtgaagtacggagttccgcatttaacttgtgtcggatcatttggtgtggatgtgagccttgaagggaatctgatactgtgcaggcaagtggatcaaccagggatgattggacaggttggtaacatacttggagaacaaaacgtgaatgtgaatttcatgagtgttggaagaacagtgttgaggaaacaagcgataatggcgattggagttgatgaagaaccagacaacaaaacacttgagaggattgggggtgtttctgcgattgaagagtttgtgtttcttaaactataa

SEQ ID NO: 418 - DNA, 3966 bp, Arabidopsis thaliana
atgagcttggttttcgccattaatggacaaaggttcgagcttgagctctcctctgttgacccttcaacaactttgttggagtttcttcgttatcagacttctttcaagagtgtcaagctcagctgcggtgaaggaggatgtggtgcttgtgttgttcttctctccaagttcgatcctgtcttacaaaaagtcgaagatttcactgtgagctcttgtcttacactcctctgcagcgtcaaccactgcaatattacgacatcagaaggacttgggaacagcagagacggtttccacccgattcacaagcggttatccggtttccatgcctctcaatgtggtttctgtacacctggaatgtctgtttctctcttctctgctcttttagatgctgacaagtctcaatattccgaccttacggttgtggaagcagagaaggctgtctcaggaaacttatgtcggtgtactggttaccgtccgattgttgatgcttgtaagagctttgcttcggatgttgacattgaggatcttggattaaactctttttgtaggaaaggggataaagattctagtagtttaactcggtttgatagtgagaagcgtatttgtacatttccagagtttctcaaggatgagattaagtctgtggattctggaatgtaccgatggtgcagcccagcgagtgttgaggaactctcgagcttattggaagcttgcaaggctaatagtaatacagtttctatgaaattggttgctggtaacacaagtatgggatactataaagatgaaagagagcagaattacgacaaatacatagatataactcgaatcccgcaccttaaagagatcagagaaaaccagaatggggttgagataggatcagtggtaacaatctctaaagttattgctgctctgaaggagattagggtctcaccgggagtggagaagatatttggaaaacttgctactcatatggaaatgatagcggcgagatttatcaggaactttggtagcattggtggaaaccttgtgatggctcagaggaaacagtttccttctgatatggctacaatacttcttgcagctggtgcatttgttaacataatgagctcatcaagaggactcgaaaagctaacacttgaagagttccttgaacgttctcctcttgaggctcatgatctggttctgagtattgaaattcctttttggcattctgaaacaaactctgaattgttctttgaaacctatagagctgcacctcgtccacatggaagcgctctggcttacctgaatgctgctttcttggctgaagtgaaggatacaatggtagttaactgtagattggctttcggggcttacgggaccaaacacgccattaggtgtaaggaaatcgaagagttcctgtctggtaaagtaatcactgacaaagttctgtatgaggctattaccttacttggcaatgttgtggtgcctgaagacggtacaagcaatcctgcttacaggtcaagcttggcgcctggcttccttttcaagttccttcacaccttaatgacccatcctactacagataaaccttcaaatggttaccacttggatccaccaaaaccgttgccaatgttgtcttcttcacaaaatgttcctataaacaatgaatataatccagttggtcagcctgttactaaagttggagcttcccttcaggcttctggtgaggctgtttatgtggacgatattccatctcccacaaactgtctctatggagcatttatctatagcaaaaagccattcgctaggataaaaggtattcacttcaaggacgatttggtacctactggagttgttgcagtcatttctcgcaaggatgttcctaaaggcggaaagaatattggtatgaagattggattaggctccgaccaattgttcgcagaggatttcaccactagtgtaggcgaatgcatcgccttcgtggttgctgatacgcagagacatgcggatgctgcagtaaaccttgcagttgttgaatacgagacagaggatttggaaccaccaatcttatctgtagaagacgcggtcaagaaatctagtctgtttgacattatccctttcctttatccacaacaagttggtgatacatcaaaaggaatggctgaagctgatcaccaaattctcagctcggaaataagactcggatcgcaatacgtcttctacatggagacacaaacagctcttgcagtgggagatgaagacaactgcattgtagtctatagttcaacacagacccctcagtacgtacagtcatcggtcgctgcttgcctaggcatccctgaaaataacatccgtgtcataaccagacgtgttggtggaggttttggagggaaatctgtcaagtcaatgccagttgcaacagcgtgcgctcttgctgctaagaaactgcagcgtcctgtgagaacttatgtcaaccgcaagaccgatatgataatgactggtgggaggcatccgatgaagataacgtatagtgtggggttcaaatctacagggaagatcacagctttggagctagaaatactaattgatgctggggcaagttatggttttagtatgtttattccatcaaatctcatagggtcgctaaagaagtacaattggggcgccttatcttttgatatcaaactttgtaaaacaaatcttctaagcagagcaatcatgagatccccgggggacgtgcagggtacgtatattgctgaagccatcatcgaaaatatagcctctagcctctctttggaggttgatacaataagaaagattaatctccatacacatgagagcttagccctgttctacaaggatggtgctggtgaaccacatgagtatactttatcttcgatgtgggataaggttggcgtatcttccaagtttgaggagagggtttctgttgtcagagagttcaacgagtctaacatgtggagaaaacgagggatatctcgagtacctattatctatgaggttttattgtttgctactccagggagagtaagtgttttgagcgatgggacgattgttgttgagattggtggaatcgagctaggacaagggttatggacaaaggtgaagcagatgactagttatgctcttggtatgctacaatgcgatggaacggaagaactcttggagaagataagagttatacaatcagattcattgagcatggtccaaggaaatttcacaggaggtagcacaacatccgagggaagctgcgcagctgttcgtctctgctgcgaaaccttagtcgaaagattgaaacctttaatggaaagatcagatggtccaatcacctggaatgagttgatttctcaggcttatgcacaatccgtgaacttatcagctagtgacttgtatactccaaaagacactcccatgcagtacctgaactatggtactgcggtcagcgaggttgaagtagaccttgtgacgggacaaaccacagttctacagacagatatcttatatgactgtggaaaaagtctcaatcccgctgtcgatttaggacagattgaaggatcttttgttcaaggacttgggtttttcatgcttgaagagtacatagaagatccagaaggactccttctgacggatagcacatggacatacaagattccaacagttgacaccattcctaaacagttcaatgtcgagatactaaatggtggatgtcatgaaaaacgcgtactctcttctaaagcctcgggagagcctccgttgctactggcagcttcggtgcactgcgctaccagacaggctgttaaagaagcacgcaaacagctatgtatgtggaaaggtgagaatggttcctccggttcagcgtttcagttgccagttccagctacaatgccggttgtgaaggagctatgcggtctagatatcattgaaagctatttggagtggaagttacacgacaactcaaacctatga

SEQ ID NO: 419 - DNA, 465 bp, Arabidopsis thaliana
atggatttggttcagaagcagaagagtttgcaagattacaccaaatcactcttcttagaagggattttggacagccagttcttgcagctgcaacaactacaagatgaaagcaatccagattttgtttcacaagttgtcacactcttcttccaagactctgataggattctcaatgatctctcactttccctagatcaacaagttgtagactttaaaaaagttgatccccatgttcatcaactcaaaggtagcagctccagtataggagcacagagagttaagaatgcttgtgttgtcttccgcagcttctgcgagcagcaaaatgtcgaagcatgtcatagatgtttgcaacaagtgaagcaagagtattatcttgtgaaaaacagattagagactctgttcaagctggagcaacagattgtagcttctggtggaatgatcccggccgtcgaactcggattttga

SEQ ID NO: 420 - DNA, 1788 bp, Arabidopsis thaliana
atgaataaatggttaaacagaaaacctaaagtttacgattttagcgaagacgaaattgatacagaacctgagagcgaagacgatgatggtggtgtgagtgtgaggggtggttaccaaaggaaacaccggcgaggcaaatcggagactttgagagctcaatacattaacacaaaggatatcaaagtgacggtggctacatggaacgtcgccggaaaacgtccctccgatgatctcgagattgaagattggctctctactgataatccttcagatatttacattatcgggtttcaagaagtggttccattaaacgctggaaacgttttcggagcagaagatagaggtccgattccgaaatgggaatcgataattcgtagaacactaaacaaatccaataaagaatcagtttatgatcaatcgccaagctgcaacaacaacgctcttcatagatctcacagcgcgccgtcgtctcctatcttggcacaagaagcaaactccattatctctcatgtcatggtagagaatctagttgcggaccactcgctggatttagctacaaacgagttcatcgatgctgcaaccgctttaccgagccttgaaccacagcggaatccgaacatggactggccggaactagctttagatagcaaccctcagatagttggatcagaggggaagctaaggagggtatttagcagcaacgcgacgctaggatttaagctaccggagaatccatcaggagctagtagatttgcttcggaagcaagacaattgaaacgctcacggagctttgaaactttaaacttgagttggaatgatataaaagaagagattgataataggtcctcctcctcgtccgaagcggaagaagctgcaaaaatcatgcatgatgattcatcagacggagattcgtcttcccaggacgaagaggatggtgacaagatcagaaatagttatggattgccggaagatttggtggaggagtgtcggaaagtgaaagatagtcaaaagtatgtaaggatagtaagtaagcaaatggttgggatctatgtatcggtttggatccgacgacggttaagaagacatgtcaacaacctgaaagtctcaccggtcggagttggcttgatgggctacatgggaaacaagggatcagtgtcgattagcatgacgttgtatcaatcacggatgtgttttgtgtgctcacacttaacttccggccacaaagacggtgctgagcaacgccggaatgctgacgtgtacgaaatcatacgtaggactcgttttgcatcggttcttgacactgatcaaccaaggacgattccatgtcacgatcaagtattttggttcggagatttgaactaccgacttaatatgtcagacggtgaagtaagaaagcttgtctcacaaaaacgatgggatgagctcaagaacagtgatcagttgattagagaattaagaagagggcatgtttttgatggatggagagaaggaccgattaaattccctccaacctataaatacgaattcgattctgatcgttacgccggagaaaacttgagagaaccggagaagaagagagctcctgcttggtgtgataggatattatggttaggaaaaggaataagacaagaatgttataagagatcggagataagaatgtccgatcaccggccggtgacttcgatttttaacgttggagttgaagtgttcgatcaccggaaacttcaaagagctcttcacgttaataacgcagctgcttctgctgttcatcctgaaccttctttttga

SEQ ID NO: 421 - DNA, 945 bp, Arabidopsis thaliana
atggcaacatgcatagacacatgccgaaccggtaatacccaagacgatgattcccggttctgttgcatcaagaatttctttcgacccggtttctctgtaaaccggaagattcaccacacccaaatcgaagatgacgatgatgtctggatcaagatgcttgaagaagccaaatccgatgttaaacaagaacccattttatcaaactactactacgcttcgatcacatctcatcgatctttagagtctgctttagctcacatcctctccgtaaagctcagcaatttaaacctaccaagcaacacactcttcgaactgttcataagcgttttagaagaaagccctgagatcatcgaatccacgaagcaagatcttatagcagtcaaagaaagagacccagcttgtataagctacgttcattgcttcttgggcttcaaaggcttcctcgcttgtcaagctcatcgaatagctcataccctctggaaacagaacagaaaaatcgtagctttattgatccaaaacagagtatcagaatctttcgccgtcgatattcatcccggagcgaagatcggaaaagggattcttttagaccatgcgacgggcgtggtgatcggagagacggcggtggttggagacaatgtttcgattctacacggagtgaccttgggaggaacagggaaacagagtggtgatcggcatccgaagattggtgatggtgtgttgattggagctgggagttgtatattggggaatataacaatcggtgagggagctaagattggatcagggtcggtggtggttaaggatgtgccggcgcgtacgacggcggttggaaatccggcgaggttgattggtgggaaagagaatccgagaaaacatgataagattccttgtctgactatggaccagacatcgtatttaaccgagtggtctgattatgtgatttaa

SEQ ID NO: 422 - DNA, 717 bp, Arabidopsis thaliana
atggcacttgaaactcttacttctccaagattatcttctccgatgccgactctgtttcaagattcagcactagggtttcatggaagcaaaggcaaacgatctaagcgatcaagatctgaattcgaccgtcagagtctcacggaggatgaatatatcgctttatgtctcatgcttcttgctcgcgacggagatagaaaccgtgaccttgacctgccttcttcttcgtcttcacctcctctgcttcctcctcttcctactccgatctacaagtgtagcgtctgtgacaaggcgttttcgtcttaccaggctcttggtggacacaaggcaagtcaccggaaaagcttttcgcttactcaatctgccggaggagatgagctgtcgacatcgtcggcgataaccacgtctggtatatccggtggcgggggaggaagtgtgaagtcgcacgtttgctctatctgtcataaatcgttcgccaccggtcaagctctcggcggccacaaacggtgccactacgaaggaaagaacggaggcggtgtgagtagtagcgtgtcgaattctgaagatgtggggtctacaagccacgtcagcagtggccaccgtgggtttgacctcaacataccgccgataccggaattctcgatggtcaacggagacgaagaggtgatgagtcctatgccggcgaagaaactccggtttgacttcccggagaaaccctaa

SEQ ID NO: 423 - DNA, 1338 bp, Arabidopsis thaliana
atgggccaccaaaacgccgccgtttcagagaatcaaaaccatgatgacggcgctgcgtcgtcgccgggattcaagctcgtcggattttccaagttcgtaagaaagaatccaaagtctgataaattcaaggttaagcgcttccatcacatcgagttctggtgcggcgacgcaaccaacgtcgctcgtcgcttctcctggggtctggggatgagattctccgccaaatccgatctttccaccggaaacatggttcacgcctcttacctactcacctccggtgacctccgattccttttcactgctccttactctccgtctctctccgccggagagattaaaccgacaaccacagcttctatcccaagtttcgatcacggctcttgtcgttccttcttctcttcacatggtctcggtgttagagccgttgcgattgaagtagaagacgcagagtcagctttctccatcagtgtagctaatggcgctattccttcgtcgcctcctatcgtcctcaatgaagcagttacgatcgctgaggttaaactatacggcgatgttgttctccgatatgttagttacaaagcagaagataccgaaaaatccgaattcttgccagggttcgagcgtgtagaggatgcgtcgtcgttcccattggattatggtatccggcggcttgaccacgccgtgggaaacgttcctgagcttggtccggctttaacttatgtagcggggttcactggttttcaccaattcgcagagttcacagcagacgacgttggaaccgccgagagcggtttaaattcagcggtcctggctagcaatgatgaaatggttcttctaccgattaacgagccagtgcacggaacaaagaggaagagtcagattcagacgtatttggaacataacgaaggcgcagggctacaacatctggctctgatgagtgaagacatattcaggaccctgagagagatgaggaagaggagcagtattggaggattcgacttcatgccttctcctccgcctacttactaccagaatctcaagaaacgggtcggcgacgtgctcagcgatgatcagatcaaggagtgtgaggaattagggattcttgtagacagagatgatcaagggacgttgcttcaaatcttcacaaaaccactaggtgacaggccgacgatatttatagagataatccagagagtaggatgcatgatgaaagatgaggaagggaaggcttaccagagtggaggatgtggtggttttggcaaaggcaatttctctgagctcttcaagtccattgaagaatacgaaaagactcttgaagccaaacagttagtgggatga

SEQ ID NO: 424 - DNA, 1059 bp, Arabidopsis thaliana
atggcggctcttttaggcagatcctgccggaaactgagttttccgagcttgagtcacggagctaggagggtatcgacggaaactggaaaaccattgaatctatactctgctattaatcaagcgcttcacatcgctttggacaccgatcctcggtcttatgtctttggggaagacgttggctttggtggagtctttcgctgtacaacaggtttagctgaacgattcgggaaaaaccgtgtcttcaatactcctctttgtgagcagggcattgttggatttggcattggtctagcagcaatgggtaatcgagcaattgtagagattcagtttgcagattatatatatcctgcttttgatcagattgttaatgaagctgcaaagttcagataccgaagtggtaaccaattcaactgtggaggacttacgataagagcaccatatggagcagttggtcatggtggacattaccattcacaatcccctgaagctttcttttgccatgtccctggtattaaggttgttatccctcggagtccacgagaagcaaagggactgttgttgtcatgtatccgtgatccaaatcccgttgttttcttcgaaccaaagtggctgtatcgtcaagcagtagaagaagtccctgagcatgactatatgatacctttatcagaagcagaggttataagagaaggcaatgacattacactggttggatggggagctcagcttaccgttatggaacaagcttgtctggacgcggaaaaggaaggaatatcatgtgaactgatagatctcaagacactgcttccttgggacaaagaaaccgttgaggcttcagttaaaaagactggcagacttcttataagccatgaagctcctgtaacaggaggttttggagcagagatctctgcaacaattctggaacgttgctttttgaagttagaagctccagtaagcagagtttgtggtctggatactccatttcctcttgtgtttgaaccattctacatgcccaccaagaacaagatattggatgcaatcaaatcgactgtgaattactag

SEQ ID NO: 425 - DNA, 396 bp, Arabidopsis thaliana
atgaattctaaggcaatgcaagctttgatctttcttggtttcttggccacttcatgtctcgctcaagctcctgcaccagcaccaaccaccgttactcctccaccaacggcgcttcctccagtgacagcagaaacaccttcaccaattgcttcaccgcctgttccagttaacgagccaactccagctcctaccacttctccaacaacatccccggttgcttctcctcctcagaccgatgctcctgctcccggtccttccgctggattaactccaacttcgtctccagctccaggaccagacggtgctgctgatgcaccaagtgccgcatgggctaacaaagctttccttgtgggaacagctgttgccggagctttatacgctgtcgttttggcttag

SEQ ID NO: 426 - DNA, 1170 bp, Arabidopsis thaliana
atgggttacataggagctcatggtgtagctgctcttaagaaacacaaatacagtggtgttgatcactcttatcttgccaaatatgttctccaacctttttggaaccgttttgtcaaaatcttccctctatggatgccccccaacatgataacacttatggggttcatgtttcttctcacatctgctctcttaggctatatatactcacctaagttggattctccacctcctcgatgggtccactttgcacacggcttacttctgtttttatatcagacatttgatgcggttgatgggaagcaagcacgaagaacaaattcatctagcccactaggagagctttttgaccatggttgcgatgcacttggctgtgcgttagaaacaatggcatatgggagtactgctatgtgtggaagagatactttctggttttgggttatttctgctgttccattttttggagcaacatgggaacactattttaccaatacgcttactcttccggtagtcaatggtcctacagaaggtcttgcacttatatactgtggccatttcttcacagccattgttggtgcggagtggtgggctcagccgtttgggaagtcgattcctttgtttagttgggttccgtttttgaacgagatgcaaatgtccagaataatactattctccatgattttctttgctgttataccaacccttgcaatcaacacgtctaatgtttacaaagttgtacattcaagaaatggaagcatgcttctagcattagctatgctatatcccttagtcacgttaattgcaggagttctgatttgggattacttgtctccaattgatctcataagaaactaccctcacttagttgtgttgggaactggtcttgcatttggattccttgtgggaagaatgattctagctcacttatgtgacgaaccaaaaggattgaaaacaaacatgtgtatgtcactgctttaccttccatttgcactagcaaatgctctaaccgctagactcaacgacggggttcctcttgtggatgagttttgggttcttcttggatattgtatattcacattgtcactatatgcgcattttgcaacttcagtcattcatgagatcacaactgcacttggaatctactgcttcaggattactcggaaagaagcttga

SEQ ID NO: 427 - DNA, 1416 bp, Arabidopsis thaliana
atggtttcttctcagtgttctgttgcaaacaaaaaccagactgggaagccgtttcagaaacatctatctttatccatcagccctccaaaatctgtcttgggtgataaccttgagcttcaattctctgatgtctttggaccaatgcctgaagctaactctgaagaggcctgtgatgttgcttacgacgagcctgctgttgtctacagtcgatcccactcattggttggcccgtctttggttgttagccattctttgaagatgaacaagctcactttacgagaaactgaggactcagttgacttggtggagtgtgttgaaggtgaatcgataaaagagaacgatgaattctctggtaatgatgacactgacagtgagaaatctccagaggaggtctcaggtgtagtaggcattgaggactttgaggtattgaaggttgtgggacaaggtgcatttggaaaagtgtaccaggtgaggaaaaaagacacgtctgagatatacgcgatgaaggtcatgagaaaagataaaattgttgagaagaatcatgctgaatacatgaaagccgagcgcgatattctaaccaaaatcgatcatcctttcattgtgcaacttaaatactcttttcagaccaaatacagattgtatcttgttcttgactttataaacggaggtcatcttttcttccagctctatcaccaagggcttttcagggaggacttggctcgtgtgtacactgcagaaatcgtctctgcagtttcccatctccatgagaaaggcataatgcatagagatcttaaacctgaaaacatactcatggacgtagatggccatgtgatgttaactgattttggtttagcaaaagaatttgaagaaaacacaagatcaaactccatgtgtgggactacggagtatatggcccctgagattgttcgtggaaaaggacatgataaggctgccgactggtggagtgtaggaatccttctgtatgagatgctcactggaaagccgccgtttctcgggagcaaaggaaagatacagcagaaaatcgttaaggacaagatcaagcttccacagtttctgtctaatgaagctcatgccttgctgaaagggctgctgcaaaaagagccagaaaggagactgggaagtggaccgagcggagcagaggagataaaaaaacacaaatggttcaaggcgataaactggaagaagctggaggctagagaagtacaaccaagtttcaagccggcggtttcgggaagacaatgcatagctaattttgacaagtgttggactgacatgtctgttttggattctccagcaagtagtcccaactctgatgctaaggcgaacccttttacaaacttcacatacgtcaggcctcctcattcattccttcatcggaccacatccaacttgtag

SEQ ID NO: 428 - DNA, 1575 bp, Arabidopsis thaliana
atgactaatactctctgtttaagcctcatcaccctaataacgctttttataagtttaaccccaaccttaatcaaatcagatgagggcattgatgttttcttacccatatcactcaaccttacggtcctaaccgatcccttctccatctctgccgcttctcacgacttcggtaacataaccgacgaaaatcccggcgccgtcctctgcccttcctccaccacggaggtggctcgtctcctccgtttcgctaacggaggattctcttacaataaaggctcaaccagccccgcgtctactttcaaagtggctgctcgaggccaaggccactccctccgtggccaagcctctgcacccggaggtgtcgtcgtgaacatgacgtgtctcgccatggcggctaaaccagcggcggttgttatctcggcagacgggacttacgctgacgtggctgccgggacgatgtgggtggatgttctgaaggcggcggtggatagaggcgtctcgccggttacatggacggattatttgtatctcagcgtcggcgggacgttgtcgaacgctggaatcggtggtcagacgtttagacacggccctcagattagtaacgttcatgagcttgacgttattaccggaaaaggtgaaatgatgacttgctctccaaagttaaaccctgaattgttctatggagttttaggaggtttgggtcaattcggtattataacgagggccaggattgcgttggatcatgcacccacaagggtgaaatggtctcgcatactctacagtgacttctcggcttttaaaagagaccaagagcgtttaatatcaatgaccaatgatctcggagttgactttttggaaggtcaacttatgatgtcaaatggcttcgtagacacctctttcttcccactctccgatcaaacaagagtcgcatctcttgtgaatgaccaccggatcatctatgttctcgaagtagccaagtattatgacagaaccacccttcccattattgaccaggtgattgacacgttaagtagaactctaggtttcgctccagggtttatgttcgtacaagatgttccgtatttcgatttcttgaaccgtgtccgaaacgaagaagataaactcagatctttaggactatgggaagttcctcatccatggcttaacatctttgtcccggggtctcgaatccaagattttcatgatggtgttattaatggccttcttctaaaccaaacctcaacttctggtgttactctcttctatcccacaaaccgaaacaaatggaacaaccgcatgtcaacgatgacaccggacgaagatgttttttatgtgatcggattactgcaatcagctggtggatctcaaaattggcaagaacttgaaaatctcaacgacaaggttattcagttttgtgaaaactcgggaattaagattaaggaatatttgatgcactatacaagaaaagaagattgggttaaacattttggaccaaaatgggatgattttttaagaaagaaaattatgtttgatcccaaaagactattgtctccaggacaagacatatttaattaa

SEQ ID NO: 429 - DNA, 507 bp, Arabidopsis thaliana
atggttgcgagaagtgaggaaattgtgatagtggaagaagatacgactgcgaaatgtttgatgttgttatcaagagtcggagaatgcggcggcggctgcgggggagatgaacgtgttttccgatgcaagacttgtcttaaagagttctcatcgtttcaagctttgggaggtcatcgtgcaagccacaagaaacttatcaacagtgacaatccatcacttcttggatccttgtccaacaagaaaactaaaacgtctcatccttgtccgatatgtggagtgaagtttccgatgggacaagctcttggtggtcacatgaggagacataggaacgagaaagtctcaggctcgttggttacacgttcttttctaccggagacgacgacggtgacggctttgaagaaatttagtagtgggaagagagtggcttgtttggatttggacttagattcgatggagagtttggtcaattggaagttggagttgggaagaacgatttcttggagttaa

SEQ ID NO: 430 - skipped

SEQ ID NO: 431 - DNA, 912 bp, Arabidopsis thaliana
atgggtttcaaactcaactctcttttccttcttctttcgcttctcatactcacaatcttgtccggagccgaccaagccttggcttacgtcaagaaaccacatgtgagccaacgcaacaaaacggcgttagcagccgtcgccggaagaggaggaggaaaagagatgttgaaagggaggaagcagacgagtggttgtaacttgtttcaagggagatgggttttcgatgcttcttaccctttctacgattcatccacgtgccctttcatcgacggtgagttcgactgtctcaaattcggccgaccagacaaacagttccttaagtactcttggcagcctgattcatgcaccgtcccaaggtttgatggggaagcgtttttgaagaaatggagagggaaacgagtgatgttcgtgggtgactcactgagtctaaacatgtgggaatcgttggcatgtatgatacattcgtgggattttataagagatgggtcttcactgatgagagacatggaccgccttgatgctttcaacaaaggactcaccacttggggtcaatgggttgatcaaaatgttaatgtttcgcaaacccgagtcttcttccaaggcatttctcccactcactacatgggaagggaatggaacgagccgaggaaaacttgcaacgggcagatgcaaccgttgaccggatcaacatacccaggtggttcacttcctgcagcaagcattgtgtctcgagtattaagcacgatgagaacgcccgtttacttactcgacatcacaactctatctcaactgagaaaagatgctcatccatctacatatggaggcgatggcggaacggattgcagtcactggtgccttcctggcttgccggatacttggaaccagcttctctatgcagctctttcgatgtga

SEQ ID NO: 432 - DNA, 1290 bp, Arabidopsis thaliana
atgtccttaacgaaatcttcagaatcagttttcactgaagaagaagaagaagattcctttagcggtcgatacacgttatggatcaaagaagcattagaggagcttccacacaatttcacaatcaccgacccgtttatttcgggtcacccgattgttttcgcgagcttagggtttttgaaaatgactggctattcacgagaagaagtgatcggaagaaacggtaaagtttttcaaggacctaagactaatcgaagatcgatcatggagattcgtgaagcgattcgtgaagagagatcagtgcaagtgagcttgttgaattatcgtaaatctgggtctccgttttggatgttgtttcatatgtgtcctgtttttgggaaagatgatggtaaagtcaccaattttgtggcggttcaggtcccgatttcgggacgagaacatcatcggaagaagttgagaaatgtcggagatttgtcgtcggatacttctccgacatttggttcttgtcgaagagaggtttgttttggtaatttcgtgtgtcaggatcgagctttaccagtggaatgtgatgatgatgaacaaggattagaggattgggaacagtgtgaagcgagtgagtccgagaagctgaaagctacggaagctattaacaatgtgttatctatcttagtgcattacagcgagttgagtggtagattagtctgcggaaagcggtactgcttgcgaggagtagattgtctaagctcgtcgttagttatttctctcggtagaatcaaacaaagtttcgtattaaccaatccatgcttaccagacatgcctatcatttatgcgagtgatgcctttttgacactgaccggttacaagagacaggaagtgttgggacaaaactgtagatttctgagtggggttgatactgattcctcagtactatacgagacagcatattttgtgggtgttcaagtagaagcaagttgtagaaatactgaaattaaagagctgagaccagagacgagacaactgagtgttgtcggtgcggttagagttgcgaatgtaagaaacaaggttggtatcggcaaacaagaaaaaaatattacaatcgaaaatgttctgctcgtgattcgacaaacagaagacatctccaatctgtattccaaaaacacgaagatttataggtggaaaatgcaacatagaaaagtagaagacatttccaatctgtattccaaaactgttggatacggacaccggatattgcacttatggcaaattgggcgagaagcagaattgttgcgttga

SEQ ID NO: 433 - DNA, 920 bp, Arabidopsis thaliana
atgacatattacttctctcttccttttgctttcgcatcttcttcttcgtcaacgaatcctcggactctccggcgatgcccgtcgattaaacgacgcgagcctggccgttttaccgccaccgttcttcttttaatcggtttaatctcttgtgttatcgtctacgctgttttctcttctgtcctccgtccatcccaagatcctacactcgttgattccgcggttcgattcaaagaggagccgcgagatcacgatgcaactgaagacggtgaaggtgggtgttgccgtggaattgataatctggagctttggggtccggcggtgaagtggggcacggattttaagtttaattcgtctgatggatgttgtaaagcttgtaaagttatgtgtagtggcaacgatggaccttgcttgtgcgattcatgggtgttttgtgggaacaaagaggattgtggctcgaagtttggagagtgttggttgaagaagcaaaaagatgtcttggtgcctgatcgacaaggaggtggcgagaaagtaatgtggacatctggacttatcttcggacaaggccaggctccctttggtccaccatacgctatgattcaaggaatactccaggccgagggaaacattttcacaccgatcccaaccgagcactgcccaactataagccgtggctcggtggcgtgggtcggctcgggtccagaattcttcatcagtttagcaaaccaccacgaatggaaacaatcttacacggtattcggcttagttctaccagaagacatggatgtcgtggagacaattgccggtttaccaacaagagccgatgtctggaacagcgtcaatgtctctgtgctggagaaaccggtttccttaaccgtacggagaatgaagacgggccaagaacaagaagaaaccggttcatg

SEQ ID NO: 434 - DNA, 510 bp, Arabidopsis thaliana
atgtctgcgacaacaacaccatctctatctctttcaaatttcagaccaagattccaaactccagttaaaggccaccatatatctccactctcttggtctgtttcaagaagaaagatcttgtcttttagggttcttcgtcttcaccaagaaaaaacccaactatggagagtctctgcaactccggaagaaatttcccaagagatcgtttcttctgattcatcttcttcttctggagcagttgtgtctagtggtggacaagatggtgttgctttgattatacaagtgcttctctttgttgcatttcttgctctcacggttctcaccattggtgttgtgtacattggagtgactgagtttcttgggaagagggagagagagaagtttgagaaagacgaggcagcaaagaagtctaagaaaggtgggaagaagaaggcaatgagagccagagctggaccaagaggttttggtcagaagattgaagatgatgacatcgacattgatcttgagtga

SEQ ID NO: 435 - DNA, 186 bp, Arabidopsis thaliana
atgtcggcgacttgcgttgcgaaccgtccgtacatacataatatgcattacacaaatatgtctaattgtgtctctatgtgtatgttattcaggagcagattaagggcttttagttttagtttcgtgcaagtaagatcatgtcatgtgatagatctccgagtttttcttttcaaggatttcgtgtaa

SEQ ID NO: 436 - DNA, 237 bp, Arabidopsis thaliana
atggagtctgtgaagaccaaatcctccaccgcgaggagcgttgagctaccgcctcgccgtggaaaggtgaagcgagagatctttggtttcttagccaattccattgtttccgccgccgtgaaagctggtggatcgtttaggaggaacggcggaggtggtggtggtggctcttcttcctcaaccaccactcctccagggagtggatacacctccgaccagaacaacgaatccacttaa

SEQ ID NO: 437 - DNA, 1197 bp, Arabidopsis thaliana
atggcatcggcggttcagaaatcagcgttgctcttatgtggagactacatggaagcctatgaaacgattgttcctctctatgttctccaatcgtttggggttagcgttcattgcgtttcacccaaccgcaacgccggcgatcgctgcgttatgtctgcccacgatttcttgggcctcgagctatacaccgagcttgtcgttgaccagttgactttaaacgcaaacttcgatgacgtcactccggagaattacgacgtcatcatcatcccaggaggccgattcacggagcttctcagcgccgacgagaaatgcgttgacctcgtggcgcgattcgccgaatccaagaagctgatcttcactagctgtcatagccaggttatgctgatggcggccggaatcctcgccggtggtgtgaaatgcacggcgtttgaaagcataaagcctttgatcgaactctccggcggtgagtggtggcaacagcctgggattcagagcatgttcgagatcaccgattgcgttaaagacgggaatttcatgagtacggttggttggccaacgcttggtcacggcattaagcttttgcttgaatctcttggtggcaaagtctgtagcttggagaagaagcaagcttctgtgcttttcctcattggggactatgtagaagattatgggatcaatgtaccgtttagagcactacaagctttaggttgtaaagtggatgctgtgacaccgaacaagaagaagggagaagtgtgtgcaacggcggtttatgaccttgaggatggacggcagattcctgcagagaagcgtggacataacttctttgtgactgcatcgtgggatgatatatgtgtggatgattatgactgtgtagtggttccaggagggagatcacctgagctattggtgatgaatgaaaaggctgttgctttggttaagagttttgcagagaaagataaggtgtttgcagctattggacaggggaaattgcttcttgcagccactggtgttcttaaggggaagcgatgcgcgagtgggaaagggatgaaggtgatggtgaaggtggctggaggtgaggctgtgatggaaaagggatgtgtaactgatgggaaggttgtgacggcagcatcagccacggatctgcctgcctttttgtttgatttatcaactgctcttggtctaactgtcatgttctaa

SEQ ID NO: 438 - DNA, 747 bp, Arabidopsis thaliana
atgggaggtgcagtgacgaaatctgaaactctgcaaaaagaatgggttccagagacaaagttggaggctaagatcatagaagccgtgcaacgcagggcatcgaggggcaccacaatgaaatctttcaacagtattgttctcaagttcccaaagatcgatgatggtcttcgaaactgcaaagccattttccaagaattcgatgaggattcaaacgggtcaatagatcacacggagctaaagaattgtatcaggaagctagagatctcgttcgatgaagaagagattaatgatttgttcaaggcttgcgatattaacgaggatatgggaattacatttacagaattcattgttcttctttgcctcgtctatcttcttaaagacgattcatccactctccaaaagaaatggacaatgggaatgccaaagctggaaccaacattcgagacgcttgttgacacatttgtgttcctagacgagaacaaggacggatatgttagccgcgaggagatggtccgagccattgatgaatcaggagaacgatcctccgggcggattgcaatgaagagatttgctttcttcttcactgaaccaagaatattgattttgattcctgtgtctgcagaggaaatggactgggacaagaacggaatggtgaacttcaaagagtttctcttcgcatttacgcagtgggttgggatagatgagaatgaagaagaagaagaagaagacaacaatgagaaagcttaa

SEQ ID NO: 439 - DNA, 699 bp, Arabidopsis thaliana
atggaccacactctttctcttcttccatttctcttcatcataatcatttcttccttccatgttttgcctgtttcacccacaccttcacacaaactaaaatccgccactaccatcagaaaactcaaccgcggaggaccttacatcggtctcgtgacggtcattgcgaccgaagaaaatgcttttctccgcagtgtcgatttcagacctgaccctactcatcccttcttggatctctctgggagacgttttcgaatagggaagattcatggaaagaaggttgtgtatgttagatgtgggagaggaatggtgaatggagcagcagcaacacaacagatgatagatgtgttcaatgtgaaagggatagtgcattttgggattgctggaaatatgaacaactcaatgtccataggagatgtgagcatccctaagcaaattacgaatgctggcttgtgggattggctgaatccagacaaagtaaagggagttgaggatatagcgtacttagatgtcggaaactataatgttccaaaaggagatggcgacaatgagttagggagtattggatataattacgagcaactatattcagtcactggtcacatcaatgcacctcagaatgtgttttggatcaacacaactcaagagtggcttcatcttgcagctgatctagaggttgttaagagctatacaacatactga

SEQ ID NO: 440 - DNA, 63 bp, Arabidopsis thaliana
atgcatatgtccatgttgcttgtgtgtgactgtactagtggagatcgcaattggtttgattaa

SEQ ID NO: 441 - DNA, 2235 bp, Arabidopsis thaliana
atgggaggtgtttgttcttgtgtattcaaagatgatgataagaagaagaagttgagatcaaacgatgatgataagtcaagagggttttctgggaaacttaagtctatgagaagaaataattacggaggctcaagacggaaaagttctaagcctgatgaggttgttttcaacttttctggcgagcttggtccgatgcctccattaaggaacgattccaccaagtttatgcagaggaactcgtttatgggacgggctggggtaatggggctagagaaagctgttgaagttctagacacgctcgggagcagcatgactcgtatgaatccgagcaacgcgtatctctctggtgttacatcgtcccgtggtggcaaagtcactatattggcttttgaagtggccaatactattgccaaaggtgctgctttgctgcaatctttgtctgaagagaatctcaagttcatgaagaaagatatgttgcattccgaggaagtcaagaagttggtttctacggataccacagagttgcaaattcttgctgcttctgacaaaagggaggaactcgatcttttctctggagaggttatcaggtttggtaatatgtgcaaagatctgcagtggcacaatctcgatcgatattttatgaagcttgacacagagaactcacagcataaactgctcaaagatgatgcagaggcaaggatgcaagagctcgtcactcttgccagaatcacttctataattgagaagcttgtggatgttgtaagttatatacggcagacgattgtggaagtttttggcaacaatggtctaagagacaatgaaggggagcagggaagagaacgattaggtgaagccggtctttcgttacactatgctaatctaatacaacaaatcgataatattgcgtctcgaccatcgtcacttccttctaatgtaagggacacgctgtacaatgcattacccgctactgtcaagacagctcttcgtcctcggctacaaactcttgatcaggaggaagagctttcagtacctgagatcaaagctgaaatggagaagtcgcttcaatggcttgtcccgttcgctgaaaacaccaccaaagcacatcaaggcttcggatgggtaggtgaatgggcaaattcaaggatagagtttgggaaaggaaaaggaaaaggcgagaacaacgggaatccaacacgacttcagacgcttcatcatgcggataaaccaatagttgattcatatgtactcgaactcgttgtatggcttcatcgactaatgaagtcatcaaagaaacgtgctcacggcgttaagcttcaagaaaccaaccatgtctctccacccaacaacagaaccatctccaacacgcaactatcactctcccctgacttcacctacaaaaaccagctctctctagaagacaggttgttgttagacagagtccaaagtataagatttggtccaaatctaagtaagagtcaagagttagtcggcttgaagaagaacaagaaaggattcaagatttgggcactgagtagaagtacaggaaactctccaaaagttgatctttcagataagaactcttctagtgatttggatgtccttgatggtcaactactttcttttttctctccatcaactcctcagacaatcttaaagaagctaacaactccagaggctgcacaagtaaccaaaatcaccacaccattagaaccaacaggaggagtaagcgtgaaccagaaccaaccaattcttggtcaaccttcttcttcttcacctgtaaaccagcctttaaccgggttaagccaaccattaatcggattcaatcaaccttcatcaactggtttgaagcaaccaattcttggtcagccatctacttcttcttcggtaaaccagcctttaaccgggataaatcaaccattaaccggatttaatcagccatcatcaactggactcaacaatccaattcttggtcagccatctacttcttcttcccttaaccaacctttaaccgggtttaatcaaccatcatcaactggattcaaccaaccgatttcttcgtcttcttcttcatcatcatctgctcaaaatcaaccctttacgaatcgactcaaccagaacaatctctctggcgttccatttcttaatggaaattcaaagttgaaggtctccggcacaaagattatctttatctggattggtcttttccttgctttgcacggtactgacaggaactga

SEQ ID NO: 442 - skipped

SEQ ID NO: 443 - DNA, 710 bp, Arabidopsis thaliana
atggatcaaattgtttcaggagaagaagaagatcttgatgtagatattgaagatggtagattcaatgagacacaagagataacgacgaatcttgtttcagcggaaggggattcagagaatgttttgaatcatgtttggagtggacgtttgagttttgatgggtctgaaaagagtgctgatgatctagtagaccctttaatgggagagggaaagcggagagaaagaagcagtcaaagtttggatctttcggatatgaagtttgataatgataagtttaagaagacgagaaaaccttcaaagccaccgaggcctccaaaaggtccgttactgagtgctaatgaccagaagttgatgagggaaatcacggagcttgctatgagaaagcgtgctcggattgaacggatgaaaacactcagaagattgaaagcagcaaagtcctcgtctccctgcagtagcattttcgccatgatagtgacggttatattcttcgtcttcttaatctttcaagggttcttcacaagcaatgcgagtttgaattctgacaattcacctgcaccaaataattcagctaataaccgtatggtctctgttcagttctacaatgagtttgctcctcgtgagagaatcgatcccagccctactacttctttcaggtataagagagtctcaggtgcagacaatgaagaaaacacaagagaagttaccagatg

SEQ ID NO: 444 - DNA, 873 bp, Arabidopsis thaliana
atggcggcaacatcactattgtacaatcagctcaaggctgctgaaccattcttcttgttggctggtccaaatgtgattgaatccgaggaacatattcttcgaatggcaaagcacattaaagacatttccacaaaagttgggctgcccctggttttcaagtcaagttttgataaagctaacagaacttcttcaaagtcatttcgtggtcctggcatggccgagggtctgaagattcttgagaaggtgaaggtagcatatgatctaccaatagtaactgatgttcatgaatcaagccagtgtgaagcagttggcaaggttgcagatataattcagattccagcattcttatgtcgccagacagatcttctggttgcagcagcacaaaccggaaaaattatcaatattaagaaaggacaattctgtgctccttctgtcatggagaattcagctgagaagatcagactggctgggaatccaaatgttatggtttgtgaaagaggaaccatgttcggatacaatgatttgatagtagatccacgaaacttcgagtggatgagagaagctaattgtcctgttgtcgctgatataacccattcactacaacaacctgcaggcaagaagttggatggtggtggtgttgcaagtggaggccttcgcgagttaataccatgcattgcaagaacagctgtagcagttggcgtcgatggaattttcatggaggttcatgatgatcctctaagtgctccagttgatggtccaactcaatggcctttgcgccatctagaagaactcctggaagagctcattgcgattgcgagggttacaaaagggaagcagcggcttcaaatcgaccttacaccctaccgtgattaa

SEQ ID NO: 445 - skipped

SEQ ID NO: 446 - DNA, 1158 bp, Arabidopsis thaliana
atggttgaacagactcagcaccccacgattcttcagaaggtttctggccaactcttgagctcgagtgtttctcaggacattcgtggttatgcttcggcttccaaaaggcctgctacataccagaaacatgcagcttacggaaactactccaatgctgcatttcaatatcctcttgtggctgcatctcagattgcaactactacttctcctgtgtttgtccaagctccaggagagaagggatttactaactttgctattgatttcatgatgggtggtgtttctgctgctgtgtcaaagactgctgctgctcccattgagcgtgtcaagcttttgattcaaaaccaggatgagatgcttaaggctggaaggcttactgagccatacaagggtattcgtgactgtttcggcaggacaattagggatgaaggtattggttcgttgtggagaggaaacaccgctaatgttatccgttacttccccactcaggccttgaactttgcattcaaagattacttcaagaggcttttcaacttcaagaaagacaaggatggctactggaagtggtttgctggtaacttggcatctggaggtgctgctggtgcctcttcccttctctttgtgtactctcttgactatgcacgtacccgtcttgccaatgactccaagtctgccaagaagggaggaggtgaaaggcagttcaatggtcttgttgatgtctacaagaagaccctcaagtcagatggtattgctggactttaccgtggtttcaacatctcgtgtgctggtatcattgtctaccgtggtctctactttggactgtacgactctgtgaagcctgtcctcctcactggagacctgcaggacagtttcttcgctagttttgctcttggatggctcatcaccaatggtgcgggtcttgcgtcgtacccgattgacacggttagaagaagaatgatgatgacatcaggtgaagcggtgaagtacaagagctcatttgatgcgttctcacagatcgtgaagaaggaaggagccaagtctctgttcaagggtgcgggtgccaacatcctgcgtgccgttgcaggtgctggtgtgcttgctggctacgacaagctgcagttaatcgtcttcggcaagaagtatggatctggaggtgcctaa

SEQ ID NO: 447 - DNA, 984 bp, Arabidopsis thaliana
atggccaatgcgaagcccttttgtctcctcggcttcttttgtctgttattacagttattctccatcttccatatcggaaatggggaattggagatgaactattacaaagagagttgtccaaaagcggaagagataataagacaacaagtggagacgctttactacaaacacggtaacacagccgtatcttggctccgtaatctcttccatgactgtgtcgtcaagtcgtgtgatgcgtcgctgctgctagagacagcgagaggtgtggaatctgagcagaaatcgaagaggagtttcggtatgagaaactttaagtacgttaagattatcaaagacgcactcgagaaagagtgtccttccacagtctcttgtgctgatattgtcgctctttctgcgagagacggtattgtcatgttgaaagggccaaagatagagatgataaagacaggaaggagagatagtagagggagctacttgggagatgttgagactctaatccctaaccacaatgactctctctcatctgttatctccacctttaactccattggcatcgatgtcgaagccaccgtcgctctcttaggtgctcactcagtgggtagggtccactgcgttaacctagtgcaccggctatacccaacgattgaccctactctcgacccaagttacgccctttacttaaaaaaacgttgcccaagtccaacaccggacccgaacgccgtcttgtactcccgtaacgatcgtgagactccgatggttgtggacaacatgtattataagaacatcatggcccataaggggcttcttgtcattgatgatgagctagccaccgatcccaggaccgcaccgtttgtggccaagatggctgcggacaataattacttccatgagcagttctcacgtggcgtcaggctcttgtccgagaccaacccgctcacgggagaccaaggggagatcaggaaggattgtcgttatgtgaactaa

SEQ ID NO: 448 - DNA, 762 bp, Arabidopsis thaliana
atgttggcaatatttcagaaagcttttgctcacccaccggaagaactcaacagtccggcttctcatttctccggcaaaactcctaaacttcccggcgaaactctctccgacttcctctctcatcaccaaaacaatgctttctctatgaacttcggcgactccgccgtcttagcttacgctcgccaagaaacctctcttcgtcaaaggttgttctgtggactagatgggatctactgtatgtttctagggagattgaataatctctgtacattgaatcgacaatacggtttatctgggaagaactcaaacgaggcaatgtttgtgatcgaagcttatcgaacacttcgtgatcgtggtccttacccagcagatcaagttcttagaggtcttgagggaagcttcgctttcgttgtctacgatactcaaacttcctctgttttctcagctctgagttctgatggaggagagagtctttactggggaatttctggagacggatctgttgtaatgtctgatgatattcagatcataaagcaaggctgtgctaaatcgtttgctcctttccctaatggatgtatgtttcatagtgagacagggcttaagagctttgaccatccgactaatatgatgaaggcaatgccgaggattgatagtgaaggtgttctttgtggagctagtttcaaagttgatgcttgttctaagatcaatagtatccctagaagaggaagtgaagctaactgggcgctggctaattctcgttga

SEQ ID NO: 449 - DNA, 1140 bp, Arabidopsis thaliana
atggatggatcaaagcatccatcagtctttcagaagctacatggacaatcttacttgatcaatagactttctccgagtgtgcaagctcgtggttactgtgtctctggtgcttatgtcaatggaggtttgcagagtctattgcagccaactagccatggcgttggctcgtctcttatacctcatggttcatttcctgtattagctcacgctcctagtgagaaaactggtactggtttcttgatcgatttccttatgggaggagtctcagctgctgtttcgaagacggcagccgcgcctatagagcgtgtgaagctcttgattcagaatcaagatgaaatgatcaaagctgggcgtctctctgagccatataaaggaatcagtgattgttttgctcgaacagtcaaagacgaaggaatgcttgctctttggagaggaaacactgccaatgttatcagatacttccccactcaggctttaaactttgcgttcaaagattacttcaagaggctgtttaacttcaagaaagaaaaagatggctactggaagtggtttgcagggaacctggcgtctggtggtgcagctggtgcatcatctctgctttttgtgtactctttggattacgctcgtacccgtttagccaatgatgcgaaggcggccaagaaaggtggtcagcggcagtttaatggcatggtcgacgtgtacaagaagactatagcctctgatggcattgtcgggctttaccgtggtttcaacatctcatgcgttggaattgtcgtgtaccgggggctttactttggattgtatgattccttgaagcctgtggttctagttgatggtctccaggatagcttccttgctagtttcttactgggatggggaatcaccattggagctggattggcgtcttacccaattgacacggttcgcagaagaatgatgatgacgtcaggtgaagcagtgaagtacaagagctctcttcaggccttctctcagatcgtcaagaacgaaggggccaagtcactcttcaagggtgcaggtgccaacatccttcgtgcggttgcaggcgctggtgtactggccggctatgacaagctccagctcattgtgttgggtaagaagtatggctctggtggtggctaa

SEQ ID NO: 450 - DNA, 678 bp, Arabidopsis thaliana
atgggttactggaattccaaggttgttccaaaattcaagaagttattcgagaaaaatagtgctaagaaggctgctgctgctgaagctaccaagacctttgatgaatctaaggaaacaatcaacaaggaaattgaggagaaaaagacagaactccaaccaaaggtcgtggaaacctatgaagccacgtctgcagaagtcaaggctttggtgagagaccctaaggtggctggtttgaagaaaaactcagcggctgtgcagaagtacctcgaggagctagtcaaaattgaattccccggatcaaaagcggtgagtgaggcttcgtctagcttcggagctggctatgtcgcaggaccggtcacgttcatattcgagaaggtatctgttttcctcccggaggaggtgaagactaaagaaataccggtggaggaagtgaaagctgaagaacctgccaaaactgaagaaccagccaaaaccgaaggaacaagtggtgagaaagaggagattgttgaagagacaaagaaaggcgagacccctgaaaccgcggtcgtggaggagaagaaaccagaggtagaggagaagaaggaagaggctactccggctccggcagtggttgaaactccagttaaggaaccggagacaacgacgacagcgccagtggctgaaccaccaaagccttga

SEQ ID NO: 451 - DNA, 768 bp, Arabidopsis thaliana
atggcctcaaacgcactctcgtctttcaccgccgctaatcccgctctgtctcctaagccactactccctcacggctctgcttctccgtcggtttctctcggcttctccaggaaagttggcggcggcagagcagtggtcgttgcagcggctacggtggacacaaacaacatgccgatgaccggagtcgtgttccagcctttcgaagaggtgaagaaagccgatctggccattccaatcacatctcatgcctctctcgctcgccagaggtttgccgacgctagcgaggcagtcattaatgagcaaatcaatgtggaatacaacgtctcctatgtgtaccattcaatgtacgcatactttgacagagacaacgttgctatgaagggactagccaaatttttcaaggaatcaagtgaggaagagagagggcatgctgagaagtttatggagtaccagaaccaaagaggaggaagagtgaaactccaccctatcgtctcacctatctcagaattcgaacatgctgaaaaaggagatgctttatatgcaatggagttggctctgtctctagagaaactcactaatgagaagcttctaaacgttcacaaagtggcctcagagaacaatgatccccagttagctgatttcgttgagagtgaatttctgggagagcagattgaagcaatcaagaagatctcagactacatcacccagctaaggatgatcggcaaaggccacggagtttggcatttcgaccagatgcttctgaactag

SEQ ID NO: 452 - DNA, 2745 bp, Arabidopsis thaliana
atggaggcgatcgatgagttgtctcagctctcagattcgatgaagcaggcggcgtctctcctcgccgacgaagatcccgacgaaacctcttcttccaagcgccctgccactttcctcaacgtcgttgccttgggaaatgtgggagctggaaagtctgcagttctaaacagtctaattgggcatccagtgctgccgacgggtgagaatggtgctacacgagctcctataataattgaattgagcagggagagttctttgagcagcaaggcaattatcttgcaaatcgacaataaatctcaacaagtttctgcaagtgctttgagacattctctgcaagatagacttagcaaaggagcctcagggaagaatcgtgatgaaataaacttaaaacttcgtaccagcacagctccaccattgaaattagttgatctgcctggactggaccagagaattgtggacgagtcaatgattgctgaatacgcgcaacacaatgatgccatactgctggttatagtgcctgctagccaggcatctgaaatttcatcatcccgagccctgaagattgcaaaggagtatgatccagagagtactaggacaataggcattattggaaaaattgaccaggcagcagagaactcgaaagcccttgcagctgttcaggctcttctttcaaatcaaggacctccaaaaacaactgacattccatgggttgctgttattggccaatccgtttcaattgcgtcagcacagtctggaagtggtgagaactccttagaaactgcttggcgtgctgagagtgaaagtcttaagtccattttgactggggctccacaaagcaagcttggcagaattgcgttggtggatacccttgctagccagattcgtagcagaatgaagctcaggcttccaagtgtcctgtctgggctccagggtaagtctcaaatagtgcaggatgagctagcgaggcttggtgaacaactagttaacagtgctgaaggtacaagggctatagctttggagctttgccgtgagtttgaagacaagtttcttctgcacttggctggtggtgaaggaagtggttggaaagttgttgcaagttttgaaggaaatttccccaaccgtatcaagcagcttccattggatagacattttgacctgaacaatgttaaaagggttgttttggaggcagatggttatcaaccttatcttatatctccagagaaagggttgagatcgttgataaagattgtccttgagttggctaaagacccggcacgcctttgtgttgatgaggttcaccgagttcttgttgacatagtttcagcttctgcaaatgctacacctggacttgggagatatcctcctttcaagcgagaggttgtagctatagcaagtgcagcacttgatggtttcaagaatgaagccaagaaaatggtggttgcactagttgatatggaacgcgcttttgtaccacctcaacattttatccgtcttgtgcaaaggagaatggaaagacaacgtcgcgaggaagagctgaaagggcgatcttctaagaagggacaagatgcagagcagtcccttttaagcagggctactagtcctcagccagatgggccaacagctggtggtagcttaaaatcaatgaaagacaaacctagtccgcaagataaagagacgccggaggtctctggtctgaaaactgctggacctgagggggagataacagcagggtacttaatgaagaaaagtgcaaaaacaaatgggtggagtaggcgatggtttgttctgaatgagaaaactggaaagcttggctataccaaaaagcaagaagaaagaaactttcggggcacgataactttggaggaatgcactattgaagaaatccccgaggacgaagtagaaaagtcaaagagctcgaaggacaagaaggcaaatggacctgattcaaaaggaccaggccttgtgtttaaaataacctgcaaggttccctataagactgtactcaaagctcacaatgcccttgtgcttaaggctgagagtgtagtcgacaagaacgagtggattaataagttgcaaaaggttatccaggctcgtggaggccaagtgggcagtgtttccatgaggcagagtctttcagaaggttcacttgataagatggttaggaaacccatcgatccagaagaggagctccggtggatgtcccaagaagtacggggttacgttgaagctgttcttaacagccttgcagccaatgttccaaaggctgttgttctttgtcaagtagagaaagcaaaggaagacatgctgaatcaactctacagttctataagtgcaataggcaatgaaaggattgagtcattgatacaagaggatcagaatgtcaaaagacgaagagagcgttaccagaaacaatcctctcttctttctaaactcacgaggcagcttagcattcacgacaaccgagcagcagctgcttcaagttattcggacaacagtggcactgagagtagcccaagagcaagtggaggttcttcaggggacgactggatgaatgccttcaactccgctgctaatggaccctcagactcattgtcaaagtacggttccggtggtcacagccgccgttacagtgaccctgcgcagaacggagatgcagcatcaccagggtctggtagcaaccgccgcaccacccccaatcggttgccaccagcaccaccgcctacaggttcagcttataggtattag

SEQ ID NO: 453 - DNA, 630 bp, Arabidopsis thaliana
atgaaggccaccatatccatcactaccatctttctcgtggtcgctttggccgcaccctccctagctcgtcctgacaaccatgtcgaggactctgtaggccgtctacttcgtcctggtcaaacgtaccacatcgtacctgcgaatcccgagacaggaggaggtattttctcgaacagtgaagaaatctgtcctcttgacatcttccagtcaaacaatccgcttgacttgggcctacccatcaaatttaagtccgagttatggtttgttaaggaaatgaatagtatcaccatcgagtttgaggctccgaactggtttttgtgtcctaaagaatccaaggggtggagagttgtgtactctgaagaattcaaaaagagtcttataataagcactggtggttcatcaaacccaagtggcttccagatccatcgagtcgacggaggtgcttacaagattgtatattgtacaaacatctcgactactacgtgcatgaacgttggcatattcaccgatatctctggtgcacgacgcttagccttgaccagcgatgaggctctcctagttaagttccagaaggcagcaactccaaaagctgatttgaagactaagctgaggatgttccctttctactga

SEQ ID NO: 454 - DNA, 630 bp, Arabidopsis thaliana
atggcaggaatcaaagttttcggtcacccagcttccacagccactagaagagttctcatcgctcttcacgagaagaatctcgactttgaattcgttcatatcgagctcaaagatggtgaacacaagaaagagcctttcatcttccgcaacccttttggtaaagttccagcctttgaagatggagacttcaagcttttcgaatcaagagcaatcactcaatacatagctcatttttactcagacaaaggaaaccaacttgtctcccttggctccaaggacattgcgggcatagccatgggcattgaaattgaatcgcatgagtttgacccagttggttcaaagcttgtttgggagcaagtcttaaagcctttgtatggtatgaccacagacaaaaccgttgttgaagaagaagaggctaagctagccaaggtcctcgatgtttacgaacacaggcttggtgagtccaagtatttggcttctgataaattcactttggtcgatcttcacactatccctgtgattcagtacttgcttggtacaccaactaagaaactctttgacgagcgtccacatgtcagtgcttgggttgctgacatcacttctaggccttctgctaagaaggttctttaa

SEQ ID NO: 455-456 - skipped (2 entries)

SEQ ID NO: 457 - DNA, 1280 bp, Arabidopsis thaliana
atgggtaattgtttagattcatcagctaaagtggataatagcaaccatagcccacatgctaattctgcttcttcgggctctaaagtttcaagcaagacaagccgttcaacgggtccttcaggactaagcacaacttcttacagcacagatagtagttttgggccattaccaacacttaggacagaaggagagatactttcatcgcctaacctaaaagctttcactttcaacgaactcaagaacgcgactaagaactttcgtcaagataatctactaggggaaggaggtttcggttgtgtattcaaaggatggattgatcaaacatctctcactgcttcacgtcccggttctggaatcgttgttgctgttaagcagcttaagcctgaaggttttcaaggtcataaagagtggttgactgaagtaaactatcttggtcaacttagtcacccaaatcttgtattactagttgggtattgcgcggaaggcgaaaaccggcttcttgtatatgaattcatgccaaaaggaagcttggagaatcatctttttagacgtggggcgcagccacttacatgggcaataaggatgaaagtggcggtaggtgcagctaaagggctaacttttcttcatgaagcaaagtcacaagtgatatacagagactttaaagctgctaacattctactcgacgctgacttcaatgctaagctttcagatttcggattggcaaaagcaggtcctactggtgataatacacatgtgtcaacaaaggtcattggtactcatggatatgcagctcctgaatatgttgccacaggtagattaaccgcaaagagtgatgtgtacagcttcggggtcgtgctactagaactaatatcaggacggcgtgccatggacaattcgaatggaggaaacgagtatagtcttgtagattgggcaacaccgtaccttggcgataagcgaaagctttttcgcataatggacacgaaactagggggtcaatatccacaaaagggagctttcacagctgctaatcttgcattgcaatgcttaaatcccgatgcaaaactccggccaaaaatgtcagaggttttagtcacattagaacagctagaatccgttgctaaacctggaaccaaacacacccaaatggaatctccaagatttcatcattcttctgttatgcagaaatctccggtaagatatagtcatgatcggcctctgctgcacatgactcctggtgcatcgcctttaccttcttacactcaatctcctcgtgtaagatg

SEQ ID NO: 458 - DNA, 650 bp, Arabidopsis thaliana
atgaactcattttctgccttttctgaaatgtttggctccgattacgagtctccggtttcctcaggcggtgattacagtccgaagcttgccacgagctgccccaagaaaccagcgggaaggaagaagtttcgtgagactcgtcacccaatttacagaggagttcgtcaaagaaactccggtaagtgggtgtgtgagttgagagagccaaacaagaaaacgaggatttggctcgggactttccaaaccgctgagatggcagctcgtgctcacgacgtcgccgccatagctctccgtggcagatctgcctgtctcaatttcgctgactcggcttggcggctacgaatcccggaatcaacctgtgccaaggaaatccaaaaggcggcggctgaagccgcgttgaattttcaagatgagatgtgtcatatgacgacggatgctcatggtcttgacatggaggagaccttggtggaggctatttatacgccggaacagagccaagatgcgttttatatggatgaagaggcgatgttggggatgtctagtttgttggataacatggccgaagggatgcttttaccgtcgccgtcggttcaatggaactataattttgatgtcgagggagatgatgacgtgtccttatggagctatta

SEQ ID NO: 459 - skipped

SEQ ID NO: 460 - DNA, 747 bp, Arabidopsis thaliana
atggagggttcgtccaaagggctgcgaaaaggtgcttggactactgaagaagatagtctcttgagacagtgcattaataagtatggagaaggcaaatggcaccaagttcctgtaagagctgggctaaaccggtgcaggaaaagttgtagattaagatggttgaactatttgaagccaagtatcaagagaggaaaacttagctctgatgaagtcgatcttcttcttcgccttcataggcttctagggaataggtggtctttaattgctggaagattacctggtcggaccgcaaatgacgtcaagaattactggaacactcatctgagtaagaaacatgaaccgtgttgtaagataaagatgaaaaagagagacattacgcccattcctacaacaccggcactaaaaaacaatgtttataagcctcgacctcgatccttcacagttaacaacgactgcaaccatctcaatgccccaccaaaagttgacgttaatcctccatgccttggacttaacatcaataatgtttgtgacaatagtatcatatacaacaaagataagaagaaagaccaactagtgaataatttgattgatggagataatatgtggttagagaaattcctagaggaaagccaagaggtagatattttggttcctgaagcgacgacaacagaaaagggggacaccttggcttttgacgttgatcaactttggagtcttttcgatggagagactgtgaaatttgattag

SEQ ID NO: 461 - DNA, 1458 bp, Arabidopsis thaliana
atggctatggcgagtttatatcggcgatctcttccttctcctccggccattgacttttcttccgccgaaggcaagctaatcttcaatgaagcgcttcagaaaggaactatggaaggatttttcaggttgatttcgtattttcagacacaatccgaacctgcgtattgtggtttggctagtctctcagtggtgttgaatgctctttctatcgatcctggacgtaaatggaaagggccttggaggtggtttgatgaatcaatgttggattgctgcgaacctctggaagtagtgaaggaaaaaggcatttcatttggaaaagttgtctgtttggctcattgttcaggagcaaaagttgaggctttccgtacaagtcagagcaccattgatgatttccgcaaatttgtcgtcaaatgcacgagttctgagaattgtcatatgatctcaacatatcaccgaggtgtatttaagcagactgggactggtcacttttcacctattggtggctataatgctgagagagatatggctttgattcttgatgttgctcgtttcaagtatccccctcactgggttcctcttaaacttctttgggaagccatggacagtattgatcagtcaacagggaaacgtagagggttcatgctcatatctagaccacacagagaacccggattgctctatactctgagctgcaaggatgaaagctggatcgaaatagccaagtatttgaaggaagatgttcctcgtcttgtaagttcacagcatgtagattctgtggagaaaatcatatcagttgtgttcaagtcacttccatcaaatttcaaccaattcatcagatgggtggctgagatccgaattacagaggactcaaaccaaaatctcagcgcagaggagaagtctaggctgaaactaaagcaattggtgctgaaggaagtgcacgaaactgaactgttcaaacacatcaataagttcttatccacagtgggttatgaagacagtctgacttatgctgctgcaaaggcttgttgccaaggagctgaaatcttatccggaagcccatcaaaagagttttgttgtcgggaaacttgcgtgaaatgcatcaaaggtcctgatgactctgaaggcacggtggtgactggagttgtggtgcgtgatgggaatgaacaaaaggttgatctgttagtgccatcgacgcaaactgagtgtgaatgtggtcctgaagcaacttatccagcaggaaacgatgtgttcactgcacttctattggctttacctccacagacatggtcagggatcaaagaccaagctcttatgcatgaaatgaagcagctcatttccatggcttccctcccaactttgcttcaagaagaggtattgcatcttcgacggcaacttcagctgctaaaacgatgccaagagaacaaggaagaggatgatctcgctgctcctgcctattag

SEQ ID NO: 462 - DNA, 555 bp, Arabidopsis thaliana
atgaagaggaaaggtgttgatgagtttccattctgtgttcatttggtttcatgggagaaagagaatgtgtcaagtgaagcacttgaagcagcacgtattgcttgcaacaagtatatggtgaaatctgctgggaaagatgcttttcatttgaggattagggttcatcctttccatgttctcaggattaacaagatgctttcgtgtgctggagctgataggcttcagactggaatgagaggtgcttttggtaaagctcttggtacttgtgctagagttgcgattggacaggttcttttgtctgttaggtgtaaggataatcatggagttcatgctcaggaagctcttcgtagagctaagtttaagttccctggtcgtcaaaagatcattgttagcaggaaatggggattcactaaattcaaccgtgctgagtacacgaagctgagagcgatgaagaggattgtgcctgatggtgtcaatgctaagtttctatcaaaccatggtccattggctaaccgtcaacctggaagtgccttcatatcagccactagcgaataa

SEQ ID NO: 463 - DNA, 702 bp, Arabidopsis thaliana
atggttcagcaaatatgggagacgttgaaggaaacaatcacagcttacactggactttctccagctgcgtttttcaccgtacttgctctcgctttcgccgtttaccaagtcgtctccggtttcttcgtttctcctgaagttcaccgacctcgttctttggaggttcagcctcaatcggagcctcttccaccgccggttcagctcggagaaatcactgaggaggagcttaagctttatgatggctccgattctaaaaagccccttcttatggcgatcaagggccagatctatgatgtttctcagagcaggatgttttatggaccaggtgggccatatgctctgtttgcagggaaagatgcaagccgagctctggcaaagatgtcatttgaggaccaagacttgactggagacatctcaggtctcggtgcatttgagctagaggcgttacaagactgggagtacaagttcatgagcaagtatgtcaaagtcggaaccattcaaaagaaggatggagaaggcaaagaaagttcagaaccttccgaagcaaagactgcctctgcggaaggtctttctacaaacactggagaagaagcttcagcaattacccatgatgaaacttctagaagcacaggcgagaaaatcgcggaaaccacggagaagaaagatgttgcaactgatgatgatgatgctgcaaaggagtaa

SEQ ID NO: 464 - DNA, 1398 bp, Arabidopsis thaliana
atggtttcctctcagcgtcctgtccccaacaaaatccagaaacagcaatatctatccatcagcccttcaaattctgtcttgaaagatgatgttgaacttgagttctctgatgtgtttggtccactccccgaagaggccaatgatattgcttacgacgagcctgctgttgtctacagtcgatcccactccttggttggcccgtgttcgctcgatagtcattctttgaagctgaccaagctcaccttactagagactgaggactcaattgacttggtggagtgtctcgaaggtgaatctttaaaagaaaatgatgatttctctggtaatgacgacagtgacaatgagaaagctttagagggagatctggtgaaagtctcaggtgtagtaggcatagatgattttgaggttatgaaggttgttgggaaaggtgcgtttgggaaagtctaccaggtgaggaaaaaggagacctctgagatatacgctatgaaagtcatgaggaaagatcacattatggagaagaaccatgctgaatacatgaaagctgagcgcgatattcttacaaaaattgatcacccattcattgttcaacttaaatactcttttcagaccaagtacaggctgtatcttgtgctcgactttataaacggaggtcatcttttcttccaactctatcaccaagggcttttcagagaggacttggctcgagtgtacactgcagaaatcgtctctgcagtttcccatctccatgagaaaggcataatgcacagagatctgaaacccgaaaacatactcatggatacagatggccacgtgatgctaacagattttggtttagcaaaggaatttgaagaaaacacaagatcaaactccatgtgcggaactacggagtatatggcacctgaaattgttcgaggaaaaggacatgataaagcagctgactggtggagcgtagggattcttctgtatgagatgctcacaggaaagccaccgtttctcgggagcaaaggaaagatacagcagaaaattgtgaaggacaagatcaagcttccgcagtttctgtctaatgaagctcatgcaatactgaaagggctgctgcaaaaagagccagaaaggcgacttggaagtggactgagcggagcagaggagataaaacagcacaaatggttcaagggaataaactggaagaagctggaggctagagaagtgatgccaagtttcaagccggaagtatcgggaaggcaatgcatagcaaattttgacaagtgttggactgacatgtctgttttggattctccggcgagcagtcccagttcggatcctaaggccaacccttttaccaatttcacttacgtcaggcctcctccttcattccttcaccagtccacaactactttgtag

SEQ ID NO: 465 - DNA, 1308 bp, Arabidopsis thaliana
atggcgagctcggttttatcagaatgtggttttagacctctccccagattctaccctaaacacacaacctcttttgcctctaaccctaaacccactttcaaattcaatccaccacttaaacctccttcttctcttctcaattcccgatatggattctactctaaaaccaggaactgggcattgaatgtggcaacacctttaacaactcttcagtctccatccgaggaagacacggagagattcgacccaggtgcgcctcctcccttcaatttggcggatataagagcagccatacctaagcattgttgggttaagaatccatggatgtctatgagttatgttgtcagagatgttgctatcgtctttggattggctgctgttgctgcttacttcaacaattggcttctctggcctctctactggttcgctcaaggaaccatgttctgggctctctttgtccttggccatgactgcggacatggtagcttctcgaatgatccgaggctgaacagtgtggctggtcatcttcttcattcctcaattctggtcccttaccatggctggaggattagccacagaactcaccaccagaaccatggtcatgtcgagaatgacgaatcatggcatcctttgcctgaaagcatctacaagaatttggaaaagacgactcaaatgtttaggtttacactgccttttccaatgctcgcataccctttctacttgtggaacagaagtccagggaaacaaggttctcattatcatccggacagtgacttgtttcttccaaaagagaagaaagatgttctgacatcaactgcctgttggactgcaatggctgctttgcttgtttgtctcaactttgtcatgggtccaatccagatgctcaaactatatggcatcccttattggatatttgtaatgtggttggacttcgtcacttacttgcaccaccatggacatgaagacaagctcccttggtatcgtggaaaggaatggagttacctgagaggagggctcacaacattagatcgtgactacggatggatcaataacatccaccacgatattggaactcatgtgatacatcatcttttcccgcagatcccacattatcatctagtagaagcaacagaagcagctaaaccagtactaggaaagtactacagagaaccgaaaaactctggacctctgccacttcacttactgggaagcctcataaagagtatgaaacaagaccatttcgtaagcgatacaggagatgtcgtgtactatgaggcagatccaaaactcaatggacaaagaacatga

SEQ ID NO: 466 - skipped

SEQ ID NO: 467 - DNA, 2034 bp, Arabidopsis thaliana
atgtcgatctcttggactcgaaatttcttcgaaagattctgcgtcgaggaatacaatatagacaccataaaacagagtagtttcctctctgccgatcttctaccatctcttggagccaggatcaaccaatctactaagctccgcaaacacataatctctccttttaatccacgttacagagcgtgggagatgtggctagtattactagttatttactcagcttggatttgcccatttcaatttgctttcatcacctataaaaaagacgcgattttcatcatcgacaacattgttaatggcttcttcgccattgatattattctcaccttcttcgtcgcttatctcgatagccactcctatcttctagttgacagtcctaagaaaatagcaataaggtacctttcgacgtggttcgctttcgatgtttgttccacagcaccatttcagccactaagcctcttgtttaactacaacggaagcgaactaggattcagaattcttagcatgctcaggttatggcgtctccggcgagttagctcgctatttgcaaggcttgagaaagatatccgtttcaactatttctggatacgttgcacaaaactcatttcggtcactttgttcgctatacattgtgctggatgtttcaactacctgattgcagatagatatcctaatccaagaaagacatggattggagctgtgtatccaaatttcaaagaagcaagtctatggaatagatatgtgactgctctttactggtccattacgacattaacgaccacgggatatggagattttcatgctgagaacccaagagaaatgctttttgacattttcttcatgatgttcaacctcggtttgacagcttacctcattggaaatatgaccaacctcgtcgttcattggactagccgaaccagaacctttagggattcagtgagagctgcttcagagtttgcttcaagaaatcaactcccacatgacatacaagatcaaatgttatcacacatttgcttaaagttcaaaacagagggcttgaaacaacaagagaccttgaacaatctgccaaaagcaatccggtcaagcattgcaaactatttattcttccccattgttcacaacatttacctctttcaaggagtttctcgtaacttcctctttcaattggtttcagatatagacgctgagtatttcccaccaaaagaagatataattctacaaaacgaagctcctactgatctttacattctggtgtcaggagcagtggacttcactgtctacgttgatggacatgatcagtttcaagggaaagcagtaattggagaaacatttggagaggttggagttttatactatagaccacaaccattcacagtaagaacaaccgagctatctcaaatactgcggataagcagaacatcgctgatgagtgcgatgcatgctcatgctgacgatggacgagtcatcatgaacaatctcttcatgaaacttagagggcaacagtcaatagcaatagatgattcgaatactagtggtcacgaaaacagagatttcaaaagcatgggatgggaagagtggagagattcaagaaaagatggctatggtttagatgttacgaatccgacttccgacactgctctaatggatgcgattcacaaggaagatactgaaatggttaagaagatacttaaggaacaaaagatagagagagccaaagtggaaagatcaagtagtgaaaccgctggaagaagttacgctaacgattcatcgaaaaaagatccatattgcagctcaagcaaccaaatcatcaagccatgcaaacgagaagaaaagagagttaccatccacatgatgtctgagagcaagaacgggaagttgatactcttaccatcatccatagaagagcttctaagacttgcaagtgagaagtttggaggctgcaacttcacaaagatcaccaatgcggacaacgctgagattgatgatttagatgtcatttgggatggtgatcatttgtatttttcatcaaattga

SEQ ID NO: 468 - DNA, 798 bp, Arabidopsis thaliana
atgtcgtcttctcgggaagagaatgtgtacttagccaagttagctgagcaagctgaacgttatgaggaaatggttgagttcatggagaaagttgcaaagactgttgacaccgatgagcttactgtcgaagagagaaacctcttgtctgttgcttacaagaacgtcattggtgctaggagagcttcctggaggatcatatcttccattgaacagaaggaagaaagcagaggaaacgatgatcatgtttccattatcaaggactacagaggaaagatcgaaactgaactcagcaaaatctgtgatggaatactcaatcttctggattctcaccttgttcccactgcatctttggccgagtccaaagtcttttacctcaaaatgaaaggagattaccacaggtaccttgctgagtttaagactggagctgagaggaaagaagctgctgagagcactctggttgcttacaagtcagctcaggatattgcacttgctgatttagctcctactcatccgattagactgggacttgctcttaacttctctgtcttctactacgagattctcaactcacctgatcgtgcctgcagtctcgcaaaacaggcttttgatgaggccatttctgagctggatacattaggagaagaatcatacaaagacagtacgttgataatgcaacttctccgtgacaatctgaccctttggaactctgacatcaatgatgaggcgggcggtgatgagatcaaggaggcgtcaaaacatgagccggaagaggggaaaccagctgagacagggcagtga

SEQ ID NO: 469 - skipped

SEQ ID NO: 470 - DNA, 1512 bp, Arabidopsis thaliana
atgtctcttttctccttccccatctccactgagttgcttccatggcttctcctacttttgattcctccacttcttatcttctttcttcttcgttcccctaaaaatcttccaccaggtccaccaagattacctatcttaggaaacatccaccagctcggatccctccctcaccgcagtctcagagatctctctctcaaatatggcccagtcatcaccgtctatctcggcagcgtccgtaccgtggttgttcactctccggagacggcggaggaagttctaaaacttcacgactccgagtgttgtactcgtccaaagctatctatcaccaaaagctttttctatgatggacttggtctagggtttactaaatggggtgattactacagagatgtgcggaaactctgtgttcttgaacttttctccgttaaacgagccaactcgttccggaacataagagaggaggagctgagtcgactcgttaactcgttttctgactcggcgtcatctggatcttccgttgaccttaccgcaaatttggctaagttcgtcgcgagctttacgtgtcgaatggcgtttggattgagttttcaaggaagtggaatggataacgagacgtttctggagctgttcacggaggcgaacagagtgatcggaaaattcgcggcggcggatatattccccgggtttggctggatcttggatcggatcagtggtcttgattctagccggaggaagagttttcaagatcttgatacgttttaccagaaagctattgttgaccatcgggagaagaagaaaactgaagaccgtgaagatctcattgacgtcttgctcaagttacagagtcaagaaaccaaacttggttcttcaagaatcaccgatacacatatcagagctattattatggatttgtttgtagcaggagtagacacatctgttatcactttggattggacaatggcagagctttcaagacatccaagagtaatgaagaaagtacaagccgagattcgtgaacacgtaggagacaaaggtatagtgacatacgatgatctcgaggctctagtctacatgaaaatggtgatcaaggagacttggaggttacacgcaccgagtcctattctgattccaagagaagcaatgactaacttcaagatcaagggttatgatatttaccctggaacgcgtattcatgtcaatgcttgggctattggacgtaaccctgatgtatggaaggatcctgatgagtttataccagagagatttgttgatagcaatgtggaaactaaagggacaagttttgagctgttgccgtttgggagtggacgcagaggttgtcccgcaatgtacgtgggattaagtacggtggagtacacattggcgaatcttttgtatcattttgattggaaagcgactgaggaagtgagtgttgaagaagcacctggtctcactagccacaggaagcatcctcttcaccttgttcctgttaatgtcatcaaccgcaagctttag

SEQ ID NO: 471 - DNA, 1716 bp, Arabidopsis thaliana
atggcttccttcaattcgttccccattcccaaacagattgttggttcttcttcttcgtcgtcctcctctacttctcggccacgtattttagtgcgatcgagtttaacatcgtctatgacctctaccaatagtatgctggtctttgtacatcctcatcctttgattaaacattggctctcgttattgagatctgaccaaacttctttccccattttcgttagaattccaatgacttctgtggttgcaacgaggtggtcgtttctatcctcagtcaaagaggaaagcagaatttatcagaacgattctctaaaagcatgtggctgcgcatctgtatctccttacactgcacaaaataatgtttatgttgagctcaaagacccaaaggaaaatattggcgtgggttctgcagaaagatcatattcatctcgtagcatgttgcaatacaatttactggcaaagaaccttttggcactagaggaaacgtttgttgccttggattctgtaagaatggaaagagatattatgttgcaaatggggaagttgggggctgctgagttatttaaaacctgtctatctaggtatcgtggttcctcaatcacgtcgtgcttatctgacacaactgagttggtggatactacgccgaatcaacaagtctttgtatcctcgaggagaaaagtaaaaaagaaagcaaggaggtcgagtgtgacagctgagaatggtgatcagagttctctgccaatcggtttaagaactacatggaacaatattgatgtccctagagtgagaagaccaccaaaatatagaaagaaaagagagaggatctctagaaacgagactgagatgtcaacaggagtcaagatagtggcggacatggagagaatcagaacacaactggaggaagaaagtggtaaggtagcgagtttgagttgttgggctgcagcagctgggatgaacgagaaactcctgatgcgcaatctacattacggttggtactgtagagatgaactggtgaaaagcacccggtctttggttctcttcctcgcaagaaattaccgtggactgggaatcgcccacgaagatttaattcaggcagggtatgtgggggtgttacaaggagcagagaggtttgatcacacaaggggttacaagttttcaacatatgtgcagtattggataagaaaatcaatgtctacgatggtgtcacggcatgcaagaggcgtccatattccttcatcaataatccgaactatcaatcatatacaaaaggctcgtaagaccctgaaaacgagccatggtataaaatatgcggctgatgaggagattgcaaaactaacaggccactcggtgaagaagattcgagcagctaaccaatgcctaaaagtggtcggttcaattgacaagaaagttggggattgctttactacaaaattcctggaatttacaccagacacaacgatggagagtcctgaggaggccgtgatgaggcagagcgcgaggagagacatacatgatcttctagaagggttagagccaagagagaagcaagtgatggtcctacgttatggtcttcaagactacaggcccaagtccctggaagagattgggaagcttcttaaagttagcaaagaatggattcggaagatcgaacggagagcaatggctaaactcagagaccaacccaacgccgaagacctcagatattatttgaatcagtaa

SEQ ID NO: 472 - DNA, 642 bp, Arabidopsis thaliana
atgaactcattttcagctttttctgaaatgtttggctccgattacgagcctcaaggcggagattattgtccgacgttggccacgagttgtccgaagaaaccggcgggccgtaagaagtttcgtgagactcgtcacccaatttacagaggagttcgtcaaagaaactccggtaagtgggtttctgaagtgagagagccaaacaagaaaaccaggatttggctcgggactttccaaaccgctgagatggcagctcgtgctcacgacgtcgctgcattagccctccgtggccgatcagcatgtctcaacttcgctgactcggcttggcggctacgaatcccggagtcaacatgcgccaaggatatccaaaaagcggctgctgaagcggcgttggcttttcaagatgagacgtgtgatacgacgaccacgaatcatggcctggacatggaggagacgatggtggaagctatttatacaccggaacagagcgaaggtgcgttttatatggatgaggagacaatgtttgggatgccgactttgttggataatatggctgaaggcatgcttttaccgccgccgtctgttcaatggaatcataattatgacggcgaaggagatggtgacgtgtcgctttggagttactaa

SEQ ID NO: 473 - DNA, 480 bp, Arabidopsis thaliana
atgggtcttcctgaagatttcatcaccgagcttcagattccaagttacatattaaagatactttacgtcatcggtttctttagagacatcgtcgatgctctttgtccttacattggtctacctcgttttctagaccacaacgagacctctgcacccgatctgacccgacacgctctctctacgtcagcgagtcttgctaacgagttgatcccggtggttcggttctcggatcttccgaccgatccggaagattgttgtacggtttgtttgtcagattttgagtccgacgataaggttaggcagctacccaagtgtggacacgtgtttcatcattattgtttagaccgttggatcgttgactacaacaagatgaaatgtccggtttgtcggcaccggttcttaccgaaagaaaagtacacgcaatctgattggggttctggttcagattggtttagtgatgaagtggaaagtaccaactaa

SEQ ID NO: 474 - DNA, 1233 bp, Arabidopsis thaliana
atgagcgcgaaaaagcttgaaggttcgtcggctccggcgaatcgacgggatccgtacgaggtcctttgtgtatcaaaggacgctaatgatcaagaaatcaaatccgcttacagaaaattagctctcaagtatcatccggataagaatgcgaacaatcctgatgcttctgagcttttcaaggaagttgcattttcgtatagcattttgtctgatcctgaaaagagaaggcactatgacaatgcaggatttgaggcactcgatgctgatggaatggatatggaaattgacttgtcaaacctcgggaccgtaaataccatgtttgcagcattgttcagcaaactaggtgtgcctatcaagactactgtatctgctaatgttcttgaagaggctatgaatggaactgttacagttaggcctcttcctattggaacatcagttagtgggaaggttgagaagcaatgcgctcatttttttggagttacgataagtgaacaacaagctgaatcaggggttgttgttagagtaacttcaacagcacaaagtaaatttaagttactttattttgagcaagattcaagtggtggctatggattggccttacaggaagagcgtgagaaaacagggaaggtgacatcagctggcatgtatttcttacattttcaagtgtatagaatggatacaactgtcaatgcgttggctgcagccaaggaccctgaatctgctttcttcaagcgattggaaggtcttcaaccttgtgaggtttcggaactgaaagctggcacgcatatatttgcagtttatggtgataatttctttaagactgcatcttacacgattgaagcactctgtgccaagacctatgaggatacaacagagaagttaaaggagattgaagctcaaatcttaagaaagagaaacgaactgcggcagtttgaaacagagtaccgaaaagctttggcgcggtttcaagaagttaccaacagatatacacaggagaaacaaactgtggatgaactgctaaagcaacgggatacaatccattcgaccttctctgttgtgaagacaccaagcggcaacaacttgagcaatggaagtagcagcaaagctcagggagatgaatcaaaaggtgatggggatagtgcgggagaagaaggcggaacagagaatagagacaaatccaagaggaaatggttcaacttgaacctaaaaggatctgataagaagcttggttga

SEQ ID NO: 475 - DNA, 1179 bp, Arabidopsis thaliana
atggcgtttgccggcgttttgccgattgttttcttgcttatattatcatcagcggatctagcagcgagtcaatcacagcccggtccaacaaatcaaccgtataactacggcagactaagtccagccatggcagtgatcgtcgtgatcctaatcgctgctctcttcttcatgggcttcttctctatctacttccgtcactgctcaggcgtaccagacgccggtgtttctccagctggtggagctagatccagagcaaccgtcaacgcggcggcgcgtggtctcgacgtttcagttgtcgagacttttcctacgttcttgtactcagatgtgaaaacgcagaagcttggtaaaggagagttagagtgtgcgatatgtttgaacgagttcgaagacgacgaaacgctgcgtttgcttcccaagtgtgatcacgtgtttcatccgcactgcatcgatgcttggctcgaggctcacgtgacttgtcccgtttgcagagcgaatcttgctgaacaggtagctgaaggtgagtcagttgaaccgggaggaactgaaccggatcttgaattgcagcaggttgtggtgaatcctgaaccggtggttactgcaccggtaccggaacaattggtgactagtgaagtcgattcgaggagattacctggtgtaccggtggatcttaaaagagttaaattctcgagatcgcatacgacgggacattcggtggttcaaccgggagaatgtaccgaacggtttactcttcggttaccggaagatgtgaggaagaggataatgaaggattggaaattgaaccggacgaatagtcttctggttcttcctagaggagggagttcgaggagaggtaaaccgattgaccggtcaagggctcggtctgatcgatggttgtttcgtaaaacgccttcgtttctgtggaggagtcgtgatgatggttcgattaggttaggtgctaccggtagcgttcgagccagtgctgtaccgaattcaaccggtagtgattcggtacgtgcaggagaccggtgggcttttcttagaaacgcgtcgtttttgtggaggaactcttcggtacatgtgccaagaggaggagtcaataaagacggcgaaggaacttcggttaaatcgaccggtgcaagtggctcaactagcggttcggtgagattaccggtttag

SEQ ID NO: 476 - DNA, 1170 bp, Arabidopsis thaliana
atgggaggttgtttcagcaatcggattaaaacagatattgcttccagtacatggctaagttcgaaattcttgagtagagatgggagcaagggctcgtcgaccgcttccttctcttatatgcctcgaacagaaggcgagatcttgcaaaatgctaatctcaagaactttagtctcagtgaactgaaatctgcaactaggaatttccggcctgatagtgtggttggtgaaggtggatttggttgcgttttcaaaggctggatcgatgagtcctctctcgctccttctaaaccggggaccgggattgtcattgctgtgaaaagacttaaccaagaagggtttcaaggtcatcgagagtggctggctgagatcaattatttaggccagctggatcatcctaaccttgtgaaactgattggatactgcttggaagaggagcacaggcttcttgtttacgagtttatgactcgtggtagtcttgagaatcacttattcagaagaggaacattctatcagccactttcatggaacacgcgggttcgtatggctcttggtgcagctagaggacttgcttttcttcacaatgctcaaccgcaagttatataccgagacttcaaagcatctaacatcttgctagattcgaactacaacgcaaagctttcggatttcggtttggctagagatggtccaatgggtgacaacagccatgtttctaccagagtcatgggaactcagggatacgctgctccagaatatctagctacaggtcatttatcggtgaagagcgatgtatacagttttggggttgtgttactggagttgttatcaggaagacgagcaattgacaagaatcaaccagtaggagaacacaatctcgtggattgggcaagaccctacttaacaaacaagagaagacttctgcgagtgatggatcctcgtctccaaggtcaatactcactaacccgagctttgaaaattgcagttcttgcactcgattgcatatctatagatgccaagagtagaccgaccatgaacgaaatcgtcaagacaatggaagaacttcatatccagaaggaagcatcaaaagagcagcagaatcctcaaatcagcattgacaacatcatcaacaaatctccacaagctgtgaattatcctaggccttcaattatgtaa

SEQ ID NO: 477-478 - skipped (2 entries)

SEQ ID NO: 479 - DNA, 606 bp, Arabidopsis thaliana
atgagcggaggaggagacgtgaacatgagtggtggagacagacgcaagggaacggtgaagtggtttgatacacagaaggggtttggtttcatcacacctagcgacggtggtgacgatctcttcgttcaccagtcttccatcagatctgaaggatttcgtagcctcgcagctgaggaatctgttgagttcgacgttgaggttgacaactccggccgtcccaaggctattgaagtgtctggacccgacggtgctcccgttcagggtaacagcggtggtggtggttcatctggtggacgcggtggttttggcggcggtggtggaagaggagggggacgtggtggaggaagctacggaggaggttatggtggaagaggaagcggtggccgtggaggaggtggtggtgataattcttgctttaagtgcggtgaaccaggtcacatggcgagagaatgctctcaaggtggtggaggatacagcggaggcgggggtggtggaaggtacgggtctggcggcggcggaggaggaggtggtggtggcttaagctgctacagctgtggagagtctgggcactttgcaagggattgcactagcggtggtgctcgttga

SEQ ID NO: 480 - DNA, 2930 bp, Arabidopsis thaliana
atggctctgtttagagatattgttcttcttgggtttctcttctgcttgagcttagtagctactgtgacttcagaggagggagcaacgttgctggagattaagaagtcattcaaagatgtgaacaatgttctttatgactggacaacttcaccttcttcggattattgtgtctggagaggtgtgtcttgtgaaaatgtcaccttcaatgttgttgctcttaatttgtcagatttgaatcttgatggagaaatctcacctgctattggagatctcaagagtctcttgtcaattgatctgcgaggtaatcgcttgtctggacaaatccctgatgagattggtgactgttcttctttgcaaaacttagacttatccttcaatgaattaagtggtgacataccgttttcgatttcgaagttgaagcaacttgagcagctgattctgaagaataaccaattgataggaccgatcccttcaacactttcacagattccaaacctgaaaattctggacttggcacagaataaactcagtggtgagataccaagacttatttactggaatgaagttcttcagtatcttgggttgcgaggaaacaacttagtcggtaacatttctccagatttgtgtcaactgactggtctttggtattttgacgtaagaaacaacagtttgactggtagtatacctgagacgataggaaattgcactgccttccaggttttggacttgtcctacaatcagctaactggtgagatcccttttgacatcggcttcctgcaagttgcaacattatcattgcaaggcaatcaactctctgggaagattccatcagtgattggtctcatgcaagcccttgcagtcttagatctaagtggcaacttgttgagtggatctattcctccgattctcggaaatcttactttcaccgagaaattgtatttgcacagtaacaagctgactggttcaattccacctgagcttggaaacatgtcaaaactccattacctggaactcaatgataatcatctcacgggtcatataccaccagagcttgggaagcttactgacttgtttgatctgaatgtggccaacaatgatctggaaggacctatacctgatcatctgagctcttgcacaaatctaaacagcttaaatgttcatgggaacaagtttagtggcactataccccgagcatttcaaaagctagaaagtatgacttaccttaatctgtccagcaacaatatcaaaggtccaatcccggttgagctatctcgtatcggtaacttagatacattggatctttccaacaacaagataaatggaatcattccttcttcccttggtgatttggagcatcttctcaagatgaacttgagtagaaatcatataactggtgtagttccaggcgactttggaaatctaagaagcatcatggaaatagatctttcaaataatgatatctctggcccaattccagaagagcttaaccaattacagaacataattttgctgagactggaaaataataacctgactggtaatgttggttcattagccaactgtctcagtctcactgtattgaatgtatctcataacaacctcgtaggtgatatccctaagaacaataacttctcaagattttcaccagacagcttcattggcaatcctggtctttgcggtagttggctaaactcaccgtgtcatgattctcgtcgaactgtacgagtgtcaatctctagagcagctattcttggaatagctattgggggacttgtgatccttctcatggtcttaatagcagcttgccgaccgcataatcctcctccttttcttgatggatcacttgacaaaccagtaacttattcgacaccgaagctcgtcatccttcatatgaacatggcactccacgtttacgaggatatcatgagaatgacagagaatctaagtgagaagtatatcattgggcacggagcatcaagcactgtatacaaatgtgttttgaagaattgtaaaccggttgcgattaagcggctttactctcacaacccacagtcaatgaaacagtttgaaacagaactcgagatgctaagtagcatcaagcacagaaatcttgtgagcctacaagcttattccctctctcacttggggagtcttctgttctatgactatttggaaaatggtagcctctgggatcttcttcatggccctacgaagaaaaagactcttgattgggacacacggcttaagatagcatatggtgcagcacaaggtttagcttatctacaccatgactgtagtccaaggatcattcacagagacgtgaagtcgtccaacattctcttggacaaagacttagaggctcgtttgacagattttggaatagcgaaaagcttgtgtgtgtcaaagtcacatacttcaacttacgtgatgggcacgataggttacatagaccccgagtatgctcgcacttcacggctcactgagaaatccgatgtctacagttatggaatagtccttcttgagttgttaacccgaaggaaagccgttgatgacgaatccaatctccaccatctgataatgtcaaagacggggaacaatgaagtgatggaaatggcagatccagacatcacatcgacgtgtaaagatctcggtgtggtgaagaaagttttccaactggcactcctatgcaccaaaagacagccgaatgatcgacccacaatgcaccaggtgactcgtgttctcggcagttttatgctatcggaacaaccacctgctgcgactgacacgtcagcgacgctggctggttcgtgctacgtcgatgagtatgcaaatctcaagactcctcattctgtcaattgctcttccatgagtgcttctgatgctcaactgtttcttcggtttggacaagttatttctcagaacagtgagta

SEQ ID NO: 481 - DNA, 1503 bp, Arabidopsis thaliana
atgttatacttcatccttctccctcttctatttcttgtaataagttacaaatttctctactccaaaacgcaacgtttcaaccttcctccaggaccaccgtcacgacccttcgtcggccatctccacctcatgaaaccgccgatccaccgtctcctccaacgctactccaaccaatacggcccaatcttttccctccgtttcggctcccgacgcgtcgtggtcataacatccccttctctcgcccaagaatccttcaccggccaaaacgacatcgttctctccagccggccgctccaactcaccgccaaatacgtcgcatacaaccacacaaccgttggtacagctccttacggcgaccactggcgtaacctccgccgcatttgctcccaagagattctctcctctcaccgtctcatcaacttccaacacatccgcaaagacgagatcttacggatgctcacacgcctctcacgttacacacaaacctccaacgaaagcaacgatttcactcacatcgagctagaaccgctcttatctgatctaacattcaacaacatagtaagaatggttacagggaagagatattacggcgacgacgtcaacaacaaagaagaagcagagctattcaagaagctagtctacgatatcgccatgtatagcggcgctaatcattccgctgattacttaccaatactaaaactattcggaaacaaattcgagaaagaagttaaagctataggcaaatcaatggatgatattttgcagcgtttgttagatgaatgtagaagagataaagaaggtaacacaatggtcaatcatttgatctctctacaacaacaacaacctgagtattacactgacgttatcatcaaaggccttatgatgtcgatgatgctcgccggaactgagacctccgctgtgacattagagtgggcgatggcgaatctactgagaaatccagaagtactggagaaggcgagatcggagatcgatgagaagatcggaaaagatcgactaatcgacgaatcagacatcgcagtgcttccttacctccaaaacgtcgtctccgaaacattccggctatttccggtggcgccgtttctaatccctcgatcaccgacggacgacatgaaaatcggaggttacgacgtcccgcgagatacgatagtgatggttaacgcttgggctatacatagagatccagagatttgggaggagccagagaagtttaatccagatcgatataatgacggatgcggaagcgattactatgtttacaagctgatgccgtttgggaatggccggagaacttgtcccggcgccggattaggtcagaggattgtgacattggcgcttggatcgttgattcaatgctttgaatgggagaatgtgaaaggggaagagatggatatgtctgagagtactgggttgggtatgcgtaagatggatcctttacgggccatgtgtaggcctaggcccattatgtcaaagcttttactctaa

SEQ ID NO: 482 - DNA, 996 bp, Arabidopsis thaliana
atggggaataagaattcgatgtgtgggttaaaaaggtttccgaactacaagaagtctccgatcggttcatttgcgaaaaactcatcatctcacgacggtattaaaacaatcgaagctgttaacagttgcagtttttctagaaaagcagatctttgcatccgtatcatcacatggaacatgaatggaaatgtttcgtatgaggatttagttgagcttgttggcaaagaaaggaagttcgatttgcttgtcgttggcttgcaagaagctcccaaagcaaacgttgatcaacttttgcagacagcttcatctccaactcacgagcttcttgggaaggcgaaattgcaatcggtccagttatatttgtttgggccaaagaattcacatacattagtaaaagaattaaaggcagagagatattcggtaggaggatgtggaggtttaataggaagaaaaaaaggagccgtggctattcgtattaactacgatgacatcaaaatggtttttatctcttgccatctctctgctcatgcaaaaaaagtggatcaaagaaatacggagttaagacacatagcaaattcactattaccaagagacaaaaggaaacgtgaccttactgtttggctaggagatctaaattacaggatccaagatgtctctaaccatcctgttcgatctcttatccaaaaccatcttcaatctgttcttgtgagtaaagatcaactcttgcaagaagcggagagaggcgaaatattcaaaggttactctgaaggaactttagggtttaaaccaacctacaagtacaatgtaggaagcagcgactatgatacaagccataagatcagggttccagcttggacagataggatcttattcaagatccaagatactgataatattcaagcaactcttcactcttatgattccatagaccaagtatatggttctgatcataagcctgtcaaagcggatctttgcttgaagtgggtcaacagttaa

SEQ ID NO: 483 - DNA, 1140 bp, Arabidopsis thaliana
atgggtgtgatatctccgactgaaactctgttcttaaagtctcaacatcgtcttcttcaacctcgaaactattcatacgcacttgcttttcacagcactcgacgagttgcgaatttcccacgcaactcattctcttctctaggtttcactttctttctcctctgtttttatgaaatttctgttttgtttcagctgtatcataagaaggtttcttctattatggaaacattaaagcaagcctactcttttattcctcatggaattctgttaagtacaatattagctcttgtctatccaccttctttcacatggttcaagccaaggtactttgtacctggcttagggttcatgatgtttgctgttggtatcaactctaatgaaagagattttcttgaagcacttaaaagaccagatgctatttttgccggttacatcggacaatacttgattaaacctctcttaggtgctggaatcatgttggtctcatgtgttagtggagctcagctatcaaattacacaactttcttgaccgatccttcactcgcggcgcttagcatcgtcatgacatctatctcaacggccactgcggtcctcgttacacctatgctttcactcttactcattggtaaaaagcttcccgttgatgtgtttgggatgatctctagcattcttcaagtggtgattacacctattgccgcaggactacttctgaaccgaaagaacaaaaaactaacgttacgttacaaatgtgagtgcaggttgtttccaaggttgtctaatgcaatcaaaccatttcttccggcgttaacagttatcgatatgagttgttgcataggagcaccccttgctttgaatatagattcaatcttgtctccgtttggtgcaaccattttgttcctcgtcatcacgtttcatctcttggcttttgttgctggttactttttcactggtttcttcttcagcaaggcacctgatgtaaaagctctgcaaagaacaatttcctatgaaacaggaatgcaaagtagtcttctcgctctggccctcgctacaaagttctttcaagatcctctcgttggagtgcctccagcaatctccgtgagttttcaatatagttttgttacatctattttcttctattaa

SEQ ID NO: 484 - DNA, 1467 bp, Arabidopsis thaliana
atgcatagagtacgcaataaaccggttaaatccaccgctactgcttccgtcaagcatttaatcaaacagagaggcggcgacggagctacggcggcttccaagtcggcgaatgattataataataatgatagtctcttgacggatatgcaggaaccaagcatcgatacagataaactcagctacgagattttctctattcttgagagcaaatttcttttcgggtacgacgactcgaaacccgaacccgcgaattcggttgttgctgggtcgattaagaaccagagaggtaaaatctgtattctgagtatcgatggaggtggaatgagagggatcttacccggtaaggctttggcttatctagaacacgctctgaaatctaaatcgggtgacccgaatgcccgaatcgccgattactttgacgtagccgccgggtccggtataggtgggatttacacagccatgttgttcgggtcaagagacggtaaccgccccatcttcaaagcagatgacacgtggcagttcttaacgagaaacgccaagggtctttacggaggagcaggaatcttgaaacgggtcttgagaaccgggtcgggttgttgttccgggacggctaagttaaagaaagtgatgaaagagtctttctcggagctaaccttaaaggacacgcttaaaccggtgcttataccttgctacgacctcaaaagctctggcccgtttctgttctcacgggccgatgcgcttgagacggacggctatgattttaggctctcggaggtttgtagagcgacttgggctgagccgggtgtgtttgagcccgtggagatgaagtcggttgatgggcagaccaagtgtgtggctgttggtggaggattagccatgagcaatcccacagcggctgcaatcacgcatgtcctgcacaacaagcaggagtttccgtttgtgcgaggtgttgaggatttgcttgtgttgtctcttggtatgggtcagttgcttgatgttagctatgagtatgatcggattatcaagtggaaggctaagcattgggctcgccccgcagctcttatttctaatgacggtgctgctgacactgtcgatcaagctgtggccatggcttttggtcactgccgcagtagtaactatgtccggattcaggcgaatgggtcgaacttaggaccttggagtcctaacatggacacagaccctagtgggagcaatgtgaatatgctgatgggagtagcagaggagatgcttaaacaaaagaatgttgaatctgttttgtttggaggtaaaagaatcgatgaacagagcaacttcgagaagcttgactggttagctggggaacttgttctcgagcatcaaaggagaaatagcagaatcgctccaaccgtagcgttcaagcaatccgtgcatagagcagatcaaaagacaagtgataaagatatcggtgtgaccgcaagagaacgatga

SEQ ID NO: 485 - DNA, 639 bp, Arabidopsis thaliana
atggaggatcggttctccgctatcaccaatcttcatggagatcataaacaggcaatatttggagtctatgttggtcatggaggagttaaagcggctgagtttgcagctaagaacttagataagaacattgtagaagaagtagttgacgcaacgtttcttaaggaggaaggttttaagggtggttcatcctgtgtcacggctttggttagcgaagggagccttgttgtgtcaaacgccggtgactgtcgtgctgttatgagtgtaggagagatgatgaacggaaaagaattgaaaccacgggaggatatgttgatacgtttcacgttgtggagaatccagggatccttagttgtgccaagaggaatcggagatgctcaacttaagaaatgggttatagctgaaccagagacaaagatctcgagagttgagcatgaccatgagttcttaatcttggcatcacatggtttatgggataaggtaagtaaccaagaagcagtagacattgctcgtcccttctgcttacgaaccgagaagccattgttgttagcagcttgtaagaagcttgttgatctctcggcttcacgaggctcgtttgatgatatcagtgtgatgttgatcccattgcgccagttcgtatag

SEQ ID NO: 486 - DNA, 1587 bp, Arabidopsis thaliana
atgaaagaagtagtttatgttctgctacttgttcttcttgtttcggtttcagatgcaaatgaaacgaaaccaaatattgaaaacttcctccgatgccttcgtaatcggaccaatccgaagaatccgatcgccgaagccatctatactcatgagaactccaccttcgcgtcttcttacgtgtcctacacgaataacaaacggtgtttaaaccctaacgacacaaaactaatcgccattgttgctgcaaaacatgaatctcatgttcaagcaactgtggtttgcgcaaagtcaaacggaatccagatccgtatccgaagcggcggtcacgactacgagggactttctttcacctcctccgttccgtttgttatccttgacatgcacgatctccggtctataaccattgacgtgttcagaaagcaagcttgggttgatgctggtgcgaccatgggagagctctacaccaagatcgcagcggctagcaaaaccctagcatttgcgggtggcgtttgccctacattaggagctggaggacacatcagtggcggaggatacggaaatctgataagaaagtacggaatctcggtcgatcatgtggttgatgctcgaatagttgatgtcaacggcaatatcttgacaggagctaccttgggacgtgatctattgtgggctattcgaggcggtgggggcgctagctttggcgttatcctctcgtggaaaatcaacctcgtcgatgttccaaagaccgtgactgtttttaaggttaacaaaaccttggagcaaggagttactgatgttctctacaaatggcagcttgtgtcgagcaaattgcctcaagaccttttcttgagagcaatgcctaaaccggtaaatggcgtggtacctagcgagaaaaccatcgcagttgtgttctacgctcagtttttaggctcagcaaggaggctcatggcgattatgaacaagaatttgcctgaattagggctaaaacgtgaagattgctacgaaatgagctggattaatacgacaacgttttggcagaactatcctgtgggaacatcgacaagcgttttattggatagaccatcgggtcccgcaggagcattctacaagagtaaatcggattacgtcaagaaaccgatcccaaaggaagaaatggagaagatctggaaagcaatgttgaagttcaacaatatgtggatgcaatggaacccttacggtggagtgatggacaagattcctgctgatgccaccgcgtttcctcatcgaaaaggaaacttgttcaagattcagtactttgcgttatggacagacgcaaacgccacatacgctaatcttggtctaatgagagatatataccatgagatggagccgtacgtgtcaagtaaccctagagaggcgttcttgaattacagagatatcgatgtcggaagcaatccgagtggtgagaccaatcttgaagaagctaagatctatggatcgaagtatttcttggggaattttaagagattgatggaagttaaagcaaagtatgatcctgagaatttctttagattcgaacaaagtattcctcctgctagtgcaatgtaa

SEQ ID NO: 487 - DNA, 1602 bp, Arabidopsis thaliana
atgaaggctcgtagtggtcacgagatgaagaagacgttgacgtggtgggatctcatgtggtttggtatcggtgcagtcatcggctctgggatattcgttctcactggactcgaagcacgtaatcattccggtccagccgtcgtgttgtcttacgttgtctctggtgtctccgccatgctctccgtcttttgttacaccgagttcgccgttgagattcccgtcgcaggcggttcttttgcctacttaagagtggagctcggcgacttcatggccttcatcgccgcgggaaacataatcctcgaatacgttgtcggtggagctgccgtggctcgatcgtggacctcttacttcgccactctcttaaaccataaacctgaagacttccgcatcatagttcacaaactcggcgaagactatagccacttagatccaatagccgtcggcgtttgcgccatcatttgtgttttagctgtcgttggcacaaaaggctcctcaagattcaattacattgcttctataatccacatggtcgtgattctctttgttatcatcgccggatttactaaagccgatgtgaaaaactacagcgatttcactccttacggcgttagaggagtgtttaaatccgccgcggttcttttctttgcctatattggatttgatgcggtttcaacgatggctgaggagacaaagaatccagggagagatattcctattggtcttgttggatcgatggtggttactacggtttgttattgtctcatggcggttacgttgtgtcttatgcagccgtatcaacagattgatccggacgcgccattctcggttgcgttttctgccgttggatgggattgggctaagtacattgtcgcctttggggctcttaaaggtatgacgacggttttgttagttggggccattggtcaagctaggtacatgacacacatagcccgagcccatatgatgcctccatggctagctcaagtcaacgcaaagaccggaacaccaattaacgcgaccgtggtaatgcttgccgcgacagctctcatagcattcttcacaaaactgaaaattttagccgatctcttgtctgtttccacacttttcatcttcatgttcgttgctgtggctcttctcgttagaagatattacgtcaccggagaaacatcgacccgtgaccgtaacaagtttttagtgttcttaggtttgattcttgcgtcctctaccgcgactgctgtttattgggctttggaagaagaaggttggattgggtattgcattacggttcctatatggtttctgtctacggttgccatgaagtttcttgtaccgcaagctagggctccgaaaatttggggtgttcctttggttccgtggttgccttctgcttccatcgctattaatatcttccttcttggttccatcgatacaaaatcgttcgttaggtttgcaatctggacaggtattctgctcatatattacgtcttgtttgggttgcacgcaacgtatgatacagctaaggcgacgttgaaggagaagcaggcattgcagaaagctgaggaaggtggtgttgttgctgataattcttgttctgcaacttaa

SEQ ID NO: 488 - DNA, 1113 bp, Arabidopsis thaliana
atggtagcgttgcctctgttaccgactccgatagaatcgaactacagggcttgcaccattccttatcgattcccttctgataatcctagaaaggctactcccactgagatctcctggatcgatctcttctccaattccatcccttctttcaaggaacgtgcagagagcgatacaaccgttccagatgctcctgttcgagctgaaaagtttgccaaaaggtatgcggagattcttgaggacctgaagaaagatccggagagccatggtggtccaccggattgcattgtaagtatagtttcctcttgtaaacttctctgcagaattcgtgagctgatactaagagaattgggatttagggacatatttaagaaagttaaggatgaggagaatgcaaaggcaatatcactatttcctgaagttgtccgtttgagtgatgctattaacgatgaaggcaagcgcatagagaatctggtcagagggatatttgctggaaacatctttgatctgggttctgcacagtatcttaatgagtggatcttatgtttctttattcacatattgaagcttgctgaggttttctcaaaagacggcatgtcctttttggctagctgtcagaacttggtttcacgaccatgggtcattgatgacttggataactttcaagctagatggctcaagaagccttggaagaaggctgtgatatttgtcgataattctggtgcagacataattttgggtatcttgccctttgctagagaaatgctacgtctaggaatgcagaagttgtttattatgtatatttctaagttgttcctcattgcaccttcccttttgaaggttgtactggctgctaatgagcttccgtctatcaacgatgtaacttatatcgagcttgcagagatcttgtctaaggtgatgaatagagtcatttgggttattgatcttgcaagagtatcacaggaggttgcgtacctctcaagcgatgcagacttggtcatcttagaaggcatggtaagaccttttaatcgcgtgaagttggtgaactatgtgttatctagtcttaggtatcaacaaactgactccttgactgtcctgtacagggccgtggaatag

SEQ ID NO: 489 - DNA, 1062 bp, Arabidopsis thaliana
atgggaactccaaatcctcgcacctggtcggagctccctccagatttgctgggatctatttttcatcgattaagctttaccgattttcaccgcgcgaagattgtttgttggaactggaacttgagttcgaagctaacagttcccaagaaaataagatctccatggctgatgctgtttccagaaggagataacgaagatggttctgtgctactgttcaatccagaagaagaagaaaagatttacaagacaaagagatacttttcagggattcgattccttgcaaactcgggtaaatggttcctattgatagactctctattcaatctctatatcattgatgtgtttagcgagaacaagatagatcttctgcctctagaagagtctctactagataaagaggaatccgaagatttaacgggtcttttgtgggtagacgaaaagacggcagagtacgttgtagtcttgttcttcaacttccctagcggaaatgttggcttttgcaagaaaggtgatgatcattacactaaaattccgctgcattgcggagtcccgtggaggttacaagggttaatagatgcggtgctcttgggttaccgtctttacatccgcacggagcttagttacattcgtatcctagatttgtctacacaacaaggtttcgaggatgttaacaagtacgaaccattccaagtgttttcttcaactcaagattgtagcattgcggttacaacacgaggagaggttttgttggtcaagagcatcctcgacaacacaaccattggaagccataggaggttttgcatcttcaagaatatagactacaatccgcaagaagaggttgattctctaggtgatgaggccttgcttcttaacttaggtattctcttgcctagcatcgcaccaaactccatctattttacccgtcatggtcgtatctatcacaaggagcattttaacctggacttatgtgtgttcaatctcgaaacaaaaaccctcaaacgcttccctagtctcgccaatatgaagctcaaggatgctcaatggtttttccctggcatttga

SEQ ID NO: 490 - DNA, 876 bp, Arabidopsis thaliana
atggcgtctaaatcgaagcagcatcttcgttatcagccgcgaaaatctgtgtcacgatcaacacaagctttcacggtgcttatacttcttctcgtagtgattctgattcttctgggtctcgggattttgtcactacctaatgctaatagaaactcttccaagacgaatgatttgaccaacattgtacgaaagagtgagacgagttctggagatgaagaagggaatggtgaacgttgggttgaagttatttcttgggagcctcgtgctgttgtttatcacaatttcttgactaatgaagaatgtgagcacttgatcagccttgctaaaccgagtatggttaagtcaaccgtggtagatgagaaaaccggtgggagcaaagatagcagagtgagaactagctcaggaacttttcttagaagaggacatgacgaagttgtcgaggtgattgagaaaaggatttcagatttcaccttcattcctgttgaaaatggtgaaggtcttcaagttcttcactaccaagttgggcagaagtatgagcctcactatgactatttcttagatgagttcaacaccaagaatggaggacaacgaatagctactgtgcttatgtacctctctgatgtcgatgatggtggcgagactgtgttccctgcagcaagaggaaacattagtgctgtcccatggtggaacgagctctcaaaatgtggtaaagaaggactatctgttctaccaaagaagcgagatgctttacttttctggaacatgaggcctgatgcatctctagacccttcgagcttgcacggtggatgtccagtggtgaaaggaaacaaatggtcatccacgaaatggttccatgtccacgagttcaaggtttaa

SEQ ID NO: 491 - DNA, 375 bp, Arabidopsis thaliana
atgccaacatcagcaacagcggtggctccatcaactggatctgtccagaaaaaagatcaagactggcgtgcgattttgtctcccgagcaatttagagttctcagggaaaagggcacagagaaccgaggtaaaggagagtataccaaactgttcgacgacggaatctatagttgtgctggttgtgcaactcctctttataagtccaccactaagttcgactctggttgtggctggccttccttcttcgatgctatccctggtgccattaaacaaacggatatgtttggtagcaatgctgccgatggatcaatagtaacgagcggtttggactacattttgatttccatcaatgagaagttaaaagcttacacttaa

SEQ ID NO: 492 - DNA, 978 bp, Arabidopsis thaliana
atggctcgatctgcggttgatgagacatcagattcaggagcttttcaaagaactgcatcgacattccgtaacttcgtttcaaaagattccaattctcagtttccagctgaatctggtagataccatctttacatatcgtatgcttgtccatgggcttctagatgcctttcatacttaaagatcaaaggacttgacgatgcaataagcttctcgtctgtaaaacccatttggggaagaaccaaagaaaccgatgaacatatgggatgggtctttccaggttcagataccgaagttccaggagctgatcctgaccatcttaatggtgctaagagtgtaagagaactctatgagattgctagcccaaactacaccgggaagtatactgttcctgttctgtgggataagaagctcaaaactgttgttaacaacgagagtgcagaaataatccggatgttcaacactgagttcaatcatattgcgggaaatcctgatcttgatctttacccttcccatctccaagctaaaatcgatgaaactaatgaatggatttacaatgggataaataatggtgtctatagatgcgggtttgcaaagaaacaaggaccttatgaggaggcagtggagcaagtgtatgaagcattagatagatgtgaggagattcttggaaaacatcggtacatctgtggtaacactttgactgaaacagatatcagattgtttgtcacccttataagatttgacgaggtttatgcagtccacttcaaatgcaacaagaaactcataagggagtatccgaatttgttcaactacacgaaagacattttccagatccccggtatgagtagcacggttaacatgaatcacatcaagcagcattactatggaagccacccgtcgatcaacccttttgggatcatccctcatggaccaaacatcgattacacttcgcctcatgatcgacacagattctccaaatga

SEQ ID NO: 493 - DNA, 807 bp, Arabidopsis thaliana
atgtgtagtttgtcggcgattatgttgttaccaacgaagctgaaaccagcttattcagacaaacggagtaacagtagcagcagcagctcactcttcttcaacaatagaagatccaagaagaagaaccaatcgattgttcccgttgcaaggttgtttggaccggcgattttcgaatcatccaaattgaaagtactcttcttaggggttgatgagaagaagcatccttcaacgctccctaggacttacacactcactcacagtgacattacagctaaactaaccttagctatttctcaatccataaacaactctcagttgcaaggatgggcaaataggctataccgggatgaagttgtggcagaatggaagaaagtgaaagggaaaatgtcgcttcacgttcattgtcacataagcggtggccatttccttttagatctctttgcaaagtttcgatatttcatcttttgcaaagaactacctgtggtgttgaaggcttttgtgcatggagatgggaacttgttgaacaactatcctgagctacaagaagctcttgtttgggtctatttccattctaatgtcaatgagttcaacaaagtcgagtgttggggtccgctttgggaagctgtttcgcctgatggtcacaagactgagactcttcccgaggctcggtgtgcggacgagtgtagttgttgttttccaaccgttagctcgattccatggtctcatagtcttagtaatgaaggtgtaaatggttactctgggactcagactgagggaattgctactccaaatccggagaaactctag

SEQ ID NO: 494 - DNA, 1344 bp, Arabidopsis thaliana
atggatactacaataatttactcagggtttagtaaattagggttcttgtctaaagatgagtataatcagaaagttgaaaacttggagatggttttctcttcggttgctgttcaaattgcgagatacattgtgacgatgacaagtactggagctattcttttgattgggtttcaattatcagtgtatgtatttgtgatgaaaggtggagatagttcgatgaactcattggtttggtatagttggcttggtggaattatcattggaaccatgactggtgctaacatggttttggaagatcattatcgagccggtccacggaatgttgttataaccggaaggggactagggaaagctcttgctagagagtttcttctctctggagacagagtcattgtcacatctcgcagttctgaatctgttgatatgactgtcaaagagctagagcaaaatctcaaagagattatgagtaacgctagcgagtcagctagaaagaaactgagtgatgctaaggtagttggtattgcctgtgatgtttgcaaacccgaagacgttgagaagctgtcgaatttcgctgtaaaagagcttggttccatcaacatatgggtaaagaaacatatttctttttgtacaataaacaatgctggtactaacaaaggttttagaccgctactcgagttcacggaagaagatatcacacagattgtctccacaaatttgattggatcaattctatgtacacgaggggctatggatgtgatgagcagacagcacagtggtggacacatctttaacatggatggtgctggctctggaggttcaagtactcctctcactgccgtatatggttcaacaaaatgtggacttaggcagtttcatgggtctatagtgaaagaaagccaaaaaacaaacgttggccttcacactgcatcccctggcatggttctgacagaacttcttctcagtggttcgagcattaaaaacaagcagatgtttaacataatctgtgagcttcctgagacagtagctagaactttggtaccacgaatgcgagttgtgaaaggttcgggaaaagccgtcaattacctaactcctcctcggatattgttagctattgtcacttcctggctaaggagaggccgatggtttgatgaccaaggacgggcgttatatgcagcagaagcagatagactaaggaactgggcagagaacaggacgaggttgtcgttaacagacgcgatggagatgtatacagagaatacttgggtctctgttttctctctttctgttgtttgcgctttcatcatcttacaaagcacaacacctagctcttttccaggcacataa

SEQ ID NO: 495 - DNA, 4836 bp, Arabidopsis thaliana
atggcttcagtgaaggtaactgtggggtcacaggtctgggtggaagatccagatgaagcctggctagatggagaagttgtggaagctaacggtcaagagatcaaagttaattgccaaaccaagacggttagtcccttttctccaaagcaacgagacaatgtgttagttcttaaggttgtggcaaaggttaatgctgtccaccccaaggatcctgagtttcctgagcttggtgtggacgacatgacaaagcttgcgtatttgcatgaaccaggggttcttctcaatctaaaagccagatacaatgcaaatgaaatatatacatacacagggaatatactgatagctgtgaatccctttaaaagattaccccacctatatggaaatgagataatggagcaatataagggcacagattttggcgagttaagcccacatccttttgctgttgctgattctgcatacagaaaaatgatcaacgagggagtaagccaggcgatcttggtgagtggagaaagcggtgctgggaagacagagagcacaaaaatgctcatgcaatatcttgcatacatgggtggaaaagctgagagtgaaggacgatctgtcgaacagcaagttttggagtcaaatccagttttagaagcttttggtaatgcaaaaaccgtcagaaacaataattcaagtcgttttggtaaatttgtggagattcagttcaatcatatgggaagaatctcaggagctgctattagaacatatttgctggagaggtcacgagtttgtcaagtttctgatcctgaaagaaactatcattgcttttacatgctttgcgctgcgccagaacaggaaactgagcggtatcagttagggaaaccaagcacatttcactacctaaatcaatcgaattgccatgcattggatgcaattgatgattccaaagaatacctagctacgaggaaagctatggacgttgttggaattagtcctgaagaacaggatgcaatctttcgggtagttgctgctatccttcatctaggaaacattgagtttgcaaagagcgaagaatcagatggtgcagaacccaaggacgataaatcccggttccatctaaaagttgctgcaaaacttttcatgtgtgatgagaaagctctagagaactccttgtgcaatagggtgatggtgactcgtggtgaaagcattacaaagcctcttgatcccggtagtgcagcactaagcagagatgctcttgccaagattgtctattctaaattgtttgattggcttgtgactaagataaataattccattggccaagactcaagttctaagtacataattggagtcctggatatttatggatttgagagtttcaagacaaacagttttgaacagttttgtataaacctgacaaacgagaagctgcagcagcatttcaatcagcatgtgttcaagatggagcaagaagaatatactaaagaagagattgactggagttacatagagttcattgataatcaagatgtccttgaccttatagaaaagaaacctggtggaattattgctcttcttgatgaggcttgtatgttcccaagatcaacacatgatacacttgcagaaaagctataccagacatttggtagccacaagcgttttaccaagccaaaattggctcgtacagactttaccatctgccattatgctggtgatgtcacttatcagactgaactatttttagacaagaacaaagattatgttgttggagaacatcaatctctcatgaactcttcagattgttcctttgtctcatcgttgttcccaaaatcgcgagaggaatcgtccaaatcatcaaagttctcatcaataggctctcaattcaagcaacaactacaatctttgctcgagacgttgaacaccacagagccacactacatacgttgtgttaagccaaataacgttcttaagccagaaatatttgagaacgttaatgttctgcatcaacttaggtgtgggggggtcatggaagccattaggattagttgtgctggatatcccactagaaagcctttcaatgaatttttgaccaggttccgaattttggccccagaggcaacggagagaagctttgatgaagttgatgcttgcaaaaagcttctagcaagagtggaccttaaaggttttcagatagggaagacaaaggtgtttcttagggcaggtcagatggcagaactggatgctcaccgagcggaagttcttgggcattcagcaaggattatacagaggaaagtcattacgtatctgtctcgcaaaaaatatctgctgttgcagtccgcttcaactgaaatccaagccttttgtagaggacatattgcacgcgttcagtttaaggccacgagaagagaagctgcttctgtgagaattcagaagcaggcacggacatatatatgtcagacagcatttaaaaagttgtgtgcttcagctatttccattcagtctgggttgcgtgcaatggctgctcgagttgaatttcaatacaggacgaagagaaaagcagcgattattattcaagcaagtttaaaacctcatattgatgataaagatctctcctttttcagtcaaatcagaagatgtttgtgtcgacggcggtatttgagaacgaagaaagcagcgattaccactcaatgtggctggagagtgaaagttgcacaccgagaattgcggaagcttaaaatggctgctaaggaaacaggtgccctccaagacgctaagactaagctagaaaaggaagtggaagaactcacttcatgcttagagcttgagaaacaaatgaggatggagcttgagcaagtcaaaactcaagaagtcgaagatttgcggtcagctttaaatgatatgaaacttcagctaggggaaactcaagtaaccaaaagtgaggagattttgaagttgcagtctgctttacaagatatgcaactagaatttgaagaacttgctaaggagttggagatgacaaatgatcttgctgccgaaaatgaacagctcaaggatttggtgagctcgttgcaaaggaaaattgatgaatccgatagcaaatatgaagaaacaagtaagctaagtgaagaacgagtaaaacaggaggttcccgtcattgaccaaggtgtaattatcaaactcgaagctgaaaatcaaaaattgaaggctttggtcagtacattggagaagaaaatcgattcattagacagaaagcacgacgatctggtagatttgttggaaaggaaaatagacgaaacagagaagaagtatgaggaagcaagtaaactttgtgaagagaggcttaagcaggttgtggacacagagaagaagtatgaggaagcaagtagactttgtgaagagaggcttaagcaggttgtggacacagagacaaaactaatcgagttaaaaacatctatgcaaaggctagaggaaaaggtatctgacatggaagcagaagacaaaattcttcggcagcaagcgctacgtaattcagcttcccggaaaatgtcacctcagaaaagtcttgacctcttcgttttcatgtacctcttccagcctgtggagaacggacatcatgaatcatttgctcctataccatcaagaaggttcggggcaatgtcttttagacgatctcagattgaacaacaaccccatgaatttgttgacgtcctactcaaatgtgtttcgaaaaacgtcggtttcagccacggaaagcctgttgcagcatttacaatctacaaatgtctcatacactggaaactattcgaagcagagaaaaccagtgtctttgaccgtattgttcctatttttggttctgctatagaggtaacctggaaaaggtttaatcaatatgcgttgatatactttcagaacccagaagatgatagcaatttggcttattggctaacaaacacatctacactgctgttcttgcttcaaagaagcttgaaatctcatagtacaaccggtgcaagtccgaagaaacctcctcagccaacttctttttttgggaggatgacacagggtttccgttcaccctcctcggccagcctttcaggtgatgtagtgcaacaagtagatgctcgatatcctgctttacttttcaagcagcagcttacagcctacattgagactatatatgggatatttcaagagaatgtgaagagaaaactcgcacctgtgctttcgtcctgcattcaggagaattcacccacggaaacttggcaagacgtcattggtcttttgaatcagcttctcggcacattgaagaaaaactacaagattttctgccaaacattccaagacatcaacgttcaactctttaacagccttctgcaacgtgaatgctgcacattcatcatgggcaagaaggtgaatgtctggctaaatgaactagagtcttggtgcagccaggcaactgaagattttgtaggatcttcttgggatgaactcaaaaacacaagacaagccttagtgctattggttacagaacagaagtccacaattacatatgatgatctaacgactaacctctgcccggctcttagtactcagcaattgtatagaatatgtaccctctgcaaaattgatgatcacgaggatcaaaatgtatctccagacgtgatttccaacttgaaacttctagttacagatgaagacgaagacagtcgttccttcttgttagacaataattccagcatcccctttgcagctgatgaaatctcgaactctatgcaagaaaaagactttaccaatgtaaaaccagctgtggaactcgctgataaccctaacttccactttctgaaggaatga

SEQ ID NO: 496 - DNA, 3165 bp, Arabidopsis thaliana
atggaggaggagaagtcgttctcggcgtggtcttggtctgttgagcaatgtttgaaagagtacaagacaagattagacaagggtttaactagcgaagatgtccaaatccgccgtcaaaagtacggttttaacgagcttgctaaggagaaaggcaagcctttatggcatcttgtattggaacaattcgacgatacgcttgtgaagattcttctcggtgctgcgtttatctctttcgttttagcctttttaggtgaggaacacggctcaggttcagggttcgaggcctttgttgagccttttgtgattgttttgattctgattttaaacgctgtggttggtgtgtggcaagagagtaatgctgagaaagcacttgaggctcttaaagagatgcaatgtgaatctgcaaaggttttgagagatgggaatgtgttgcctaatttgcctgctagagagcttgttccaggggatattgtggagttaaatgtaggagataaagtccctgctgatatgagagtttccggtttgaaaacatccactttaagagtcgagcaaagctcgttaaccggtgaagcaatgccggttttgaaaggagcgaatcttgtagtcatggatgattgtgaactgcaagggaaagaaaatatggttttcgctggaacaacggttgttaacggaagctgcgtttgcattgtgacaagtataggtatggatacggagatcgggaaaatccagagacagattcacgaggcgtcgcttgaagagagcgagactccgttaaagaagaagctagacgagtttgggagtagattgactacagctatttgcattgtctgtgttcttgtgtggatgataaactacaagaactttgtttcttgggatgttgtggatggctataaacctgtgaatatcaagttttcattcgagaaatgtacttactacttcaaaatcgctgttgctctcgcagtggcagcgatacccgagggtttacccgctgtgatcacgacatgtttagctttagggacgaggaaaatggcgcagaagaacgcgatagtgaggaagctcccgagtgtagagacactcggttgcacaactgtgatctgttcagataaaaccgggactttaacaacaaaccagatgtctgcaaccgaattcttcacattaggcggtaaaacaacgactactcgagtgttttcagtcagtggtacgacttatgatcctaaagatggtggaattgtggattggggctgcaacaatatggatgctaacttgcaagctgttgctgagatatgttcaatttgtaatgatgctggagtgttctatgaagggaagttgtttagagcaacaggtttgcctacagaagcagcattgaaagttcttgttgagaagatgggtatcccggagaagaagaacagtgagaacatcgaggaagttacaaacttttcagacaatggtagctcagtgaagctagcttgttgcgattggtggaacaaaagatcgaaaaaggtagcgacattagagtttgatcgcgttcgtaagtccatgagtgttattgtgagcgaaccaaatggacaaaaccggcttctcgttaagggtgctgctgagagtatacttgagagaagttcttttgcacagcttgctgatggatctcttgtagctttagatgaatctagcagagaagtaatccttaagaaacattctgaaatgacttcaaaaggattaagatgtttaggattagcttacaaagacgaattaggagagttttcggattactcttccgaagaacatccttcacacaagaagcttttggacccttctagctattcgaacatcgaaacaaatctaatctttgttggagttgttggtctaagagatcctccgcgtgaagaagttggaagagcaattgaagattgcagagacgcagggataagagtaatggttataactggagataacaaatcaacagctgaagctatttgttgtgaaattagattgttttcggagaatgaagatctttcgcagagtagcttcactggtaaagagtttatgtctcttccggcttcacggagatccgagattctgtcaaaatctggagggaaagtgttctctcgagctgagccaaggcataagcaagaaatcgttaggatgcttaaggaaatgggagaaatagttgccatgacaggtgatggtgtgaatgatgctcctgctttgaaacttgctgacattggtatcgccatgggaatcactggaactgaggttgccaaagaagcttcggatatggttcttgcagatgataatttcagtactatagtatcagctgtagcagaaggtcggtccatttacaacaatatgaaagcttttatcaggtatatgatatcatcaaacgttggagaagtaatctccatcttcttaaccgcggcattggggataccggaatgtatgataccggttcagcttctttgggttaatcttgtaactgatggtcctcctgctactgcgttaggcttcaatccagctgatattgatatcatgaagaagccaccccgcaaaagcgatgattgtctcattgattcatgggttcttattcgatatctagtgattggttcttatgttggagttgcaactgttggaatctttgtcttgtggtacacacaagcttcattccttgggattagcctaatctcagatggacacacattggttagcttcactcagcttcagaactggtcagagtgttcttcgtggggaacgaacttcacggcgactccttacacagtcgcaggtggtcttaggaccatcgcgtttgagaacaatccttgcgattacttcactctcgggaaagtcaagccaatgacattatcactcaccgttcttgtggctatcgaaatgtttaactcgctgaacgcgttgtctgaagacaacagtctcttaacgatgccaccatggagaaacccttggctactagtggccatgactgtctcctttgcgctacactgtgtcatcctctatgttcctttcttagctaatgtgtttgggattgtgcctttgagtttcagggaatggtttgtggttattcttgtttccttccctgtgattctgatcgatgaagctctcaagttcattgggagatgcagaaggacaagaatcaagaagaagatcaagacaatgtaa

SEQ ID NO: 497 - DNA, 4080 bp, Arabidopsis thaliana
atgggttcactgaaaaaggacggcgagatcggagatgagtttacggaggcgttactgtacgttaacggcgttcgtagagtcttgcctgatggattggctcatatgacacttctcgaatatctcagaggattgaccggtacaaagctgggatgcggcgaaggtggttgtggggcttgcacggtgatggtgtctagttatgacaggaagtcaaagacctctgtgcattatgctgtcaacgcttgcctagcacctctctattctgtagaagggatgcatgtaatatccattgagggacttgggcatcgcaaacttggcttgcaccctgtccaggagtctttggcatcttcccatggttcccaatgtgggttttgtactcccgggtttatcatgtccatgtattcgttgttgaggtcaagtaaaaactcaccttctgaggaggagattgaagaatgtcttgcaggaaatctatgtcgttgtactggttatcgacccattgttgatgcgtttcgggtttttgcaaaatctgatgatgctctctactgtggtgtatcttcacttagccttcaagatggttctactatttgcccatctactggcaaaccttgctcttgtggatcaaaaacaacaaatgaagttgccagttgtaatgaagatagatttcagtcaatctcttatagtgatatagatggagctaagtatacagataaggagcttattttcccccctgaacttttgctgaggaagttaactcccttaaagttaaggggaaatggggggattacctggtatagacccgtatgtcttcagaacttgcttgagctcaaagcaaattatcctgatgcaaaactactggtaggtaatacagaggtgggaatcgaaatgagattgaagaggttacagtatcaggtgctgatctctgttgctcaagtcccagaactcaacgcattgaatgtcaatgacaatgggatagaggttggttcagctttgagactttctgaactcctgaggttattcaggaagatagtaaaggagcgtcctgcacatgaaacatcagcatgcaaggcttttatcgaacagctgaagtggtttgctgggacacaaataagaaatgttgcttgcattggtggaaacatctgtacagctagtccaatatctgatttaaatcctctttggatggcttcaagagcagagtttcggataaccaactgcaatggagatgttaggtctatacctgcaaaagatttcttcctcggttatcgtaaagtggatatggggagcaacgagatcttgttgtcggtattccttccatggacaagacccttagagtatgtgaaagaatttaagcaggcccatcgcagggatgatgatatagctattgtcaatggtggaatgcgtgtgtttcttgaagacaagggtcaacaattgttcgtttctgatgcatccattgcttatggaggtgtggctcctctttctttgtgtgcgagaaagactgaagagtttctaattggaaagaattggaataaagatcttctgcaggatgcgcttaaggtcatacagagcgatgtcgtgattaaggaagatgctcctgggggaatggtggagtttcggaaatctctaaccctaagcttcttctttaaatttttcttatgggtttctcataatgtcaataatgcaaattctgcgatagagaccttcccaccctcccatatgtcagctgtgcaacctgttcctcggttatctagaattggaaaacaagactatgagacagtaaagcagggaacatctgttggctcgtcggaggtgcatctttcagcgagaatgcaggtcacaggggaagcggaatatactgatgatactccagtacctcctaataccttacatgctgcctttgtgctaagcaaagtgccacatgcccgcatcctttcaatcgatgattcggcagccaaatcttcatctggttttgttggtctgtttcttgccaaagatattcctggggataatatgattggaccaattgttcccgacgaagaattatttgctacagatgtggtcacgtgtgtgggacaagtcattggtgtggtcgtcgcggatacacatgaaaatgcaaaaactgcagcaggaaaagttgacgttaggtatgaggaactaccagcaatattatcaatcaaggaggctattaatgctaaaagtttccatccgaacacagagaaaaggctaagaaaaggggatgtcgagctgtgttttcaatctggtcagtgtgacagggtaatagagggagaggttcaaatgggtggtcaggaacacttctacttggagcctaatggtagtttggtttggacagtagatgggggcagcgaagttcatatgatttcatccacacaggctcctcaaaagcaccagaaatatgtgtcgcatgttcttggtcttccgatgtctaaagtggtatgcaaaaccaaacgaattggtggtggctttggtggtaaagaaacaagatcagctttcattgctgcggcagcttctgttccttcctacctattgaatcgacctgtgaaactcatactggaccgagatgtggacatgatgataactggtcatcgtcatagttttcttggaaagtacaaggttggatttacgaacgaaggaaaaatattggcgttggaccttgaaatttacaacaatggtggcaactctttggatctctccctttctgttcttgaacgtgccatgtttcactcggataacgtttatgagatcccgcatgtaaggattgttgggaatgtttgctttactaattttcctagcaacactgctttccgagggtttggaggcccccaaggtatgcttataactgaaaactggattcaaagaatcgcagctgagcttaataaaagccctgaagaaatcaaagagatgaactttcaagtggaaggatcagtcacccattactgtcagactcttcagcactgcacattgcatcagctctggaaagagctgaaagtatcgtgcaacttcttaaaggcccgcagagaagctgacgaatttaatagtcataatcggtggaaaaagcgtggtgtagctatggttcccacaaaatttggcatatcatttaccacaaagttcatgaatcaggccggagctcttgttcatgtttacactgacgggactgttttagtgactcatggtggtgtggagatgggtcaaggattgcatacaaaggtcgctcaagttgctgcatccgcctttaacattccacttagctcagttttcgtgtcagagacaagcactgacaaggttcctaatgcgtcaccaactgctgcttctgcgagctctgatatgtatggtgctgcagttttagacgcttgtgagcagattatagcaagaatggaacctgttgcatctaagcacaatttcaacacatttactgagctagtaagtgcctgctactttcaacggatagacctatcagctcatggttttcacatagttcctgatcttgggtttgactggatatctggaaaagggaacgcctttagatattacacatatggagctgcctttgcggaagttgagatagatacattgactggtgatttccacacaagagcagctgatataatgttggacctcggatattctcttaacccagccattgatgttggacaaatagaaggagcgtttgtacaaggactgggttgggtagctttagaagaactcaaatggggagatgcagctcataaatggattaaaccaggaagtttactcacttgcggacccggaaactacaaaataccttccatcaacgacatgccgttcaacctcaatgtttcgcttctcaaggggaatccgaatacaaaggcaatacattcatctaaagcagtgggtgagccaccattctttcttgcatcatcggttttctttgcgataaaggaagctattaaagcggctagaaccgaggtgggtctcacagactggttccctctagagagtccagccactccagagcgtatcaggatggcttgtttcgacgaattttcagctccttttgtaaattcagatttctaccctaatcttagtgtttga

SEQ ID NO: 498 - DNA, 2466 bp, Arabidopsis thaliana
atgcgtattgttgcatgcttgctcttgataacagccttattctcaagctatggctatgcagctattaccacgtcaagtcctttgtcgataggggtaactttgagctctcctggtggatcatatgagcttggtttcttcagttctaacaactctgggaatcagtatgttggaatctggttcaagaaagtcactcctcgggttattgtttgggtggctaacagagaaaagccagtctctagtactatggcgaatctcacaatcagcagcaatggaagtcttatcttgcttgatagcaaaaaagatctggtgtggtcatctggaggagatcccacatctaacaagtgtcgtgctgagcttttagacaccggaaatcttgtcgtcgtagataatgttactggaaattatttgtggcaaagttttgagcatcttggtgatacaatgctacctcttacatctctcatgtacgatattcctaacaacaagaaacgtgtgctgacttcttggaagagtgagaccgatccatcgcctggggagtttgtagctgagattacaccacaagtaccctcgcaaggccttataaggaaaggctcgtcaccttattggagaagcggtccatgggcgggaacaaggttcactgggataccagaaatggatgcatcgtatgtgaatccattgggaatggtccaagatgaagtcaacggcacaggagttttcgctttttgtgttctgagaaatttcaatttgtcatacatcaagctaacgccagaaggatcattgaggattacacggaataatggaaccgactggatcaagcactttgagggtccgctaacctcgtgtgatctatatggtagatgtggaccttttggcttgtgtgtgagatccggtactccaatgtgccaatgcttaaaagggttcgaaccaaaatcagatgaggagtggagaagtgggaattggagtcgtggatgtgtgagacgcacaaacttatcttgtcaaggaaactcttctgtagaaacgcagggcaaggacagagacgtattctatcatgtatccaacataaagcctccagattcatacgaattagcaagctttagcaatgaagaacaatgccaccaaggctgtctcaggaactgttcttgcacagccttttcctatgtcagtggaataggatgtttggtgtggaaccaggagctgttggacacagtgaaatttattggcggaggagagactctttcccttcgtcttgcacattctgaattgactggaagaaagcgaatcaagattatcactgttgccactctcagcctttctgtttgcttgattttggtgcttgttgcatgtgggtgctggagatacagagtaaaacaaaatggttcaagtcttgtatccaaagacaatgtagaaggcgcttggaagagtgatttacaatcacaagatgtctcaggtttaaatttctttgagattcatgacctacaaaccgccacgaataatttcagcgtgttaaataaactcggtcagggtggatttggtacggtttataaggggaagcttcaggacggaaaggaaatagctgtaaaacgtcttactagcagctctgtacagggcacagaggagttcatgaacgagataaaactcatctcgaaattacaacacagaaacttgcttcggcttttgggatgctgcatcgatggagaagagaagctattggtctatgaatatatggtgaacaaaagccttgatatctttatatttgatttgaagaaaaagcttgagattgattgggctacgagattcaatatcattcaaggaatcgctcgtggacttctctatctccatcgtgactcattcctcagagttgtacaccgcgatctgaaggtcagcaatattctcttggatgagaaaatgaacccaaaaatatcggattttggattggctcggctgtttcatggaaatcaacatcaagacagcactggtagtgttgtaggcactctaggatacatgtctcccgagtatgcttggactggtacgttctctgaaaaatccgacatttacagcttcggagttctgatgctcgaaatcatcactggcaaggagatttcaagtttcagctatggcaaagataacaaaaaccttctttcatatgcatgggactcgtggagcgaaaacgggggagtgaatctactggaccaagatcttgatgattctgattcagttaattcagttgaagcaggaagatgtgttcatattggtctgctctgtgttcagcatcaagctattgatagaccaaacatcaaacaagttatgtcaatgctgacttcaacaacggatcttcctaagccaacacaaccaatgtttgtattggagacaagtgatgaggattcttctctgtctcactctcaacgctccaatgatctctcctctgttgatgaaaacaaatcttctgaagagctaaatgcttcctcatga

SEQ ID NO: 499 - DNA, 3012 bp, Arabidopsis thaliana
atgaaactttttcttctccttctttttcttctccacatttctcataccttcaccgcaagccgaccaatctccgagttccgtgctctcctctcactcaaaacctctctcaccggcgccggagatgacaaaaactcgcctctctcttcctggaaagtctcaacaagcttctgtacatggattggtgtcacgtgcgatgtatctcgccgtcacgtgacttctcttgatctctccggtctcaacctctccggtactctttccccagatgtttctcatttacgtcttcttcagaatctatcactcgctgaaaatctaatctccggtccgattccgccggaaatctcgagcctttccggtcttcgtcacttaaatctctcgaacaatgtcttcaacggttcgtttcccgatgagatttcttctggattggtgaatctccgagttcttgatgtctacaacaacaatctaaccggagatttaccggtttccgtcaccaatctgactcagctccggcaccttcacctcggtggtaactacttcgctggaaagatcccgccttcgtacggaagctggccagttattgagtatctagcggtttccggcaacgagcttgtcgggaaaatccctccagagatcggaaacctaacgactctccgggagctttacatcggctactacaacgctttcgaagacggtcttcctccagagatcggaaatctatcggagctagtcagattcgacggagctaattgcggattaaccggtgagattccgccggagattgggaagcttcagaaactcgatacgcttttcttgcaagtgaatgtcttctccggtccattaacttgggagctaggaacgctatcgagtttaaaatcaatggatttgtctaacaacatgttcaccggagagattccagcgagtttcgcagagttgaagaatctcacgcttttgaatctcttccgtaacaaacttcacggcgagataccggagttcatcggagatttgccggagcttgaagtgttacagctttgggagaacaatttcaccggaagcatcccgcagaaattaggagaaaacggtaaactaaatctcgtcgatctctcttccaataagctgaccggaactttaccgccgaacatgtgctccggtaacaagttagaaactttaatcactcttggaaactttctctttggttcaatccctgattctcttggtaaatgtgagtctttgacccggatccgaatgggtgagaatttcctgaacgggtcaatcccaaaaggactattcggattacccaaattaactcaagtggagctccaagataattatctctccggagagttaccagtcgccggaggtgtctctgttaatcttggtcagatcagtttatcaaacaaccagctctcaggtccattacctccggcgatcgggaacttcaccggcgttcagaaacttcttcttgatggaaacaagttccaaggtcctattccttcagaggtagggaagcttcagcagctctcgaagattgatttcagccacaacttgttctccggtcgaatcgcgccggagattagtcgttgcaagctcttaacgtttgttgatctgagcagaaacgagctctccggtgaaatcccaaatgagatcactgctatgaagatattgaattacttgaacctgtcgagaaaccatctggttggatcaatccctggttcaatctcgtcaatgcagagcttaacatctcttgatttctcttacaacaacctctccggtttagttccgggaacaggacaattcagttacttcaactacacatcgttcttgggtaatcctgatctctgtggtccttatcttggtccttgtaaagacggtgttgctaaaggaggtcaccagagtcatagtaaaggacctttatcagcttctatgaagttattgcttgttcttggactacttgtttgttcgattgcgttcgcggtagtagccataatcaaagctagatcattgaaaaaggcgagtgagtcacgggcttggaggttaacagctttccagagactagacttcacgtgtgacgatgtcttggattctctcaaagaagacaacattataggcaaaggaggagctggtattgtctataaaggcgtaatgcctaatggtgatctagtcgcggttaaaagactcgctgcaatgtctcgtggatcttcccatgatcacggcttcaacgcagagattcaaaccttaggaaggataagacacagacacatagtgaggcttctcggattttgctcaaaccacgagacgaatctacttgtctatgagtacatgcctaatggtagtctcggtgaggtgcttcacggtaagaaaggaggacacttgcattgggacacacgttacaagattgctcttgaagctgctaaaggactctgttaccttcatcacgattgttctccattgatcgttcacagagatgtcaaatcaaacaacatcctccttgattcaaactttgaagctcatgttgctgactttggtctcgctaaattccttcaagattccggtacttctgaatgtatgtctgcaatcgctggctcttacggctacatagctccagagtatgcgtatacgttgaaggtagatgagaagagcgatgtgtatagtttcggtgtggttcttttggaactcgtcaccggaagaaaacctgtcggagaatttggagacggtgtcgatatagtgcaatgggttcgtaaaatgactgattcgaacaaggattcggttctgaaagtattggatccgagactttcttcgattccgattcatgaagtgacgcacgtcttctatgtagcgatgctctgtgtagaagaacaagctgttgagaggccgactatgagagaagttgttcagattctcactgagatcccgaagttgccaccgtcgaaggatcagccgatgacggaatcagcgccggagagtgagctttcgccgaagtctggtgttcaaagtccgccggatctactcaatctatga

SEQ ID NO: 500 - DNA, 3018 bp, Arabidopsis thaliana
atgactcgtttacccttacctttccttttcttcttcctcacgtcaatacccttatctgtcttttcgcagttcaacgaccagtcaacgcttctgaacctgaaacgcgatctcggagatccaccgtctctccggctgtggaacaacacatcttcaccgtgcaactggtcggagatcacttgcaccgccggaaatgtcaccgggatcaatttcaagaaccagaacttcactgggacagttccaacgacgatatgcgatttgtcgaatctcaatttccttgacttatcgtttaattacttcgccggcgagtttccgacggttctttacaattgcacgaagcttcaatatctcgatctctctcagaaccttctcaacggctcacttcccgtcgacatcgaccgtctctcaccggaactcgactatctcgacttagctgctaacggattctccggcgatatccctaaaagtctcggacggatctcgaagctcaaggtattgaatctgtaccagagcgaatacgacggtacgtttccatcggagatcggagacttatcggagcttgaagaacttcgactagcgttaaacgataagtttactccggctaagattccgatagagtttgggaagttgaagaaactcaagtatatgtggttagaggagatgaatttgatcggagaaatctcacccgttgttttcgaaaacatgacggatcttgagcacgttgacttatcggtcaataacttaacgggtcggatcccagatgttttattcgggttgaagaatctcaccgagttttatctcttcgctaatggcttaaccggagaaatccccaaatcaatttcggcgacgaacttggtatttcttgatctctctgctaataatttaaccggttcgattccggtatcaatcggaaatctaacgaaattacaagtgttaaacctcttcaacaacaagttaaccggagaaattccaccggttatcggaaaactaccgggattgaaggagtttaaaatcttcaacaacaagttaaccggagaaatacctgcagagattggagttcattcaaagctggagagattcgaagtttcggagaatcagttaaccggaaagttaccggaaaatttgtgcaaaggtggtaaacttcaaggagtggttgtgtactcaaacaatcttaccggagaaatccctgagtcgctcggagattgtggaacgctcttgactgttcagttacagaacaatgacttctccggcaagtttccttctcggatctggaatgcttcaagtatgtatagtctacaggtgagtaacaactcattcaccggagagttaccggagaatgttgcttggaatatgtcgaggatcgagattgataacaatcgattttccggtgagattccgaagaaaatcggtacttggtcttccttagttgagtttaaggcgggaaacaatcagttttctggtgagtttccgaaggaattgacttctctttcgaatctcatatcgatctttctcgatgagaatgatctcaccggtgaattaccggatgagatcatctcatggaagtcgttgataacgttaagtttatccaagaacaagctttccggggaaattccgagagctttaggattgttgccacgtctgctcaatcttgatctatcggagaatcaattctccggtggaatcccaccggagattgggagcctgaagctgacaacatttaatgtgtcatcaaatagactcactggaggaataccagagcaacttgataatcttgcttacgagagaagtttcttgaacaactctaatctttgtgcagacaacccggttctcagcttaccggattgtcggaaacagcgccggggatcaagagggttccccgggaaaatcctcgcgatgattctagtcatcgcggttctgcttctcaccattactctgtttgttacgttctttgtggttagggactacacaaggaaacaaagaagaagaggtctagagacgtggaaactcacttcatttcatagagtagattttgcggaatccgacatcgtgtcgaatctgatggaacactacgtgatcggtagtggcggatcgggcaaagtttacaagattttcgtcgaaagctcgggacaatgtgtggcagtgaagaggatatgggacagcaagaaactggaccagaaacttgagaaggagtttattgctgaagttgagattcttggaacgatcaggcactcgaatatagtgaaactattgtgttgtatctcaagggaagattcaaagcttctagtgtatgagtatctcgagaaacgcagtcttgatcaatggttacatggaaagaagaagggaggtaccgtagaggctaataaccttacatggtcacagaggttgaatatcgcagttggagcagctcaaggactttgctatatgcatcatgattgtactcccgcaatcatacatagagatgtcaagtcgagtaacatcttgcttgattctgaattcaacgcgaagattgcagatttcgggttggctaaactgttgattaagcaaaaccaagaacctcataccatgtcagctgttgctggatcctttggttacattgctccagaatacgcatatacgtcaaaggtagatgagaagatcgatgtgtacagcttcggggtagttttgctagagctggtgactggaagagaaggaaacaacggagatgaacacacaaacttagcagattggtcatggaaacattaccaatctggaaaaccgaccgcagaggcgtttgatgaggacatcaaagaagcttccacgactgaggcgatgacaacagttttcaagctaggtctcatgtgtactaacacattgcctagtcatagaccttccatgaaagaggtcttgtatgttctgcgccaacaaggacttgaggcgacgaagaagactgcaacagaggcatatgaggcacctctactagttagtttatcgggtcgaaggacaagtaaaagggtagaagatgaagatttaggttttgtataa

SEQ ID NO: 501 - DNA, 2445 bp, Arabidopsis thaliana
atgggaaagattggtattgttttctttgcttcgttgctcttcttgctaattatattcccaagttgtgcctttgcagctataaccagagcaagtcctttgtcaataggacaaactctgagctcccctaatggaacttatgagttagggttcttcagtccaaacaactctcggaatcagtatgttgggatctggttcaagaacatcacccctcgggttgttgtctgggtggctaacagagataagccagttacaaacaacgcagcgaatctcactatcaacagcaatgggagccttatcttggttgagagagaacaaaatgttgtttggtcaataggagaaactttctcttctaacgagcttcgtgctgagctattagaaaacggaaatcttgtactcattgatggagtttcagaaagaaacttatgggaaagtttcgagcatcttggtgatactatgttacttgaatcatctgtgatgtatgatgttccgaataacaagaaacgtgttttatcttcttggaaaaatcccaccgatccttcacctggagaattcgtagctgagcttacgacacaagtacctccgcaaggctttataatgagaggatccaggccttactggagaggtggtccatgggcaagggtaaggttcaccggcataccagaaatggatggatcacatgtaagcaaattcgacatttcccaagatgttgcagccggcacaggatctttgacttattcattagaacgaagaaattcgaacctgtcgtacactacgctcacatcagcgggatcgttaaagatcatttggaataatggctctggttgggttactgacttggaggcccctgtaagctcatgtgatgtttataatacatgtggaccttttggcttgtgtataagatctaatcccccaaagtgtgaatgcttgaaaggctttgtaccaaaatcagatgaggagtggaataaaaggaattggactggtggttgtatgagaagaacaaatttatcttgtgatgtgaactcttctgcaacagcacaagccaataatggagacatcttcgacatagttgcaaatgtgaagcctccagacttttatgaatatctaagtttgatcaatgaagaggattgccaacaacgttgtcttggaaactgttcttgcacggcattttcctatattgaacaaattggatgtttggtatggaatcgagagcttgtggatgtaatgcagtttgttgctggaggagaaactctttccattcgtcttgcaagttctgagttagctggaagcaatcgagtgaagattattgttgctagcattgtcagcatttctgttttcatgatcttggtttttgcctcttattggtactggagatacaaagccaaacaaaatgattcaaatcctataccattggagacatcacaagatgcatggagggaacaactgaaaccacaagatgtaaatttctttgatatgcaaaccatattaactatcaccaataactttagcatggaaaataagcttggtcaaggtggattcggtccagtgtataagggaaatctacaagatgggaaagaaatagccataaaacgcctttcgagcacctctggacagggtctagaggagttcatgaatgaaataatactcatctcgaaactccaacacagaaacttggtccgccttttgggatgttgcattgaaggagaagaaaagctattgatttatgagtttatggcgaacaaaagcctcaatacctttatctttgattcgacgaaaaagcttgagcttgattggcccaagcggtttgaaatcattcaaggtattgcttgcggacttctttatcttcaccgcgactcatgtcttagggttgtacaccgagatatgaaggtcagcaacatccttttagacgaggaaatgaacccaaaaatatcagattttggattggctcggatgtttcaaggaacccaacatcaagccaacactcgcagggttgttggaacgctcggatacatgtctccagagtatgcttggacaggcatgttctctgagaaatccgacatctacgcatttggagttctgctattggaaatcataaccggcaagaggatttcaagtttcaccattggagaggaaggcaaaactcttcttgaatttgcatgggattcttggtgcgaaagcggtggatcggatctactggaccaagatatctctagctcgggttctgaatccgaagtagcgagatgtgttcagattggtttgctctgtattcaacaacaagccggggatagacccaacattgcacaagtaatgtcaatgcttacaaccacaatggatcttccgaaaccaaaacaacccgtattcgcaatgcaagtccaagagagtgattcagagtctaagactatgtactctgtcaataatataacacaaactgctatagttggtcgataa

SEQ ID NO: 502 - DNA, 2673 bp, Arabidopsis thaliana
atgtcaaaggcgcttttgcatttgcattttctttctctgtttttactctgttgtgtctgccattcaagtatttttactttaaattttcattttactggtattgtggcctgtcgtccccaccagattcaagccttcacgaagttcacgaacgagtttgacacccgcggttgcaacaacagtgacacctttaatggagtctggtgcgataactcgacgggtgcggtcgcagtgctacaactaaggaagtgtctcagtggaactttgaagtccaacagtagcctcttcgggtttcatcaactccgttacgttgatctccaaaacaacaacttaacctcctcttcactcccttccgggtttggaaatctcaaaagattagagggcttgtttctttcctctaatggcttcctcggccaagttccttcctcattcagtaacctaacaatgcttgctcaattagacctttcttataacaagctcactggtagtttcccacttgtccggggtctaagaaagctcattgttttagacctttcatataatcacttctccggaactctgaatccaaacagtagcctctttgagttgcaccagctacgttaccttaatctcgcttttaacaactttagttcctcactcccttccaaatttggcaatctccatagattagagaacttgattctttcctctaatggcttttctggtcaagttccttccacaattagtaacctgacccggttaactaagttgtaccttgaccaaaacaagctcactagtagtttcccacttgtacagaatctaaccaacctctacgaattagacctttcatataataagttctttggagtcatcccttcttctctcctcactctgcctttcttagcacatcttgctctacgtgaaaacaatcttgctggttctgttgaagtttcaaactcctctacctcatctaggctcgaaatcatgtatctcgggtctaaccattttgaaggacaaatcctagagcctatctcaaagctcatcaacctcaagcatcttgacctttctttcctaaacacaagctacccaatagacttaaaactcttctcctccctcaaatctttgcggtctctggatctttctggaaacagtatatcttcggccagtttaagttcagattcatacatcccgttgaccctggaaatgttgaccttgaggcactgtgacatcaacgagttccccaacatcttaaagaccctcaaggagttggtgtatatagacatatccaacaacagaatgaaagggaagatccctgagtggttatggagcctacctcttctacagtcagtaactcttggaaataattatttcacaggtttccaaggttcggcggagattttagtaaattcatcagtgctgctattatatttggattcaaacaattttgaaggagcacttcctgatctaccactctctatcaaaggcttcggtgtggctagtaatagtttcacaagtgagatacctctttcaatctgcaaccgaagctctctcgctgctattgatctatcctacaacaacttcactggtcccattcctccatgtttgcgtaatttggaacttgtgtatctccggaacaacaacctggaaggaagtatccctgacgcgctctgtgatggtgcctctttacggacactcgatgttagccataaccgattaacagggaagcttccaaggtcttttgtaaactgctcatcgctaaagtttctaagcgttataaacaacagaattgaagatacgtttccgttctggctcaaagctttaccgaatttgcaagtccttactcttcgctcaaacagattttatggtcctatatctcctccgcatcaaggtcctctcgggtttccagagctgcggatatttgaaatatctgacaataagtttacaggaagcttgccaccaaactactttgtgaactggaaagcatcatcacgcacgatgaatcaagatgggggtttatatatggtatacgaggagaagctgttcgacgaaggcggctatggttatacagatgctttagatttgcaatacaaaggtctacacatggagcaagctaaggccctcacttcctacgccgccattgatttttctggaaatagactcgaaggacagattcctgaatctattggtctcttgaaggcactgattgcagtcaatatatcaaacaacgccttcacaggccatattcccctgtctatggccaatcttgagaatctcgagtcactagacatgtcaagaaaccaactctcggggactattcctaatggactagggagcatttcgtttttggcgtacatcaacgtgtctcacaaccaactcacgggtgaaataccacaaggaacacagattactgggcaatctaaatcttccttcgaagggaatgcagggctttgtggtcttcctctcaaggaaagttgcttcggcactggtgcacctccgatgtatcaccaaaagcaagaagacaaagaagaagaagaagaagaagaagaagaagaagaagaagtgttgaacgggagagcagtggcaatagggtatggatctggattattgcttggattggcaatagcacaagttattgcttcatacaaaccggagtggcttgtcaagataattggtctgaataaacgcagaaagcgttag

SEQ ID NO: 503 - DNA, 2016 bp, Arabidopsis thaliana
atgaagactatgtccaaatcgtctttgcgtttgcattttctctcgctactcttactttgttgtgtctccccttcaagctttgtcattataagattcattacacataatcattttgatggtctagtacgttgtcatccccacaagtttcaagcccttacgcagttcaagaacgagtttgatacccgccgttgcaaccacagtaactactttaatggaatctggtgtgataactccaaggtgcggtcacaaagctacgactacgggactgtctcagtggaactctcaaatcaaacagtagcctcttccagtttcatcatcttcgctaccttgatctctctcacaacaacttcacctcctcttccctcccttccgagtttgtttcccactttgcggaatctaaccaagctcacagttttagacctttctcataatcacttctccggaactttgaagcccaacaatagcctctttgagttacaccaccttcgttaccttaatctcgaggtcaacaacttcagttcctcactcccttccgagtttggctatctcaacaatttacagcactgtggcctcaaagagttcccaaacatattcaagacccttaaaaaaatggaggctatagacgtatccaacaatagaatcaacgggaaaatccctgagtggttatggagccttcctcttcttcatttagtgaatattttaaataattcttttgacggtttcgaaggatcaacggaagttttagtaaattcatcggttcggatattacttttggagtcaaacaactttgaaggagcacttcctagtctaccacactctatcaacgccttctccgcgggtcataacaatttcactggagagatacctctttcaatctgcaccagaacctcacttggtgtccttgatctaaactacaacaacctcattggtccggtttctcaatgtttgagtaatgtcacgtttgtaaatctccggaaaaacaatttggaaggaactattcctgagactttcattgtcggttcctcgataaggacacttgatgttggatacaatcgactaacgggaaagcttccaaggtctcttttgaactgctcatctctagagtttctaagcgttgacaacaacagaatcaaagacacatttcctttctggctcaaggctttaccaaagttacaagtccttaccctaagttcaaacaagttttatggtcctatatctcctcctcatcaaggtcctctcgggtttccagagctgagaatacttgagatatctgataataagtttactggaagcttgtcgtcaagatactttgagaattggaaagcatcgtccgccatgatgaatgaatatgtgggtttatatatggtttacgagaagaatccttatggtgtagttgtctatacctttttggatcgtatagatttgaaatacaaaggtctaaacatggagcaagcgagggttctcacttcctacagcgccattgatttttctagaaatctacttgaaggaaatattcctgaatccattggacttttaaaggcattgattgcactaaacttatcgaacaacgcttttacaggccatattcctcagtctttggcaaatcttaaggagctccagtcactagacatgtctaggaaccaactctcagggactattcctaatggactcaagcaactctcgtttttggcttacataagtgtgtctcataaccaactcaagggtgaaataccacaaggaacacaaattactgggcaattgaaatcttcctttgaagggaatgtaggactttgtggtcttcctctcgaggaaaggtgcttcgacaatagtgcatctccaacgcagcaccacaagcaagacgaagaagaagaagaagaacaagtgttacactggaaagcggtggcaatggggtatggacctggattgttggttggatttgcaattgcatatgtcattgcttcatacaagccggagtggctaaccaagataattggtccgaataagcgcagaaactag

SEQ ID NO: 504 - DNA, 2595 bp, Arabidopsis thaliana
atggtggttctgaggaagacatccttgttggtcttcttcttattcctcctcttgttgttagagtcaacgtttgagcaacagacaagttctctgaatgagaaatcggcgcttctgctgttaaggtcttctcttgggttacgaagcagagattggcctgtaaaaggcaatccttgtctgaactggaacggcatcaaatgtgatcagaatggtagagtaactaagatcaacatttcagggttcagaaggacaaggattgggaatcaaaacccggaattctcagttggttctctcgtcaatctcacccgtctagcttccttcaacgcctcaaggttctatcttccaggtccaatcccggctttgtttggatcgagtctgttgactttagaggtgttggaccttagctcctgttcaatcacaggaaccatccctgaaagtttgactcggttatcacatctcaaagttcttgatctttcaaagaatgcgatcaatggggatattcctctgtctcttacctctcttcagaatctatcaatccttgatctttcctcaaactcggtgtttggttcgattcctgctaatattggggcactctcaaagctccagcgtctgaatctttcgcgtaacaccttgacttcttcaatacctccatcactcggagacctctctgttttaattgaccttgatctcagcttcaacggaatgtcaggttcggttccatcagatttgaaagggctaaggaacttgcagacattggtaattgcgggaaatcgcctttcaggatccctacctcctgatctgtttagtttgctgagtaaacttcagatcattgacttcagaggcagtggtttcataggcgctttaccgtccaggttatggtcgttaccggagctcaagtttctagatatttctggaaatcacttctctgacatgctgcctaataccactgtcagttttgattctactgtctccatgcttaacatatccgggaacatgttttacggcaatctcacacttttactgacaaggttccaagttgttgacctgtcagaaaactattttgaaggtaaaattcctgactttgtgccaaccagagcttcattgagcaacaattgtcttcagggcccagagaagcagcggaagttgtcggattgcactttgttttattcaaaaaagggcttaactttcaacaatttcggacaacatgaagagaagaagagttctaaaacttcctggttaagccacacgaaaatagttatacttgctgcagttggagggtctatattgcttatgctcattctcatagtgttaccaataacagtgagtttctgtgtccgtcgaagaaacagatcatcaacaagtaatcatcctagaggaagacacaacggtgttggcccattacctcctgatgaaacacttccctcaagaggaggagtctctataaactttgggagtcttggatcatcatttacctatcagcagttgctcaatgccaccaaggagttcagtgattcaaacctgatcaagaaaggacaatctggggatcttttcaagggagttctagaaaacggagttcagatcgttgtgaaaagaatcagcttggaatctacaaagaacaacgaagcttatctaaccgagttggatttcttcagccggtttgcgcatccgagaataatcccattcgtagggaagagcttagagagcgcaactcataagttcttggtatacaagtacatgctgaatagggatttaccaagctcattgttctataaatccaattccctagttgacaacggattgagatctctcgattggatcaccagactgaaaatagcattgggagtagcagagggacttgcttacctgcaccatgattgctcaccatccgtcgtccacagggatattcaagcaagtagcattctcttggatgataagtttgaagttaggcttggaagctttagcaaagcttgtcatcaagaaaacaatggccgtccacggaaaatagcccgattgctcagactatcccagtcttctcaagaaagtgttcctgggtctgcagctacagcaacatgtgcctacgatgtgtactgcttcggcaagatacttctggagcttatcacagggaaactcggaatcagctcatgtaaagaaacccaattcaaaaaaatcctaaccgagatcatgccttacatttcatcgcaagagaaagaacccgtaatgaacattctagaccaatctcttctggtcgacgaagacctcttagaagaagtctgggcaatggcaatcgtcgctagatcttgtcttaacccaaaaccaacgagacggccgcttatgagacacatagtacaagccttggagaatccactgagagttgtgagagaagacagcagcgaatctgagagattccgtacgactggatcttcgagaggatcttcgagtagcggtcgaatatttggtagttggagacagagcgtgtctgatcctgtcgcagcgggaacaagtagccttctgtctcaggcggagggtttagcgactggatcgtcagcgagaggaagtagccgtggcgcgtcgagtcgacggagtatgaaagatgtatag

SEQ ID NO: 505 - DNA, 2550 bp, Arabidopsis thaliana
atgagattcttccgcaaaacctcactttatctttctctcttcttatacttctttctttatgaatcttccatggctgcaaatacaatcagaagaggcgaatctttaagagacggaatcaatcacaaacctttagtctctccacaaaagacattcgagctaggtttcttcagtcctggaagctctacgcatcgtttcctagggatttggtatgggaacatcgaggataaagctgtggtatgggtagcaaacagagcaactccaatttcagaccaatctggagttctcatgataagcaacgatggtaatctcgtgttattagacgggaagaacatcactgtctggtcttcaaacatcgagtcaagcactaccaacaacaacaacagagtcgtttctatacatgacactgggaactttgttttgtctgaaaccgacacagatagacctatttgggagagtttcaatcacccaacagataccttcttaccgcagatgagagttcgtgtgaatccacaaaccggagacaatcacgcttttgtctcatggagatctgagactgatccttcccctggtaattactcattaggggttgatccctctggagcaccagagattgtgctttgggaagggaacaagacgaggaaatggagaagcgggcaatggaactctgcgatttttaccgggattccgaatatgtctctgttgacgaattatctttacggattcaagctttcatctcctccagatgaaacaggtagcgtgtacttcacgtatgttccttcagatccatcagtgttacttaggtttaaggttctttataatggaaccgaagaggaattgagatggaatgagactttgaagaagtggactaagtttcagtctgagccagatagtgagtgtgatcagtataatcgttgtggcaagtttggtatttgtgatatgaagggctctaatggaatctgtagctgtattcatggttatgagcaagtttctgttgggaattggagtagaggttgtagaagaagaacaccgttgaagtgtgaaaggaacattagtgttggagaggatgagttcttgactttgaaatctgtgaagttgcctgattttgaaattcctgaacataatcttgttgatcctgaggattgcagagagaggtgtctgaggaattgttcttgcaatgcttattctcttgttggtggtattggatgcatgatttggaaccaagatttagtggatttacaacagtttgaagctggtggttcttcgcttcatatccgtcttgctgattccgaagtaggggagaacaggaaaacaaagattgcagtgattgtcgcggttcttgttggtgtgatcttgataggaatctttgctctgcttctatggagattcaagagaaagaaagatgtttcaggagcatattgtggtaagaacaccgatacatcggttgttgttgctgatctgaccaagagcaaagaaactacttcagcgttttcaggatcagtagacataatgattgaagggaaagctgttaacacatccgagttacctgtcttttctctgaatgctatagccatagctactaatgatttctgcaaagaaaatgagcttggaagaggtggattcggaccagtctacaagggtgttctcgaagatggacgtgagatagctgtgaagagattgtctggtaaatcaggacaaggagttgatgaattcaagaatgagattattctcatagcgaagcttcaacatcggaatcttgtgagattacttggatgttgcttcgagggagaagagaaaatgcttgtttatgagtatatgcctaacaagagcttggatttcttcctctttgatgaaacgaaacaagcgttgatagactggaaactgcggttttcgataattgaagggattgcgagaggattgctttatcttcatagagattcaagattgagaatcattcatagagacttgaaggttagcaatgtgttgttagatgcagagatgaatccaaagatctcagattttggtatggcaaggatctttggtggtaaccaaaatgaagctaacacggttcgcgttgttggaacttacggatacatgtctcctgaatacgcgatggaaggacttttctcggtgaaatccgatgtttacagcttcggtgtcttgttgctagagattgtaagtgggaagaggaacacaagtcttcgatcttctgaacatggaagtctcattggttatgcttggtatttgtatactcatgggagatcagaggagcttgtggatcctaagatcagggtcacatgcagtaagcgagaggccttgagatgcatacacgtagcgatgctatgtgttcaagattcggctgcggagagacccaacatggcttcagttttgcttatgttagagagtgacacagcgacgctcgctgcgcctagacaaccaacgtttacttccaccagaagaaactccattgatgtcaactttgctcttgattcgagccaacaatacatcgtttcttctaatgagatcacttcaacggttgttcttggacgataa

SEQ ID NO: 506 - DNA, 2529 bp, Arabidopsis thaliana
atggcaggatttaacagaaaccttactttggtgacgactcttttgatattccatcaactatgtagcaacgtatcttgctccacaagcaactcattcactagaaaccacacaatacgagagggagactcactgatcagcgaggatgaaagcttcgagcttggattcttcacccccaaaaattcgacgttaaggtatgttggaatatggtacaagaacatagaacctcaaacagttgtttgggttgcgaatagagagaagccgttgttggatcacaagggagctctaaagattgcagatgacggaaatttggtgatcgtgaacggtcaaaacgaaaccatttggtccacaaatgtcgagcccgagtcaaacaacacggttgctgttctgttcaaaacaggggatttggttctgtgttcagactcagacagaagaaaatggtattgggagagttttaacaatccaaccgacactttcttgcccggtatgagggttcgggtgaatccttcgcttggagaaaatcgcgcatttatcccgtggaaatccgagagtgatccttcaccaggaaagtattcaatggggattgatcctgtgggagcactagagattgtgatttgggaaggggaaaagagaaaatggcgtagcggaccgtggaattcggctatctttaccggtatacctgatatgctccgtttcacaaattatatttacgggtttaagctctcttctcctcctgatagagatggtagcgtgtacttcacgtatgttgcctcagatagttccgatttcttgaggttttggattaggcctgatggcgtagaagagcagttcagatggaataaggatatcaggaactggaatttgcttcaatggaaaccaagcacggaatgtgagaagtataaccgttgtggtaattacagtgtatgtgatgatagtaaggagtttgattccggtaaatgcagttgcattgatggatttgagccggttcatcaggatcaatggaacaacagggacttctcaggtggctgccaaagaagagttcctttgaactgtaatcagagtctggttgcaggtcaagaggatgggtttacggtacttaagggaataaaggtgcctgattttggatcagttgttttacataacaactcagagacctgtaaagatgtatgcgcaagggactgttcttgtaaggcttatgcgttagtagtagggatcggatgcatgatttggacccgtgatttgatcgatatggaacattttgaacgcggtggaaactctatcaacatccggctagcgggttctaaactaggtggtgggaaggaaaattcaacactttggataattgttttcagtgttataggagcattcttactaggattatgcatttggatcttatggaagtttaagaaaagccttaaagctttcttgtggaagaagaaagatatcacagtttctgatatcatagagaacagagattactcaagctcgccgatcaaagttctagtaggggatcaagttgacacacccgatttaccaatattcagttttgacagcgtagcctcagctactggagatttcgctgaagagaacaagcttggacagggcggattcggtactgtatataagggaaacttttcagaaggaagagagattgcagtgaagagactatcagggaaatctaaacaaggactagaggagttcaagaacgagatcttactaatcgcgaaactccagcatcggaatcttgttagattactaggatgttgcattgaagacaatgagaagatgcttctctatgaatatatgccaaacaagagtttggaccgctttctttttgatgagagtaaacaaggaagtttggactggagaaaacgatgggaggtcattggaggaatcgcgaggggattactttacttacatagagactcaagactaaagatcattcaccgtgacctaaaagctagcaatatcttgctagacacggaaatgaatccaaagatctcggatttcggtatggctaggatattcaactaccgacaagaccatgccaacacaatccgagtcgtcggcacatatggttatatggctccggagtatgcaatggaagggatattctcagagaaatcagatgtgtatagctttggagtgttgatattggagattgtgagtggaagaaaaaacgttagctttcgagggactgatcatggaagtctcattggttatgcgtggcatttatggagccaaggaaagacaaaagagatgatagatccaattgtgaaggacactagagacgtgacggaagcgatgagatgcatccacgtgggtatgttgtgtacacaagactcggtcattcacagaccaaacatgggttcggttttgttgatgttggagagtcaaaccagtcaacttccacccccgagacagccgaccttccactcgttcttgaactctggtgacattgaactcaactttgacggtcacgatgttgcctccgttaacgatgttactttcacaacaattgttggtagatga

SEQ ID NO: 507 - DNA, 2850 bp, Arabidopsis thaliana
atggaatcctttgcaggttcttgtgaaattgttgaggagaaggatgcggtaaggttagccaaacattctagcagatattgtatgtcacctttgggatcaagtaaagatatggagcagcgtcctgcattgaagtcagggtaccaaggttctatggagtatgacattgatcagcttttccagtctataactataaaaccatcacctagaagagtgatgggctcttctttccatcatcttgagacgagcgcaagtgctggtacgagcaggagcacaagcccttcaaataaaggcgctatgaaaaagccctttcccatgggaacccctcgatcaccaagagttggtccctctgattcaatatctctgaagcaggctctgagagatctttgcatctccaaggcatcagaaatggcttcccagaaacgtttatcaaaatctgcagctgcatctccgagggtttctgaagcagacaggataaagactctttacagacaagttttgaatgaatctgctggcaagcctgggcttcctgtggacaagggtaaaagcttggttgaaatatctttgacgccggtagtcgatatacccagctcctcccagagtgtacctcagcggtatgatgtccttgagacagagccatctaacttcatttctgaaccatctcaggctgaaatccttctccacgtacttggaaatgggtcgggaataaagacagtgggatatggaatgctggagactgtatcactgtgtaaatccaacaaatctggatcttgtctcagttctggcagtggagattatgagatagagatagatgaaaatcatacatctcctcctcatatggtcattgaagatcaattagtggaaatcgacaaacatgttacctcgctgccttcttgttctggcagcaaagttgatactgaagagctagacaagagcatcgtctcatcagctagagtgaaaagtgagccaacagctttgagctcagggttaaaaggaaagttggataactttcctggttcaggaacagagaagagcaaactggtaagcaaggtgacaagaaatatcccacgtcccaaaccgcggccgaagaagaagatattgcttaaaaagaagctaaaaatcgttgtaaattctgctacaaaaatggttgaggaagtcgatacttccttagagcctagtgcaagtcaacttctgtgccagaagtgccactgtgcggtaaagagcaccagcactgaaaaccacccgccctcgaatactagtcatactactgataaaaatgtcagtatagaagcagatcaagaatcactcgcaagcccgcgtctcattcgcattgtgaagtgtaataaagaggccagcaagggttcctcggattcttgtgaggttagtgatagcggtgaagctgtcattgtcatgaaacaagaagtctctccaagcaattatagtggaaaaggtgatgcagatgaacagataagagcgaatccaacttccagtgaaaaatttgatttctcgttgagctcaaagaatagcctaggggactatagcagcagcacaagcatgagtgaggagagcaatctgagcaggtttagctgtggcaataaacctcacatgtctatggatgtgagatgggaagcagttaagcatgtaaagttgcagtatggctctttaggactgcgacatttcaaccttttgaaaaagcttggttgtggagatattggaactgtctatcttgctgagctggttggtacaaactgcctgtttgccatcaaggtcatggacaacgagttcttggcccgaaggaaaaagacaccaagagcacaggcagaacgggcaatccttaaaatgttggaccatccttttctgcctaccttgtatgcgcaatttacttcagataatttatcgtgtctggtgatggagtattgtcctggtggtgatcttcatgtcctaaggcagaaacagctcagcaggtgtttctccgaacccgcaactaggttctatgtagcagaaatcctccttgcgctggagtacttacacatgcttggtgttatataccgagatttgaaaccagagaacattctagtccgagaagatggtcacatcatgcttacagattttgacctctcactcagatgtgcggtgaacccgactcttctcagatcaacttctccacccgagaaagatcccgcaaggatgtccggtccatacagcacatcgaattgcatacaacctctatgtattgaaccatcatgtcgggtcccatgtttcagccctaggctcttatcaacccaagcaagaaaccaaaaaccaagaaaaccgaaaaggcctgatcttttgacacagcagttcagatcattgcctcagcttgtggctgaaccaaccgaagcaagatcaaattcgtttgtgggaacgcacgagtacttggccccggagatcattaaaggagaaggacatggtgctgcagtagactggtggacatttggggtccttctctatgagcttttgtacgggaagacacctttcaaaggttatgacaatgaggagacactgtccaatgttgtataccagaacctcaagtttcctgatagcccgctcgtgagcttccaggcaaaggagttgatcagaaggctgctggtgaaggatccagagagtcgtcttgggtcagaaaaaggagctgcagagatcaaaagacatcctttctttgaaggattgaattgggctctcatccgctgcgccataccacctgagctgccagatatctatgacaatggtgccacggaagcgacttctcctgaggggaataataggtatcttgaatgtaaagccatcggagatcatcttgagttcgagttgttttag

SEQ ID NO: 508 - DNA, 2502 bp, Arabidopsis thaliana
atgtgttcaaatggcatctttgtctctcttcttactttatctctcttgttaggaaaatcatgcagtgaaacagatacgctacatcagggtcagttcttgaaagatgggcaagagctcgtttctgcttttaaaatcttcaaactcaagtttttcaactttaagaattcagaaaacttgtatcttggaatttggttcaacaatctttatcttaatactgatagccaggacagacctgtctggattgctaaccgtaacaatccaatctcagaccgctctggaagcctcacagtggattctcttggcagattgaagattttaagaggagcatcaaccatgcttgagctaagctctatagaaaccacaagaaacacaacccttcagcttttggattctggaaatcttcagctccaagagatggatgctgatggatcgatgaagcgggttttgtggcaaagtttcgattatccaacagatactcttcttcctgggatgaaactaggtttcgatggcaagaccaggaagagatgggaacttacatcatggttaggtgatactttacctgcttctggatcttttgtctttgggatggatactaatatcacaaacgtattgaccatcttgtggcgtggaaacatgtattggagtagcgggctttggaataaaggtcggttctccgaagaggagttaaacgaatgcggtttcctcttttccttcgtttcaaccaagagtggacaatattttatgtattcaggtgatcaggacgatgccagaacattttttccaaccataatgatagacgaacaaggcattttgcgtagagagcaaatgcatcggcaacgtaacaggcaaaattataggaaccggaattgtttggctgcaggttacgtagtccgggatgagccatatgggttcacttctttcagagtgacagtatcttcttccgcaagcaatggttttgtacttagtggaacgtttagttcagttgattgcagtgctatatgtttgcaaaactcttcttgtcttgcctatgcttcaaccgagccggatggtacgggttgcgaaatctggaatacttatcctaccaacaaagggtcggcttctcatagtcctagaactatatatatccgtggaaatggtcaagagaacaaaaaagtggcagcttggcatattgttgtggcaacactgttcctcatgacacctataatttggtttataatctatctcgtgttgaggaaatttaatgtaaaaggtagaaattgtatcagaattactcacaaaacagttttagtctcaatggttttcttactaacaagttcaccctctttctttctttttatgatccaggacgtgttttatttcgtggaatatactactttctatggagagagctcactcctcaaggtacaccaagaaatgctactacgtgaattgggaattgataggagctgcatacacaagagaaatgaaaggaagagtaataacgagcttcagatttttagctttgaaagtgtagtatcggcaacagatgacttctccgatgaaaacaagctcggtgaaggaggttttggtcctgtatataagggaaagttattaaatggggaagaagtggctatcaagagactatctttagcatctggccaaggattagtggagtttaaaaacgaagctatacttattgcaaagcttcagcatacaaatcttgttcaggttttaggatgttgcatcgaaaaagatgagaaaatgctgatttatgaatacatgcagaacaagagccttgactacttcctctttgatcccttgaggaaaaacgttttggattggacgttgcggttcaggatcatggaaggaatcattcaagggcttttgtaccttcacaagtactcaagattgaaagtgatacatagagacatcaaagctagtaatattttgctagacgaggatatgaatccgaaaatatcggattttggattggctcggatatttggagcggaagaaacaagagccaacaccaaaagagttgctggcacatttggctatatgtcgccggagtattttagagaaggactattctcggcgaaatcagatgtgttcagctttggggttctaatgctcgaaatcatttgtgggaggaagaacaatagctttcaccatgacttagaaggacctttgaatctcatagttcatgtgtggaatctgtttaaagagaacaaaattcgtgaggtgatagatctgtctttgagagattctgcgcttgattaccctcaagtgttgagatgcgttcaagttgctctattgtgtgtacaagaaaacgcggaagatagaccaagtatgttagacgttgtgtccatgatatatggcgaaggaaataatgctctttctttgcctaaagagcctgctttctatgatggtccccggagaagctttccagaaatgaaggttgagccacaggagccggaaaatgtatcggcgagtattaccatcacggtgctggaggcaaggtga

SEQ ID NO: 509 - DNA, 1880 bp, Arabidopsis thaliana
atgcttttctttgcttcaatctccacgttgcggaagttactcctcgttgaagacgaaaaggtttggcttttgcatcagatcaaagagaaggaagctgggaaattggacagaggttatgttgccactgtgaacagcaaggaaataaagaaagtggggaagaaagagcatcacttgtggaagaagaatgactctgctgggtctggacagaaagcacttaatcttgttcgaatgctctctggactcccaaatgaaaaagaggctgtttatggagctttgaataaatgggtagcttgggaggttgaatttcccattattgctgcagctaaggcgttgcaaatcttaagaaagagaagtcagtggcatcgtgtgattcaattggctaagtggatgttaagcaaagggcaaggtgctacaatgggaacatacgatatcctcttattggcatttgatatggacgaaagggctgatgaggcagagtccttatggaacatgattctgcacacacatacacgatccatcccaagacgcttgttcgctaggatgatagcgttgtatgctcaccatgaccttcacgataaggttatcgaggtctttgcagacatggaagagctgaaggtgagcccagacgaagactctgcgaggagagtggcacgagccttcagggaactcaaccaagaagaaaatcgaaaactgatccttagaaggtacctctctgaatacaaatacatctacttcaatgaccaatctctctcttcttcttcttcacgttctctctctttccggataagggtagagatggctagagtttgtgtaatgatgatggctatggctatagctatggctatgaacatagctatgggtgatccaatagcaccatgttacttcatattcggtgactctttggttgatagtggaaacaacaatcggcttacctctctagcaagagctaattacttcccttacggtatcgacttccagtacggtccaaccggtcgcttctccaacggaaaaaccaccgtcgatgtcatcactgagcttcttggtttcgatgactacattacaccgtattccgaagcaaggggagaagatatcctaagaggagtaaactacgcttctgcagctgccggaatccgagaagaaactggtcgacaattgggagctagaataacatttgcagggcaagtagctaatcatgtaaacactgtgtcacaagttgtgaacatactcggagacgagaatgaagctgctaattacctaagtaaatgcatctactcaatcgggttaggcagtaacgactatctcaataactattttatgcctgtttattactccaccgggagccagtactccccggatgcctacgccaacgacctcataaaccgctacaccgagcaactccggataatgtataacaacggagcgaggaagtttgcgctagttggtataggtgcaataggatgcagtccaaatgagctggctcaaaacagcagagacggggtgacttgtgacgaaaggatcaattccgctaacagaatcttcaacagtaagcttgtgtctctggttgatcacttcaaccaaaacacaccaggggccaagttcacttacattaatgcttatggtatcttccaagacatggtagctaatccttctcgctatgggtttagggtgacaaacgcgggatgttgtggagttgggaggaacaatggacagataacttgtcttccgggtcaagctccatgtcttaacagggacgagtatgtgttctgggacgcgtttcatccaggagaagctgcgaatgttgtcatcggtagtcgatcttttcagagagaatctgcttctgatgctcatccttatgatatccagcagcttgctcggctcta

SEQ ID NO: 510 - DNA, 1308 bp, Arabidopsis thaliana
atggttgatatggattggaagaggaagatggtatcatcagatttaccaaactcacctaagctttcttcaaagcttcacgtaactattccatcaccgttcaaaatcgtccctgtttcatctccgatctcatgttcagcacctgctctttgctctgcttacgagctttaccttcgtctccctgagctaagaaagctctggtcatctcgtgattttcctcaatggacatcagagccgattctcaaaccagctcttcaagctttggagatcagtttcagattagttttcgccgtttgttctgatactagaccgtacatcaaccaccgtgaatggaaccggaggctagattctctcatcacgaagcagatccagcttgtagcagcgatctgcgaagatgaagaagaagaaggtatatcagcggaggctccggtcggcggtggacggagttcgttgagtttgttaccgcagctagctacgtggaggagatcagaggctttggggaagaagatcttatatacgatcgataacgagatgagtcggtgtaagtacacgctcggactcggtgaacaaaacatcgccggaaaaccaaatctccggtacgatgcgatttgccgaccaaacgagatctatagcctcaaggataatccatacgcagatcatatcgataatcacgagaatcaaactctctatatcattcaccagatcctcgaatcgtggatctacgcatctggaaatcttctgaatcgaatcgtctcaagtatcgaagaagagaaattcggaaaagcttcaaacgatgtttacttgctggagaagatctggaaaattttagcggagattgaagatcttcatatgttgatggatccggaagattttttgaaattgaagaaacagttacagatcaaatcgacgggtaaaaacgatgcgttttgtttcagatctaaaggattagtggagatgatgaagatgtcgaaagatctgagacagaaagtaccggcggtcttggcggttgaggtagatccaaccggaggaccaagattacaagaggcggcgatgaagctttacgcgaggaagacagagtgcgataagattcatttgcttcaggggatgcaagcggtggaagcggcggcgaagagtttcttctttgggtataggcagttagtggcggctatgatgggaagtgcggagatgaacgcgacggcgagtcaagagtcgtgtgactcactgagtcagatatttatggagccgacgtatttcccgagccttgacgcggcaaagacgtttctgggagagttttggagtcatttgggatga

SEQ ID NO: 511 - skipped

SEQ ID NO: 512 - DNA, 222 bp, Arabidopsis thaliana
atggcgtcgagaaactccgtcaccggattcgcgttgttcagttttgtattcgccgtcatcttatctctcgccggcgctcaatccctggctccagctcctgctcccaccagcgatggaacatcgatagatcaagggatagcgtatttgctaatggtggtggcgttagtgctgacttacctaattcatcctcttgatgcttcttcttcctactccttcttctaa

SEQ ID NO: 513 - DNA, 1050 bp, Arabidopsis thaliana
atggggttttctccttcattttcttgcagtgctattggagccctaattttgggttgccttctgcttcaagcatcaaactctaatgctcagttgaggcctgatttctacttcgggacgtgcccatttgtttttgatatcattggaaatatcatcgtcgatgaactgcagactgatcctcgtattgccgcgagcctccttcgtcttcactttcacgactgctttgttcgtggttgtgatgcatcgatcttgcttgacaattccacatcattccggactgagaaagatgctgctccgaacgcaaattcggctcgagggtttaatgtcatagatagaatgaaagtagcccttgagagagcttgcccaggaagagtctcttgtgcagatattctcaccatcgcctctcaaatatcagtgcttttgtcgggaggtccatggtggccggttccgttggggaggagagacagtgtagaagctttcttcgctctggctaatacagctctgccctctccgtttttcaatcttactcaacttaaaacagcctttgctgacgttggcctaaaccgcacttccgatctagttgctctttccggtggtcacacatttggaagagcacaatgccagttcgtgacgcctcgtctctacaacttcaatggtacaaacagtccagacccaagtctgaacccaacttaccttgtcgaactccgtcgattgtgtcctcaaaacggaaacggcaccgttctggtcaacttcgatgtcgtgactccagatgctttcgatagtcaatactacaccaaccttcgtaatgggaaaggtcttattcagagtgaccaggaactcttttcgactccaggagccgatacgatccctttagtaaaccaatacagcagcgacatgtccgtgttctttcgagcattcattgacgcaatgattaggatgggaaatcttagacctttgactggaactcaaggagagattagacaaaattgtagggttgtgaatccacgaattagggttgtggagaacgacgatggtgttgtgagttctatctga

SEQ ID NO: 514 - skipped

SEQ ID NO: 515 - DNA, 1962 bp, Arabidopsis thaliana
atggctggtaaaggagaaggtcctgcgatcggtatcgatcttggtacgacgtactcttgcgtcggagtgtggcaacacgaccgtgttgagatcatcgctaatgatcaaggaaacagaaccactccctcgtacgttgctttcactgactccgagaggttgatcggtgatgctgctaagaaccaagtcgccatgaaccctgttaacactgttttcgatgcaaagaggttgattggtcgtagattcagtgacgcatctgtccaaagtgacagacagttatggcctttcactatcatctccggaactgcagagaaaccaatgattgtcgtcgaatacaagggagaagagaaacagttcgctgctgaagagatctcttccatggttcttattaagatgcgtgagatcgctgaggctttccttggcactacggtcaagaacgctgtcgtcactgttcctgcttacttcaatgactctcaacgtcaggctacaaaggatgctggtgtcatcgctggtttgaatgttttgcgtatcatcaacgagcccactgctgcagccattgcttatggtcttgacaagaaggccacaagtgttggagagaagaatgttttgatctttgatcttggtggtggtacttttgatgtctctcttcttacaatcgaagagggtatctttgaggtgaaggcaacagctggtgatactcatcttggtggggaagattttgacaacagaatggttaaccattttgttcaagagtttaagagaaagaacaagcaggatatcaccggtcaaccgagagccctcaggagattgagaacagcttgtgagagagcaaagaggactctttcttccaccgctcaaacgaccatcgagattgactctttatatggtggagctgacttctattctccaatcacccgtgctagattcgaagagatgaacatggatctctttaggaagtgtatggagcctgttgagaagtgtctccgtgatgctaagatggacaagagcactgttcacgagattgtccttgttggtggatccacccgtatccctaaggttcagcaattgcttcaggacttcttcaacggcaaagagctttgcaagtctatcaaccctgatgaggctgtagcttatggtgcagctgttcaggctgcgatcctaagcggtgaaggaaacgaaaaggtccaagaccttctcttgcttgatgtcacacctctctcccttggtcttgaaactgctggtggtgtcatgaccactttgattcaaagaaacacaaccattccaaccaagaaggaacaggtcttctcaacttattcggacaaccagcctggagtgttgatccaagtttttgaaggtgagagggctaggaccaaggacaacaacctcctcggtaaatttgagctttctggaattccccctgctccacgaggtgtccctcaaatcactgtctgcttcgacattgacgccaatggtatcctcaacgtctctgctgaggacaagaccactggaaagaagaacaagatcacaatcactaatgacaagggtcgtttgtctaaagaggatattgagaagatggttcaagaagcggagaagtacaagtctgaggatgaggagcacaagaagaaggtcgaggccaagaacgctcttgagaactacgcttacaacatgaggaacaccatccgtgatgagaagatcggtgagaagcttccagctgcagacaagaagaaggttgaggactctattgaggaagcaatccaatggctagatggtaaccaattgggtgaagctgacgagtttgaagacaagatgaaggagttggagagtgtttgcaatccgatcatcgctaagatgtaccaaggaggagctggtggtgaagctggtggtcctggagcttctggaatggacgaggatgaagctcctcctgcatcaggtggtgctggtcccaagatcgaggaagtcgactaa

SEQ ID NO: 516 - DNA, 993 bp, Arabidopsis thaliana
atggctcttccgttgccattgatcttccttatcttctctcatttgttcgtttctggagttagatcaacgagcttcattatggtgaacaaatgcgaatacacagtctggcctggacttttatcaaacgccggagttccaccacttccgacgaccggattcgttctccaaaaaggcgaagaacgaacaatcagcgctccaacttcatggggaggaagattctgggggagaactcaatgttccaccgacaccgacggaaaattcacttgtctcaccggagattgcggatctggtaccctcgaatgctccggatccggagcaacaccaccagcaacactagcggaattcacactagacggatctaacggactcgatttctacgacgttagtctcgtcgacggttacaacgtcccgatgctagtggctccacaaggaggctcgggtttaaactgtagcagcaccggatgcgttgtagatctgaacggttcgtgtccgtcggagcttaaagtgacgagtttagacggcagaggtaaacaatccatgggatgtaaaagcgcgtgtgaagcttttcgtacgccggagtattgttgcagcggcgcccacggtacacctgacacgtgtaaaccgtcgtcgtactcgttgatgtttaaaactgcgtgtccacgtgcttacagctacgcttacgatgatcagagtagtaccttcacatgtgctgaatctcctaattacgttatcacgttttgccctactcctaacaccagtcaaaaatcatctcaagatcagagcccagatcccaaaccgacgacaccaaccgggacgtcgtcgacaactcctgccggagatagtagtacgacgtggtcaccggtagatacatcaatgatatacgaaggagctttggatcaaaacaaaggatcaccgtccacgtgtcatctttcgttatgtggaatcacagtcacacttgcgctggccttttgtcggatgtggcggctcttttga

SEQ ID NO: 517 - DNA, 1569 bp, Arabidopsis thaliana
atggcgctcttgtctcaagcaggaggatcatacactgttgttccttctggagtttgttcaaaggctggaactaaagctgttgtttcgggtggcgtgaggaatttggatgttttgaggatgaaagaagcttttggtagctcctactctaggagtctatctaccaaatcaatgcttctccattctgttaagaggagtaagagagggcatcaattgattgttgcggcaagtcctccaacggaagaggctgtagttgcaactgagccgttgacgagagaggatctcattgcctatcttgcctctggatgcaaaacaaaggacaaatatagaataggtacagaacatgagaaatttggttttgaggtcaatactttgcgccctatgaagtatgatcaaatagccgagcttcttaatggtatcgctgaaagatttgaatgggaaaaagtaatggaaggtgacaagatcattggtctgaagcagggaaagcaaagcatttcacttgaacctgggggtcagttcgagcttagtggtgcacctcttgagactttgcatcaaacttgtgctgaagtcaattcacatctttatcaggtaaaagcagttgctgaggaaatgggaattggtttcttaggaattggcttccagcccaaatggcgtcgggaggatatacccatcatgccaaaggggagatacgacattatgagaaactacatgccgaaagttggtacccttggtcttgatatgatgctccgaacgtgtactgttcaggttaatctggattttagctcagaagctgatatgatcaggaagtttcgtgctggtcttgctttacaacctatagcaacggctctatttgcgaattccccttttacagaaggaaagccaaacggatttctcagcatgagaagccacatatggacagacactgacaaggaccgcacaggaatgctaccatttgttttcgatgactcttttgggtttgagcagtatgttgactacgcactcgatgtccctatgtactttgcctacagaaagaacaaatacatcgactgtactggaatgacatttcggcaattcttggctggaaaacttccctgtctccctggtgaactgccttcatataatgattgggaaaaccatctgacaacaatattcccagaggttcggttgaagagatacttggagatgagaggtgctgatggaggtccctggaggaggctgtgtgccctgccagctttctgggtgggtttattatatgatgatgatagtctccaagctatcctggatctgacagctgactggactccagcagagagagagatgctaaggaacaaagtcccagttactggcttaaagactccttttagggatggtttgttaaagcatgtcgctgaagatgtcctgaaactcgcaaaggatggtttagagcgcagaggctacaaggaagccggtttcttgaacgcagtcgatgaagtggtcagaacaggagttacgcctgcggagaagctcttggagatgtacaatggagaatggggacaaagcgtagatcccgtgttcgaagagctgctgtactaa

SEQ ID NO: 518 - DNA, 1107 bp, Arabidopsis thaliana
atgaattcgacatcgacacattttgtgccaccgagaagagttggtatatacgaacctgtccatcaattcggtatgtggggggagagtttcaaaagcaatattagcaatgggactatgaacacaccaaaccacataataataccgaataatcagaaactagacaacaacgtgtcagaggatacttcccatggaacagcaggaactcctcacatgttcgatcaagaagcttcaacgtctagacatcccgataagatacaaagacggcttgctcaaaaccgcgaggctgctaggaaaagtcgcttgcgcaagaaggcttatgttcagcaactggaaacaagcaggttgaagctaattcaattagagcaagaactcgatcgtgctagacaacagggattctatgtaggaaacggaatagatactaattctctcggtttttcggaaaccatgaatccagggattgctgcatttgaaatggaatatggacattgggttgaagaacagaacagacagatatgtgaactaagaacagttttacacggacacattaacgatatcgagcttcgttcgctagtcgaaaacgccatgaaacattactttgagcttttccggatgaaatcgtctgctgccaaagccgatgtcttcttcgtcatgtcagggatgtggagaacttcagcagaacgattcttcttatggattggcggatttcgaccctccgatcttctcaaggttcttttgccacattttgatgtcttgacggatcaacaacttctagatgtatgcaatctaaaacaatcgtgtcagcaagcagaagacgcgttgactcaaggtatggagaagctgcaacacacccttgcggactgcgttgcagcgggacaactcggtgaaggaagttacattcctcaggtgaattctgctatggatagattagaagctttggtcagtttcgtaaatcaggctgatcacttgagacatgaaacattgcaacaaatgtatcggatattgacaacgcgacaagcggctcgaggattattagctcttggtgagtattttcaacggcttagagccttgagctcaagttgggcaactcgacatcgtgaaccaacgtag

SEQ ID NO: 519 - skipped

SEQ ID NO: 520 - DNA, 864 bp, Arabidopsis thaliana
atggatcggcaaagttccgatgacatcatgaaatttctcgacggcatggctagctccgacgatgttctttttggcttcctcgacgaaggaaaccactcaccggaggattataacttcgccgccggcgacgaatccgaagttgacaacgataccaccgattgtaattcagaagagaacagaaaattttggcaagaacacgaacaacttctccaggcgacactgtataggacaagttcaattgagacaaagataagacaagcaactaaggaagcgttgaaagtagttagatcaaagggtttggtatgtgtctgccggagaccggttaccgacggttgtcgtagctgtttacgcggcgaagtatctagcctcctccgagaagctggctatgattgcgtcatttccaaatctaagtggagaagctctcatgagatccctgcaggtgagcatgaatacttggaggtcgtggacaaatcggtttcaaagaaaggcgagatccgggtggtgatcgaactatgttttagggcggagtttgagatggcgagaggcagtgaagagtacaagcgactcatcggaatgttaccggaagtgtatgtcgggaaaacggagaggctaaaatcattaataaagatattgtgcaccgcagcgaagaagtgtatgaaagacaagaagatgcacatgggtccttggagaaaacacaaatacatgcaggctaaatggtttggaacttgtgagagaaaatctgtgtcgccagtatccgaaactgaggagaatatgtttccggtggcaaagcagagggtttctatgttgaattatggtctttttggtgctggaataggccgtccgaccgttgtagcggttgtgtga

SEQ ID NO: 521 - DNA, 1400 bp, Arabidopsis thaliana
atggatgttccacggccagctttcaaatgttttgatgacgatggccggcttaaacgttcagggacggtttggaccgcgagtgcgcatatcataaccgccgtgattggatctggtgttctatcgcttgcgtgggctataggtcaactcggttggatcgcaggtcctacagtgatgttgttgttctcttttgtcacttactactcttccacgcttcttagcgactgctacagaaccggagatcctgtctctgggaagagaaactatacttacatggacgctgtccgatcaatcctaggtggctttaggttcaagatttgtgggctgattcagtatttgaatctgtttggtatcacggtcgggtacacaatcgcagcatctataagtatgatggcgatcaagaggtccaactgtttccacgagagcggagggaaaaacccgtgtcacatgtcgagcaatccatacatgatcatgtttggtgtgaccgagatcttgctctctcagatcaaagattttgaccagatttggtggctctccattgtcgctgctatcatgtccttcacatactctgcaatcggtttagctctcggaatcattcaagtcgcggcaaatggagttgtcaagggaagtctcaccggaattagcatcggcgcagtgactcagacccaaaaaatatggagaacctttcaagcacttggagacattgcctttgcttattcatactctgttgttcttattgaaattcaggacactgtaagatctccaccagcagaatcaaaaacgatgaagatcgccacaagaatcagcatcgctgttacaacgacattttacatgctatgtggttgtatgggctatgccgccttcggagataaagcaccgggaaacctcttaaccggttttggtttctacaatccgttttggctccttgacgtggctaacgctgccatagttatccaccttgtaggagcttatcaagtctttgctcagcccatcttcgcctttattgagaaacaagctgccgctaggtttcccgacagtgacttggtgaccaaggaatacgaaatccgaatccctggttttaggtcaccgtacaaagtcaacgttttcagagcagtttaccgaagcgggtttgtggttttgaccactgtgatatccatgcttatgccgtttttcaacgacgtcgtagggattttaggtgcgttagggttttggcctttgacggtttactttccggtggagatgtatataagacagaggaaggttgagagatggagtatgaagtgggtttgtctgcagatgttgagctgtggttgtttgatgatcacgttggtcgccggagttggctccatcgccggagtaatgctagaccttaaggtttacaagccgttcaagactacttacta

SEQ ID NO: 522 - DNA, 1527 bp, Arabidopsis thaliana
atgggttcggcgaacaacgagtacgagtttctgagtgagattgggctgacttctcacaacttgggatcttacgttgctggcaaatggcaagccaacggacctcttgtttcaactctcaatcctgctaacaatcagccaattgctcaagttgtggaagcttctctagaggattacgagcaaggtttgaaagcttgcgaggaagcagctaaaatatggatgcaggttacggctcctaagagaggtgatatcgtcagacagattggggatgcactaagatccaaacttgactatcttggtcgtcttctttctcttgaaatgggaaagatccttgctgaaggtattggagaagttcaggaagtaattgacatgtgtgattttgctgttggtttgagccgacaactcaatggatcggttataccttcagaacgccctaaccacatgatgttggagatgtggaatcctcttggcattgttggtgttatcacagcgtttaattttccctgtgcagttcttggttggaatgcttgtattgctcttgtctgtggaaactgtgtagtctggaaaggtgctccaactacaccgttaataactatcgcaatgaccaagctagtagctgaagttttagagaaaaacaacttacccggtgccatttttacggccatgtgtggtggtgctgaaattggtgaagcaatagccaaagacacacgcattcccttagtatcctttactggaagctccagggtgggctcaatggtacaacaaacagtgaatgcgagatctgggaaaactttgcttgagttgagtggaaacaatgcaatcatagtcatggacgatgctgatatacagttagcggctcgatctgttctattcgctgcggttggaactgctggtcaacgttgcacaacttgccgtaggctgcttttgcatgagagtgtctatgacaaagtactcgagcaactgcttacctcatacaaacaagtcaaaatcggcaatcctcttgagaaagggacattgttaggaccattacatactcctgaatcaaaaaagaactttgagaaaggaattgaagtcatcaaatcccagggtggtaaaatactaacgggaggtaaagcagtcgaaggtgaaggaaactttgtggagcctacgataatcgagatatcagcagatgctgctgtcgtcaaagaagagctatttgctccggttctatatgttctaaagtttaagtcatttggagaggctgttgcgataaacaactcggttcctcaaggtctaagcagctcgatattcactcggaaccctgaaaacatcttcaggtggatcggaccactgggaagtgactgtggcattgtgaatgtgaacataccgacgaatggagctgagattggtggagcttttggaggcgagaaagcgactggtggtggtcgtgaagctggaagcgactcatggaaacagtacatgcgtcgatcgacttgtaccatcaactatggaaacgagttacctctagcgcaaggaattaacttcggttag

SEQ ID NO: 523 - DNA, 1875 bp, Arabidopsis thaliana
atggaagctgtgattcaaaccagagggcttctctctttacccaccaaacccatcggagtgagaagccaacttcagccttcccatggcttaaagcagagacttttcgccgcgaagccaagaaatctacatgggttgtctctatcctttaacgggcacaagaaatttcaaacctttgagccaaccctgcatgggatttcgatttcccacaaagagagaagcaccgagttcatatgcaaggcggaggccgcggctgctggcgacggagctgtcttcggcgaaggcgattccgcagctgttgtagcctcgccgaagattttcggtgtggaggttgcaaccttgaaaaagattatccctttaggattgatgttcttttgtattcttttcaattacacaattctgagggatacaaaggatgtcttggtggtgacggcgaaaggaagttctgctgagattatacctttcttgaagacttgggtgaatcttcctatggccattgggtttatgctcctctacactaaactctccaatgttctctccaagaaggctctgttttacactgttattgtccctttcatcatctactttggggcctttggtttcgtcatgtaccctctcagcaactatattcacccggaagctctcgcagataagctccttacaaccctcggcccaagattcatgggtcctattgcaatattgcggatttggagtttctgtttgttttatgttatggctgagctttggggtagtgtggtggtctcagttctcttctggggctttgctaatcagatcacaactgtggatgaagccaagaaattctatcctttgttcggacttggagccaatgttgcactgattttctcaggaagaaccgtgaaatacttctctaacttgagaaagaatcttggtcctggagttgacggctgggcagtttcgttgaaagccatgatgagcattgtggtgggaatgggactcgccatttgtctcctctattggtgggtcaatagatatgttcctcttccaacccgtagcaagaacaagaaggagaaaccgaagatgggaacgatggaaagcttgaagttcttggtatcatcaccatacattagagatcttgctactttagtggtggcatacggtattagtatcaatcttgtggaagtcacatggaaatcaaagcttaaagctcagttccctagcccgaatgagtactcagcatttatgggagacttctcaacctgcacgggtgttgcaacattcacaatgatgcttctcagccaatacgtattcaataagtatggttggggagtagctgcaaagatcaccccaactgttctgctattgactggtgttgcgttcttctctctaatattgtttggcggcccattcgcaccacttgttgccaagcttggtatgacaccgctacttgcagctgtgtatgtcggtgcccttcagaatatcttcagcaagagtgccaagtacagcttgttcgacccttgcaaagaaatggcctatatcccattggatgaggacaccaaggttaaaggcaaagctgcgattgacgtggtctgcaacccattagggaaatcagggggagctttaatacagcagttcatgatcttatcctttggatcactagcgaattcaacgccgtatctaggaatgatcttgttggttattgtcactgcgtggttagctgcagctaagtcgctggagggacagttcaacagcttgcggtctgaagaagagcttgagaaggaaatggagagagcttcatcggtgaagatccctgtcgtgtctcaggacgaaagcggaaacggttcccttggagaatctcctagcagttcaccggagaaatctgctcccaccaacttataa

SEQ ID NO: 524 - skipped

SEQ ID NO: 525 - DNA, 2790 bp, Arabidopsis thaliana
atgaaaccgttctcaaagaacgatcggcgacggtggtcatttgattcagtttccgccggaaaaaccgccgtcggaagtgcatcaacttcaccgggaactgaatactccattaacggtgatcaagagttcgttgaagtcacaatcgatcttcaagacgatgacacaatcgttcttcgtagcgtcgagccagcaaccgccattaatgtcatcggagatatctccgacgacaacaccggaataatgactccggtttcgatttcgagatctccgacgatgaaacgaacttcatctaatcggttccgacaattctcacaagagcttaaagccgaagctgtggcgaaagcgaaacagttatctcaggagttgaaacgattctcatggtctcgttctttctcaggtaacttaaccactactagtaccgccgctaatcaaagcggcggtgctggtggtggtttggtgaactcggctttagaagcgcgagcgttgcgaaagcaacgtgctcagttagatcggactcggtctagtgctcaaagagctcttcgtggtttgagattcattagcaataagcaaaagaacgttgatggttggaacgatgttcaatcaaatttcgaaaaattcgaaaaaaatggttacatctatcgctccgatttcgctcaatgcataggaatgaaagattcgaaagaatttgcattggaactgttcgatgcattgagtagaagaagaagattaaaagtagagaaaatcaatcacgatgagctttatgagtattggtcacaaatcaacgacgagagttttgattctcgtctccagatcttcttcgacatagtggacaagaatgaagatgggagaattacagaagaggaagtaaaagaggaacaagcagaggaatatgcagctttgattatggaagagttagatcctgaaagacttggctacatagagctatggcaactagagactttgcttctacaaaaagacacatacctcaattacagtcaagcattgagctatacgagccaagcattgagccaaaaccttcaagggttaaggggaaagagtcgaatacatagaatgagttcggatttcgtctacattatgcaagagaattggaaaaggatatgggttttatccttatggatcatgatcatgatcggattattcttgtggaaattcttccaatacaagcaaaaagatgcatttcatgtgatgggatattgtttactcacagccaaaggagcagctgaaacacttaaattcaacatggctctaatacttttcccagtttgcagaaacaccattacttggcttagatccacaagactctcttacttcgttccttttgatgataatatcaacttccacaagacaattgctggagccattgtagtagctgtgatccttcatattggagaccatcttgcttgtgatttccctagaattgttagagccaccgaatacgattacaatcggtatctgtttcattactttcaaacaaaacagccaacatacttcgacctcgttaagggacctgaaggaatcactgggattttaatggtcattttgatgattatttcattcacattagcaacaagatggtttaggcgtaacctagtcaagcttcctaagccatttgatcgactaaccggttttaacgccttttggtattcgcatcatttgttcgtcattgtttatatcttgcttattcttcatggtatcttcctctatttcgccaagccttggtatgttcgtacgacatggatgtatcttgcagtaccagttttactctatggtggagaaagaacacttaggtacttccgttctggttcttattcggttcgactgcttaaggttgctatatatcctggtaatgttctaacgctacaaatgtcgaaaccaactcaatttcgttacaaaagcggacaatacatgtttgtccaatgtcctgcggtttcgccattcgagtggcatccattctcaattacttccgcacctgaagatgattatatcagcattcacattagacaacttggtgattggactcaagaactcaaaagagtattctctgaagtttgtgagccaccggttggcggtaaaagcggacttctcagagccgacgaaacaacaaagaaaagtttgccaaagctattgatagatggaccgtacggtgcaccagcacaagattataggaaatatgatgttctcttattagttggtcttggcattggtgcaactccatttatcagtatcttgaaagatttgcttaacaacattgttaaaatggaagagcatgcggattcgatctcggatttcagtagatcatcagaatacagcacaggaagcaacggtgacacgccaagacgaaagagaatactaaaaaccacaaatgcttatttctactgggtcacaagagaacaaggctcttttgattggttcaaaggtgtcatgaacgaagttgcagaacttgaccaacggggtgtgatagagatgcataactatttaacaagtgtgtatgaagaaggtgatgctcgttctgctctcattacaatggttcaagctcttaatcatgccaaaaatggtgtcgacattgtctctggcactagggtcagaacacactttgcaagacctaattggaagaaggttctcacaaagctaagttccaagcattgcaatgcaagaataggagtgttttattgcggagtaccggttttagggaaggagcttagcaaactatgcaacacattcaatcaaaaaggttcaaccaagtttgaatttcacaaggagcatttctaa

SEQ ID NO: 526 - DNA, 1860 bp, Arabidopsis thaliana
atggctgctaccgctgctgcttctgttgtccgttacgcacctgaggatcatactcttcccaagccctggaaaggccttatcgatgatagaactggttacttgtacttttggaatcctgagaccaatgttactcagtacgagaaaccaaccccctctctacctcctaagttttctcccgccgtttctgttagctcttccgttcaggttcaacaaactgatgcctatgctcctcccaaggatgacgataagtactccagaggctctgaacgtgtgtccaggttttctgagggtggcaggagtggaccgccttattcgaacggtgctgctaatggagttggggattctgcttatggtgcagcatctaccagagttcctcttccttcatcagctccagcaagtgaactatcccctgaggcctattcccgccgtcatgaaattactgtcagtgggggccaagtaccaccacctctaatgtcctttgaagctactggttttccacctgagcttctgcgggaggtactcagtgcaggtttctctgctccaactccaattcaagctcagtcatggcccattgctatgcaaggtagggacatagtagccattgctaaaactggctcgggaaaaactttgggttacttgattcctggatttttgcatcttcaacgtatccgaaatgattcgcgaatgggcccaacaatcttggtattgtctccaacgagagagctggccacacaaatccaagaagaagctgttaaatttgggaggtcatcaagaatttcgtgtacgtgtttgtatggtggtgcaccaaagggccctcagttgagggatttagaaagaggagcagatatcgtggttgcaactcctgggagattgaatgatatccttgaaatgaggaggattagtctgcgtcagatatcttatcttgtgctagatgaggcagatagaatgttggacatgggttttgaacctcagataaggaagattgtgaaagaaattcccactaagcgtcaaacccttatgtacacagctacatggccaaagggagttaggaaaattgcagctgacttgcttgttaaccctgctcaagtcaacattggcaatgttgacgagcttgtggctaacaagtcaatcacacagcatattgaagtggtagcaccaatggagaaacagaggaggttagagcagatcttgcggtctcaggaaccaggctcaaaggtgataatattctgctcaaccaaaaggatgtgtgatcaactaacacgcaatctaacccgccaatttggagctgctgctatacatggagacaagtcccagcctgagagagacaatgttcttaatcaattccgcagtggcagaactccggttcttgtagcaaccgatgttgctgctcgtggtctggacgttaaggacatcagggcggtcgtaaactatgatttccccaatggagtggaagactatgttcatagaatcggaagaacaggaagagctggagcgactggtcaggcattcacattctttggtgatcaagattcgaaacatgcttcggatctgatcaagattttggaaggagcaaaccagcgagttcctcctcagatccgcgaaatggctacacgtggtggtgggggaatgaacaaattcagtcgttggggacctccttccggcggccgtggtcgtggtggcgactctggttatggtggcagaggtagctttgcttcccgtgacagtagaagcagcaatggatggggaagagagcgagaaaggagccgtagccctgagagattcaacagagctccaccaccgtcttccaccggatctcctcctcgcagcttccacgagacgatgatgatgaaacacagatga

SEQ ID NO: 527 - skipped

SEQ ID NO: 528 - DNA, 1896 bp, Arabidopsis thaliana
atggaggtgcacaaggtggttgctccgccgcataagagcacggtggcaaagctaaagacaaaactgaaggagactttcttcccggacgatcccttaagacagttcagaggacaaccaaaccgtaccaagctcatacgcgccgctcaatacatttttccaatcctccaatggtgtcctgagtacagcttcagcctactcaaatccgacgtcgtttcaggtcttaccatcgctagtttagctattcctcaggggattagttacgcgaagctagcaaatttgccaccaatcgttggtctatactcgagcttcgtgccaccgttggtttatgcggtcttgggaagctcaagagatctagcagtgggaccagtctccatagcgtcgttaatcttaggatccatgctaaggcaacaagtatctcccgtagacgatcctgttctctttctacagctagccttctcttctaccttctttgctggtctctttcaagcctctcttggaatcctcaggctgggatttataatagactttctatcaaaagcgacgctaatagggtttatgggtggagcagccataattgtatcactccaacagctaaagggtctgcttgggataactcatttcacaaagcatatgagtgtagtccctgttctctcctctgttttccaacacaccaacgagtggtcatggcaaacaattgtgatgggagtttgcttcttgctcttcttgctctcgacacgtcacctcagcatgaagaagccgaagctgttttgggtctcagccggagcaccacttctttccgttatcgtctctacacttcttgtctttgttttcagagccgagcgtcacggaatcagcgtcatcgggaaattaccagaaggtttgaatccaccgtcttggaacatgcttcagtttcacggtagtcatctcgcactcgtcgccaaaaccggactcgtcaccggaatcgtctccctcacggaaggaatcgcagtgggaagaacatttgcagcgctaaagaactaccacgtagatggaaacaaagagatgatcgccattggtctgatgaacgtagtaggctctgccacatcttgctacgtcacaaccggagcattctctagatcagcggtcaacaacaacgcgggagctaaaaccgcagtttcaaacattgttatgtcggtcactgttatggttacgcttctcttcctaatgccgcttttcgaatacactcccaatgtggtcctcggtgccatcattgtgaccgcggtcattggtctcatcgaccttcccgcggcctgtcacatatggaagatcgataaatttgatttcttggtgatgctttgcgcgttctttggtgtcattttcctatccgttcaaaacggtctagccattgcggtggggctatcgttgttcaagatattgatgcaagtaacaaggccgaaaatggttataatgggtaatattcctggaacggatatataccgagatcttcatcattacaaagaagcacaaaggatcccgggatttcttgttttaagcatcgaatctcctgtcaatttcgccaattctaactacctcactgaaagaacatctcgttggattgaagaatgcgaagaagaggaagctcaagagaagcattctagcctacagttcttgattcttgaaatgtcagccgtgagcggtgtagacacaaacggagtgtccttttttaaggaacttaagaaaacaaccgccaagaaggacatcgagcttgtgtttgtgaaccctctaagcgaagtggtggagaagcttcaaagagctgacgaacaaaaagagttcatgaggcccgagtttctcttcttaaccgtcgctgaggccgttgcgtcgctctctcttaaagggccatctctcagtaacgtttaa

SEQ ID NO: 529 - skipped

SEQ ID NO: 530 - DNA, 333 bp, Arabidopsis thaliana
atgagctcgtcgccgttatcttcatctctctttcatcctctgtcgaccttgtcgactcattgccatggtcggagacagaacctctgtttcaatcggaagcaacaacctttcgttgtcagagccgcaaaacttcctgaaggggtgatagtgccaaaagcacaacccaaatctcaacctgcgtttctgggattcacacaaacagctgagatatggaactcacgagcttgcatgattggtctcatcggtactttcatcgtcgaactgattctgaacaagggaatacttgaactgatcggtgtagagattgggaaaggactcgatcttcctctataa

SEQ ID NO: 531 - DNA, 474 bp, Arabidopsis thaliana
atgggtcttccaacagatttcaaagagcttcagattccaggttacgtactaaaaacactttacgtcatcggtttctttagagacatggtcgatgctctttgtccttacatcggtctaccaagttttcttgaccacaacgagacctctcgatccgacccgacccgactcgctctctccacgtcagcaactcttgccaacgagttaatcccggtggttcgtttctccgatcttttaaccgatccggaagattgctgcacggtttgcttatccgattttgtatccgacgataagattagacagctgccgaagtgtggacacgtgtttcatcatcgttgtttagaccgttggatcgttgactgtaataagataacgtgcccgatttgtcggaaccggttcttaccggaggaaaagtccacgccgtttgattggggtacttcagattggtttagagatgaagtggagagtaccaactaa

SEQ ID NO: 532 - DNA, 1635 bp, Arabidopsis thaliana
atgggcaattcatgtcgtggttcttttaaggacaaaatctacgagggcaatcatagtaggcccgaggagaattccaaatccaccaccactactgtttcctctgttcattctcctactacagaccaagatttctccaaacagaacaccaatccagctcttgtgattcctgttaaagaacccattatgcggcgtaacgttgacaatcaatcttactatgttcttggtcacaagactcctaacattcgtgatctttacacgttgagtcgtaagttaggacaaggacaattcgggacaacgtatttgtgtactgatattgccacaggtgttgactatgcttgtaagtctatatccaagaggaaattgatatctaaagaagatgttgaggatgttaggagggagattcagattatgcatcatttagctggtcacaagaatattgttactattaaaggagcttatgaggatcctttgtatgttcacattgtgatggagctttgtgctggtggtgagttgtttgataggattattcatagaggtcattacagcgagaggaaagctgctgagttgaccaagatcattgtcggtgttgttgaggcgtgtcattctcttggtgttatgcatagagatttaaagcctgagaatttcttgttggttaataaggatgatgatttctctcttaaggccattgattttggtctctctgttttcttcaaaccaggccaaatattcaaggatgttgttggaagtccatactatgttgctcctgaggttcttctaaaacattatggtccagaagctgatgtgtggactgctggtgttatactctatatcttactaagtggtgtcccgcctttctgggcagaaacacagcaaggaatatttgatgctgtgttgaagggatatattgactttgatacagacccgtggcctgtcatatccgacagtgctaaagatctgatccggaagatgttatgctctagtccttctgaacgtttgactgctcatgaagtcttgcgtcatccatggatctgtgagaatggagttgcaccggatagagcacttgacccggctgttttgtctcgtctaaaacagttttctgcaatgaataaattaaagaagatggctttaaaggtgatagctgagagcctctcagaagaagagattgcgggtttaagagcaatgtttgaggcaatggatactgataacagcggtgcaatcacttttgatgaactcaaagctggcttgagaagatatggatcaaccttgaaagacaccgagatccgagatcttatggaagcggctgatgtggacaacagcggtacaatagattacagcgagtttattgcagcgacgatccatctgaataaactagagagagaagagcatcttgtctctgcatttcagtactttgacaaagatggaagtggttacatcaccattgatgagctgcaacaatcttgcattgaacatgggatgaccgatgtttttcttgaagacataatcaaagaagtagatcaagacaacgatggacggattgattacgaagaatttgttgcgatgatgcaaaagggaaatgctggtgtagggagaagaacaatgaaaaatagtctaaacatcagcatgagagatgtgtag

SEQ ID NO: 533 - DNA, 1638 bp, Arabidopsis thaliana
atgggtaactgtaacgcctgtgtaaggccagactcaaaagaatcaaaaccatcttcaaagccgaaaaaacccaatcgagatcggaaattaaacccattcgccggagatttcaccagatccccagctccaatacgtgttctcaaagatgtaatccctatgagcaatcaaactcagatcagcgacaaatacatcttaggtcgtgaattaggtcgaggcgaattcggaatcacttacctctgtactgatcgtgaaacccacgaagctttagcttgcaaatcgatttcaaagcgaaagcttcgaacagctgtcgatatcgaagacgttcgtcgtgaggtagcgattatgtctactttacctgagcatccaaacgtagttaagcttaaggctagttatgaggataacgagaacgtgcatctggttatggagctttgtgaaggaggtgagctttttgatcggattgttgctagaggacattacacggagcgtgctgctgcagctgttgcgagaacgattgctgaggttgtgatgatgtgtcactctaatggagttatgcatcgagatttgaaacctgagaatttcttgtttgctaataaaaaggagaattctccactaaaggctattgattttggcttgtctgtgttcttcaaacctggagataagtttacagagattgtaggaagtccgtattatatggctccagaagtgttgaagagagattatggaccaggggttgatgtgtggagtgccggagttattatctatatcttgctctgtggtgttcctccgttttgggctgagactgaacaaggtgttgctcttgcgatcttgcggggagttcttgattttaagagagacccttggcctcagatatcagagagtgccaagagccttgtgaagcagatgttggatcctgatccgactaagcggttaactgctcagcaagtgttagctcacccatggatacagaatgcaaagaaagctcccaatgttcctttaggagatatagtcagatctaggttgaagcagttctctatgatgaacagattcaaaaagaaagttcttcgtgtaattgcggagcacttgtctattcaagaggttgaagtgataaagaacatgttctcactgatggatgatgacaaggatggtaaaataacttacccggaactcaaagctgggcttcagaaggtcggttcacaacttggtgaaccagagatcaaaatgttgatggaagtggcggatgtcgatggaaatgggtttctggattatggagagtttgtagctgtgataattcacttgcagaagatagagaatgatgaacttttcaaactagcttttatgtttttcgacaaagatggaagtacatacattgaacttgatgagctacgggaagctttagcggatgagttaggcgagccagacgccagtgttctaagcgacatcatgcgtgaagttgacactgacaaggacggacgtataaactatgatgagtttgtgacgatgatgaaagctggaactgactggagaaaggcatcgagacaatattcaagagagaggttcaaaagcttaagcattaacttgatgaaagatgggtcattgcatctccatgacgctctcactggacaaactgttcctgtttaa

SEQ ID NO: 534 - skipped

SEQ ID NO: 535 - DNA, 810 bp, Arabidopsis thaliana
atgggaagatctccttgctgcgagaaagaacacatgaacaaaggtgcttggactaaagaagaagatgagagactagtctcttacatcaagtctcacggtgaaggttgttggcgatctcttcctagagccgctggtctccttcgctgcggtaaaagctgccgtcttcggtggattaactatctccgacctgatctcaaaagaggaaactttacacatgatgaagatgaacttatcatcaagcttcatagcctcctaggcaacaagtggtctttgattgcggcgagattacctggaagaacagataacgagatcaagaactactggaacacacatataaagaggaagcttttgagcaaagggattgatccagccactcatagagggatcaacgaggcaaaaatttctgatttgaagaaaacaaaggaccaaattgtaaaagatgtttcttttgtgacaaagtttgaggaaacagacaagtctggggaccagaagcaaaataagtatattcgaaatgggttagtttgcaaagaagagagagttgttgttgaagaaaaaataggcccagatttgaatcttgagcttaggatcagtccaccatggcaaaaccagagagaaatatctacttgcactgcgtcccgtttttacatggaaaacgacatggagtgtagtagtgaaactgtgaaatgtcaaacagagaatagtagcagcattagctattcttctattgatattagtagtagtaacgttggttatgacttcttgggtttgaagacaagaattttggattttcgaagcttggaaatgaaataa

SEQ ID NO: 536 - DNA, 1299 bp, Arabidopsis thaliana
atggcgatcaaagacctgacggcgacgaccggtgattcatctcttcctttaataaaatctccgccgtctgaaacaaccggcggtgacagaacctctgctcttcaaacgctcggtaacattatcgtctccatcgtcggtacaggcgtccttggtcttccttacgcattccgcatcgccggttggttagccggatctctcggtgtcattatcgtcggattcgccacctattactgcatgctcctcctcattcagtgcagagataagctagaatcggaagaaggagaagaagaatcgaaaacttatggtgatttaggtttcaaatgtatgggaacaaaaggtcgatacttaaccgaattcctcattttcactgctcaatgtggtggatcagtagcgtatttagtgttcataggtcgaaacttgtcatccatatttagttcgtatgggttaagtatggtttctttcatattgattctggttccaatcgaagttggattgtcgtggatcacttctttatcagctctctcgcctttcagtatctttgctgatatatgcaacatcatagcaatgtgttttgttgtcaaagaaaatgtggaaatggtgattgaaggagacttctcgtttagtgatagaactgctatttcgtctaccattggtggtttaccttttgctggaggagttgcggtgttctgttttgagggttttgcaatgacgttggctttggagagttctatgagggaaagagaagctttccctaaattgttagctaaagtgcttgccgggattacgtttgtctatgtgttgttcgggttttgtggttatatggcttatggtgatcaaacaaaggatatcatcactcttaacctcccaaataattggtctgccattgctgttcagattgggttatgtgtgggattgacgtttacatttccgatcatggtacatccgcttaacgagatcatagagcagaaactgaagaggatagactggcttcaaaagcatcataatgggtacagcaacgaaacaggttcagtctcaaaatttgcaatctttacaacgaggacacttttggtggtaggacttgcagcaatcgcgagtttagtcccagggtttggtacatttgcatctcttgttggaagtactttgtgcgcactcatctcctttgtgttgccggcttcttatcacctcacgctgctcggtccatcactaaatgtatggaacaaatccatcgacgtattcattgtgatttgcgggttgatctttgctgtttatggtacgtacaacacaatcgtcggagtgtga

SEQ ID NO: 537 - DNA, 1377 bp, Arabidopsis thaliana
atggccaacaacaattccaactctcccaccggtccacactttctattcgtaacatttccagcccaaggtcacatcaacccatctctcgagctagccaaacgcctcgccggaacaatctctggtgctcgagtcaccttcgccgcctcaatctctgcctacaaccgccgcatgttctctacagaaaacgtccccgaaaccctaatcttcgctacctactccgatggccacgacgacggtttcaaatcctctgcttactccgacaaatctcgtcaagacgccactggaaacttcatgtctgagatgagacgacgtggcaaagagacactaaccgaactaatcgaagataaccggaaacaaaacaggccttttacttgcgtggtttacacgattctcctcacttgggtcgctgagctagcgctcttctccattttttaccattacttcaatggctacgaagatgcaatctcagagatggctaataccccctctagttctattaaattaccttctctgccactgcttactgtccgtgatattccttctttcattgtctcttccaatgtctacgcgtttcttctacccgcgtttcgagaacagattgattcactgaaggaagaaataaaccctaagatcctcatcaacactttccaagagcttgagccagaagccatgagctcggttccagataatttcaagattgtccctgtcggtccgttactaacgttgagaacggatttttcgagtcgcggtgaatacatagagtggttggatactaaagcggattcgtctgtgctttatgtttcgttcgggacgcttgccgtgttgagcaagaaacagcttgtggagctttgtaaagcgttgatacaaagtcggagaccattcttgtgggtgattacggataagtcgtacagaaataaagaagatgagcaagagaaggaagaagattgcataagtagtttcagagaagagctcgatgagataggaatggtggtttcatggtgtgatcagtttagggttttgaatcatagatcgataggttgtttcgtgacgcattgcgggtggaactctacgctggagagcttggtttcaggagttccggtggtggcgtttccgcaatggaatgatcagatgatgaacgcgaagcttttagaagattgttggaaaacaggtgtaagagtgatggagaagaaggaagaagaaggagttgtggtggtggatagtgaggagatacggcggtgcattgaggaagttatggaagacaaggcggaggagtttagaggaaatgccacgaggtggaaggatttagcggcggaggctgtgagagaaggaggctcttcctttaatcatctcaaagcttttgtcgatgagcacatgtga

SEQ ID NO: 538 - skipped

SEQ ID NO: 539 - DNA, 620 bp, Arabidopsis thaliana
atggcggttggtgaggtcatgaggatggagattcccgccggtggagatttgactgttactactccggagttgcatgttcttgccgtcgatgatagtattgtggatcgtaaagtcatcgagaggttgcttagaatctcttcttgtaaagtgacgactgtagagagtggaactagggctttgcagtatcttggcttagatggaggcaaaggggcttctaatcttaaggatttgaaggtgaatttgatagtgacggattactcaatgccaggactttcaggatatgatctccttaaaaagattaaggaatcttcagcattcagagaagtaccagtagtgattatgtcatctgagaacatcttacctcgtatacaagaatgtctcaaagaaggagcagaggaattcttgttgaaaccggtgaagctagcagatgtaaagcgaatcaaacaacttataatgaggaatgaagctgaggaatgcaaaatcttaagccattctaacaagagaaagcttcaagaagacagtgatacatcatcatcaagtcatgatgatacttctatcaaggactcttcatgttcaaaacgaatgaaatcagaatctgaaaaccttttttctctactttg

SEQ ID NO: 540 - DNA, 2058 bp, Arabidopsis thaliana
atgtcctacgcatctctcagcgtcaaggacctgaccagccttgtttcaagatccggaaccggttcgtcttcttcgctcaagcctccgggtcagacccgccccgtcaaggtcatcccgcttcagcatcctgacacctccaatgaagctcgtcctccttcgattcctttcgacgatatcttctccggatggacggcgaagatcaagcgcatgaggctcgtcgattggattgatactctctttccttgtttccgatggattcgaacttaccgatggagcgagtattttaagctcgatctcatggctggtatcaccgtcggtataatgcttgttccccaggcaatgtcgtatgcgaaactagctggccttccaccaatttacggtctatactcttcatttgtgccggtatttgtctatgccatatttggctcatcccgtcagcttgcaattggacctgtagcattggtttctcttctcgtctctaatgctttgggtggaatcgctgatacgaacgaggaattacatattgaattggccattttgttggcgcttttagttggaatcttggagtgcatcatggggctcttaaggcttggatggcttattcgtttcattagtcactcagtcatatctggatttacaagtgcttcggccattgtgattgggttatctcaaataaaatatttcctggggtatagcattgcccggagcagcaagattgtgccaatagtagagagcataatagctggagctgataagtttcagtggccacctttcgtgatgggatctcttattctggtgattcttcaagtgatgaaacatgtgggaaaagccaaaaaggaacttcagttcttacgagcagcagcgccactcaccgggattgtgctcggtacaaccattgcaaaagtgtttcatccgccttccatctctctggtgggagaaatacctcagggccttccaacattttctttcccaagaagttttgatcatgcaaaaacgttgcttccaacatcagctctcattactggtgttgccatcttggaatctgtgggaattgccaaagcgcttgcggcaaaaaacagatatgagttggattcaaattcagagttgtttggtcttggtgttgcaaatatattggggtcattattttctgcatacccagctacaggatccttttctaggtcagctgtgaataatgaaagtgaagctaagactggcctatcagggcttataacaggaatcatcattggatgttctctactgttcttgacaccgatgtttaaatacataccacagtgtgctttggcagcaatagtgatatctgccgttagtggcttggtggactatgacgaagctattttcctctggcgtgtggacaagagggatttttcgctttggaccatcactagcaccataacattgttcttcggaatagagatcggtgtccttgttggtgttggtttttcactagcattcgttatccacgagtctgcaaaccctcacattgctgtcttggggcggcttccaggcaccactgtgtacagaaacataaagcagtatccagaggcttacacatacaacgggattgtgatagttcgaatcgattctcctatttactttgccaacataagttacatcaaggacagactacgagaatatgaagtagctgttgacaaatacacaaaccggggactggaggtggatagaataaattttgtaatcctggaaatgtctcctgttacacacatagattcgagcgcagtggaagccttgaaagaactgtatcaagagtataaaacaagggatattcagctagcgatatcaaacccgaacaaagatgttcacttgacaatagcaagatcaggaatggtggagctagttggcaaggaatggttctttgtgagagtacacgacgccgtacaggtgtgtctacaatacgtacagagctctaacttggaggacaagcatttaagttttacgagacgatatggtgggagcaacaacaattcatcctcctccaacgcgctgttgaaggagccattgttatcagtggagaaataa

SEQ ID NO: 541 - DNA, 2379 bp, Arabidopsis thaliana
atggatctcaatctcggaaaatgctgtggttctcgttcttctaagaaggaatcatggaggtcggttttgcttcttgcttaccagagtcttggtgttgtctatggagacttgagtatctctccgctttatgtctttaagagcacttttgctgaggacattcaacattcagagaccaatgaagagatctacggtgttatgtcttttgttttctggactttaactttggttcctttgcttaagtatgtcttcattgtcctccgagctgatgataacggagaaggtggaacttttgctttgtactcattgatctgccgtcatgtcaaagttagcctcctcccaaaccgacaagtctctgatgaggcactgtccacttataagctggagcatccaccggagaagaaccatgactcgtgtgtgaaaagatatctggagaaacacaagtggttacacactgctttgctgcttcttgttcttcttgggacttgtatggttattggagatggacttctcactccagctatctccgttttctctgctgtgtcaggtcttgagctgaatatgtctaaagaacatcaccaattaattcctattacctgcttcatactagtctgccttttctcgcttcagcattttgggacacatcgtgttgggtttgttttcgcgcctattgtcctcacttggctgctctgtataagtggtattggcttgtacaatataatacagtggaatcctcatatatacaaagctctttctcctacatacatgttcatgttcttgagaaagacgagagtaagcggatggatgtctctaggcgggatcttgttgtgcataactggtgctgaggccatgtttgctgatcttggtcacttcaattacgcagcaattcagattgcgtttaccttcctggtttatccggctcttatattggcatacatggggcaagctgcttacttatcccggcatcaccattctgctcatgcaattgggttttacgtctctgtaccaaaatgtttgcactggcctgtgcttgctgtagcaattcttgcttctgttgtgggaagccaagcgatcatcagtgggactttctcaatcataaaccagagccagtctctcggatgcttccctcgagtcaaagtcattcacacgtccgataagatgcatggtcagatttacataccggagattaactggatgctcatgattctctgcatcgctgttactatcgggtttagagatgtcaaacacctgggaaatgcatcaggtttggctgtaatggcggttatgctagtgacaacatgtcttacctcattagtcattgttctttgctggcacaagcctccaattctagcgctagcgttccttctctttttcggttcaatagaacttctctacttctcggcctcactcaccaaatttcgtgaaggcgcttggcttccgatcctcttatctctaatattcatgatcatcatgttcgtttggcactacaccaccattaagaaatacgagtttgatctccagaataaagtctcgcttgaatggcttcttgcattgggtccaagcctcggaatttctcgagttccaggtatcggtttagtcttcacggatttaacctctggaatccccgccaatttctcccggttcgtcaccaacctccctgccttccaccgtgttcttgtctttgtctgcgtgaaatctgtccctgtcccgttcgttccacctgctgagagatacctcgtgggtcgtgttggtcccgttgaccaccgctcttacagatgcatcgttcggtatggataccgtgacgtccatcaagacgtggactcattcgaaacagagctcgtaagcaagctggcggatttcatccgttacgattggcacaaaagaacacaacaagaagacgacaacgctcgttctgtccagtccaacgaatcctcaagcgagtcaagactagccgtgatcggaacagtagcttacgagatcgaagacaatctccaaccagagagtgtctccatcggattctccacagtcgaaagcatggaagacgtcatacaaatggccgaaccagccccaaccgccaccataagacgggtgaggtttgcggttgaggaaaacagttacgaggacgaaggatcaacatcgtcagcagaagcagatgcggaactgagaagcgagctgagggatttgctggcagcgcaagaagcaggaactgcgtttatattgggacattcacatgtgaaagcgaaacaaggatcatcggtgatgaagagattagcagttaatttcggttataatttcttgagaaggaactgtagaggacctgacgtggctcttaaggttccacctgtttctcttttagaagtcggcatggtttatgttgtttga

SEQ ID NO: 542 - DNA, 945 bp, Arabidopsis thaliana
atggcggatcaagctatgacggatcaagatcaaggagctgttactctctacagcggcacagccattaccgacgcgaagaaaaaccatccgttctctgttaaggtcggattagctcaggtacttcgtggcggcgccattgttgaagtttcctcggttaaccaagctaagctcgctgaatccgccggcgcatgttctgtaatcgtctcagatccggttcgatctcgcggcggtgttcgtcgtatgccggatccggttctcatcaaagaggtaaaacgagctgtgtctgtacctgtgatggcacgagctcgcgttggtcattttgttgaggctcagatcttggaatctcttgcggttgattacattgacgagagcgagattatctctgttgcggatgatgatcatttcatcaacaaacataatttccgatctccgttcatttgtggttgccgtgatacaggagaagctttgaggagaatcagagaaggtgctgctatgattaggatccaaggagatttaaccgcaacaggtaacattgcagagactgtgaagaacgttaggtcattgatgggtgaagttagagtcttgaacaacatggatgatgatgaggtgttcacgtttgctaagaagatttcagcaccgtatgatcttgtggctcagactaagcagatgggtagggttccggttgttcagtttgcatcaggtgggatcacgactcctgctgatgcagctttgatgatgcagctaggttgtgatggggtttttgtgggttctgaggtttttgatggtcctgatccgtttaagaaacttaggagcattgttcaagctgttcaacattacaatgatcctcatgtgttggctgagatgagttctggattggagaatgcaatggagagcttaaatgttcgtggtgacaggattcaagactttggccaaggcagtgtttga

SEQ ID NO: 543 - DNA, 855 bp, Arabidopsis thaliana
atggcgatcacttacttgcttcctctgtttctttctcttatcatcacctcctctgtttcagctaatttccaaagagacgttgagatcacttggggtgatggtcgtggacagatcaagaacaatggagagcttctcactttatctctagataaatcctctggttctggattccaatccaaaaacgagtacttgtttggtaaagtctccatgcaaatgaagcttgtccctggaaactccgcaggaacagtcacaacactttacttgaaatcacctggaacaacatgggacgagatagatttcgagtttttagggaattcaagtggagaaccttacacacttcacacaaatgtctacacacaaggcaaaggagacaaagaacaacaattcaaactctggtttgatccaacagctaatttccacacttacactattctctggaacccacaaagaatcattttcaccgtcgatggaactccgatcagagaattcaagaacatggagtctctaggcactctgtttcccaagaacaaaccaatgagaatgtactcgagtctttggaacgctgatgattgggcaacgagaggtggtttggtcaaaaccgattggtctaaagctcctttcactgcttcttaccgtggctttcaacaagaagcttgtgtttggtcaaacggcaagtcttcttgtcctaatgcctcgaaacaggggactactactggctcgtggttgtcacaagagcttgactcaacagctcaacaaaggatgagatgggtgcagaggaactacatgatctataattattgtacggatgcgaagaggttccctcaaggtcttcctaaagagtgcttagctgcatag

SEQ ID NO: 544 - DNA, 2487 bp, Arabidopsis thaliana
atggttccatcggagatagaatctctaggagacgaatctgatcgtcgtttcgccaatctgagaggtctgcgatggcgcgtgaatctcggtgttcttccgtttcagtcttcttccatcgatgatcttcgtaaagctacagctgaatctcgcagaagatatgctgctttaagaagacggctcttgattgatccacatttgtctaaagatgttcgaaattcccctgatctctctatcgacaatcccttatcacaaaaccctgatagtacatggggtcggttcttccgtaacgcagagctagagaaaacattggatcaagacttgtctaggttatatccagagcattggagttactttcaagctcctggatgtcaaggcatgttaaggcgtattctactcttgtggtgccttaaacatcccgagtacggttatcgacaagggatgcatgagcttttggcgccactgctttatgtacttcatgttgatgttgatcgtctctctgaagtgcgtaaaagttatgaagatcatttcatagacagattcgatggtttatcttttgaagaaagagatattacttacaactttgaattcaaaaagtttctggaggatttcacggatgatgagattggtggtattcaggggaattcaaagaaaataaagagtctagatgagctcgatcccgaaatccagtctattgtgaggttaagtgatgcttatggagctgaaggtgaactcgggattgtcttgtccgagaaattcatggagcatgatgcttactgcatgtttgatgctctaatgaatggagttcatggttgtgttgcaatggctggattttttgcttactctccagctagcggatcccacacgggtttacctcccgttcttgaagcttccactgcgttttaccatcttttatcattcgttgattcgtctctccatagtcatttagtagaactcggagttgaacctcagtactttgggcttcgctggttacgagttttgtttggaagagagtttttgcttcaggatttattgatagtgtgggatgagatattctcagcagataacacgacgagaacagatgcggataacaatacaaaccagagctacaagatctttgattctcctcggggagctctaatctcgggaatggcagtttcgatgatattatgtttaagatcatcattgcttgctactgaaaacgcagcttcttgtctccagagactattgaatttcccagagaagattgatgtgaggaagataatagagaaagctaagtcattacaaactttggctttggatgatgatgtacgatcatcagctctatcgataaatgatggctttgatcagagcatcagtccagcagtaccggcgagaactaacagttttccttccggatccacatctcctaaatctccattgataattaccccacaaagttattgggaggatcaatggagagttctacacaaagccgccgaggaagagaaaaagagtccttctccaatacagaagaaaaagccttggttcagggtgaaaagacttttcagagcagagtctgagccaactcatagcgccaagtcaccaaatgggaaaagtgaagtcaagatatcatcagttgcgcgaaacttgcttgaagattttaatcggcagcttgtttctgaacctgtggaagctaatccaatagatgttgtgaacaatgaagatagctcaattcgagaaaccgaggatataaacacggattttgaaactgctgctgaagagagtatagtaatggaggagaattcttctgatcttttctcagatccaaacagtcctctcagagactcaaactacattgagaatgattcggatagcagtaacgagtcaaatctatttcctgatgaaacagttaaagatcgagaaacaagcgtagtagattcgcctctttccatttcttctcaaccgagcatggagtttatagtatctctgtctaaagatcaagaaacaagcgtagtagattctcctcttcccgtttcttctcaaccgagcatcgagtttccagtaactcagtctaatgatgaagacaacgctgcagataaatctgtggccaatatcaaggagcgtagtaaggttttaccaggaaaattccagtggttttggaagtttggacgcaatgtcactgctgaggagacgagatgtaatggagtcgaaagtagtaagagcgatttagtttgctcttctgagtcacattctcttccacaggcttcatcttcgggcagcaaaggagacacagaccagaatgtgatgaatactctgaaaaaccttggcaattcgatgctcgaacacattcaggtgatagagtcagttttccagcaagaacgaggtcaggttcaggcaggactaattgagaatttatctaagaacaatttggtcgaaaagggacaagtcacagccatgactgctctgaaggagcttcgaaaaattagtaatcttttgttggaaatgtga

SEQ ID NO: 545 - DNA, 560 bp, Arabidopsis thaliana
atggcaggaggaggaacagaagcgtttcctgatcttggagagcattgccaagaccctgattgcaaattactcgattttctcccttttacttgcgacggctgcaaattggtgttttgtttggagcatagatcatacaagtcacataactgtccgaaatccgatcatgggagcagaacggtttccatctgtgaaacatgttcaatagcgattgaaacaactggttttgatgaaaaaggaatcaaatctttgcttgagaaacacgaaagatccggagattgtgatccaaacaagaaaaagaaaccaacgtgtcctgtaaaacgttgcaaagagattctgacttttgcgaataaccttacttgcaaatattgtggagtcaagttctgtttgaaacaccggtttccgacagatcatgtctgtaacaagaagatcattaataccgcgggaacaagctcgaggtggaacgagaggtttatggaagctttgagtttaagaaaccagaaagggtgtggaagagggagctctgtttcatcaaaatcttcaccatcagttagatcgtttta

SEQ ID NO: 546 - DNA, 1578 bp, Arabidopsis thaliana
atggctctttccaacgcctcctctctctccaccagatctatctacggcggtgatctttctcaccgtccaagcaaccgtcaatcatccttcacatttcatcccgccgtcaacaccaagcctaaatccgttaacctcgtcacggctgtacacgcggctgagccagctagaaacgctgtttcagtcaaagaatccgttgcgtcttcttcgtctggtgcattgaaatggactccagagagctggaaactgaagaaggctctgcaacttcctgattatcctaacgccaatgagcttgagtctgtgcttaaaacgatagaggcttttcctccgattgtgttcgccggagaagctaggaatcttgaagagagattggctgatgctgctgttggtaaagcttttcttctccaaggaggtgattgtgctgagagtttcaaggagttcaatgctactaatatcagagacaccttcagggttctgcttcagatgagtattgttcttacattcggtggccaggttccggtcattaaggttgggaggatggctggtcaatttgcaaagcctagatctgatgcatttgaggagaaggatggagtgaaattaccaagctacaagggagataacatcaatggtgatacttttgatgagaaatccaggattcctgatcctaataggatgattcgagcttacactcaatctgcagctactttgaatcttcttagagcctttgccactggaggttacgctgctattcaaagagttactcaatggaaccttgattttgttgaacaaagtgagcaagctgacaggtaccaggaattagctaatagggttgatgaggccttggggttcatgtctgcatgtggacttggcacggatcatccacttatgactacaactgatttctacacatcccatgagtgtttgcttctgccttatgaacagtcccttacaaggttggattcaacttctggtctctactatgattgttctgcacacatggtctggtgcggagagcgtaccagacaattggatggcgctcatgtcgagtttctcagggggattgctaatcctctgggcattaaggtgagcaacaaaatggatccctttgagctggttaagctagtagaaatcctgaatcctaataacaagcctggaagaatcactgtaattgtgagaatgggtgccgagaacatgagagttaagcttccccacctgatcagagcagtccgcagatcaggccagattgtgacatgggtctgcgatccaatgcatggaaacaccatcaaagcaccttgcggtcttaaaacacgtgcctttgactcaatactggctgaagtccgagcattccttgatgtgcacgagcaagaaggaagccacgcgggcggtatccatctcgagatgacaggtcagaacgtgacagaatgcattggagggtcccgcactgtgacctacgatgacctcagttctcgctaccacacacactgtgacccaaggctgaacgcgtcacagtctcttgaacttgccttcattgttgcagaacggctcaggaagagaagaacgggtagccagcgtgtgtcttga

SEQ ID NO: 547 - skipped

SEQ ID NO: 548 - DNA, 924 bp, Arabidopsis thaliana
atgggacaaaaactcggcgttgactctagacaaaaaatcagacaagttctcggttcctcatccaaggtgcaaaaacacgacgtggaatctatcggtggaggcgggggagagatcgtacccggtcattcgccgtttgatgacttgccggaggattgcatctccaacataatctcttttacaagtccacgggacgtgtgtgtctccgcttcagtttcaaaatccttcgcacatgcggtccagtgtgatagtatatgggagaagtttcttccgtcggagtatgaatccctgattcctccgtggcgagttttctcatcgaagaaggacctctatttcactctttgctacgatcctgttctagttgaggatggcaaaaagagcttttggttagagacggcaagtgggaaaaagtgtgtactgttagctgcaaaggaactgtggatcacaggagggaataatcctgagtattggcaatggattgaactttgtgaatctagttttgaaaaggtaccagagcttctcaataatcgttctttccagatgggtggtagtatgagtacccaaatcttatccctaggaactcattattcagtttacattgtgtacaagataaaagatgaacgtcatggcttacgagatttgcctatacaagttggtgtaggatttaaaggccaagaaatgcctaaacaattcatatgctttgacgagtctaccgataaaaccaaagagtggccaaagaagaagctaatgaaatcaaagaagaggggagatgggtggatggaggcagagattggggatttcttcaatgatggaggattaatgggttttgatgaagttgaagtgagtattgtagacgttacttcacctaatttgaagtgtggtgtgatgattgaaggaattgaattccggccaaaggattgtcagtaa

SEQ ID NO: 549 - DNA, 1413 bp, Arabidopsis thaliana
atggatttgcagagaggctttgtgttcttgtctttggttctatcttttatgataatcgaaacgacggcgtatcgagagagacagctgctgctgctgcaaccaccgcaagaaacggcgatagataccgcaaacgcggtggtgacggttcaagatcgaggtttgaagacgcggcgaccggagcataagaacgcatacgcaacgatgatgtacatggggacgccaagagactacgagttctacgttgcgacacgtgttttgatcagatcgttgagaagtcttcacgtggaagctgatctcgtcgtcatcgcttctctcgacgttcctctccgatgggttcaaaccttggaagaggaagatggagctaaagtggtgagagttgaaaatgtggataatccatacaggagacagaccaacttcaacagtagattcaagcttactctaaacaagctctacgcttgggctttgtctgattacgaccgtgtggtcatgctagatgccgataacctctttcttaagaaagccgacgagttgttccagtgtgggcgcttctgtgcggtcttcattaacccttgtatcttccacactggtctcttcgtgttgcagccatcagtggaagtgttcaaggacatgctccatgagctacaagttggaagaaagaatcctgatggagctgatcaaggttttcttgtcagttacttctctgatcttcttgaccaacctctctttagtcctccgagtaacggatctgtacttaatggtcacttgagacttcccttaggctaccaaatggacgcttcttatttctccgaaatgcctttggttataatccaagcaatgttttaccttggaatcatagtggttacacgactagctcgtcctaacataaccaagctatgttatcgccgctctgaccgcaacttaacaacgatccaagctggttttaagttgatcgcgcttctctctgtagttgcagcctacatcttcccattcttcaccatccctcacactatccacccactcatcggctggtcgctctacttgatggcttcttttgctctctcttccatttcaatcaacactctcctcctcccaacgctccctgttctcactccatggctaggaattctcggcactctccttgtcatggccttcccttggtaccctgatggagtggtcagagccttgtcagttttcgcatacgcattttgttgcgcaccctttgtgtgggtttcattccgcaaaatcacatcgcacctccaggttttgattgagaaagaggtgttgttcccgcgattgggagactcaggggtcacttcaggcttcagcaaattctccgaaacacacttgtatgcacctactcatcacagaaagatattgaacaaaataatgaatcattcactagaaaaactgtag

SEQ ID NO: 550 - DNA, 2994 bp, Arabidopsis thaliana
atggagaatcgcgaagatcttaactcaattcttccgtaccttccacttgtaattcgttcgtcgtcgctgtattggccgccgcgtgtggtggaggcgttaaaggcaatgtctgaaggaccatctcacagccaagttgactcaggagaggttctacggcaagctattttcgatatgagacgatccttatctttctctactctcgagccatctgcttctaatggctacgcatttctctttgacgaattgattgatgagaaagaatcaaagagatggttcgatgagattatcccagcattggcgagcttacttctacagtttccatctctgttagaagtgcatttccaaaatgctgataatattgttagtggaatcaaaaccggtcttcgtttgttaaattcccaacaagctggcattgttttcctcagccaggagttgattggagctcttcttgcatgctctttcttttgtttgtttccggatgataatagaggtgcaaaacaccttccagtcatcaactttgatcatttaagcctttatataagttatagtcaaagtcaagaaagcaagataagatgtattatgcattactttgaaaggttttgctcctgcgtgcctattggtattgtttcatttgaacgcaagattaccgctgctcctgatgctgatttctggagcaagtctgacgtttctctttatcaacctgacaatgctctcgaagtggactttgcaaacaagtatctcggaggtggttccctaagtagagggtgcgtgcaggaagagatacgcttcatgattaaccctgaattaatcgctggcatgcttttcttgcctcggatggatgacaatgaagctatagaaatagttggtgcggaaagattttcatgttacacagggtatgcatcttcgtttcggtttgctggtgagtacattgacaaaaaggcaatggatcctttcaaaaggcgaagaaccagaattgttgcaattgatgcattatgtacaccgaagatgagacactttaaagatatatgtcttttaagggaaattaataaggcactatgtggctttttaaattgtagcaaggcttgggagcaccagaatatattcatggatgaaggagataatgaaattcagcttgtccgaaacggcagagattctggtcttctgcgtacagaaactactgcgtcacaccgaactccactaaatgatgttgagatgaatagagaaaagcctgctaacaatcttatcagagatttttatgtggaaggagttgataacgaggatcatgaagatgatggtgtcgcgacagggaattggggatgtggtgtttttggaggagacccagagctaaaggctacgatacaatggcttgctgcttcccagactcgaagaccatttatatcatattacacctttggagtagaggcactccgaaacctagatcagctaccaccaacaaagctatccagccgccttgactctgcaaattctccttcattaacttgtttgatgcattctcatactgtatctctgcattttcccacatgggcaataaggatggaactgagggcagatcttaggtcaattcttcagtatttgcctcttgtggctcagtcttcatcactagtttggccaccttctgtcgaagaagagctccaaacaatatctagaggaccgagtgagtcaatggttaactcgggagaggctcttgccttgcatatcacgaatatgcggaaatctctctccttgaatgcatctgatctcgccccttatgcattacaagggtatggtcttttctttgacaagaaaatttccagagaagagtcggcaaacttttttggtgaggtggttcctgcattgtgcagattacttctccagttaccttccatgttagaaaaacactatcagaaggcagaccatgttcttgatggagttaagtccgggcttcgtctattaggccctcaagaagctggaattgtgttacttagccaggagttgattgcagctcttcttgcgtgttccttcttttgcttgttccctgaagttgacagaagcttaaagaatcttcaaggaatcaactttagtggattgttttcgtttccgtatatgcgtcactgcacgaagcaagaaaacaaaataaagtgccttatccattactttggaagaatatgtcgatggatgcccaccggctttgtttcatttgagaggaaaattcttccactggaataccatcctcactttgtttcttatcccaaggctgattcgtgggctaattctgtcaccccactttgctccattgagattcacacctcgggagctatagaagatcaaccttgtgaagctcttgaagtagattttgcagatgagtattttggaggccttactctgagttatgatactctacaggaagaaataaggttcgtgatcaacccggaacttatcgctggcatgatctttttgcctcgtatggatgcaaatgaagcaattgagattgttggtgttgaaagattttcaggttatacagggtatgggccttcgttccaatatgctggtgattacacagacaacaaggacttagacattttcaggaggcgaaaaacaagagtcatagctatagatgccatgcctgacccaggaatgggacagtacaaacttgatgccctcattcgagaggttaataaggcttttagcggatacatgcatcaatgtaaatataatatcgatgttaagcatgatcctgaggcatcatcttcgaccaagattaaatttgttttcgcaaagcagcatgttcctcttacatcagattctgcgagccaagttatagaaagctctcatagatggtgtatcgatcatgaagagaaaaagattggtgtagctacagggaactggggctgcggtgtgtttggaggtgatccagaactaaagatcatgcttcagtggcttgccatttcacaggcatgcttctctgttttcatcaacttatcttacaaaacataa

SEQ ID NO: 551 - DNA, 984 bp, Arabidopsis thaliana
atgtctaatgaaaccagagatctctacaactaccaatacccttcatcgttttcgttgcacgaaatgatgaatctgcctacttcaaatccatcttcttatggaaacctcccatcacaaaacggttttaatccatctacttattccttcaccgattgtctccaaagttctccagcagcgtatgaatctctacttcagaaaacttttggtctttctccctcttcctcagaggttttcaattcttcgatcgatcaagaaccgaaccgtgatgttactaatgacgtaatcaatggtggtgcatgcaacgagactgaaactagggtttctccttctaattcttcctctagtgaggctgatcaccccggtgaagattccggtaagagccggaggaaacgagagttagtcggtgaagaagatcaaatttccaaaaaagttgggaaaacgaaaaagactgaggtgaagaaacaaagagagccacgagtctcgtttatgactaaaagtgaagttgatcatcttgaagatggttatagatggagaaaatacggccaaaaggctgtaaaaaatagcccttatccaaggataatagccaatggaaacgaaaataggagttactatagatgtacaacacaaaagtgcaacgtgaagaaacgagtggagagatcgttccaagatccaacggttgtgattacaacttacgagggtcaacacaaccacccgattccgactaatcttcgaggaagttctgccgcggctgctatgttctccgcagacctcatgactccaagaagctttgcacatgatatgtttaggacggcagcttatactaacggcggttctgtggcggcggctttggattatggatatggacaaagtggttatggtagtgtgaattcaaaccctagttctcaccaagtgtatcatcaagggggtgagtatgagctcttgagggagatttttccttcaattttctttaagcaagagccttga

SEQ ID NO: 552 - DNA, 1143 bp, Arabidopsis thaliana
atgttgcgagctttagcacggcctctcgaacggtgtttgggaagcagagctagtggtgatggtttactctggcaatcggaattgagacctcacgctggcggtgattattcgatcgcggtggttcaagccaattccaggcttgaagatcagagtcaggttttcacatcttcttctgctacttacgtcggtgtatacgatggtcatggtggacctgaagcttctagattcgttaacagacatctctttccttatatgcacaaatttgcaagagaacatgggggattatctgtagatgttatcaaaaaggcattcaaagaaacagaagaagagttttgtggtatggttaaacgatcccttcccatgaaaccgcaaatggctactgtaggatcttgctgtcttgttggtgcaatctctaatgacacactgtatgttgctaatcttggggactcgagagccgttcttggaagcgttgtttcaggggttgatagtaataaaggtgccgtagctgaacggttatctactgatcataatgttgctgttgaagaagtgagaaaggaggttaaggcacttaaccctgatgactcacaaatcgtcttatacacacgtggagtttggcggattaaaggcattattcaggtatcgagatcaattggggatgtatacttgaaaaaaccggagtattacagggacccgattttccagcgacatggaaatcccattcctttgaggagacccgcgatgacagccgaaccctccattatagtaaggaagcttaagccacaggacttgtttctgatatttgcatcagatggtctctgggaacatcttagtgatgaaacagccgtagaaatcgtcctcaaacacccaagaactggtattgcccgaagacttgtaagagctgctctggaagaagcggcaaagaagagagaaatgagatatggagatataaagaaaatagccaaaggaattcgacgacatttccatgacgacataagcgttattgtagtttatctagatcaaaacaaaaccagttcatcgaatagtaaattggtgaagcaaggaggtatcaccgctccaccggatatctactcattacactctgatgaagcagagcaacgacggttactcaatgtgttatactga

SEQ ID NO: 553 - DNA, 2487 bp, Arabidopsis thaliana
atggtttcgttcttgaccctcacttccttctttttcatctgcttcttcatccatggctcttccgccgtcgacacaatctccggcgactttactctctccggcgaccagactattgtctcctccgacggaacttacgaaatgggtttctttaaaccaggttcttcttcaaacttctacataggtatgtggtataagcaactctctcaaaccatactatgggtagccaatcgagacaaagcagtttccgacaaaaactcatcagttttcaaaatctccaacggaaacttaatcctactcgacggtaattaccagactccggtttggtccaccggtctcaactccacttcctctgtttctgctcttgaagcggttttgcaagacgacggcaatcttgttctcagaaccggcggctctagcttatcagctaacgtattgtggcaaagctttgatcacccgggagacacgtggcttcccggagtgaagatccggttagataaacgaaccggaaagagccagcgactcacttcgtggaagagtctcgaagatccatcaccaggtttgttctctctcgagctagacgaatccacagcttacaaaattctctggaacggatctaatgagtactggtcaagtggtccttggaaccctcagagcaggatctttgattcggttcccgagatgagactcaattacatctacaacttcagctttttctctaacaccacagactcatacttcacgtactctatctataaccagttgaacgtgtcacgcttcgtcatggacgtgtctggacagatcaaacagttcacttggttagaaggaaacaaggcatggaacttgttctggtctcaacctcgacaacaatgtcaggtctataggtattgtggctcctttggaatttgcagtgacaagtctgagcctttttgccgttgcccacaagggtttaggcctatgtcgcagaaagactgggacttgaaggattactctgcaggctgcgttagaaagactgaactacaatgctctcgtggagacattaaccagttttttcgtcttccgaacatgaaactagctgataattcagaggtattgacaagaactagtcttagtatttgtgcctctgcttgccaaggagattgttcttgtaaggcttatgcatatgatgaaggctcgagcaaatgcttggtttggtctaaagatgtcttgaatctacagcaacttgaagatgaaaacagtgaggggaacatattttatcttagactcgctgcttctgacgttcctaatgttggtgcttcgggtaagagtaacaataaaggtttgatatttggggcggttctaggctcgttaggagtaatagtccttgttctgttggtggtaatcttgatcttaaggtacaggaggaggaagagaatgagaggagagaagggtgatggtacattgagtgcgtttagctatagagaattacagaatgcgacaaagaatttctcggataagttaggaggaggaggttttggttcagtgttcaaaggtgctttaccggattctagtgatatagcggtgaagaggcttgagggtattagccaaggggagaagcagtttaggacggaagtagtgacgataggaacgatccaacacgttaatctagtgaggcttcgcgggttttgctccgaaggaagcaagaaattgttggtttatgattacatgcctaatggttctttggattctcatcttttcttaaaccaagttgaagaaaagatcgtcctcgggtggaaactgcggttccaaatcgcgttagggacagctagaggattagcttatctacacgatgaatgtagagactgtatcattcactgcgatataaaacccgaaaacattttgttagattcacagttttgtcccaaagttgctgatttcggtttggccaagctcgtgggtcgagattttagtagggttttgacgacaatgagaggcacaagagggtatcttgcaccggaatggatatcgggagttgcgataacagcgaaagccgatgtttacagctacgggatgatgttatttgagcttgtttccgggaggagaaacacagagcaatcagagaacgagaaagtcagattctttccaagttgggccgcgaccatactcaccaaagatggagacattcgctcactggttgaccctagactagagggagatgcagtggacatagaggaggtcacgagagcttgtaaagtggcgtgttggtgcatacaagacgaagagagtcataggccagcgatgagtcaagttgttcagattcttgaaggtgtcttggaagtgaatccaccgccttttccaagatcaattcaagctttagtcgtttccgatgaagacgtggtcttctttactgagtcgtcatcttcgtcaagccataattcttcacagaatcacaagcattcttcttcttcttcttcttccaagaaaatgaccaacgataactcttctgcttag

SEQ ID NO: 554 - DNA, 1280 bp, Arabidopsis thaliana
atggcccgttgtaccaaccttgttaccgttttcctattatgggctcttttgatgttctcatggtgtaaagcttcaagaatcagccctaatgtatatgaccattcttataaaaggttcaaatccgatagcttaatcaagcgaagagaggacatcacgggattgagaagttttgtaagagcctctttgcggactccaaccaccgttagtgtttctgattttggagctaaaggagatggaaaaaccgatgacacgcaggcgttcgtgaatgcgtggaagaaagcatgttcttcaaatggagctgttaatctcctagttcctaaagggaatacttatctccttaagtctattcaattaactggtccatgcaattctattctcaccgttcagatattcggaacgttatccgcatctcaaaaacgatcggattacaaagatatcagcaaatggataatgtttgatggcgttaacaatctatcagtcgatggaggcgacactggggttgtggacggaaacggcgaaacgtggtggcaaaactcatgcaaacggaacaaagctaaggctcttactttttacaactcgaaaagtctgatagtgaagaatctgaaggtgagaaatgcacagcagatccagatttcgattgaaaaatgctccaacgttcaggtctctaatgtcgtggtaactgcgcctgcggatagtcctaacaccgatggtattcatatcactaacacccaaaacattcgagtctccgaatccatcattggaacaggcgatgattgcatatctattgaaagtggatcacaaaatgttcaaatcaatgatataacttgcggtcccggtcacggtatcagtattgggagccttggagatgacaattcaaaggcttttgtctcaggcgtgactgtggatggtgctaagctttccggtacagacaatggagtaagaatcaaaacttaccagggagggtcaggaactgctagcaatattatatttcaaaacattcagatggataatgttaagaatccgatcataatcgaccaagactactgcgacaagagcaaatgcactacagagaaatccgcggtccaagtgaagaacgtggtgtaccgggacataagtggcactagcgcatcggaaaacgcaataacgtttaactgcagcaagaactatccatgccaaggaattgtgcttgacagagtgaacattaaaggaggaaaagcaacttgcaccaatgctaatgtggttgataaaggagctgttctgcctcagtgcaactccactta

SEQ ID NO: 555 - skipped

SEQ ID NO: 556 - DNA, 1287 bp, Arabidopsis thaliana
atgacatctctccatacgttactcttctcttctcttcttttcttcatcgtctttccaaccttcacgttttcctccaccttattgtttcagagtttcaattgggagtcatggaagaaagaaggaggattctacaattctctccacaactccattgacgacatagccaacgctggaatcactcatctttggcttcctcctccttctcaatccgttgctcctgaaggttacttaccgggaaagctatacgatctaaacagctccaaatacggttcagaggcggaactgaaatcgttaatcaaagcgttgaatcaaaaaggaataaaagctttggctgatatagtgattaaccacagaacagctgagaggaaagacgataaatgtggatactgttatttcgaaggtgggacttccgatgatcgtcttgattgggatccttcctttgtctgccgcaatgaccctaaatttcccggtaccggaaacctcgacaccggaggagattttgatggagcgcccgacatcgaccaccttaaccctagagttcagaaagagttgtccgaatggatgaattggcttaaaactgaaatcggattccatggttggagatttgattatgttcgaggttatgcatcttccatcaccaaattatacgttcagaatacatcaccggattttgcggtgggtgagaaatgggacgatatgaagtacggaggagacgggaaactagactatgatcagaacgagcatcggtcgggtctcaaacagtggatcgaggaagcgggtggtggtgtgttgacagcttttgatttcaccaccaaagggatcttacagtctgctgtcaaaggtgagctttggagactaaaggactcgcagggaaaaccgcctggtatgataggaatcatgcccggaaacgctgtcacattcatagataaccatgatacattcagaacgtgggttttcccttctgataaagtcttgcttggatacgtttatatacttactcatccaggaactccttgcattgtaagtatcattttattttataatcattacatagaatggggactaaaagagagcatctcaaagctggtggctatcaggaacaaaaatgggattggtagcacaagctctgtaacgataaaagcggcagaggcggatctctacttggctatgattgatgataaagttatcatgaagattggaccaaagcaagatgtgggaacacttgttccttctaattttgctttagcttattcaggccttgactttgctgtctgggagaagaagtaa

SEQ ID NO: 557 - DNA, 1296 bp, Arabidopsis thaliana
atggcccgttgttgcagacatcttgctgttttcttatgcgttcttttgatgctctcgttgtgtaaagctttgagtagcaacgttgatgatggatatggtcatgaagatggaagttttgaatccgatagcttgctcaagctcaacaacgatgatgttcttagcttgataagctcagacgaaaccactttggaagcatcaaccgttagtgtttcaaacttcggagccaaaggagatggaaaaactgatgatactcaggccttcaagaaagcatggaagaaagcatgttcaacaaatggagttactactttcttggttcctaaaggaaagacttatctccttaagtctactcgatttagaggcccatgcaaatccttacgtaactttcagatcctaggcactttatcagcatctacgaaacgttcagattacaaagacaaaaaccattggcttatcttagaggacgttaacaatctatcaatcgacggtggctcgacgggaattattaatggcaacggaaaaacctggtggcagaactcatgcaaaatcgacaaatctaagccatgcacaaaagctccaacggctcttactttatacaatttaaagaatttgaatgtgaagaatctgagggtgaaaaatgcgcagcagattcagatttcaattgagaaatgcaacaaagttgaagttagtaatgttgagatcactgctccgggcgatagtcccaacacagatggtatccatatcactaatactcaaaacattcgagtctccaactcagatatcggaacaggtgatgattgtatatccattgaggatggaacgcaaaatcttcaaatctttgatttaacttgcggccccggtcacgggatcagcattgggagcttgggggacgacaattcgaaagcttatgtctcgggaattaatgtggatggtgctaagttctctgagagtgacaatggagttaggattaagacttatcagggaggatcaggaactgccaagaacattaaatttcaaaatattcgaatggaaaacgtcaagaatccgatcataatcgaccaggactactgcgacaaggacaaatgcgaagaccaagagtcggcagtgcaagtgaaaaacgttgtgtacaagaacatatctggtacgagcgctacggatgtggcgataacgttgaattgcagcgagaagtatccatgtcaagggattgtgcttgagaacgtgaaaataaaaggaggaacagcttcttgcaaaaatgccaatgttaaaaatcaaggcaccgtttctcctaaatgctcttaa

SEQ ID NO: 558 - skipped

SEQ ID NO: 559 - DNA, 1428 bp, Arabidopsis thaliana
atgtcgtcgaaccagcacgattactccgacgcactctcaaaatcaattctcttcttcgaaggccagcgctccggttacctcccaaacgaccagcgtatgacctggcgccgtaactccggtctgagcgacggttggacacacaacatcgatttaaccggcggttattacgacgccggagacaacgtcaaattcaatttcccgatggctttcaccaccacaatgctcgcctggagcgtaattgagttcggcgaattcatgccttcgtcggagctacgtaactctctcgtggctctccggtggagctctaattacctcctcaaatccgtttcacagctacctaaccggatcttcgtccaggtaggtgatccgatagcagatcataattgctgggaaagaccagaagacatggatacaccacggactgcttacgccgttaatgccccgaatccggcttctgaagttgccggagaaactacggcggccctctcagctgcttcgattgctttccgatcatcggatccaggatactctcaaacattgctccaaaatgctgtcaaaacttttcagttcgctgatatgtatcgcggtgcttatagcagcaatgacgatatcaaaaatgatgtgtgtcctttctactgcgatttcaacggatttcaggatgagttattgtggggagcagcttggctaagaaaagcgactggtgatgaaagctaccttaattacatagagagtaaccgtgaaccgtttggtgctaacgataacgtagacgaatttggctgggacaacaaagttggtggacttaatgttctcgtttcgaaggaagttattgaaggaaatatgtacaacttagaggcgtacaaggcatcagcagagagcttcatgtgtagtctggtcccggaatcttcgggaccgcatgttgagtatacttccgctggtctactttacaagcccggcggtagccagctccaacatgcgaccaccatatctttcctcctcctcgtatacgctcaatatctttcaagaagctctctctccctcaattgcggcacccttaccgtccctcctgattatctccgccgtcttgccaagaaacaggtggactatatattggggaataatccgatgggattatcgtacatggtcggatacggagagagatatccaaagaggatccatcaccgtggctcatcattgccatcgattgtggaccatccagaagccatcagatgcaaagacgggtcggtttatttcaattctaccgaaccgaacccgaacgttttgattggagcggtggtgggtgggcccggagaggacgatatgtacgatgatgatcggtccgatttccgcaagtccgagcccactacttacatcaatgctcctttcgttggcgttttggcgtactttgcagccaatcctggttctagctaa

SEQ ID NO: 560 - DNA, 873 bp, Arabidopsis thaliana
atggcaaatgcgatcacatttttcaagctcaacaccggcgctaagttcccttcggtgggtcttggaacatggcaagcttctcctggcctcgtcggtgatgcagtcgccgcggctgttaagattggctatcgtcacattgattgtgctcagatctatggcaacgaaaaagagattggggcagttctgaaaaaattgtttgaagacagagtagtgaaacgcgaggatttgttcatcacctccaaactctggtgtactgatcatgaccctcaagatgtcccggaggcattgaacagaactctcaaggatctgcagcttgaatacgtcgatctttatctgatacactggcctgcacggataaagaaaggttctgttggaataaagccagagaaccttttgcctgtagatattcctagtacatggaaagcgatggaagcactatacgattcgggcaaggcacgagccataggtgtaagcaatttctctaccaagaaactagctgatctcttggagttagctcgtgttcctcctgctgttaatcaggtcgaatgtcatccttcttggcgacaaactaagctacaagaattctgcaaatccaaaggggttcacctaagtgcatactcgccattaggttctccagggacaacatggctgaagagcgatgttttgaagaacccgatactgaatatggttgcggaaaaactcggaaagagtcctgcgcaagtcgcccttcgttggggactccaaatgggtcacagtgtgcttcccaagagtacaaatgaaggaaggatcaaagagaactttaatgttttcgactggtcaatacccgattacatgttcgctaagtttgctgagattgaacaggtacgttcttaa

SEQ ID NO: 561 - DNA, 1878 bp, Arabidopsis thaliana
atgggttctagaaccaccatttcgattcttgttgttcttcttctagggttggttcaacttgcaatttcagggcatgactataaacaagctctaagcaaaagcattctcttctttgaagctcagagatcaggacacctccctcctaaccaaagagtttcatggcgatctcattccggtctttacgatggcaaatcaagcggcgtggatctagtgggaggatattatgacgccggagacaatgtgaaattcgggcttccgatggctttcacggtgacaacaatgtgttggagcatcatagaatacggtggccagctggaatccaacggcgaacttggccatgccattgacgccgttaagtggggaactgattatttcattaaagcccaccctgaacctaacgttctctatggagaggtaggagatggtaagtcggaccattattgttggcaaaggccagaggaaatgactactgatcgtagggcttacaaaattgaccggaacaatcccggttcggatctcgccggagaaaccgctgccgcaatggctgccgcttccatcgttttccgtcgctctgatccatcatactctgctgagctactccgtcacgcacatcagctatttgaatttgcggacaaatacagaggcaaatatgacagcagcattaccgtggcacaaaaatattaccgatccgtcagcggttacaatgatgagttactatgggctgctgcgtggttataccaagcaacaaatgataaatactatctagattacctcggcaagaatggcgactcaatgggtggtacgggctggtcgatgaccgaatttggttgggacgttaagtatgctggtgttcaaacccttgtggccaaggttttgatgcaaggaaaaggtggagaacatactgctgtgttcgagaggtaccaacagaaagcagaacagtttatgtgttcgttgttaggtaaaagtacaaagaacattaagaaaactccagggggtttgattttccgacaaagctggaataatatgcagtttgtcacgagtgcttcattcttagccactgtttactccgactatctctcgtactccaaaagagatcttctttgttctcaaggaaacatttctccatcccaactcctagaattttctaaatcacaggtggattacattcttggagacaaccctagagcaacaagttacatggtcggatacggagagaactatccacgacaagttcatcatcgtggttcgtctattgtctccttcaatgtcgatcaaaagttcgttacttgccgtggtggttacgccacatggtttagccggaaaggaagcgatccaaatgttttaaccggagctctagtgggtggacccgacgcctacgataacttcgctgaccaacgggacaattatgagcaaaccgaaccagcaacttacaacaacgcgcctcttcttggtgtattagcccggttaatttccggttcgaccggttttgaccagctgcttcccggtgttagtccgactccaagtccggttatcataaaaccagcaccggtaccacaaaggaaaccgacaaaacctcctgcttcttctcctagtcccattaccatatcgcagaagatgacaaactcatggaagaacgagggaaaagtgtactatcgatactctacgatattaaccaatagatctacgaaaacattgaaaattttgaagatatcaatcaccaagctatacggtccaatatggggtgtgacgaaaaccggaaattcattcagttttccatcatggatgcaatctttaccatcaggcaaaagcatggaatttgtctatatccactcagcttctccggcagatgtcttggtttctaactattctttggaatga

SEQ ID NO: 562 - DNA, 1040 bp, Arabidopsis thaliana
atggctttaaaacatatgcaaatctttctcttcgtcgctatattttcatcattctgtttctccatcactctttctcgtccactcgacaatgaactcatcatgcaaaagaggcacatcgagtggatgactaaacacggccgtgtctacgcggatgtgaaggaggaaaacaatcgctacgttgtgttcaaaaacaacgtcgaacgcattgaacatttaaatagcattcctgccggaagaactttcaaacttgcggtaaatcagtttgctgatttaaccaatgacgaatttcgttccatgtacactggtttcaaaggtgtctcggcattatctagccaaagccaaactaaaatgtcgccgtttaggtaccaaaacgtttcttctggtgctttgccggtttctgttgactggaggaagaaaggagctgtgacccctatcaagaatcaaggcagctgcggatgttgttgggcgttttcagcggttgcggctattgaaggagcaacacaaataaagaaagggaaacttatatctttgtcagaacaacagcttgttgattgcgacacaaacgattttggctgcgaaggcggtttaatggatactgcgtttgagcatataaaagcgactggcggcttgacaactgagtcaaattatccttacaaaggcgaagacgctacttgcaattccaaaaagaccaatccaaaagcaacttctattacaggttatgaggatgtcccggttaatgatgagcaagcactgatgaaggcagtggcacaccaaccggttagcgttggaattgaaggaggtggttttgatttccaattctattcgtctggtgtgttcactggagagtgcactacgtatcttgatcatgcagtaactgcgattggatacggcgaatctactaacggatcaaagtattggatcatcaagaattcatggggaacaaaatggggagaaagtggatatatgaggattcaaaaagatgtcaaggataaacaaggactatgtggtcttgccatgaaagcttcttacccaactatatg

SEQ ID NO: 563-564 - skipped (2 entries)

SEQ ID NO: 565 - DNA, 1182 bp, Arabidopsis thaliana
atggcgttatcacgactttcttcacgatccaacactttcctaaagccggcgattaccgccttgccctcctccatccgccgtcatgtttccacagactcatcaccgatcacaatcgaaaccgccgtccctttcacatcgcatctatgtgaatcaccgtcacgctccgtcgagacttcatcggaggagatcttagcctttttccgtgacatggctcggatgaggaggatggagatcgcagcagattctctttacaaggcgaagctgatccgtgggttctgtcatttgtacgatggtcaagaggctttagcggtgggaatggaagcggcgattaccaaaaaagatgcgattatcacatcgtatcgtgatcactgtactttcattggtcgtggtgggaagcttgttgatgctttctctgagcttatggggagaaaaactggttgttctcatggtaaaggaggatctatgcatttctataagaaagatgcttccttttatggtggacatgggattgttggtgctcagattccattgggatgtggtttggcttttgctcagaagtataataaggatgaggctgtgacttttgctttgtatggtgatggtgctgcgaatcagggacagttgtttgaggccttgaacatttcggctttgtgggatttgcctgcgattcttgtttgcgagaataaccattatggaatgggaacggctacatggaggtcggctaagtctccggcttatttcaagcgtggagattatgttcctggcttgaaggtggatggtatggatgcactggctgtgaaacaggcgtgcaagtttgccaaggagcatgctctcaagaatggtcctattatccttgagatggacacttacagataccacggtcactctatgtctgacccaggaagcacttaccgtactcgtgatgaaatctctggcgtgagacaggtgcgtgatccaattgaaagggtgcgaaagttgctcttaactcatgacatagctaccgaaaaagagcttaaggacatggagaaagagataaggaaagaagtagatgacgccgtagctcaggccaaggagagcccgataccagatgcatctgagctattcacaaacatgtacgtgaaagactgcggagttgagtcgtttggagcagacagaaaagaactcaaagtaacacttccatag

SEQ ID NO: 566 - DNA, 735 bp, Arabidopsis thaliana
atggcaaacctcttggtctctactttcatattttccgcacttttgctcatctccaccgcaacagccgccacattcgaaatcctaaaccaatgtagttacaccgtgtgggctgccgcaagccctggaggtggccgacgtctagatgctggccaatcatggaggctagatgtcgcggcgggcactaaaatggcacggatttggggtaggaccaattgtaactttgactcctcaggtcgtggccgatgccaaactggtgactgcagtggtggactccaatgtactggctggggacagccaccaaacacgttggctgagtacgctttgaaccaattcaacaacttagacttctacgatatctcacttgtcgatggatttaacatacctatggagtttagcccaactagttcgaactgccatcggatactatgtaccgcagacataaacggacaatgtccaaacgtgttgagagccccaggtggatgcaacaacccgtgtactgtatttcagacgaaccaatactgttgtacgaacggtcagggatcatgtagcgatactgagtactcaagattctttaagcagagatgccctgacgcttacagctatccacaagatgacccgactagcactttcacttgcaccaacactaactacagggtcgtgttttgtccaaggtctaggctcggtgctactggatcccaccagctcccgatcaagatggtcaccgaggagaattaa

SEQ ID NO: 567-568 - skipped (2 entries)

SEQ ID NO: 569 - DNA, 639 bp, Arabidopsis thaliana
atggcgcaacaatcgttgttctacagtttcatcgctcgcggcaccgtaatcctcgtcgagttcacagatttcaaaggcaatttcacatctgtcgctgctcagtaccttgagaatcttccttcctcgaacaacaagtttacctacaactgcgatggtcatacgttcaacgacctcgtcgaaaatggattcacctattgtgttgttgcagttgattctgctgggagggagattcctatggctttcttggaacgcgtgaaggaggatttttataagagatatggtggtgaaaaggctgcaactgatcaagcaaatagcttgaataaagaatttgggtcgaatctgaaagagcacatgcagtattgcatggatcatcctgatgagattagcaaccttgctaaagctaaagctcaagtgtctgaagttaaaagtttaatgatggaaaacattgagaaggttcttgcccgtggtgtgatatgtgagatgctggtcacagccgcaagctttctatataaaaagaactcaaatgaaaaggaagaagtggtttcagaacatgaagataaaactcattgtccttgcaattatcattgccttgattctcatcatcatcctctcggtttgtgggggattcaactgcggtaa

SEQ ID NO: 570 - skipped

SEQ ID NO: 571 - DNA, 264 bp, Arabidopsis thaliana
atggccgctcgttcactctccggtgccgttaaatctctttgtccgccgcatccggaaaatgtaacagcagcaggattgagtaagggaggttccaccagagttatggtggggaagatggaacagagaggtttagatcaagaggcagagtctgcttggggaccagatccagttactggatactacagaccttccaatcgtgcggctgagattgatccagctgagctcagagagttgcttttgaaaaacaaagcaaagtctttctga

SEQ ID NO: 572 - DNA, 650 bp, Arabidopsis thaliana
atgaagctcgccgctagcctcaaccgcctcagccccaaacgtctcttccgtaccaaatcaaaagcttccgtctccagatctgagccttcttccttcagctccaatgcttcttcctcttcctctgatggatcttacggtaacctcaaacaaggtccaaccgcgactccgatcagtgttctccctcaaaactccggcgatttttacactgagcttgttcaagcttttaaactgatcgatcgtgatgacgacggtgttgtttccagaggagatctcgcggcgttgattagcaggttaagtcatgaaccaccgagtcaagaagaggtgagtttgatgctaagagaagtagacggcggagacggtggttgtatcagccttgaagatcttgctagccgtgtcgctggtacttccggtgaaggctctgttgagacggaggagctgagagaggtgttcgagatttttgacgtggatcgtaacggaaaaatatcggcggaggagttacacagagtttttggagtgatcggagatgaacggtgcacgttagaagagtgtatgcgtatgatagcgacggttgatggaaacggtgacggttttgtttgcttcgatgacttttgccgcatgatggttccagcgatgaatgatcatcatcatta

SEQ ID NO: 573 - skipped

SEQ ID NO: 574 - DNA, 483 bp, Arabidopsis thaliana
atgccgaaacaggatatggagaagatggagcttcgtaagaacttccgtaatgtttggcataccgatcttacccacacatacatatggaaatgtcttgtttcttcttcttctcattgcagtgccccttgtgcatcatacttgcttcgcaagcgtgcgctttacgatgatatgtcaaggtacgtctgctgtgccggttacatgccttgtagtggtaggtgtggagaagccaaatgtcctcaactttgtcttgccactgaggtcttctgctgctttgcaaactctgtggcctcaactcgctttcttctgcaagatgagttccaaattcaaacgacaaaatgtgacaactgcatcattggtttcatggtttgcctcagccaagtggcttgcatattctccatagttgcatgtattgtcggtatggatgagctttcagaagcttctcagatactcacatgttgctctgacatggtgtactgcacgtaa

SEQ ID NO: 575 - DNA, 1437 bp, Arabidopsis thaliana
atgggaactcctgtcgaagtctctaagctccatttcttgctcttccctttcatggctcatggccatatgataccaactctagacatggctaagctctttgccaccaaaggagctaaatccactatcctcactacacctctcaatgccaagctcttcttcgagaaacccatcaagaatctgaatccgggtctcgaaatcgacatccagatcttcaatttcccttgcgtggagctggggttaccagaaggatgtgaaaacgttgatttcttcacttcaaacaacaatgatgataaaaacgagatgatcgtgaaattctttttctcgacaaggtttttcaaagaccagcttgagaaactcctcgggacaacgagaccagactgtcttatcgccgacatgttcttcccctgggctactgaagctgctgggaagttcaatgtgccaagacttgtgttccacggcactggctacttctctttatgcgctggttattgcatcggagtgcataaaccacagaagagagtggcttcaagctctgagccatttgtgattcccgagctccctgggaacattgtgataactgaagaacagatcatagatggcgatggagaatccgacatgggaaagtttatgactgaagttagggaatcggaagtgaagagctcaggagttgttttgaatagtttctacgagctagaacatgattacgccgatttttacaaaagttgtgtacaaaagagagcgtggcatatcggtccgctatcggtttacaacaggggatttgaggagaaggctgagagaggaaagaaagcgaacattgatgaggctgaatgcctcaaatggcttgactccaagaaaccaaattcagtcatttatgtttcctttgggagcgtggctttcttcaagaatgaacagttattcgagatcgctgcagggttagaagcttccggtacaagtttcatttgggttgttaggaaaaccaaagaaaaagaagaatggttaccagaagggttcgaagagagggtgaaaggaaaagggatgattataagaggatgggcaccacaggtgctcatacttgatcatcaagcaacttgtgggtttgtgacccattgcggctggaactcgcttctggaaggagtggctgcagggctaccaatggtgacatggcctgtagcagcggagcaattctacaatgagaaattggttacgcaagtgctcagaacaggagtgagcgtgggagcgaaaaagaatgtaagaactacgggagatttcattagcagagagaaagtggttaaagcggtgagggaggtgttggttggggaagaggcggatgagaggcgggagagggcaaagaagttggcagagatggctaaagctgccgtggaaggagggtcttctttcaacgatctaaacagcttcatagaagagtttacctcgtaa

SEQ ID NO: 576 - DNA, 920 bp, Arabidopsis thaliana
atggtggcggctggtaaatccgacctttccttgcccaaaactttcgcctgcagtgccttcgctgcttgcgtcggcgaggtatgcacaattccattggacactgctaaagttaggcttcagctccaaaagtctgctcttgctggtgatgttactctgcctaaatatcgaggattgttgggaactgttggtaccatagcaagggaagaagggttacgttcactatggaaaggtgttgtacctggattgcatcgtcaatgcctatttggaggtcttaggattggaatgtatgagccggtgaaaaacttgtatgttggaaaagactttgtaggtgatgttccattgagcaagaaaattcttgctggtttgacaacaggtgcactgggtatcatggtagcaaatcccactgatcttgtgaaagttaggcttcaggccgaaggaaaactagctgcaggtgcgccaagacggtattctggagcgctgaatgcttattcaacaattgtgagacaggaaggagtccgagctctttggactggtcttggacctaacgtagcaagaaacgctattatcaatgctgctgaattagcgagttacgatcaagtgaaagagacgatcttgaagattccgggtttcactgacaacgttgtcacacatattctatctggactgggagcaggattctttgctgtctgcatcggctctcctgtcgacgtggttaagtcaagaatgatgggagattctggtgcttacaagggcaccattgactgcttcgtcaaaactctgaagagcgacggtcctatggcattttacaagggtttcatccccaactttggacgccttggctcatggaacgtaatcatgtttttgaccctcgaacaggcaaagaagtatgtccgggaactcgatgcgtccaaaagaaactg

SEQ ID NO: 577 - DNA, 450 bp, Arabidopsis thaliana
atggcggatcagctcacagacgatcagatctcagaattcaaggaagccttcagcttattcgacaaggatggtgatggttgcattaccacaaaggagcttggtaccgtgatgcgttccctcggtcaaaacccaaccgaagctgagcttcaggacatgatcaacgaagttgatgcggatggtaacggaaccattgatttcccggagttcttgaacctaatggctaggaaaatgaaggacactgactctgaggaagaactcaaggaagctttcagagttttcgacaaagaccagaacggtttcatctcagctgctgaattgagacatgtgatgactaacctcggcgagaagcttactgatgaagaagttgatgagatgattaaggaagctgatgttgatggtgatggtcagatcaactacgaagagtttgtgaaggttatgatggctaagtga

SEQ ID NO: 578 - DNA, 885 bp, Arabidopsis thaliana
atgaagagactaagcagctcagattcaatgtgtggtctaatctccacttctacagatgaacagagtccaagagggtacggaagtaattaccaatctatgcttgaaggttacgatgaagatgctacactaatcgaggaatattccggcaaccaccaccacatgggtctatcggagaagaagagaagattaaaagttgaccaagtcaaagctcttgagaagaatttcgaacttgagaataaactcgaacctgagaggaaaactaaattagcacaagagcttggacttcaacctcgtcaagtagctgtttggtttcagaaccgtcgtgcacggtggaaaacaaaacagcttgaaaaagattacggtgttcttaagggtcaatacgattctctccgccacaatttcgattctctccgccgtgacaatgattcccttctccaagagattagtaaaatcaaagctaaggtaaacggtgaagaagataacaacaacaacaaagctattacggagggtgttaaggaagaggaagttcacaagacggattcgattccttcgtctcctctgcagtttctagaacattcctctggttttaactaccggcgaagcttcactgacctccgtgaccttctaccgaattccaccgttgtcgaggctggatcttccgatagttgcgattcaagcgccgttcttaacgacgaaacaagttctgataacggaagattgacgccgcctgtgacggttactggcgggagtttcttacagtttgtgaaaacagagcaaacagaggatcacgaggattttctaagcggtgaagaagcttgtggtttcttctccgatgaacagccgccgtcacttcattggtactctgcttcagatcattggacttga

SEQ ID NO: 579 - skipped

SEQ ID NO: 580 - DNA, 1839 bp, Arabidopsis thaliana
atgcctgaggcaccaaagaaagaatctttagaggttttcgatctgacgcttgaccaaaaaaacaagcaaaagcttcagttgatcgaagaactcacctctaacgccgaccaagtccaaagacaagtcttggaggagatcttgacccgcaatgctgacgtggagtatctcaggcgacacgacctcaacggtcgcactgaccgtgagactttcaaaaacatcatgcccgttatcacctacgaagatattgagcctgagatcaacaggatcgctaatggtgataaatcacctatcctctcttccaaacccatctctgagttcctcacaagctctgggacatctggtggggagaggaagctaatgccaacaatcgaagaggagctagacaggagatcactcctctacagtctcttgatgcctgtgatgagccagttcgttcctggtctcgaaaacggcaaaggaatgtatttcttgttcatcaagtccgaatccaagactccaggaggcctccctgctcgtcctgtcttaaccagttactacaaatcttcccatttcaaagaaagaccctatgatccttacaccaactacacaagccctaacgagaccatcctttgctctgactcttaccagagcatgtactctcagatgctttgtggcttatgtcaacaccaggaggttcttagagtcggcgctgtcttcgcctctggattcatcagagccatcaagtttcttgagaaacactggatcgagttggtccgtgacatcagaaccgggactctaagttccctgatcaccgatccttcagtgcgtgaggcggtcgccaagatccttaaaccgagcccaaagctagctgatttcgtggaatttgagtgcaagaagtcgtcctggcaagggattattactaggctgtggcctaacacaaagtatgtggatgtgattgtgaccgggacaatgtctcaatacattccaactttggactactacagtaatggcttgcctcttgtctgcacaatgtatgcttcctctgagtgttactttggtgtgaatctaaggccactctgcaaaccaagcgaggtctcttacacgctcataccatccatggcttatttcgagttcttgcctgttcatagaaacaacggtgttactaactccatcaaccttcctaaagcactcactgagaaagagcaacaagagcttgttgatctagttgatgtcaagcttggtcaggaatacgagcttgttgtcaccacttacgccgggctttgcagatacagagttggtgatttattgagagtgactggtttcaagaacaaagcgcctcaattcagtttcatatgtcgcaaaaatgtggtcttgagcatagattccgacaagaccgacgaggttgagcttcagaacgcggtgaagaacgcagtgacacaccttgtcccatttgatgcctcactctctgagtacacgagctatgcagacacaagttccatcccaggccattatgtcctgttttgggagctatgtttggatggaaacacaccgatccctccttcggtcttcgaggactgctgcttagctgtagaagagtcattcaacactgtttatagacaaggaagggttagtgacaagtccataggcccgcttgagatcaagattgttgagccagggacattcgataagctcatggattacgcaatcagcttgggagcatcgattaatcagtataagacgccgagatgcgtgaagtttgctccaattatcgagctattgaactcaagggttgttgatagttacttcagccccaagtgtcctaaatgggttcctggtcacaaacagtgggggagtaactaa

SEQ ID NO: 581 - DNA, 789 bp, Arabidopsis thaliana
atgacggcgactgcgtttagggtcggcttgtggttggccgttacggcttcctttctcttaaccgcaacaaacgccaaaatccccggcgtttacagtggcggaccgtggcagaatgcacacgccactttctacggtggcagtgacgcctccggcacaatgggcggcgcgtgtgggtacgggaacttgtacagccaaggatacggtgtgaacacggcggcgttgagcactgctttgttcaacaacggattcagctgtggtgcttgttttgagattaagtgtactgatgatccgagatggtgtgttccgggaaatccatctattcttgtgacggcgacgaacttttgtccgccgaattttgctcagccgagtgacgacggagggtggtgcaatccgccgcgcgagcattttgatctcgccatgcctatgttcctcaagatcggtctataccgtgcaggcattgtccccgtctcctatcgcagggtaccttgtcggaagataggagggataagattcacagtaaacggattcagatacttcaatcttgttctggtaactaacgttgccggcgccggagatattaacggagttagcgtaaagggatcaaagacagattgggtgaggatgagtcggaactggggacagaactggcaatccaacgccgttctcatcggccaatcactctctttccgagtcaccgcctctgaccgacgttcttctacctcatggaacgttgctcctgccacgtggcagtttggtcagactttctccggcaaaaactttcgagtctga

SEQ ID NO: 582 - DNA, 1788 bp, Arabidopsis thaliana
atgaccgttgattcagctctgcgatctccgatgatgcactcaccgtccactaaggacgtgaaggctctaaggttcattgaggagatgacacgtaacgtcgatttcgttcagaagaaagtgattagagagatacttagtcgtaactcggacactgagtacctgaaacggtttggtctcaagggattcactgaccgtaaaacatttaagaccaaagttccggtggttatctacgatgatcttaaaccggagattcaacgtattgccaatggtgaccggtcaatgatcttgtcttcttaccccatcacagagttcctcacaagctctgggacatcagctggtgaaaggaagttgatgccaaccattgatgaagacatggaccgacgtcagcttttatacagtcttctcatgcctgtgatgaatctctacgtgcccggattagacaaaggcaaggctctatattttttgttcgtgaagacggaatcgaagactcccggtggattaccagcacgtccggtgctcacgagttattacaaaagcgaacaattcaagagacgtcctaacgatccgtacaacgtgtacacgagccctaacgaagccatcctttgtccagactcatcccaaagcatgtacacgcagatgctttgtggtctccttatgcgtcacgaagtcctccgtctcggcgccgtcttcgcttctggtctcctccgtgccattggattccttcaaaccaattggaaagaactcgccgacgatatctccaccggtaccttaagttcaagaatctctgacccggccattaaagagagcatgtccaagatcttgaccaaaccggaccaagaactggctgatttcataacttcggtatgtggtcaagacaatagttgggaaggtattattactaagatttggcctaacactaagtaccttgacgtcatcgttactggagccatggctcagtatatcccgatgcttgagtactatagcggcgggttaccgatggcttgcacgatgtatgcatcgtccgagagttactttgggatcaacttgaaaccaatgtgtaaaccttctgaggtttcttataccattatgccaaacatggcatacttcgagtttctccctcatcatgaagtcccaaccgaaaaatccgaacttgtggagctagctgatgtcgaggtcgggaaagagtacgagcttgtgatcacaacctatgctgggcttaaccgttatagagttggtgatattcttcaggtgactggattctacaattccgctccacagttcaagtttgtgcggaggaagaacgttttgcttagcattgagtcggataaaaccgatgaagctgagctccaaagcgcggttgagaacgcatcgctcttacttggagagcaaggaactcgtgttatcgagtacacgagctatgcagagacgaagactatacctggccattatgtcatttactgggagcttctagtgaaggatcaaaccaatcctccaaatgacgaagtcatggctcggtgctgcttggaaatggaggagtcgttgaactctgtgtatagacaaagtcgggttgcggataagtcgataggaccactcgagatacgtgttgtgaagaatggaacgttcgaggagctcatggactatgccatctccagaggcgcatcgatcaatcagtacaaggtgccgaggtgtgtgagtttcacgccaataatggagcttcttgactcaagggttgtatctacacacttcagcccagctttgccacattggtcaccagaacgtcgtcgttga

SEQ ID NO: 583 - DNA, 855 bp, Arabidopsis thaliana
atggcgagattagtgcgtgtggctagatcctcctccctctttggctttggtaaccgtttctactctacttcagccgaagctagccacgcgtcgtcgccttcgccgtttcttcacggcggcggagctagcagggttgctccgaaagatagaaatgttcagtgggtgtttttgggatgtcctggtgttggaaaaggaacttacgctagtagactatcaacccttctcggcgttcctcacatcgccaccggcgatctcgtccgtgaagagcttgcatcttctggacctctctctcaaaagctatcggagattgtaaatcagggaaaattggtttctgatgagatcattgtagacttattgtccaaaagacttgaggctggtgaagctagaggtgaatcagggtttatccttgatggctttcctcgtaccatgagacaagctgaaatactgggagatgtaactgacatcgatttggtggtgaatttgaagcttcctgaggaagttttggttgacaaatgccttggaaggagaacatgtagtcaatgtggcaagggttttaatgtagctcacatcaacttaaagggtgagaatggaagacctggaattagtatggatccacttctccctccacatcaatgtatgtcaaagcttgtcactcgagctgatgatactgaagaggtggtgaaagcaaggcttcgtatatacaatgaaacgagccagcctcttgaagaatactaccgtaccaagggaaagcttatggagtttgacttacctggaggcatcccagagtcatggccaaggctattggaagctttaaggcttgacgattacgaggagaaacagtctgtcgcagcataa

SEQ ID NO: 584 - DNA, 1338 bp, Arabidopsis thaliana
atggcgagcaacggagttaccaactgtaacgcaaacgccaatgtttggcggttcaaaggaaacggtgcaacgagtgatgcggcggcggtgacgttgagaaagcttgcttttgggatgtttaaaaactgcaccatgaacagtggaaagaccattttgttcccaactcccggcgagccctccgcccattccaacttcaggacttgcccggaagccgaggaagccgttgccgcagctgcacgctccggcatggctaactcttacgcacccagccctggagttttcaaggctagaagggcggtggctgaatatttaaacggagaacttccgacgaagctgaaggccgaggatgtgtatatcaccggaggatgtaaccaagccatagagatcgtgatagattctcttgccggaaatccatccgccaacattctacttccaaggccgggatatcctcactacgatgctcgtgctgtctatagcggcctcgagattcgcaaatacgatcttctccccgagagtgattgggaaatcaatctcgatggcctcgaggcggctgcggatgagaataccgtcgcaatggtaatcatcaaccccaacaatccatgtggaaacgtctacacctacgaccatctcaacaaggtcgcggagatggctagaaaactcggtataatgataatatccgacgaagtatatgatcatgttgtatatggagacaagccttttattcccatggggaagtttgcatcaatagctccggtgatcacgctcggatccatatccaaaggatgggtcaacccaggctggagagttggctggatcgccatgaacgatcctaatggtatctttgtatctacaggggtagttcaagcaatagaggattttcttgatttaactccacagccttcatttattctccaggaagcacttcctgatatattggagaaaacacctaaagagttcttcgagaagaagatcaaagccatgagacgcaacgtcgagctttcatgtgagaggctcaaggatattccttgtctcttttgtcccaagaaacccgaatcttgttcttatttatggttgaagcttgacacatcaatgttgaataatatcaaaaatgattttgatttctgcacgaagctagttagtgaggagagtcttatccttataccaggagtggctctaggggcagagaattgggtgaggatatcgataggaaccgacgaatcagtggtacaagaaatatttgacagactaaaaggtttctatgatcgtcatgccatctccaaggaagctatcaaactcagtggccatgccattaaccagatcgtcgtctctgtcaactga

SEQ ID NO: 585 - DNA, 1197 bp, Arabidopsis thaliana
atggcggctgcgaagctcgtcgctttgttacttcttgccttgcttttcaccaccagcgtcttcgccgatgctgatgagccggaggtttctgaggctgccggatccgatggctcttccaagatccacctggatcagcttaatgccaagatccgtgccctagaatctcaaatcgatgagaaaacccgggaagttcagggcaaagacgaggtagtagcagagaaggagaaactactcaaagaaagggaagacaagattgcttccttgcagactgaagtctcatcactacagaaaaagggatcatcagattctgcaaaacagttgggaaaggctcaagcacgagctgatgaattagagaagcaggttgaggttctcaagaacttcttggagcaaaaaaacaaggagaaagattccactgaagctcggactaatgaagctgagaaaaaactaagggaacttaactcgagccttgacaaacttcagaagacaaatgaagagcagaagaacaaaataggaaaacttgaacgtgctattaagatagctgaggaagaaatgttgaggacaaagctcgaagcaaccacaaaggcgaaggaactgctagaggctcatggttcgtggcttcccccttggcttgctgttcactggtttaaatttcagacttataccgagacacattgggaggcccatgggaaacctgctgtggagacagtaattctaaaggtgacggaagcaaaagctcaagctgaaaagtgggctgaaccacatgtcgaaaacgttaaaactaaatatattccagccatcaaggaaaccgttactatacatgttgagccacacttccgaacactatccatcaaagctaaagaggcttaccattcatcaaagagtgctgtttcccctcacattgtcacggttcaagaatttgtagacccctattatcaggaggccaaaaagttcagcaagccatatgtcgaccaagtggccacgaccacgaaaccacatgttgataaaatgaaggttgccatgaaaccttacacaaccaaggtgatcatcgtctatacagagttccttgaatccgccacaacttatcacaatcaggtccaagcccatgttgaacgaaaactgaaaagccatgagctgacggagccttttgctaccaatgagtttgtttggtttgcggtattttgccttactttcttctag

SEQ ID NO: 586 - DNA, 1509 bp, Arabidopsis thaliana
atggaagatatcatcatcggcgtggtggctctcgccgcggttctccttttcttcctctaccaaaaaccgaaaaccaaacggtacaagctacctccagggccatcaccacttccggtgatcggaaacctccttcagcttcagaagcttaacccacaacgcttcttcgctggatgggccaaaaaatacggtccaatcttgtcatacaggataggaagcagaacaatggtggtgatatcttcagctgagctagctaaagagcttctcaagacgcaagatgtcaactttgcggaccggcctccacatcgtggccatgagttcatatcctacggcaggcgtgacatggcattaaaccactacacaccgtattaccgagagataaggaagatggggatgaaccacttgttctcaccaacacgtgtggccacctttaagcatgtacgagaggaagaggctaggaggatgatggataagatcaacaaggccgcggataaatccgaagtagtcgatataagtgagcttatgttgaccttcacgaactcggttgtgtgtagacaagcgttcgggaagaagtacaatgaagatggagaagagatgaagaggttcatcaagattctttatgggactcaaagcgttttggggaagatctttttctctgattttttcccatattgtggctttcttgatgatttatcaggcctcacagcttatatgaaagagtgtttcgaaagacaagacacttatattcaagaggttgtcaatgagacgcttgatcctaagagagtcaagcccgaaaccgagagcatgattgatctcttgatggggatctacaaagaacaacctttcgcttctgagtttactgtagataatgtcaaagccgtcatcttggatattgtagtggcgggaacagatactgcagctgcggcggttgtgtgggggatgacgtatctaatgaagtacccacaagtgttgaagaaagctcaagcagaagtgagagagtatatgaaagagaaaggttcaacgttcgttactgaagacgatgtcaagaaccttccttacttcagagccttagttaaagaaaccctaaggatcgaaccagtgattcctctccttatccctcgtgcttgcattcaagataccaagatcgccggttacgacatccccgcaggaacaacggtcaacgtcaacgcgtgggccgtgtcacgtgacgagaaagaatggggaccgaaccctgatgagtttaggcccgagaggtttcttgagaaggaagttgacttcaaaggcacggactacgagtttataccgttcgggtcaggccggagaatgtgcccgggaatgcgtcttggggccgcgatgcttgaggttccttatgcgaaccttctcctcagcttcaactttaaacttcctaatgggatgaaaccagatgatatcaatatggatgtcatgactggtcttgctatgcacaagtcgcagcatctcaagcttgttccagagaaagtgaacaagtattag

SEQ ID NO: 587 - DNA, 633 bp, Arabidopsis thaliana
atggcatctgctctcgctcttaagagactcctatcatcctccatcgctccacgttcccgtagtgttcttcgtccagctgtttcctctcgcctcttcaacaccaacgccgttaggagctacgacgacgacggcgaaaatggagacggcgttgatttatatcgccgctctgttcctcgccgccgtggtgatttcttctcagatgtgtttgatccgttttcgccgacgaggagcgttagtcaagtgctgaatctgatggaccagttcatggagaatcctctgttatcagctactcgtggcatgggagcttcaggagctcgtcgtggttgggatataaaagagaaagacgatgctctgtacctgagaatcgacatgcctgggctgagcagagaggatgtgaagctggctttggagcaggacactctggtgattagaggagaaggaaaaaacgaggaagatggtggcgaggaaggagagagcggtaatcggagattcacaagcaggattggattaccggataagatttacaagatcgatgagattaaggcggagatgaagaacggagtgttgaaagttgtgatcccgaagatgaaagaacaagagagaaatgatgttcgtcagatcgagatcaactaa

SEQ ID NO: 588 - DNA, 1506 bp, Arabidopsis thaliana
atgtcgattcttctgtatttcttctttctccccgttattttatcgttaatattcatgaagaaattcaaagactcgaaacgaaatcttcctccgagcccaccgaagctaccaattatcggaaacttacaccagcttcgaggattgtttcatagatgtcttcatgatctctccaagaaacacggtccggtgttacttctccgtctaggttttatcgatatggttgtgatctcatcaaaagaagcagcggaagaagttctcaaagtacatgaccttgagtgttgtactagacctaagaccaacgcctcatcaaaattctcgcgtgatggtaaagacatcgcctttgcgccatacggggaggtttcgagagagttgcggaagctttccttaatcaactttttcagcacgcaaaaggttcgatcttttaggtacatcagagaggaagaaaatgatttgatggtcaagaaactaaaggaatcagctaagaagaagaatacagtggatttgagccaaacacttttctatctagttgggagtatcatattcagggctacctttgggcagcgtttagaccagaacaagcatgtcaataaggaaaagatcgaagaactcatgtttgaggtccagaaagttgggtctctaagcagctctgatattttccctgctggtgtgggatggtttatggactttgtgtcaggacgacataagacacttcacaaagttttcgtcgaggttgatactttgctaaatcatgtaattgatggtcacttgaagaatcctgaagacaaaacaaatcaagatcgccctgatatcatcgactcgatcttagagactatttataaacaagaacaagatgaatctttcaaactcaccattgatcatctcaaaggaattatccaaaatatatatcttgctggagtagacacaagtgccatcaccatgatttgggcaatggcagagcttgttaagaacccacgggtaatgaagaaagctcaagaagagatccgaacatgcattggaatcaaacagaaggagagaatcgaagaagaagatgtcgataagcttcagtacttgaagcttgtgatcaaagaaaccttaagactacacccaccagcacctcttttacttccaagagagacaatggctgatatcaagattcaaggctacgacattcctcggaaaaccattcttttggttaatgcatggtcgataggacgaaaccctgaactctgggaaaaccctgaggaatttaacccggagagatttatcgattgtcctatggattacaaaggaaatagttttgagatgttaccatttggttctggtcggaagatatgtccagggatagcttttggaatagcgaccgttgaactgggactattgaacttgctttactactttgattggagattggctgaggaggataaagatattgacatggaagaggctggtgatgccacaattgttaagaaagttcctcttgaacttgtcccaattattcatcattga

SEQ ID NO: 589 - DNA, 1977 bp, Arabidopsis thaliana
atgggcacggaggactacacattccctcaaggagcggaggagcttcaccgccgccaccacacggtggaggctccacaacctcaaccgttcttgaagtcacttcagtactcagtgaaggaaactctgtttccagacgacccttttagacaatttaagaaccaaaatgcatcaagaaaatttgtgttaggcctcaaatacttcctcccgattttcgaatgggcaccacgctacaatctcaagttcttcaaatcagatctcatcgccggaatcaccatcgctagtctcgccatccctcagggcatcagttacgccaaacttgctaacttgcccccaattcttggcctttattcgagttttgtaccgccattggtatacgcggtgctagggagttcaagggacttagcggtgggaacggttgcggttgcgtctctgttgacaggtgcgatgctgagcaaagaagttgatgctgagaaagatcctaagctttaccttcaccttgctttcaccgccacttttttcgccggcgttctcgaagcctctcttggaattttcagggttagggttcatagtggactttctatcgcatgcaacgatagtaggattcatgggaggagcagcgacggtggtgagtctgcaacagcttaagggtattttcggacttaaacatttcacagactctaccgatgttatctctgtcatgcgttccgttttctcccaaactcacgagtggagatgggaaagtggcgttcttggatgtggttttctattctttcttctctccaccagatatttgagcatcaagaaaccaaaattcttttgggtggcggcgatggctcctttgacctcagtgattcttggaagtctcttggtttacttcactcacgctgagagacatggtgttcaagtgataggggacctgaagaaagggttgaatccactctccggttctgatctcatctttacttccccttacatgtccacagctgtcaaaactggcctcatcactggcatcattgctctcgcgaaggagtagcagtggggaggagttttgcgatgttcaagaactacaacatagacgggaacaaagagatgatagcgtttggaatgatgaacatcgttggttccttcacatcttgttacctcacaaccggaccattttcaaggtcggcagtgaactacaacgcgggttgcaagaccgcaatgtccaacatagtgatggcgattgcggttatgttcacactcctcttcctcacaccgctttttcactacacaccactcgtcgtcctctctgccatcatcatatccgcaatgctcggactcattgactatcaagctgccatccatctctggaaagttgacaagttcgacttcctcgtctgcatgagcgcctacgttggggtcgtattcggcagtgtagagattggactcgtcgtagcggtggcgatatctatagcgaggttgttgctgtttgtgtcgaggccaaaaactgcggtgaagggaaacataccaaacagcatgatctataggaacactgagcagtacccatcatcaagaaccgttcctggtattctcatcttggagattgatgctcccatctactttgctaatgccagttacttgcgtgaaagaatcataaggtggattgatgaagaggaagagagagttaaacaatcaggagagagcagcttacaatatattatactcgatatgtcagctgttggtaatatcgacacaagcggtattagcatgatggtggaaattaagaaagtcattgacaggagagcgttaaagttggtattgtcaaatccaaaaggagaggtcgtgaagaaattaaccagatccaaattcatcggtgatcatttgggcaaagagtggatgttcttaacggtaggagaagcagtggaggcttgtagctacatgcttcacacgtttaaaaccgaaccggcctccaaaaacgagccttggaacaacgtatag

SEQ ID NO: 590 - DNA, 1239 bp, Arabidopsis thaliana
atgtatcctctccaatccttggccagaagcaagagattgtttccgattcgaaccagatcaaaaccggtttgtttagcactgaccaatgctcaaacaaacggtggtgaccaagaggagaaagtagtgattgttggcgccgggattggcggacttgccactgccgtttcacttcacaggcttggaatccggtcggtggtgttggagcaggcagagtcgcttcgtactggtggaacatcactgacgctattcaagaatgggtggcgcgttcttgacgccatttccgtcgggcctcaactccgaacgcagtttcttgaaatcgaaggccaagaagttcgggccgtggagaggcgagtactcttggaaacacttgcaagccagcttcctccacaaaccattcggttttcctcaaaactggaaagtatacaaagcaatgccaatggtgacactctccttcaacttggagatggaacccggttgcttgcacagattgttattggttgtgacggtatccggtctaaggttgcaacttggatggggttcagtgagccgaaatatgttggccattgcgcttaccgtggtcttgggttctatccaaatggacagccatttcagaaaaaggtgaactacatatacggtaaagggattagagctggatatgtacctgtatctacaacaaaagtctactggttcatctgtttcaacagcccatctctaggtaggcccaaaattacggatccagcgatcctaaaaaaacaagccaaagaactggttagtacatggccagaagatctgcaaaacctcatcgatttaacacctgatgaaactatcagcagaactcctctagtagaccggtggctatggcctggcattgctcctccagcatcaaaaggacgagtggttcttgttggagatgcttggcacccaatgactccaaatcttggacaaggtgcttgttgtgccttggaagattcagtagttctggcaaataaacttgccaatgcaataaatggaggaaccgaatcaattgaagtagcaatggaatcatacgggagtgagagatggtctcgagcattcccgttgacagtacgtgcaaacctagttggcgcacttctgcaatgggagaatcctctagtgtgttccattagaaacaatattgtcataccaaagttactgaggcttggaccaatgcttgaacacacaaactttgagtgtgaacctctctttgtttctaaaagctga

SEQ ID NO: 591-592 - skipped (2 entries)

SEQ ID NO: 593 - DNA, 1068 bp, Arabidopsis thaliana
atgtccatgcaacaagaaacgtctcacatgacggcggctccacagaccaacggccatcaaatcttccctgagattgacatgtccgccggcgattcctcctccatcgtacgagctacagtcgtccaagcctctacagtcttctacgatactcccgccacgctagataaggcagagagactgctttctgaggcagcggagaatggatctcagctagtggtgttcccggaggctttcatcggtggatatccacgtggctctacctttgaattggctattggttctcgtaccgctaaaggacgagatgactttcgcaagtaccatgcttctgccattgatgttcctggccctgaagtggaacgattagcgttaatggccaagaagtacaaagtatacttggttatgggtgtgatagagagggaaggctacacgctatactgcaccgttcttttcttcgattcacaaggtctgttcttaggtaagcaccgcaaactcatgcctacagctcttgaacgttgcatttggggatttggagatggatcaaccatccctgtgttcgatactcctattgggaaaatcggtgctgctatttgttgggaaaataggatgccttctttgagaaccgcaatgtatgccaaaggcattgagatttattgtgcacctactgctgattcaagagaaacttggctagcatcaatgactcatattgcacttgagggtggatgttttgttttgtcagctaaccagttttgtcgtcggaaagactatccttctccgccggaatacatgttttccggttcagaagagagcctaacaccggactctgttgtctgcgctggtggaagctctatcatttcacctttgggaattgttttagctggaccaaactatagaggagaagctcttatcacagctgatctagatcttggggacatagcacgagccaagtttgattttgatgtggtcggacattactcgaggcctgaagtgtttagcttgaacataagggagcatccgagaaaagcggtcagcttcaagacgtcaaaggtaatggaagatgaatccgtctaa

SEQ ID NO: 594 - skipped

SEQ ID NO: 595 - DNA, 1242 bp, Arabidopsis thaliana
atgggattacctcaaaataagctcagttttttctgcttcttcttcctcgtctctgtactaactcttgccccattggctttctccgagatcttcttagaggagcatttcgaaggtggatggaaaagtaggtgggtcttgtctgattggaaaagaaacgaaggcaaagctggaacctttaagcacactgccggtaaatggcccggcgatcctgacaataaaggtattcagacttataatgatgccaagcattatgcgatttctgcaaagattcctgagtttagcaacaaaaaccggactcttgttgtccagtactcagtcaagattgaacaagacattgaatgtggtggtgcttacattaagctcctgtctggctatgttaaccagaagcagtttggtggtgatactccatacagtctaatgtttggaccagatatatgcggaacacagacgaagaagcttcatgttatagtttcatatcagggacagaattatccaatcaaaaaggatttgcaatgtgaaacagacaaattaaatcatttctacacatttattctgcgtcctgacgcttcttacagcgttctggtggataataaagagagagaatttggcagtatgtacacagactgggacatccttcctccaaggaagatcaaggtcaagaatgcaaagaagccagaggactgggatgatagagagtacatcgatgaccccaacgatgtcaaacccgagggttttgattctattccacgtgaaattccagatcgtaaagctaaagagcccgaggactgggacgaggaagaaaatggtctctgggaacctccaaagatcccaaattctgcgtacaaagaatttgaagatgatccagatctttacgttctgaagtctatcaaatatgcaggcattgaagtatggcaggtgaaggctggctcaatctttgacaatatattgatctgcgatgacccggcatatgcaagaagcatcgtggatgactattttgcccaacacagggagtctgagaaggagttatttgcggaagcagagaaagaaagaaaagctagagaagatgaggaagctcggatagcacgggaagaaggtgaacgcaggcggaaagaaagggaccaccggtatggagacaggaggaggcgttacaaacggccgaatccacgtgattatatggatgattaccatgtaagtgttccttctatctcaaccactttaaaaagaatggtttatgcagtttag

SEQ ID NO: 596 - DNA, 1293 bp, Arabidopsis thaliana
atggcggctacgacgaactctttccttgtcggaagcaacaacactcagattcctgctttgaaacccaaatcatcatctcaatcctttcttcacctcagcaaaccaaacaccgtcaacttcgtcagcaaaaccaagcccgtcgctgttagatgcgtcgcttcaacgactcaagttcaagatggagttagatccggctccgtcggatcccaagaacgtgtcttcaacttcgcggcgggtccagccactttgcctgagaacgttctcctaaaagctcaggcggatctatacaactggcgtggatctggcatgagtgtgatggagatgagtcacagaggcaaagagtttctctcgattatacaaaaagctgaatcggatcttcgtcagcttctcgagattcctcaggaatattccgttttgttcttacaaggtggtgccactactcaattcgctgctttacctctcaatctctgcaaatcggatgatacagtcgatttcgttgttactggttcgtggggtgataaagctgtcaaggaagcgaagaagtattgcaagactaatgtgatttggtctgggaaatctgagaaatacacaaaggttccatcttttgaggagttggagcaaactccggacgctaagtatttgcatatatgcgccaatgagactattcatggagttgagtttaaagattaccctgttcctaaaaatgggttcttggttgctgatatgtcttctaacttctgttcgaaacctgttgatgtatctaagtttggtgtgatttacggtggtgcacagaagaacgttggtccatctggtgtcacaattgtgatcattcgtaaagatttgattgggaatgctcaagatattactcctgtgatgcttgattacaagattcatgatgagaatagttcgttgtacaacacgcctccttgctttgggatttacatgtgtggtcttgtgtttgaagatctgttggagcaaggtggattgaaagaagtggagaagaagaaccagaggaaagctgatttgctttacaatgctattgaagaaagcaatggctttttcagatgtcctgttgagaaatcagtgaggtcgttgatgaatgtgcctttcacattggagaagtctgaattggaagctgagtttatcaaggaagctgctaaagagaagatggtgcagctcaaaggacatagatcagtgggaggtatgagagcttctatttacaatgcaatgcctttggctggtgttgaaaagcttgttgctttcatgaaagatttccaggctaagcatgcttag

SEQ ID NO: 597 - DNA, 2766 bp, Arabidopsis thaliana
atgaaaatgagacgaggcaattcaagtaacgaccatgaacttgggattctacgaggagctaactcggacaccaactcggacacggagagcatcgctagcgaccgtggtgcctttagcggtccgcttggccggcctaaacgtgcgtccaagaaaaacgcaagattcgccgacgatcttcccaagagaagcaatagtgttgctggcggccgtggtgatgacgatgagtacgtggagatcacgctagacatcagggacgactcggtggccgtccatagtgtccaacaagcagctggaggtggaggccacctggaggacccggagctagcccttcttacgaagaagactctcgagagcagcctcaacaacaccacctccttatctttcttccgaagcacctcctcacgcatcaagaacgcctcccgcgagctccgccgcgtgttctctagacgtccctccccggccgtgcggcggtttgaccgcacgagctccgcggccatccacgcactcaaaggtctcaagttcattgccaccaagacggccgcatggccggccgtcgaccaacgtttcgataaactctccgctgattccaacggcctcttactctctgccaagttttgggaatgcttaggaatgaataaggaatctaaagacttcgctgaccagctctttagagcattagctcgccggaataacgtctccggcgatgcaatcacaaaggaacagcttaggatattctgggaacagatctcagacgaaagctttgatgccaaactccaagtcttttttgacatggtggacaaagatgaagatgggcgagtaacagaagaagaggtggctgagattattagtcttagtgcttctgcaaacaagctctcaaatattcaaaagcaagccaaagaatatgcggcactgataatggaagagttggacccagacaatgctgggtttattatgatcgaaaacttggaaatgttgctattacaagcaccaaaccagtcggtgcggatgggagacagcaggatacttagtcagatgttaagtcagaagcttagaccggcaaaagagagcaaccctttagtgagatggtcggagaaaatcaaatatttcatacttgacaattggcagagactatggataatgatgttatggcttggcatctgtggtggcctctttacttataaattcattcagtacaagaacaaagctgcctatggtgtcatgggttattgcgtttgtgtcgccaaaggaggcgccgagactctcaaattcaacatggctctcatattgttgcctgtttgtcgaaacaccatcacttggcttaggaacaagactaagcttggtactgtcgttccttttgatgatagtcttaacttccacaaggttattgcaagcgggatagtcgtcggtgttttactccatgcgggtgcccatttaacgtgtgattttccacgtttaattgccgcggatgaggacacctatgagccgatggaaaaatactttggggatcaaccgactagctactggtggtttgtgaaaggagtggaaggatggactggcattgtgatggttgtgctaatggctatagcctttacactcgcgacgccttggttccgacgtaacaagcttaacttacctaacttcctcaagaagcttaccggtttcaacgccttttggtacacccaccatttgttcatcattgtttatgctcttctcattgtccatggtatcaagctctacctcacaaagatttggtatcagaaaacgacatggatgtatcttgctgtacccatccttctatatgcatcggagaggctgctccgtgctttcagatcaagcatcaaaccggttaagatgatcaaggtggctgtttaccccgggaacgtgttgtctctacacatgacgaagccacaaggattcaaatacaaaagtggacagttcatgttggtgaactgccgagccgtatctccattcgaatggcatcctttctcaatcacatcagctcccggagacgattacctgagcgtacatatccgcactctcggtgactggacacgtaagctcaggaccgttttctccgaggtttgcaaacctcctaccgccggtaaaagcggtcttctccgagcagacggaggagatggaaacctcccgttcccgaaggtccttatcgacggtccatacggtgctcccgcacaagactacaagaaatacgacgtggtactcctcgtaggtctcggcattggagccacgcctatgatcagtatccttaaggacatcatcaacaacatgaaaggtcctgaccgcgacagcgacattgagaacaataacagtaacaacaatagtaaagggtttaagacaaggaaagcttatttctactgggtgactagggaacaaggatcattcgagtggttcaagggaataatggacgagatttcggagttagacgaggaaggaatcatcgagcttcacaattattgcacgagtgtgtacgaggaaggtgatgcaagagtggctctcattgccatgcttcagtcgttgcaacacgctaagaacggtgtggatgttgtgtcgggtacacgtgtcaagtcccacttcgctaaacctaactggagacaagtctacaagaagatcgctgttcaacatcccggcaaaagaataggagtcttctactgtggaatgccaggaatgataaaggaattaaaaaatctagctttggatttttctcgaaagacaactaccaagtttgacttccacaaagagaacttctag

SEQ ID NO: 598 - skipped

SEQ ID NO: 599 - DNA, 1176 bp, Arabidopsis thaliana
atgacggcggcacaagggaactctaacgagactctgttttcttcttacaagatgggaagattcgatctctctcatcgagtggttctggcgccgatgacgcggtgcagggcgttgaacggagtaccaaacgcggcgttggcagagtattatgctcaacggaccactcccggcggttttctcatctccgaaggcaccatggtctctcccggatccgcagggttcccacatgtgcctggaatctattcagatgaacaagtagaagcatggaagcaagttgtggaagcagttcacgctaagggaggtttcatcttttgtcaattatggcatgttggacgtgcttctcatgcagtgtatcaacctaatggaggatcaccaatatcgtcaacgaacaaaccaatctcggaaaacaggtggcgagttttgttgcccgatggttcccacgtgaagtacccgaaacctcgggctttagaagcttccgagatacctcgggtggtggaggattattgcctttctgctttgaatgcgattcgagctggtttcgatgggattgagatccacggggcgcatggttaccttattgatcagtttttgaaagatgggatcaatgaccgtactgaccaatacggaggatccattgcaaaccgttgtagattcttgaaacaagtagtggaaggtgtagtttcagccataggagctagtaaagttggtgtgagggtatctccggctatagatcacttggacgcaactgattctgacccactatcactcgggctagccgtggttggcatgctcaataagttacaaggtgttaatggctcaaagctcgcttaccttcacgttacacaacctcgctaccacgcctacgggcaaacagagtctggaaggcaagggagtgatgaggaagaagctaagctaatgaagagcttgaggatggcttataatggaacctttatgtctagtggaggattcaataaggaactaggtatgcaagctgttcaacaaggtgatgctgatttggtttcatatggcagactgtttatcgcaaacccggatttggtttcgcggttcaagattgatggagagttgaataaatataatcggaagacgttttacactcaagatccagttgttggctacacggattatcctttcttggctcctttttcccgcctctga

SEQ ID NO: 600 - skipped

SEQ ID NO: 601 - DNA, 1935 bp, Arabidopsis thaliana
atgggaggttgtttatctggagatgtgaaaggaggcaaacaagccattggaggggtccagcagagacccacttcctcaaccatcgccaacaatgcggctcacaacgacgccgtcgattttttcttcagatctcgtgctcctctagtatatgatgtggtcacatttggattagtcaaccaattaactttgtcggcttcaaacttgttggactgtgacataacgtctaagagtgatccgatggctgtcatgtatttgaggaaaaaggatgggagacttgaggaaattggccgtactgaagtcatacttaacaacttgaatcctaagtggattgagaagataacagtctcttttcagtttgaagctgtccagacattagtttttcacgtgtatgatgttgataccagatatcataatgtgccagtgaaggtaatattttcattgatagtaacatcaagaagtttgcatatcgataataaatgctacacatcaaaagtggtttcaatatactgtataactttgcagacattaaagctaaaggatcaggatttcttgggagaaggcacatgtgttctgtccgagtcagtgttactgctctttgtgtacgacatatctaatacttacaatttacattcctctttcaatcaccagattatgacaagacaaaaccggacactgacattaactcttactggcaacgttagagctggtgtgaatagaaatttgggaacactctctatccaagctgaagaaacagttgcttctaaaactgtcgctgagattaattttcgctgtgtcaatttggataacaaggacttgttctctaagagtgatcctttcttaagaatatcaagagttgttgagacaagtgctgcagtcccaatttgtcggactgaggtcgtggacaacaacctcaaccccatgtggaggcctgtgtgcttgactatgcaacaatttggaagcaaagacaccccattggttatcgagtgcttagattttaacaccagtgggaatcatgaacttattggaaagacagagaaatctgtagcagaattggagagactttgtctccagaaagaggctgcaaactttgtctatccatctctaagtcacggtagaaacaaggttctgaaaggccagctcattgtggatcgttatgtggagaaagtccagtacagttttcttgattacatatccagtggctttgaacttaatttcatggttgcagttgacttcactgcttcaaatggcgatccccgaactccaagttctttgcactacattgatccatcaggcagattaaactcatatcaacaggctattatggaagtaggagaggtcatccagttttatgattctgataagcggtttcctgcctgggggtttggaggaagaacatcggatggttctgtgtcccatgcttttaacttgaatggagcatcatatggcgacgaggttgttggagttgaaggaatcatggtagcttatgcgagtgctcttcgcaatgtttctctagcaggaccaactctatttagcaatgtggtcgacaaggctgctcatactgcttcacagtcactctcacaaaacagtcccaagtactttgttctgctcatcattacggatggagtccttacagacatggcgggtacagtagatgcattagtgagagcttctgatctcccgttgtcagttcttatcgtcggtgtgggaaacacagacttcaaacaaatggagatgcttgatgctgataatggtcggcggttagagagttctactggtcgaatagctacacgggacatcgttcaatttgtccctatgaaagacatccatagtggactagtgtcggtggtgcaggcacttctagaagaacttcccggccagtttctgacctatgtccgttcgagaaagattaatccgatcggagctccagcaatttga

SEQ ID NO: 602 - DNA, 1479 bp, Arabidopsis thaliana
atggagcgatctcgctcagaaacgccatcgtctcgctcacgattgaagctgtgcttcataaactcgccgccatcatcgatattcacggggtccaagatcgaagctgaggatggttctccgcttgtgatcgagctcgtggacgccaccacaaacactctagttagtacgggaccgttctcgtcttctcgggtcgagctcgtgccgctgaacgctgatttcacggaagaaagctggaccgttgagggatttaatcggaatattctcacgcaacgtgaagggaaacgtccgttgctcactggagacctaacggtgatgcttaaaaacggtgttggagttataaccggagatatagctttctcggataactcgagctggactaggagtcggaagttccggttaggtgctaagttgaccggagatggagccgtggaggcgagaagtgaagcttttggatgtagagaccaacgaggagaatcttataaaaaacatcatcctccgtgccccagtgatgaggtttggagactagagaaaatcgcgaaagatggagtttcggcaacgcgtttggctgaacgcaagattttaaccgtcaaggattttcgccgtttgtatactgtaaatcgaaatgagttacacaacataattggtgcaggggtctcaaagaaaacatggaacacaattgtatcacatgccatggattgcgttttggacgaaacagagtgttacatttacaatgcaaacactccgggcgtaacacttctcttcaactctgtttatgagttgataagagtgtcattcaatggcaacgatatccaaaaccttgatcagccaattctagaccaattaaaggccgaagcttatcaaaaccttaaccgcattacagcggttaacgataggacctttgtgggtcatccacaaaggtccttacagtgcccgcaagatcctggatttgtcgtaacatgttctggatcgcagcacatcgactttcaaggaagtttggatccatcaagctcttcgatggctctttgccacaaagcttcaagctcaacggtccaccctgatgtcctgatgagttttgataactcatcaaccgcgaggtttcatatcgacaaaaagttcttaccgactttcggaaacagcttcaaagtaagtgaactcgatcaagtacacggaaaatcacaaactgttgtgacaaaaggttgtatagagaataacgaggaggatgagaacgcgttttcttatcatcaccatgatgacatgacctcaagctggtcacctggtacgcaccaagccgttgaaacgatgtttcttaccgtgtctgagacggaagaagctggaatgttcgatgttcattttgcaaacgttaatttgggatctccaagagccaggtggtgtaaggttaaggcagctttcaaggttagggcagcttttaaggaagtccggagacacacaactgccagaaatccgagggaaggcttgtaa

SEQ ID NO: 603 - DNA, 1035 bp, Arabidopsis thaliana
atgtggaagattgggcagagaggagttccctatttccagagactcattgctgcgccgttcacgaccttgcggtccttgccaacttctttggtcgagacagggcagaaccgtgtcattgatgcttcgttaactctcatccgtgaaagggcaaaactcaaaggagagttagtgcgactcataggaggagcaaaagctacaacagctcttcttggagtaccacttggtcacaactcttcttttcttgaaggcccagccttggctcctcctcatgtaagggaagctatttggtgtggtagtacaaactccaccactgaagaagggaaggagctaaaagatccacgtgttctaagtgatgttggtgatattccggtacaagagattagagaaatgggggttgatgatgatagacttatgaaagtagtaagtgaatctgtgaagctggtgatggaagaggaaccattgcgcccgctggtcataggtggagaccattccatatcttatcctgttgtgagagctgtttcggagaaacttggaggacccgtggatattcttcatcttgatgcacatcccgatatatatgaccgttttgaaggcaattattactctcatgcatcttcttttgctcgtatcatggaaggtggctatgcgcggcggcttttacaggttgggatcagatccataaacaaagaaggacgggaacaaggcaagaggtttggagtagaacagtatgagatgcgaaccttctcaaaagatcgccaaatgttggaaaacttgaaactaggggaaggagtgaagggcgtgtatatctcgatcgatgttgactgtctcgatccgggattcgcgcacggagtgtcccacttcgaaccaggaggtctttctttccgagacgtccttaacatattacacaaccttcagggagatttggtgggggctgatgttgttgagtacaatccacagcgtgataccgctgatgacatgacggcaatggtcgcggctaagtttgttagagagctagccgcaaaaatgtcaaaatga

SEQ ID NO: 604 - DNA, 996 bp, Arabidopsis thaliana
atggaagagtctatcaatcaaaatcctgaagctatggaagcacttatctccaatctctttggaaacatctcgtctttgaaatctgcttatatcgagcttcaaagtgctcatactccttacgatcccgagaagattcaggcagcggacaaagttgtcatttctgaactcaagaatctttccgaaatgaagcatttttacagagagaataaccccaagcctgtatgtgtctctccacaagactctcgtttagctgcagagattcaagagcagcagagtttgttgaagacttatgaggtcatggtgaagaagtttcagtctgagattcagaacaaggattccgagatcacgcagatgctgcagaagattgaggaagcaaaccagaaacggcttaagcttgagaagaatcttaagttaagaggaatgtctacaaaccaaggttctggtggagatggaaatttacagtttcctgacttgactactgaactctttgtatctacttacgaagctgctgctaaagttgtgcatgatttctccaagccgctaatcaacatgatgaaagcagcaggatgggatcttgatactgcagccaattctattgagcctgatgttgtttacgccaagaggcctcacaaggaatatgcatttgaatcatacatatgccaaaggatgttcagtgggtttcagcagaagaacttctcagtaaactcagagagtgctacggttatggccgatgatgacacagacacctttttccgccagtttcttgctctcaaggacatggatccactagatgctctagaccagcgtgactacgtgacaggaggtggccacccgaggactgcattttaccaggccttcttaaaacttgcaaagtcgatatggatcttgcacaagcttgcttactcttttgatccagctgcaaagatcttccaagtgaaaaagggtagtgagttctctgattcatacatggaaagtgttgtgaagaacatacattaa

SEQ ID NO: 605 - DNA, 2136 bp, Arabidopsis thaliana
atgtcctcttcttcttcttcgtcaacctccatgatcgatctcatggcagcaatcatcaaaggagagcctgtaattgtctccgacccagctaatgcctccgcttacgagtccgtagctgctgaattatcctctatgcttatagagaatcgtcaattcgccatgattgttaccacttccattgctgttcttattggttgcatcgttatgctcgtttggaggagatccggttctgggaattcaaaacgtgtcgagcctcttaagcctttggttattaagcctcgtgaggaagagattgatgatgggcgtaagaaagttaccatctttttcggtacacaaactggtactgctgaaggttttgcaaaggctttaggagaagaagctaaagcaagatatgaaaagaccagattcaaaatcgttgatttggatgattacgcggctgatgatgatgagtatgaggagaaattgaagaaagaggatgtggctttcttcttcttagccacatatggagatggtgagcctaccgacaatgcagcgagattctacaaatggttcaccgaggggaatgacagaggagaatggcttaagaacttgaagtatggagtgtttggattaggaaacagacaatatgagcattttaataaggttgccaaagttgtagatgacattcttgtcgaacaaggtgcacagcgtcttgtacaagttggtcttggagatgatgaccagtgtattgaagatgactttaccgcttggcgagaagcattgtggcccgagcttgatacaatactgagggaagaaggggatacagctgttgccacaccatacactgcagctgtgttagaatacagagtttctattcacgactctgaagatgccaaattcaatgatataaacatggcaaatgggaatggttacactgtgtttgatgctcaacatccttacaaagcaaatgtcgctgttaaaagggagcttcatactcccgagtctgatcgttcttgtatccatttggaatttgacattgctggaagtggacttacgtatgaaactggagatcatgttggtgtactttgtgataacttaagtgaaactgtagatgaagctcttagattgctggatatgtcacctgatacttatttctcacttcacgctgaaaaagaagacggcacaccaatcagcagctcactgcctcctcccttcccaccttgcaacttgagaacagcgcttacacgatatgcatgtcttttgagttctccaaagaagtctgctttagttgcgttggctgctcatgcatctgatcctaccgaagcagaacgattaaaacaccttgcttcacctgctggaaaggatgaatattcaaagtgggtagtagagagtcaaagaagtctacttgaggtgatggccgagtttccttcagccaagccaccacttggtgtcttcttcgctggagttgctccaaggttgcagcctaggttctattcgatatcatcatcgcccaagattgctgaaactagaattcacgtcacatgtgcactggtttatgagaaaatgccaactggcaggattcataagggagtgtgttccacttggatgaagaatgctgtgccttacgagaagagtgaaaactgttcctcggcgccgatatttgttaggcaatccaacttcaagcttccttctgattctaaggtaccgatcatcatgatcggtccagggactggattagctccattcagaggattccttcaggaaagactagcgttggtagaatctggtgttgaacttgggccatcagttttgttctttggatgcagaaaccgtagaatggatttcatctacgaggaagagctccagcgatttgttgagagtggtgctctcgcagagctaagtgtcgccttctctcgtgaaggacccaccaaagaatacgtacagcacaagatgatggacaaggcttctgatatctggaatatgatctctcaaggagcttatttatatgtttgtggtgacgccaaaggcatggcaagagatgttcacagatctctccacacaatagctcaagaacaggggtcaatggattcaactaaagcagagggcttcgtgaagaatctgcaaacgagtggaagatatcttagagatgtatggtaa

SEQ ID NO: 606 - DNA, 1539 bp, Arabidopsis thaliana
atggacaatagcagaaccagacaaaacatgaatggttctgctaattggtcacaacaatccggaagaacatctacttcctctttggaagatcttgagataccaaagttcagatcttttgctccttcttcaatctctatctctccttctcttgtctctccttccacttgtttcagtccctctctttttctcgattcccctgcttttgtctcctcctctgctaacgttctagcttctccaaccacaggagctttaatcacaaacgtaactaaccagaaaggtataaatgaaggagacaagagcaacaacaacaactttaacttattcgatttctcattccacacacaatcatcaggagtttctgctccgaccacaactacaactacaactacaactacaacaacaacaaacagttctatctttcaatctcaggaacaacagaagaagaaccagtcagaacaatggagccaaaccgagactcgtccaaacaatcaagctgtatcttacaatggaagagagcaaaggaaaggagaggatggttacaattggagaaagtacggacaaaaacaggtgaaaggaagtgagaatcctcggagttactataagtgtactttccctaattgtccaacgaagaagaaagtggagagatctttggaaggtcagatcacagagattgtgtataaaggaagccacaaccatcctaaacctcagtctactagaagatcttcttcgtcttcttcgacttttcattcagctgtgtacaatgccagtttggatcataatcgtcaagcttcttctgatcagcctaattccaataatagctttcatcagtctgattcctttgggatgcaacaagaggataatactacttctgattctgttggtgacgatgagttcgaacaaggctcatcgattgtcagcagagacgaagaagattgtgggagtgaacctgaagcaaagagatggaaaggggacaatgaaacaaatggtgggaatggtggtggaagcaagacagtgagagagccgagaatcgtagtgcagacaacgagtgatattgacattcttgacgacggttacagatggagaaaatacggccagaaagtcgttaagggaaacccaaatccaagaagctactacaagtgcacaaccatcggttgtccagtgaggaaacatgtggagagagcatcacacgacatgagagcagtaatcacaacctacgaagggaaacacaaccacgatgttcctgcagctcgtggtagcggttacgccacaaacagagcaccacaggattcgtcttcagtcccgattagaccagctgctattgctggtcactccaactacactacttcttctcaagcaccatatacacttcagatgctgcacaacaacaacactaataccgggccttttggttacgccatgaacaacaataacaacaacagcaaccttcaaacgcaacaaaactttgttggtggtggattctctagagcaaaggaagaaccaaacgaggagacctcatttttcgattcgtttatgccctga

SEQ ID NO: 607 - DNA, 1764 bp, Arabidopsis thaliana
atggcaccaatcaaagaattcatatccaaattctcagatttcaaaaacaacaagaaactcattctctcctccgccgcaatagccttgctattattggcctccatagtcggaatcgccgccacaacaacaaaccaaaacaaaaaccaaaaaatcacaactctatcttcgacatcacacgccattctaaaatctgtttgcagctcaacactatacccggagctctgtttttccgccgtggcagccaccggaggaaaagagctgacgtcacagaaagaagtcatcgaagcgtcacttaacctaactaccaaagccgtgaaacacaactacttcgctgtcaagaagctgatcgcgaagagaaaaggtttgacaccgcgtgaggtcacggcgcttcacgactgtttggagacaatcgacgagacgttagatgagctccacgtggcggtggaggatcttcatcagtatcctaagcaaaaatctctgaggaaacatgccgatgatctcaaaacactaatcagctcagccattactaatcaagggacttgccttgacggtttctcttacgacgacgccgataggaaagttcgtaaggcgttattgaagggtcaggtacacgtggagcacatgtgtagcaacgcattagcaatgatcaagaacatgacagaaaccgacatagccaactttgagctaagagataagtcttcaaccttcaccaacaacaacaaccgcaagctcaaggaggttaccggcgacttagacagtgatggatggccaaagtggttatccgttggagacagaaggcttcttcaagggtcaacaattaaagcagacgctacggtggcggatgacggaagcggtgactttacaacggtagccgcggctgtggctgcggcgccagagaagagtaacaagaggtttgtgatacatataaaggcaggagtttatagagagaatgtggaagtgacgaagaagaagacgaatataatgttcttgggagatggccgtggcaaaactattatcactggaagtagaaatgtcgtcgatggaagcaccactttccactccgctactgttgctgccgtcggcgagaggtttctagcgcgtgacatcacattccaaaacaccgccggtccgtcgaagcatcaagcggtggctctccgagtcggatcagatttttccgctttttaccaatgcgacatgtttgcttatcaagacacactttatgtccactcaaatcgtcaattctttgtgaaatgtcacataaccggaaccgtcgatttcatcttcggaaacgcagccgcggttttacaagactgcgatataaatgcacgcagaccaaattccggtcagaaaaacatggttaccgcccaaggacggtctgatccgaatcaaaacacggggattgtgatccagaattgtcgtattggtggcacgtcggatcttttggccgtgaaaggaacgttcccgacgtatcttggtcgtccttggaaggaatattcacggacggtgataatgcaatcggatatatccgacgtgatccgacccgaaggatggcatgagtggagcgggagttttgcgttggacactctaacttatagagagtatttgaatagaggaggaggggcaggaactgcaaatagagtgaagtggaagggctataaggtaattacaagtgatacagaagctcagccatttacggctggtcagtttattggtggtggaggctggttagcgtcgaccggttttcctttctcgttaagtctttga

SEQ ID NO: 608 - DNA, 1878 bp, Arabidopsis thaliana
atgcctaactcgattctctttcttcttctttcattcctgtatctcacaaactgcgttgctcaatctccatcacaaacttgtcctttagatttctctcatgtcctaacaatcccatggaacacaacagattgtcaaaagtccgacaaatcagccgatagcaagaacagttgttgccaatctcttttaactctaatcggaatccctctagctcatcgtctcaaacaaacttccaatttccgtctcccaaatctcgctacttcaatctcttgtctcaacaatctccaaacgaagcttagttcactctctctatcttcgaatctcacctctctctgtttcgatccgaatcagttcgtcatcaataacgaaacctgtgctggaatccaaacgactcaagattgggtatctcgtctcggtccatctacggcgcttgactccgcctgtagcagtggtctcactgatctaacgcgatgcgacgcttgcgtggcggctgggtttagggttcaaaaacagctcatcactttggacggtaatagctctcacggtgtttattgttaccattttgtggttacttacgctgctggtattgttaacaagaaaggacctgagagtgatgatgctttgtcttgtctcttctctttgagtttgagatctccattgaactcaaagaagaaaagacacacggtggctcttgctttagggataaccggagctattttcggggctctggttattgccggtttgatttgtttgtatttccggtttggtaaagctgttaaaggaggagaggttggttgggaggatcaagggtctagaccgaaatggagaccaaacactggctctatctggttcaaaatcgaggaactagagaaagctacgaataacttctcgcagaagaatttcatcggtcgaggcgggtttggttttgtttacaaaggggttttaccagatggatcggttatcgcggttaagaaggtgatagagtctgagtttcaaggggatgcagagtttcgtaatgaggttgagatcattagcaatttgaaacataggaatcttgttccgcttagaggttgtagtatggtggatgatgatagtgagagtcagagatatcttgtttatgattacatgtctaatggaaatctcgatgatcacttgtttcctcgaggtgagactacgaagatgccattgagctggcctcagagaaagagcatcattttggatgtggctaaagggttggcttatttgcattacggtgtgaaacccgctatttatcaccgggatattaaaggtacgaacatattgttagatgtcgatatgagagcgagagttgcggatttcggtttagctaaacagagtagagaaggagagtctcatctcactaccagagttgcgggaacacacggttacttggctccagagtatgccctctatggtcaattaaccgagaaaagcgatgtgtatagcttcggggttgttatattggagatcatgtgtggaaggaaagctcttgatctgtctacttctggatcaccaaacacttttctgatcacagattgggcttggtcattggtaaaagcagggaaaacagaggaagctcttgagcagtctttgttgagagaggaaggctcagggctctcgaatccgaaagggataatggagagattcttgcaagttgggatattgtgtgcccatgtattggttgctttaaggccaacaatattagatgcattgaaaatgcttgaaggagacatcgaggttcctcctattccggaccgaccagtcccgctcgcgcatccttcgtaccgtatggacggaaacggattcacaatatcgcctgcgcttagcggactacaaatacattccggagatatgctcagatga

SEQ ID NO: 609 - DNA, 1410 bp, Arabidopsis thaliana
atgccacttcaccgtcaaatatatgtagattcgcgccggatccatcttattgtagatcggttcttccaaaccagcccggagatatatattcctacggacgtttgtctctacgaagatccctctcacgagcccgccggggctctcgaagactgcaaattcctagccagcctgactatggactacctccttagtagctcacagacggctgattccaccaaaacactgtcgttatctagggccgaggatgttcatacatttctgagtgctgccatcaccaatgagcagacttgtcttgaaggacttaaatcaacggcgtccgaaaatggtctttccggtgatcttttcaacgatacaaaactctatggggtgtctcttgcccttttctccaaaggtataaacaaaagttgggtgccaagaaggcaaagatcgagaccgatttggcaaccacaagccagcgacattgtgacggtgatccagaacgggacgggaaacttcacgaccataaacgccgccattgcagctgcaccaaataaaactgacggtagtaacggttacttcttgatctacgtaacggcgggattgtacgaggaatacgtggaagttcccaagaacaagagatatgtgatgatgatcggtgacggcatcaaccagaccgttatcaccggaaacaggagtgtcgttgatggatggacaactttcaattcagccacatttattctatcaggtcccaactttattggtgtaaacataacaatccgcaatacggcaggaccaaccaaaggccaagctgtggcattgaggagtggtggggacttgtctgttttctacagttgtagttttgaagcctatcaagacacgttatacacacattctctcagacagttttatcgtgaatgtgatgtctatggtactgttgattttatatttggtaacgctgcagtggtattacaaaactgtaatttgtatccacgtcaacctcgcaaaggtcaatcgaacgaggttacggctcaaggtcgtactgatccgaaccaaaacactgggacggcaattcatggttgtactataagaccggcagatgatttggctacgagcaactatacagtgaagacttatcttggtcgaccatggaaggaatattctagaaccgttgtcatgcaaacttacatagacgggtttctagaaccgagtggttggaatgcatggtctggtgattttgcattgagcacactttactacgcggaatataataataccggacctggttctgacacgacaaaccgagtcacttggcctggttatcacgtcatcaacgcaactgatgcttccaatttcacggtcaccaatttccttgttggtgaaggttggattggacaaaccggagtgcctttcgtgggtggactgatcgcataa

SEQ ID NO: 610 - DNA, 2064 bp, Arabidopsis thaliana
atgttgctcgcaggagtgttgtccatgagtatccttaccatagagaacaagtgcaatcacacagtttggccagttatcttctcatggaacgttgactcacaagtctccccaacaggctttgctctcagaagaggggaggctcgagccctacaggcgccatcttcatggtacggtcttatctcggctaggacgctatgctccatcgactcaacaggaacattctcttgcgccacaggagactgcgaatcgggtacgatcgagtgtcctggcaattacggttgggctccggtgacttatgtctactttagaatgaacagctacaccatcagtgttgagtacggttacaaccttccactaatggtggtcccttcacagcgtagccggacatgtatcagcgctggttgcgttgttgaactgaaaaagacttgtccaaaagatcttatgaaaatgtccagagaaaatctagtcgcctgtagtagcacgtgcatggagtttgatactccggaggcttgttgcacccgagacttcaagtcaaagcaaaactgcaagccgacagtgtacacgcagaactttgagcgagcttgcccactcgctcatatctacgcctatgatgataacaatagcaccgttacatgcctaaactctactgactacgtcatcacgtttttcgcctgcaaaagtgcgtgtcgacaatccgcatccgatgagaattgttgcactaattacttcaagtataagcaaacttgtaagccgacaccgtacgtacagaacttcgaccgtgcttgcccatccgcttatagctaccccttcagcggtaataacagtaccttcacatgcacaaattcaactgattacgtgatcacgttttgtccctcctccattcccaacaccacaaggggaggctcagcagctttaattgtgttgatcagtattgttgtgattgcgctagtagtgagagcgaggcatgcgaaaagaaagagtgaattgaacgacgagaacattgaagcggttgtgatgttgaaacgttatagctttgaaaaagtcaagaagatgacaaactcgtttgatcatgttattgggaaaggaggatttggaactgtctataaaggaaaactacccgatgccagcggccgagatattgctctgaagatcttgaaagagtcaaaagggaatggagaagagttcatcaatgaactagttagcatgagtagagcttctcatgttaacatcgtttctctttttggattttgctatgaagggagccagagagctattatctacgagttcatgccgaatggatcccttgacaagtttatatccgagaatatgtcaacaaagatagagtggaaaacattatacaacatcgcggtaggtgttgctcgtgggctcgagtacttgcacaatagttgtgtatccaagattgtgcatttcgatataaagccacagaatatactcatagacgaagacttatgcccgaagatttcggatttcggtcttgctaagctatgcaaaaagaaagaaagtatcatatcaatgttagacgcgagagggacagtagggtacattgctcctgaaatgttttccaagaactatggaggagtttcgcataagtcagatgtgtatagttatggaatggtggttcttgagatgattggggcaacgaaaagagaagaagttgaaacttctgcgaccgataaaagttcaatgtactttcctgattgggtctatgaggatcttgagaggaaagaaaccatgagactattagaagatcatataatcgaagaagaagaagaagagaagatagtgaagagaatgacattagtgggtttgtggtgtatacaaaccaatccatctgatcgtccaccaatgagaaaagttgttgaaatgttagagggcagtcgtctagaagctctacaggttccacctaagcctctcttgaatttacacgtagtaacggattgggaaacttctgaagatagtcaacagacttctagactctcgacacaaagcttgttagagagaaaaactcgttcgaattaccaatatactgtggaagcggtttaa

SEQ ID NO: 611 - DNA, 1242 bp, Arabidopsis thaliana
atgggtctttgttggggatctccatctgattctcctccaacaacaacaccttcctctactggtaacatcagttcagggacttttaagtcatcaaacaacacgacgactacaggaacatcaaggggaagtaacatatctagcaatagtgggttctctgtggcaagtggtgaagatgcttaccccgatggtcagatacttcccattccgaatttgaggatattcagcttagcagaacttagagcttcaacaaggaatttcaggtctgagaatgttcttggagagggaggatttgggaaagtctttaaaggctggcttgaagacaagactccagggaaacaaagcaacggaactgtgattgctgttaagaaactgaatgcagaaagcttccaaggattcgaagaatggcaatgtgaagtgaattttcttgggagggtttctcatccaaacctcgtgaagctgttgggatactgcttggaaggtgaagagttgcttcttgtgtatgagtatatgcaaaaagggagcttagagaatcatctcttccgaaaggggtctgccgttcagccactctcatgggagataaggcttaagattgcaataggagcagctaaaggcttagcattcttacacgcttcagagaagcaagtaatttatcgagacttcaaagcgtcaaacattctacttgatgggtcatataacgcaaagatatcagattttggattggcgaaattaggaccttccgctagtcaatctcacatcacaacacgggttatgggtacacacggttacgcagctccagagtatgttgctacaggtcacttgtatgtaaagagcgatgtttacgggtttggcgttgttttggctgagatcttaactggtttacatgcgcttgatcctactcgtcctaccgggcaacacaatctaaccgaatggatcaaacctcatctatccgaaagaagaaagctaagaagcataatggaccctcgtctagaaggaaaataccctttcaaatctgctttccgagtagctcaactggctctgaaatgccttggacccgaacccaaaaaccgtccatcgatgaaagaagtggtggaatcgctcgaactcatcgaagctgccaatgagaaaccgttagaacgaaggaccactagagcttccccatccatccgtcaacaacaaggccattatcgcccgcaacaactctcttcgtttcgtcctagacaaaacgtgtctcgagctcactag

SEQ ID NO: 612 - DNA, 1437 bp, Arabidopsis thaliana
atgaagattgagcttgtgttcatacctttgccggggattggtcatctcaggccaaccgtgaagctagcgaagcaactcataggcagcgaaaaccgtctttcgatcaccataatcatcatcccttcaagatttgacgccggtgatgcatccgcctgtatcgcatctctcaccacgttgtctcaagatgatcgcctccattacgaatccatatccgtcgcaaaacaaccaccaacctccgacccggatcctgttccggctcaagtgtacatagagaaacaaaagacgaaagtgagagatgcagtcgcggcgagaatcgtcgatccaacaagaaagctcgcgggattcgtggtggacatgttctgttcctcgatgatcgatgtagctaacgagtttggagttccgtgttatatggtatacacatcgaacgctacgtttttaggaaccatgcttcacgttcaacaaatgtacgatcaaaagaagtatgacgtcagcgagttagaaaactcggtcaccgagttggagtttccgtctctgactcgtccttatccagtgaagtgtcttcctcatatcctcacttcaaaggagtggttacctctctctctagctcaagctaggtgtttccggaagatgaagggtattttggtaaatacagttgctgagcttgaacctcacgctttgaaaatgttcaatattaatggtgacgatcttcctcaagtttatcctgttggaccagtgttgcatctcgaaaacggcaatgacgatgatgagaagcaatcggaaattttgcggtggctcgacgagcaaccgtctaaatctgttgtgtttctctgctttgggagcttgggaggtttcactgaagaacaaacaagagaaaccgctgtggccctagatagaagcggtcagcggtttctttggtgtcttcgtcacgcatcgccaaatataaaaacagatcgtcccagagattacacgaatcttgaggaggttttaccggaggggttcttggaacggactttggatagagggaaagtgattggatgggcaccacaagtggcggtactagagaagccggcgataggagggtttgtcactcactgcggttggaactctattttagagagcttgtggttcggtgttccaatggtgacgtggccgctatacgcggaacagaaggttaacgcgtttgagatggttgaggagctgggtttggcggtggagatacggaagtacttaaaaggagatttgttcgccggagagatggagacggttaccgcggaggatatagagagagccattaggcgtgtgatggagcaagacagtgacgttaggaacaacgtgaaagagatggcggagaagtgccacttcgcgttaatggacggtggatcttcgaaggcggctttggaaaagtttattcaagacgtgatagagaatatggattaa

SEQ ID NO: 613 - DNA, 1359 bp, Arabidopsis thaliana
atgaagaagattgagctcgtgttcataccttcgccgggaatcggccatctccggccaaccgtgaagctagcaaagcaactcatcggaagcgaagaacattttttcaatcaccagtctcaagatcgcctccgctacgaacccatctccgtcgaaaaacaaccaccaaccgcaaatcttgagccgtctcaagtctacatcgagaaacaaaaaccacaagtgagagacaccgtctccagaatcatcaatccaacaagaaaactcgccggattcgtggtggacatgttctgttcttcaatgatcgatatagctaacgaatttggagttccttgttatatgatctacacatcaaacgctacgtttttgggaatcacacttcacgttcaagaaatgtacgacgacaaaaagtatgacgtcagcgatttggatgagtcagtcaacgaattggagtttccttgtttgactcgtccttatccagtgaagtgccttcctcatatccttagttcaaaagattggttacctttttttgcagctcaaggtaggtctttccggaagatgaaaggtattttggtaaatacagttgctgagcttgagcctcacgctttgaagatgtttaacaatgttgatcttcctcaagcttatcctgttggaccagtgttgcatcttgataacggcgatgacgacgatgaaaagagattggaggttttgcggtggcttgatgatcaaccgcctaaatctgttttgtttctctgttttggaagtatgggaggtttcactgaggaacaaactagagaggtagctgtggcgttaaaccgaagtggtcaccggtttctttggtctctccgtcgtgcatcgccgaatataatgatggaacgtcccggagattataagaatcttgaggaggttttaccggacgggttcttggaacggactttggatagagggaaagtgattggatgggctccacaagtggcggtgttagagaagccggcgataggagggtttgttactcattgtgggtggaactctatgttagagagcttgtggtttggtgttccgatggtgacgtggccgctttacgcggagcagaaggttaacgcgtttgagatggtggaggagctgggattggcggtggagatacgtaagtgcattagtggagatttgttgttgatcggagagatggagatagtgacggcggaggatatagagagagctataaggtgtgtgatggagcaggatagtgatgtaaggagtcgagtgaaggagatggcggagaagtgtcacgtggcgttgatggacggtggatcttccaagacggctttgcaaaagtttattcaagacgtgatagagaatgttgcttaa

SEQ ID NO: 614 - DNA, 1940 bp, Arabidopsis thaliana
atgggaaagagttgtgttgtgactagttccttctcgcttctccttctcttccttcaaaccctaaaatatgttcatgccggtttcatttgctacggcgactttttcaatgttaactacggcgtcagtcgaacgtatctcttctcttctcttccttctaacgtcgtttctaacggcggtttctacaacgcatcgtttggcagagattccaaaaacaacagagtccacgttgttgccttatgcagacgaggctacgagaagcaagcttgtaagacatgtctcgaacatgtgattgaagacacaaaatccaagtgtcctcgccaaaaagagtctttctcgtgggtcactgatgaattcgacgacgtttcttgctctctacgttacaccaaccactcaactcttggcaaactcgagctcttaccaaatactattaaccctaaccctaacagtatagattccaaattcaacaacatggccatgttcagccaagaatggattgcaatggttaaccggacactcgaggctgcttccaccgctgagaattcctcagtccttaagtactacagcgcaacaagaacagagttcacacaaatttcagatgtttacgcgttgatgcagtgcgtgcctgatctatcgccaggcaactgcaagagatgtcttagagagtgtgtgaatgactttcagaagcagttttggggaagacaaggaggtggggttagtcggcctagctgttatttccggtgggatctttatccgtactacagagcttttgacaatgttgtaagagttcctgctcctcctcctcaagcttcttctactattatcgattacgggagagacgagaaaagttttcaaggaagcaacatagcaattattgtggtcccttcagtcatcaatctcatcatatttgtggttctaatattctcttggaagagaaagcagtcacacaccataatcaatgatgtttttgattcaaataatggtcaatctatgttacgttttgatcttcgaatgattgtaactgcaaccaataacttctctcttgaaaataagcttggccaaggtggatttggatctgtctacaagggaatattaccaagcgggcaagagatagcggtaaagagattaagaaaaggttcaggacaaggaggtatggagttcaagaacgaggtcttactcttgacaagactccaacataggaatctggttaagcttcttgggttttgtaatgaaaaagatgaagagattcttgtctacgagtttgtccccaattcaagccttgaccacttcatattcgatgaagaaaaacgccgagttctgacatgggatgtgaggtatacaatcatagaaggagttgcaagagggcttctttatctccatgaagattctcagttgaggattatacacagagatttgaaggcaagcaatatccttttagacgcggagatgaaccctaaggttgcagattttgggatggcaaggctgttcgatatggacgagactcgaggacagacaagcagagtagttggaacatatggatatatggctccagaatacgcgacatacggacaattctcgacaaaatctgatgtttatagctttggtgtcatgcttctagagatgataagtggtaaaagcaacaaaaagttggaaaaagaagaagaggaagaagaagaagagcttccagcttttgtgtggaagaggtggattgaaggaagatttgcagagatcattgatcctttggctgctccgagtaacaatatctcaataaacgaagtaatgaagctcattcacataggtttgttgtgtgttcaagaggatatttccaaaagacctagcattaattcaatcctcttttggcttgagagacacgctactatcacaatgcctgtgcccacgcctgttgcttatcttacgcgaccatcgttatcacttggtcatta

SEQ ID NO: 615 - DNA, 546 bp, Arabidopsis thaliana
atggaagggggagaagagtttcaagaagaagaagtgtggtcagttttgagagaaagtgaaactcaaggtcctgaaatgaaaatgtccaaaagtaacaatctcttctcagcctcttcctcatcttctgcgaggtacattcctaaaggcaacgaggtctctggaggggcaaaacagtcatctgctccaatgaatattcctgactggtccaaggtttatgggtattcaaagaagaacacaagcagccacttgcattcatgggccattgacgatgatgatgaaggctcaatggttcctccacatgagttagtagcaaaaagacttgcaagaacgcagatctcatcattctctatgtgcgaaggaatcggaagaacgctcaaaggaagagatctcagcaaaacaagaaacgctgtcttaacaagaactggtttttggatttttttagataagtatgatgacgatgaggatgacttgtcaatcccatgcatgggcccataccatttttctcatgttatgtttgtagttctcaatggtcttttaactctttag

SEQ ID NO: 616 - skipped

SEQ ID NO: 617 - DNA, 1059 bp, Arabidopsis thaliana
atgacccggtccgtcagtttccctctcttcctcttcgccgttgtactctccctctcttcttctctcctcgccgacgatcccaaaccaatccgccgtgaggtctacgaaggaggtaagatatacgacatcagccatcgttacacgccggagattccagcttgggaatcttcggaaggattgggaaagacgttcctgcgattagccgcgagtatgaagaatggatcattcgctaacgtatcggagatgaaactatctgttcactctggaactcacgtggatgctccaggtcacttttgggataattattacgatgctggttttgatactgattcgcttgatctccaagtcctaaatggtcctgctttgttggttgatgttccgagagataagaacattactgctgaggtaatggaatcacttcatatacaaagaggagttcgtcgtgtgctctttagaacatccaacaccgacaacttgtattacacatttttttctgaaaccggttattctgcattgtggaatccagggcttgattatctttcatttgctgcttttgaggaatcacctgcaacacacagggttatacttaaaggacggcggtattcactggacaagaaagtgagagagataggtaggcttaaaagggagatgaactacgtcttaacacgtgagatacacatgttttcaggatataatcccagtggaagcgctgaagctggatggtgtggaggtaggaacatactcgcttcattgcttaccgctgagattagttggagcggaaggagcaccgacaagatgcattctcatcaagtgattcagggaaaaaggaaacacaatctgtgtgttttggttgtattccattatattgaaagagacatgcaagtcccatctagcttgcaaaaagctagcgtacttagcaccaaggagaagcctctgaatgcacaagagagcgttctcgtggttcatcagttgaatgataatagaagtgaaccagctctgcttaccactaaaattagattgttagatgttgccaaacgaattgcaaaagaaaaatcataa

SEQ ID NO: 618 - DNA, 369 bp, Arabidopsis thaliana
atgcaaatgctaagaagcttgagcacgaggacaagaagccgtcgtggaggatacgagagagtgagtgatgattcaactttcagtttactcggagcaaagctaaggagatcgacgagtgttccttactacgcaccatctataaagcttggagctggtggtgttccgaccattcttgaggagcttcctcgtcagaaatcaaagaaagtcaaaccaacaggcaaatttagtcacccaatctttagtcttttctacggaaagaagaagaagtcgacgacgacgaagcctgagttttctaggtatcttgagtatttaaaggaaggtggtatgtgggatgccagagctaatgcgcctgttatctattacaagtag

SEQ ID NO: 619 - DNA, 1086 bp, Arabidopsis thaliana
atggcgaaatctcagatctggtttggttttgcgttactcgcgttgcttctggtttcagccgtagctgacgatgtggttgttttgactgacgatagcttcgaaaaggaagttggtaaagataaaggagctctcgtcgagttttacgctccctggtgtggtcactgcaagaaacttgctccagagtatgaaaagctaggggcaagcttcaagaaggctaagtctgtgttgattgcaaaggttgattgtgatgagcaaaagagtgtctgtactaaatatggtgttagtggatacccaaccattcagtggtttcctaaaggatctcttgaacctcaaaagtatgagggtccacgcaatgctgaagctttggctgaatacgtgaacaaggaaggaggcaccaacgtaaaattagctgcagttccacaaaacgtggttgttttgacacctgacaatttcgatgagattgttctggatcaaaacaaagatgtcctagtcgaattttatgcaccatggtgtggccactgcaaatcactcgctcccacatacgaaaaggtagccacagtgtttaaacaggaagaaggtgtagtcatcgccaatttggatgctgatgcacacaaagcccttggcgagaaatatggagtgagtggattcccaacattgaaattcttcccaaaggacaacaaagctggtcacgattatgacggtggcagggatttagatgactttgtaagcttcatcaacgagaaatctgggaccagcagggacagtaaagggcagcttacttcaaaggctggtatagtcgaaagcttagatgctttggtaaaagagttagttgcagctagtgaagatgagaagaaggcagtgttgtctcgcatagaagaggaagcaagtacccttaagggctccaccacgaggtatggaaagctttacttgaaactcgcaaagagctacatagaaaaaggttcagactatgctagcaaagaaacggagaggcttggacgggtgcttgggaagtcgataagtccagtgaaagctgatgaactcactctcaagagaaatatcctaaccacgttcgttgcttcttcttaa

SEQ ID NO: 620 - DNA, 987 bp, Arabidopsis thaliana
atgggtttggttagatcattgtgcttattaataaccttccttaattgtctcatcatctcggttcatggccaagccaccgcaaggcctggtcctgtttccggcactaggattgggttttacttaactacgtgtcctagagctgagactattgtccgaaacgccgtgaatgctggtttcagttctgaccccagaatcgcacccggaatactgagaatgcatttccacgactgttttgtccaaggttgtgacggttcgatccttatatccggagctaacaccgagagaaccgccggtccgaacctcaatctccaaggatttgaagtcatagacaacgccaaaacgcagctcgaagccgcgtgtcctggagttgtctcttgtgctgatattttagcattagccgctcgtgacacagtcattctcactcaaggaacaggctggcaagtaccaacgggacgtagagatggtagagtttctttggcttcgaatgctaacaatctccctggtccccgtgactccgttgccgttcaacaacagaaattctccgccttgggactcaatactcgtgatctcgtcgtcctcgtcggaggacacacgatcggaacagcaggatgtggtgtattcaggaacaggctattcaataccaccggacaaaccgcagatccaaccatcgacccaacatttttggcgcagcttcaaacacaatgtccccaaaacggcgacggttcagtgcgcgtggatctcgacaccggaagcggaagcacttgggacacttcttactacaacaacctaagccgtgggcgtggagttctccaatccgatcaagtcctttggaccgatccagccactagacccatagtgcaacaattgatggctcctagaagcaccttcaacgttgagtttgcgaggtcaatggtcagaatgagtaatatcggtgtggttaccggagctaatggggaaatccgtagggtttgctctgcggttaattaa

SEQ ID NO: 621 - DNA, 1863 bp, Arabidopsis thaliana
atgaagagagaaggagaagaagaagaagacaacaatcaactttcactgcaagaagaagaaccagatacagaggaagagatgtctgggaggacaatcgaaccgtggacgaagcagataacggtgagaggagtgttcgtgagcatagtgatcggagttgtgttcagtgtgattgctcagaagctaaatctcacgacaggaattgttccaaatctcaacagctctgcagctttacttgcttttgtctttgtccagacttggactaagattctcaagaaatcaggatttgttgcgaaaccattcacaagacaagagaacacaatgattcagacatctgctgttgcttgttacggcatcgctgtcggaggtgggtttgcttcatatcttctggggttaaaccataagacatatgtgttgtctggtgtgaacttggaaggtaactctccaaagagtgtgaaagaacctggccttggttggatgactgcttatctctttgttgtctgtttcatcggtctttttgtcctaatccctctccgaaaggttatgattgttgaccttaaattaacatatccgagtggtttagctactgcggttctcatcaatggcttccacacacaaggagatgcacaggccaagttcttctttgatttcagcatgacatttgtgggagcaggaatgatttgttcacatttggttaacctttctttgcttttaggagctatcctctcttatggcttaatgtggcctcttcttgataaacttaagggctcttggttccctgataatctcgacgaacacaacatgaagagcatttacggctacaaagtcttcttatccgtagctctaatcctcggcgacggtctttacactttcgttaagatcctctttgtgaccattgccaatgtcaacgcaagattgaagaacaaacctaatgatctagatgacgtaggtcacaagaaacaacggaaagatctcaaggaagatgagaatttcctcagagataaaatcccaatgtggttcgcagtttccggatatcttacattcgctgcggtctcaaccgtcgtggttcctctgatatttcctcagctcaaatggtattacgttattgtagcttacattttcgcgccttctctggccttctgtaacgcttatggagctggacttacagacattaacatggcttataactacggcaaaattggtctttttgtcatcgcggctgtgacgggaagagagaacggagttgtagccggactcgccggttgtggactgatcaaatccgttgtttcggtttcttgtattttgatgcaagatttcaagacggctcattacacgatgacgtcacctaaggctatgtttgctagccaaatgattggaacggtcgttggatgcatcgtgacgccgttaagtttctttttgttctacaaagcgttcgacattggaaaccctaacggagaattcaaggctccttacgctttgatttacagaaatatggcgattcttggggtgcaaggcttctctgctctgcctcttcactgtctccaaatgtgttacgggtttttcgggtttgctgttttggtcaacgtcgtcagagatcttactccggcgaagattggaagattcatgccacttccgacggcgatggctgttccgtttcttgtcggagcttatttcgcaatcgacatgtgtgttgggactttgattgtgtttgtttgggagaagatgaatcggaagaaagcagagtttatggttccggcggtggcttcagggctaatctgtggcgaagggctttggactttacctgcggcggtgcttgccctcgccggagtaaaacctccgatatgtatgaagttcttagcttcatag

SEQ ID NO: 622 - skipped

SEQ ID NO: 623 - DNA, 729 bp, Arabidopsis thaliana
atggcgggagaagatagccgtgaagctcaacgaggcgacgaatatgaggaatcgagtcctctcttgaaggtgaacgagaatgacggcaagatctgctcgaaaagagatgccaaggcggcgcctcttgtgcctcctcccgcggcggaggaatacggctggacggcggatggattgcctgtgagccatggtagcgtgattggcgagccgatcaggagaaaccagtggaattctggtctttttacctgtcttggtcgcaatgatgaattttgcagcagcgatctcgaagtttgtcttcttggaagtgtggctccttgtgtgttgtatggaactaatgcagagagacttgggtctgctccgggaacattttcaaaccattgcttgacgtatttgggattgtactttgttggtaattctttgtttggctggaactgtcttgctccatggttctcttattctagccgttctgctattcgccgaaagtttaaccttgagggaagctttgaggctatgaacaggtcttgtggttgctgcggtggctgcatagaggacgagatgcaaagggaacacttggagacgacttgtgactttgtgacacatgtcctttgccatacatgtgccctttgccaagaagggcgtgagctccgcaggaaggttcttcacccaggtttcaatgctcagtccaccgttgttgtgatgccacccatagaacaaaccatgggtcgtaagtga

SEQ ID NO: 624-625 - skipped (2 entries)

SEQ ID NO: 626 - DNA, 609 bp, Arabidopsis thaliana
atgaatcctgaatatgactatttgttcaagcttttgctcattggtgattctggtgttggaaagtcgtgcttgcttctaaggtttgctgatgattcctacctggatagctacatcagcaccattggtgtcgactttaaaatccgaacagtcgaacaagatggaaagaccatcaaactccagatttgggatacggcaggccaggaacgtttcagaacgattactagcagttactacagaggagctcatggaattattgtgacttatgatgtaacagatctagaaagcttcaacaacgtcaagcaatggctaaatgaaatcgaccgctatgcaagtgagaatgttaacaagctactggttgggaacaagtgtgatctcacatcacagaaagttgtatccactgagacagctaaggctttcgctgatgaacttgggatcccattcttggaaacaagtgctaagaatgctaccaatgtcgaagaagctttcatggccatgactgctgcaatcaagaccagaatggcgagccaacctgcaggaggatctaagccaccaacggtccagatccgaggacaacctgttaaccagcaatcaggctgctgctcctcttaa

SEQ ID NO: 627 - DNA, 1077 bp, Arabidopsis thaliana
atggaagcaaaaggggcagcacagtggagctctatcctagttccatccgttcaagagatggttaaggagaagacgatcacgaccgttcctcctaggtacgtccggtctgatcaagacaaaactgaagtcgatgatgattttgatgtgaaaattgagatcccaatcatcgatatgaagcgtttgtgttcttcaaccaccatggattctgaggttgagaaactcgacttcgcttgcaaagagtggggatttttccagcttgtaaaccatggaatagactcaagtttcttggacaaagtaaagtcagagattcaagatttcttcaaccttcccatggaagaaaagaagaagttctggcagcgaccagatgagatagaaggtttcggacaagcttttgtggtttcagaagatcagaaactagattgggcagacttgttcttccataccgtgcaaccagttgaattacgcaagcctcacttgttccccaagctacctcttccctttagagatacactggagatgtattcttctgaagtgcagagcgtagctaagatcttaatagcgaaaatggcaagagccctagagatcaaaccagaggaactggaaaagttgtttgatgatgttgattcggttcaaagtatgaggatgaattactacccaccatgcccacaaccagatcaggttattggtctaaccccgcattctgattcggtcggactcactgtactgatgcaagtgaatgacgttgaaggtctccaaatcaagaaagatgggaaatgggttcctgttaaacccctcccaaatgctttcattgtcaatattggagacgtcttagagatcataactaatgggacataccgaagcatagagcatcgcggagttgtgaattcagagaaagagaggctctctattgcaacgtttcacaatgtgggaatgtataaagaagttggtcctgcaaaaagcctagttgaaagacaaaaggttgcaagattcaaaaggctgaccatgaaagagtataacgatggtttgttctctcgtactctcgacggaaaagcttatctagatgctttgagaatctaa

SEQ ID NO: 628 - DNA, 920 bp, Arabidopsis thaliana
atgaccacgttattcctccttattgctctattcatcacaaccatcctcaacccaacaagtggagaatcagtaggtgtatgctatggaatgatggggaacaaccttccttctcaatcagacacaatcgctctctttagacaaaacaacatccgacgtgttagactctacgatccaaaccaagccgctttaaacgctcttagaaacacgggtatcgaagtcatcatcggcgttccaaacaccgatcttcgttcactcactaacccttcttccgctagatcatggctccaaaacaacgtcctcaactattaccccgccgttagcttcaagtacatcgccgtaggtaacgaagtatctccgtcgaacggcggtgatgttgtgctccctgccatgcgtaacgtttacgatgctctaagaggtgcaaatcttcaagatcgtattaaagtttctaccgccattgatatgactttgattggaaactctttccctccttcctccggagagtttcgtggtgacgttagatggtatatcgatcccgtcatcgggtttcttacgagtacgaactcagcgttactagccaacatctatccttacttcagctacgttgacaatccacgtgacatatctctctcttacgctctcttcacttctccttccgtcgtcgtatgggacggctctcgtggctaccaaaacctctttgacgctttacttgacgttgtttactctgccgttgaacgctcaggcggtggatctctcccagtggttgtttccgagagcggatggccttctaacggtggaaacgccgcgagtttcgataacgcgcgaagctttttacacgaatcttgcgtcgcgtgtgagagagaacagaggaacaccgaagagacctggaagaggagtggaaacgtatttgttcgctatgtttg

SEQ ID NO: 629 - skipped

SEQ ID NO: 630 - DNA, 819 bp, Arabidopsis thaliana
atggaatccaattcgtttttcttcgatccatctgcttcacacggcaacagcatgttcttccttgggaatctcaatcccgtcgtccaaggaggaggagcaagatcgatgatgaacatggaggaaacttcgaagcgaaggcccttctttagctcccctgaggatctctacgacgatgacttttacgacgaccagttgcctgaaaagaagcgtcgcctcactaccgaacaagtgcatctgctggagaaaagcttcgagacagagaacaagctagagcctgaacgcaagactcagcttgccaagaagcttggtctacagccaaggcaagtggctgtctggtttcagaatcgccgagctcgttggaaaacaaaacagcttgagagagactacgatcttctcaagtccacttacgaccaacttctttctaactacgactccatcgtcatggacaacgataagctcagatccgaggttacttccctgaccgaaaagcttcagggcaaacaagagacagctaatgaaccacctggtcaagtgcccgaaccaaaccaacttgatccggtttacattaatgcggcagcaatcaaaaccgaggaccggttaagttcagggagcgttgggagcgcggtactagacgacgacgcacctcaactactagacagctgtgactcttacttcccaagcatcgtacccatccaagacaacagcaacgccagtgatcatgacaatgaccggagctgtttcgccgacgtctttgtgcccaccacttcaccgtcgcacgatcatcacggtgaatcattggctttctggggatggccttag

SEQ ID NO: 631 - DNA, 768 bp, Arabidopsis thaliana
atgggagttttagtaatctcgcttctcgtggttcatctcctagctttttccgtctgcgttcagggcggctaccgtcgtggcggacaccatcccggcggtcacatgggaccttggatcaacgctcatgccactttttacggcggcggtgatgcttccggcactatgggtggagcatgcgggtacggcaatctgtatagccaaggttatggactggagacggcagcgctgagcacagcgttattcgaccaaggacttagttgtggcgcatgttttgagctgatgtgtgtcaacgatcctcaatggtgcataaaaggccgatccattgtggtcactgccactaacttttgtcctcctggtggtgcatgcgaccctcccaaccaccatttcgatctttctcagccgatctacgagaaaattgctctctacaaatccggtatcattcccgttatgtatagaagggttcggtgcaagagaagtggtgggataaggttcacgatcaacggccactcatactttaacttggtgttggtcacaaacgtgggtggagccggggacgtacactcggtctcaatgaaagggtcgaggacaaaatggcaattaatgtcgagaaattgggggcaaaattggcaaagcaactcttatctcaatggtcaaagtctgtcgtttgttgttaccacaagtgatcgtcgaagtgtcgtctcttttaatgttgcaccacccacttggtcctttggccagacctacaccggagggcagtttcggtattaa

SEQ ID NO: 632 - skipped

SEQ ID NO: 633 - DNA, 2655 bp, Arabidopsis thaliana
atgaagtcttcttacggttcttcctctaatgatctccacgcttttgtcaatgagatcaagggagaaattcagttgtccaacattaatcttgatccttactcatttgtctctccttccgcttacgacacggcttggttatccatgatcgaagaagacatcaacgtagatgataatgagcttaaaccgatgttccaaggttgtctagattggattatgtgcaatcaaaatgccagagaaggtttctggatgaactccaccagttatacaacggtggctgatggcagagacgaagacggcgaaaaggacatgtgtattctaacttccactcttgcttgtgttgtagcacttcagaaatggaatattgggtgttttcatctccacaaagggacgagatatatcgaaagaaatacggagatgataattgggaaatacatcaacgaagaaggatcttatcctcgttggttcgctatcaaattcacaggaatcctagagcttgctcaaaaacttggcttacactttgttttctctagtcgctgtatcgaaatgatcaaagggatgttttatcaacgccaagagattatccaaagagaaaaattggtacatgactgtaattataaacctttactggcctatctagaggtgttgccatcgaaattatatgtcacaaatcaagaagacatcattgtgaagagtctcgacagtatggatggctctttgtttcagtcaccttcagcaactgcatcagcgtttatgctcactcgcaacacaaaatgtctagcttatcttcaaaatctcgttcaaaaatgccctaatggagtgccacaaaagtaccctctcaatgaagatctcataaaactctccatggttaatctaatcgagagtactggtttaggagagttctttggtatagagattgaacacgttctggaacaagtttacagccgctacgaagaaaaagattttgagagaatgcccatgagttatctggcggatcaattgcacaaagactctcttgcatttcgaatgttaagaatgcatggtcgggatgtttcacctagaagcttttgctggttcttgaatgatcaagaaactcgaaatcatttagaaagaaatatagactctttcttgcttgtgatcctaagtgtttacagagccacggatctcatgtttccgggagagcatgatcttcaagaagcaagagaatatactcggaatttactcgagaaacgtcggtccatcaaagaaaaaatggtaccaatatatctcaataagattatgcatgaattaagtactccatggatagctcgactcaaacaccttgaccataggatgtggattgaggacaagaactcaaatgttttatccatggaaaaagcctcttttctaagactacatagttcgtatagcgacaaactgactcatcttgctgcaagaaacttcgagtttcaacaagccaaatactgtcgcgagctggaggaactgacaatgtgggtaaagaaatggggacttagtgatattggtttcggtagagagaagacaacatattgttactttgcaactgtgacttcgttgccctatgaatatgccattaaatttggtaagcttgcagcaaaaactgctatcctcatcacaattgccgatgacttcttcgatgaaaaaggttccttcaatgacttggaaggtcttactaaagcagttttaagatgggaaggagaagagcttaaaagttacggcaatatcatttttagagcacttgatgatattgtaagagagactgcaaatacttgtcgtacgcaccacaaaaccgacataattgtccatcttcgcaacatctggggtgaaacatttgagtcgtggctacgtgaagctgaatggagtaaaaagggacacacatcgtcaatggacgaatatattcgaaacggaatgatctcaatcgcagcacacaccattgctctttccatctcatgtctcatggaaccttgttttccccacaacaaactcaaaccgggaaattacgatagcataactacattgctcatgatcatacctcgacttttaaatgacctacaaagttatcagaaggaacaagaacaagggaagatgaactccgtgctgctccacatgaagaatcatccaggtctggagattgaggactcgatcgctcatatcgaaaagattatcgattcaaaaaggaaagagtttctggagcatgtactagttgatggactaagcgatttgccaaaaccgtgcaaggagattcacatgtcttgttgtaaagtcttcgagatgttttttaacaagaagaaccgttatgattcaaacacggagatgcttcatgacattaagaaggctctctatgatcccatcaatgtttatgaactatcagagatggagcctatgccactgatggcacatggtgatgaatatatgattcttcctttgcttttgaacagtttgccaaatattcttgaatttaagaggaaggacggatacggagcaatgaaaacatctatgtgctttggaagaagttatcgtgttaataaacgcgttatggcctcacagcttgatgatcaacataagcctctcaagattgttgcgtcgcagcggaaaccggtaccaatgatgcaatcgatattcgcaccatgcttctactaa

SEQ ID NO: 634 - DNA, 657 bp, Arabidopsis thaliana
atggatccatttttaattcagtccccattctccggcttctcaccggaatattctatcggatcttctccagattctttctcatcctcttcttctaacaattactctcttcccttcaacgagaacgactcagaggaaatgtttctctacggtctaatcgagcagtccacgcaacaaacctatattgactcggatagtcaagaccttccgatcaaatccgtaagctcaagaaagtcagagaagtcttacagaggcgtaagacgacggccatgggggaaattcgcggcggagataagagattcgactagaaacggtattagggtttggctcgggacgttcgaaagcgcggaagaggcggctttagcctacgatcaagctgctttctcgatgagagggtcctcggcgattctcaatttttcggcggagagagttcaagagtcgctttcggagattaaatatacctacgaggatggttgttctccggttgtggcgttgaagaggaaacactcgatgagacggagaatgaccaataagaagacgaaagatagtgactttgatcaccgctccgtgaagttagataatgtagttgtctttgaggatttgggagaacagtaccttgaggagcttttggggtcttctgaaaatagtgggacttggtga

SEQ ID NO: 635 - DNA, 1923 bp, Arabidopsis thaliana
atggtggtcaaaaggaagttaaattgtggtggctctaatggttttgatttccccaatattcccaaggctcctcgttcaagcaggaggaaggtctcaggtaagagatctgatgatgaaagtgagatctgtgcaattgatttgctagcttctcttgctggaaagttgttggaagaaagtgaaagttcctcaacgtctacctatgcatctgaagctgataatcttgatcatttgggtggactgattaagcaagaacttgaagatggctatactactaagccttgtaaatccgagtttttcgatccaggaaaccctgcttcaaagtctactagtgaaaatactagcgtgacttgtttgccattttcgtctttcgaaaatgattgcattttggagcaaacaccggtttctgattgtaagagggcatctggtttgaagtccctggtagggagcatcactgaggagacatgtgttgttaatgaggatgccggatctgaacaaggtgctaatactttcagcttaaaggatccaagtcaattacattcgcagtctccagaatcggtccttctggatggcgatgtgaaattagcaccatgcacggatcaagtccctaatgattcttttaaaggatataggaatcattctaagttagtttgcagagatgatgacgaaaactattgtaagtattataaatttagtgacaaatgtaagtcatataggcctctctcccgggttggcaatagaagaataatgcagtcggtgagagcaatctccaagttgaagtgttttgaagacactagaacagatggtcgtttgaaggctctctaccgcaagagaaaattatgttatggttacaacccatggaagcgtgagaccattcataggaagagaagattgtctgacaaaggtttggtcgtaaattatgatggtgggctcagtagtgaaagtgtttccaattcacctgaaaagggagaatcagaaaatggtgatttctctgctgcaaaaataggtcttctttcgaaagactcccgtgtaaagttcagcatcaagtcccttaggattccggagcttgtaattgaagttccagaaacagcaacagtaggcttactgaagaggacggtgaaggaggcggttactgctttactcggtggtggaatacgtattggggtgttagtccaagggaaaaaagttagagatgacaacaacactctatcacagactggtctttcgtgtagagaaaatcttggcaaccttggcttcaccttagagcctggtttggaaacactgcctgtacctctttgttctgaaactcctgtcctttctctgccaactgactctacaaagttgtcagaaaggtccgcagcttctccagcgttagagactggaattcctctccctccccaagatgaagattacttgattaatttgggaaatagtgtggagaacaatgatgaattagtcccacatctgagtgacataccagctgatgaacaaccttcatcagattcaagagcgctggttccagttttggccttggaatccgacgctcttgcacttgttccagttaacgagaaacctaagcgtacagagctttcacaacgcagaaccaggagaccattctctgttacagaggtagaagctctagtaagcgcagttgaagaagttgggactggaagatggcgtgatgtgaagttgcgttcttttgagaatgcaagtcatcgaacctatgtggacttgaaggacaaatggaaaacgttggttcacacagcaagtatatcaccacagcaacgaagaggagaaccagtgcctcaagaactgctagacagagtcttaggagcacataggtactggacacagcaccaaatgaaacagaacgggaaacatcaggtggctacaacaatggtggttgaagcaggttcgtccatgtaa

SEQ ID NO: 636 - DNA, 1509 bp, Arabidopsis thaliana
atggaagaaaccaacattagagttgttctctactccattttctctctcatcttcttgataatctctttcaagttcttaaaaccaaagaaacagaatcttccaccgtctccgccgggatggttgccaataataggccatctccgccttctgaagccacccatccaccgcaccctccgctccttctccgagaccctcgaccacaacgatggtggcggcgtgatgtccctccgacttggatcccgtctagtctacgtggtgtcgtcacataaggttgcggcagaggagtgctttggcaagaacgacgtcgttctagctaaccggccacaggtgatcatcggaaaacatgttggttataacaatacaaacatgatcgctgcaccttacggtgatcactggcgtaacctccgtcgcctctgcactatcgagatcttttcaacacaccgccttaactgctttctttatgtccgtaccgacgaagtacgtcgccttataagccgcctctctcgtctcgcaggaaccaaaaaaactgttgtggaattgaaaccaatgcttatggacttgacattcaacaacataatgagaatgatgaccggaaaacgatactacggtgaagaaacaaccgatgaggaagaagcaaagcgtgtccgtaagttggtagcagatgttggggctaacacgagttcaggcaacgccgttgactacgtccccatcctcagactgttttcaagttatgaaaatagggttaaaaagttaggagaggagacagataagtttttacaaggtctcattgacgataaacgtgggcaacaagaaaccggtactacaatgatcgatcatttgcttgtcctccaaaaatctgatattgagtattacactgatcaaatcatcaaaggcatcatactgataatggtaatagcagggactaacacatcagcagtcactctagaatgggcactttccaatttgcttaaccatcctgacgtaatatctaaagcgagagacgaaatcgataaccgggttggtttagaccggcttatcgaagaagcagatcttagcgagctaccatatctaaagaacattgtccttgagacccttaggctacacccagctacaccattgctagtcccacacatggcatcagaagattgcaagataggatcctacgatatgccacgtggtacaacgttgttggtgaatgcatgggccatacatagggatccaaacacgtgggatgatccggatagctttaaaccagagcggtttgagaaagaagaggaagcacaaaagcttctggcgtttggattaggtagaagagcgtgtcctggatcgggtctggcccaacgaatcgtgggactagctctcgggtcattgatacaatgctttgaatgggagagagttgggaatgtggaagtggatatgaaggaaggagttgggaatactgtacccaaagcgattcctttgaaagctatttgcaaagctcgtccatttctacataagattatttcctaa

SEQ ID NO: 637 - DNA, 860 bp, Arabidopsis thaliana
atggcgatgatcagttactccaccattgtggttgctctgcttgcttcttttatgatttgctctgtttccgccaattttcaacgagacgtagagataacttggggagacggacgtggacagatcacaaacaacggcgatcttcttacactctctctcgacaaagcttcaggctcaggattccaatccaagaacgaatatttgttcggtaaaatcgacatgcagatcaaactcgttgccggaaactccgctggaactgtcaccgcttactatttgaaatcccctggatctacatgggacgagattgactttgagttcttgggaaacctaagtggtgatccttacacacttcatactaatgtctttacgcaaggaaaaggcgatagagaacaacaattcaaactctggttcgatcccactagtgatttccacacttactctatcctctggaacccacaacgcatcatattctccgtggatggaactcccataagagaattcaagaacatggaatctcaaggaactctgtttcctaagaaccagccaatgagaatgtactctagtctatggaacgctgaagaatgggccacaaggggtggtctcgtcaaaaccgactggtctaaagctcccttcactgcttcctaccgcggcttcaacgaagaagcttgcgtcgtgatcaacggccagtcttcatgccctaacgtgtcaggacaagggagtactggttcgtggttgtctcaggagctagactcgacgggtcaagaacagatgagatgggtacagaataactacatgatttacaattactgtacggacgctaaaaggttccctcaaggtcttccacgcgagtgcttagctgcgta

SEQ ID NO: 638 - skipped

SEQ ID NO: 639 - DNA, 978 bp, Arabidopsis thaliana
atggctgatggaggaaaggtggtctgcgtaaccggagcttccggttacatagcgtcttggatcgtcaagcttttgctcttccgtggctacaccatcaatgccaccgttcgagacccaaaagatcgaaagaaaacagatcaccttctagcacttgacggcgcaaaagaaagactcaaattattcaaagcagatcttctagatgaaggttcttttgagctcgcaattgatggatgcgagactgtcttccacactgcttcaccggttgcaatcactgtcaagactgatcctcaggttgagctgatcaatccagccgtcaatggtactattaacgtcctaagaacttgcactaaagtgtcttctgtcaagagggtcatcttaacatcgtccatggccgcagttcttgcgcctgagaccaagttgggaccaaacgatgtagtagacgaaaccttcttcactaatccaagttttgctgaggagagaaagcaatggtatgtactttctaagactttggccgaagatgcagcatggcgatttgccaaggacaatgagatcgacttgatcgtactgaatccgggacttgtgactggaccaatcttgcagccaactcttaatttctcggtagctgtgattgtggaacttatgaaaggcaagaatccttttaatactacacatcataggttcgtggacgtgagagatgttgctctagctcatgtaaaggcactcgagactccttcagccaatggcagatatatcattgatggtccggttgtgacaataaaagacattgaaaacgttttgcgcgaattctttcctgatttgtgtattgctgataggaatgaagacattactgagctgaattcagtgactttcaatgtgtgtctggataaagtgaaaagtttgggaataattgagttcactcctacagaaacaagccttagagacactgttcttagtctcaaggagaaatgtcttgtgtga

SEQ ID NO: 640 - DNA, 1827 bp, Arabidopsis thaliana
atgggtggtttaatcgatctgaacgtgatggagacggaggaagacgaaacgcaaacgcaaacaccgtcttcagcttctgggtctgtctctcctacttcgtcttcttcagcttctgtgtctgtggtgtcttcgaattctgctggtggaggggtttgtttggagctgtggcatgcttgtgctggaccccttatctctctaccaaaaagaggaagccttgtgttgtatttccctcagggacatttggaacaagcccccgatttctccgccgcgatttacgggctccctcctcacgtgttctgtcgtattctcgatgttaagcttcacgcagagacgactacagatgaagtttatgctcaagtctctcttcttcctgagtcagaggacattgagaggaaggtgcgtgaaggaattatagatgttgatggtggagaggaagattatgaagtgcttaagaggtctaatactcctcacatgttttgcaaaacccttactgcttctgatacaagcacccatggtggtttctctgttcctcgccgagctgctgaggattgcttccctcctctggactatagccagccccggccttctcaggagcttcttgctagggatcttcatggcctggagtggcgatttcgccacatttatcgagggcaacctaggaggcatttgctcactaccgggtggagtgcgtttgtgaacaagaagaagcttgtctctggtgatgctgtgcttttccttagaggagatgatggcaaactgcgactgggagttagaagagcttctcaaatcgaaggcaccgctgctctctcggctcaatataatcagaatatgaaccacaacaatttctctgaagtagctcatgccatatcgacccatagcgttttcagcatttcctacaaccccaaggcaagctggtcaaacttcataatccctgcaccaaagttcttgaaggttgttgactatcccttttgcattgggatgagatttaaagcgagggttgaatctgaagatgcatctgagagaagatcccctgggattataagtggtatcagcgacttggatccaatcaggtggcctggttcaaaatggagatgccttttggtaaggtgggacgacattgtggcaaatgggcatcaacagcgtgtctcgccatgggagatcgaaccatctggttccatctccaattcaggcagcttcgtaacaactggtcccaagagaagcaggattggcttttcctcaggaaagcctgatatccctgtctctgaggggattcgcgccacagactttgaggaatcattgagattccagagggtcttgcaaggtcaagaaatttttccgggttttatcaacacttgttcggatggtggagccggtgccaggagaggccgcttcaaaggaacagaatttggtgactcttatggtttccataaggtcttgcaaggtcaagaaacagttcccgcctactcaataaccgatcatcggcagcagcacgggttgagccagaggaacatttggtgtgggccgttccagaactttagtacacgtatcctccccccatctgtatcatcatcaccctcttccgtcttgcttaccaactcgaacagtcctaacggacgtctggaagaccatcacggaggttcaggcagatgcaggctgtttggtttcccattaaccgacgaaaccacagcagttgcatctgcgacggctgtcccctgcgttgaagggaattccatgaaaggtgcgtcagctgttcaaagcaatcatcatcattcgcaaggaagggacatctatgcaatgagagacatgttgctagacattgctctctag

SEQ ID NO: 641 - DNA, 1860 bp, Arabidopsis thaliana
atgatcacatggcacgacctctacaccgtcctcacggcggtgataccactctacgtagccatgatcctcgcttacggctcagtccggtggtggaaaatcttctcaccagaccaatgttccggcataaaccgcttcgtcgctattttcgccgtccctcttctctctttccacttcatctcctcaaacaatccttacgcaatgaatctccgattcatcgcagccgatacactccaaaaactaatcatgctcactctcctaatcatctgggctaacttcactcgctccggtagtcttgaatggagcatcacaatcttctctctttcaacacttcccaacactctcgttatgggaatacctctcttgatcgccatgtacggagaatattccggctcactcatggttcagatcgttgttcttcagtgtataatctggtacacgcttcttctctttcttttcgaatacagaggagctaagatcttgatcatggaacagtttccagagactggtgcttcgattgtatcgttcaaagttgagtccgatgttgtttctttagatggacatgattttcttgaaactgatgctcaaatcggtgacgatggtaagcttcatgttacggtgagaaaatcaaacgcttctcggagatctttttacggtggtggtggtactaatatgactcctcgtccgtctaatctcaccggagctgagatttatagtcttaacactactccaagaggatctaacttcaatcattctgatttttactctatgatggggtttcccggtggccggctttcgaactttggtccggcggatatgtactctgttcagtcctcgagaggacctactcctagaccttcgaattttgaggagagttgtgctatggcttcttcgccaagattcgggtattacccgggaggagctcccgggtcgtacccagctcctaatccggagttttctaccggtaataaaaccggtagtaaagctccaaaagagaatcatcatcatgtaggaaaatcaaatagtaatgatgctaaggagcttcatatgtttgtttggggatccaacggatcacccgtttcggaccgagctggtcttcaagttgataatggagccaatgaacaagtcggaaaatccgatcaaggcggtgcaaaagagattcgaatgttgatctctgatcatactcaaaatggtgaaaacaaagctggtccgatgaacggggactatggcggggaagaagagtcggagagggtaaaggaagtgcctaacggactacacaagcttcggtgtaactccacagcagagctaaaccctaaagaagctatagaaacgggtgaaactgtaccggtaaaacatatgccaccagcgagtgtgatgactcggctgatattgataatggtgtggaggaaactcataagaaacccaaacacttactctagtctcattggtctcatttgggctcttgttgctttcaggtgggatgtggcaatgcctaaaattattcaacaatcaatctcaattctttctgatgctggtcttggtatggcaatgttcagtttggggttgttcatggcattgcaaccgaaattaattgcttgcggaaattcgacggcgacttttgcgatggcggtgagattctttactggaccagcggtaatggccgtggcagcaatggctattggattacgtggagacctattgcgtgtggccattgttcaagctgcattgcctcaagggatcgtgccgtttgtgtttgcaaaagagtataatgttcatcccgcaatcttgagtacaggggtaatatttggaatgcttatcgcactaccgattacacttgtttactacattttactcgggctataa

SEQ ID NO: 642 - DNA, 1416 bp, Arabidopsis thaliana
atgacggcgaagcgagcgatcggacggcacgaatcccttgctgacaaggtccatcgacatcgtggtcttctacttgtgatttcgatccccattgtgttgatagctcttgtgcttctgttaatgccggggacgtcgacgtccgtctctgtcatcgagtacacgatgaaaaaccacgagggaggttccaattcgaggggtccgaagaattacgctgtgatttttgatgctggaagttctggaagccgtgtgcatgtttactgtttcgatcagaatttggatcttgttcctttggagaatgagctcgagctcttcttacagctaaaaccgggtttaagtgcatatcctaatgatcctcggcaatcagcaaactctttagtaactcttctggacaaagcagaagcttccgttccccgtgagttgcgtccaaagactcctgtcagagttggggcaactgcaggtttgagagctttgggtcaccaagcctctgaaaacattttgcaagcggttagggagctcctcaaaggtagaagtaggctgaagactgaggcaaatgcagtgactgttctggatggtactcaggaaggatcttatcagtgggtgacaattaattacttgctaaggactttgggaaagccgtactcggacacagttggagtggttgatcttggaggggggtcggttcaaatggcatatgctataccagaggaagatgctgcaactgcaccaaaaccagtagaaggcgaggattcttatgtcagagaaatgtatttgaagggacgaaagtatttcctctatgttcatagctacctacattacgggttactggctgctcgggctgagattttgaaagtttctgaggactctaacaacccctgtatcgcgactggatatgctggtacctacaaatatggaggaaaagcgtttaaagctgcagcttctccatccggtgcaagtctagatgagtgccggcgagtagctattaacgcactcaaagtcaataattcattgtgtacacacatgaaatgcacttttggtggagtatggaatggtggaggcggtggtggccagaagaaaatgtttgttgcatcatttttcttcgatcgagccgcagaggctggttttgttgacccaaaccaacctgtggctgaggttcgaccacttgactttgagaaagcggccaacaaagcttgtaacatgagaatggaagaagggaaatcgaagttcccacgtgtggaggaagataatcttccttacttgtgcttggatcttgtttaccaatatactcttctcgtcgatggattcggattgaagccatcacagacaataacgttagtgaagaaggtgaaatacggagattacgccgtggaagctgcgtggccactaggaagcgccatagaagcagtatcctcaccatga

SEQ ID NO: 643-644 - skipped (2 entries)

SEQ ID NO: 645 - DNA, 1419 bp, Arabidopsis thaliana
atgacggcgaagcgtgggattggacggcacgaatctcttgctgacaagatccaacgccatcgtgggattatacttgtgatttcggttcccattgtgttgatcggtctcgttcttctgctaatgcctgggagatcgatttctgattccgtcgttgaagagtattctgtgcataatcgcaaaggaggtcctaattcgagaggtccgaagaattacgctgtgatttttgatgctggaagttctggtagccgtgtacatgtttactgttttgatcagaatttggatcttattcctcttgggaatgaacttgagctcttcttacagctaaaaccagggttgagcgcatatcctactgatccccgacaagcagcaaactctttggtgtctcttcttgacaaagcagaagcttctgttccccgtgagctgcgtccaaagacacatgtcagagttggggctactgcaggtttgaggacgctgggtcatgatgcatctgagaacattttgcaagcggttagggaactcctgagagatagaagcatgctgaaaactgaggcaaatgctgttactgtactggatggtacccaggaaggttcttatcagtgggtaacaattaactacttgctaaggaacttgggaaaaccatactcagatacggtaggagtggttgatcttggaggggggtctgttcaaatggcatatgctatatctgaggaagatgctgcaagtgcaccaaaaccattagaaggagaggattcatatgtcagagagatgtatctgaagggacggaagtatttcctctatgttcacagttacctacattacggattactggccgctcgagcagagattttgaaagtttctgaagattcagagaacccctgcatcgtggcaggctatgatggtatgtacaagtatggaggaaaagaatttaaagcccctgcttcacaatcgggtgcgagtcttgacgagtgccgaaggataaccatcaacgcactaaaagtgaatgatacactgtgtacacacatgaaatgcacattcggaggagtctggaatggtggtcgaggtggtggtcaaaagaatatgtttgttgcttcttttttcttcgatcgtgctgctgaggctggattcgttgacccgaagcaacctgttgctacagttcgtcccatggactttgagaaagcagcaaagaaagcttgtagtatgaagctggaagagggaaaatcaacgttcccacttgtggaggaagagaatttgccttacttgtgcatggatctcgtttaccaatatactctgctcattgatggattcggattggagccatcacagacaataacgttagtgaagaaggtcaaatacggagaccaagccgtggaagctgcgtggccattgggtagcgccatcgaggccgtatcctcaccgtga

SEQ ID NO: 646 - DNA, 1434 bp, Arabidopsis thaliana
atgcagagattcgcggcgaaaagatcggtgcaaaacatttccgtctctctatggcgtcgatgtatctcatcgacgtctcaggcagcgacagcttccgttaaggattccgacgagtttcaggcgaggcttcctccttttgcttacactcctccgccgtatactggtccttccgccgatgttatccttagcaaaaggaaggagtttctcagtccttccatgttctgtctctatcggaaaccgttaaacattgtggatgggaaaatgcagtatctatttgatgagagtggtcggagatatttagatgcatttgctgggattgctgttgtgaattgtggacattgtcatccagatgtggttgagccagtgattaatcaaatcaagaggcttcagcatcctactgttctttaccttaaccatgccattgctgatttctctgaggctcttgcttctaaacttcccggtgatctaaaggtggtgtttttcactaactcagggacagaggctaatgaattggcgcttatgatggctaagttgtatactggatgtcaagatattgtggcggttcgaaacgggtatcatggtaatgcagctgcaactatgggggctactggtcagagtatgtggaagtttaatgtggttcagaatagtgttcatcatgctttgaaccctgatccttatagaggtgtgtttggttctgatggagagaagtatgcaaaggatttgcaagatcttattcaatatggtacgactggtcacattgccggttttatttgtgaagctattcagggagttggagggatcgtggaactagcaccgggatatttgtcagcggcttacgatactgttaagaaagctggtggattgttcattgcggatgaagttcagtctggtttcgcacgtactggtaacttttggggatttgaggcacacaatgttgtccctgacatagtaaccatggcaaagggaattgggaatgggtttcctttgggagctgttgtgacaactccagagatagcaggagtgttgactcgccgtagctacttcaatacatttggtggaaattctgtgtctactacagctggtctcgctgttctgaatgtgattgagaaagagaagcttcaggaaaatgctgcaatggttggatcctatctgaaagaaaaactcacacagctgaaagaaaaacacgagattatcggggatgtccggggaagaggactgatgcttggagtggagctggtgagtgatcgcaagcttaagactcctgcaaccgccgagactctgcacattatggatcaaatgaaagaattgggtgtgttgattggaaaaggaggctactttggaaatgtctttagaatcacaccacctctctgcttcaccaaggacgatgcagattttctcgtggaagcgatggactactcaatgtcgaagatgtga

SEQ ID NO: 647 - DNA, 702 bp, Arabidopsis thaliana
atgacgttagagagttacgccggcgatgttcacacggtaccacaatcggagaactcgatggaggagagaggcggcggtgagcttttcgtgccacctcttaacttcgctatggtcgataatggaattttccgttctggttttcctgaacccgtcagtttcagctttctccagtctttgcgtctcaaatccatcatatatttgtgtcctgaggcatatccagaggtgaatagagagtttgcaaaatcaaatgggatccaagtttttcaatttggaattgaaagatgcaaggtgagattggtggaaccatttgttaatatccctgacgaggtaatccgagaagccttacaacatcggacgggatgtcttgtaggttgtgtgaggaagattcaaagatggtgtttgtcttctatcttcgacgagtaccaaagattcgcagctgcgaaagctagaatctcagaccagagattcatggagctctttgacatctccaatctaaagcatacaccactttccttctcatgctccaagagaggagttaataatgattcggtgtgttgcgtgtgcatgggaaggaagaaaggagcagcgtttatcccatgtggacatactttttgcagagtgtgttctcgagaggtgtggcttaatcgaggatcgtgtcctctttgtaaccgtccgatcatcgagatcctcgacatttattga

SEQ ID NO: 648 - DNA, 1434 bp, Arabidopsis thaliana
atgatggaaatagcttatcagcctcggattgattccgagattgaatcactcgtcgagagaatcaatcctccaagggtttgtgtagacaacgactctgacccagagtgcacacttattaaggtagatagcgcgaacaagtacgggatattactggacatggttcaagtgttagccgatcttgatctcgttatctccaaatgttacatctcatctgatggcgaatggttcatggatgtgtttcacgtgacagaccaactcgggaataagctcaccgaccgaagccttattctctacattcaacaggcaatatgttctagtagaacgggaggtataacaaaggagatgcagagtaatctaaaacgggaggtgcaacagcgccacgtgtcaacagaacacacggcctttgagataaccggaatcaatagaccgggtctactatccgaaatatctgccgtactttccgacattggatgtcacgtgacggctgctgttgcatggacccaccacgagcgagcggctatggtgatttatctagaagacgggtttaacggtgggcccattatcgacccaataagaaaggcccaagtaaaggatcatctggatacagtcatggaggcccatcacatagttggcgatgtgtctcatgtcgtcgtgagggtcgtcgaggctaaaggagttccggtcgggtgggctcacactgagcgacgacttcacgagctaatgtacggagaaggagattacgagaattgcttcgactgcgattgtttcggagacaggtgcgatgctttgtggagaggaagatgcgagaggatacacgtgacaatcgaagcatgtaatggctattcaatggtgaatgttaagtgtagagacagaccaaaactacttttcgacacggtgtgtgctttgaaagagttacaattcgttgtgtttcacgccgtcgccggagctaaaggctccactgcagagcaagaatatttcataagaaagaagaacgggggcacgttagaaacggaagggcaaagagagagactaaggcattgtttggttgctgcgatttcgagacgtgcttcacaaggattgaaactcgagattcggacagagaacaagatgggtttgttgtcggatgtgactagagttgtgagagaaaacggtttatcgataacgagagctgagatgtgcacgcaaggtgagattgcggttggctcgttttatgttacggatgtgaatggtggtgagacgggtcctagtgaggttgaagcggttgtacgagaattgggaggagcggttgtgtcagcggttaaaggggttggaatgatgccgaggaggattggttcgacgagtgatagtgtggagcaggacaaagctaagtcgtctattgggagaatgttttggtctaaattagagaggttgtcaacgtctataagatcgttgtga

SEQ ID NO: 649 - DNA, 1455 bp, Arabidopsis thaliana
atgctaatcaaatcccaaagattgactcttttctctcctctcttgtccaaaacaagacggatcccggttaactcccaccaaacactggtcgcagaatcggtgataactcggagaacactcggtgcgatcaccgcaactccgagttttcataaaaatccggtggtgattcgacggaggatcaaattagagagagttacgaggaactgcgtcagaattgatcgggaaatcgacgaagaagaagaagaagaggagaaggagagaggggatctggtgaaacagagcatatgggaacagatgaaagagatagtgaagttcacaggtccggcgatggggatgtggatttgtggaccgttgatgagtctcatcgacacggtcgtcatcggccaaggaagctccatcgaactcgctgctcttggaccgggaacagtactatgcgaccacatgagttatgtcttcatgttcctctccgtggctacatccaatatggttgctacttctcttgccaaacaggacaagaaagaagcgcaacatcaaatctctgttttactctttattggattggtttgtggactaatgatgcttctgctcacaagattattcggtccttgggctgttactgcttttacaagggggaagaacattgagattgtccctgcagctaataagtatattcagattcgaggcttagcgtggccgtttatccttgttggattggttgctcaaagtgcaagtcttggaatgaagaactcatggggacctcttaaagcattagctgcagcaacgatcattaacggtcttggcgatacaatcctatgcttgtttcttggacaaggtatcgctggagctgcttgggcaacaactgcttcacagattgtttcggcttatatgatgatggattctctgaacaaagaaggctacaatgcttactcttttgcgatcccttcaccgcaagaactatggaagatctctgcactcgctgcacctgtttttatctccattttctccaagattgctttctactctttcataatttactgtgctacttccatgggaactcacgttttagccgctcatcaggtgatggctcagacgtataggatgtgcaatgtatggggtgagccactctctcaaacggctcagtcatttatgccagagatgttatatggtgcgaaccgtaatcttcccaaggctagaacgttgcttaagtccctgatgattattggagccacgcttggattagtcttgggagttatcggaacagcggttccaggcctgtttcctggtgtctacacacatgataaagtcatcatatccgaggtctgtttttgtttttcaaatcaacatttgtttcctgtgtttttgattctaacttggtctaatctgattcttgatatgtttgccagatgcatagactgcttatacctttcttcatggcgttgtctgcattgcccatga

SEQ ID NO: 650 - DNA, 2055 bp, Arabidopsis thaliana
atggatgatgaagatgtagaaatagatcttctaacaaaaagtagtaatgtggatgtattttgtgaagcaagtacaagtgggaacgttgctcagtgtgcaacggttagtgagctcagaaatgggatggattttgagtcaaaggaagctgcatactatttctacagagaatatgctcgatcagtgggatttggtatcacaataaaagctagccgtcgttctaaaagatcagggaagtttattgatgtcaaaatagcgtgttcgagatttggaaccaagcgcgagaaagccacagctatcaatccacgttcatgtccaaagaccggttgcaaagccggtttgcatatgaagaggaaggaagatgagaaatgggttatatataattttgtaaaagaacataaccatgagatatgtcctgatgatttttatgttagcgtacgaggaaagaacaagcctgctggtgcgctagcaataaagaaaggtcttcaattggctttagaagaggaagacttaaagctattgcttgagcattttatggagatgcaggataagcagcctggttttttctatgcggtagatttcgatagtgacaaacgtgttagaaatgtgttttggcttgatgcgaaggctaagcatgactattgcagcttttctgatgttgttctgttcgacacattttatgttaggaacggatacagaatcccatttgctccttttattggggtcagccatcaccgtcaatacgttctgcttggatgtgctttgattggagaagtgagtgagtcaacatattcttggctatttagaacgtggcttaaagcagtcggtggtcaagctcctggagtgatgataacagatcaggataagcttctaagtgatattgttgttgaagtctttccagatgttcgtcatattttctgtttgtggagtgtgctgagcaaaatttctgagatgctgaatccatttgtgagtcaagatgatggttttatggaaagtttcggaaattgcgtagcaagctcttggacagatgaacattttgaaaggaggtggtcaaatatgattggtaaatttgaacttaacgagaatgagtgggttcagttgttgtttagagatcgtaaaaaatgggttccacattattttcatggaatttgtttagctggactgtctggacctgaaagatctggcagtatcgcctctcatttcgacaagtatatgaactcggaggctacattcaaggacttctttgagctctacatgaagtttctgcaatatcgatgtgatgtggaagctaaggatgatcttgaatatcagagcaaacagcctacactgaggtcttctttggctttcgagaaacagctttccttgatctacacggacgctgcttttaagaagttccaagctgaggtacccggagttgtttcttgtcaacttcaaaaagaaagagaagatgggacaacagcaatattccgcattgaagatttcgaggaacgacaaaatttcttcgttgctttgaacaacgagttgttggatgcgtgttgctcttgtcatttatttgagtaccagggattcctatgcaaacatgcgatacttgtacttcaaagcgctgatgtttcccgcgttccgtctcagtatatattgaagcgctggtcaaagaaaggtaacaacaaagaagacaaaaacgataaatgtgccactatagataaccgaatggcacgttttgatgatctatgtaggcgctttgtcaagctgggagtagttgcatctttatcagatgaagcctgcaaaactgctttaaagttattggaggaaaccgtgaagcattgtgttagtatggataattcttccaagtttccttcagagccagacaagttaatgacaggtggatctattggcttagaaaacgaaggtgtgttggactgtgcatcaaaagtgtccaagaaaaagaaaattcagaagaaaagaaaggtatactgtgggccagaggatgcaacaaacaggtcagaagaacttcgccaagaaaccgttagtaatctgattttgccatgctattatatctga

SEQ ID NO: 651 - DNA, 2676 bp, Arabidopsis thaliana
atgtattataagaagagaccagaactcattagcttcgttgaagaatcttacagagcttatagagctttagctgaacgttatgatcatatttctacagagcttcaaaatgctaacacgacgatcgcctctgtttttcctgatcaagttccaaactttgccatggatgatgatattgatatgtctaaatttgctaaaagatcgaatatttctggtgctaatgtccctaatgttcccaaactgcctgttaaggatttgaagagtgcggttagagtggctacgaagaagcttcagccgaggaaatctatgaagtacacgggtggttctacgaatgttgttgttaagagctcgggtttgagtaagcctgaggcgatgggggagattgataagttgcagaaagagattttggcgttgcagacggagaaggagtttgtgaagagttcttatgagataggtttgtctaagtattgggagtttgaaaaaggtattaaggagaaacaagagaggatctgtggtttgcaggatgagtttggtgagagtgttgcgattgaagacgaggaagctcggagattgatgaccgagactgcgataaagtcttgtcaggagaagctagtggagttgcaggagaagcaagagaagtcttatgaagaagctagagaagagcatgtgaagattaaagagtctaaagagaagctaagatctatggcaagccagtttctaggtgatgaaagtgtctttgcgaaagacgatggtgatgaagttagaagaacagcagagttggatcatgagatcaaagagatgtctaggaagaagaaagagttggaatctgttaaggagaagattagagaacattttgagtctggtgcgaattcatcgctcaatgggacagatatggctgagaaagtcgatgagcttgtgaacaaagtgattagcttggagagtgcggtttcctcgcagactgctttgatacagagactaagaaacgagaccaacggtcttcagacgcagatcagtactcttgaaacagataaggcgttgttagcagacgacaagagtgatctgaggaacaagctgaaggaaatggaagagaaactcaaggcattgcaggatttggacagaaatgttttggacaagagtagcaatctgcagacacattttgatgacgcttgtcataatcttgataacctctctggtgggaacctgcatgaggtgaagccagagagcgagtctgataacttggcgattagtatagaaccgcagaaagatctggaaggtgagaagaggactttagatatcagtgaagagataaaggaacatcaaaaggaaacgggtgaggagaagaaagaagcacctgtgaagagtgtaaaattcgagcagacccgcaatgcgacaatagcagaagatagtaccatcccaagtacaaatccagacactgtgttggaatctactgaaaaagtagattctgatttagagaagcaagatgcatctgataagacagattctgttcttgataatgttttagagaaccaagctgcatctgatcagacagattctgttcttgattctgttttggagaagcaaggtgaatctgataagatagattctgtgccgagtaatgtttcagagaaggagtctgatatcagtttcaatggtgaacaacaagaggatcaaaaggagaaagaaggtgaaccagattggaaagagatgttcatgaagggaatggagaacagggaaaagcatttgcttacagagtacacaactattctcaggaacttcaaggatatgaagaaaactttggatgaaaccaagacaaagatgaagacagagaatgcgacaaaagatgatgagatcaagctactaagagagaaaatgagcctcttgcagaagggtctaggagacagtaatgacttgatggaaaaccaattgtcaaacgacgactactccatcggattcatggctgcagaaaaccagaacatgtccctggttgaggagcagttcaggctgaatattgatgagcttctagaagagaatttggatttctggttaaggttcagcacagcatttggacagatacagagctacgacacttcaatcgaagatctacaagccgagatatcaaagctcgagcagagaagaaagcaagatggaagcagcacagccaaatatgccctgagatcagatgttcgaccactgtatgtacacttaagggaaataaacacagacctggggctctggctggagaaaggtgctgccttgaaagaggaactgaaatccagattcgagtccttgtgtaacatacaggatgagataacaaaagccctcaagtcaagtgctgaagacgatgatttcagattcacgagctatcaagctgctaaattccaaggtgaggtgttgaacatgaagcaggagaacaacaaagtggcagacgagttacaggccgggttagatcacattaccacgcttcaactcgaggttgataagactctaggaaagctgatcgacgagtttgctctttcgggttcaaagaacaaatctgatcttgatctccagcattccgatagccgctcaagagtgcccttaaggtcattcatctttggctccaaacaaaagagagcaaagccatccatattctcctgcatgcatccctcactatatagaaagatgaagacttctacatag

SEQ ID NO: 652 - DNA, 1040 bp, Arabidopsis thaliana
atgcatgtcatatctctttcgttatcctcaatattctttttcctcttcctcacatcaaccattttgatttctccggtacaacccacaacctctaagcctccggcaccacggccccacagagagctctccgccgattactactccaagaaatgtcctcagcttgaaactctcgtcggttccgtcacttctcagcggttcaaagaagtccccatctcagctccagccaccattcgcctcttctttcacgactgcttcgttgagggttgtgatgggtcgatattgatagaaacaaagaaaggaagcaagaaattagcagagagagaagcatatgagaataaggaattgagagaggaaggatttgatagtatcatcaaggcgaaggccttggttgagtctcattgcccttctctcgtctcttgctctgatattctcgctattgccgctcgagatttcattcatctggcaggtgggccttactatcaagtgaaaaaaggaaggtgggacggaaaaagatcaacggcaaagaacgtccctccaaacatacctcgatcaaactccaccgttgatcaactcatcaagctcttcgcgtccaaaggactaaccgtagaggaactcgtcgtcctttctggttcccacaccatcggcttcgcccattgtaaaaatttccttggtcgtctctacgactacaaaggcacaaaacgacccgacccgagtcttgaccaaagattactaaaagagctccggatgtcttgtcctttttccggcggaagctctggagtcgtccttccgctcgacgctacaactccgtttgtgtttgataatggatatttcacaggtctaggaaccaacatgggccttctcgggtcggaccaagctttgttccttgacccgaggacgaagcccattgcacttgagatggcaagagataagcagaagtttctcaaggcgtttggagacgctatggataaaatgggttccattggtgtaaagagagggaagagacatggggaaatacgtacggattgtcgagtctttttata

SEQ ID NO: 653 - DNA, 885 bp, Arabidopsis thaliana
atggcagctccgattcgattctttgaactgaacactggtgccaagttaccttgcgtcggtctaggaacctacgcaatggtcgcgacagcgatcgaacaggcgattaagattggttacaggcatatcgactgtgcttcgatttacggaaacgagaaagagattggtggtgtgttgaagaagctgataggtgatggttttgtgaagcgtgaggagttatttatcacttccaaactctggagcaatgatcatttacctgaagatgtgcctaaggcactggaaaaaacgttacaggacttacagattgactatgttgatttatatctgatacattggcctgcgagcttgaagaaggaatcactaatgccaacacctgagatgctcacaaaacctgatataactagcacatggaaagcaatggaagctctctatgactctggaaaagctcgagcaatcggtgtaagcaatttctcgtcgaagaagcttacagatcttcttaacgtggcacgtgtaaccccggctgttaaccaagttgaatgtcacccagtttggcagcaacaaggtcttcatgagttatgcaaatccaaaggagttcacttatctggttactctcctttgggttcccaaagtaagggagaagtcaggctaaaggttcttcaaaacccgattgttaccgaggttgctgagaaacttggaaagaccaccgcccaagtggctctccgttggggactccaaactggtcatagtgttctaccaaagagctcgagcggggctcggctcaaggagaatcttgatgtttttgactggtccataccggaagatctgtttaccaagttctctaacattccccaggcaagttctttcatctttctttttttttctcgatga

SEQ ID NO: 654 - DNA, 2547 bp, Arabidopsis thaliana
atggctatggatcatctctgtttcgtactaccgacagaatccggcgagttaaagccaccggtgatggtcgaggagaccacagaagaagaagaggagaagaagagtcgtgattgtggacgtcaagttgtgagtttaatcggagatttattccggcgattacacggctctaagttggtgaagagcttgaatctctgtagtatcaacgagagtaaagattcgatttcaatggagatcaataaatcattcactgacatggaaggtgttcagctttccagcaaagtcggttgcgagaatccaagaatctttggatactctgagctttatatcggaactaatggtttcagcgacgaactgatcctcggaagcggcggtttcggccgcgtttacaaggcgttgttaccgagcgacggaaccaccgtggctgttaaatgcttggcggagaagaaaggagaacaattcgagaaaactttcgcggcggagcttgttgcggtggctcagctccgccatcgaaatcttgtgaagttaagaggttggtgtctacacgaagacgagttgcttcttgtttacgattacatgcctaaccggagcttagatcgtgtgcttttccgacgaccggaagttaactccgattttaaaccgttggattgggatcggaggggtaaaatcgtcaaaggactcgccgccgcgttgttctacctccacgagcagttagagactcagatcattcacagagatgtgaagacgagtaacgttatgttggattctgagtttaacgctaaactcggagattttggtttagctcggtggttagaacacaagattgatgaaacagagcatgattcgagttacgactctgtttcttccttccgtaaccaccagttccgagtcgcggattcgactcggatcggtgggactatcgggtacttaccaccggagagtttccggaaaaaaaccgttgccaccgctaaaacagatgttttcagctttggtgttgtggttttagaggttgtctccggtagacgagccgttgatctttcgttctcggaagataaaatcattttacttgattgggttcggagattatccgataaccggaaattactcgacgccggggattctcggttagcaaaaggatcttatgatctctctgatatgaagagaatgattcatcttgctctgctctgttctttaaacaatccaacgcatcgtcccaacatgaaatgggttatcggagcactttccggcgagttttccggtaacttaccggcgttaccttcgtttaagagccatcctctttatattcctttatcttctttaaaatcaacctcaacttcggcgactacgactactacaagaacaacgatgaccaccaccacctccacaactagcttcaatgcgtcgtcggagtcaacgccgtcatcaaattacgttactgcccttgaggattctatttaccagacggcggagactggagaaaatccgtactttaattacaacagccggagagtgatgtcatcaaagtctttcgtattggacacgccaagagagatttcatacaacgaccttgttttagccactgataatttctctgatgcacgtcgcgttgctgaggttgattttggtacggcttattatggtttactaaatggagaccaacatattgtggtgaaacgtctcggtatgactaaatgtccggcgcttgttacccggttctccactgaactacttaacctaggccggcttcgacaccgtaacctagtaatgctccgtggttggtgcaccgaacacggagaaatgcttgtagtgtacgattattccgcgaatcgtaagctaagtcatcttcttttccataatcatatacctggaaactctgttttgcgatggaaaagtcggtacaacgtgatcaaatcgcttgcttgcgctgtacgttatctccacgaggaatgggacgaacaagtcattcaccgaaacattacttcttcaactatatttcttgatagagatatgaatccgcggctttgcggattcgcattggcagagtttttgtctagaaacgacaaggctcatcaagctgcaaaaaagaaaggatctgctcaagggatttttggttatatggcaccagaatacatggaatccggcgaggctacaaccatggcggatgtatacagctttggcgtggtagtgctcgagatggttacggggcagccagcagtggattacaagaggaaaaaagaagatgctcttatggtgttgcgaatccgcgaagtagttggtaaccgaaaaaaactcttggaggagattgcagatattcatttggatgatgaatacgagaatcgagaattggcaaggctattacggttagggttagtttgcacgagaaccgatccgaagttaaggcctagcattagccaagtggtgagtatattggatggaagcgagaggttcttcgaagaggaaggaggaaaggaaggtgacgttagccgcaagcaaatgtatgattcgtctatgttgatgattagacaaatgcaagcgcttgggatccattga

SEQ ID NO: 655 - DNA, 1977 bp, Arabidopsis thaliana
atggaaagatccaatcttttccacatcccttgttttcttctcttatttcttctcttcaacatcaatggcgttcacactaccttcgtctgcggcgacgaagacttctctccaaacacaagctacgttgaaaacctcgaatctctcttgccttctcttgcttcaaacgtcatacgagaacgtggtttctacaacgtttcgctagacggagtttacgctcttgccctatgtcgaaaacactacgaagttcaagcttgtcgtcgctgcgtcgatagagcaagtaggactctgttaacacaatgccgaggcaaaacagaagcatatcactgggattccgaaaacgatgcaaacgtttcttgtctagtacgctactcaaatatccatagatttggcaaactaaagcttgagccaatagggaatgttcctcactcgagtcttgacccctcttccaatctaacccgaatcagccaagagtttgccgccagggctaatcgaacagttgaggttgcgtccacagctgatgagtcttcggtattgaagtattatggagtctcaagtgcagagtttacagacactcctgaggttaatatgttgatgcaatgcacacctgatttatcttccagtgactgtaatcattgtctgagagaaaatgttaggtataatcaagaacataactgggacagagttggaggaacagttgcccgtcctagttgttatttccgatgggatgattacagattcgcaggagctttcgataacctagagagagttcccgcgcctcctcgatctcctcaaactcgacaagattatcgggtcaagaaaggaagaatgtttcaaccatggagcgttgtggttgttgttttccctacgggcataaatcttgccgtgtttgtcgctttcgtgcttgcttatcgccggatgcggaggaggatttatactgaaatcaataagaattctgattctgatggtcaagctacgttaagatttgatcttggcatgatcttaattgcaaccaatgagttctcccttgaaaataagcttggacaaggtgggtttggatctgtctacaaggggatattaccgagcgggcaagagatagcggtaaagagattagctggaggctcaggacaaggagaactagagtttaagaatgaagtcttactcttgacaagactccaacataggaatctagttaagcttcttggattctgtaatgaaggaaatgaagagattcttgtctacgagcatgtccctaattcaagtcttgatcactttatctttgacgaagacaaacgttggcttcttacatgggatgtgaggtacagaatcatagaaggagttgcaagaggacttctttatctccatgaagattctcagttgaggattattcacagagatttgaaggcaagcaatatccttttagacgcggagatgaaccctaaagttgcagactttgggatggcgaggttgtttaacatggatgagactcgaggagagacaagcagagtagttggaacctacggatatatggctccggagtacgtgagacatggacaattctcagctaaatctgatgtttatagcttcggtgttatgcttttggagatgataagtggtgaaaaaaataagaactttgaaacagaaggacttcctgcttttgcatggaagagatggatagaaggagagcttgagagtataatcgatccttacttaaacgagaatccaagaaacgagatcataaagttgattcagattggtttgttgtgtgttcaagagaatgcagcaaagagaccaaccatgaactctgtaataacttggcttgcaagagacggtacttttacaatacctaaacctacagaagctgctttcgtcactctgcctctctcggtgaaacctgaaaataggtccatgagtgagcgtaaagacaaagatccgttttcagtggatgaggtctcgattacagtcttgtatcctcggtga

SEQ ID NO: 656 - DNA, 1233 bp, Arabidopsis thaliana
atgctttcttcaatcaaaccatcttcgtcttccttctccaccgctatctccggcagcgtaaggcggtcaattcctacaaagctcaagttttctcctttactcatcatcaaaaactgccataaccaaagctttaacgctaatgttgtctcccatcaaaagcctctacacatttcatctgcttcgaatttcaagcgtgaggtcaaagtcgaagcttacgaggccgatcgttcccgtccactggacatcaacatcgagcttcccgatgaacaatccgcgcagaaactgaaaatcggaatctacttcgcaacttggtgggcacttaacgttgtcttcaacatctacaacaagaaagtcctcaatgcttttccttacccgtggcttacttcgacgttgtctctcgcttgtggttctttgatgatgcttgtctcttgggctactagaatcgcagatgctcctaaaactgatctcgagttctggaaaactctgttcccggtcgctgtagcacacacgataggacacgttgcagcaacagtgagtatgtcaaaagtagcagtttccttcacacacatcattaaaagtggtgaaccagctttcagtgtcttagtctcaagattcttcatgggagagactttccctcttcctgtctatctctctctcttaccaatcatcggaggctgcgctctcgcggccatcaccgagcttaacttcaacatcactgggtttatgggggcaatgatatcgaatttggcatttgtgttccggaatatcttttcgaagaaagggatgaaagggaagtcagtgagcggaatgaactactacgcttgcttatcgatgatgtctcttgtgatcctcactccattttctattgccgtggaaggtcctcaaatgtgggctgctggttggcaaaatgcggtttctcaagtcggaccaaactttgtctggtgggtagtggcacaaagtgtgttttaccatttgtacaatcaggtctcatacatgtcattagaccagatttcgccgttaactttcagtatcggtaatacgatgaagcggatttccgttattgttgcatcgatcatcattttccataccccgattcaaccggttaatgccctcggtgctgccattgcgatttttggaactttcctctactcacaggtaaacaaacaaacttattcttgtttacctacctctagtacttggttctttagtgaacaatttctagttctaatataa

SEQ ID NO: 657 - DNA, 2703 bp, Arabidopsis thaliana
atgatcccattctacctctgtatacttctagtgattatacaaatcctgttcgatacacaagttaacaactctgctgataatcgttgtggttgtgaatgcatcgaaagaaatagagctggaaaatgccaaagagagctttgcggtttagaacattctaaaccggatcaagccttcttttgttctatccctcgtcctccactatggcctcctttgttacaaatcccgcgtcctgagagtcgcgatgttagaggtcttcgtgatgattcttgcagaagaacaggatcttgtcctgttactatactctttactggaaataaccgttcccttggaacaactgtatctgagaatctgttcactagttctgtgtcggcgaacgcctctgagattttgcgtactttagccaacaatgttttgggtacaacagttgaggcagatttcaccaattatcttgatccagggattgcctcaaatctttccatctacaatatccaacctcggtgcattctaaatgctacgtttccgttctcattcgaacaaccacctctcaagtttgagaaagagttgagatgtgttcaaggatcaaatctttggacaaatacctccaaagaggtcaatgataagattttcaagggttataagaaaggaaaccccgagggaaagataaatgagatcgctgcagcatatgatctcttgaacactgataggaacaattttaatgtgcacatctggtataattcaacgtacaaggacgatgcaggaaatagacttataaagttgatccgtgttccccgctcagtcaatttggtgtcaaatgcttaccttcaatttctacaaggaccggggacaaggatgttgtttgaatatgtcaaagaaatgcctaaaccagaaacaagtcttcgtctggacattgcgtctctaattggcccccttttcttcacctgggttattcttcttctgttccctgtgatcttgtcgtcattagtgtatgagaaacagcaacatctaagaattataatgaaaatgcatggcctaggagatggtccttattggatgatttcctacgcctatttccttaccatatccgtgttatacgttatatgcctgatgatattcgggtcagcaataggactgaagttctttcggcttaattcctacagcatccagttcgtattctattttctctatttaaatctgcaaatcgcccttgcctttctagtttcttcagtattttcaaaagtcaagacatcaacagttgcttcttacatatacgtgtttggatctggacttttgggtttgtttctactcaactttctgattgaagattcatcattccctagaggctggattattgtcatggagttatatcctggcttctccttataccgtggcctgtatgagttggcgcaatttgctttccggggaaacttgagaggggaagatgggatgaagtggaaagattttggtgatagtgcaatggatgatgttttttacatcattgtcgttgaatggtttcttgcactcattgcagcatactatatcgataagatatcttcatccggaagaaacccgttgttcttcttgcaaaaccctttcaagaaatctccttctttgagaagacctagtttgcagaggcaaggctccaaagtctcagttgatatggaaaaaccagatgttactcacgagagtaaaaaagtcgagcggttgatgcttgagtcgagcacaagccatgcgattgtatgtgacaacctgaagaaggtgtatcctggtagagatgggaacccgcctaaattggcagttcgtgggttatctcttgcagtgccttcaggagaatgcttcggcatgttaggtcccaatggtgctggaaagacttccttcatcaatatgatgactgggctcctgaaaccgacatctgggacagcacttgttcaaggtttggatatatgcaatgatatggacagagtgtacaccagcatgggcgtatgcccgcagcatgatttgctatgggaaacactgacaggaagggaacatctgctgttttatgggagacttaagaatctcaaaggcgctgatctcaaccaagctgtggaagagtctcttaagagtgtcaaccttttccatggaggagttgcggacaagcctgctgggaaatatagcggaggtatgaaaagacggctgagcgtagccatttcacttatcgggaatcctaaggtggtttatatggatgagccaagtacaggacttgatccagcttcgagaaagaacctatggactgtcatcaagcgtgcaaaacaaaacaccgcgataatcctcacaacccactcaatggaagaagcagaatttctatgtgaccgattgggtatttttgtggacggaggcttgcaatgcattggcaacccaaaagagctgaagggaaggtacggtggatcttatgtgtttacgatgacaacatcttcagaacacgagcaaaacgtggagaagctaattaaagatgtctccccaaacgccaagaagatatatcacatcgcagggactcagaagtttgagcttccaaaagaagaggttcggatctcagaggtgttccaggctgtggagaaggcgaagagcaactttaccgttttcgcttggggactcgccgacacaactcttgaagatgtcttcatcaaggttgtgagaaacggtcaggcctttaatgtcttctcttga

SEQ ID NO: 658 - DNA, 1422 bp, Arabidopsis thaliana
atggatctcctcacaccactcatcttcctcctcctcctcctctcaccattttcactctcagatgctggttccatcggagtaaactacggccgaatctccgacgaactcccctccgcattcaaagtagtccaactactaaaatcccaaggaatcacgcgagtcaaaatcttcgacgcagacccatcagttctcaaagcattatccggatctggaatcaaagtcaccgtagatctccccaacgagttactcttctccgccgccaaaagaacttccttcgccgtctcatgggtcaaacgcaacgtagcagcttatcatccttcaacacagatcgaatcaatagctgttggtaacgaagtcttcgttgatacacacaacactacaagcttcttgatccctgcaatgagaaacattcacaaagctcttatgagtttcaatctccactccgacattaaaatctcttctcctcttgctttaagcgctcttcaaaactcttacccttcttcctccggttctttccgaccagaacttattgactctgttatcaaaccaatgcttgacttcttacgtgaaactggttcaagacttatgatcaatgtctatcctttctttgcttatgaaggaaactctgacgtcattcctttagattatgctttgcttagagagaatccaggaatggttgattctggtaatggtttgagatactttaatctcttcgacgctcaaatcgacgccgttttcgcagcaatgtcggctttaaagtacgatgatatcgaaatcattgtcacggaaactggttggccgtcgaaaggagatgagaatgaagtcggagctactctagctaacgcagcttcttacaacggaaacttaatccgtcggatcttgacacgtggaggtacaccgttacgtcctaaagcagatctaacggtctatcttttcgctctgttcaacgagaacaagaagttaggtccaacgtcggagagaaactatggtctcttcttccctgatgagaagaaagtctacgacattcctttcacaacagaggggttgaaacattaccgtgacggtggtcatactccggtcactggaggagatcaggttacaaagcctccgatgagtggaggcgtgtcgaagagtttgaatggttatacttggtgtgtagctaatggtgatgctggtgaagaaaggttacaaggtggtttagattatgcttgtggtgaaggtggtgctgattgtcgtcctattcaacctggtgctaactgttatagtcctgatacacttgaggctcacgcttcgtttgctttcaatagttattaccagaagaagggtcgtgccggtgggagttgttacttcggcggcgccgcttacgtcgttagccaaccaccgagtaagtataactttttttttgtgtgtggcgcatgttaa

SEQ ID NO: 659 - DNA, 834 bp, Arabidopsis thaliana
atggctaaacccacatcacgaaatgaccgatttgcccttttcttcataaccctaattttcctgatcctaaccgtttccaaaccggtcgcctctcaaaactgtggctgcgcctctgacttctgttgcagcaaatatggctactgtggtacgaccgatgagttctgcggcgagggctgccaggcaggaccttgccggagcagtggaggcggtggagatcctgctgtttcactagaaggaacggtgacacctgacttctttaactctatactaaaccaaagaggtgattgtcctggcaaaggattctacactcacgacaccttcatggccgcagctaattcttaccctagcttcggtgcttccatctccaaacgcgaaatcgcggcgtttttcgctcacgtagcccaagaaacagggttcatgtgttacattgaggaaattgatggaccagccaaggccgcatccggagagtactgcgacacagagaaaccagagttcccatgtgcacaaggaaagggctactatggccgtggtgcaatccagctctcttggaactacaactacggtctctgtggcaaagccttggacgagaacttattggcttcaccagagaaagttgctcaagaccaggttcttgccttcaagaccgctttctggttctggaccactaatgttcgcacgagttttaaatcgggctttggcgcaacaatcagggcagtgaatagtagggagtgtagcggaggagattctacagccaaagccgccaacaggattaagtatttccaagactattgtggcaagcttggagttgcacctggagataacctcacttgttaa

SEQ ID NO: 660 - DNA, 504 bp, Arabidopsis thaliana
atgtcggaagcagcacagctcagaagaggtctaaagcctaaagggaagacttatgggttgaccaatcagaagagacgagagatcagagagatctttgatcttttcgacatagacggttcaggtagcatcgatgctagcgagctcaacgttgctatgaggtctcttggatttgagatgaataatcagcaaataaacgaattgatggcagaagtagataaaaaccaaagtggagccatagatttcgacgaatttgtgcatatgatgacaaccaaattcggagaacgagactccatagacgaattgtctaaggcgtttaagatcattgaccacgacaataatgggaagatttcacctcgtgatataaagatgattgctaaagaattgggagaaaatttcacagataatgatatagaagaaatgatcgaagaagcagaccgtgacaaagatggagaagttaacttggaggagttcatgaagatgatgaagagaacctcttacggctaa

SEQ ID NO: 661 - DNA, 945 bp, Arabidopsis thaliana
atgggtgttagagagaaagatccgttagcccagttgagtttgccaccaggttttagattttatccgacagatgaagagcttcttgttcagtatctatgtcggaaagttgcaggctatcatttctctctccaggtcatcggagacatcgatctctacaagttcgatccttgggatttgccaagtaagcaaacatgtttcacatttgtaggggagtataattgtaactatttaggtaaggctttgtttggagagaaggaatggtatttctttagcccaagagatcggaaatatccgaacgggtcaagacccaatagagtagccgggtcgggttattggaaagcaacgggtactgacaaaattatcacggcggatggtcgtcgtgtcgggattaaaaaagctctggtcttttacgccggaaaagctcccaaaggcactaaaaccaactggattatgcacgagtatcgcttaatagaacattctcgtagccatggaagctccaagttggatgattgggtgttgtgtcgaatttacaagaaaacatctggatctcagagacaagctgttactcctgttcaagcttgtcgtgaagagcatagcacgaatgggtcgtcatcgtcttcttcatcacagcttgacgacgttcttgattcgttcccggagataaaagaccagtcttttaatcttcctcggatgaattcgctcaggacgattcttaacgggaactttgattgggctagcttggcaggtcttaatccaattccagagctagctccgaccaatggattaccgagttacggtggttacgatgcgtttcgagcggcggaaggtgaggcggagagtgggcatgtgaatcggcagcagaactcgagcgggttgactcagagtttcgggtacagctcgagtgggtttggtgtttcgggtcaaacattcgagtttaggcaatga

SEQ ID NO: 662 - DNA, 1974 bp, Arabidopsis thaliana
atggaggaaatcggaatagttatcgtcggcggcggaatcgctggtctcgccacttccattgctcttcataggaaaggaataaagagtgtggtgttggagagagcagagaaagtgagatcggaaggagctggaatcggaactctctccaatggttggagagcccttgatacagcttggcgttgggcacggaccatgttgattgagaatggaaaaaaacgagaattcgtttcaaatatagtagacgaagctcgttgtattaaaaggaacgatcttgttgaggccttatccgatgcccttccgaaaggaaccatccggttcggttctcatattgtttctattgagcaggacaaaactacgttgtttccggttgttcacttagccaatggaaatagcatcaaagccaaggtcctgattggatgcgatggtgccaattctatcgtcagtgattatttgcagttaaacccgaaaaaggcgtttgcttgtcgtgcggtgagagggtttactaagtacccaaacggccatggatttccacaagaggttctaaggataaagcaaggaaatgtcttaataggaaggcttcctttgacggataatcaagtcttttggtttctagtacatatgcaagacaataatcacaatgattggaaagaaatggtaaaaatatgcaatgtggagtcattaacactcacacacttaaggtaccgagcgccatcggaaatcatgttagggaaatttcgtcgtgggacagtgactgtagccggcgatgcgatgcacgtgatgggtccgttcttggcacagggcggctcagcggcgctagaggatgcggttgttttagctaggtgtctagctaggaaagttggtccggaccacggagacttgttaaaggattgttcgatgaaaaacattgaagaagctattgatgagtatgtggatgaacgtaggatgagattactcgggctttcggtgcagacttatttgaccggacgttcgctacaaacgtcatcaaagctaaaatttcttattcttttgtttccatttactcaagaaaacatttactacattttcctacatttagcttatttgactattttaaaaaaacgttataagctagactcgcatagtttatgtcaagctctcatcacagttatggcgaatctaactctagagctaaacatcaactccgcaagaaaccttttaaatgtcaatctcatcactaaaatgaacgttttcactgccatcaccatcaacggcgagaatactcgaaagaaacaaaaggcgaaaaccacggttgatcgttatggtggatctaacccgacttggaatcaaaccatcaaattttccgtggacgagaggtcagcccgtggtggtcattcgtcacttgtcatgagagtaatctctcgtcgagtcctaggcaacaaagaaatcggaagagttaacatcccgttacttgagctcttgaatgcaaccacaccatcatttaacggtgatggtaacgatcatgagatgaaactgatgtcgtatcaggtgagaacttcgtcgggtaaacggtcagtgatcactaaccggagttgtgtagactccgcggcaccatctcaaatcgagcatgcaccttcggctccacccgaattgccaattgagtttcctaagctgcctcagccgccgtatcttttgagacatcctttcgccgccggttctagccgtggtcttcttccaatatcatatggcgctgggatgaccgagcaaaccggtcacgctaataactatgcgcaaaccggtcacgctaacaactatgcgccaccaccgagacaaggatatggaccgtacggttatgtgtcgtcgggatatggatacggaagtccctcgtatcaacaacgtaaggagatggggattgggcttggattgggagccggactttttggtggattaatggtgggagacattgtgtctgatgttgcaaattgttatgatctttga

SEQ ID NO: 663 - skipped

SEQ ID NO: 664 - DNA, 954 bp, Arabidopsis thaliana
atggcggtggagctcatgactcggaattacatctccggcgtcggagctgatagcttcgccgttcaagaagcagctgcttcaggactcaaaagtatcgaaaatttcatcggtttaatgtctcgtgatagctttaactctgatcagccatcttcttcttccgcctccgcctccgcctccgccgccgcagatcttgaatcagctcgtaacacaacggcggacgcggctgtttcaaagtttaaaagagtcatatctctcttagatcgaactcgaaccggacacgcccggtttagacgtgctccggttcatgttatttctccggttcttttacaagaagaaccaaaaacgacgccgtttcagtctcctcttcctcctccgccgcaaatgatccgaaaaggttcgttttcttcatcgatgaaaacgattgatttctcatctctctcctctgtaacaacggaatcagacaaccagaagaagattcatcatcatcaacgtccctctgaaacggcgccgtttgcgtctcaaactcaaagcctctccacgacggtctcgtctttctcaaaatcaacaaagagaaaatgtaactctgagaatcttctcaccggaaaatgcgcttccgcttcttcctccggtcgttgtcattgctcgaagaaaagaaagataaaacagaggagaataattagggttccggcgataagtgcaaaaatgtccgatgtaccaccggacgattattcatggaggaaatacggacaaaaaccaattaaaggatctccacatccaagaggatattataagtgtagtagcgtaagaggttgtccagcacgtaaacatgttgagagagcagctgatgattcgtccatgttgattgttacttatgaaggagatcataatcattctctctccgccgctgatctcgccggagccgccgttgctgatcttattttggaatcgtcttga

SEQ ID NO: 665 - DNA, 210 bp, Arabidopsis thaliana
atggacgccattgattccgtcgtggatcctcttagagactttgccaaggacagcattcgcctcgttaagcgttgtcataagccagatcgcaaagaattcacgaaagttgcagtccgtacagcaatcgggttcgtagtaatgggattcgtgggattctttgtgaagctcatctttattccaatcaacaacatcatcgtcggtgctacttag

SEQ ID NO: 666 - DNA, 1599 bp, Arabidopsis thaliana
atgggtctttctctttctttgctcttgtctgcttggaaagaagttgtgacgacccagttcttcagtttcaagaaccctgtcgagagttttcttgaaaccagatctttcagcttaaaacttaaagaaggaggcttgacttcaagaaccaacagtttcaagagtgagaacccgcaggaaaagtctccgaagacgggtatggagcggtctttgagcttcaacagctgggagattgtgacagaagttgagactgaaccgatgaacaaggaagatgaggagattgttgaaccgacgaagcctgctcgtaacagtttgaatggaaggaactgtgagagaatccaaataacgaagcctactattactccacctacgccttttgtgttcttctctccaagaccggtcaccgagcttgatgcagctgcaactacgttacagaaggtgtacaagagttacagaacaagaaggaacttagcggattgcgcggttgttgttgaggagctctggtggaagactctggatgctgcagctttaaatttgagctcagtcgccttctttgaagaagagaaacatgaaaccgcggtttcgaagtgggcacgagctaggacacgagctgctaaggttggaaaaggattgtcaaaagatgaaaaagctcaaaagttagctcttcagcattggcttgaagctattgacccacgccatcgttatggccacaacttgcacttctattatgatgtctggtcagcaagcatgagcgcacaaccattcttctactggttggacattggcgatggaaaagatgtgaatcttgaacaccacccaagaagtgttctgcaaaaacagtgcattaaatatctaggaccactggagagagaagcatacgaagtgatagtagaagatggaaagctaatgaataaacaaagcatgactctgatcaattcaacagaggattccaagtcaatttttgtacttagcacaactagaaccttatacgtagggcagaagaagaaaggtcgtttccaacattcgagtttcttgtctggaggtgccacaactgctgcaggaagattggttgctcgcgaggggatcctcgaggctatatggccatacagtggacactacctcccaacagaagacaacttcaatgaattcataagtttcctggaagagaacaatgttgatatgaccaatgttaagagatgctctgtgaatgaggaatattcgtcattcaattccagtggctacgaagaagaagcaacaaaagaagaagaagcagagaagaaaccagcagaaaccatcgttacagaggaacaagaagaagagaaagagagagaaagaccggtgttccagcttgcaaagaggctgtcttgcaaatggaacagtggagttggtccaagaattgggtgtgttagagattatccaatggaacttcagtcacaagcgttcgaacaagtcagtttgtctcctcggatttcgcctggttctacacgttttccgtcaccatacggcccaattccttctccaaggcctagtcctagagtaagagtctctccacgcttagcatacatgggaatcccaagccctagagttcaagtaaactgttag

SEQ ID NO: 667 - DNA, 279 bp, Arabidopsis thaliana
atggaggatcagaaaaagccaccaacgaccgagcaagaagtgaaagaagttaaaaacgacgacctcgagtctatcaagaccccatacttggactatgataacttggaagattacaagatgaaaggttacggagcacaaggccaccaagagcctaaactcggtatgggaggtggagccaccgatgctcccactccttcaggcggtcttggacgcggtggaggcgctgcatcgacggatctttcttctaccgatgcgattaaccgtcagggcgttccgtga

SEQ ID NO: 668 - DNA, 969 bp, Arabidopsis thaliana
atggctcgattttccttcttgaatgttgtaaaggatgttgtggctattctaaatgaatcccgcaaactgtttctcaagaacaaaaagttgatgttctcagtcttggtattccctctcttactcaattgtttagtttacttcttgaacatctttgtcatcgtaccggagatcacaaacttgatccttgaagcaagtttgttgccttcgacagatccaacctccccggaatacgcagcccgccttatgagagtctttacagattttcgccaatttgtgggttcttcatacattttcgcggctgtctcctccatcatcaacctcttttctgttctagtcatcgtccacgcatcggctattactcttaaagatgaaaacttcaatatcaaagattttcctgttctgagccttaaatcttggaagggacctcttgtgacatatttctacattgctcttttcagtcttggctttggcttcctcttctttataatcctttgtcctatccttttgttctctataaaatccggttccgtggaaaatatcggtttcttggcggtcgaggctggtgttttattgattatattcaccgtctctcagtcctattttgctatctattggaacttatctatggtcatatcgatactagaggaaagttatgggttccaagctttggggaaagcagcaaagattgttaaagggatgaagacaaaactgtttctcttgaatcttttctttggtttattggcatccggattagctcaaatcttgcagctgatcaatatgggaagatcgttagcggttaccttaaccacaggttttgtccttgtgtgtttggtctttgcggtgaggatgtttcagcttgtgacttacaccgttgcatatttccaatgtaaaagcctccaaggcagagacgttgagtcgctcagggatgtggaatatatggcattgtcttccactactctcacggaatga

SEQ ID NO: 669 - DNA, 440 bp, Arabidopsis thaliana
atggttacaagtaaacagaccaagaatatattccttcctggaactcccattcgtattcctgctgcagagttcaccaactcaccggctcttatatactttgtggtagcattatccgtggcatgcttttacagcattgtatctacatttgtcaccgtatctgctttcaagaagcattcctgctctgcggttctcttgctaaatcttgccattatggatgcggtgatggtggggatagtggcctcagcaaccggggcaggaggtggagtagcttaccttggtctgaagggaaacaaagaagttagatggggcaaaatctgtcatatctacgacaagttttgccgtcatgttggaggagcaatcgccgtctcattgtttgcttcggttgtcctcctcctcctatccatcatctctgtcctctccctctacaagaaaatccgttg

SEQ ID NO: 670 - DNA, 975 bp, Arabidopsis thaliana
atggagtgtagatcattggatctgacgattatatctgcggaggatctcaaagacgttcaattgatcggtaaacaagacttgtacgccgtcgtttccatcaacggcgacgctaggacgaagcagaagacaaaggttgataaagattgcggcaccaaacctaaatggaagcatcaaatgaagctcaccgtcgatgacgcagcggcgcgtgacaatcgtcttactcttgttttcgagatcgtggcggatcgtcccatcgctggtgataaacctgtcggtgaggttagcgttccggtgaaggagcttttggatcagaataaaggtgacgaggagaaaacggttacttacgccgtgaggttgcctaacgggaaggcgaaaggatctctcaaattctcgttcaaatttggggaaaagtatacttatggatcttcgagtggtcctcacgcgccggtcccttcggctatggatcataagactatggatcagcccgtcaccgcttacccgcccggacacggtgcaccgtctgcataccctgctcctcccgcgggtccttcttccggatatccaccacaaggacatgacgataagcacgatggtgtttatggatacccgcagcaggctggatatccagctggaaccggtggttatccgccacctggtgcatacccacaacagggaggttaccctggatatccgcctcagcaacagggtggatacccgggttatccgccacagggtccatatggttacccgcaacaaggttatccaccacagggtccatacggttacccgcaacagcaagctcatggtaaaccgcagaaaccgaagaagcatggtaaggctggagctggaatgggactaggacttgggcttggagctggtttattgggtgggttgttggttggtgaagcggtttctgacatcgctgatatgggtgacatgggtgacatgggtgacatgggtggtttcgatttctga

SEQ ID NO: 671 - DNA, 213 bp, Arabidopsis thaliana
atgcaaatccgttacggtaacgagtcgcagcaactttcttcttcttactacgttcgtcttcccggtgattcgggtcggtttgtaagatccgatttagatgtatcgggtcctggatctaattcctccaatagggcgtcgtcgtcgacaagcacaactacgtttgctgtttacgcgggagtccagtcacctgtttctcgtcaggttgtcacgtga

SEQ ID NO: 672 - DNA, 2418 bp, Arabidopsis thaliana
atggtggtgattcacggagtgtctcttactccacgcttcactcttccttctcgacctctcaacactggctttaatgccggcaattccaccctctctttcttcttcaaaaagcaccctctctctcggaagatctttgctgggaaacaatctgcggagtttgattcttcgtcacaagctatctctgcttctgagaaagtcttagtacctgataatcttgatgatgatcccagaggtttttcacagatatttgatctagaaagtcaaacaatggaatatactgaggcagtaagaacagaagaccaaacaatgaacgttgtcaaggagagaggggtgaaaccaagaatagttcccccaccgggtgatggcaagaaaatttatgagatagaccccatgttacgaacttacaacaatcatcttgattaccgttatggacagtataaaagattgcgtgaggaaatagacaagtatgagggtggtcttgaggcattctctcgtggctatgaaaagttaggattttcgcgcagtgatgccggtataacttatagagagtgggcgcctggagctaaggctgcatcacttatcggagatttcaacaactggaattctaatgcagatatcatgactcggaatgaatttggtgtttgggagatctttttgcccaacaacactgatggttcgcctgcaattcctcatggctcacgtgtaaagattcgtatggatactccatctggcattaaagactcaattcctgcttggatcaagttctcggtgcaagctccaggtgaaatcccattcaatggcatatactatgatcctccagaagaggagaagtatgtattcaaacatcctcaaccaaagagacctaagtcgctaaggatttatgaagcacatgttggcatgagtagcacggaaccaatggtcaatacgtatgctaactttagagatgatgttcttccccgcatcaaaaagcttggatataatgctgttcaaattatggccatacaagaacattcatattatgccagctttgggtaccatgtcacaaacttttttgccccaagcagtcgctgtgggaccccagaggaactaaaatcactgatagatagagctcacgagttaggcctggtagttctgatggatatcgttcatagccatgcttcaaaaaacacattggatggactgaacatgtttgatggaactgatgctcactattttcactctggacctcggggataccattggatgtgggattcacgacttttcaattatgggagctgggaagtattacgatatctcctttcaaatgcacggtggtggctagaagaatacaagtttgatggatttagatttgatggtgtaacctcaatgatgtatactcatcatggactctcggttggatttactgggaactacaccgaatactttggattggaaactgatgtggatgctgtgaattatctcatgctggttaatgatatgattcatgggctctaccctgaagcgattaccgttggtgaagatgttagtggtatgccaacattctgtattcctgtccaagatggtggcgttggatttgactaccgtttacacatggccatagctgataagtggatagaaatgctcaagaagagagatgaagactggcaaatgggcgacatcatttacacacttaccaacagaaggtggtcagagaagtgtatctcttatgctgaaagtcacgatcaagctcttgttggtgataaaacaattgccttctggttaatggacaaggatatgtatgatttcatggcagtagacagaccatcaactcctcttatcgatagaggaatagctttgcacaaaatgattaggcttataactatgggattaggcggtgaaggttacttaaattttatgggaaacgaattcggacatccagaatggattgattttcccagaggcgagcagcgtctttctgatggtagcgtgattcctggcaacaatttcagttatgacaaatgccgccgcagatttgatcttggggatgcagattatctcagataccgcggactacaagaatttgatcaggcaatgcaacatcttgaagagaattacggttttatgacttcggagcaccaattcatatcacgaaaagacgaagcagatagagtaatcgtattcgaaagaggtgatctcgtctttgtctttaactttcactggaccagcagctactttgattaccgcattggttgctccaagcctggaaaatataagatcgtattggactcggacgatcctctctttggtggattcaataggctcgatcgcaaggcagagtacttcacttatgatggcttatacgacgaacgaccctgctccttcatggtctatgcaccgtgtagaaccgccgtggtttatgctttagcaaaccacgattag

SEQ ID NO: 673 - DNA, 990 bp, Arabidopsis thaliana
atggttgtggtgaacaaaacgaatctcttattgcttcttctctctctatgtctcaccctcgacctctcctccgcacaactccgccgtaacttctacgccggaagttgtcctaacgtcgaacaaatcgttagaaacgccgtacagaaaaaagtccaacaaactttcaccaccattcccgccactctacgcctctatttccatgattgtttcgtcaatgggtgtgatgcatcagtgatgatagcgtcaacaaataataataaggcggagaaggatcatgaggaaaatttatcgttggccggagatggattcgacaccgtcattaaagctaaagaagctctcgatgccgtcccaaattgtcgtaacaaagtttcatgcgctgatattctcacgatggccactcgtgacgtcgttaatcttgcgggtggaccacaatacgacgtggaattgggaaggctagatggactatcatcaacagcggctagcgtcggagggaagttgccgcatccgaccgacgatgtcaataaactcacttcactcttcgccaaaaacggccttagccttaacgacatgatcgctctctccggggcacacacattaggattcgcgcattgcacaaaagtgttcaatcggatatacactttcaacaagacaactaaagtggatcccacggttaacaaagattacgtgacagagctaaaagcgtcgtgtcctcgaaacatagatccaagagtggctattaacatggacccaacaacaccaagacaattcgacaacgtttactacaaaaacttgcaacaagggaaaggattgttcacgtcggatcaagtcttattcacggatcgtcggtcaaagccaaccgttgacttatgggctaataatggacagttgtttaatcaagcttttattaactcgatgatcaagcttggtcgtgttggtgttaaaactggtagtaatggtaatatccgtcgtgattgtggagcttttaattga

SEQ ID NO: 674 - DNA, 1803 bp, Arabidopsis thaliana
atgtacctcattgagccagtaagagttgacaactctgagaccacccaatttcctgccagcacgctcctcagcaacagaacgcttgctacgctggaacttgagttgtgtcactccctgagtgatgcaaaaaatcattgtcaaaggaatgaaaggaaccaaagaagacacggggagagcccatcccagccggagagacttataagtttgatagacaaaaacgtcagaaatcgtttgactacgatgagtggtggtggtgttctgaagtataaggatggaatgagaaaagaagttgaaaccgcggagaaagctatattgtttaaagaagagctagaaatgatcgattctctgcaaagactcggaatctcgtatcactataaacatgaaatccatgatattttgagaaaaattcatgaccaacacggcgaaattgagagggaaacacaagatcttcatgctacatcacttgaatttattctcttaaggcaacatggttttgatgtctcgcaagatgcttttgacgttttcataagtgagaccggagaattcagaaaaactttacacagcgatatcaaaggtttactctctctatacgaagcttcttatttttcaatggattcggagtttaaactcaaggagactagaatttatgcaaacaagcggttaagtgagtttgtcgcggaaagtagcaaaactatttgcagagaagatgaaacttatatattagagatggtgaaacgagcactagagacgccgtaccattggagcatacgaagattagaagcaagatggtacataaatgtgtacgaaaaaaagcatgaaatgaaccctctcttgctagagtttgcagcaattgatttcaacatgttacaagctaatcatcaagaagaacttaaacttatttctagcacaggacttatgaaacaacttgatttcgtgagagaccgaatcacagagagttatttttggaccattggaatattttacgaaccagagtttaaatactgccgcaagatactcaccaaaatattcatgttaattgtgattatggatgatatctacgacatctatggtacattagaggagctcgagcttttcacaaatgtggtcgaaaaatgggatgtgaaccatgttgaaagacttcccaactacatgagaatgtgttttctttttctatacaatgagatcaaccaaataggatacgatgttctcagagacaaaggacttaacgttatcccttacctcaaacaagtttggacggatctatttaaaacgttcctaactgaatccaagtggtacaaaactggacacaaaccaagtttcgaagaatacatgcaaaacggtgtgatctcgagttctgtcccaacgatactgctccaccttttctccgtcctatccgaccacatctccgaccaaaccctaaccgatgattccaaaaaccactctgtcgtccggagctgtgccaccattctccgtctcgctaatgatcttgccacctcaacggaggagatggcaagaggagattccccaaagtcggtccaatgttacatgtatgagacaagagcaagtgaggaagaggcacgtagacacatgcaaagtatgatcagcgactcttgggacattataaactccgatttaaaaacggcacacacttcttctcttcctcgtggttttctggcagccgccgcaaatcttaaccgcgtggtacagtgtatctaccggcacggtgatggccacggaagcccagaaaagaccaagaccgttgattatatccaatcagtactcttcaatcccgttccgttatag

SEQ ID NO: 675 - DNA, 603 bp, Arabidopsis thaliana
atggctgcagctggaaacaagagcattaacgccaaattggtgttgcttggagatgttggtgctggaaaatcaagtcttgtgttacggtttgtcaaagatcagtttgttgaattccaggaatcaaccattggtgctgcttttttctcacaaacgttagctgtgaacgatgccactgtgaagtttgagatttgggatacagcgggtcaggaacggtaccatagtttggctccaatgtactacagaggtgctgctgctgcaatcattgtttttgatgttacgaatcaggcttcgtttgagagggcaaagaaatgggttcaggaactgcaggcacaaggtaaccctaatatggtcatggcccttgctggaaacaaatctgatttattagatgcaaggaaggtgacagcagaggatgcacaaacatatgctcaggaaaacggtcttttcttcatggaaacttcagcaaaaaccgctactaatgtcaaagagatattctatgaaatcgcaagaaggctaccgcgagtacagccaacagaaaacccaacaggaatggttctgccagacagggccatggatagggcagtgagctcatcttgttgtgcttag

SEQ ID NO: 676 - DNA, 1563 bp, Arabidopsis thaliana
atggctcacactctcggtctcactcaacccaactccactgagcctcacaagatctcgttcactgcgaaggagatcgatgtaattgaatggaaaggagacatactcgtagttggtgtgacagagaaggacttagccaaagacggtaactcaaagtttgagaatccgatcttgagcaaggtcgatgctcacttaagtggacttttagctcaagtctcttccgaggaagatttcactgggaaacctggtcaatcgactgttctcaggcttccgggtttaggatcaaagagaatcgctttgatcggtcttggacagtctgtttcgtctccggtggcttttcatagccttggtgaagctgtagctacagtttcaaaagcttctcaatctactagtgctgctattgtgcttgcttcaagtgtttctgatgaatctaagcttagttctgtatcagctttagcttcaggcatagtacttggtttatttgaagatggtaggtataagtctgaatcaaagaaaccatctttgaaagctgttgatattattggatttggaactggggctgaggtagaaaagaagctgaagtatgctgaagatgtttcttacggtgtaattttcgggagagagctcattaattctcctgccaatgtgcttactcctgctgtactagctgaggaagcagcaaaggtggcttctacgtacagtgatgtcttcactgcaaacatcttgaacgaagagcaatgcaaagagttgaagatgggttcttacctagctgttgctgctgcgtcggctaatcctcctcacttcatccaccttgtctataaacctccgaatggctctgttaagaccaaacttgctcttgttggaaaaggattgacctttgacagtggtggctacaacattaagactggacctggctgctcaattgagctcatgaaattcgacatgggcggttcagctgctgttcttggcgctgcgaaagctattggtgagattaagcctcctggtgttgaggttcatttcatcgttgcagcctgtgaaaatatgattagtggaaccggaatgagacctggagatgtcatcactgcctcaaacggaaagaccattgaggtcaacaacacagatgctgaaggtcgtctaacactcgcagatgctctagtgtatgcttgtaaccaaggcgtcgacaagattgttgacctcgctactttgaccggggcctgtgttattgctcttggaacttcaatggcaggaatctatacacctagcgacgagcttgcaaaggaagtgattgctgcatcagaaaggagtggagagaagctgtggaggatgccactggaagagagctattgggagatgatgaagtctggagtggctgatatggtcaacacaggcgggcgggcaggaggatccatcaccgcggctctcttcttgaaacagtttgtgagtgagaaggtgcaatggatgcatatcgacatggctggaccggtgtggaacgagaagaagaagtctgggaccgggtttggtgttgctacgcttgttgaatgggtacagaagaattcatcttcgtga

SEQ ID NO: 677 - DNA, 486 bp, Arabidopsis thaliana
atggcttcaaagaactcagcctctcttgctcttttctttgcgctcaacatcctctttttcaccttaaccgttgcaacaaattgcaactgcaagccaagtcctaaaccaaagccagtcccaagtcctaagcccaagccggtccaatgtcctcctccaccccgtccttcagtcccaagtcctaatcctaggccggtcacacctccacgcacccctggttcatccggaaacagctgtcctattgatgctctcaagctcggtgtatgtgcaaatgtcttaagcagtctactcaacatccagttgggacagccatcctctcaacaatgttgctcgctcatccaaggtttggttgacgtcgacgctgcgatttgtctatgcactgctctgagggctaacgttcttggtatcaaccttaacgttccgatatctctcagcgttcttctcaacgtttgtaacagaaagcttccatctggtttccaatgtgcttga

SEQ ID NO: 678 - DNA, 1428 bp, Arabidopsis thaliana
atggatggagaggttacttcttggattaggagagcaaatttctctcatactgtttgttatcgtatgattacgccgagtttagaatctatgccttttactgtaaaccaagagaagatgcagaggaatccagttactaataagaagagatctgtttctccgttgcctcatatggctctttctgatgcttttatcgaagcaaagtctgatattaagaggttttctactccacatcctagaagagtggaaccagagaagggaatgaaggccaagtcgtcgtcccgcaaagattcttctgagaaaaaatcagttaatctacggtccctgtctcactcgggtcctattagggatcttagtacgcagaaagttaaagagaggggaaagagcaagatagataagaagtcttcaaagtctgttgactatagaggttctaaagtaagttctgcaggagtgcttgaagaatgcctcattgatgtgtctaagttgtcttatggggataggtttgctcacgggaaatatagccagatttatcatggtgaatatgaaggcaaagctgttgctctgaagattatcacagcgcctgaggatagtgacgacatattcttgggagctcgtttagaaaaagagtttatcgtggaagccactcttttatctcgactaagccatccaaatgtcgttaagtttgttggagtgaatactggaaactgtatcatcacagagtatgtacctcgagggtctttaagatcatatctgcacaagctcgagcagaaatcccttcctttggaacagctaatcgattttggtctggatattgctaaaggaatggaatatattcactcaagagagatagttcatcaggatctgaagccagaaaacgtgttgatcgacaatgactttcacttgaagattgctgactttggcatagcgtgcgaggaggagtactgtgatgttttgggggataacataggaacttataggtggatggcacctgaagttttaaaacggataccacatggacggaagtgcgatgtttatagttttggacttcttttatgggaaatggtagctggagcacttccatatgaggagatgaaatttgctgaacaaattgcctacgcagttatatacaagaaaattaggccagttataccgacggattgtccagcggccatgaaagagctgatcgagcgatgttggtcatcgcaaacagacaagagaccggaattctggcagattgtcaaagtgttggaacatttcaagaagtctctaacaagcgaaggaaaacttaatcttttacctagccagatctgtccagaactaaagaaatgtcctaaattctggattcatatattcggatcattccaccaccacagcagcggtggcggcagcagcagcaacaactcagccttacctaagcctaaattcgcttga

SEQ ID NO: 679 - DNA, 1100 bp, Arabidopsis thaliana
atgtcaagaaagccatgttgcgtcggagaaggcttgaagaaaggagcatggaccaccgaggaggacaagaaactcatctcttacatccacgaccacggcgagggaggctggcgcgacattccccaaaaagctgggttgaaacggtgtggaaagagttgtagactgcgatggaccaactaccttaaacctgagatcaaaagaggcgagtttagttcagaggaagagcagattatcatcatgcttcatgcttctcgtggcaacaagtggtcggtcatagcgagacatttacctagaagaacagacaacgagatcaagaactactggaacacgcatctcaaaaaacgtttgatggaacagggtattgatcccgtgactcacaagccactggcttctagttccaaccctacggtcgatgagaatttgaattccccaaatgcctctagttccgacaagcaatactcccgatcgagctcaatgccttttctgtctcgtcctcctccatccagttgcaacatggtttccaaggtctccgagcttagcagcaatgatgggacaccgattcaaggcagttccttgagttgcaagaaacgtttcaagaaatcaagttctacatcaaggctcttgaacaaagttgcggctaaggccacttccatcaaagatatattgtcggcttccatggaaggtagcttgagtgctactacaatatcacatgcaagcttttttaatggcttcactgagcagattcgcaatgaagaggatagttctaacacatccctgacaaatactcttgctgaatttgatcccttctccccatcatcgttgtaccccgaacatgagatcaatgctacttctgatctcaacatggaccaagattacgatttttcacaatttttcgaaaaattcggaggagataaccacaatgaggagaacagtatgaatgatctccttatgtccgatgtttcccaagaagtctcatcaactagcgttgatgatcaagacaatatggtaggaaacttcgagggatggtcaaattatcttcttgaccataccaattttatgtatgacaccgactcagactcgcttgaaaagcatttcatatg

SEQ ID NO: 680 - DNA, 456 bp, Arabidopsis thaliana
atggcggatgctttcacagatgaacagatccaagagttttacgaagccttctgtctcatagacaaagattccgatgggttcatcacgaaggagaagctaacgaaagtgatgaagtcgatggggaagaatccaaaggcggaacaactgcaacagatgatgagcgatgttgacatctttggcaacggtggcatcacttttgatgatttcttgtatattatggctcaaaacacttctcaggaatcagcatcggatgagttaattgaggtattcagagtgttcgacagagacggagatggtctcatatctcaacttgagttgggagaaggaatgaaggacatggggatgaagataacagcagaagaagcggagcatatggtccgagaagccgaccttgatggcgatggttttctttctttccacgaattctctaaaatgatgattgctgcctcttattag

SEQ ID NO: 681-682 - skipped (2 entries)

SEQ ID NO: 683 - DNA, 966 bp, Arabidopsis thaliana
atggcttcagtggctcctaaaatcgctaaagatgtaactgaactaatagggaacactccattagtgtatctaaacaaagtagctaaagattgtgttggtcatgttgctgctaagcttgagatgatggaaccatgttctagcgtcaaagacaggattggttatagtatgattgctgatgcagaagctaaaggacttattaaaccgggagagagtgtgttgattgagccaacaagtgggaacactggagttggtttagcatttactgcagctgcaaagggctataagcttgttataacaatgccagcttcaatgagtatagagagaagaatcattctcttagcttttggagctgagttgattcttactgatccggctaaaggtatgaaaggtgctgttgcaaaggcggaggagattttggcgaaaacacctaatggttatatgcttcaacagtttgagaatcctgctaatccaaagatccattatgagactactggacctgagatatggaaaggttctggtggaaaagtggatggctttgtttctggtattggtactggtggtgctgggaagtatctcaaggaacagaacacaaacataaagctgtatggtgtcgagcctgttgaaagccctattctgtccggtggaaagccaggtccccacaaaattcaaggtataggtgctggttttattccaggcattttggatgttgatcttatagatgaagttgttcaggtttcaagtgaagaatccattgacatggcaaggcttcttgctagggaagagggtctgttagtgggaatctcatctggagcagcagctactgcagcaatcaaacttgcaaagaggccagaaaatgctgggaagcttatagtggcggtgtttccgagtttcggggaaagatatctatcgactgtactgtttgatgcagcaaggaaagaggcagagactatgacctttgagccctga

SEQ ID NO: 684 - DNA, 867 bp, Arabidopsis thaliana
atggccgagaaagtccatgagatcgccggaaagataactcctttctgccggaaaatagttcacgtgaacagaaaatggagaatcatcgagagggtatcgatctttggagatttctttaggtttctatggagaaaaattgtttcttgttcaagtatcatcgaaaaacctattctttaccggcgaatcgttcacaagatttcttccaccgcgggcgatatctttgacggagacgacgatactacgacagaacctactgtttccggtagaaggtttggttcaagttcggattcggatttggttagtctcaagatcagtttattaggcgattgtcaaacagggaagactacttttgtagtaaaatatgttggagatgagaatcaaagtttcttggagatgacgggtttgaatttgatggacaaaactttttatgttcaaggagttactatttcgtttagcatttgggatgtgggaggtgatgaaaagagatcaaaagatcatataccaattgcttgtaaagatgcagtagcaatcttgttcatgtttgatctaaccagtcgatctactcttaacagtgtcttcgggtggtatagccaggcaagaaaatggaacaagacggcaattccgattctaataggaacaaaattcgatgactttgttcggctcccacccaatcttcagtggaccatcgtcactcaggcaagagcatatgcgaaggtgatgaatgcgtcattgttcttctcaagtgcgacacacaacataaatgtgaacaagatcttcaaattcattttggctagactttttaatttgccttggaagattgacagaaatttgaccttaggtgaacccattatcgactacgattcctaa

SEQ ID NO: 685 - DNA, 1530 bp, Arabidopsis thaliana
atgccacaactcgagaacaacgagccacttctaatcaacgaggaagaagaagaagaaacagcgtacgatgaaacagagaaggtacatatcgtaagaaacgaagaggaggacgatctagaacacggcgtcggatgcggcggcgcaccaccgttctcatggaagaagctatggttattcaccggacctgggtttttaatgagcattgcgtttttagatccagggaatctcgaaggagatcttcaagccggtgcggttgctgggtactctttgttatggcttctcatgtgggcaacagcaatgggtcttttggttcagcttttgtcggctaggcttggtgttgcgacaggtcgtcacttagctgagctttgtcgtgatgagtatcctacttgggcaagaatggttttgtgggttatggctgaattggctttgattggatctgatattcaagaagttattggtagtgctattgctatcaagattttgagtaatgggattttgcctctttgggctggtgttgttattactgctcttgattgtttcgtcttcttgtttcttgagaactacggaataaggaagctcgaggctgtgtttgcagttcttatcgctacaatgggagtctcattcgcttggatgtttggtcaagctaagccaagtggctctgagcttctcattgggattttggtaccgaaactgagttcaagaacgatacagaaagcagttggagttgtgggttgcattataatgccacacaatgtgtttcttcactcagctcttgttcaatctagagaagtcgataaacgacagaaataccgagtccaagaagcgctaaactactacacaatagaatccacaattgctcttttcatctcctttttgatcaatctgtttgtcacaactgttttcgccaaagggttttataatactgacctcgccaatagcatcggtttggttaacgcgggacagtatcttcaggagaaatatggaggcggtgtgttcccgatactatacatttgggcgatcgggctattagctgctggccaaagcagcactattaccggtacatatgcgggacagttcataatgggcgggtttcttaatttcaaaatgaagaaatggttgagagctttgatcacacgaagctgcgctatcattccaactattatcgttgcgctagtgtttgattcatcggaagctacactcgatgtcttaaacgagtggcttaacgtgcttcagtccattcaaatcccctttgcactcattcccttactttgtttggtctccaaggaacaaatcatgggtagcttcaagattggtcctttgtacaagacaatcgcgtggcttgttgctgcgctcgtgataatgatcaacggttatcttttgttggagttcttctccaatgaggttagtggcatagtctataccggttttgtgacactgttcacagcttcttatggtgcattcatcctctacctcattgctcgtggcatcactttcactccttggccgttcaaagcggagtctagtcattga

SEQ ID NO: 686 - DNA, 822 bp, Arabidopsis thaliana
atggaagattacgagcgaataaactcaaactctccaacacatgaagaagattctgatgtacggaaaggtccatggaccgaggaagaagatgcaatcctagtcaacttcgtctctatccatggcgatgctcgttggaaccacatcgctcgttcctctgggctaaagcgaactggtaagagttgtagattaagatggcttaattacttacgtccagatgttagaagaggcaacatcactctcgaagaacaatttatgatcctcaaactccattctctttggggcaataggtggtcgaagattgcgcaatatctaccgggaagaacagataatgaaataaagaattattggagaactcgagtccaaaagcaagccaaacacctaagatgcgatgttaacagtaatcttttcaaggagactatgagaaatgtttggatgccgagattagtggaacgaatcaacgcccaatcattacccaccacgtgtgaacaagtggagtcaatgatcaccgacccaagtcaaccagttaacgaaccgagtccggtcgagccgggtttcgttcaattcagccagaatcatcatcagcaattcgtaccggctacggaattgtcagcaacgtcttcgaattctccggctgagacgttttcggacgttcgaggtggggtggtgaacgggtcaggttatgatccgtcgggtcaaacgggtttcggagagttcaacgattggggctgtgttggtggggacaacatgtggactgacgaggagagtttttggttcttgcaggaccagttctgccccgatacgacatcgtattcgtataattaa

SEQ ID NO: 687 - DNA, 1308 bp, Arabidopsis thaliana
atgccagagatcgagattgccgccggcagcggcgacaacaacgacgccttattcggtaaatatgagctcggaaagcttctcggatgcggcgcattcgccaaagtcttccacgcacgtgatcgtcgtaccggccaaagcgtcgccgtgaaaatcctcaacaagaaaaaactcctcacaaatccagctctagccaacaacatcaaacgcgagatctcaatcatgagaagattatctcatccaaacatcgtcaagctccacgaagtaatggcgacaaaatcaaagatcttcttcgcaatggagtttgttaaaggaggagaactattcaacaaaatctcaaaacatggacgtcttagcgaagatttaagccggagatatttccagcaactgatctccgccgttggttattgccacgctcgcggtgtttaccaccgcgatctcaaaccagagaatctattaatagacgaaaacggaaacttaaaagtttccgatttcggtctaagcgcgttaacggatcagatccgacccgatgggttgttacataccttgtgtggtactccggcgtacgttgcgccggagattctatctaaaaaaggatatgaaggtgctaaagttgatgtatggtcttgtggaatcgtcttgttcgttctcgtcgccggttatttaccgtttaacgatccgaatgtgatgaatatgtataagaagatttataaaggagagtatcgttttcctcgttggatgtctccagatctgaaacgattcgtttctcgtcttttagatattaatcctgagactagaatcaccattgatgagattttgaaagatccttggtttgttagaggaggttttaaacagatcaagttccacgatgacgagatcgaagatcagaaagtggaatcgtcactagaagctgtgaagagtttaaacgcgtttgatttgatttcttactcgtcgggattggatttgtcgggattgtttgctggttgtagtaattcgagtggtgaatcggagaggtttttatcggaaaagtcgccggagatgttggcggaggaagtggaggggtttgcgagagaggagaatctgaggatgaagaagaagaaggaggaagagtatgggtttgagatggaggggcaaaatgggaaatttggtatcgggatttgtatttcgcggttgaatgatttgcttgtggtggtggaggcacggcggagaggtggtgatggtgattgttataaggagatgtggaatggtaaactcagggttcaacttattcgcgtttgcgatcagacgtcgtcaacaaacgcggctatttaa

SEQ ID NO: 688 - DNA, 2739 bp, Arabidopsis thaliana
atggatgcagtgagagaggaaggaacttccttcgtaactgctgtccaggagcagtcatctaatggatatttgcttattgcagctagtggaggccttaaccaacaaagaacaggaataactgatgcagtggttgttgcacggattcttaatgctactttagttgtacccgagttggatcaccattcttactggaaagatgacagtgacttcagtgacatttttgatgttaactggttcatatcttctctcgccaaagatgtgactatagtaaagagagttcccgacagagtcatgcgtgcgatggagaaacctccttataccacacgtgtgcctcgaaagtctactcttgagtattatcttgaccaagtattgccaattctcacgaggagacatgttttacaattgacaaagtttgactacagactagcaaatgatctagatgaagacatgcaaaagttgcgctgcagggtcaactatcatgctttaagattcacaaagcggatacaatcagttgggatgaaagtggtcaagaggatgagaaagatggccaaacgttttattgctgtccatttgagatttgagcctgacatgctagccttttctggttgtgactttggtgggggtgaaaaagagagagctgagctagcagaaataagaaaacgatgggacacattgcctgatctggaccctcttgaagaaagaaagcgtgggaaatgccctcttacacctcatgaagtgggcttaatgctgcgcgctcttggttttacaaacgacacatatatctatgtcgcatctggagaaatatatggtggtgaaaagacactgaaaccactgagagagctgtttccaaacttttacaccaaggaaatgcttgccaacgatgagctcaagcctctgcttccctattcttcacgccttgctgccattgactacattgttagtgacgaaagcgatgtgtttatcactaataataatggaaatatggccaagattcttgcaggccgaaggaggtacatgggtcacaagaggaccatcaggccaaatgcaaagaagctcagtgcattgttcatggaccgggaaaagatggagtggcaaactttcgccaaaaaagtgaaatcttgtcaacgtggattcatgggtgatccagatgagttcaaaccaggacgcggtgaattccacgagtacccgcaatcttgcatttgtcagagacccttctcttacgacaaaacctcaacggatgatgaagaagaagacatgtcagaagagaaccacaacagcaccagccctggacatatatttagctggttagtggtgttattgtcattgatctcattagtccctgttccatcggaatcggctgttttgagtgtagatctaggttcagaatgggttaaagttgccgtagttaatctgaaacgaggacagagtccaatctctgtagccattaatgagatgtccaagaggaaatccccagctttagtagcatttcaatctggagaccggttactaggcgaggaggctgcgggaataacggctcgttatccgaataaagtttattcacaactgagggatatggtgggaaaacctttcaaacatgttaaggatttcattgattctgtctacttgccttttgatattgtagaagattctagaggtgcagttggtattaagatcgatgacggttcgactgtttactcagtggaggagttgttagctatgatcttgggttatgcctcaaatctagctgagttccatgctaaaatcccagtgaaggatatggttgtttcagttccaccttactttggacaggctgagagacggggtttgatccaggcttctcagttggctggggttaatgtcctctccctggttaatgagcattccggtgctgctttgcaatatgggattgataaggattttgctaatgggtcgagacatgtcatattttatgacatgggttcaagtagtacttacgcagcccttgtctattactcagcttacagtgagaaggaatatggcaagactgtttctgtcaaccaatttcaggtcaaggatgttagatgggacttgggacttggaggacagagtatggagatgcgcttggtagagcactttgcagatgagtttaataaacagctcggtaatggagttgatgtgaggaagttccccaaagcaatggctaaattgaaaaaacaagtcaagcgtacaaaggaaattttgagtgcaaacactgcggctccaatatctgtggaatctcttcatgatgatcgtgacttcaggagcacaattacccgtgagaagtttgaggaactgtgtaaagatctgtgggagagatctcttacacctttaaaagatgtgctcaagcattcaggtttgaagattgatgatatatctgcagtggaactaataggaggagctactagagttcccaaactacagagcacaatccaggaatttattgggaaacaacagttagacaaacatctagacgctgatgaggctattgtcctcggctcagcactacatgctgctaacttgagcgatggaattaaattgaaacgtaggctaggtatagttgatggttccccctatggttttctggttgagttggaaggccctaatgttaagaaagatgagagcacaaagcagcaactcgtaccacggatgaaaaagctacccagcaaggtaccgcattacattcaaaatctgtttaagcttagaaacatttctgtcttgtaa

SEQ ID NO: 689 - DNA, 1089 bp, Arabidopsis thaliana
atggaagcaacatacgatcgtgctagtgaggtaaaagcttttgacgagttgaagatcggcgtaaaaggtctcctagacgccggagttactcagatcccacgtatcttccatcatccacatcttaatttaaccgactcaaatctacttctttcctctacaacgatggttataccaacaatcgatcttaaaggaggcgtgttcgacgagtacacagtcacgcgagagagcgtcatcgcgatgatcagagacgcggttgagagattcgggtttttccaggtgattaaccatgggattagtaatgatgttatggagaagatgaaagatgggattcgtgggtttcatgagcaagactcagacgttaggaaaaagttttatactcgtgacgtcaccaaaacagttaagtataacagtaattttgatctttatagctctccttcagcgaactggagagataccttgagttgctttatggctcctgatgttccagaaacagaggacttaccagatatttgtggggaaatcatgttggaatatgcgaaacgagtgatgaaactaggggaactaatctttgagcttttatcagaagctttagggctgaatcctaaccacttgaaagaaatggattgcacaaaaggtttattgatgctttctcattactacccgccttgtcctgagcctggtttaacttttggcacaagtccgcattcagacagatcttttctcactattcttcttcaagatcacattggtgggcttcaagttcgtcagaatggttattgggttgatgttcctcctgttccgggagctcttctcgttaacctcggagatcttttacagcttatgaccaatgatcagtttgtgagcgtagagcatagagttctggctaataaaggtgaaaagccgcggatctcagtagcatctttctttgtgcatcctttaccgagtttacgagtttatggaccgataaaagaacttttgtctgagcaaaaccttcccaagtatagagacactaccgtcactgagtacacgagtcattacatggcaagaggactttatggaaattctgtgttgcttgatttcaagatctga

SEQ ID NO: 690 - skipped

SEQ ID NO: 691 - DNA, 1638 bp, Arabidopsis thaliana
atggtgatggaggacaacgagagttgcgctagtagagttattttcgacgccttacctacctcccaggccactatggaccgccgtgagcgcatcaaaatggaggtcttcgatgaggttctccgccgtctccgtcaatcggacattgaagacgcccatctccctggtttcgaagacgacctctggaatcacttcaatcgcctccctgccaggtatgctttggatgtgaatgtggagagggctgaagacgtcttgatgcacaagcgattgctgcattctgcttacgatccccagaatcggcctgctatcgaagttcatctcgtccagcctgatctttcatcttttatgttttgcctcttttgtcaacttttggattcctgggctcacaggttctttcgtcactcctcttttcttaaggttcaacctgccgggatctctgctgacttggactctacttctaatgatgctggtcattcttctcctacccgaaaaagcattcatccgccgcctgcctttggttcatcccctaatcttgaagcacttgcacttgcagctagtttatcccaagacgaggatgcagacaactctgttcataacaattcactctattcacggcccttgcatgagataaccttttccacagaagacaagcctaaactcctttttcagttaactgccttgcttgctgagcttgggctgaacattcaagaggcacatgctttctctacaactgatggctactcactagatgtttttgttgttgatggctggccgtacgaggaaacagagagacttaggatatcattggagaaagaagcagcaaagatcgagatgttaatctctctccttccttctgtttacctcttgttttatttcaggtataaaggtacatactgtagccaggaagttgctatcaaagtcctaaagccagagcgtctagactcagatctagagaaagagtttgcccaagaagtctttattatgaggaaagttagacacaaaaatgttgttcagttcattggtgcttgcaccaagcctccacatctgtgtatcgttacagaattcatgcccggtggaagtgtatatgactatctacacaagcaaaagggcgtctttaagcttccaactttgtttaaagtagctatagatatttgcaaagggatgagctacttacaccaaaataacataattcacagagatttgaaggctgccaacctcttaatggacgaaaatgaggtggttaaggttgcagactttggggtggctagagtgaaagcacaaactggagttatgacagctgaaactggaacatatcgctggatggctccagaggtgatagaacacaagccatatgatcacaaggctgacgtattcagctacgggattgtgctatgggagttgttgactgggaagggattaaggccaacaataccaaagaacacgcatccgaaattggcagagctattggagagattgtgggagcatgattcgacgcagagaccagacttctcagagatcatagagcagcttcaagagatagccaaggaggtaggagaagagggagaggagaagaaaaagtcgtcaacaggactaggagggggtatatttgcagccctgaggagaagcaccacacatcattga

SEQ ID NO: 692 - DNA, 1359 bp, Arabidopsis thaliana
atggagaaaagggtagagaagagaaggattgtgttagttccggttgctgcacaaggacatgtaaccccaatgatgcagcttgggaaagcccttcaatcaaagggcttcttaattactgttgctcagagacagttcaatcaaataggctcatcattgcaacactttcctggttttgactttgtcaccataccagaaagcttacctcagtctgaatctaagaaactaggaccagctgagtatcttatgaatctcaacaaaacaagcgaggcaagcttcaaggagtgtataagtcagttatcgatgcaacaaggcaatgatatagcatgtatcatctatgacaagcttatgtacttctgtgaagcagcagctaaggagtttaagattcctagtgttatcttcagcactagcagtgctacaattcaagtttgctactgtgttttaagtgaactcagtgccgagaagttcttgatcgacatgaaagatcctgaaaagcaagataaggtgttggaaggtttgcatcctttaaggtacaaagacctaccaacttcaggatttggaccattagagccacttttggagatgtgtagggaagtagttaacaaaagaacagcttccgctgttatcatcaacacggcgagctgtctagagagcttgtctctgtcatggctgcaacaagaacttggaattccagtgtatccattaggccctcttcacattacagcttcatcgccgggacctagtttactgcaagaggacatgagctgcattgaatggctgaacaagcagaaaccaaggtcagtcatatacataagcttgggaaccaaagctcacatggagaccaaggagatgttagagatggcctggggattgttgaatagcaaccaacctttcttatgggtcatccgacctggctctgttgcaggcttcgagtggatagagttattaccagaggaagtcattaagatggtaacagaaagaggatacatagcgaaatgggcaccgcagatagaagtacttggacatcctgcagtgggaggattctggagccactgtggatggaactcaacactcgagagtattgtggaaggagtcccaatgatttgcaggcctttacaaggcgaacaaaagttaaatgcgatgtatatagaaagtgtttggaaaatagggattcaacttgaaggtgaagtggaaagggaaggtgtagagagagctgtgaagaggttgatcatagatgaagaaggtgcagccatgagggagagggctcttgatttaaaagagaagctcaatgcctcggtaagaagtggaggctcctcatacaacgcactggatgagcttgtcaagttcttgaatacagagtga

SEQ ID NO: 693 - DNA, 1377 bp, Arabidopsis thaliana
atggttacatatttttgtgttgacttcttctcagagaagagagatagggtttcacgtgagaacatcaacgacgacgacgacgaaggcaataaggttctcatcaaaatggagggttcacgagttgaagaaaacgatcgttccagagatgtcaatatcggtctgaatcttctgaccgcgaatacgggaagcgatgagtcaacggtggatgatggactatcaatggatatggaagataaacgtgcaaagattgaggctcaggagagcaaagcagaaggaaggaaacggcaggaactgcaaatcatggtgccaaggcagttcatggaccttgggccgtcgtctggagcagcagagcatggagccgaagtgtcatctgaagagaggacaacggttcgttcaggttctcctccttcgcttctagaaagttccaatccccgagagaacggaaagaggttgcttggaagagaagaaagctcagaggaatcagagtctaacgcctggggaaaccctaacaaagtccccaaacataatccatcctctagcaatagcaatggaaacagaaacggaaatgttattgatcagtcggccgcagaagccaccatgcggaaagcccgtgtctcagttcgtgcccgatctgaagctgccatgataagcgatggatgtcaatggagaaagtacggacaaaaaatggctaaaggaaacccgtgtccgcgggcttattatcgttgcacaatggccggtggatgtccagttcgcaagcaagtgcagcgttgcgcagaagacagatctattctcataaccacctacgaaggaaaccacaaccatccactcccaccagccgctacggccatggcctcaacaaccaccgcagctgcaagcatgctcctctcgggctcaatgtcgagtcaagacggtttaatgaacccaacaaacctcctagctcgagctatcttgccttgctcctcaagcatggctacaatctcagcctccgcaccattcccaaccatcacattggacctcaccaattcacccaacggtaacaaccctaatatgaccactaataacccgttgatgcagttcgctcaacggcccggtttcaacccggcagttttgcctcaagtggttggtcaagctatgtacaataaccaacaacagtccaagttttctggtttacagttaccggctcagccactgcagatcgcggccacttcctcggtggccgagagcgttagtgctgccagtgcagcaattgcgtccgatccaaactttgcggcggctctagcggcagcgatcacgtccattatgaacggttccagtcatcaaaataataacaccaataataataatgtggctacgagcaacaatgacagtaggcaataa

SEQ ID NO: 694 - DNA, 1437 bp, Arabidopsis thaliana
atggcaaccgaaaccgtattagccacggcggtgagcaatggcaaaagcaaaggatgttgcaagtccggtccaggttacgcgacgcctctcgccgccatggccggtccacgggaaaagctcatctatgtcactgccctttactccggaacggggcgagacaaaccggactacttggcaacggtggatgtggatccaagctcacccacattttcaagcgtcattcacagactaaaaatgccatatataggagatgagcttcaccacactggttggaactcttgcagctcttgccatggtgatgcttctgctgatagacgttaccttgtcttaccaggcttaatttctggtcgcatctatgcaatcgacacaaagaccgacccaaaggctccgtctttgtacaaggttgtagagcctaaggagattgctgaaaagacaggattagcatttccacatacatctcattgcctagcttcaggggatatgttggtgtcatgccttggggacaaagaaggaaacgccaaagggaacgggtttcttttgctagactctgacttcaatgtcaaaagcaggtgggacaaaccaggacatggtcctttgtttggttatgatttttggtaccaacctcggttcaagaccatgatcagcacttcttggggtgcacctaaagccttctccaaaggtttcaatctccagcatgttgcggatggcttgtatggaagtcatttgcatatttatcaatggcctgaaggtgaaatgaaacagataacttattgggtttttgttgttatgtggttgcagatcagattcttgcatgatccttctaaagatacagggtatgttgggagtgctttgtctagtaatatgataaggtttttcaagaacagtgatgacacgtggagccatgaggcaatcgaaaactggatacttccagaaatgccggggcttatcaccgacttcttgatctccctcgatgaccggtttttctactttgtgaactggcttcatggagacattcgtcagtacaacatcgaagaccctaaaaacccggtcttaaccggacaaatatgggtcggaggattactacaaaagggtagtccttataaggctgttggagaagatggtaatacttaccaattcgatgttcctcagatcaaggggaagtctctaagagcaggacctcagatgatccaactaagcctagatgggaaaagattatatgcgacaaactcgctatttagcgcatgggaccgtcagttttacccggaaatcatggagaaaggctcacacataattcaaatcgatgttgatacagacaaaggtggtctcactctaaaccctgacttctttgtggactttggtgatgaaccagacggtcctgcactagctcacgagatgagatatcccggcggagactgcacttccgatatctggatctga

SEQ ID NO: 695 - DNA, 684 bp, Arabidopsis thaliana
atggcgctcgaggctcttacatcaccaagattagcttctccgattcctcctttgttcgaagattcttcagtcttccatggagtcgagcactggacaaagggtaagcgatctaagagatcaagatccgatttccaccaccaaaacctcactgaggaagagtatctagctttttgcctcatgcttctcgctcgcgacaaccgtcagcctcctcctcctccggcggtggagaagttgagctacaagtgtagcgtctgcgacaagacgttctcttcttaccaagctctcggtggtcacaaggcaagccaccgtaagaacttatcacagactctctccggcggaggagatgatcattcaacctcgtcggcgacaaccacatccgccgtgactactggaagtgggaaatcacacgtttgcaccatctgtaacaagtcttttccttccggtcaagctctcggcggacacaagcggtgccactacgaaggaaacaacaacatcaacactagtagcgtgtccaactccgaaggtgcggggtccactagccacgttagcagtagccaccgtgggtttgacctcaacatccctccgatccctgaattctcgatggtcaacggagacgacgaagtcatgagccctatgccggcgaagaagcctcggtttgactttccggtcaaacttcaactttaa

SEQ ID NO: 696 - skipped

SEQ ID NO: 697 - DNA, 426 bp, Arabidopsis thaliana
atgaccgcggcagcagttccagcaactggatctttccagaaacaagacgaggagtggcgtgcggttctgtctcctgagcagtttagggttctcagactaaaaggcacagataaacgaggcaaaggagagtttacaaagaagttcgaggaagggacttatagttgtgctggttgtggaactgctctttataaatcgaccactaagttcgactccggttgcggttggcctgcgttcttcgacgccatccccggtgctattaaacaaactccagaagcaggtggaagaagaatggagataacatgtgcagtgtgtgatggacatttaggccatgttttcaaaggcgaaggttactctactccaaccgatcaacgtcactgcgttaacagtgtctctctcaaattctcttctgctggttcctcccaataa

SEQ ID NO: 698 - DNA, 2880 bp, Arabidopsis thaliana
atgtgcgagcccgatgataattccgctagaaacggcgtcactactcaaccttcgaggtcaagggagcttctaatggatgttgacgacttagatcttgacggttcatggccactagatcaaatcccttacttatcctcatcgaatcgcatgatttctccgatttttgtctcctcttcctctgagcagccttgctcgcctctctgggctttctccgacggtggaggaaatggttttcaccacgcaacctccggtggcgatgatgagaagatcagctctgtctccggtgttccttctttccgtctcgccgagtatcctctcttcctcccttactcttctccatcagcagctgagaacacaacagagaagcataacagtttccagtttccgtctccattgatgagcctagtcccaccagagaacacagacaactactgtgtgatcaaagagaggatgactcaggcgcttcgatacttcaaagaatcaaccgaacaacacgttttggctcaggtctgggctcctgtgagaaagaatggtcgtgatttgctgacgactttgggtcaaccttttgttcttaatcctaatggtaatgggcttaatcaatacaggatgatctctctcacatatatgttttctgtggatagtgaaagtgacgtagagctcggactcccgggtcgagttttccgtcagaaattgcctgaatggactccaaatgttcagtactattccagcaaagaattctcgcggcttgatcacgccttgcactacaacgtgcgtggtacactggccttgcctgtctttaatccctctggtcagtcctgcataggtgttgtggaacttataatgacctcagagaagattcactatgcacccgaagtggacaaagtttgcaaagcccttgaggcggtaaatctgaaaagctcggaaatacttgatcaccaaacaacacagatatgcaatgagagtcgccaaaacgcgcttgctgagattctcgaagtgctgacagttgtatgtgagacccataacttgcctctcgctcagacttgggttccatgtcagcatgggagcgttcttgccaatggtggcggtctaaagaaaaactgcaccagctttgacggtagctgcatgggtcaaatctgcatgtctacaaccgacatggcctgctatgtcgtggatgctcatgtctggggctttagagatgcctgtcttgaacaccatctccagaaaggccagggagtcgctggacgagcttttctcaatggtggctcatgtttctgcagagacatcaccaagttctgcaaaacgcagtacccactagtccattatgcgctcatgttcaagttgaccacttgttttgcaatatctctccagagctcttacacgggcgacgacagttacattcttgaattttttcttccttcgagtataacagacgaccaagagcaagatttgctgttgggttctattttggtgacaatgaaagaacattttcagagtctgagggttgcatctggggttgactttggtgaagatgacgacaaattgtctttcgagatcatccaagcattaccggacaagaaggttcattcaaaaatagaatccattcgagttcccttttctggttttaagtcaaatgcaacagagacgatgttgattcctcagcctgtggttcagtcttctgatccagtaaatgagaaaatcaacgtggccactgttaacggtgtggttaaggagaagaagaaaacagagaaaaagcgtgggaagactgagaaaacaatcagtctagatgtacttcagcagtatttcactggaagtctcaaagacgctgcaaagagcctaggagtttgcccgacgacaatgaagcgaatttgcaggcaacacggaatctcgcggtggccatcgaggaagatcaagaaagtgaatcgttcaatcacaaagctgaaacgagtcatcgaatctgttcaaggtactgatggaggcctcgacctgacttccatggccgttagttccatcccttggacacacggtcaaacatcagcacagccactaaactcacccaatggttccaaaccacctgagctaccaaacaccaataattcacctaaccattggtcaagtgatcacagtccgaacgagccaaatggttcgcctgagttaccaccaagcaatggtcacaagcgatcacgaacggtggatgagagcgctgggactccaacctctcatggctcatgtgacggtaaccaattagatgaaccgaaagtcccaaatcaagatccgctcttcacggttggtggatcacccgggctcctttttccaccttattctagagatcatgatgtatctgcagcttccttcgcaatgccgaacaggcttcttggttctatagaccatttccgaggaatgctcattgaagacgctggaagttcaaaagatctgagaaatctctgccccactgcagcatttgacgataagtttcaagacacaaactggatgaacaatgataataatagcaacaacaacttatacgctcccccaaaggaagaggccattgcaaatgttgcatgcgaaccatcaggctcagaaatgagaacggtaacaatcaaagcaagttacaaagacgacataatacggttcagaatatcctcgggttcaggtataatggaattgaaggatgaagtggctaagaggctgaaagttgatgcaggaacgttcgatatcaagtatcttgacgatgataacgaatgggttttaatagcttgtgatgctgatcttcaagaatgtctcgagatccctagatcctcccgcacgaaaatcgtaaggctcttagttcatgatgtaacgacaaatctagggagctcctgcgagagcactggagaattgtga

SEQ ID NO: 699 - skipped

SEQ ID NO: 700 - DNA, 1005 bp, Arabidopsis thaliana
atggcgatgcaggccggagttggcttatccaggatctttctcttagccggagcaggttacactggtacgatcatgatgaagaatggaaaattgtcggatttgttgggtgaattgcagagtttggtgaagggaatggagaaatctggagaagggtctgagggagattctgatgtttctgatgctatagctgcacaggttcgccggttggctatggagattcgacagctagcttcgcagcaacacataacggtcatgaatggagtttctggtgactctcttgttttttcagcaaacctacaagcccttgctgttcctgctgcggcattgggagctctcggatatggttatatgtggtggaagggactctcattcactgaccttatgtatgtgacaaaagccaacatggctgctgcagtggctaacttgacaaagaatctggagcaagtttctgagactcttgcggctgcgaaaaggcatttaacacaaaggattcagaatctggatgataaggtagaaaagcagatcgatctctcgaaggaaatcaatagccaggttatttctgctcgtgagaatatcagctcacttgagatggatttggaatcattgcataatttgattactggactggatgggaagttggacacgctggaatacaagcaggatgtcacaaatgttttcatgctaaacttgtataactattttggaggcaagagcacaaagctgcctgaaatggaacagcttcagcttcctgtaaaccagagggctcgtaatttgcttgcagatgttgaaactaagggtctgaaaaacttggctgaagagctgtttaaaagcaatggcacacaggtgacaaccacagtgaaacaaatcagtttgagtaaagtgaatgtgaagtcgaggccattgttatcaaggtgtgataaaggaaatgtgaatgcagggctgcttcagctaagtgttgatatggaagttttcctgatggcggtttggcttgcgggatgtatataa

SEQ ID NO: 701 - skipped

SEQ ID NO: 702 - DNA, 2412 bp, Arabidopsis thaliana
atggagctagaacccaataaatcactatctgctgatatgccatctttgctgagtagatcatctgaagcttttaatggaggcactggatatcgttcttcaagtgatctcagcatgttctcaagctcattgcccacactttttcatgaaaagctgaatatgactgattcagatagttggctctcctttgatgaaagctcacccaatctgaacaaacttgtcataggaaactcagagaaagattctttggaagatgttgaacccgatgctttagaaatattgctgcctgaggatgaaaatgagctccttcctggcctcattgatgagcttaattttaccgggttgcctgatgaacttgacgatctcgaagagtgtgatgtcttttgcacgggagggggtatggagttggatgttgaatcccaagataatcatgctgttgatgcgtcagggatgcagatttctgatcgcggtgctgcaaatgcatttgttcctcgtaaacgtcccaatacggctggtagagtttcagtggaacatccaaacggtgaacatccttcaaggacattatttgttaggaatatcaacagcagtgtcgaggattctgagttaagcgccctttttgagccgtttggggagatcagaagtttgtacactgcatgtaaaagcagggggtttgttatgatatcctactacgatattcgagctgctcatgccgcaatgcgtgcactacagaacacacttttaagaaaaaggacactggacattcacttttccattcctaaagaaaatccatcagagaaggatatgaatcaaggaactcttgtgatttttaatgtggacacaacagtatcgaatgatgagctccttcagctgtttggtgcctatggtgaaataagagagattagagaaaccccaaacaggcgattccacaggttcattgagtactatgatgttagagatgcagagacagccttgaaagcactgaatagaagcgagataggtggaaaatgtataaagctcgaacttagtcgtcctggaggggctcgtcgactgtcggtcccgtcacaaagtcaagatttggagagaaccgaagttacaaatttctacaatcaagtaggttcacatgttgctaattctccaccaggtaactggccaattggtagcccagtgaagggctctccttcgcatgcctttacgaggccacatggtctaggaatggtcaggccagttaactcagacaatatgccaggactggcttcaattcttcctgctcatccttctagctttcatggattttcaccagtcagtaatgaccaagggctattgaatcattcaaaccaaactattctgaataagggattgatgcacaacatttcctatgggcaacctcattctttgccagagcatataacagggggaatttccaactccatgaggtttatagctccacactcctcaggattcgggacttcatctgatcaccgctatcgctggggaagccctcctcagcatatgaattatcctggttacactggagtgtcgtcgtcatcgtcatctactgaacgtcctttcactgtcaggcatggttttccatttgctgagaggcaggcttcattgcttggaaaataccagcatcatgtgggctctgctccctcaagcattcattttaatacacaaatgaattgctacacgggatcaccagagataccccttggatttagtgatatgggaatcaacagaaactataacagtgctcatggaaaagcaaaccttggtgttagtctaccggggaacagtagtgaacaggatttcactggctttggcatgtcttcaatgcctacagttcctttcggtgggagtagaggattacaatcagtaaggcctgaaccttttgctgagcagggtaggatacataaccacgagagtcacaatcagaatcagttcatagatggtgggagatatcatatcgacttggataggattgctagtggagatgaaatccgaactacattaatcatcaaaaacatcccaaacaagtacacttacaagatgctggtggctgaaatcgacgaaaagcacaagggagactatgactttctatgcttgccgacagactttaagaataaatgcaacatgggtcacgcttttatcaacatggtctctccattgcacatcgttcccttccaacagactttcaatggtaaaatatgggagaaattcaacagtgggaaagttgcttcattggcatatgcagagatccaaggaaagtctgcccttgcgtcatacatgcagactccaagttctatgaaggaacaaaagcaattgtttccagaagtctcctaccatgatgatggtcaagacgccaatgatcacgtatgtttatccgatacaaaatctcatttttgtttttgtttttga

SEQ ID NO: 703-704 - skipped (2 entries)

SEQ ID NO: 705 - DNA, 375 bp, Arabidopsis thaliana
atgcaaatgctaagaaacttaagcacgaggacgaggagtcgtcgcggcggatatgagcgtgtaagcgatgattccaccttcagcctacttggagcaaagctaaggaggtcaacgagcgttccatactatgctccatcgataaggcttggtggagattttcctgtgattttggaaaagcttccacgccaaaaaccaactaaaacagtggtgacaagcaaattaagccatccaatcttcagtttatttgatggttatcgccgccataacaagaagaaagcgacggctaaaccggagttctctagataccatgaataccttaaagaaagtggaatgtgggatttgagatctaatagtccggtcatctactttaagtag

SEQ ID NO: 706 - DNA, 864 bp, Arabidopsis thaliana
atgttctcagtcttggtattccctctcttactcaattgtttagtttacttgttcaacgccattgccatcaaacccgagataacaaacttgatccttgaatcaagtttgttacctatgacagatccaaacaccccggaatttgctgcccatcttatgagagtctttgtagattttcgccagtttgtcaattctttatacatcttcatcgccgtctcctccatcatcaaccttttatccactcttgtcatggttcatgcatcggctcttactcataaagatgatagcttcgagatcaaagattttccgattctgacgcttaaatattggaagggacctcttgtgaccaatttctatattgttctcttcagtcttggctattggttcctattctttatagtcctattttctatcgttttcttctctacaaaactcgattccttggcagccaaatctcgcgctttattcattgtatttgcagtctttgagtcttacttagctatcgtttggaacttatctatggtcatatcgatactcgaggatacttatgggatccaagctttggggaaagctgcaaagattgttaaagggatgaagccaaaactattcctcttgaatcttttctttgggttattgtcatttggattagttcaaatcttgcggctggtcgattggagtagttcattctcggttaccttaaccaccggtttggtccttatgagttcggtctttgtggtgaggatgtttcagcttgtgacttacaccgttgcttatttccaatgtaagagcctgcaaggacaagactcgctgagggatgttgaatatacgaaattgtcatccactactctcatgggaggattgccttga

SEQ ID NO: 707 - DNA, 1485 bp, Arabidopsis thaliana
atggagaatcatcatccttctactctattgtctatggattcaagtgcttcttctcatgaggagcttgatttggagatgaataacaacaggcaatctctgctctctggccctcctgatatcaatttacctctctcagctgagagaagtcctcctcctccgccgtggaatttagatgcttgtgatattttggatgttgggttaggttcacaagcttatgagactgagaattacatgagtgttgtacctaaggttgggaggaaatgtgctaaacgtgttgatagtatctggggtgcttggtttttcttcagtttctacttcaagcctgcgttaaacgagaaatcaaaggcgaaaatcgtccgggatagtaatgggatatctggttttgacaagtcggatttgaagcttgatgtgtttttagttcagcatgatatggagaatatgtatatgtgggtgtttaaggaaagacctgagaatgcactagggaagatgcagttgaggagttacatgaatggtcattctagacaaggggatcgtttgtttccatttagtgttgagaaagggtttgttaggtctcacagaatgcagaggaaacactacagaggtttgtcgaatccgcagtgcgttcatgggattgagcttgttcctttgccaaacctcacgtgtctagatgaagaagagaggaaaaggtggatggagcttacgggtcgtgatttgaatttcaccattccacctgaagctagtgactttggttcttggagaaaccttcccaacactgactttgagcttgagaggcctacaccttctttgaagaatcctactgcaaaccactctaagaaactactcaatggctcggggctcaatctctcgactcaaccatccaaccattctaatggtgaagcaaccgatttatctccttcgagccacaagaagaggaaggacttgttctcaaatgggattcatgaggaggagtgttgcttaactgtaaacccacaacctcctgttatcgaagctcaccagaatgagctacctacttggtcaaacgagtttactggggccatgaaaaacgtttatggacctgttactgctgcaaaaacgatctatgaggacgaagaaggctacttgatcataatcagccttccttttgtggatttgaacagcgttaaagtctcctggaggaacactctcacacatggaatcataaaagtttcatgcctcagcacatcgcgcgtacctttcataaagagacatgatagaacattcaagttgactgattcagcctctgagcattgcccgccaggtgaatttgtcagagagatcccattatcaaaccgaatcccggaagatgcaaacattgaagcgtattacgatggacctggatcagttcttgagatacttgtcccaaaactaagagctggcccggaagagcacgaggtgcgggtgtgtctccgtcccaacctcggtggaaacgatcttatgctgacttaa

SEQ ID NO: 708 - DNA, 216 bp, Arabidopsis thaliana
atgagtcaatacagccaaaaccaatcttcaggagcttatcctacgccgccagtgtctaccggcccttacgtggcaccgccaccgctaggttacccaacgaacgacacaagtcatgccacggtggcaacggtggagacaaagtccaagggtgatggattcttaaaaggctgtcttgcggccatgtgttgttgttgtgtcctcgacgcatgcttctga

SEQ ID NO: 709 - DNA, 1700 bp, Arabidopsis thaliana
atgtcatcagctggtgttgcgttaagtccggttcgtagcgagccattgattatgcctctggttcgtgccaattcttgtcttgattcttatcctgacgacaccatcatgatttaccttacacttcctggatcggtgataccaatgcgagtgcttgagtctgattccattgagtctgttaagcttcggattcagtcttaccgcggctttgttgtgaggaatcagaagcttgttttcggtggtcgagagctagctagaagcaattctaatatgcgtgattatggtgttagtgaaggcaacattctccacttggttcttaagctctctgatcttcaggttcttgatgttaagactacctgtgggaaacactgcaggtttcatgtcgagagagggagaaacattgggtatgtgaagaagcagatttcgaaaaagcgtggagactttgttgatcctgatgaacaggagattctttacgaaggtgagaagttggaagaccagagtcttattaatgacatttgtagaaacgatgactcggttttgcatctgcttgtgcggagatctgctaaagttcgagttaagccggtggagaagaactttgagttgtctattgttgccccacaagcaaaagataagaagggtcgtgaagctaagagcattgtgccaccaaaaaagctttctttggagccggtagttgttaactccaaggctaaagtacctctggtggttaaagatatgattcagtctgcttctgatggacttaaaagtgggaattctccggtcaggtcaagcgaaggtacgggaggagcttatttcatgcagggtccatctggcaacaaatttgtgggtgtgtttaagccaatagatgaggaaccaatggctgagaacaatcctcagggtttaccactttcgccaaacggtgaaggtttgaagaaaggaacaaaggttggagaaggtgcattaagggaagtcgctgcatacattttggatcatcccaaaagtggaaacaaatctatgtttggtgaagagataggttttgctggtgtacctcccacagctatgattgaatgtttgcatccagggtttaaccatcccaaaggaatcaaaaccaagattggatcacttcagatgtttactgagaacgatggcagctgtgaagatatgggtccactttcatttccagtagaagaagttcataagatttctgtgttggatattagactggccaacgcagacagacatggtgggaacattttgatgaccaaggacgaaagcgggaagctcgttttggttcctatagaccatggatactgcttgcctgaaagctttgaagattgcacgtttgagtggctatattggccacaagcccggaaaccgtactctgcagagacccaagagtacataagatcactggacgcagaggaagatattgatctactaaagtttcatggatggaaaatgccggcagagacggctcaaacgctcagaatctcaacgatgctactgaagaaaggagtggaaagaggactaacagcatttgagattggaaccataatgtgcagagaaacacttagcaagaagtctctggtggaggaaatggtagaggaagctcaagaagctgtgcttccagggacgagcgaagctgcattcctcgaagccctatccgatgtgatggattaccatctcgatcactctcaggaacacta

SEQ ID NO: 710 - DNA, 732 bp, Arabidopsis thaliana
atgataagaacagaggaagaagaagactatacaagtccaccgtggctaatgccaatgctacgagggagttacttcgtcccttgttccatccatgtcgattcaaacaaaaacgaatgcaatttgttctgtcttgattgtgctggaaatgccttttgctcttactgtttagtcaaacataaagaccatcgtgttgttcagatacgaagatcttcgtaccataacgttgtgagagtgaatgagatacagaagttcatagacatcgcttgtgttcagacatatattatcaacagcgcaaagatcgtgttcctcaatgaaagacctcagcctagaatcggtaaaggtgttacaaacacttgtgaaatctgttgcagaagtctccttgattctttcaggttctgctctctcggctgcaagcttggaggaatgaggagaggagatttatctctaaccttctctttgaaaggaaagcatgggagagagtaccttggtgggtcggaatcagatgaagctactacaccgactaagatgcgtaagaccaatgctttcaaccgtctgatgagtggtctctcgatctcaaccgttagattcgatgactacggtcccaatggtgatcaaaggtcttcaagctctggtgatgaaggtggttttagtttctctccgggaacacctccgatctataatcaccggaattcaagcagacgaaagggtgtccctcaccgtgctccgttctaa

SEQ ID NO: 711 - DNA, 840 bp, Arabidopsis thaliana
atgtcgatgatggcgggtatacaaggccagattctcgaggtcactggttcgtacctttctcacatccccaattctattatgttcttcaaccttatctatgatccgttgaaatttgttgggtgccagaaattgaaagacacggaatggttttcaagacaagatccatacgtcgtccttgagtatggtggcagaagtcaccgtaccagaacctgcacagatggtggaaagaacgctgttttccaagagaagtttatcttcactttgattgaagggcttagggatcttaaggttgctgtctggaatagcaacactctctccactgatgacttcattggcaatgcaacgattcaattgcagaaagttctttctcaggaatacgacgactgtacctggactttgcagagtaaaactgggagtgctgacatggttttgctcactgatcagagtcgttataaacataattacgggtctgcgccatcagcaccgtatgcacctcacgtacctcaatactcagcaccgccttctgcatctccgtattcaacagcaccaccatactctggaccatctctatacccacaagtacaacaataccctcagccatcaggataccctccagcttcagggtatcctcctcagccatctgcctatccacctccctcaacctcgggctaccctccgatcccttcagcttacccacctcctccgccatcctcagcttaccctcctcaaccataccctccgcaaccatcatattacccacaaggtaccttcctttctttcctgttctatgctgcaattgatcgcatttgcttgtctctaactatagtcagtggtggttga

SEQ ID NO: 712 - DNA, 918 bp, Arabidopsis thaliana
atgacactttatattcgtcgtgaatcttccaagctatggaagagattttgctctgagatatcgacggagattggtcttcttgctgagaactggaaatatcttctcgctggtcttatctgtcagtacattcatggtttagctgctaaaggagttcattatattcatcgcccgggaccgacacttcaggatcttggcttctttcttcttccggagcttggtcaagagagaagctacataagtgaaaccgtgttcactagtgtgtttctttcgtttttcctgtggactttccatccattcattctgaaaaccaaaaagatatacaccgttttgatatggtgcagagttctagcattcttagttgcctgccagtttctccgtgttataactttctattcaactcagcttcctggccctaactatcactgccgtgagggctctaaagtttctaggttgccatggcccaaaagcgctcttgaggttctcgagattaaccctcatggggtgatgtatggatgcggagacctgattttctcatcgcacatgatattcactctagtctttgtccgtacttaccagaaatatggcactaaaaggttcataaagctgtttgggtggctcactgcaattgtgcagagcctcttgatcattgcctctcgtaaacattacagtgtcgatgtagttgttgcatggtatactgtgaatttggtggtgttctgtctagacaagaaattaccagaattaccagatcggactgctgtgttgctcccagtaatctcaaaagacagaacaaaagaagagaaccacaagctgttgaatggaaacggtgttgaccctgctgattggagaccgagggctcaggtgaacgggaagattgacagcaacggagttcacacggataacacaatgaatggcgcgtga

SEQ ID NO: 713 - skipped

SEQ ID NO: 714 - DNA, 1077 bp, Arabidopsis thaliana
atgtctgcttttgtcagcaaatacgaagatgagctgatcaagacggccaagtacattgcaacgccgggaaggggcattttggcggcagatgagagcacagaaaccattgggaaacgattcgccggaatcaatgttgagaacactgagtccaaccgccaagcttaccgtgagctcctcttcacttcccctggcagttacccttgcctctctggtgttatactcttcgaggaaaccctctaccagaaaacctctgatggcaaacccttcgtcgatctcctcatggagaacggtgttatccccggaatcaaagtggacaagggtttggttgatctagcagggaccaacggcgagaccactactcaaggtctagactcgcttggtgcacggtgtcagcagtattacgaggcaggagggcggtttgctaaatggcgtgcattcttcaagattggggccaccgagccaagcgttctctccatccaagaggacgccagggtgctagcccgctatgccatcatctgccaggagaatggacttgtcccgatcgtcgagccagaggtgctgacaggtgggagccacgacatcaagaaatgtgcggcggtgactgagacggttcttgctgccgtgttcaaggccttgaactaccaccatgtcctcctcgaaggcactctgcttaaacctaacatggtcactcccggctccgacagcccaaaggttgcaccggaactaattgcggaatacacggtgactgctctgcgccgcacagtcccaccagctattccgggaatcgtgttcctctcaggcatacagcgcgaagagcaagcgacactaaatctaaacgcaatgaacaagcttgatgtgttgaagccatggacgctcactttctcttttggcggagccctccagcaaagtgctatcaaggcttgggccggtaagcccgagaacgtagccaaagctcaggccaagttcctgaccaggtgcaaggctaacaaggacgctaccctcgggaaatacaccggctgggcttctggtgactcggccgctttcgagaacttggttgtgataggatacaggtactag

SEQ ID NO: 715 - DNA, 1554 bp, Arabidopsis thaliana
atgaaactttactctctactttccgttttcttggtcatcctcttggcaacaagcgacagtgatgcctttaccagaaacaattttccaaaggatttcctctttggagccgccacttctgcttatcagtgggaaggagctgttgctgaagatggaagaactcctagcgtctgggatactttctcacacacttgtaatttaggtaatggagatataacatccgatgggtatcacaaatacaaggaagatgttaagctgatggcagaaatgggcttagaatcattcagattctctatctcctggtcaagacttatacctaatggaaggggactcattaacccaaaaggtctactgttttacaagaacctcatcaaagaactaataagccatggaatcgaaccacatgttacactttaccactatgatcttcctcagtctcttgaagatgagtatggaggctggatcaaccgcaaaatcatagaagacttcactgcttatgcagatgtatgtttcagagagtttggggaggatgtgaagttatggactacaataaacgaagctacaattttcgccattggttcttatgaccaaggaatctcgccccctggacattgttctcctaacaaattcatcaattgtactagtggaaattcttctacagaaccatatcttgcaggccataacatattgctagctcatgcctctgcttcaaagttgtataaactaaagtacaagagtacgcagaaaggatccatagggcttagtatatttgcattcgggttatctccatatacaaactccaaggatgatgaaatcgcaactcaaagagctaaagctttcttctatggctggatgttgaagcctttggtatttggagactatccggatgaaatgaagagaactgttggatcgagattaccggtgttttcggaggaagagtcagagcaacttaaaggatcatctgactttataggaattattcactacacgacattttatgtcacaaacaaaccctcaccttctatctttcccagcatgaatgaaggcttctttaaagacatgggagtatatatgatttccgctgcgaattcttcatttcttctgtgggaggctactccatggggtcttgaaggtattcttgagtatataaagcagagctataacaatcctccaatctatattcttgaaaatgattcttcaacttgcaattttttaaatataaaaacaggtatgccgatgggacgcgactcgacattacaagacacacaaagaattgaattcattcaagcttacattggtgctatgctcaatgccatcaagaatggatcggacacgagaggttactttgtatggtcgatgattgatttgtatgagttactgagtggatatacgaccagcttcggaatgtactatgtgaatttcagcgatcctggtcgcaagaggactccaaagctctctgcttcttggtacactggtttcctcaatggtacaattgatgttgctactcaagatactattcagttgcagagcaacatctctggctcttcttcattgtaa

SEQ ID NO: 716 - DNA, 849 bp, Arabidopsis thaliana
atgtcgatgagcaattccttgaaaaagctctcttcttgtgttcttattgatctcgatggtaccttaatcaacacagatggtgttgttggtgacattttgaggaaatacttgtgtaaatatggtaaacagtgggatggaagagaatcattgaaaatagttggcaaaactccagtagaagctgctactactattgttgaagattatgaacttccttgtaaagttgatgaattcaattctgaattctaccctttgttctctgctcagatggacaaaatcaaatctcttcctggtgccaataggttgattcgacatttgaagtgtcatggagtacctgtggctttggcttccaattcttcaagagcaaatattgaatccaaaatttcatatcatgaagggatagagaacactttaccaattgatccatggcatattggaggtccagtcatcaaaggatttggccgtggctctaaagtactcggaatccccaccgctaacttgtcaacaaaggattatgcggatgagctagtggaacatccttcgggagtgtactttggttgggcaggcttggcaaagagaggtgtctttaaaatggtcatgagcattggttggaatccttatttcaataacaaggagaaaactattgaaccatggctgcttcacgatttcactgaggatttctacggagaagagctacgtcttattatcgttggctatatacgccctgaggctaatttctcttcactggagagtctcattgcaaagattcacgaggacagggaagttgcagagaaagctcttgatcttccttcgtatgctaagtttaagggtgatccttatctgactaaatga

SEQ ID NO: 717 - skipped

SEQ ID NO: 718 - DNA, 1374 bp, Arabidopsis thaliana
atgagtgaagcaaagaagggtcacgtactgttttttccatatccattacaaggccacattaacccaatgatccaactcgctaaacgcttatccaaaaagggcatcaccagcacactcatcatcgcctccaaagaccaccgtgaaccttacacctccgacgactactccatcaccgtccacaccatccacgacggtttctttccacatgaacaccctcacgccaagttcgtagatcttgaccgtttccacaactctacttctcgaagcctgaccgatttcatctctagtgcgaagttgtcggacaatcctccaaaagctctgatctatgatccatttatgccctttgcattggacatagccaaggacttggatctatacgtagtggcatatttcactcaaccatggttggctagtcttgtttactaccatatcaacgaaggcacctacgatgttcccgttgatagacacgagaacccaacacttgcatcgtttcctggtttcccattgttaagccaagatgatctgccttcgttcgcctgcgaaaaagggtcgtaccctcttctacacgagtttgtggttaggcaattctctaatttattgcaagctgattgcattctctgcaacacttttgatcaacttgaaccaaaggtagtgaaatggatgaatgatcaatggccggtgaagaacattggaccggtggttccatcgaagttcttggataaccggttgccagaagacaaagattacgaactcgagaactccaagacagagccagacgagtctgttttgaagtggttgggaaacaggccggcgaagtcggtggtttacgtggcgtttgggacattggtggctttgagcgaaaaacagatgaaggaaattgcaatggcgattagccaaaccggatatcacttcttgtggtctgttagagaatccgagagaagcaaactaccctctggttttatcgaagaggcagaggagaaagactctggacttgtggctaagtgggttcctcagctagaggttttagcacatgaatcaatcgggtgtttcgtgtcacactgtggatggaactcgacattggaggcactatgcttaggggttccaatggtgggcgtgcctcagtggactgatcagcccacaaatgctaagtttatagaggatgtgtggaagattggggttagagtgaggaccgatggagaagggctttcgagtaaagaagagattgcgagatgcattgttgaggtcatggaaggagagagagggaaagagataaggaagaatgttgagaagcttaaggtgttggctcgcgaagctatctctgaaggaggtagttccgacaagaagattgatgagtttgttgctcttttgacttaa

SEQ ID NO: 719 - DNA, 1482 bp, Arabidopsis thaliana
atggttttgtctaagacagtttccgaatctgatgtctcaatccattcaacttttgcttctcgttacgtccgcaactctcttccacgattcgaaatgcctgagaactcaatcccaaaagaagcagcttaccaaatcatcaacgacgagctaatgctcgatggtaacccaaggctgaacctagcttccttcgtgaccacatggatggagccagaatgtgacaagctcatgatggagtccatcaacaagaactacgtcgacatggacgagtaccctgtcaccactgagcttcagaaccgatgtgttaacatgatagcacgtctcttcaacgcgccgcttggtgacggtgaagctgccgttggtgttggcaccgtcggatcgtcggaggcgattatgttggccggtttggcttttaagagacaatggcagaataagcgtaaggcccaagggcttccttatgataagcccaatatcgtaaccggtgctaatgtccaggtttgctgggagaaattcgcaaggtatttcgaagtggagcttaaggaagtgaacctaagagaagactattacgtgatggaccctgtaaaggcggtcgaaatggtagacgaaaacacaatttgtgtcgctgccatcctcggttcaacgttaaccggtgaattcgaagacgttaagctcctcaacgacctccttgtcgagaaaaacaagcaaaccggatgggacacgccaatacacgtggacgcagcgagtggtgggtttattgctccgttcttgtatccggagctggagtgggatttccggctaccgttggttaagagtattaatgtgagtggtcacaaatacggtttggtttacgccggtattggttgggttgtatggagaaccaaaaccgatttgcctgatgaacttatcttccatatcaattatcttggcgctgatcaaccaacctttacactcaacttctccaaaggttcaagtcaagtgattgctcagtactaccagctgattcgtcttggattcgagggttatcgcaatgtgatggataattgtcgggaaaacatgatggtactaagacaaggattagagaaaacgggacgttttaaaatcgtctccaaagaaaacggtgttccgttagtggcgttttctctcaaagatagtagccgccacaacgagttcgaggtggcccatacactccgtcgcttcggctggatcgttccggcctacacgatgcctgcggatgcgcagcatgtcactgtccttcgagttgttatccgagaagatttctctcgaaccttagccgagagattggtagctgatttcgagaaggttctacacgagctcgatacgcttccggcgagggttcacgccaagatggctaatggaaaagttaacggtgttaagaagacgccagaggagacgcagagagaagtcacggcctactggaagaagttgttggagactaagaagaccaacaagaacacaatttgctaa

SEQ ID NO: 720 - DNA, 5892 bp, Arabidopsis thaliana
atgtctgctacgagaggaggtcctgatcaagggccgtctcagcctcagcagcggcggattatacgaactcagactgctggtaatcttggagagtcattcgatagtgaagttgttccatcatctcttgttgagattgcccccattcttcgggttgctaatgaagttgaatctagtaatcctagggttgcgtatctctgtcggttttatgcatttgagaaagcacatagattggatcctacctccagtggaagaggtgttcggcagtttaagactgcacttctacagcgtcttgaaagagaacatgatccaacactgatgggcagggttaagaaaagtgatgcccgtgaaatgcaaagcttttatcaacactactataagaagtatattcaagctttgcacaatgctgctgataaggctgaccgtgcccagctgacaaaggcataccaaactgccaatgttttgtttgaggtgttgaaggctgttaatctgacacagtccattgaggttgaccgggagattctggaagctcaagataaggttgcagaaaagacacagttgtatgtcccctataatatcctacctctcgatcctgatagtgccaatcaagcgattatgagatatcctgagatccaagctgctgttcttgctctccgcaatactagaggtcttccttggccagaaggtcacaagaaaaagaaagatgaagacatgcttgattggcttcaagaaatgtttggatttcagaaagacaatgtggctaatcaaagggagcatctgatcttattacttgctaatgtgcatataagacaatttcctaagcctgatcagcagccaaagtttatcctttcgtttgttctcattgtgccctcacagttagatgatcaagcattgacagaagtgatgaagaagcttttcaagaactataagaaatggtgcaaataccttggtcgaaagagtagtctttggttgccaactatacagcaggaaatgcagcagcgcaaactattgtatatggccctgtatcttctaatttggggtgaagcagcgaacttgagattcatgccagagtgtctctgctacatttatcatcatatggcatttgaactctatggtatgctggctgggaatgttagtcctatgactggggaaaatgtgaagccagcttatggaggcgaggaagatgcattcttgaggaaagttgtgactcctatttatgaagtgattcagatggaggctcaaagaagcaaaaaagggaagtctaagcactctcagtggaggaactacgatgatttgaatgaatacttttggtcagttgattgttttcggttaggttggccaatgcgagctgatgctgatttcttttgtctgcctgttgctgtacccaatacagaaaaggacggggataacagcaagcctattgtcgccagagatagatgggttggtaaagttaattttgttgagattcgttctttctggcatgtcttcagaagtttcgatcgaatgtggagcttctatattctgtgcctccaggccatgattattatggcctgggatggcggacaaccaagttcagtctttggagctgatgtattcaagaaagttctgagcgtgtttatcacagctgcaataatgaaacttggacaagctgttcttgatgtgatccttaatttcaaagctcatcaaagcatgacactacatgttaaactaagatacattctgaaagtgttctctgctgctgcctgggttattattctgcctgttacttacgcctacagctggaaagatcctccagcatttgccagaactatcaagagttggtttgggagtgctatgcactcaccttctctatttataatagcagtcgtttcctatttgtcacctaacatgctcgcggaaactaacgaaaaccttctgttgtgttgtttaactgatgtgactataattaacaccttgcagcccagactctacgttggcagaggaatgcacgagagcgcattttccctcttcaaatataccatgttctgggtgttgcttattgcaacaaagctggcattcagttactacattgagatcaggcctttagttgccccaacacaagccattatgaaggcccgtgtgacaaattttcagtggcatgagttctttcctcgtgccaaaaacaatattggtgtcgttatcgccctctgggcccccattattctggtatattttatggatagtcagatttggtatgctatattttccacattatttggaggtatctacggtgcattccgccgccttggagagattcggacactgggaatgctcagatcacggtttgaatcactgcctggagcttttaatgaccgcttaattccagatggaaagaaccagcaaaagaagaagggaataagggcaacgttatctcataactttacggaggataaggtacctgtgaacaaagagaaagaagctgcaagatttgcacagttgtggaacacaataattagtagttttagagaggaagatcttataagtgatagggagatggatctgttgcttgttccttattgggctgaccgtgatttggatctcatacagtggcctcccttcttattggctagcaagattccaatagcattagatatggcaaaagacagtaatgggaaggacagagagctcaagaagaggattgagagtgacacttacatgaaatgtgctgtccgtgaatgctatgcttcattcaagaatatcataaaatttgtggttcagggaaaccgtgaaaaagaggtgatagagatcatatttgcagaggttgacaaacatatagatacaggggatttgattcaagaatacaagatgagtgctcttcctagcctctatgatcactttgtcaagttgatcaaatatttggtaaatgttcttcctgtgcttgacaataaggaggaagatagagatcacgttgtaattctcttccaagacatgctggaagttgtaacaagagacattatgatggaggattacaatatatcgaggttggcgactttctaccgcaccgcaatggcttgtcattcaagtcatggtggcacttggcatgggggaatgatccctctcgaacaacaatatcagctgtttgcatcctcaggtgccattagatttcctattgaaccagtaacagaagcttggaaagagaagatcaaacggatatatcttttgttgactactaaagagtctgctatggatgtcccctctaacttggaagcaagaaggcggatctcattcttctcaaattcgttgttcatggacatgcctatggcacctaaagttcgcaacatgctatcattttctgttttgactccttattacactgaagaggtcctcttctccttgcgggacctggaaacaccaaatgaagatggtgtttcaatcctcttctacctacaaaagatttttccaggtgatttttgttcatatgctgttaacgtagcctatattcttgaatcacgtcttgaacctgaccttttatctccagatgaatggaacaattttcttgagcgggtgaagtgcttaagtgaagaggaacttaaggagtctgatgaattagaggaggaacttcgtttatgggcttcatatagagggcaaactttgactagaactgtaagaggaatgatgtactatcgaaaagccttggagcttcaggcattccttgacatggctatgcatgaagatttgatggaaggttacaaggctgtagaactaaattcagagaacaattcaagaggtgaaagatcactctgggcacagtgccaagctgttgctgacatgaagtttacatatgttgtatcatgtcaacaatatggtatccataaacgatccggtgatcctcgtgcgcaggatatattgaggcttatgacaagatacccttcactccgtgttgcatatattgatgaggtcgaagaaccagtgaaagacaagtcaaagaaagggaaccagaaagtgtattattctgtgttggtaaaggtgcctaagtcaactgatcattctaccctagcacaaaatctggaccaggttatctacaggattaggcttcctggacctgctattcttggagaaggaaagccagaaaaccaaaatcatgctatcattttttcccgtggagaaggtttacagacaatcgatatgaatcaggataattacatggaggaagcgttaaagatgaggaatttgcttcaagaatttcttacaaaacatgatggtgttagacatccatccattcttggacttagggaacatatatttactggatcagtttcatcccttgcttggttcatgtcaaatcaagagactagttttgttaccattggtcagagattattggcaaatccattgagggtgcgtttccattatggccatccagatgtttttgatagactgtttcatctaacaagaggtggtgttagcaaagcatccaaggtaatcaacctcagtgaagatatatttgcaggattcaattctacacttcgtgaaggaaatgttacccatcatgaatacatacaagttggtaaaggaagagatgttggtctaaatcagatctctatgtttgaggccaagattgctaacggcaatggagagcagacattaagtcgggatatttacaggcttggacaccgttttgactttttccgaatgatgtcatgttacttcaccactgttggcttttatttcagcaccctgattactgttctcactgtctacatcttcctttatggacgtctctatcttgttttgagtgggctcgaacaaggtttaagtacgcagaaaggcatccgagacaatacacctttgcaaatagctctggcttcacagtcttttgtccagattggtttcctgatggctttacctatgcttatggaaattggattagagaggggttttaggactgccttgagtgaatttgtgctgatgcagcttcagttggcgccagtgttctttacgttctctcttgggacaaagactcactactatgggaggacgttacttcatggcggtgccaagtacaggtccacaggaagaggatttgtcgtctttcatgccaaatttgctgataattacagactgtattcccggagccattttgtgaagggacttgaaatgatgctgctactcgttgtgtatcaaatatttggtagtgcttacagaggcgtccttgcatatcttttgatcaccatatctatgtggttcatggtcgggacctggctttttgctcccttcctcttcaatccttctggttttgaatggcagaagattgttgatgattggactgattggaataaatggataaacaacatcgggggtattggtgttccggcagaaaaaagttgggaatcgtggtgggaggaagagcaagaacatctccggtattccggaaaacgtggtttatggagtatcatggctggtgattttcttgatattgtttgtgatgaagactgtttcggttggaaggcggagattcagcgcgagttttcagctgatgttccggttgataaaggggctgatattcatgacgtttatcgcaattattgtgatattgatcacactggctcacatgacgatacaagacataattgtgtgtatccttgcctttatgcccacaggttgggggatgctcttgcgtgtaagccggtggttcatagagcaggattctggggatcagtgaggaccctagctcgtggatacgagatagtaatgggactgttgctgttcacgccagtggcgttcttggcatggtttccatttgtgtcagagttccaaacgcgtatgctctttaatcaagctttcagtagaggtcttcagatctctcgtatccttggaggtcatcgtaaggatcgctcttctcgaaacaaggaatga

SEQ ID NO: 721 - DNA, 1239 bp, Arabidopsis thaliana
atgcaaatgttaacagatcttagtgattttgggaatgtaggactggattatgcagaccccaagaagaaaaacaattacttgggaaagattcttttgacagcttctcttacagccttgtgcattttcatgctcaagcaatctccaacattcaatactcctagcgtgttttctcgacatgagccaggggttacacatgttttggtcactggtggtgctgggtatattggttcacatgcagctctaaggcttctaaaggaatcatatcgagtaaccattgtggacaatctatcacggggcaatctcgctgcagtcaggattttgcaagaactatttccggaacctggaaggcttcaatttatttatgctgatcttggagatgccaaagctgtcaacaagatattcacagagaatgcctttgacgctgtgatgcatttcgctgctgttgcatatgttggggaaagcacacaattccctcttaagtattatcacaatattacatcgaacactttggtagtattagagacaatggctgctcatggagtaaagactttgatatattcaagcacttgtgcaacgtatggggagcctgatattatgccaattacagaggaaactcctcaggtgccaatcaacccatatggtaaggccaagaagatggcagaagatatcattttggatttctcgaaaaactcagatatggcagttatgatcctaagatatttcaatgtgattgggtccgatccagagggcagattgggtgaagccccaagacctgagctgcgagagcatggacgcatctccggtgcttgttttgatgcagcacgtggcatcatgcctggcctacagatcaaaggaacagactacaaaaccgctgatggaacttgcgtacgggattacattgatgtcactgatttggttgatgctcatgttaaagctcttcaaaaggcaaaaccacgcaaagttggaatctacaatgttggcaccgggaaaggtagctcggtgaaagagtttgttgaggcgtgcaagaaagcaactggtgttgagatcaagatcgactatttgcctagacgtgcaggtgattacgctgaggtttacagtgatccaagcaagattaggaaggaacttaactggacagctaagcacactaatctcaaagagagtcttgagactgcatggagatggcagaagctgcaccgtaatggctatggcttaacaacctcatcggtctcggtttactga

SEQ ID NO: 722 - skipped

SEQ ID NO: 723 - DNA, 1476 bp, Arabidopsis thaliana
atgtgtaacaattttcttggaaagcaagttagtctgatggtcgagaatcgagatcttgatattggtactgcaccatctgataggtcagagatgagtccttcaagcttggcaacgttggcattggatgatacacatggtctaacaataaacaagttgcagattcctaatgatcagcaaaatcaatttcattcttatcaatggtctactacaactaatcatataccttgtactcgtggagctcctaccgttcaaccagcagctaatgatcaaacctttttctccataggtacccatctaggagctcctaccgttccaccaggagctaatgatcactggtttccttatagtgatcctgcgtgtaccaattctggagcttctgccgttccaccagcagataatggtcaatggttgccatatacagatcctacgtataactatactgttgtatattcaaccggtgcaccagcagccactgctcaatggccaacatctaatgatttccttcccatagatactcgagctccaacttttgcaaaagcacctactgcggcatttgaccattttgcaaatggttttggagaagatattaataatagcagcccaaatttccagccgatggatccttcaacagcaaaactactaacacaactcgaccacctgcaacaagacccatatggacaataccaactgccactgcaggttctaaaaaaaccctcactagaagagctgcgaaaacttccatatgaagtaaacaacgtgctgcgatatgatggaaacaacaacgggatgcaaggagtactaatgaaacccgaaaagccgccacaagacctatatggacaatgccaaccgcaaccacagatccaacgaaacttttcagtacaagagctgcaaaaacttcaatatgaagcaaacaacaacgggttgcaatatgatgcacacaacaacgggctgcaaggaggactaacgcaacccgagaagccactacaagacctatatggaaaatgccaacagaatctctcagtagaagatctgctacctcttgaatatgaagcaaacaacaacggactgcaaggaggactaacacaacccgagaagccattacaagacctatatggagaatgccaacaaaatctctcagtagaagatctgctaactcttgaatatgaagcaaacaacaacaaactgctaggagtaccaacgcaacccgagaagccactacaagacctatatggagaatgccaacagaatctctcagtagaagatctgctacctcttgaatatgaagcaaacaacaacggactacaaggaggactaacgcaacccgagaagccactacaagacctatatggagaatgccaacataatctctcaatagaagatctgctacctcttgaatatgaagcaaacaacaacggactgcaaggaggactaacacaacccgagaagccactacaagacctatatggagaatgctaa

SEQ ID NO: 724 - DNA, 807 bp, Arabidopsis thaliana
atggaagtaacttcccaatctaccctccctccagggttcagatttcatcctaccgacgaagaactcatcgtttactatcttcgaaaccagaccatgtctaaaccatgccctgtctccatcatcccagaagttgatatctacaaattcgacccatggcaattacccgagaaaacagagtttggagaaaatgagtggtatttcttcagccctagagaaagaaaatatccaaacggagtcagaccaaaccgggcagctgtttccggttattggaaagcaaccggtacagacaaagccattcacagcggttcaagtaacgtaggtgtcaagaaagctctagtcttctacaaaggtagacctcctaaaggaatcaaaactgactggatcatgcatgagtatcgtctccatgattcacgtaaagcatcaacgaaacgtaacggttccatgaggttagatgaatgggtactgtgtaggatatacaagaagagaggagcaagtaagcttctgaatgagcaagagggtttcatggacgaagtactaatggaggatgagacaaaagttgtagttaacgaagcagagagaagaactgaagaagagataatgatgatgacgtcgatgaaacttccaaggacgtgttcgctggctcatttgttggaaatggattacatgggacccgtctctcacattgataattttagtcagttcgatcatcttcatcaacctgattcggagtctagttggttcggggaccttcagtttaaccaagacgagatcttaaaccatcatcgtcaagcgatgtttaagttttag

SEQ ID NO: 725 - DNA, 810 bp, Arabidopsis thaliana
atgaaggcggagttgaatttgccggcgggattccgatttcatccgacggacgaagagcttgtcaagttctatctttgccggagatgtgcgtcagaaccgattaacgttccggttatcgcagagattgacttgtacaaattcaatccatgggagcttccagaaatggcgttgtacggtgagaaagaatggtacttcttctcgcatagagaccggaaatacccaaacgggtcgagaccaaaccgggcagctggaaccggttattggaaagcgactggagctgataaaccgatcggaaaaccgaagacgttagggattaagaaagcactcgtcttctacgcaggaaaagctccgaaagggattaaaacgaattggattatgcacgagtatcgtctcgctaatgtcgatcgatctgcttctaccaacaagaagaacaacttaagacttgatgattgggttttgtgtcggatatacaataagaaaggaacaatggagaagtatttaccggcggcggctgagaaaccgacggaaaagatgagtacgtcggactcaagatgctcaagtcacgtgatttcaccggacgtcacgtgttctgataactgggaggttgagagtgagcccaaatggattaatctggaagacgcgttagaggcatttaatgatgacacgtccatgtttagttccattggtttgttgcaaaatgacgcctttgttcctcagtttcagtaccagtcctccgatttcgtcgattcgtttcaggacccgttcgagcagaaaccgttcttgaattggaattttgctcctcaagggtaa

SEQ ID NO: 726 - DNA, 1362 bp, Arabidopsis thaliana
atggcaccagctcctagtccaatcaattctcaacacgtggcggtgatcggagccggagcagccggtttagtagcagccagagagcttcgtcgtgaaggtcacaccgtcgttgtccttgaccgagagaaacaagtaggtggtctttgggtttacacacctgaaaccgagtccgacgagcttggtcttgacccgacccgacccatagtccactcgagcgtctacaagtctctccgaaccaatctccctagagaatgtatgggttacaaggatttccctttcgtgccacgtggcgatgatccgtcaagagactctagaaggtatccgagtcacagggaagttcttgcgtaccttcaagactttgctacagagtttaacatagaggagatgatccggttcgagactgaggttcttcgtgttgaaccggttaatggtaaatggagggtccagtctaaaaccggcggcggtttttccaacgatgagatctatgacgccgttgtaatgtgttgtggacatttcgcagaaccaaacatcgctcaaattcctggtaaaatatcaaaattttcttatactttatttcaaaaaaaactattggtggtggtagtaatcgggaattttgcgagtggagccgatatcagtagagacatatctaaagtcgcaaaagaagttcatatcgcatctagagcaagtaaatccaacactttcgaaaaacgtcctgtacctaataacaatctctggatgcactctgagatagacaccgcccacgaggatggtaccattgtttttaaaaatgggaaggtggtacatgctgataccattgtccattgtaccgggtacaagtattactttccatttcttgagaccaataattatatgagagttgatgacaatcgcgttgaacctctctacaagcatatttttccacctgcgctagctcccggactttctttcattggtttacctgcaatgggtctacaattctatatgtttgaagtccaaagcaaatgggttgctgcagtcttgtctggacgagttacacttccttcggtagatgaaatgatggacgatcttaagttgtcgtatgaaacacaagaagcgttaggtattcccaaaagatatacacataagttgggtaaatctcagtgtgagtacctcgattggatcgcagacctgtgtggattcccacatgttgaacattggagagatcaagaagtaactcgcggttaccagagacttggtaatcaaccagaaactttccgtgatgaatgggatgatgatgatctcatggaagaagcatacgaagattttgctagactaaatctgatcaattttcatccttctcgttttctcgaatccggaagatga

SEQ ID NO: 727 - skipped

SEQ ID NO: 728 - DNA, 915 bp, Arabidopsis thaliana
atgaactccaacgaccaggatccgattccgttcagacccgaagacaacaacttctccggttccaaaacctacgccatgagcggcaaaatcatgctaagtgcaatagtaatcctcttcttcgtcgtcattttaatggtcttcctccatctttacgctcgttggtatctcctccgtgctcgtagacgtcatctccgtcgtcgtagccgtaaccgtcgcgctacgatggttttcttcaccgctgatccttccaccgccgcaacttccgtcgtcgcttcacgtggacttgatccaaacgttattaaatctcttcctgttttcactttctccgacgagactcataaagatccgatcgaatgcgccgtttgtttatcggaattcgaagagagcgagacgggtcgggttttgcccaattgtcaacatacttttcatgttgattgtattgatatgtggtttcattctcattccacttgtcctctttgtcgatctctcgttgagtctctcgccgggattgaatcaacggcggcggcgagggagagggaagttgtgattgcggttgattctgatccggttttggtaattgaaccgagttctagctctggattgacggatgaaccacatggatctggatcttctcagatgctgagggaagattccgggagaaaaccggcggcgattgaggttccgaggaggacttttagcgagtttgaagatgagttgactcggagagactcgccggcgagtcagtcgtttaggtctccgatgagtcggatgttatctttcactcggatgttgagtagagatagaagaagcgcttcgtctcctatcgccggagctccgccgctatcgccgacgttaagctgccggatacagatgaccgagtcagatatcgaacggggaggagaagagagtaggtga

SEQ ID NO: 729 - DNA, 369 bp, Arabidopsis thaliana
atgaataaaggaagcatctttaagatggacgacgatttcgaaaagagaaaagctgaagctggaaggatcagggagaaataccctgatcgaattcctgtgattgtggaaaaggctgagaaaagtgaagtcccaaatatagacaagaagaagtaccttgtgccatcagacctaacagttggtcaatttgtgtatgtgattcggaagagaatcaaactaagtgcagagaaagctatcttcattttcgtagacaatgttcttcctccaacaggagagctaatgtcaagcgtttacgaggataagaaagacgaagatggcttcctttacatcacttacagtggcgagaacacattcggtgcttcttcaatctaa

SEQ ID NO: 730 - DNA, 620 bp, Arabidopsis thaliana
atgggtcaaaagactcaaaggccagaattgacgcagccgtttatgagaagtgagaagacaatttcggagtcacttcctttatttcctctcttccttcactctctcctatataaaccttcctctcctcttcctctcttctcatctcttcaaaccattttcgaaagccttgagagagagaacacagacgataccaactttcttcaatctcgttgccgcagtataattatctcattcctcggatatatctctccttctgcggcggcgacaagaagctacaagaataaaaagtctgttttctctcttttcaagaaaccacttacttcgaaaatggctcgttctatctctaacgttaagatcgtatctgctttcgtctctcgtgaactctccaatgctatcttccgacgtggttatgcggccacggcggcgcaagggagcgtttcgagcggtggaagaagtggagctgttgcttcggctgtgatgaagaagaagggagtggaagaatcaacccagaagatttcttgggttccagatcccaaaaccggttattacagacccgaaaccggttccaacgagattgacgcggctgagctacgagcagctctcttgaacaacaagcagtg

SEQ ID NO: 731 - DNA, 320 bp, Arabidopsis thaliana
atggaatctgcagggatccagcaactgcttgctgctgaacgtgaagctcagcaaattgtcaatgccgctaggaccgcaaaaatgactagactgaagcaagccaaggaagaagctgaaacagaggttgctgagcacaaaaccagtacagagcaggggttccagaggaaactcgaagcgacaagtggagattcaggtgcaaacgtgaagaggcttgagcaagagactgatgccaaaatcgagcaattgaagaacgaagctacgagaatttccaaagatgttgtggatatgcttctgaaaaatgtgaccacagtgaacaactg

SEQ ID NO: 732 - DNA, 1716 bp, Arabidopsis thaliana
atgggtttcggttctgtttatcgatctctaacggaaatatttcctcagattgatgcacgaattttgagggctgttgcaatagaacacccaaaggatgctgatgaagctgctgctgtggttctttcagagattattccttccttttcctcaaatttgttccataattttactcaatcttcgtacaagtcatctggaagcatttcagagcgcgaagtagaacatggtttggaagatgttgcttctaggtgccgcccttttcttggagcttctggctcaaaggccagcacttcttcttcttcttcttcttcagaaactcttcccctggttgttacccgtgaccacaatacccgtgctctaagtactgatttggtctcaaacatgaacgagctaacaaccttgcaaccaaatgttgatcctgatgtttgccataaagaccttgaaagtgaggaaattcaatcagtgaaaaaggctcgtggaaaagagaatggaaactatgatttatttggtaggtgttttgatgttacgagcaatgcaaaaattggtttggatgtgccagaggatgatattgcctcagtcgtctctctcttttccctagataatgttaaattggctagcaatttttgggaagatcttggttttgatatcacatggaatcaagcagaaaatgctgtatcgaagctggtcgattcaactcctggggatactatgacaactacacagcaaggttcatgttttgaagttggccatgggagtacaaatcttgtggacgagacttcaaatcgttctttgttctctgaaaatggtgatactgaaataggtgatgcttttagcacatcaacgcatgtatgcagcgttgatcaacttgaagatattattgaagatgccaaaagtaataagaaaaacttgcttactgagatggaaacggttacaaatataatgagagaagttgaactaaaggagaaagatgcagagaagtcaaaggaggaagctgctaggggaggtttagatactcttcaaaaggttgaggagctcaagaagatgctggaacatgcgaaggaagcaaatgacatgcatgctggagaagtatatggagagaagtcaattttggccactgaagtaaaagagcttgaaaaccggttgctcaacttatcagaagaaagaaacaaatctcttgctatccttgatgagatgcgaggaagtctcgaaataagactagcagcagcactggagttgaaaaagactgctgagaaagaaaagaaagacaaagaagattctgcacttaaggcacttgctgagcaagaagccaacatggagaaagtggtccaagaatcgaagcttctacagcaggaggcagaggaaaattccaagcttcgagattttcttatggatcgtggtcagattgttgataccttacaaggagaaatttctgtgatctgtcaagatgtgaagctgttgaaagaaaaatttgaaaaccgagtgcctttaaccaaatcgatctcctcaagcttcactagttcatgcggatcatctatgaaaagcttggtgctcgagaacccttctgagcgattgaatggagtgactgaaacctcaaacaacaacaagttcccagaagcagcagctttcttcatgaacaaagagaaagatgattgtagagatcttcttgaagatggatgggacatctttgacaaggagaccgaacaagttgtttggtactga

SEQ ID NO: 733 - DNA, 1503 bp, Arabidopsis thaliana
atggtgcagtaccagagattaatcatccaccatggaagaaaagaagataagtttagagtttcttcagcagaggaaagtggtggaggtggttgttgctactccaagagagctaaacaaaagtttcgttgtcttctctttctctctatcctctcttgctgtttcgtcttgtctccttattacctcttcggcttctctactctctccctcctagattcgtttcgcagagaaatcgaaggtcttagctcttatgagccagttattacccctctgtgctcagaaatctccaatggaaccatttgttgtgacagaaccggtttgagatctgatatttgtgtaatgaaaggtgatgttcgaacaaactctgcttcttcctcaatcttcctcttcacctcctccaccaataacaacacaaaaccggaaaagatcaaaccttacactagaaaatgggagactagtgtgatggacaccgttcaagaactcaacctcatcaccaaagattccaacaaatcttcagatcgtgtatgcgatgtgtaccatgatgttcctgctgtgttcttctccactggtggatacaccggtaacgtataccacgagtttaacgacgggattatccctttgtttataacttcacagcattacaacaaaaaagttgtgtttgtgatcgtcgagtatcatgactggtgggagatgaagtatggagatgtcgtttcgcagctctcggattatcctctggttgatttcaatggagatacgagaacacattgtttcaaagaagcaaccgttggattacgtattcacgacgagttaactgtgaattcttctttggtcattgggaatcaaaccattgttgacttcagaaacgttttggataggggttactcgcatcgtatccaaagcttgactcaggaggaaacagaggcgaacgtgaccgcactcgatttcaagaagaagccaaaactggtgattctttcaagaaacgggtcatcaagggcgatattaaacgagaatcttctcgtggagctagcagagaaaacagggttcaatgtggaggttctaagaccacaaaagacaacggaaatggccaagatttatcgttcgttgaacacgagcgatgtaatgatcggtgtacatggagcagcaatgactcatttccttttcttgaaaccgaaaaccgttttcattcagatcatcccattagggacggactgggcggcagagacatattatggagaaccggcgaagaagctaggattgaagtacgttggttacaagattgcgccgaaagagagctctttgtatgaagaatatgggaaagatgaccctgtaatccgagatccggatagtctaaacgacaaaggatgggaatatacgaagaaaatctatctacaaggacagaacgtgaagcttgacttgagaagattcagagaaacgttaactcgttcgtatgatttctccattagaaggagatttagagaagattacttgttacatagagaagattaa

SEQ ID NO: 734 - DNA, 594 bp, Arabidopsis thaliana
atggattctcgtatatcagtttctaggctttctctgaatcatcccggctcgaaatttgggttctcactcgatactagggtgagaaatgagtttatcgttagagcagaagaaggtaacacagaagctgaatctgaagaatttgttgctgaaatcgctgatacggaaggaaatgtagaggaagtggtcgaagctaaacctacaagaaaacctaggatcaagctcggagatgtcatggggatactgaaccagaaagcaattgaggtagcagagaaagtgagacctgttccagaaatcaggacaggagatattgtagaaatcaaattggaagttcctgagaacaaacgtaggctatctatctacaaaggcatagtgatgtcgagacaaaatgcaggcatacacactaccattcgtattcggagaattattgcgggtatcggtgttgaaattatactctcccaacatcaaagagataaaagtggtgagtcacaggaaagtaagaagagcaaggctttactatctgagggacaagcttcctcgtctgtccactttcaagtgaacaccatccaccgtgctgtgtttgacctccagaggtag

SEQ ID NO: 735 - DNA, 684 bp, Arabidopsis thaliana
atggctgaagaacaacaaaattcgagttatagcattggtggaaacattcttcctactcctgaagaagctgctacattccagccccaagttgttgcagaaggcggatgggacaaatgttgggaagacggggtaacaccatgggaccaaggaagagccacacctctcattcttcatcttctcgactcttcagctctccctcttggccgtacccttgtccccggctgtggcggaggacacgacgtcgttgcgatggcaagccctgaacgtttcgtagttggattggatatttctgacaaggctctcaacaaagctaatgagacttacggctcctcaccgaaggcagagtacttttcgttcgtgaaggaagatgttttcacttggcgtcctaacgaattatttgacctcatcttcgattatgtgtttttctgcgcaattgaaccggagatgagacctgcatggggtaaatccatgcatgaactcctcaaacctgacggagaacttataactcttatgtatccgatgaccgaccacgagggtggagctccctacaaagtagctttgtcttcctacgaagatgtgttggttccggtaggatttaaagcggtgtccgttgaggagaacccagactccattcccactcgtaagggcaaagagaagcttgcgaggtggaagaagattaactga

SEQ ID NO: 736 - DNA, 1254 bp, Arabidopsis thaliana
atgcttttgataccttccttcaccgcaaattctaacgaaccaccaccgtcgaagctttctctttccgatctttcaatggcgattctcaaatctcacttcttcttactcttccctcttcttcttctccactttcacactgtctcctttgctcagacgctctttgtgttcggagatggtctttacgacgccggaaacaaacagtttctctctcagaaccgagttgacgcaagctttcctccttatggagtcactgtaggacaagccaccggacggtggtccgatggttctatcgttcctgattatcttgctaaattcatgggaattcctaaaatctctccgattctcctaaccacggcggatttttctcacggagctaatttcgccatcgccgacgctaccgttcttggctctcctccggagacgatgactttgtcacaacaagtgaagaaattctcggaaaacaagaataagtggacaaatcaaacacgttctgaagctatctacttgatctacattggttctgatgattacttgagctatgctaagagtaatccaagtccatcagatactcagaaacaagcttttgttgatcaagtcatcactaccataaaagcagaaataaaggtggtttacgggtctggcggaaggaaattcgcattccagaacttggcaccgttaggttgcttaccggccgtgaaacaagcaagcggaaatgttcaagaatgtgtgaaattgccttcggaaatggctgctttgcataacaagaaacttttgcagctcttggttgaactatcaagagaactaaatggtttccagtactcgttttacgacttctttagctcgatccaaaacagagttatcaagtctaagacttatacattcgagacaggaaacgctgcttgttgtggaactggctctatcaacgggagtaattgctcagctaaaaatgtatgcgccaagcctgaagagtatatcttctttgatggtaagcatttgacgcaagaagccaaccttcaggtcgggcatttgatgtggggagcagatccggaagtgattggaccgaacaatatcagggagcttatggtccttcctctagacattacagtcatcttagctggtatacaagaagctatggctgccatgagaccgagacagagcaacattgagagtctctatgatatcaagaagatggagtcagagatggataatcattggctttatcaagttgacaaagctatctcctttatgatataa

SEQ ID NO: 737 - DNA, 243 bp, Arabidopsis thaliana
atgtcgagagctacatacattatcggtgcccttgcgggatctgcggtagtagcttacgtgtgtgacaaagttatttctgatgataagctttttggaggtactacaccaggaactattactaacaaggaatggggtgctgcgactgaagagagattacaagcatggccaagagttgctggtcctcccgtcgtcatgaaccctatcagtcgccagaatttcatcgtcaagtcacgtcctgaataa

SEQ ID NO: 738 - DNA, 1224 bp, Arabidopsis thaliana
atggcggaagaaatctcaaagacgaaggtgggatcttcttctactgcttcggtggctgattcatctgctgctgcgtcggctgcaacgaatgcggccaaatcaagatggaaaattttgtggcctaattcgctccggtggattcctacgtccaccgattacatcatcgccgccgagaaacgtcttctctccatcctcaagacgccttatgtacaagagcaagtcagtattggttcaggaccaccaggttctaaaatcaggtggtttaggtctacgagcaatgagtcacgttacatcaacactgttacatttgatgccaaggagggagctcctacactcgtcatggttcatggttatggtgcttctcaagggtttttcttccgtaattttgatgctcttgccagtcgatttagagtgatcgctattgatcaacttgggtggggtggttcaagtaggcctgattttacatgtagaagcacagaagaaactgaggcatggtttatcgactcctttgaggaatggcgtaaagcccagaatctcagtaactttattctattaggacattcttttggaggctatgttgctgctaaatacgcgcttaagcatcctgaacatgttcaacacttaattctggtgggatctgctgggttctcagcagaagcagatgccaaatcagaatggctcactaaatttagagcaacatggaaaggtgcagtcctaaatcatttatgggagtcaaatttcactcctcagaagctggttagaggattaggtccttggggtccaggtcttgtaaatcggtatacaactgcaagatttggtgcacattcggagggaactgggctaacagaagaggaagccaaattgctaaccgattatgtgtaccatactttggctgcaaaggctagtggagagttatgcttgaaatacatcttctcatttggagcatttgctaggaagcccctcttacaaagtgcatcagagtggaaagtgccaacaacgtttatctatggaatgaatgattggatgaactatcaaggtgcggtggaagcgaggaaatccatgaaggtcccttgcgaaatcattcgggttccacagggtggtcattttgtgttcatagacaacccaattggttttcattctgcagtgctttatgcttgccgcaagtttatatctcaagactcctctcatgatcaacaactcctagatggtctacgattggtttag

SEQ ID NO: 739 - DNA, 1467 bp, Arabidopsis thaliana
atgtcgggtgagaaacaagcggaggagtcaatagtagtctccggggaggatgaggtggccggtagaaaagtggaagattcagcggcggaggaggatattgacggcaacgggggcaatggatttagtatgaagagcttcctctggcatggcgggtccgcttgggacgcctggtttagctgtgcatcaaatcaagtggcacaagtgctgttgacgctgccgtattcgttctcgcagttgggaatgttatcaggaatattgcttcaaatattctatgggttaatgggatcttggactgcttatctcatcagtgttctttacgtcgagtatcgtgcccgtatggagaaacaagaagccaaatccttcaaaaaccacgttattcaatggtttgaagtgcttgatgggctgctgggtccgtactggaaagcagcggggctcgcatttaattgcaccttcttgttattcggatcagtcatccagctcattgcttgtgctagcaatatatattacataaacgataggttagacaagaggacatggacttatatatttggggcttgctgtgccacgaccgttttcataccatctttccacaattaccgtatttggtctttcctcggccttggcatgaccacctacaccgcttggtacctcaccatcgcctcttttctccatggtcaggcggagggtgtgacacattccggtccaaccaagcttgtgttgtactttaccggagccaccaacatcctctataccttcggtggacacgctgtgaccgtggaaataatgcatgcgatgtggaaaccaaggaagtttaagagcatctacttgatggcaactctgtacgtcttcacattaacgcttccgtcagcctccgccgtctactgggctttcggcgaccaacttctcaaccactcaaacgctttctctctcctccctaaaacgcgtttccgtgacaccgccgttatcctcatgctcatccatcagtttataacgttcgggtttgcgtgtacaccattgtacttcgtatgggaaaaagcgatcggaatgcaccacacaaagagcttatgtctaagagcgctggtgaggctaccggtggtggttccgatatggtttttggcaatcatctttccctttttcgggccaataaactcggcagttggagccttacttgttaccttcaccgtctatatcatccctgccttagcccacatgctcacgtaccgcaccgcctctgcccgccggaacgcggcggagaaaccaccgttttttatccctagctgggctggagtttacgtgataaacgctttcatagtggtttgggtcctagttctcgggttcgggtttggcggatgggccagtatgaccaacttcatcaggcaaattgatacttttggcctctttgccaaatgctaccaatgcaaaccacctccagctccgatcgccgccggagctcaccaccgccgttag

SEQ ID NO: 740 - DNA, 2760 bp, Arabidopsis thaliana
atggccttagctaaagagttaatgggttatcctctcatcacagaaaggtcatcacttgtctcgtcggcgtcgcatttcaagaagaggacacagtcaacacagttctcgatcaacccttttgaccggagaccaagaaaaaccaaatccggcgtcgttgcagccatcagcgaggatttggtcaaaacgctgcgtttttccacaacgaccggagacagaaagagcgaagaggaggagaaagcggcggtgaagttcaaggtgagagctgtggttactgtgaggaacaagaacaaggaggatttgaaagagactcttgttaagcatttggatgcttttgctgataaaattggtcgaaacattgtcttggagcttatcagcacccaacttgatccaaaaacgaagttgccgaagaaaagcaatgcagcagttttaaaggattggtcaaagaaatcgaaaactaaggcggagagagttcactatacggcggagttcacggtggatgcagcgtttggctcgccgggagcaatcaccgtcatgaataaacaccaaaaagagtttttcttggagagcataaccattgaaggcttcgcacttggtcctgttcactttccatgcaattcttgggttcagtctcaaaaagatcaccctgataaacgaattttcttcactaatcagccgtatttgccgaatgagacaccaagcggattaagagtattgagggagaaagagttgaagaatctacgaggagatggaagtggagtgagaaaattatcagacagaatttacgactttgatgtttacaacgaccttggaaatcccgacaaatcatccgagctctctcgccccaaactcggtggcaaagaggttccttaccctagacgttgtcgtactggtcgccaatcaacagtttctgataaagacgcggagagccgagtagagaagccattacctatgtatgtgccacgagacgagcaatttgaagagtcgaagcaggacacttttgctgcagggaggctaaaagcagtcttacaccacctaattccgtcgctcaaagccagtattgtagctgaggactttgcagacttcggcgagatcgatcgtctttataaagaaggcttgttactcaagttagggtttcaagatgacatctttaagaagtttcctctccctaaggtcgtagttgataccctccaagaatctactaaaggactcctcaaatacgacactcccaaaatattatcgaaggataaaaacgcatggttaagagatgacgaattcgcacgtcaagccatagctggaatcaatccagtgaacattgagagagtcaagacttttccaccggtcagcaatcttgaccccaagatctacggtccacaacactccgctcttactgacgaccatatcattggtcacctcgacggattctccgtacaacaagcgttggaagagaatagattgtatatgttggattaccatgacatattcttaccgttcctagaccggattaatgcgctagacggacgcaaagcctatgctactcgaactatcttcttcttgactcgtctaggcacacttaagccggtagccattgagctaagcctccctccccatggtccaaaacatcggtccaagcgtgtgcttacacctccagtcgatgcaacctctaattggatgtggcagctcgctaaagcccacgttagttctaacgatgctggtgtccatcagcttgtcaatcactggttacggacacatgcatgcttggagccatttatattagctgcacacaggcaattgagcgctatgcatcccatattcaagctactggatccacacatgagatacacgttggaaatcaatgctttggctagacaatcgttgatcagtgcagatggtgtgatcgaaggaggcttcactgctggtgcatacggcatggaaatgagtgccgccgcatacaaaagcagctggcggttcgacatggaaggcctccctgccgatctaattcgcagaggaatggcaattcctgatgcaacacaaccacatggtcttaaactcctaatcgaagactatccgtacgccaacgacggtcttttactctggtcagcaatccaaacctgggtccgaacctatgttgaacgctactatccaaacccgaaccttatcaaaacagactctgagctccaatcttggtactcagaatcaatcaacgtcggccacgctgacctccgcgacgctgattggtggccggagttatcaaccgtcgacgacctcgtgtcgattctaaccactctaatctggctcgcctctgctcaacacgccgctctaaactttggacaatacccttacggtggctacgtcccaaaccgaccaccgttgatgcggcggttaatccccgacgagtcggatccagagtacgcgagtttcatctcccatccggagaagtattacttctcgtcgatgccaagtttggcgcagacttcgaagtttatggccgtggttgatactttgtcgacgcattcgccggatgaggagtatattggagagagacaacagccgtcgatttggacaggagatgcggagattgttgaagcgttttatggatttgcggcagagatcggacggatagagaaagagattgagaaaaggaacgctgatcctgaccgtagaaataggtgtggggctggtgttttgccttatgagttgttggttccgagttctgagcctggtgttacgtgtagaggtgtacctaatagtgtatctatataa

SEQ ID NO: 741 - DNA, 3063 bp, Arabidopsis thaliana
atggagagctacttgaacgaaaacttcggcgatgtgaagccgaagaactcgtccgatgaggcgttgcagcgttggaggaagctctgctggatcgtcaagaatcctaaaaggagatttagattcactgctaatctgtctaagcgttccgaggccgaggcgattcggcgttccaatcaggaaaaatttcgagtggcggtcttagtttcacaagctgcacttcagttcattaatagtttaaagttgtccagtgagtatacactacctgaagaagtaagaaaagcagggtttgagatttgtcctgatgagttgggatcaattgtagaaggtcatgatttgaaaaagttgaaaattcatggtggaactgagggcctcactgaaaaactttccacgtctattgctagtggaattagtacatctgaagacctgctgagtgtaagaaaagaaatttatggaatcaaccaattcacagaaagccccagccgtggcttttggttatttgtttgggaagcccttcaggatacaacacttatgattctagctgcatgtgcgtttgtttcacttatagttggaatactgatggaagggtggcctattggtgcccatgacggacttggtatagtggcgagtattctgcttgttgtgtttgtcactgccactagtgattataggcaatccctgcaattcaaggacctggatgcagagaagaaaaagattgtggttcaggttacgagagacaaactgaggcaaaaaatctcaatatatgatctactccctggagatgttgttcatcttggcattggagaccagattccagcagatgggctttttatctcagggttttctgttctgataaatgaatcgagcttgactggagaaagtgaaccggttagtgtcagtgtggaacacccgtttcttctctctggtaccaaggttcaggatggatcttgcaaaatgttggtgactacagttggaatgaggactcaatggggtaaactgatggctacactaagtgaaggcggtgatgatgagacaccgttgcaagtaaaacttaatggtgtggcaaccatcattggtaaaataggtctattttttgctgtcattacgtttgctgttttggttcaaggattggctaatcagaagcgcctagataattctcactggatctggactgctgatgaattgatggcgatgctagaatattttgctgttgctgtaacaattgttgtggttgcagttccggagggtctgccgttggctgtgacattaagtcttgcttttgccatgaaaaagatgatgaatgacaaagcgctagtgcgcaatcttgctgcttgtgagacaatgggatctgcaacaactatttgtagtgacaaaactggaactcttacaacaaatcacatgacagttgtaaaagcctgcatctgtgaacaagccaaagaggttaatggtcctgatgctgctatgaaatttgcctctggtatccctgagtctgctgttaaacttctactgcaatctatatttactaacactggtggtgagattgttgtgggcaaaggaaacaaaaccgagatactgggaactcctacagaaactgctctgttagaatttgggttgtcactcggaggggacttccaagaagtaaggcaagcctcaaatgttgtgaaagttgagccctttaactctacaaagaaaagaatgggagttgtcattgagctgcctgaaagacatttccgggcacattgtaagggtgcttcagagatagttttagattcttgtgataagtacatcaacaaagatggtgaagttgttcctctcgatgaaaaatcgaccagtcacctgaagaacataattgaggaatttgctagcgaagcacttcgaactctttgcctagcgtatttcgaaattggtgatgaattctcattagaggctcctattccaagtggtggatacacttgtataggtattgtgggcatcaaagaccctgtacgccctggtgtcaaggagtctgttgcgatttgtaaatctgctggcatcactgtcagaatggtgactggagataaccttactactgcgaaggccatagccagggagtgtggcatattgactgatgatggcatagctatcgaaggtcctgaattccgggagaaaagtgatgaggaactgctcaagctaatcccaaaattgcaggtgatggcacgatcctcgcccatggataagcatactttggtgagactcctccgcacaatgtttcaggaagtcgttgcagtgacaggtgatggaacaaatgatgctccagcacttcatgaagctgatattggactcgcaatgggcatttccggaactgaggtggcaaaagaaagtgcggatgtgattatcctagatgataacttctctacgattgtcacagtagccaaatggggccgttctgtgtacataaatattcagaaatttgtccagttccagctgacagtaaatgttgtggctcttattgtcaacttcttatcagcctgcctcactggaaacgcgcctctgactgctgtccaactactgtgggttaacatgataatggacacacttggagcactcgcgctagcgactgaaccaccacaggacgacctgatgaagagatctccagtgggaaggaaaggaaacttcataagtaatgtaatgtggaggaacatccttggtcagtcactctaccagcttgtcatcatatggtgtcttcaaacaaagggaaagacaatgtttggtctcgatggccccgactctgatctaacactcaatacccttattttcaacatttttgtcttctgccaggtattcaatgagataagctcgagggaaatggaaaaaattgatgtgttcaaggggatactaaagaactacgtattcgtagcggttctaacatgtacagtggtgttccaagtaatcataatcgagctgctgggtacatttgcggatacaacaccattaaatttgggacaatggttggttagcatcatactcgggttccttggcatgcctgttgctgctgccttgaagatgatccctgttggttcacactaa

SEQ ID NO: 742 - DNA, 648 bp, Arabidopsis thaliana
atgaatatctttagatttgctggcgatatgagtcacttgatcagtgtcttaatccttcttctcaaaatctacgcgacgaaatcttgcgctggaatctctctcaagactcaagagctctatgcgcttgtgttcttgactcggtacttggatctgtttacggattatgtatctctgtacaacagcatcatgaagattgtcttcattgccagctctttggctatcgtttggtgtatgcgtaggcatccacttgtgaggaggtcatacgataaggacctggacacatttcgtcatcagtatgttgtgttagcgtgttttgtactgggacttatcctgaatgaaaaattcacagttcaagaggtgttctgggcgttttctatctacttagaggcagttgctatccttccccagttggttctgctacaaagaagtgggaatgtcgacaatttgactgggcaatatgttgtctttctcggggcgtatcggggactctatattatcaactggatctatcgctatttcacagaagatcatttcactagatggattgcttgtgtgtctggtcttgtccaaacagctctctatgcggatttcttctactactactacataagctggaaaaccaacaccaaacttaagcttccggcttga

SEQ ID NO: 743 - skipped

SEQ ID NO: 744 - DNA, 567 bp, Arabidopsis thaliana
atggcggctaataacagatccgatcatgggtcagacgaaaacacaagactttacaatccttaccaaaactacgaagtcccaatcaacaaatctcagtacctttacaagcttcctacctcccctgagtttctcttcacggaggaggctttaaggcaacgtagatcttggggtgagaatctcactttctacaccggaacagcttacctcggtggctccgttgccggagcttctgttggagtcatcactggagtcaaaagcttcgaatctggcgacactactaagctcaaaatcaacaggatcttgaactcttctggtcaaactggtcgaacttggggtaatcggattggtatcattggattggtttacgcagggatcgagagtggtattgtggctgccacggatagagatgatgtttggaccagtgtggtggctggtcttggaaccggagctgtttgtagagcggcgagaggagtgagatctgcagctgtagctggtgctcttggtggacttgcggctggagctgttgtagctgggaagcaaattgtgaagcggtatgtgcccatttga

SEQ ID NO: 745 - DNA, 1389 bp, Arabidopsis thaliana
atggcgagagttctagtctcgtctccatcttcattcttcggttcaccgttgattaaaccgtcgtcatctctccgtcacagtggagtaggaggaggaggaaccgctcaatttcttccataccggagtaataataacaaactcttcactacttcaaccaccgtacgattcagcttaaacgagattcctcctttccatggcttggattcatctgtagacatcggagcgattttcaccagagctgaatctcttctctatacaatagctgacgccgccgttgttggtgctgattccgtcgtaactactgattcatccgccgtgcagaagagtggtggttggtttggttttatctccgatgctatggaattggttcttaagattttgaaggatggattatcagcggttcatgtaccttatgcttatggatttgcgattatcttgcttacgattatcgtcaaagcagcgacgtatcctttgactaagcaacaggttgaatcaacactagcgatgcaaaatcttcaaccgaaaatcaaagcgattcaacaacgttacgcaggaaatcaggagaggatacaactagagacatcgcgattgtataaacaagctggtgttaatccgttggcaggttgcttaccaactttagcaaccataccagtttggattggtttataccaagctctctctaacgtggccaacgagggattgtttacagaaggtttcttttggattccatctctgggtggaccaacatctatagctgctcggcagagtggatccggcatttcgtggctttttccgtttgtggacgggcatccaccattgggatggtatgacactgtagcttatcttgttctacctgttctacttattgcctcccagtatgtgtcaatggaaattatgaagcctcctcaaactgatgatcctgcacagaagaatacgcttcttgttttcaagtttcttccactcatgatcggttactttgcattgtctgtcccatcaggactatctatttactggctcacaaataatgtacttagtaccgcccaacaagtatatctgcgtaaactaggtggtgcaaagccaaatatggatgaaaacgcaagcaaaataataagtgcgggacgagcaaagagatctattgctcagcctgacgatgctggcgaaagatttagacaattaaaagagcaagagaagcgcagcaagaagaacaaggcggttgcgaaagatacagttgaattggtagaagaatctcagtctgaatcagaagaagggtctgatgatgaggaagaagaggctcgtgaaggagcgttagcttcgagcacaacaagcaagccgcttcctgaggttggccaacgaagaagcaaaagatcgaagcggaaacgcactgtatag

SEQ ID NO: 746 - DNA, 1425 bp, Arabidopsis thaliana
atggtgtttttccgcagcgtatcggcctttactaggctgaggtctcgcgtccagggccaacaatcttcactcagcaattctgtcagatggattcagatgcagagctctaccgacctggacctgaagtcgcagctgcaagagttaattccggaacagcaggaccgtctgaagaaactgaagtcagaacatgggaaggtccaactgggaaacatcactgttgatatggttattggtggaatgagagggatgactggattgctttgggaaacctcattgcttgacccggaagagggtattcgctttaggggattgtcgattcctgagtgccagaaagtattacctactgcccagtctggagctgaaccattaccggagggtcttttgtggcttctcttaactggaaaggtacctagcaaagagcaagttgaagcactgtcgaaagacttggcgaaccgtgctgctgtgccagattatgtgtacaatgccatcgatgctctgccttccacagctcatccaatgactcaatttgctagcggtgttatggccctccaggtgcaaagtgagtttcaaaaggcatatgagaatggaattcataagtcaaagttctgggagccaacatatgaggattgcctcaacctgattgctcgtgttcctgttgtagctgcatatgtttatcgaaggatgtataagaatggtgattccattccctcagataaatctttggattatggtgcaaatttttcccacatgttgggatttgatgatgaaaaggtgaaagagctcatgaggctttacatcaccatccacagtgatcatgaaggtggaaatgttagtgctcacactggtcacctggttggtagtgcactttcagacccatatctgtcatttgcagctgcattaaatggtttagctgggccactccatggtttggctaatcaggaagttttgctttggatcaaatcagtcgtagaggaatgtggagaagatatatcaaaagaacagttgaaagaatatgtttggaaaacattaaacagtggcaaggttattccgggatatggtcacggtgttctgcgcaatactgatccaagatatgtatgccaaagagaatttgccttgaagcatctacctgacgaccctcttttccagctggtgtcaaagctttatgaagttgtgcctcctgttctcactgagcttggaaaggtgaagaacccgtggccaaatgttgatgctcacagtggggtcttgctgaaccactatggtctaaccgaagcaaggtactacaccgtgctctttggtgtttcaaggagtcttggcatctgctctcagcttatatgggaccgagctcttggacttgcacttgagaggccaaagagtgttaccatggactggcttgaagcccattgtaagaaagcttcatctgcttaa

SEQ ID NO: 747 - DNA, 243 bp, Arabidopsis thaliana
atggctaagtctgctaccatcgttactcttttcttcgctgctcttgttttctttgctgctcttgaagcaccgatggtggtggaagcacagaagttgtgcgagaggccaagtgggacatggtccggagtttgcggaaacagtaacgcgtgcaagaatcagtgcattaaccttgagaaagcacgacatggatcttgcaactatgtcttcccagctcacaaatgtatctgctacttcccatgttaa

SEQ ID NO: 748 - DNA, 903 bp, Arabidopsis thaliana
atgtttggtttaaggaaatcaccggcaaatcttcccaagcataactcagtcgacctcaagtcttccaagccaaatcctttcgattcagatgatgaatctgacaacaaacatacccttaacccttctaagaggactacctctgaaccctctttggctgatatgacaaacccttttggtggtgagagagttcagaaaggagatagtagttcatccaaacagtcattgttttcgaactccaaataccagtacaagaacaatttccgtgattctggtggtattgaaaaccagtcggttcaggagcttgaaggttatgctgtgtacaaggctgaagagactacgaaatctgtacaaggttgtttgaaggtagcagaagatataaggtctgatgctaccagaactttggtcatgttacacgatcagggcgagcaaatcactaggacgcaccataaagccgttgaaatcgaccatgatctcagtcgtggtgagaaacttcttggaagccttggaggcatgttttcaaagacttggaaaccaaagaagactcgtcctataaatggtcccgtcgtaaccagagatgactcaccaacgagaagagttaaccacttagagaaaagggaaaaactgggactgaactcagcacccagaggacaatcaagaacccgagaaccactccccgaatcagctgatgcttatcagagagtggagatggaaaaagctaagcaagacgatgggctttcagacttgagtgatatactcggcgagctaaagaacatggctgttgacatgggaagcgaaatcgagaagcagaacaaaggacttgaccatcttcatgatgatgttgacgaactcaacttcagagtgcaacaatcaaaccaacgtggtcgccgtttgcttggaaagtag

SEQ ID NO: 749 - skipped

SEQ ID NO: 750 - DNA, 1050 bp, Arabidopsis thaliana
atggcaacttctgcaatatctaagctcttagtgtctgatttcgcctcctccgttcacatcccttcaaactatgtccgaccaatctccgaccgtccgaacttgtccgaggtcgagagttctggcgattccatccctctgatcgatctccgggacctccatggacctaatcgagccgtaattgtccaacaacttgctagtgcgtgttccacttatggtttctttcagatcaagaatcatggagtaccagatacaaccgtcaataaaatgcaaaccgttgcgagagagttcttccatcaacccgagagcgaaagagtcaaacactactccgcagatccaacaaagacaacgagactctccaccagtttcaacgtcggcgcagacaaagtcttgaactggagagacttccttagactccattgctttcccatagaagatttcatcgaagaatggccatctagtcccatctctttcagagaagtcacagctgaatatgccacgagcgtaagagctttggttttgagacttcttgaggccatctcagagagtttaggccttgaaagcgaccatataagcaatatattaggcaaacacgctcaacacatggcgtttaactactatccgccgtgtccagaacccgagctaacttacggacttcccggacataaagacccaaccgttatcactgtccttcttcaagaccaagtctctggtttgcaagtctttaaggatgataaatgggtcgctgttagtccaattcccaacactttcatcgtcaatatcggcgaccaaatgcaggtcataagcaatgataaatacaagagtgtgctccatagagccgtagtaaacaccgagaacgagcggttatcgattccgactttctatttcccttcaacagatgcagtgattggtccagcacacgagctggtcaatgaacaagactctcttgccatttacagaacctacccgtttgttgagtattgggacaagttttggaacagatcacttgctactgcgagctgtctagacgccttcaaagctccaacaacctaa

SEQ ID NO: 751 - DNA, 2085 bp, Arabidopsis thaliana
atggtgatgatttctcataagttggatttgattttggttttcataatcgtaatcggaggatctattttccgacgagtttctgctaatttcaccgtaccttgtaacggaagatgcggtggattgactctgccttatcctttcgggttttcaaacggttgttcgatccgattcgattgctctgcggcggagaaaccgatgatcggagacttttccgttcaaaacgtgacggaaaacagtatatttgtcggtctctctcacaattgtactcggaagattgaagatatgaatccgcttttcggcgagaatttcgcaccaacgtcggagaacagtttcttgatggagaattgtaaccgtaccaccgatggttgctctatcaagcagaagtttctggagaatgtgctgaaactcaaaagttgtgatgctactggaaacataagttgtttttctttagatagtaattcgagttcgaagaactcagctaagtttttcagtatgaagacattaaggaacagctcgtgtagtttgttgttctcgtcgatagctttcgagtctgtaggtgtgaatgcgggtatagcgttagagtttgagcgagttcggttaggttggtggcttaagggaggttgcgagagcggaacttgcgcggctaacaccgattgtacagacgttgaaactcctcatggatatgcaggacaccggtgctcatgtcttgacggtttccacggtgacggatacaccaacccttgccagagagcactaccggagtgccgtggttccaagctcgtctggagacattgtagatctaatcttattactattgtaggaggaactgttggtggagcgtttttactagctgccttggcttttttcttcttttgtaagcggagacggtctactcctttgagaagtcatttaagcgcaaagcgtcttttgtctgaagctgcagggaactcgagtgtcgcctttttcccttacaaggaaatcgagaaagcgacagatggtttctctgaaaagcagaagttaggaataggtgcatatggtacggtctatagaggaaagctccaaaatgatgaatgggttgctatcaaaagacttagacatagagattcagaaagtcttgaccaagtcatgaatgagatcaagcttctttcctctgtgagtcacccgaatcttgtccgtctcttaggatgttgtatagaacaaggcgatccagttctcgtttatgagtacatgccgaatggaactctatctgaacatctacaaagagatagagggagtggtcttccatggaccttgcgtctcactgttgctactcaaacagctaaagcaatcgcgtatctccactcttcaatgaacccaccgatctatcaccgtgacatcaaatctaccaatatccttcttgattatgatttcaactccaaagttgcggatttcggactctctagactgggaatgacggaatcttctcacatatcaacggctcctcaagggactcctggttatcttgacccgcagtaccatcaatgctttcatctctctgataagagcgacgtctacagctttggagtcgtccttgccgagattataacgggattgaaagtcgttgatttcacacgtccacataccgaaatcaacctagcggctcttgctgttgacaaaatcgggtcaggttgtatcgatgagataatagacccgattcttgacttggatctcgacgcatggactctctcatccatacacacggtggctgagcttgcatttcgatgcttagccttccacagtgacatgagaccgacaatgaccgaagtagcggacgagcttgaacagataagactcagtggttggattccaagcatgagcttggattcaccagccggttctctccgttcatctgatcgaggaagcgaaagatcagttaaacaatcatcaataggaagcagaagagtcgttatccctcagaaacaacctgattgcctcgcatccgtcgaagagattagcgatagctcacccatctcagttcaagatccttggttaagtgcacaaagctcaccgtctacaaatacattgctcggtaacattccaagatga

SEQ ID NO: 752 - DNA, 4010 bp, Arabidopsis thaliana
atgggttcttactcagctggcttccctggatccttggactggtttgattttcccggtttaggaaacggatcctatctaaatgatcaacctttgttagatattggatctgttcctcctcctctagacccatatcctcaacagaatcttgcttctgcggatgctgatttctctgattctgttttgaagtacataagccaagttcttatggaagaggacatggaagataagccttgtatgtttcatgatgctttatctcttcaagcagctgagaagtctctctatgaagctctcggcgagaagtacccggttgatgattctgatcagcctctgactactactactagccttgctcaattggttagtagtcctggtggttcttcttatgcttcaagcaccacaaccacttcctctgattcacaatggagttttgattgtttggagaataataggccttcttcttggttgcagacaccgatcccgagtaacttcatttttcagtctacatctactagagccagtagcggtaacgcggttttcgggtcaagttttagcggtgatttggtttctaatatgtttaatgatactgacttggcgttacaattcaagaaagggatggaggaagctagtaaattccttcctaagagctctcagttggttatagataactctgttcctaacagattaaccggaaagaagagccattggcgcgaagaagaacatttgactgaagaaagaagtaagaaacaatctgctatttatgttgatgaaactgatgagcttactgatatgtttgacaatattctgatatttggcgaggctaaggaacaacctgtatgcattcttaacgagagtttccctaaggaacctgcgaaagcttcaacgtttagtaagagtcctaaaggcgaaaaaccggaagctagtggtaacagttatacaaaagagacacctgatttgaggacaatgctggtttcttgtgctcaagctgtttcgattaacgatcgtagaactgctgacgagctgttaagtcggataaggcaacattcttcatcttacggcgatggaacagagagattggctcattattttgctaacagtcttgaagcacgtttggctgggataggtacacaggtttatactgccttgtcttccaagaaaacatctacttctgacatgttgaaagcttatcagacatatatatcagtctgtccgttcaagaaaatcgcaatcatattcgccaaccatagtattatgcggttggcttcaagtgctaatgccaaaaccatccacatcatagattttggaatatctgatggtttccagtggccttctctgattcatcgacttgcttggagacgtggttcatcttgtaagcttcggataaccggtatagagttgcctcaacgtggttttagaccagccgagggagttattgagactggtcgtcgcttggctaagtattgtcagaagttcaatattccgtttgagtacaatgcgattgcgcagaaatgggaatcaatcaagttggaggacttgaagctaaaagaaggcgagtttgttgcggtaaactctttatttcggtttaggaatcttctagatgagacggtggcagtgcatagcccgagagatacggttttgaagctgataaggaagataaagccagacgtgttcatccccgggatcctcagcggatcctacaacgcgcctttctttgtcacgaggtttagagaagttctgtttcattactcatctctgtttgacatgtgtgacacgaatctaacacgggaagatccaatgagggttatgtttgagaaagagttctatgggcgggagatcatgaacgtggtggcgtgtgaggggacggagagagtggagaggccagagagttataagcagtggcaggcgagggcgatgagagccgggtttagacagattccgctggagaaggaactagttcagaaactgaagttgatggtggaaagtggatacaaacccaaagagtttgatgttgatcaagattgtcactggttgcttcagggctggaaaggtagaattgtatacggttcatctatttgggttcctttctttttctatgtgggcagagcaactagggttttgatcatggatccaaacttctctgaatctctaaacggctttgagtattttgatggtaaccctaatttgcttactgatccaatggaagatcagtatccaccaccatctgatactctgttgaaatacgtgagtgagattcttatggaagagagtaatggagattataagcaatctatgttctatgattcattggctttacgaaaaactgaagaaatgttgcagcaagtcattactgattctcaaaatcagtcctttagtcctgctgattcattgattactaattcttgggatgcaagcggaagcatcgatgaatcggcttattcggctgatccgcaacctgtgaatgaaattatggttaagagtatgtttagtgatgcagaatcagctttacagtttaagaaaggggttgaagaagctagtaaattccttcccaatagtgatcaatgggttatcaatctggatatcgagagatccgaaaggcgcgattcggttaaagaagagatgggattggatcagttgagagttaagaagaatcatgaaagggattttgaggaagttaggagtagtaagcaatttgctagtaatgtagaagatagtaaggttacagatatgtttgataaggttttgcttcttgacggtgaatgcgatccgcaaacattgttagacagcgagattcaagcgattcggagtagtaagaacataggagagaaagggaagaagaagaagaagaagaagagtcaagtggttgattttcgtacacttctcactcattgtgcacaagccatttccacaggagataaaaccacggctcttgagtttctgttacagataaggcaacagtcttcgcctctcggtgacgcggggcaaagactagctcattgtttcgctaacgcgcttgaagctcgtctacagggaagtaccggtcctatgatccagacttattacaatgctttaacctcgtcgttgaaggatactgctgcggatacaattagagcgtatcgagtttatctttcttcgtctccgtttgttaccttgatgtatttcttctccatctggatgattcttgatgtggctaaagatgctcctgttcttcatatagttgattttgggattctatacgggtttcaatggccgatgtttattcagtctatatcagatcgaaaagatgtaccgcggaagctgcggattactggtatcgagcttcctcagtgcgggtttcggcccgcggagcgaatagaggagacaggacggagattggctgagtattgtaaacggtttaatgttccgtttgagtacaaagccattgcgtctcagaactgggaaacaatccggatagaagatctcgatatacgaccaaacgaagtcttagcggttaatgctggacttagactcaagaaccttcaagatgaaacaggaagcgaagagaattgcccgagagatgctgtcttgaagctaataagaaacatgaacccggacgttttcatccacgcgattgtcaacggttcattcaacgcacccttctttatctcgcggtttaaagaagcggtttaccattactccgctctcttcgacatgtttgattcgacgttgcctcgggataacaaagagaggattaggttcgagagggagttttacgggagagaggctatgaacgtgatagcgtgcgaggaagctgatcgagtggagaggcctgagacttacaggcaatggcaggttagaatggttagagccgggtttaagcagaaaacgattaagcctgagctggtagagttgtttagaggaaagctgaagaaatggcgttaccataaagactttgtggttgatgaaaatagtaaatggttgttacaaggctggaaaggtcgaactctctatgcttcttcttgttgggttcctgccta

SEQ ID NO: 753 - DNA, 2805 bp, Arabidopsis thaliana
atggagggttgtttaggacaaaaccaaacaactgaaatcaaagtaggagtagtgcttgatctccatacttcattttccaagctctgcctcacttccattaacatatcgttgtccgatttctacaaatatcattctgattacaccacgagacttgcgattcacattagagattccatggaagatgttgtccaggcctcatctgcagccttggacctaatcaagaacgagcaagtgagcgccatcatcgggccaagaacctctatgcaagctgagttcatgataagactcgccgataaatcacaagtaccgaccatcacattctctgcaacatgccctcttctgacatccatcaacagcccttactttgtccgagccactctcgatgactcatcccaggtcaaagccattgcggccattgtcaaatccttcgggtggagaaatgtagttgccatttatgtggacaacgaattcggagaaggaatattgccattattgactgacgctttacaagacgtgcaagcttttgtagtcaatagatgtttgatccctcaggaggctaatgatgatcaaattctcaaggagctttataagctaatgacgatgcagacgagggtattcgttgtccacatgccaccaactctcggttttcgtttttttcagaaagctagagagattggtatgatggaggaaggatatgtatggttattgacagatggagtgatgaatttgttgaaatctaatgaacgcggtagcagcttggagaatatgcaaggggttttgggtgtaaggagccatatccccaaatcgaagaagctcaaaaatttcagattgagatgggaaaaaatgtttcctaagaaggggaatgatgaagagatgaacatttttgcgttaagggcatatgattcgatcactgccttagcaatggccgtggagaaaaccaatataaagagcttgcggtatgatcatccgatcgcttcaggaaataataagacaaatttggggacattaggggtctctcgctacggtccaagtcttcttaaggctctttcgaatgtaagattcaatggtttagccggagagtttgagctcattaacgggcagctagaatcatcagtgtttgacgtcatcaatattattggaagtgaagagagaattattggattatggagaccaagcaatggaattgttaatgcaaagtcaaaaaacactacgtcggttttaggggagaggttggggccggtgatatggcccggtaagtcgaaagatgttccgaaaggttggcagattccaacaaacggaaagatgcttagagtgggcattccagtgaagaaaggcttcttagaatttgtggatgcaaagatagatccgatcagtaacgcaatgaccccaacgggttactgtattgagatattcgaagctgttcttaagaagttgccttactccgtcattcctaaatatattgctttcttgtctccagatgagaactatgatgaaatggtataccaagtatacaccggggttagttcgtctatttctactatggcctatgacgcagttgtgggagatgtaaccatagtagcaaacaggtcattgtatgtcgatttcacgctaccgtacacagagtctggagtgtctatgatggtacccctcaaggacaacaagaacacatgggtgttcctcagaccttggagcttagacctatgggtcaccactgcttgctttttcgtattcattgggtttatcgtgtggattttagaacatagagtcaacaccgactttcgcggaccgcctcaccaccaaataggcaccagtttttggttcgctttctccactatgaactttgcccaccgtgagaaggtggtgagtaatttagcgaggtttgtggtgttggtgtggtgcttcgtggtgcttgtgctgattcagagctatacagcgaatctcacatctttcttcacagtaaaactgttgcaaccaacggttacaaattggaaagatctcataaaatttaacaaaaatattgggtaccaacggggcactttcgtgcgtgaacttttgaaaagtcaaggatttgatgaatcacagctcaaaccttttggttctgccgtagaatgtgacgagcttttttccaatgggacaatcacagcatcttttgacgaagtggcctacattaaagttatcctttctcagaattcctccaaatatactatggttgaaccatcctttaagactgctggttttggctttgtattccccaaaaaatcacctttgacggatgatgtctcaagggcgatcttgaatgtgacacaaggcgaagaaatgcaacatattgagaataaatggtttaagaaaccaaataattgtccagatctaaacacttctctgtcctccaaccatctcagcctgagtagcttctggggtctgtttcttatagcaggcatagcttcattcttggcacttctcatcttcgtggccaacttcttgtacgaacacaagcacacgctctttgatgactccgaaaattctttccgtggaaagctaaaatttttggttagaaactttgatgagaaagacataaagtcgcatatgttcaaggagaatgccgttcataatgtgagttcacctattactcaaggaagttcaagccctttgaccgatcagagcactccattgccgcgaagtccggaacagtatagggaattagagctaagaagagtgtcttccatctcgagcggtgaacttttcactacgcaatcagaacaagttgaagatgaggaatctgctataattcaatgtgaaggtgaatga

SEQ ID NO: 754 - DNA, 2049 bp, Arabidopsis thaliana
atggaaaactttctagctttgtttaatgaaggcatggacgaagaagcatcccgccttgaaaaattgttaccatttcatgagcatccgttgataccttttacacgcttcgagttcaccaagtgtaaaggatgctactcgaccgatgaagataatacaagcttcatttccaaacatcccggttgcagttacatttacggaggacaccgatgcaatgagccgggatgtgatgttgtgttccatgaagagtgcgccaagccgttaccagaaatcgaccacccttaccatccagtccatcctctcaagctgatcctcctacataccagagtttctaattgtagtttctgtggagaatttttcagtgtcggttatcgctgtaacaaatgtgatttccagttggatttgatttgcgcgaggagaccagccctacttgttcttgctgaaaactcctacctacacgagcatccactccaactctcccatgaagcgcacgaaacactcagagattgcaaagggtgtggccatcaacataatagctggaaacatttctacacatgtcatcaatgcgagtttttcatcagtctggattgtatcgatcataatagtccagaagcataccacacttctcacccccaacacccactcaagtcacttagatatgaagtccctggttacgccgacaagaaatgtcttctttgccgcgaggagtttgatggaatccatcgccagcttcaccactgtggtgtttgtaattttagcatatgcagatcatgtatgaaaaacccaccaccggttcttgttaaaagcccgaggacccatgaacatcaacttcaccttgttccaagacgcattgacttcacttgcaatgcttgtgggacgctaggtgaccgtagcccttatttctgtcttcagtgcaatttcatgattcatcgggaatgtatcgatctacctcgcgtcataaacatcaaccgccacgaccaccgcatctcttacacccctcgcctcggacatggagacgggaaatgcagagtttgtcgtaaaaatgtggatgggttctacggggcttattcttgctccaaatgttttgattattttgttcattcaagatgcgcaaccagaagggatgtatgggacatgatcgaactggaagggacacccgaagaagaggaaactgcgccattcaaggtgattgatgacaacacgatagaccattacggccataagcataacttacgaatttaccgtggctggaatctaccagaaagtgtagtttgtaccgcatgtgtcttccagatttgttcagaaccgttctacgcttgcgcgagaaagagatgcgatttcataatccacgaaaaatgtgccaagcttcctttaaagaaacgtcatgtgtgccacaaccagccactcgaactatccccaaattatggcacctacttgttacataggtgtagtatttgccgtcaactgttcaccggtttctcctatgaatctaaggaattaaggatagatgtacggtgcgctacagttacagaaccatttgagcacaaaagccatcaacatcctttacactactctacagatcactccaaacgttgtagtgagtgtgatggagacgggaaattgagttgcgatgattgtgaatttggtttgtgcttcaagtgtgctattttaccgcaaaaggtaatgaggcataggtacgacgatcatcctctcttcttatcttatggcgaaatgggcgtggctggcaaatattggtgtgaagcatgcgaaacaactgtgaacccagaaaaatggttctatacatgcaatgagtgtgggatcacattgcatatttcctgcgttatagatacttacgcatattccatgccaggagcgttaacatggataggaacatttgtatccaaccactctatttgtagaccactttgctgcgtgtgcaactctcgatgcaagctccctttcgttcgtacgcttcccgaggacggagctgatctatacttttgttctttagaatgtgagaagaaaatttatcaggaacgtttcgaattttaa

SEQ ID NO: 755 - DNA, 792 bp, Arabidopsis thaliana
atgccacaagtcgatatagaagcctttgtttcttcagtatgcatcggtggctccgaccaccgcaagatcgtatgcgaaaccctcgccgacgactcaacgatcccaccttattacaacaactccgccgttagtccgagtgatttcccaccggaatcttatttcttgtcaaacgatgctcagctagagtggctcagcgacaacgccttctttgatcgtaaagactcacaaaaaggaaactctgggattctcaattctaatcccaactcgaatccaagctcgcaacggttcttactaaaatccaaagcgtcgatcatcggtttgcctaaaccgcagaaaacgtgtttcaacgaggcaaagcaacggagacacgcgggcaagaaccgggtcatcttgaaacgggtcgggtcaaggataaagacggatatttcgcttctggaaccttcttctcctaaagtctcttgcatcggtagagtgagatccagaagagaacgcagccgccgtatgcaccgtcaaaaatcaagtcgggtcgaaccggtaaaccgggttaagaaacccgggtttatggcgagtttcagagctattttcaggatcaaaggcggctgcaaagacgtgtcagcgcgtgagactcacacgtcgacgagaaacacacacgacatcaggagccgacttcctgcggaagctgatgagaagtcggtattcgacggcggagaaccggtggtacccggtttgggtgggatgacgcgtttcgcatctggtagaagagcggatttgttgggtggtggaggatgttga

SEQ ID NO: 756 - DNA, 525 bp, Arabidopsis thaliana
atgaaggaagacgcaggaaaccctttgcatctcacgtcactgaaccatgtctctgtcttgtgccgatccgtcgacgaatctatgaatttttaccaaaaggtgttagggttcatcccgatacgaagacctgaatccttaaattttgaaggcgcttggttgtttggtcacgggattggaatacacctcctgtgtgccccagaaccagagaaacttcccaagaaaactgcgattaatcccaaggataatcacatctctttccagtgtgagagtatgggagtagtggagaagaagctggaggaaatggggatagattatgtaagggcattagtagaagaaggagggatccaagtggaccagctcttcttccatgaccctgatggcttcatgatcgagatttgcaactgcgatagcctccccgtagtccccctcgtaggagaaatggctcggtcctgctcaagagtcaaactccaccagatggtgcagccacaaccgcagactcagatccaccaagtggtctacccttaa

SEQ ID NO: 757 - DNA, 1689 bp, Arabidopsis thaliana
atggaggatctccgtcgtagatttccgactaaaaagaacggagaagaaatctctaatgtcgccgtcgatcctcctcttcgtaaagcctctgacgcgcttcctcttccgttatacctaaccaacacttttttcctctcgctcttcttcgctactgtttattttcttcttagccgatggcgtgagaagatccgtaactcgacgcctcttcacgtcgttgacttatctgagatctgtgctctaatcggtttcgttgcttcgtttatctacctccttggtttctgtggtattgatctcattttccgatcttcttccgatgatgatgtttgggttaacgatgggatgattccatgtaatcaatccctagattgtcgtgaggttcttccgattaaacctaattccgtcgatcctcctcgggaatcggagcttgattcggtggaagatgaagaaatcgttaaattagtgatcgacggaaccatcccttcgtactcattggagacgaaactcggagattgtaaaagagcagcagcgattagaagagaagcggttcagaggataaccggtaaatccttaaccggtcttccattggaaggtttcgattacaattcaattttggggcaatgctgtgagatgccagttgggtatgttcagatcccagtggggattgcaggacctttgttgcttgatggggttgagtattcagtgccaatggctacaacagaaggttgtttggttgctagtaccaatagaggttttaaagctatacacttgtctggtggtgcttttagtgttcttgtgaaagatgccatgactagagctccagttgttagattcccttctgcaagaagagctgctcttgtcatgttttatcttcaagatccttctaatttcgagagattgtctctcattttcaacaaatcgagtagatttgctaggcttcagagtattacatgcacgattgctgggaggaatctgtatccgaggtttgcgtgtagtactggtgatgctatggggatgaacatggtctcaaaaggtgttcagaatgtcttggactttgtaaagagcgagtttcctgacatggatgttattggcatctctgggaactactgttcggacaagaaggcttcggctgtaaactggatcgaaggacgtggtaagcatgttgtatgtgaagcttttattaaggctgagattgtggagaaagtgttgaagactagcgttgaggctcttgtagagcttaacacgctcaagaatcttgttggttcagccatggcgggttctcttggtgggttcaatgctcattcaagcaatattgtcagcgctgtgttcatcgccactggccaagacccagctcaaaacgtggagagctcacactgtatgaccatgattcttcccgatggtgacgaccttcacatctctgtttcaatgccttgcattgaggttggtactgttggaggtgggacacaacttgcatcacaagcagcttgtttgaatctactcggtgtgaaaggatcaaacaacgagaaacctggctcgaacgcacagcaattggcaagaatagtggctggttcggttcttgcaggagagctttcactaatgtctgctattgcagctggacagcttgtgaagagtcacatgaaatacaacagatccagcagagacattggcccttcgtctcaagtcaacaggtga

SEQ ID NO: 758-760 - skipped (3 entries)

SEQ ID NO: 761 - DNA, 1260 bp, Arabidopsis thaliana
atggcgtttcataacaatcactttaatcatttcaccgaccaacaacaacatcagcctcctcctccgccgcaacagcagcagcaacaacattttcaagaatcagcaccccctaattggctcctccgctccgacaacaacttcctcaatctccacacagctgcctctgccgccgctacaagctccgattctccttcttccgccgccgctaaccagtggctctcacgatcctcatccttcctccaacgaggcaacaccgcaaacaacaacaacaacgaaacatccggtgacgtcatcgaagacgttcccggcggagaggagtcaatgatcggagagaagaaggaggcggagaggtggcagaatgcgagacacaaggcggagatactgtctcatccactatacgagcaacttttgtcggcacacgtggcgtgcctgaggatcgcaacgccggtggatcagcttccgaggatagacgcacagcttgctcagtctcaaaacgtcgtggctaagtactcaactttagaagccgctcaaggactcctcgccggcgatgacaaggagcttgaccacttcatgacgcattatgtactattgctttgctctttcaaagaacaactgcaacagcatgttcgtgttcatgcaatggaagctgttatggcctgttgggagattgaacagtcgcttcaaagttttacaggggtatctcctggtgaaggcacaggagcaacaatgtctgaggatgaagatgagcaagtagagagtgatgctcatttgtttgatggaagcttagatgggttagggtttggtcctctagttcccactgagagcgagagatctttgatggaacgagtcagacaagaactcaaacatgaactcaagcagggttacaaggagaaaattgtggacataagagaggagatactgaggaagagaagagctggaaaattaccaggagacaccacctctgttctcaaatcatggtggcaatctcattctaagtggccttaccctactgaggaagataaggcgaggttggtgcaggagacgggtttgcagctcaaacagataaacaattggttcatcaatcaaagaaagaggaattggcatagcaatccatcttcttctaccgtctcaaagaataaacgccgaagatatatggagtcattaaatttggagggttttctttatgaagcaatgcaggtgaaaacagcggaagagaccgttgagatcaagcttgcatgtagagatccaaaagctttatag

SEQ ID NO: 762 - DNA, 852 bp, Arabidopsis thaliana
atggctaccctaagagcaatgttgaaaaacgctttcatcctttttctcttcaccttaaccatcatggcaaaaaccgtgttttcgcaacagtgcggtacaaccggatgtgcagccaacttatgttgcagtagatatggatattgtggcaccacagatgcctactgtggtaccgggtgccgaagtggaccttgcagctcctcaaccacacctatcccaccaactcctagcggtggtgcaggcggtctaaacgctgatcctcgtgatacaattgaaaatgttgtcacaccagcattttttgatggtatcatgagcaaagtcggaaatggctgtccagcgaaagggttctacactcgccaggctttcattgcggctgcccaatcgttcgacgcctataaaggaaccgtcgctaagcgtgagattgccgctatgttggctcagttttctcatgaatctggaagtttttgctacaaagaagaaatagctagagggaaatactgctcaccgagcactgcgtacccttgtacaccgggaaaagactactacggccgcggtccaatccaaatcacatggaactacaattacggtgcagctggaaagttcctcggactccctctcttgactgatccagacatggtggctcgtagcccccaagttgcctttcagtgtgccatgtggttctggaacctaaatgttcgtccagtcttggaccaaggctttggagccaccactaggaagatcaatggtggtgaatgcaacggtaggcgtcctgcagccgtgcagagcagagtaaactattacttggagttctgcaggacgcttgggatcactcctggagcaaatcttagttgctaa

SEQ ID NO: 763 - DNA, 777 bp, Arabidopsis thaliana
atgtcgacagagtcgtacgaagacgccattaaaagactcggagagcttctcagtaagaaatcggatctcgggaacgtggcagccgcaaagatcaagaagttaacggatgagttagaggaacttgattccaacaagttagatgccgtagaacgaatcaaatccggatttctccatttcaagactaataattatgagaagaatcctactttgtacaattcacttgccaagagccagacccccaagtttttggtgtttgcttgtgcggattcacgagttagtccatctcacatcttgaatttccaacttggggaagccttcatcgttagaaacattgcaaacatggtgccaccttatgacaagacaaagcactctaatgttggtgcggcccttgaatatccaattacagtcctcaacgtggagaacattcttgttattggacacagctgttgtggtggaataaagggactcatggccattgaagataatacagctcccactaagaccgagttcatagaaaactggatccagatctgtgcaccggccaagaacaggatcaagcaggattgtaaagacctaagctttgaagatcagtgcaccaactgtgagaaggaagccgtgaacgtgtccttggggaatcttttgtcttacccattcgtgagagaaagagtggtgaagaacaagcttgccataagaggagctcactatgatttcgtaaaaggaacgtttgatctttgggaacttgacttcaagactacccctgcctttgccttgtcttaa

SEQ ID NO: 764 - DNA, 780 bp, Arabidopsis thaliana
atgcttctcaagactgtttcttcatcttcttcttcagctctctcgctggtgaatttccatggcgtgaagaaggatgtgtctcctttgttaccttccatttcatcgaatcttcgagtttcttctggaaaatctggaaacttaactttctcttttcgcgcatctaaaagctcaaccaccgacgcgctaagcggcgttgtcttcgagccgtttaaggaagtaaaaaaggagctcgatctcgtccctaccagctctcatctctcactcgctcgacaaaagtactcagacgagtgcgaagccgccattaacgagcagatcaatgtggaatacaatgtctcgtatgtgtatcacgctatgtatgcttactttgatcgggataacatcgcgctcaaaggtcttgccaagttctttaaggaatcaagtttggaagaaagagagcatgctgagaagttaatggagtatcagaacaaacgtggtgggagggttaagttacagtccattgtaatgcctctttcagagtttgaacatgttgacaaaggagatgctctttatggcatggagcttgctctgtcactggagaaactagttaatgagaagctcttaaaccttcacagtgttgcttcgaagaacaatgatgtccacttggcagattttattgagagcgagtttctgacagagcaggtggaagcaatcaagttgatctcagaatatgtggctcaactgcgacgagttggcaaaggacacggaacatggcatttcaatcagatgcttctggaagggtaa

SEQ ID NO: 765 - DNA, 1536 bp, Arabidopsis thaliana
atggaggagatgactcccgcagttgcaatgactcttagcttagcagccaacaccatgtgtgaatcatcacctgtcgagatcactcagctaaagaacgttactgatgcagctgacttgttatctgattctgaaaatcaaagcttttgcaacggagggactgaatgcactatggaagatgtttctgaactggaagaggtaggtgaacaggatttgttgaaaactttatccgatacgagaagcgggtcttccaatgtttttgatgaagacgatgtattgtctgttgtggaggataatagtgctgtcataagtgagggcttgttagttgttgatgcaggctctgaattaagcttgtctaatacagctatggaaatagataacgggcgagttcttgcaaccgcgattatcgtaggcgaatcaagcattgagcaggttcccaccgcggaagttcttatcgcgggtgtaaatcaggataccaatacttcggaggttgtcattagattgccagatgaaaatagtaatcatctggtgaaagggagaagtgtttatgaactagattgtataccgctttggggcacggtttccattcaagggaatagatctgagatggaggatgcttttgccgtgtcacctcattttctgaaactacccatcaaaatgcttatgggggaccatgagggtatgagtccaagcctcacacacctcaccggtcattttttcggtgtttatgatggtcatggaggccataaggttgctgactattgccgagatagactccattttgctttggctgaagaaatagaacgtataaaagacgaattatgcaagaggaatacaggagagggtaggcaggtgcagtgggataaagtcttcacgagttgttttctaactgtcgatggtgagattgaaggaaaaattggtagagccgttgttggttcttctgataaggttcttgaggctgttgcgtctgagaccgtaggatcaactgctgttgttgccttggtttgctcatcacatatagtagtttctaactgcggtgattcgagggcggttttattccgtggcaaagaagccatgcccttgtcagttgatcacaaaccagatagagaggatgaatatgcaagaatagaaaatgctggaggcaaagttatacaatggcaaggcgcacgtgtttttggtgttctcgccatgtctaggtccatcggtgacagatatctgaagccatatgtgatcccagaaccggaagtgacattcatgcctcggtcaagagaagacgagtgtctcatactagccagtgacggtctttgggatgtaatgaacaaccaagaagtctgcgaaatagcaaggagacggatattgatgtggcacaagaagaacggtgcaccgcctctagcagagagaggcaaaggaatagatccagcttgccaagccgcagctgactacctctcaatgcttgctctacaaaaaggaagtaaagacaacatctccatcattgtgattgacttgaaagctcaaagaaagttcaagaccagaacctga

SEQ ID NO: 766 - DNA, 918 bp, Arabidopsis thaliana
atggctgataggatcaaaggtccatggagtcctgaagaagacgagcagcttcgtaggcttgttgttaaatacggtccaagaaactggacagtgattagcaaatctattcccggtagatcggggaaatcgtgtcgtttacggtggtgcaaccagctttcgccgcaagttgagcatcggccgttttcggctgaggaagacgagacgatcgcacgtgctcacgctcagttcggtaataaatgggcgacgattgctcgtcttctcaacggtcgtacggacaacgccgtgaagaatcactggaactcgacgctcaagaggaaatgcggcggttacgaccatcggggttacgatggttcggaggatcatcggccggttaagagatcggtgagtgcgggatctccacctgttgttactgggctttacatgagcccaggaagcccaactggatctgatgtcagtgattcaagtactatcccgatattaccttccgttgagcttttcaagcctgtgcctagacctggtgctgttgtgctaccgcttcctatcgaaacgtcgtcttcttccgatgatccaccgacttcgttaagcttgtcacttcctggtgccgacgtaagcgaggagtcaaaccgtagccacgagtcaacgaatatcaacaacaccacttcgagccgccacaaccacaacaatacggtgtcgtttatgccgtttagtggtgggtttagaggtgcgattgaggaaatggggaagtcttttcccggtaacggaggcgagtttatggcggtggtgcaagagatgattaaggcggaagtgaggagttacatgacggagatgcaacggaacaatggtggcggattcgtcggaggattcattgataatggcatgattccgatgagtcaaattggagttgggagaatcgagtag

SEQ ID NO: 767 - DNA, 1419 bp, Arabidopsis thaliana
atggcgatctggtttgctagatccaaaacccttgtttctagcttgagacataatctaaatttgtcgacaattctcataaaacgtgattactctcatcgtcccatcttctatacaacttctcagttatcttcaacggcgtatttgagtcccttcggtagcctccgtcatgagtctacggccgtggagacacaggctgatcatttggttcagcagattgatgaagtcgatgcccaggaactggatttcccaggaggcaaagtcggttacacatcggagatgaaattcataccggaatcatcttcaaggaggattccatgttaccgggttcttgacgaagacggacgaatcatccccgatagcgattttattccggtgagtgagaaactcgctgttagaatgtacgaacaaatggcgacgctacaagtaatggatcacatcttctacgaagctcaacgtcaaggaagaatatctttttatcttacttccgtcggagaagaagccattaacatcgcttcagcagctgctctcagtcctgacgacgtcgttttacctcagtaccgagaacctggagttcttttgtggcgtggcttcacgttggaggagtttgctaatcagtgttttgggaacaaagctgattatggcaaaggcagacaaatgccaattcattacggttccaatcgtcttaattacttcactatctcctctccaattgccacgcaacttcctcaagctgctggagttggttattctttgaaaatggacaagaagaatgcttgtactgttacattcatcggagatggtggcacaagcgagggagattttcacgccggattgaattttgcggccgtaatggaagctccggttgtgtttatatgtcggaacaacggttgggcgattagtactcatatctcagaacagtttagaagtgatggaatagttgtgaaaggtcaagcttacggtatccgaagcatccgtgtggacggtaacgatgcacttgcggtttatagtgctgtacgctcagctcgagaaatggctgtaacagaacaaagacctgttctcattgagatgatgacatatagagtaggacatcattctacatcagatgattcaactaagtacagggcggcggatgaaatccagtactggaaaatgtcgagaaaccctgtgaatagatttcggaaatgggtcgaagataacggatggtggagtgaggaagatgaatccaagctaagatctaacgcaagaaaacagcttctgcaagcgattcaggctgcggagaagtgggagaaacaaccattgacagagttgtttaacgatgtatatgatgttaaaccgaagaacctagaagagcaagaacttggtttgaaggaattagtaaagaaacaacctcaagattatcctcctggctttcatgtttga

SEQ ID NO: 768 - DNA, 672 bp, Arabidopsis thaliana
atgggcaaaaatgaggaagtgaagcttttgggaatatgggcgagccctttcagccgtcggatcgagatggctctcaaactcaaaggtgtaccgtacgaatacttggaggaagatttggagaacaagagctctttgcttcttgctctaagccctattcacaagaagatccctgttcttgttcataatggtaaaaccattatcgagtcgcatgtgatcctcgaatacatcgatgagacttggaaacacaatcccattcttcctcaggatcccttccaaagatccaaggctcgagtcttagctaaacttgttgatgaaaagatagtaaatgtgggatttgcctcactggccaaaacagagaaaggaagagaagttctgattgagcagacaagagaattgattatgtgtctcgaaaaagaactcgccggaaaagattacttcggcggcaagacagtcggattcttggactttgtcgccggaagtatgatcccgttttgtttggagagggcttgggaaggaatgggagtggagatgattacagagaaaaagtttccagaatataacaaatgggtgaagaagctgaaggaggttgagatcgttgttgattgtattcctctaagagagaaacatattgaacacatgaacaatatggcagagaaaattagatctgcttaa

SEQ ID NO: 769 - DNA, 684 bp, Arabidopsis thaliana
atggcggagagatcaaattcagaggaagtgaagcttttgggaatgtgggcgagtccttttagtcggaggattgagattgctcttacgcttaaaggtgtttcgtatgagttcctggagcaagatatcacaaacaagagctctttgttgcttcaattgaatccggttcataagatgattccggttcttgttcataatggtaaaccgatttctgaatcacttgtgattcttgagtatattgatgagacttggagagacaatccgattcttcctcaagatccgtatgagagaactatggctcgattctggtctaaattcgtcgatgaacagatttatgtgacggcgatgaaagttgtggggaagaccggaaaagagagagatgctgtggttgaagcgacgagagatttgttgatgtttttggagaaagagcttgttgggaaagattttctcggtgggaaaagtttagggtttgtggatattgtggcgactttggtggcgttttggctgatgagaacggaggagatcgtcggggtaaaggtggttccggtggagaagttcccggagatacatagatgggttaagaatttgttgggtaatgatgttatcaagaaatgtattcctcctgaagatgagcatcttaagtacattagagctcgtatggagaaactcaatatcaaatctgcttga

SEQ ID NO: 770 - DNA, 822 bp, Arabidopsis thaliana
atggcgaccaataatgattttggagctttcattgagaaagttacaatctctccaacttctacttcctcgtcgcctccttctctacagggtcttactttcgccattaaagacatttttgatgtggaaggacgcgttaccggttttggtaacccggattggttaaggacacactcggcagctacttctacagctccagtagtttcatctctcttagaagctggtgccacagctttgggtattaccattatggatgaaatggcttacagtataaacggagaaaatgcgcattatgggactccgagaaacccgattgctttcgatagagtgcctgggggatcatcgagtggctcagccgtagctgtagctgctcgtcttgtggatttttctattggaactgataccggagggagtgtacgagttccagcatcttactgtgggattttcggtttccggccatcccacggtgcagtttccactgtcggacttactccaatggctcagagcttcgacacagttggatggtttgctcgggacacagccactttgaaacgtgtaggttgcgttctcctgcagcagcatcacttgaaccccatcgaaccatctcaactgattatcgcggatgactgcttcaagctgtgtagtgtaccgcatgatctcttggtgcagcctctgaatgttccaagccttaaacatttcatgacaagtgacgatgtcactacacaacaagagttctgcattccgtctctcatggccctatcgagttcaatgagattgttacaaaggtacaacatttttctcattttacattctatcgatttctaa

SEQ ID NO: 771 - DNA, 1143 bp, Arabidopsis thaliana
atgagtatggatttttcacctttgttaacggttcttgagggagatttcaacaaggataatacttcttctgcaacagaaattgatactttagagaacttagatgacactaggcagataagtaaaggaaaacctccgaggcacctcacaagcagtgctactaggctgcagcttgcagccaatgcggatgtggatgtttgtaacttggttatgaagtcacttgatgacaaatcagagtttctacctgtataccgatcaggaagttgtgctgagcaaggggcaaaacagttcatggaagatgaacacatttgcatcgatgatcttgttaatcatcttggtgcagctattcaatgctcttctcttggagccttctatggggtatttgatggccacggtggcacagatgcagcacactttgttagaaagaacattctgagattcattgtagaggactcctccttcccactatgcgtaaagaaagcaattaagagtgctttcttaaaagctgattatgaatttgcagatgattcttctcttgacatctcttctgggaccactgcgcttacagcttttatttttggacggaggttgataattgcaaatgctggtgattgccgagcagtactggggagaagaggtagggcaattgagttgtccaaagatcacaaaccaaactgcacagccgagaaagtaagaatagaaaagttaggtggagttgtgtatgacggttacctcaacgggcaactatcagttgcacgtgccattggagactggcacatgaaaggtcccaaaggctctgcttgtccgctaagcccagagccagagttgcaagagacagacctgagtgaagacgacgagttcttgataatgggatgtgatggtctgtgggatgtgatgagcagccagtgcgctgtgacaatagctaggaaggaactgatgattcataatgatccagagagatgctctagagagcttgtgagggaggcccttaaacggaatacatgtgacaatttgacagtgattgttgtgtgcttctctccggatcctccacagaggatagagatccgaatgcagtcacgggtgaggcggagcatatctgcggaagggttaaacctactcaaaggcgtgctcgatggctatccgtga

SEQ ID NO: 772 - DNA, 5043 bp, Arabidopsis thaliana
atggaggaagtagcagctaaggttgaggaagaaactgtggaaaccaatgtagatgcagtgaaagaggacaatgcaactatagctaatgaaagcagaagcccagagagtgtttctgcagtgtctgtggtgtcaaatcgagctgcttctactaaaaagaaaccagttattagttcgaatttaataaagccaactgcgtcttcttcattacgggtctcgggtactacgcctgtgactatcaggagaaatagtactggaggagtaacagagaatttagctggtacctctaaggttctgcctaagcaagtgagtactactgcctcacgtactgatccggtaagacgatcacttccagaattgaggaagagctctgtgtcttctctttctgctaagactgtatccaaaccaagcctttccgagagtaaaaagtctgtccccgtatcaccaggtagtcggagtttgacaaagtcaactgggtttagtttaagtaagcctgagtcttctgctagaccagccatgagtgtttctgtgtcttcgaaaagagctccatcttcatcagttgacagtagtggcagcaggactagtagtggaagactacactctactctcacaagtgggaggacagtttctaaagtttcttctccctctgcgggatcatcaccttctgtttctagcagtataagatcaaagtcattttcgtcacctctagaccggacttccaacttctctggacggaagaaaacatctacccctgaaagccgtgattcacgactcattattcttccaaaggtggaggttaaagctggcgatgacatgagattggatcttagaggccacaggattcgcagtctaacctctggtggcttacacttatcaccaaacttagagtttgtctatcttagagacaatctcctatctacgctggaaggtattgagatattgaatcgagtcaaggttctggatttgagttttaatgatttcaaagggcctggatttgaaccacttgagaattgcaaaatgctgcagcaactttatcttgctggaaatcagataacttcacttgctagtctgcctcaacttccaaacttagagtttctctcggttgctcaaaataaattaaagtcacttgcaatggcaagccagccccggcttcaggtactagcagcaagtaagaacaagataacaactctgaaggactttccgtatctaccagttcttgagcatctgcgggttgaggaaaatccattgctgaagatttctcacttggaagcggcatccatactactcgtaggtcctaccttgaagaaattcaatgacagagatctctctcgtgaggaagtggcaattgccaagcgttatcctccacaaacagctctctgcctcagagaaggttgggagttttgcaagtctgatcttgcagcagaatcgacattccgcttcttagttgagaggtggaaggacacattaccttctggttatcttattaaagaagcacatgttgaccgaccttctgaagaagctccctgtcaatgccactttggtctttttcaggaaagtcctactgctacagatcaagaattagccctgaaatttcaatggtctgtggcggacagatctctttctaatttcgttcctattcttaatgcaaccaaggagaatatcacagtgaagtgctgtgcaggaaagggaataccaaaagttgtgagccttgaattaaatggggaactagttgaggggaatattatcaagggtcaagcagtggttgcatggtgtggtgggacaccaggaaagtgtattaccagttggttgaggagaaagtggaatgggagccctgtggtgatcgatggagctgaagatgaggaatatatgttatctttagatgatgtgggatcaagtatggttttcatgtacacaccagtcacagaaggaggtgcaagaggagagcctcagtataagtacacagagttcgtaaaagcagcgcctccatctgtaagtaatgttcgaattactggagatgctgttgaaggctgcgttctcaagggggttggagattattttggaggcaaggaaggtcctagcaagttcgaatggttacggaagaacaaggaaacaggagaactctcgttgatatcggctggaacctccgagtatacattgacccaggaagatgttggcacacatgtaacttttgtgtacatacctgcaaattttgaggcacccccgaaagtaacagatgctaagatagttggtgacttgagggagaatagtaaggtcactgtaacaggtactgttactggaggaactgaaggttcaagcagagtgcaatggttcaaatcaagttgttctatcctggaaggagacaattctcttgaagaattgagcacatcaaaagtggcaaagtcattccgtatacccttgggggcagtgggctattacatagttgcaaagtatactccaatgacacctgatggggaatgcggtgaaccagtatatgtactctcggaaagagcagttgagacgcaggctgaaaatgatctccctggtgcattgatacctgaagcctctgggcttcttcagtatacgattactaaagaagctataggtaaattcatttcatttcaatgtattcctgtgagggatgatgggattgtgggtgagccaagaagttgcatgtcccaggaacgtgttcgtccaggaaacccaagcacggtatctcttcatgttgttggagctcttgttgaaggaaccatgctatctgcagagaaagaatattggggtggtgaagaaggagcatcagttttccggtggttccggactaattcagatggtactccatgcgaaataaagggtgcaactacttcgtcatatctactgtcagtcggtgatatcggttacttcatttcggtttcttatgaacctgtgagaaatgacagagcccgtggacccacagccatttctgaaatagctggaccaattgtagctggtataatactctcttcccatttgttatcaagctttgcggtatctgaaggggtactaatttccatgaacgagcggggccatccaaattgtcagtcactggagtttcttggatcaatgattgaagggcaacgcttgagctttgttgcttcatatactggagggatgaagggaaattgctatcttgaatgggttagggtgaaaaataatggtgttaaggaaatattgagtagtgatgagtttttggatttatcactggacgatgtcggggaaagcattgaacttatttacactcctgttcgtgaagatggaatagaagggagtccaaggagtatcaggactgatggtattgctccagcaaatcctatggggttggagcttttaattcctgactgctgtgagaaacaagaggttgtgcctcataaaacttattttgggggccatgaaggtgttggagagtacatctggtatcgaactaaggtcaagttgcatggatctgcacttacggaaatatcctatgccggtgaagaggttgttgtttgttgtagaacattaaaatatactccatcgcttgaagatgtgggggcttatctagtcttgtattggattcctactcgcgtagatgggagaagtgggaagccagttgttgtgataacaaactctcctgttgccccagctgatccagaagtatctaatgttcgtgtgaagaaacttttttcggatgcttattctggagaaggagagtactttggtggacatgaaggtccaagtctcttcagttggtacagagagaatgatggaaccattgatcttattgatggggctaactccaaaacgtatgaggtgactgagtcagattacaattgccggatattgttcgggtacacaccagttcgttcagattctgttgtgggagagctaaagatgtctgagccaactgaaattatcctcccagggttctctttgcaacacaatcctaacacttttgatcacaatacagaggttccaaaagtagacatgcttgctttcaccggaaaggctgtacaaggtgatgttctcacagccgtccaagtgatcccaaagactgaaattcaacaacttgtttggagcaagtacaaaggagatattcaataccaatggttccgctcaccggaatcaggggataagatatcgtatgaggctctctcttcagaaatttcgtgttcatacaaggtgcggtttgaggatattggcagatgtctcaaatgtgaatgtgtagtgcatgatgtgtttggaaggtctagtgaactagcatacgccgagactgatccaatatcaccaggttttcctaggatagagaagctagagattgaaggacaaggtttccatactaacttatatgctgtgcggggaaattattttggtggtaaagagggaaagagtaaaatccaatggcttagatcaatggttggaagccctgatctcatctcaattccaggtgagacaggaaggatgtatgaagctaatgtggatgatgtcggatacagactggtcgttgtatatacacccatacgtgaggatggtgtccaaggccacccagtttctgcatcaactgagcctgttgctgttgaacctgatattcttaaggaagtgagacagaaattagaaactgggttagtgaagtttgagcttcactatcctttattctcttttttaaatgtctgttcctcaatcaattggaatcaggtgttgtgtgacaaggacccttatcccaaaaagattgtgggagagggaaatctcgagagacgaatgctagaaatgaacaggaagagaataaaggttgtgaaaccaggttcaaagacgtctttcgcaactactgaagtccgtggaagctatggtcctcctttccacgtggagacatttcgtaacgaccaaagaaggctaaggatagttgtggatagtgagaatgaagtagacatagtggtgcagtcgcgccatctccgcgatgttatagtacttgtcattcgcggctttgctcagcggttcaacagcacttcactcaattctctacttaagatcgatacatga

SEQ ID NO: 773 - DNA, 882 bp, Arabidopsis thaliana
atggtggtgtcactcttctcttccagaaatgttttctatacgttaagcttatgcttatttgcagcattataccagccggttatgagtagaccggctaagtttgaagatgactttaggatcgcatggtccgatactcatatcactcaaattgacggaggcagagccattcagctcaaattggaccctagctcaggatgtggatttgcttcgaagaagcaatacttgttcggccgtgtgagcatgaaaatcaaactgatccccggtgattctgccgggactgtcactgccttctacatgaattcagataccgattcggtacgagacgagcttgattttgagttcttaggaaatcgaagtggacaaccttacacagtgcaaaccaatgtgtttgctcatggtaaaggcgatagagagcaaagagttaacctttggttcgacccttctcgtgatttccacgaatatgccatctcatggaaccatctccgtattgtcttctacgtagacaatgtgcccatcagggtttacaagaacaatgaggcaaggaaagtaccatacccaagattccaaccaatgggtgtatattccacgttatgggaagccgatgattgggcgacacgtggaggaatagagaaaatcaattggtcgagagcgccattttatgcttattacaaagattttgatatagaaggatgtccggttccaggacccgcagattgtcccgctaattcgaagaattggtgggaaggcagtgcgtaccaccagttgagtccggtggaagctcgaagttatagatgggtccgagtgaaccatatggtctacgattattgcactgacaaatctcgttttcctgttccacctccagaatgctcggctggaatctga

SEQ ID NO: 774 - skipped

SEQ ID NO: 775 - DNA, 1245 bp, Arabidopsis thaliana
atgtattctctgattctccatggaagaaggttggtccaatcgcagaaatgcttgagtttgagtgtttcagtgcaaaatgcatttgttttgtccaattccttctcttctgctagagctgctgatgtgagcattagagatggtcgaaaagggaagaactttacagtctcttacctcgttgattcattgggtttatctaaaaagctcgctgaatccatctcaaggaaagttagctttgaggacaaggtcaatcctgattctgttctaagtctgtttagaagttacgggttcacagattctcagatctctaccatcattacggattatccgttattgcttgtagcagatgctaagaaagcacttggtcgcaagcttcagattctgcagtctagaggagcttcaagctctgagatcactgagattgtttctacagtaccgagaatcttaggaaagaaatctattactgtatactatgatgctgtcaaagacattatagtagccgatacgagttcgagttatgaactcccacagggttctcaggggaataaaatccgaaatgtatcggctttgagagaattaggcatgccttctcggttgttattacccttgctcgtctccaaatcgcagcctgtgtgtggaaaagaaaattttgatgcatcccttaagaaggttgttgagatggggtttgatcccaccaccactaaatttgttttagctttgcggatgctttaccaaatgagcgagaaaacgattgaagaaaaagttgtagtctttagaagtttaggttttactgtggatgatgtatgggaaattttcaagaagactccttctgttttgaaagtctccaagaagaagatattgaagtcggctgaaacgtttctagacctaggatatagcagagctgagtttctgatgatggttaagcgttatcctccttgcattgaatattctgtagagtctgttaaaaagaagaatgagtttctggtgaagaagatgaaatggccacgaaacgccttggttttgcaccctcaggtgtttggatacagcatggagaagaggattataccaaggtgtaacatactcgaagctctcttgtcgaaaggactgctcagaaagggaagtgaactacctgcagtgtcctctgttttgtcgtgtaccgatgaaggatttttagacaggtatgtgatgaagcacaacgagctggtgcctacgttgatggctatattcaccaaaggtagtgtttcatag

SEQ ID NO: 776 - DNA, 1956 bp, Arabidopsis thaliana
atgcctcaatctggttttgcagcgagtttgaaatctactcttgagaaacatggagttttgcagaagattttgcttgttcttgctttgattgggacttgtatggttattggtgatggtgttctcacgcctgctatttcagttttttctgcagtatctggtgttgagctttcaatgtctaaggagcatcacaagtatatagaactccctgctgcttgtgtaattctgataggtttgtttgcacttcagcactacggtacacacagggtcgggttcttgttcgccccggtgattctgttgtggctaatgtgtatcagcgccatcggtgtttacaacattttccattggaacccgcatgtgtaccaagcactttctccttattacatgtacaagttcctcaagaaaactcaaagtagaggctggatgtctcttggtggtatcttactctgcattacaggttccgaagcaatgtttgcggatctaggacatttttctcaactctcaatcaagattgcttttacgtcacttgtttacccgtccttgatactcgcctacatgggacaagcagcttatctctctcagcatcatattattgaaagcgaatacaatatcgggttttatgtatcggtaccagaaagattaagatggccagttcttgtgatcgctatactcgctgctgtagttggaagtcaagcaatcatcacaggaacattctcgatcatcaaacaatgctctgcattgggatgcttccctaaagtgaagattgttcatacgtcatccaaaatccacggtcagatttacatccctgagatcaattggatcttgatggttctctgtttagctgtcaccattggcttcagagacaccaagcggttgggtaatgcttcaggattggcggttataactgttatgctggtgacaacatgcttaatgtcactagtgattgtactttgctggcacaagagtgtcatctttgcaatcgtattcgttgtattcttcggcacaatcgaatctctctacttctctgcttccttaatcaaattcctcgaaggcgcatgggttccaatcgccctcgctttttgcttccttctcgcgatgtgtacttggcactacggaacactcaagcgctatgagtacgatgtgcaaaacaaagtctcggtcaactggctcctcagtcttagtcaaaccctcgggatcgcacgtgtccgtggccttggactcatccacaccgagctcgtctctggtgtccccgcgatattctctcattttgtcaccaacctccctgccttccaccaggttctcgtcttcctctgtgtcaaatctgttccggttccgcatgttcgtcctcaggaacggtttctagtaggacgcatcgggccaaaagagttccgcatataccgttgcattgtccggttcgggtaccgtgatgtccacaaagacgatttcgagtttgaaggcgatcttgtatgtagcattgccgagtttatccgtactgaagctgaaaccgccgccaccgctgcagagaccaacggagaggatgatgatagaatgtcagtagtaggtacttgttccacatacatgcaaggaattgaggatcactacgaaagcgatattgatgaccctgataaaccagggacgtcagagattcgatcaccaaaaccaaagaaaaagagtaagagtaaggtcaaaaagagagtgaggtttgttgtcccggagactccaaagatagaaaaggaaactaggcaagagttaatggagctaacagaggcacgagagggaggcgtggcttatataatgggaaacgcttatatgaaagcgaagccaggatcaggattactcaagagactcgccattaacattggctacgagtttcttaggaggaacactagaggtcctagaaacatgcttacctcgcctcacgcttctactttagaagtcggtatgatctataatgtctaa

SEQ ID NO: 777 - DNA, 1059 bp, Arabidopsis thaliana
atggccgttacttcgcttctcgataccgttttccgacgtagaaagaagaagtctactgagtttataagctcagttttcgaattcgacttggacaccattaaagctgcaacaaatgatttctcagaactggttggtcgtggcggatttggttttgtttacaagggtaggcttcaaaatggacaagaaatagcagtcaagattttgtctacaagttcaattagaactgagagacagtttcataacgaacttattattttgtctaagcttaaacacaagaatctgatcaatcttcttggtttctgcactaaacgagaccaacatggtcttgtttacgagttcatgcctaactcaagcctcgattgttttatactcgacccacacagagctgctcagctaaattgggagatgtgccgaaacattattgatggcatagctcgagggctacgttaccttcatgaagaatccgggttatgggtcgttcaccgcgacattaaacctggaaacattctattggattcagatttgaaaccgaaaatagtgggatttgaattggcgaggacgatgcaacaaggtgaaaacgcagctgaaacaactgaaattgtcggtaccgtagggtatttagatccggagtacatacgaagcggacgtgtttccgtcaaatctgacgtttatgcctttggagttacaatcttgacgatcattagcagaaggaaggcttggagtgtggacggagactctctaatcaaatatgttaggagatgctggaacagaggagaagccatagatgtgatccatgaagtgatgagggaagaagaaagagaatattcgataagcgaaatcttgagatacattcacattgctttgctatgtgtggatgagaatgctgagagaaggccgaatattgataaagttctgcattggtttagttgtttctctactcctttacctgatccaacatttggtaatagatttcttgtagaggaagaaacaaattggccctggtcgccatctttatctcctggtcacagctctgtcacgtcacccatatcttcacgttaa

SEQ ID NO: 778 - skipped

SEQ ID NO: 779 - DNA, 978 bp, Arabidopsis thaliana
atgaaagcgatcgtgatctcggagccaggtaagccggaggttctgcaactccgtgatgtggcagacccagaagttaaagacgatgaggttctcatcagagttctcgctactgctttgaatcgtgcagatactctccaaagacttggcctttataatccaccacctggctcaagcccttaccttggtctcgaatgttctgggaccattgaatccgtcggtaaaggcgtctctcgatggaaagtcggagaccaggtgtgtgctcttctttctggaggaggttatgcagagaaagtttctgttcctgctggacaaattttcccaattcccgctggtatctctctaaaggatgcagcggctttccctgaagtggcatgcactgtttggtctactgtcttcatgatgggccgtctctctgttggtgaatcattcttgattcatggaggttcaagtgggattgggacatttgctattcagatagctaaacatctgggagtgagagtatttgtcacagctgggagtgatgaaaagctagctgcgtgcaaagaactcggggctgatgtttgtataaattacaaaaccgaggattttgttgcaaaggtaaaagcggaaaccgatgggaaaggagtggatgttatcttggactgcattggggcaccgtatttgcagaaaaatctcgacagcttaaactttgatggaaggttatgtattatcggtttaatgggaggagccaatgcagaaataaaactaagtagtctgcttccaaagcgtctcactgtcttaggagctgcattaagaccaagaagccctgaaaacaaagcagttgttgtaagggaagtcgagaagaatgtctggccagcgatagaagcagggaaggtaaaaccagtgatttacaagtatttaccattgtcacaagcagcagaaggtcatagccttatggagagtagcaaccatattggtaagattctccttgagacttga

SEQ ID NO: 780 - DNA, 870 bp, Arabidopsis thaliana
atgtcagaattattacagttgcctccaggtttccgatttcaccctaccgatgaagagcttgtcatgcactatctctgccgcaaatgtgcctctcagtccatcgccgttccgatcatcgctgagatcgatctctacaaatacgatccatgggagcttcctggtttagccttgtatggtgagaaggaatggtacttcttctctcccagggacagaaaatatcccaacggttcgcgtcctaaccggtccgctggttctggttactggaaagctaccggagctgataaaccgatcggactacctaaaccggtcggaattaagaaagctcttgttttctacgccggcaaagctccaaagggagagaaaaccaattggatcatgcacgagtaccgtctcgccgacgttgaccggtccgttcgcaagaagaagaatagtctcaggctggatgattgggttctctgccggatttacaacaaaaaaggagctaccgagaggcggggaccaccgcctccggttgtttacggcgacgaaatcatggaggagaagccgaaggtgacggagatggttatgcctccgccgccgcaacagacaagtgagttcgcgtatttcgacacgtcggattcggtgccgaagctgcatactacggattcgagttgctcggagcaggtggtgtcgccggagttcacgagcgaggttcagagcgagcccaagtggaaagattggtcggccgtaagtaatgacaataacaatacccttgattttgggtttaattacattgatgccaccgtggataacgcgtttggaggaggagggagtagtaatcagatgtttccgctacaggatatgttcatgtacatgcagaagccttactag

SEQ ID NO: 781 - DNA, 450 bp, Arabidopsis thaliana
atgagtaacaacgagcttctcgaaatcgagcctatgtatcttcaattcccttttgaattgaagaagcagatgtcttgctctctttacttgacgaacaagacagacaataacgtggcctttaaggttaagacgacaaatcggaacaactattgcgttaggcctaattatggacttattcttccaaagtcgacttgtaaagttcttgtgaccatgcaagctcaaaaggaagttccttctgatatgcagagctttgaaaagtttatgattcaaagtgtactggctagtcctggagtcacagccaaagaagttactcgtgagatgtttagcaaagaatcagggcatgtagttgaggagactaaactgagagttacttatgtttgctccaccacgaccaacatcactagttcaccaaggactagaagagggtttatatttcagtgtttttgttag

SEQ ID NO: 782 - DNA, 1119 bp, Arabidopsis thaliana
atggagtgtagttcagtgagtgtactaggaatattactggtatttcctctccttcataaccttgtcaccatctccgggcagaatcttccggcggtgggtttgttcactttcggagattccaacttcgacgctggaaataaaaagttcctcacaagtgctccacttcctcaaaacttttggccttacggtaaatctcgagatgaccctaagggcaagttttctgatggcaaaattgtcccggactttattgcaaaattcatggggataccacacgatttaccgccggcgctaaaacccggcaccgatgtgtcacgaggagccagcttcgccgtcgggtccgcttccattcttggatctccaaaagattctttggctctgaatcaacaagtgaggaaattcaatcagatgatatcaaattggaaagtggattacattcagaaatcagtgtttatgattagcattggtatggaagattactacaactttaccaaaaacaatcctaatgctgaagtttctgctcaacaagctttcgttacttctgtcactaaccggtttaagagtgatatcaacttgttgtattcatctggagctagtaaattcgtcgtacacttgctagcgccattaggttgtttaccgatcgcaagacaagaatttaaaaccggtaacaattgttacgagaaactcaatgatttggccaaacaacacaacgctaaaattggaccgattttgaacgaaatggcggaaactaaaccggatttccaattcaccgttttcgatttctacaacgttattcttcgcaggacacaaagaaacatgaactaccggttttccgtgacgaatatatcgtgttgcggtgttgggacgcattatgcatatggttgtggtttacctaacgtgcactcgaagttatgcgaatatcaaagatcctacctttacttcgacgcacgtcataacacagagaaagcacaagaagcgtttgctcatcttatctttggagctgacccaaatgttatccaacctatgaatgttcgtgagctcatggtgtatcctgttaatgagcctatgcgtgagttttgggaggatccaatggatgagaagttatcgttagtccaatactag

SEQ ID NO: 783 - DNA, 1065 bp, Arabidopsis thaliana
atgggtgattgggctcaacttgctcagtctgtgatcctaggtttgattttctcttaccttctcgctaagctgatctcgatcgtcgtcacgtttaaagaagacaatctctctcttactcgtcacccagaggagtctcaattggaaattaaaccggaaggagttgactcgcgacgtctcgattcctcttgcggtggtttcggtggtgaggcggattcgcttgtggcggagcagggtagctcccgaagtgatagcgttgccggtgacgacagtgaggaagatgatgattgggaaggcgtcgagagcacggaactcgatgaggcttttagcgccgccactctttttgtgactaccgccgccgcagatcggctttcgcagaaggtaccgagtgatgtgcagcagcagctttacggattgtataagattgctacggaagggccgtgtactgctcctcagccatcagctctcaaaatgactgctcgtgccaagtggcaagcatggcagaaactgggagctatgccacctgaagaggcgatggagaagtatattgagattgtcactcagctttacccaacttggttagacggtggcgtgaaagccggaagtcggggtggggatgatgcagcctccaactcaagaggaaccatgggaccagtttttagctctttggtttatgatgaggagtccgaaaatgagttgaagattgatgccatacacggatttgctagagaaggagaagtcgagaatttactgaaaagcattgaaagcggcattcctgtaaatgcaagggacagtgaaggtcgcacaccattgcactgggctatagaccgtggccacctcaacatcgccaaagttctggtcgataagaacgccgatgtgaatgctaaggacaacgaaggccaaacccctttgcattatgctgttgtatgcgacagagaagctatcgccgagtttctggttaaacagaacgcaaacacagccgctaaagatgaggatggaaactctccccttgatctctgtgaatcagactggccctggatccgagattctgcaaagcaggcagactaa

SEQ ID NO: 784 - DNA, 270 bp, Arabidopsis thaliana
atggcaaaggctatcgtttccatcttcgttgtctttttcatcttcttcttagtcatttccgatgtgccggagatagaagcgcaaggtaacgagtgcttgaaagaatacggaggtgatgttggtttcggcttttgtgcgcctcggatatttccgacgatttgttacacaagatgccgtgagaacaagggagctaaaggtggaagatgccgttggggacagggcagtaacgtcaaatgcttatgcgacttctgcgacgatactccacagtaa

SEQ ID NO: 785 - DNA, 590 bp, Arabidopsis thaliana
atggccggagttttcaaaacggttacgtttcttgttttggttttcgctgccgttgttgtcttcgcggaggactacgatgttggtgatgatacggaatggacgagacctatggaccccgagttctatactacttgggctaccggtaaaactttccgtgtaggcgacgagctcgaatttgatttcgctgctgggaggcatgatgtggcagttgtatcagaagctgcatttgaaaactgtgagaaagagaaacccattagccacatgaccgttcctccggtcaaaattatgctaaacaccactggaccacaatactttatctgcaccgtcggtgaccattgtcgttttggtcaaaaactttccatcactgtagttgctgctggtgcaactggaggtgctactcctggtgccggtgctaccccagcacctggatcaaccccaagtactggaggaaccactcctcccactgcgggtgggaccacaacaccttcaggctctagcggaaccactactccagctggaaatgccgcttcctcattaggtggtgctacttttctggtcgcttttgtttctgctgttgttgctctcttttg

SEQ ID NO: 786 - skipped

SEQ ID NO: 787 - DNA, 1467 bp, Arabidopsis thaliana
atgggtcttgaagttgggtccttatgcttcaaacttaaagacggaggcttgacatcaagaaccaacagtttcaagagagacgatactaataggcaccagaattctcctaagagtactatggagcggtcgttgagtttcaacagctgggaggttcctaaagagaccaagactgattcagattttgaggtcttggagacaaagaagtcaacgcctaacactttgaatggaagaaactgtgagagaatccaaatcaagaaacctacagttactccaccagagccatttgtgttcttctctcctagacctgtcaccgagcttgatgcagctgcaactacgttacaaaaggtgtacaagagttacaggaccagaaggaacttagcagattgtgcggtcgttgttgaggagctctggtggaggactttggaaggtgcagctttggatttgagctctgtgtctttctttggagaagaaaaacatgagaccgctgtttcgaaatgggcacgagctagaaaacgagctgctaaggttgggaaaggcttatctaaagatgaaaaggctcagaaattagctcttcagcattggcttgaagctattgacccacgtcatcgttacggccacaacttgcacttctattatgatgtctggtcagcgagcaagagcacacaaccattcttttactggttggatataggagacggcaaagatgtaaatcttgagaaacaccctagaagtgttctgcaaaaacaatgcatcagatacttaggaccgatggagagagaagcatatgaagtgatagtagaagatgggagactaatgtataaacagggcatgactctgatcaattcaacagaggaagccaagtcgatttttgtacttagtactactagaaacttatacgtagggattaaaaagaaaggtcttttccagcactctagtttcttatctggaggtgccacaaccgcagcaggaaggttagtcgcccgcgatgggatccttgaggctatatggccatatagtggacattatctcccaacagaagacaacttcaaggagttcataagtttcttagaggagcacaatgttgatctcaccaatgttaagagatgttctgtgaatgaggaatattcgtcattcaaatcgactgcagatgaagaagaagaaaggaaggaagtctcagaagaagttgagataccttcagagaaagaagagagagcgagaccagtgtttgatcctgtaaagagactgtcttgtaaatggacaagtggatatggtccaagaattgggtgtgttagagattatccaatggagctacaagcacaagcactggagcaagtcagtctgtctcctagggtttcaccagctaattcttacggaccaattccatctccaaggcctagtcctaaagtgagggtgtctccacgcttggcatacatgggaatcccaagccctagggctgtaaagtgttaa

SEQ ID NO: 788 - DNA, 549 bp, Arabidopsis thaliana
atgggtgttgagaaaatggtgtgtttagcttctcgtacgggtcgtcagtttcagagatacaacaaaggtcgtcgtcaagtcgttggatgtgttccttacagattcaagctatctaatgatggtaaaataagtgatgaagtagaagttcttgttatctcttcccaaaaaggccacgccttaatgttccccaagggtggttgggagcttgatgaatctgtagaagaagctgcatcaagagaatgtcttgaagaagctggagttcttggcaacgttgagcaccaacttggaaaatgggattttttaagcaaaagcagaggaacatactatgaaggactaatgttccctatgcttgttacagaacaacttgagctttggcctgaacaacatgttaggcaaagaatctggatgaatgtaaccgaagcaagagaagcttgtagagattggtggatgaaagaagcattagatgttttggttgagagactttcatcaccaatgaatcaaccaaaggaagagaagactatgtcaatctctattgaaacaatgtgttga

SEQ ID NO: 789 - DNA, 1035 bp, Arabidopsis thaliana
atgattgcattagctgcttcttcgttggggaatacaccgattgcttcgtttaaccgtcattttagattccggttacatccacgaaaccctctgatacaagcagcggtttcaccttcgtcttcttcttcttctcctactgcttcatctggctttgatttgagttctctcgaatccgccattaacaagaaagatagtaatggtgttaaggaagctctcgataaattgagtgaagaaggttgggctaagaaatggagctcccagccgtatctttcgcgccgtacgacatcactgcgggagctgacaactctcggtatcaagaatgcagagactctggccatccctagtgtcaggaacgatgcggcttttcttttcacagtagtcggatcaactgggttcatagctgtacttgccggccaacttcccggggactggggattctttgtgccttacttagttgggagcatttcgttggtagttttagccgtgggaagcgtttcaccagggcttcttcaagctgcgatttccgggttttcgacgttcttccctgattatcaagaacgaattgctgcacatgaagcagcccacttcttaggtacccttgaaaagtttaaatctttcgattccaaagtggcttacttaatcgggcttccaatcctcgggtactcgttagacatcggtaaagaacatgtcaatctcattgacgagagactagctaaactaatatacagcggcaagcttgactcaaaggagctcgataggttggctgctgttgcaatggctggacttgccgccgagggtctgaagtatgacaaagtaattggccaatctgcagatctcttctctcttcagagattcataaacagaagccaacccaaaatcagcaacgagcagcagcaaaatctaacaagatgggctgttctttactctgcttctcttctcaaaaacaacaagaccatccatgaagctctaatggctgcaatgtccaaaaatgcatctgttcttgaatgcattcaaaccattgagacagcttcctag

SEQ ID NO: 790 - DNA, 1398 bp, Arabidopsis thaliana
atggttgagattcagggaagattcaaaagaattgagtcggctttcaacgtagccgcggctcgtgtacatccaccgtgtgataacagtagcggaagcgatcattcgccggatctttccgatttggtcgcatcttttatagagaaagagggacaaatagtattacgtgaagaagaagaaacttcttccgacgataacaatttggaagatgtgaatgagaggttacggaagcttctagaaggtttatcctgtggcgaagagcggatgagaatactgtcagcgacgatggaggttgctggaacgttcgtcggagatattagttcttctaagcgtcacttaatggcgtttctacgtaacaagggttttgatgcaggtctttgcaagtcgagttgggaaagattcggcaaaaacaccggcggaaaatacgagtacgtcgacgttcgttgtggcggagattataataatcggtatttcgtcgagacaaaccttgccggagagtttgagatagctagaccaacgaaaaggtacctctcaatactaagccaagtgccacgcgtcttcgtgggaacttcagaggaactgaaactgctcgtgagaatcatgtgccatgagatgagacggtcgatgaagcacgtagggatccacgtgccaccgtggaggagaaacggttacatgcaagctaagtggttcggtttctataaacgaacttcgacgaccaataactacgaaatggttaatacttatgatacgactgcgtttaagggttgcaaggaagagttttgggaagctaaaggtcttaaggttatggttggtcagctttcgattgctttcaacattagtgcgctttgccggaaaggaaccgttcatccgtcgccaccgccggcgataaagaccgacgaacagtttctatctcttctccccgtagctatcctctctctcgtggcggcgctctcggtggaggatcgtgaagttcttgcttacctcatctcaaactccggcgactcaaatcgtatctctcgtctcaagaaaaacaaagaagataatcatcactctcctctctttctttgtgattgttttagttgttacacgagttactgggtcagatgggacacgtcaccgaggcgccaactcattcacgagatcatcgatgcttacgaagatagtttggagatgaagaagaaaaagaaagatcggagaaagcgatcgggaaaagcttctggacgagttaactcgataggaacgagtcgactcagtgaattgggttcgagttcagccgagtttgctggtggtgactcggagaaagatggaaattgcggcggtgaagaggcggagaaggagaaaggctccgttggaaaggttatgagtttcattggtcagagatttttgggagtttggggataa

SEQ ID NO: 791 - DNA, 1926 bp, Arabidopsis thaliana
atgacgagggcgtttcatctgatcattgactgcattactggagacactggatctattcaaatgctcgttacgaatctttatgacttacccggagaatatgtgtcgatgaatcctgagatctttagcgcaatgagagcagggaacgtaaagtttttggataagatgaagactaacaacaatacaccattggcatgtttcaggaacgaaacaggagatttcactcttcaccttgctgctgcttggggtcgacttgagctagtgaagagaatcgtctctgaatgcccatgtcttcttttggaaacaaactccaaggaccagattccgcttcatgccgctgccgctgctggccgtttagctgttgttgaggcttttgttgcgagagtaaatgaaatttcagatggactctctgaagaagagagggagagagtgaatctatatgctatgaaggatatagatggaaataccgctctgcacttagccttgaaaggcggccatttgaagacagctgcatgtctggtaaaggccaaccaccttgcttcgtttcttgcaaataaccatggagtatctcctttgtttacggctataattgctggaagtctaaccctagtggaagcaatgatgtacgttcctggacagacatgtaacttggcatcaaagttagaagggagaaagtcgcttgtacacgcggctctaaaggccaaaaactcagatatccttgatgttattctcagtgaagacccaagtcttgtcaatgaacgagatgaagaaggacggacctgcctttcagttgcagcatacgtagggtactataaaggggtagtcaatctcttacaccgatcaacatcaaatgtctttgagtgtgatgatgatggttcctatccaatccacatggcagtggagaagggtcgcgtcaaaattttcctaaagcttctcaagtgttgtcccgattcacaatacctacttaacaaacaaggtcagaacattcttcacattgcggcaaaaagtgggaaaactggaacttacctattacaagtcatcaaggcttatgatttgataaagaatgatctgattatggagcaagatgtggatgggaatacacctctgcacttagccaccttaacgtggcgtcctcgaactgttaatatacttaataagttcactttgggaaaccacctacatatacgtaacaaagatggcttgagtgctctggatatagcggagtcgaatctgcagtccaattacgtctttcgagagagaatgacgttgatggtcttattgtgcacttgttcgccaagagggtttaaaatgatacccacaagtggaataacattaaaaagcagatcagaaaaagtagccggtaacaaatacaaagacagtatcaatgtacttctacttgtggcaactctagtagctactgtggcatttgctgcaggtattgccataccaggaggatttagtagttctactccaaaaaggggaattgcaattttggacgatgatgacttcctctcgatttttctggtgtttaacacattggcgatgcaaagctctgttctggcaatagttgctctaatatgggcacaactgggggatccagtacttgttcataaaacctttcatttggcattgccagcactctttgtttctctagtttcaatgtcctcagcattcttctgcggcgtggtggctacaacaaagcacaatccttggctttttgatagcattatctttatctctatcatcttcctttttgtggtagcttatctccttgccccttacgctatccctcagtttccgggcactccttttcttcaaagaattactaaatgttatctcgactttatgttgttgtttgttaatgaagatgatgttgatattgtctgcgagaagaagcaggagaccgtccatctttatgtcgcgaactaa

SEQ ID NO: 792 - DNA, 1443 bp, Arabidopsis thaliana
atggggtataaagatgtcaaaatcgcccctttgattgagaggaaagactcaggtcgacgatcaaacctagagagattctcccactatgttgcaaggcagctcggatttgaggatccaaatgaatacccacaactatgcaaattagcaaatggatatttgttgaaaacaaaagggtatgatgagaatgtggatgagtatttggagaatgaagctgagcgtgattctctctatgttcatctccttgaagaatttgatagatgcattctcacttatttttctttcaattggacccaatcttccaacctcatctctcaggctttaagcgatgagtcggatcagaaagttccaaaactcaaggatttcgtgatggcagcaacaaggaaacagaggtttgagagagtaacaaaagatctcaaggtgaaaagggtaatttcgacattagtagaagagatgagagtcattgggagcggaagcagtgagccacactgtacggaagtaatgtctccggtggctcataacaaacgaagtcccgtccttctccttatgggcggaggaatgggcgcaggaaagagcaccgtcctcaaagatatcttcctagagtcgttttggtcggaggcacaggccgacgcggtggttatagaggcagacgcgtttaaggagacggatgtaatttatagagctcttagctctagaggtcaccacgatgatatgcttcaaactgctgaattggttcatcaatcatcaacggatgctgcatcgtccttactagtaacagcattgaacgacggacgtgatgtgataatggatggaacattgtcatgggagccattcgtcgaacaaatgatcgaaatggcaagaaacgtccacaaacaaaaatatcgaatgggcgaaggctacaaggtgtccgaagaggggacgataaccgaaaaatattgggaagaagaagaagaagaaacgaaagaaaatggcaaacaacaaaatctgaaaccttacagaatcgagctggtcggtgtggtttgtgacgcttatcttgccgtagcaagaggcatacggagagctctaatggtgaagagagcagtgagagtgaaaccacaattgaattcacacaagagatttgctaatgcattcccaaagtattgtgagcttgttgataacgctaggctttattgcaccaatgctgttggtggtcctccaaggcttatagcgtggaaagacggaaatagtaagcttctggtggatccagaggatattgattgtctaaaacgggtcagcagtctcaacccggatgcagaatccatttacgagctttatccggatccaagccaattaagcaaacccggttctgtttggaatgatgttgtgttagttccatcgaggcccaaggtccagaaggaacttagcgatgcaatcaggagaatcgaaaaggcccaaccaaaaaattga

SEQ ID NO: 793 - DNA, 1062 bp, Arabidopsis thaliana
atggctacatgctggcctgagccgattgtttccgtgcaatccttgtcccaaaccggtgtaccaactgtaccaaaccgctatgtgaagccggctcatcagagaccggtctttaacaccacccaatccgatgctgggatagaaatccctgttctagacatgaacgacgtttgggggaaaccagaggggctaaggctcgtgaggagcgcgtgtgaggagtggggtttcttccaaatggtgaaccatggtgtgacccactcgttgatggagagagtgagaggagcgtggcgagagttcttcgagctaccgctagaggagaaacggaagtatgcaaactcaccggacacgtacgagggatatggaagccgccttggggttgtgaaagatgctaaattagattggagtgattatttcttcctcaattacttgccttcttccataagaaacccttccaagtggccatctcagcctcctaagatcagagaattgatcgaaaagtacggagaagaagtgagaaaactgtgcgaaaggctaacagagacgttgtcagagagtttaggtttaaaaccaaacaagctcatgcaggctttaggaggaggcgacaaagtcggagcttctctgaggacaaacttctacccaaaatgccctcagccgcagctcactttaggtctctcttctcattctgaccctggaggcatcaccattcttctcccggacgagaaggtcgctggccttcaggtccgtcgtggtgatggctgggtcaccattaaatcagtccctaatgctttgatcgttaacattggagatcaacttcagatacttagcaatggaatttacaaaagcgtggaacatcaagtgatcgttaattccggtatggaacgagtctctttggcattcttctataacccgagaagtgatatcccggttggaccaatcgaagaactagtaactgcaaaccgacctgctctttataaaccaatcaggttcgacgagtaccgttctctgataaggcaaaagggtccttgtggaaaaaaccaagtcgactcactgttattaactagataa

SEQ ID NO: 794 - DNA, 1488 bp, Arabidopsis thaliana
atgttactaatcatatcattcaccatcgtctccttcttcttcatcataatattctcactctttcacttactcttccttcaaaaactacgttactgcaactgcgagatctgtcatgcttatctcacttcaagctggaaaaaagacttcatcaatctcagtgattggtacactcatcttctccggcggtctccgacgtcaacgatcaaagtacacgtcttaaacagcgttatcacagcgaatccatcaaacgttgaacatatcctcaaaaccaatttccacaattacccaaaaggcaaacaattctctgttatcctcggtgatcttttaggccgtggaatcttcaattccgatggtgacacgtggcgtttccagagaaaactcgcgagtttggaacttggaagtgtttctgtaagagttttcgctcatgagattgttaagaccgagatcgagacacgtcttcttccgatattgacttcgttttccgacaatcctggttctgttttggatctacaagatgtgtttagaagattctcgtttgatacgattagtaaattgtcgtttgggtttgacccagattgtctccggttaccttttccgatatcggaattcgccgtcgctttcgatacggcgtcgttgttatcggcgaaacgagctttagctccgtttcctctgttatggaaaaccaaaaggcttttaagaattggttctgagaaaaagcttcaagaatctatcaatgtgataaaccggttagctggtgatttaatcaagcaacggaggttaaccggtttgatgggtaaaaatgatttgatttctagattcatggcggttgtggcggaggacgatgatgagtatctccgagacatcgttgtgagttttctattggctggtcgggatacggtagctgctggtttaaccggatttttctggttattgacccgtcatccggaagtggagaaccggatccgggaagaactggaccgggttatggggaccggttttgactcagtcactgctcgttgcgatgaaatgagagagatggattatttgcatgcgtcgctgtacgagagcatgagattgtttccgccggttcaattcgattccaaattcgctttaaacgatgacgttttgtctgatggtacatttgtgaatagtgggactagagtcacgtaccatgcttatgcaatgggtcggatggaccggatctggggcccggattacgaagagtttaaaccagagaggtggttggataacgaaggtaagttccggcccgagaatccggttaagtacccggttttccaggccggagctagggtttgtatcgggaaagagatggctatcatggagatgaaatccatagctgtggcaatcattaggaggttcgaaacacgggtcgcaagtcccgaaacaaccgagacactccggtttgcgcctggtttaactgcgacggttaacggtggattgccggttatgatccaagaaaggagttag

SEQ ID NO: 795 - DNA, 5136 bp, Arabidopsis thaliana
atgtcaacgtcacaaaccctcggcggcgccacacgttgtggccggatcataggtccatcattagacaagatcataaaaaacgctgcgtggcgtaaacacacgtaccttgtctcttcatgtaaatccgttctcgacaagctcgaatctcttcccgacgacttccacgatccttcctccgtcgtctctggcctcgccgcatcagatgcagattccgttctccaaccttttctcttatctctcgaaacagcttattcaaaagtcgtcgagccttctctagattgcgcttttaaactcttctctctctcaatcctccgcggtgagatccaatcatcaaaacaagattcaatcctcttcaaactcgtcaacgccgtctccaaagtcggtgctatagccgaagaaccgattcaactcgctgttcttagagttcttctcgctgccgttagatctccatgtatcttgatccgtggtgattgcttgttacacgttgtcaagacttgttataatatttaccttggtggcttgagcggcacgacacagatctgtgctaaatctgtcttagctcagatgatgcttgtgatcttcacaagatctgaagaagattcgcttgatgtttctgtcaaaacgatttacgtcaacgagttattaactttcacggacaagagtgttaatgaaggaagctctgtttatttctgtcaagggtttgtgaatgaagtcatggctgcaggacaaggaagtcctcttcctcctcctgatgtgattcagattctgttgcaaaatcccgagactgaaaccgttatgactccggattcaccgtctttccgaggatacgtggcaaacggagaaggtgattctgagaccggtgacatgagtaaggtgagacaagacgcttttcttctgttcaagaacttgtgtaaattgtccatgaggttttcgtccaaggagaacaatgatgatcagatcatggtgagaggtaagactctgtctttggagttgcttaaagtcattattgacaatggtggttctgtttggcggactaatgaaagcttcatcaatgccgttaagcaatacttatgcttatcactactaaagaacagtgcggtatcaatcatgtcaatatttcaattgcaatgtgctatcttcatgagcttgttatcaaagcttagatcagtcttgaaagcagaaatcggcattttctttccgatgattgttcttcgcgtgcttgagaatgttcttcaacctagttacttgcagaagatgactgttctcaacttgctagacaaaatgtcgcaagatccgcagttgatggtcgatatctttgtgaactatgactgcgatgtggagtcttcaaacatacttgaaaggattgtcaacggtcttctcaaaactgctctaggaccacccaccggatcatcaacaacgttgtctccagcgcaagatagtacattcaggaatgattctgtcaagtgtttggttaacttagccaaggcaatgggaaattggatggaccagcagttgaaagtgaacgagacggtctggcctaagggctcacaagtttatgcttctatggacagtaatgcaagccagattagtgagttagaaggaactatatctgactgtgattcacagccagatactagtaatccagaagcttatgatgcttctatgcttgagcaacgaagggcttacaaaattgaattgcaggtccagtatttacaaaaaggtatctctctgttcaataggaagccgtcgaaaggtgtcgaatttctcataagtaccaagaaaataggtagctcccctgaggaagttgcttcgtttctgatgaagaccgcagggctaaatggaactgtgattggtgattatcttggtgaaagagatgaacttccactaaaagttatgcatgcatatgttgattcgtttaactttgaaaagaaggattttgtcgaagcaatacggttctttctacgtgggtttaggctaccaggagaagcacagaagattgatcgaatcatggagaagtttgcagaacattactggaaatgcaaccctggttcttttactagtgcagacactgcttatgttcttgcatactctgtgataatgctcaacacagatgcacacaacaacatggttaaggataagatgacgaaagctgacttcgtccgcaacaatagggggatagacgatggaaaggacttgcctgaagagtatttaggttctctatatgatcgagttgtgaaagaagaaatcaggatgaactcggacactttagccccacaaaacaaacaggtgaatggcttgaataaactgttgggcctagacggaattctcaatctggtttcttggatgcaaccagatgagaaacctcatggtgccaatggacgtcttataagggatattcaggaacagttccaagctaagccagagaaatcagagtcagtttatcatactgttacagatatttcgatcttgagattcatactagaggtctcttggggaccgatgcttgctgcattcagtgtcactattgaccagagtgatgatagactagcaacttctctttgcttacaaggcttcagatatgcggttcatgtcactgcagttatgggaatgcaaactcaaagagatgcttttgtaacttccatggccaagttcactaatcttcattgtgctgcagatatgaagcagaaaaatgttgatgctgttaaagcgataataacaatagccatagaagacggtaaccatctacatggttcttgggaacatattttaacttgtctttcacgcattgaacatttgcaactccttggagaagtatcaccatcagagaaacgttacgtccctacaaaaaaagctgaggtagatgacaagaaagctttagggtttccaaatttaaagaaacgtggatcttttcagaatccatctgttatggctgttgttaggggaggttcttatgatagtacttcacttgtgaaaagtgttcccaaactagttactccggagcagatcaaaagtttcattgcaaatttgaatctacttgatcaaattggcaattttgagttgaaccatgtctatgctaatagccaaaggttgaacagtgaagctatagtttcttttgttaaagcgctatgtaaagtctccatgtcagaacttcagtcaccaacagatcctcgtgtctttagcctcacgaaactagtcgaaacagcgcattataacatgaaccggatccgattagtttggtcccgcatatggaatgttctttctgatttcttcgtatcagttggcttgtcagagaatctctctgttgcaatatttgtcatggactcgcttcgtcagctttccatgaaattcttggagcgtgaggagctagcaaactaccatttccaacatgagtttcttcgaccattcgtcgttgttatgcagaaaagcagttccgcggagattagagagctaatagtccgatgtgtttctcaaatggttcttagtcgagttagtaatgtgaaatctggttggaaaaatgtcttcacagtttttacaactgcagcgcttgatgagaggaagaacattgtactgttagctttcgagacaatcgagaaaattgtgcgggatcattttcattgcataatcgagacagagataacggtatacgcagactgcattagatgtctcatcaccttcacaaacagcaagtttgaaggtgacattggcttcaacaccatagaatttcttcgtttctgcgctttaaagcttgaagaaggaggacttgtcttgaatgagaaactcaagaacaatactatctcagcgttaaaggaagatttttctgatacacagagttttactgaccttgatgaacaagtatcctattggattcctctgcttacaggtttatgtaagcaagtctcggatccaagaccagcaattcgaaagcgttccatagaagtattgttccacattctgatggatcatggtcatctttttacaagacccttttggactggaatcttcagctctatcattctcccagttttcaacaacatacgaagtaaaaccgatatgctatttgaagaaagtgttgattcgccatcctcagcttctctagacaccgaagaaactacatgggacgttgagacatcaacacttgcattgcagcttctcgtcgatctactcgttaaatttttcagatccgtgagatctcagcttccaagcgttgtgtcaatcatcgtagggttcataaagagtccttttcaaggctctacaggctctggaatctctgttttgctacatctggctgatggattggctcgtagtgcctctgaagatgaatggagagagatattcttggctctcaaggaagcagcgtcgctgactttcgccggtttcatgaaagtcttgagaacaatggatgatatcgaagatgttgaaacactttctggtcaaagcgtaaacataggtgatcttgatgatgacagtcttcacatcatgtcgtatgttgtctccagaacaaagaaacacattgatgtcctgtctcaaatcgttgaggttgtgagtgatttatacagaagaaaccagttctcattgtccgcatcacacgtggatattctggcagacattttctcgtgcatcgcgtctcacgcacagcaactaaacaccgacacagtccttagaaggaagttcaagagagcatgctctgtccaaaacctaacagagcctcaactacttaacttcgagaacgaggcttacaaatcctacatgatgttcctccaagacatggttacttgcaatccaaacgtctccaaagaactagatctcgagtctcgtctagtcactgaatgcgcaaaaatcgtgaagatctaccttaaatgcacagatccacaacaacaagaacaacaacaaagaaaaccggtgctatgggttcttccgatggaatcagatcgtgtagaagaagcaacggcgagaacttcactgcttgtttcttcactcgaagccttgtgctcattagaagcagagtctctgaagaaacacgtgtccagcttcttccctttgttggtggatcttgtgaggactgagcattgctctccacaagttccgtacgtcctaagcaatgttttgaaatcgtgcattggtcctattttggcttag

SEQ ID NO: 796 - skipped

SEQ ID NO: 797 - DNA, 1728 bp, Arabidopsis thaliana
atgacggagtatgagaatgggaagaagaggaaagtacgaaacaaacaacaagtaaaagtacagttcttgtctcaaaggtatctaatcttatgcttttgttgtttcttcgtcttgctcttcttcttatcttccgaccgaatctccacactctctgttcgttccgattctctgagaccgtctcttcgtgttcctactctctccgttttatcatcatccatggattcgtttcaccgtggtagattccctccgttgagtgttgaagacagagttcaattccctgaccatttattgctgattctttcgcacggaattgggaaaggtgaaaaaaacctagtttgtgtttatcgtggagtaaaggaagagactttggtgttgccctcgatttctagtgatgaattcgatgagtttaggtcgattgttcgatgtcctaatgctcctttgaactattcttcatctgttgatttgcaattccgtggagatttggtgaagaagaagatgaagaaacagagccgtcgtgttcataattgggaaaaggttggttatgaggcggtgattgacggcgacacggtggttgtgtttgttaaaggattgactcgaagacctcacaaggaatcagatccttcttactataagtgtcaatttgagattgagaattcggaggagaaagaggtgactcaagctattgctgctgcgcaagaagttgtgaggtgtggtttgcctgagagtttgaagctaaatccagagatgatgtttcgagtgagtgtaattcacattgatcctagaggaagaactacccctgctctgccttcggttgcgagaatctacggttctgattcgattgagaagaaggagaagaagagtggagttaagcatgagctttgtgtttgtacaatgttatggaaccaagctccgttcttgcgtgaatggatcatgtatcactcgtggctcggtgtcgaacgttggtttatatatgataacaacagcgatgatggtatacaagaggagattgagttgcttagttcggagaattacaatgtgagtcgacatgtttggccttggatcaagactcaagaagccggtttttcgcattgtgcggttagagcgaaagaagaatgcaattgggttggattcttcgatgtcgacgagttctactacttccctacgcatcgctctcaaggcttaccgagcaaaaacgctttgaagtcgcttgtatcgaactacacttcttgggatttggttggagagatcagaacggactgtcatagctacggtccatccggtctgacctcggttccatcacaaggcgtgaccgtaggttacacttgtagacaagcgaaccccgagagacacaagtcgataatccgccctgagttgctcacaagctcattgctcaatgaagtacatcattttcagttgaaagaaggagtggggcatatgagtttggtggagagtgttgcggtagtgaaccattacaagtaccaagtttgggacactttcaaagctaagttttacagaagagtggctacttatgttgttgactggcaagagaatcagaatcaagggtctaaagatcgagctccagggctcgggacagaggcaatcgagccgccggattggaaacgacggttctgtgaagtgtgggacactggattgaaggatttggttatgtcgaattttgctgatcaagtgactggttatctgccgtggcagaggcaacaacaagaatga

SEQ ID NO: 798 - DNA, 1422 bp, Arabidopsis thaliana
atggctcatcgtgatcggttaattagaggtcgtcgacttgcaaatgaagatcaatcactcgttactttctctgacggcaacgaaactgttcgtgttgatgccctaggattttttaaggttaatgtttttatggagacttgtgaattgtttatgagagatttgcattacgctaatgtgactgttgggacgccgtctgattggtttatggttgctttagatactggaagtgacttgttttggttgccctgtgactgcaccaattgtgttcgtgaattgaaagcacctggtggctcgagtttggaccttaatatttatagccctaatgcttcatcgacaagtactaaagttccttgtaatagcacattatgtacaagaggtgatcgatgcgcttcccctgaaagtgattgcccataccagatccggtatctttctaatggtacctcttctactggagtcttggtggaggatgtacttcacttagtttcaaatgacaaaagttccaaagctattcccgctcgtgttacttttggatgtggtcaagttcagaccggtgtattccatgatggtgcagctccaaatggtcttttcgggcttggcttagaagacatatcggtgcctagtgtactagcaaaagaaggaattgcagcaaactcattctcaatgtgttttgggaacgatggagctggtaggatcagttttggagataaaggtagcgtagaccaacgggaaacaccattgaacataagacaaccacatcctacttacaatatcaccgtcactaaaataagcgttggaggaaataccggcgatcttgaatttgatgctgtttttgactctggaacctcgttcacttatctgactgatgcagcttacacccttatttcagaaagctttaattctctagctctggacaaacgttatcaaacaactgattctgagttgccttttgagtactgttatgcattaaggttgcctctttactctggtcaccatcacccaaacaaagacagcttccagtatccagctgtgaatctgacaatgaaaggcgggagctcgtatcccgtttatcacccgttagtagtaatccccatgaaggacacagatgtctactgtttagccattatgaagatagaagacattagcatcattggacagaacttcatgactggctatcgcgttgtctttgatcgtgagaaactgattctggggtggaaagaatctgattgttacaccggtgagacatcggctcggacgcttccatcgaaccgttcctcctcctcggctagaccgccagcttcttcgtttgacccagaggcgacaaacataccatctcaaagaccaaacacgtcgacgacttctgctgcttattctctctctatctcactttcattgttcttcttctcaattttggccatcctttaa

SEQ ID NO: 799 - DNA, 678 bp, Arabidopsis thaliana
atgggtaacagtttaggcggcaagaaaacgaccaaagtcatgaagatagacggcgagacttttaaactgaaaactccggtgacggctgaggaggtcttaaaagactttcccggccacgtcttgttagactccgaatccgtcaagcactacggtgcccgagccaaaccacttgagacaaagcgtttaatgttgtttggtgtgcaggcgaagcagaggttggaggcgaagcggctttattttgtggtggagccggtgaaagagtgtccaccgagaagggtaagatcaggaattcacgtgagtgcaaaggagaggcttgagagtctcatgctggcccggagatcgtcttccgatctctccatactcaaaccaccaggaggatggacgacggaggaagaagaaggagcggtgaggagggtgaaggtgaggattcccaaagctgagcttgaaaagctcgttaaagaaggagccaccgaagccgaagctacgcagaagatcgctgctctctttatggccaaacagaggcaagaggaggcatatcagaacacacgacaggacgagcccgccaccacggccaccgccaccgccaccaccaccgccacaagaggagtcaaatcccgtttggtgagttccttaatttttctcctccatttgtttgtttttttcgtacaaagtaaataa

SEQ ID NO: 800 - DNA, 375 bp, Arabidopsis thaliana
atggctcactggttgtcatccctagtcattgcattaacattcacaagctttttcactggtctctcagctagtcgccaccttcttcaatcaacaccagctattaccccaccggttacaacaacatttccaccacttcccacaaccacaatgccaccatttcctccttcaacttctcttcctcagccaactgcgtttccgccattaccaagctcacaaataccttctttacctaacccagcacaacccattaatatcccaaacttcccacaaatcaatatccctaacttcccaatttctatcccaaacaacttcccattcaatcttcccaccagcattccaacaatcccattcttcactccaccaccttccaaatga

SEQ ID NO: 801 - DNA, 549 bp, Arabidopsis thaliana
atggcgaatcaagtgatcaccggaatcaaagaaacagctcagtcaattactggagcggctcgtccatggggcgatttcctcgatctttccgccttcagcttcccttcctccatcgccgatgcaacaactcgcgtaactcagaacctgactcacttccgcatcaactacagtatcattctctctatcctcctaggtctaaccctaatcacacgtccaatcgccatcctcgcgtttatagccgttggcttagcttggttcttcctctacttcgctcgcgaggagccactcacgatcttcggattcactattgatgacggcatcgtcgctgtgcttctcattggtctttcgattgggtcgctagttaccaccggagtttggctcagagctctcaccaccgttggatttggtgttctggttttgatcttacacgctgcgttaagaggaacggatgatcttgtgagtgacgatctggaatcaccttatggaccgatgctctctacctctggcggtggtaacgacggtgctcgtggtgattacagtggaatctga

SEQ ID NO: 802 - DNA, 950 bp, Arabidopsis thaliana
atgtgtatctcaatctcgcaagtctctagattgagaatccattcatttggaagttcttgctgtgagcgtgttcatggatggatcaagaacagctctagcttgaagctgcttgatgttagagcttcttctgttgatggtaaagcaagatggatcagacgtaacgtgagtacaactacacaaggtagtagaagcaacactaagagcagtgtgttgggaggaacagttcctgtaaccaggattatagatgaagagagtagaaccaaggtacagccttttggtaatcttcagcaacggcttgcgcaagataaagatctgtctaagctcctcacggttatagtctctgatcttgagacaactggtttgcatcggaaaaatgagcggataattgaaattgcagctcaggatatagctggtggtgggtacagcacatttcagactcttgtcaacccgggtgttgttcctataactaacgcacatatccatggaatcaggaatgatatggtctgtcgacccgaggttccaaggatggaagagctgataccgatatttctgcggtatgttgagagtcgacagaagcctggaggttatgtgatgttagttgcacacaacggcaaatcatttgacttccagtttttgatcaacgagtttaaccgttgttcttatgagattcctcataattggttgttactcgactcgctcccactcgctagagagaacatgaagtctgtagagccaacggttaagctaagttcatcgttggaagcgcttgcggactactatagtcttacaagggagggtgatgctcacagagccttgtcagatgtgttactcttatctaaggtgttccagaaactcaccattgatctcaagctctcactctctgatctcgtccttcgctgtcacactgcatctgatatcagtgctgccatggccaagaacaagaaggcctg

SEQ ID NO: 803 - DNA, 927 bp, Arabidopsis thaliana
atggcggacgaagaagatgagttactggagacagaactaagttacgaccagaaaaaggaaatcgccaagtggtttttcctcaacgctcccgctggagaaatcaattacgtcgctaaagatttaaaggcggttttgagcgatgaggaagtgtacaatgaagcagccatggaagcatttccagtgtacaacaaaactcacatgatttgccttgaaatgcccagtggagctggtgatgtgattgtctcatcttacagtgaaattaatgaaaatgagtaccttgatccaagaactgcccaggttgccatagttgatcatgttaaacagatttgtacaaaggtacggcctgcaaatgatgaagaacttccttctttgtatattgaggagtacagatatgctcttgatgctgaaatccagagatatgttagtgaatcttatccgaaaggtatgtctgcagttaattgtgtgaaagggaaagataatgagggtccagggtccgactttgagcttgttgttataattactgctatgagacttagtccccagaacttctgtaatggaagttggagatctgtatggaacatagatttccaggatgaatcccaggtgcttgacataaaagggaaattgcaggtaggagctcattattttgaagagggaaatgtggaattagatgcaaaaaaagatttccaagattcaacaatatttcagtctgcagatgactgcgcgattgccatagccaatattatcaggcaccatgaaacagagtaccttgcatctctagaggtagcttattcaaaattaccggataacactttcaaggatttgaggaggaaacttccggtgacacgaactctgttcccatggcagaacactttacagttcagcctaacaagagaggtcgagaaagaacttggacttggcaagtga

SEQ ID NO: 804 - DNA, 1395 bp, Arabidopsis thaliana
atgatgttgcgtgctgtttttaggagagcttccattagaggctcttcttctgcttcgggattgggaaaatcattgcaatcctctcgtgttgcagtgtctgctcaatttcattctgtttcagcaacagagacgttggtgcctcgtggaaaccatgctcatagcttccatcaccgttcttgtccagggtgtccagactgttcaaggactattatcaacggttaccaaggcacagccctgcaaagatgggtcaggcccttttcatctgatagtggggatgtcgtggaagctgttgtgccacacatgggtgaatcaatcactgatggcaccctagccgcctttctgaagaaacctggcgatagagtagaagctgatgaggctattgcacaaattgaaactgacaaggttacaatagatattgctagcccagcaagtggtgtgatccaagagtttctagtcaaggaaggagatactgttgaaccaggaaacaaggttgcaagaatttctacatctgcggatgctgtgtctcatgtggcaccctcagaaaaggcaccagagaaacctgctcccaagccttctcctcctgctgagaagcccaaagttgaaagtaccaaagttgcagagaaacccaaggcaccatcaccgccacctccaccgccatccaaacagtcagctaaagaaccgcagcttccacctaaggatagggaaagacgggttcctatgacaagacttcgcaaacgggtggcaactaggttgaaagactctcagaacacttttgcgttgctgacaactttcaatgaagttgatatgactaatctgatgaagctccgatctcagtacaaggatgcttttcttgaaaagcacggagtgaagttggggcttatgtctggtttcattaaggctgctgttagtgccctccagcaccaacctgtagtaaatgcagttatcgatggagatgatatcatttacagagactacgtggatatcagtatcgctgttggtacctctaagggtcttgtagttccagtcataagagatgctgacaaaatgaactttgctgacatagagaaaacaataaacggtctcgctaagaaggctactgaaggaaccatatcaatcgatgagatggcaggaggatcattcacagtatcaaatggtggtgtctatggaagtcttataagcactcctatcatcaaccctcctcagtctgctattcttggaatgcattcaattgtgcaacgtccaatggttgtgggaggaagcgtagttccgaggccaatgatgtatgtcgcgctgacttacgatcataggctaattgatggaagagaggctgtgtatttcttgcgccgtattaaggatgttgtggaagatcctcagaggcttcttctcgacatatga

SEQ ID NO: 805 - DNA, 888 bp, Arabidopsis thaliana
atggcggtttctcaccgtctcctcaggccggcgacgacgacgataaagaatactttttcttctctctttattaggtctctctcttcttcttcgtctgggtcctcgctagaccccaaaatcgatctggaggaggctgcggctcagctcgggaagtcttcgtctacgtcaacgtctccatacaaaggcagaaatttccactgggtgtttcttggatgtcctggtgttggtaaaggaacctatgcctctcgtctctcttctctcctcggcgttcctcatattgccactggtgatctcgttcgtgaagagctctcctcctctggcctcctctcctctcagctcaaggagcttgttaaccatggaaaactagttcctgatgaattcataataagtttgttatcaaagcgtctccaagctggcaaagacaagggtgaatctggatacattcttgatggttttccacgcaccgtgactcaagcggaaatactggagggagtaactaatatcgatctggtgattaacctgaagctacgagaagaggcattgcttgcgaaatgtttaggaagaagaatttgcagcgagtgtggtggaaactataacgttgcctgcattgatatcaaaggtgatgatgatactcccagaatgtatatgcctcctcttcttcctccgccaaactgtgaatcgaagcttataagccgagctgatgacactgaagaagttgtcaaggaaagactcaggatttacaacaaaatgactcaaccagtggaggaattctacaagaaacgcgggaagctgttggaatttgaattgcccggtggaatcccagagtcatgggcaaggctccttagggcattacaccttgaagacgataaacagtctgcaatagcctaa

SEQ ID NO: 806 - DNA, 1728 bp, Arabidopsis thaliana
atggacgcaacaagaacgttttttggtcttcctaacgttcacaacgttcctctctgtctcacgtctacaaagagtagtgatgatcttgagggtagtcgtccttcaacgtacttttctccctctctttggggagatcactttctctctgtttccctcgaccgcggtgaatttgatgaactagaaagagagattgaaactatgaagccactggtgaaagacatgctcatgtcttctcaaagcagcgacaaggagaagattcgtctaatccatttgctcgttagcctcgggagctcttatcattttgataaggagattcaagatatccttaaacacagtttcacaaagttggatgacataatagttggggaagatgatttggagacaatctccatcatgtttgaggtctttagactatacggtcacaagatgtcttgtgatgcctttgatagattcagaggtgaagatgggaggttcaaggagagtctagccaaagatgttagaggaatgctacagttgttcgaagtcgcgcatctaggaacaccctctgaagatataatggacgaagcatcgagtttcgcccagaatcacttggattcttggataggtggtaacgtatccggtgcaactccccatctcttgaagcatatacaaaactcattatacatacctcgatactgtaacatagaagtactagtggcaagagaatatatatcttactacgaacaagaagaaggtcacaacaagatcctgctcaagtttgcaaagcttaacttcaacttttgccagtttcattatatccaagaactcaaaactctcaccaaatggtggaaggacctagatcttgcatctaagttaccttacattagggatagacttgtagagagccatctcgggggtttggggccgtacttcgagccacactattctcttgggaggatcatagtggctaaaatcatcatgaccatggttgttgtggatgacacttatgatgcacatgcaactgtacccgaagttgcggttcttaccgaatgtttgcagaggttgaatattggtgccgatgataaacttccggactatttacgaacagtcctcgaaagtgtgtttgaagttatgggagagattgaacaagaaatgagaccgaaaggacgatcatacggcgtgaaacaagtgttggaaaggttcaagaacgtagcaaaggcggacaaacagttaacagagtgggcacgaacgggcgacgtaccatcctttgatgagtacatgaaagttgggttggtgacagctgggatggatggttatgcaggatattgctttataggaatggaagatgtcagtgaaaaggaagcttttgagtggctcagttccaatcccctaatcatccaagcgctaaatgtaatgttccgtttagcaaatgacgtaggaacctacgagaccgagataaacagaggagaggtggctaatgggctcaactgttacatgaaacaatatggagtcaccaaagaagaagcatcccaagagttgcgtaaaatatacagcaacaacaaaaaagtggttatggaggagttcatgaactcacatgaccatgtgccacgccaggttctgctgcgatgcctcaactttgcacgcctcttcgatgtgatgtacacggagggtgatggatacagtgaacccaaaggcaaaatcgaacactttatgacctccttgtacgtccacccaatacccctttcataa

SEQ ID NO: 807 - DNA, 648 bp, Arabidopsis thaliana
atgggaatggtttttggtaaaatcgctgtagagactcctaaatacacggtgactaaatccggtgacggttatgagatccgtgaatatccaccagcggttgcggcggaggttacatacgatgcgtcggagttcaaaggtgataaagacggaggctttcagcttttggctaagtacataggtgtgtttggcaaaccggagaatgagaaaccggagaaaattgctatgactgcaccggtgatcactaaggaaggtgagaagattgcgatgactgctccggtgattactaaggagagtgagaagattgagatgacttctccggttgtaactaaggaaggtggtggagaaggaaggaagaagttggtgacgatgcagtttttgttgccgtcgatgtataagaaggcggaggaggcaccacgtccaacggatgagagggttgtgattaaggaggaaggagggaggaagtatggtgtgattaagtttagtggtatagcgtcggagagtgtggtgagtgagaaggtgaagaagctgagtagtcatcttgagaaagatgggtttaagatcaccggagatttcgttcttgctaggtataatcctccatggacgttaccaccgtttaggaccaatgaggtcatgattcctgttgaatga

SEQ ID NO: 808 - DNA, 2427 bp, Arabidopsis thaliana
atggcaaacgctgaacgtatgataacgcgcgtccacagccaacgtgagcgtttgaacgaaacgcttgtttctgagagaaacgaagtccttgccttgctttccagggttgaagccaaaggtaaaggtattttacaacaaaaccagatcattgctgaattcgaagctttgcctgaacaaacccggaagaaacttgaaggtggtcctttctttgaccttctcaaatccactcaggaagcaattgtgttgccaccatgggttgctctagctgtgaggccaaggcctggtgtttgggaatacttacgagtcaatctccatgctcttgtcgttgaagaactccaacctgctgagtttcttcatttcaaggaagaactcgttgatggagttaagaatggtaatttcactcttgagcttgatttcgagccattcaatgcgtctatccctcgtccaacactccacaaatacattggaaatggtgttgacttccttaaccgtcatttatcggctaagctcttccatgacaaggagagtttgcttccattgcttaagttccttcgtcttcacagccaccagggcaagaacctgatgttgagcgagaagattcagaacctcaacactctgcaacacaccttgaggaaagcagaagagtatctagcagagcttaagtccgaaacactgtatgaagagtttgaggccaagtttgaggagattggtcttgagaggggatggggagacaatgcagagcgtgtccttgacatgatacgtcttcttttggaccttcttgaggcgcctgatccttgcactcttgagacttttcttggaagagtaccaatggtgttcaacgttgtgatcctctctccacatggttactttgctcaggacaatgttcttggttaccctgacactggtggacaggttgtttacattcttgatcaagttcgtgctctggagatagagatgcttcaacgtattaagcaacaaggactcaacattaaaccaaggattctcattctaactcgacttctacctgatgcggtaggaactacatgcggtgaacgtctcgagagagtttatgattctgagtactgtgatattcttcgtgtgcccttcagaacagagaagggtattgttcgcaaatggatctcaaggttcgaagtctggccatatctagagacttacaccgaggatgctgcggttgagctatcgaaagaattgaatggcaagcctgaccttatcattggtaactacagtgatggaaatcttgttgcttctttattggctcacaaacttggtgtcactcagtgtaccattgctcatgctcttgagaaaacaaagtacccggattctgatatctactggaagaagcttgacgacaagtaccatttctcatgccagttcactgcggatattttcgcaatgaaccacactgatttcatcatcactagtactttccaagaaattgctggaagcaaagaaactgttgggcagtatgaaagccacacagcctttactcttcccggattgtatcgagttgttcacgggattgatgtgtttgatcccaagttcaacattgtctctcctggtgctgatatgagcatctacttcccttacacagaggagaagcgtagattgactaagttccactctgagatcgaggagctcctctacagcgatgttgagaacaaagagcacttatgtgtgctcaaggacaagaagaagccgattctcttcacaatggctaggcttgatcgtgtcaagaacttgtcaggtcttgttgagtggtacgggaagaacacccgcttgcgtgagctagctaacttggttgttgttggaggagacaggaggaaagagtcaaaggacaatgaagagaaagcagagatgaagaaaatgtatgatctcattgaggaatacaagctaaacggtcagttcaggtggatctcctctcagatggaccgggtaaggaacggtgagctgtaccggtacatctgtgacaccaagggtgcttttgtccaacctgcattatatgaagcctttgggttaactgttgtggaggctatgacttgtggtttaccgactttcgccacttgcaaaggtggtccagctgagatcattgtgcacggtaaatcgggtttccacattgacccttaccatggtgatcaggctgctgatactcttgctgatttcttcaccaagtgtaaggaggatccatctcactgggatgagatctcaaaaggagggcttcagaggattgaggagaaatacacttggcaaatctattcacagaggctcttgacattgactggtgtgtatggattctggaagcatgtctcgaaccttgaccgtcttgaggctcgccgttaccttgaaatgttctatgcattgaagtatcgcccattggctcaggctgttcctcttgcacaagatgattga

SEQ ID NO: 809 - DNA, 1800 bp, Arabidopsis thaliana
atgtcgtctctctcctgccctacctaccgctcccgcacttcgtcttcgtctcctttcttgtcgaatcatcatcattcttcgctgatcaatgttgttgacccacgccgctcactctccttccactacgcttctcctcaggggcttaatctagctgagctctgtgttgttagatcgcagaggaggtccgttcagagttctgttgtcgtgcaagatggatcagtagccaccgagtcaagctcgtccgaggaggcgaaagatgtaggggtgttaacgattccttcacttgaagctgacaaggttgtagcagagtctgatggcggtgaacaactttcaacagttagtatcacggtggtgggagcttctggtgatcttgccaagaagaaaatattcccagctcttttcgcactttactatgaaggctgtcttcctgagcattttaccatttttggctatgcaaggagtaagatgacagatgctgaacttagagttatggtcagcaaaacattgacatgtagaattgataagagggcaaactgcggtgaaaagatggaagagtttctcaagagatgtttttaccattcgggtcagtatgattctcaggaacattttgttgcattggacgagaagctcaaggagcatgagggtggaagactttcgaaccgtcttttctatctttcaatccctccaaatatctttgttgacgcggtgaaatgtgcaagctcatctgcttcatctgtcaatggatggactagggtcattgtcgagaaaccttttggccgggactccaaaacctcggctgcattaacaaagtctcttaagcagtacctggaggaagaccaaatatttaggatagaccattacttagggaaggagctggttgagaacttgtcggttcttcgattctcaaatcttatatttgaaccgctatggtcaaggcagtatataaggaacgtgcaattcattttttctgaggatttcggcactgaaggacgcggagggtacttcgacaattacggaataataagagatataatgcagaatcatctgcttcagatattagctcttttcgccatggaaacacctgtgagtttggatgcagaggatatcagaaatgaaaaggtaaaggtactacgttcaatgagaccaataaaacttgaagatgtggtgataggacagtacaagagccacagcataggaggagtcacttatccaagctatactgatgataaaactgtgccaaaaggtagtctgaccccgacatttgcagctgctgcactcttcatcgacaatgcaagatgggatggtgtaccttttctaatgaaagctgggaaagcactaaacacccgaagtgcggagataagagtccagttcaggcatgtgcctggaaatttatataaccggaattctggtactgatcgtgatcagaccacaaatgagcttgtcatccgcgtccaacctgatgaagctatctatttgaaaatcaacaacaaggtccctggtttaggaatgagattagatcagagtaacttaaatcttctctattcagcaaggtattcaaaggagattccagatgcatatgagaggcttttgttagatgcgatcgaaggtgaacgcagattgttcataagaagcgatgaacttgacgctgcttgggcgcttttcactccattgctcaaagagatagaagaaaagaagacaaccccagaattctatccttacggcagtcgtggtccagtcggtgcccattatctagccgcaaaacacaaggtccaatggggagacctaagtcttgatcagtga

SEQ ID NO: 810 - skipped

SEQ ID NO: 811 - DNA, 1584 bp, Arabidopsis thaliana
atgtcaccaaccatatcctcagccgccgcaacaccaaccccttcaccaaatgggtcaacgttctccgccgcactagcacttcttgtacgaaaccgtaattcatgccttcatcaaacttcagatgattcatctccatttccttctgatttcctctttggcacagcttcttctgctttccagtatgaaggtgccttcttaaccgatggaaaaggtctgaacaattgggatgtctttgcccatgaaaaccctgggaaaatagttgatggaagcaatggagacatagctacggaccaatatcatcgatatatggaagatatccaatcaatgaattttcttggagtcaatagttacagattatctatttcctggtctagagtcttacctaatggaagatttggagttattaattataagggaataaagtattacaacaatttgatcgacgctcttattaaaaaagggattacaccatttgtgacgttgaaccacttcgactatcctcaagaactcgagaaccggttcaagagttggttaagctccgagatgcagaaagatttcgggtacttagctgatatatgtttcaaacattttggagaccgagttaaacactggatcacgattaacgaaccaaaccaacatataagcttagcatatcgaagtggtttgtttccaccagcgcggtgctccatgccatacggaaattgtactcacgggaactcagaaactgagccttttatagccgctcataatatgatcctcgcacatgcaaaggcgattcaaatataccgaaccaaatatcaaagagaacaaaagggaatcattggcattgtggtacaaacatcatggtttgaacccataagcgattcgattgctgataaaaatgctgccgagagagctcaatcattttattcaaattggattctagatcccgttgtgtatgggaaatatccggaagaaatggtgaatctacttggatcagctttgccaaaattttcgagcaatgaaatgaacagcctaatgagctataaatcagactttttgggtattaatcactatacaagttacttcatacaagattgtttgatcactgcttgtaattctggagacggagcttctaaaagcgaaggattagccctcaaattggaccggaaaggaaatgtttccatcggagaactgaccgacgtaaattggcagcatattgatcctaacggattcagaaagatgttgaattacctaaaaaataggtaccacaacataccaatgtacatcaccgaaaatggtttcggacagttgcaaaaaccagagacaacagttgaagaacttctgcatgatacaaaaaggatacaatacttgagtggatatttggatgctttgaaagcagcaatgagggatggagcaaatgtgaagggatatttcgcatggtcactattagataattttgaatggttgtacggatacaaggttcgatttgggctattccacgttgattttacaactttgaaaaggacaccaaagcaatcagctacatggtacaagaacttcattgaacagaacgtgaatatagaagatcaaatagataaataa

SEQ ID NO: 812 - DNA, 1593 bp, Arabidopsis thaliana
atggcggtttctagcgccttcgttgttacaccgaagctggagaagctgttagcgaatcaccataatccaacgtattcttcttctccggccccgttggatgtaattgggatacgtgctcttccgatgaacaataggaacaagcgaggtctgatccagagagcgcgttgcgagatttctccgtctaataaggcagctagcatctcagctctcgagcagctcaagacttctgctattgaccgatacactaaggaaagaagcagcattgtggtgattgggcttagcattcacacagctcctgttgagatgcgtgagaagcttgccattccagaagctgaatggccacgagctattgctgaattgtgtggtttgaatcatattgaagaagctgctgtactcagtacctgcaaccgaatggagatttatgttttggctctatctcagcatcgtggagtcaaagaagtgactgagtggatgtctaagacaagtggaatcccggtttcagaaatctgtcagcatcgttttctattgtacaacaaggatgtcacgcaacatatatttgaagtctcagctggtctagactctcttgtcctaggtgaaggtcagatacttgcacaggttaaacaagttgttaaagtaggtcaaggagtcaatggttttgggaggaatatcagtgggctatttaaacacgcaatcacagttggaaagcgtgtcagaacagagacaaatatcgctgctggggctgtttccgttagctcggctgcagttgaacttgctctcatgaagcttcccgaatcttctcatgcatcatctgctaggatgttggtagttggtgctggaaagatggggaagcttgtaatcaagcacttggttgctaaaggttgcaccaaaatggtggttgtgaatcgaagcgaagagaaagttgcagctgtccgcaatgagatgccgcctggcgttgagattatttataaaccccttgatgagatgctgtcttgtgctgcagaagctgatgtagtctttactagcacagcatctgagacaccattattcttgaaggagcaagtagagactctccctcctgttagagatgcgaggctctttgttgatatctctgttcctagaaatgtcgggtcctgcgtcgctgaaatagacggtacacgggttttcaacgtggatgacctcaaggaagtcgttgctgcgaataaagaagacagggtgaggaaagcaatggacgctcaggctataattacagatgaatcaaaacactttgaagcgtggagggactcgttggagacggttccaacaatcaagaaattaaggggatatacagagagaattatagctgcagagattgagaaatccttgcccaaaatgggcattgacatgaacaagaagatgaggaaaacagtagatgatctaatccgaggtatagtgaacaagctcctgcacggtccaatgcagcatttgagatgcgatgggaacgatagcagaacgctgagtgagacactagataacatgcaggctctgaacaggatgtatggacttgatgcagagatactcgaggagaagattagagcaaaggtggaaaaaaagtag

SEQ ID NO: 813 - DNA, 1986 bp, Arabidopsis thaliana
atgtctcgtgaacttattattctctgccaaccaattcttgttctgttccttactctgttttacaattctcatggctacttcgtctcacaaggatctgtaggaatcggcttcaacggttacttcactttaaccaacaccacaaaacacacattcggtcaagctttcgaaaacgagcacgttgaaatcaagaactcatcgacaggtgtcatctcatctttctcagtcaacttcttctttgcgatcgtccctgaacataaccagcaaggctcacacggtatgactttcgtcatctctcccacaagaggccttcccggagcttcctccgatcaatacctcggaatctttaacaaaacaaacaacggtaaagcctcgaataacgttatagctatcgagttagatattcataaagacgaagagtttggagatattgatgataatcatgttgggattaatattaacggtttgagatctgttgcctctgcttctgctggttactatgatgataaagatggaagctttaaaaaactttctttgatcagcagagaggtaatgaggctttccatcgtttatagtcaacctgatcaacagctcaatgttactttattccctgctgagatccctgttccgccactaaaaccgctcttgtctttgaaccgagatctctcgccgtatttgcttgagaaaatgtatcttggattcactgcatcgacggggtcagttggagcaattcattacttgatgggttggttagttaatggtgtaatcgagtatccgagattggagcttagtataccagtccttcctccatatccaaagaaaacatctaatagaacgaaaactgttttagccgtctgcttaacggtatctgtgtttgctgcgtttgtcgcttcgtggatcggtttcgtcttctatttgaggcataagaaggttaaagaggttcttgaagaatgggagattcaatatggacctcataggtttgcttataaggagcttttcaatgccacaaagggtttcaaggagaaacaacttcttggtaaaggaggctttggtcaagtctataaaggaacacttccgggttctgatgcagagatcgctgtgaagcggacttctcatgattcaagacaagggatgagcgagtttctagccgagatatcgaccattggtcgtctcagacatccaaatttagtcaggcttttaggatactgtaggcataaagagaatctctacttggtgtatgactatatgcctaatggaagccttgacaagtatctaaaccgtagcgagaatcaagaacggcttacttgggaacaacgtttcaggatcatcaaagatgttgcaactgctctactacacctgcatcaagaatgggtacaagtcatcattcatcgagatatcaaaccagctaatgttttaatcgacaatgaaatgaatgcgaggctcggggatttcggactggcgaaactgtatgatcagggattcgatcctgaaacatctaaagtagcgggaacattcggatatatcgcaccagagtttctaagaacaggaagagcaaccacaagcactgatgtttacgcctttgggttggtaatgcttgaagtagtgtgtggtagaaggataattgagagacgtgcagcagaaaatgaagaatatcttgtggattggatcttagagctttgggaaaatgggaaaattttcgatgcagcagaggaaagtatacgtcaagaacaaaacaggggacaagttgagcttgttttgaagctaggtgtgttgtgttcgcatcaagctgcatcgataagaccggctatgagtgtggtaatgaggattttgaatggagtttcacagctaccagataatcttcttgatgttgtaagggctgagaaatttagagaatggcctgagacatcaatggaattactactacttgatgtgaatacatcgagttcattggagttaaccgactcttcttttgtctcccacggccgctga

SEQ ID NO: 814 - DNA, 1550 bp, Arabidopsis thaliana
atgttggagaaagagtttttcacggagtatggtgaagcaagtcaatatcagatccaagaagttgttggcaaaggaagctacggagttgttgcttctgcggaatgtccacacacgggaggcaaagtagccatcaagaagatgacaaatgtgtttgaacatgtctcagatgctattcgtatcctcagagagatcaagcttctcaggcttcttcgacatcctgatatcgtggagatcaagcatatcatgcttcctccttgtcgcaaggaattcaaagatatatatgttgtttttgagttgatggagtctgatcttcaccacgttcttaaggtaaatgacgacctcactcctcagcatcatcaattcttcttgtaccaacttcttcgtggcttaaaattcatgcactcagctcatgtgttccatagagatctgaagcctaagaacatcctcgctaatgctgattgcaaaatcaagatctgtgatttaggacttgctcgtgtctcctttactgattccccttctgctgtgttttggactgactacgttgctacaagatggtaccgtgcgccagagctctgtggttccttctattctaactacacgccggcgattgacatgtggagtgttgggtgcatatttgcagagatgctaactggaaaacctttgtttcctggcaaaaacgttgtgcaccagctagaactcgtgactgatctgcttggaactccgtcgccgataactctatccaggattcggaatgagaaggctagaaagtatttgggaaacatgaggcgaaaggatcctgtacctttcacccataaattccccaatatcgatcctgtggcgctgaagttacttcagcgtttgatcgcttttgacccaaaggaccgtccctctgcagaagaggcattggctgatccgtattttcaaggattggcaaatgtggactatgaaccatcgaggcaacctatctcgaaacttgagtttgagtttgagaggaggaaattgactcgcgatgacgtgagggaactcatgtacagagaggaatctcttaaaacttttttttttgttctctttctggatatgaaacagattttggagtatcatccacagatgttgcaagagtatctacaaggagaagagaacataaactctcattttctatacccaagagaaagtgtgtcttactttggtgaatcaatcttgatatccagcggagttgatcagttcaaacaagagtttgcccgactcgaagaacacaacgacgatgaagaggaacacaactccccaccacatcagagaaagtacacttcactccctagagaacgggtgtgctcatcagaagacgaaggttctgattcagttcatgctcaatcgtcttcagcttcagtggtgtttacacctccacagactccaaacacagcaactggcttatcatcacagaaggcgtcacaagtagacaaagcagcaactccggtaaaacggtctgcatgtctaatgaggagtgatagtatctgtgcttcaagatgtgttggtgtctcctctgcagtgtcata

SEQ ID NO: 815 - DNA, 5148 bp, Arabidopsis thaliana
atggtcgacgagtttcaacgcaaaggcgtctctgttttcgccagtgaagactcagcaagcgatgatagatttgcggaggagagtgatgcagctatagcgaaagcaagggtttcagtggtgattttctctgagaatttcgcttcgtccaaaggatgcctaaacgagtttttgaaggtttctaagtgccgacgtagcaagggcctagttgtggttccagttttctacggactcacaaattccatagtgaagaaacattgcttggaactgaaaaagatgtatcctgacgataaggtagacgagtggcggaacgctctatgggacatcgcagacttacgaggaggacacgtatcatctcataagcgaagcgactccgaacttgtggaaaaaattgttgccgacgtgcgtcaaaaacttgaccgtaggggtagaattggagtctactccagattgacgaagatagaatacttgctttgcaagcaaccaggctgcatcatccgcagcttaggtatatggggtatggcaggcataggaaagacgacacttgctagagcagcttatgaccaactttcccgtgactttgaagcttcttgcttcatcgaagacttcgacagggagtttcaggagaagggcttctttgggttgttggagaaacagcttggcgtaaaccctcaagttacaagactgagcattcttttaaaaacattacgcagtaaaagaattcttcttgttctcgatgatgtgcgcaagccactgggtgcaacgagttttctttgtgaatttgactggcttggtcctggaagcttgataatcgtaacctctcaagataagcaagtacttgtccaatgtcaggtcaacgagatatataaggttcaaggcttaaacaagcacgagtctctgcagctgttctccagatgtgcgtttggaaaagatgtaccagatcagaacctcctggagttgtctatgaaattcgttgactatgctaacggaaacccgttagctctcagcatttgtggcaagaatctgaagggcaaaacacctttagatatgaagagtgtagtccttgaactcaagcgacatctttccgacaagattttcgttaaacttaaaagcagctatgatgcacttagtgtcagtgagaaggaaatctttctggacattgtgtttacctttaggggagcaaatgtggacaacgtaatgcaatctcttgccggttgtggattctttccacgagttggaatcgaagctcttgtggacaaaagttttgtaactgtttcagaaaacagagtgcaagtgaataatttgatctacgatgttggcctcaaaatcatcaatgatcaaagcgatgagatagggatgtgttatagattcgtggatgcttccaacagtcaatctcttatagaacataaagaaatccgagaatcagaacagggctatgaagatgttaaagccataaacttggacacttctaacttacccttcaaaggtcatatcgcgtttcagcatatgtataacctaagatatctgacgatttacagctccattaatcctacgaaggatcctgacttgttccttccaggggaccctcaatttctgccgcctgagctaagacttctccactggacatgttatcctctgcactcttttccacaaaactttggttttcagtatcttgtggaactcaatatgccctgcagtaaacttaagaaactttggggaggaaccaagaatcttgaggtcttaaagaggatcacgctcagctgttccgtgcaattacttaacgttgatgaacttcaatattctccaaacatcgaaaaaattgatctcaagggatgtttagagcttcaaagttttccagacacgggtcaattacaacatctccgtattgtggatctctcaacttgcaaaaagataaaaagttttccaaaggtgccaccgtctattaggaaactgcatcttcagggaactggcataagagatctatcctcgttgaatcattcatcagaaagccaaagattaacaaggaagttggaaaatgttagctcttctaaccaagatcaccgtaagcaagtcttgaagctgaaagatagttctcatttgggaagtctgcctgacattgttatttttgagtctcttgaagttcttgatttttctggttgctcagaacttgaagatattcagggtttcccccaaaacctgaaaaggttatatctggctaagactgccataaaagaagttccatcatcgttgtgccaccatatctctaaacttgtcaaactagatatggagaattgcgaaaggcttcgagacttgccgatgggaatgagtaacatgaaatatcttgccgtgctgaaactgtctggctgctcaaatcttgagaatattaaggaactcccaagaaaccttaaagagttatatctagccggcaccgcggtaaaggagttcccatcaacactgcttgagactctctctgaagttgttctattagatttggagaactgcaagaagcttcagggtctgccaacgggaatgagtaaattggaatttcttgtcatgctcaaactgtctggctgctcgaagctggaaattattgttgatcttcctctaaatctaatagagttatatcttgctggcactgccatcagagaattgccaccgtctattggggatctagctctacttgatacattagatctgaagaactgcaatagactccgacacttgccaatggaaatgcacaacttgaatcccctcaaagttcttgatctatcaaactgctcagagcttgaggtattcacaagttctctaccaaaagtcagagaactacgtccagctcctacagtcatgctacttcgatcaaagctgccattttgtttcttcatattttatgaacatagagttactttgtctctttataaggcacgtttgcagtatattcctgaagagatacgttggatgccttcactaaagacattggatcttagtaggaacggtttcacagaggtgccagtaagcatcaaggatttttctaaactactcagtctaaggttacgctattgcgaaaacctcagatcactcccacagcttccccgaagtctacaactcttgaatgcgcacggttgttcatcactgcaattaattactccggacttcaagcagcttcctaggtattacacgttcagtaattgctttggcctaccctcacacatggttagcgaagttttagcgaatgcaccggctattgtagaatgcaggaaaccacagcagggactcgaaaacgcactagcttgcagcttctgtctaccttcacctacaagtcgagattccaaactttatctacaaccaggatcttcaacaatgattattctaaatccaaaaacgagaagtacgctcgtgggctttgcaatattagttgaagtttcattctcaaaggattttcatgatactgctggtttaggctttagatggaatgacaaaaaaggccatgctcataagcgtgataatatttttcattgctgggctccaggcgaagttgttcctaagattaacgacgatcacatgtttgtcttttttgatcttaaaatgcatccaagtatattatttgaaggagatgtcttcggtatcttggctgatctagttgtctttgaaatattcccggtcaacaagcaggagatgcatgtaggcgatagttgcactataacaaaatgtggagtctatgtgattaatgatgcagctggcagctcaagtggaaacacgatgaccccacaatgttcttcaatggattcactgaagcttttagatggtaaaggtaaaaagagattaagagttaactatgctggtttaaaacaaagagaaaaagctttatttctttacatagcatgtttgctcggtggtgagaaggctgatttgctagcacaatttcttgctagtactgactttgtaattgagtctacgctcgaagacttagctggcaggtatctcatagatatatcttccaatggggaagtaatgatgcctcctctgcaacgaaatttttctagagaaatcattcatatgctgcctgctagcacaaaagagttggtatctatggcttcgggctcaccttgcaaccgaaacaatgatgtttttgtgagcttccatggtaaagattttcggaaacaattcatcagtgactttctcaagaagctcgtatacaaaggaattcgtatatgcataggtgataagatcctaagccgctcgctgatcaacaaagttataaaagaatcaagcattgcggttgttgtgttctcggaaaattacgcctcctcaagtttgtgcttgcttcaattgatggagatcatgaagtgctgggaagagttgggtcaagtagtgatgcctattttctacaaggtcaatccttccgatattcggaatcaaagcggacactttggaaaaggtttcaagaaaacttgcaagaagactataaatgatgagcgacaaagatggagtcgtgctttgactgatgcagcaagcattgctggcgaatgttctttgaattgggcatcggatgcagacatgattgaaaaagttgccaatgatattcggaagaagctaatatcatcaaaaaaattagggaaacaaattcagagagtagactgcgaccatgataatccatgggagaccgagtttaataaatgtatagagcggttcttccaattgccatatgatggaaatcatgatgaatctctagtgagccttacaacggagaaggtaatagatatgaagcagacgctgaaagagatatatcaaattacaaaagtaaaactcaagaataatttagttggaaggcggcacatcaataacatttgtttcatgcatatattgtatgagaaatgtgaagagaggtcttctttcaatcctacaagcctgcatacgttgtatgacaatggtataccgtatcaagtatacactaagaggaagaagcacatgagtggagaagagaaagcacccattggtggttgtgtaggatgcttctacatgggtcaaaatcaagggataactaaagctggcggtggccggacaatgccaaccgcttacccggctgcaccacaagccaatcaaggttacaatgctggagctcaaccttaccctcctacggcgtatgctgtctaa

SEQ ID NO: 816 - DNA, 3078 bp, Arabidopsis thaliana
atggctgcttcaggaccaaaaagctcaggtcccagaggttttgggcgacgaacaacagtaggaagtgctcagaaaagaactcagaagaagaatggtgaaaaagatagtaatgccacttctacagcaacaaacgaggtttcagggattagtaagttgcccgcagctaaagtggatgtacagaagcaaagctctgttgttttgaatgagagaaatgtgttagataggtcggatattgaggatggaagtgatcgtttggacaagaaaacaaccgatgatgatgatttgttagaacaaaagttaaaacttgaaagagagaatcttcgtaggaaggaaatagaaacgcttgcagcggaaaatttggcgagaggtgatagaatgtttgtgtatcccgttattgtgaaacctgatgaagacatagaagtgtttctcaacaggaatctgtcgactctgaataacgaacccgatgttttgatcatgggggcgtttaacgaatggagatggaagtctttcacaaggagattggaaaagacctggatccatgaagattggttgtcatgtctccttcatatccccaaagaagcgtataagatggacttcgtgtttttcaatgggcaaagtgtatatgacaacaatgactcaaaagatttttgtgtagagataaaaggtgggatggataaagttgactttgagaattttcttctagaagagaaactgcgagagcaagagaagttagccaaggaagaagctgagagggagaggcaaaaagaagagaagagaagaatcgaagctcaaaaggctgcaattgaagctgatagagcacaagcaaaggcggagactcagaagagacgtgaattgcttcaaccggctattaagaaagctgtagtctcggctgagaatgtttggtacattgagccgagtgatttcaaggctgaagatacagtgaagctatattacaataaaaggtcaggtcctctgactaattccaaagaactgtggttacatggagggtttaataattgggttgatggattatctatcgttgtaaagcttgttaatgctgagttaaaggatgttgatccaaagagcggaaattggtggttcgctgaagttgtagtgcctggcggtgcactagtcattgactgggtctttgctgatggaccacctaaaggagcgtttctgtatgacaataatggttaccaagacttccacgcacttgttcctcaaaaacttcctgaagaactttactggttagaggaagaaaatatgatttttagaaaacttcaggaggataggcggttaaaagaggaagttatgcgtgccaagatggaaaaaacagctcgcttgaaagctgaaactaaggaaagaacactgaaaaagtttctgctatcccagaaagacgtggtttacaccgagcctctagagattcaagcaggaaaccctgtgactgtattgtacaatcctgcaaacacggttttgaatggaaaacctgaagtttggtttagaggctcttttaatcgttggactcaccgcttgggccctttgccacctcagaaaatggaagcaacagatgatgaaagctcacatgtgaagactacggctaaggtcccattggatgcttacatgatggactttgtgttctctgagaaagaggatggcggaatatttgataacaaaaatggtctggattaccatttaccagtcgtgggaggtatttcaaaggaaccaccattgcacattgttcatattgctgttgaaatggcacccatcgcaaaggttggtggcctaggtgatgttgtcactagtctatctcgcgctgttcaagaattaaaccataatgtggatatagtttttccaaagtatgattgcataaagcacaattttgtgaaggacttgcaatttaacagaagctatcactggggaggaactgaaataaaagtttggcatggaaaagtagaaggcctttcggtttacttcttagatccacaaaatggattgtttcagcgaggatgtgtttacggttgtgcagatgatgcaggaagattcggtttcttctgtcatgcggctcttgaatttcttctccaaggaggtttccatccagacattcttcactgtcatgactggtctagtgctccggtttcatggttattcaaggatcattacacacagtacggtttaattaaaacccgtattgtcttcacaattcataatttggaatttggagcgaatgccattggtaaagcaatgacatttgcagacaaagccacaacggtttcaccaacttatgctaaggaagttgctggaaactctgtaatctctgcacatttatacaaatttcacggaattataaacgggattgacccagatatatgggatccatataacgataactttattcccgtaccttatacttcagagaacgttgtagaaggcaaaagagcagccaaggaagaattgcaaaacaggcttggactaaagagtgccgattttccagtagtaggaattattacgcgcttaacacaccagaagggaatacatttgatcaagcacgctatttggcgtaccttggaacggaatggacaggttgtcttattaggttcagctccagatcctcggatccaaaatgattttgtaaacttggcaaaccaattacattcttctcatggtgaccgggctcggcttgttctaacctacgatgaacctctttcccatttgatttatgctggggctgactttattcttgtaccgtcgatatttgagccatgtggactgacacagctcatagccatgagatacggcgctgttcctgttgttagaaaaactggaggactctttgatacggtttttgatgttgaccacgataaagaaagggcacaagctcaagttctagaacctaatggtttcagcttcgacggagctgatgctcctggtgttgattatgctctcaatagggcgatatcggcgtggtacgatggtagagagtggtttaactcgctgtgcaagacggtgatggagcaagactggtcatggaaccgtcctgcacttgagtatcttgagctctatcactctgcacgcaagtaa

SEQ ID NO: 817 - skipped

SEQ ID NO: 818 - DNA, 900 bp, Arabidopsis thaliana
atgactctaataaatcgctcaaaaccatttgtacttctcgtaggcttctcaattatctcaagtttgctattatgggtctcacaagcttccgttgtttcatcaggagattttaacaaagacttctttgtgacatggtctcctacccacgttaacacctccaatgatggtcgatcaagaacccttaaactcgatcaagaatctggagcttctttttcttccattcagacgttcttgttcggccaaatagatatgaagatcaaacttatccgtggaagttctcaaggaaccgtggttgcttattatatgtcctcagatcagcctaaccgggatgagattgactttgagttcctcggaaacgttaatgggcagccttacattctccagacaaatgtctatgccgagggacttgataaccgcgaagaaaggatccatctctggttcgacccagccaaggactttcacacttactctatcttgtggaacattcaccaaattgtatttatggtggatcagattccgataaggttgtatagaaaccatggggagaaaggcgtagcctacccaaggttgcaacctatgagtgtacaggcgagtctatggaacggtgagagctgggctacgcgcggtggacatgacaagattgattggtcaaagggtccatttgtggcttcctttggggattacaagatagacgcttgtatttggataggcaatacaagtttttgtaatggagagagcactgaaaactggtggaacaagaatgagttcagttctttgacaagagtgcaaaagagatggtttaaatgggtgagaaaatatcacttgatttatgattattgccaagattatggaaggttcaataacaagctaccgaaggaatgttctcttcctaaatattga

SEQ ID NO: 819 - DNA, 2028 bp, Arabidopsis thaliana
atgagcaatataaagctaggagttgaagtgataagcgcacagggtctgttacagagagataagcataactcatgtagccctttcgtggagctcaagttcgacaaccagatattccgcgcaacgaccaaacacaacgacccaaatcctgtctggcacgagtgtttttacttcgttgtctctgacccttccgtcttgtcaactcagaggccaacaagcgggacatatgatctcgttgaagagatgaaatttctctacgtgagagttgtgaaagcgcgtgatctccccaacaaagaccttacaggaagcctagacccgtatgtcgtagtaaaaatcggaaacttcaaaggtgttaccacacattttaacaagaatacagatcccgagtggaaccaagtctttgccttcgctaaagataatcttcagtcgaactttcttgaagttatggtcaaggataaagacattctccttgatgattttgttgggatcgttaaattcgatctccgtgaggttcagtctcgcgttcctcctgatagtcctttagctccccagtggtacagactggagaacaagagaggcgagaagaagaattatgagataatgcttgctgacgtcatcatcgtgtctgacaaatcccgtgttccagaggtctttgtgcgagtaaaagtcggtaatcagatgttaaggactaaatttccccagagaagcaataatccaaaatggggtgatgagttcacgtttgtagtcgcggagccgtttgaggataacttggtcctctccgtggaagatcacactgctcctaacagagacgagccagtaggaaaagctgtgattttgatgaatgacatagagaaacggaaaggtacttcggacacgtacgttgttgccaaatacggtcacaaatgggttcggtcacgaactgtgatcaacagcatgaatccaaagtacaatgagcaatacacatgggaggtttttgatcctgcaacggttttaaccatctgcgtctttgacaacgctcatttcgcagcaggagatggcggaaacaagagagatcagccgattgggaaagtccgcattagactctcgactcttcagacgggccgtgtgtacacgcatgcttaccctttacttgttctacaacctactggtcttaagaaaagaggagagcttcacttagcggtgagattcacctgcacatcggtctccagtatgctgatgaaatacacaaaacctctcctgcctaaaatgcattacatactacccttatccacaaaccaacaggaagctcttaagatgcaggctatcaacataattattgttcgtttaggccggtccgagccaccgctgagacgggaagtggttgactatttgacagattggaaaagtcagctgttcagcatgaggagaagcaaagccaacttcaataggttcacgacagtgttctccggtgcgctgtctgtttggaaatggatggaacaagtgtgcacatggaagactcccgtgacgacggctctggtgcacgtgctctacactatgcttgtgacgttcccggagatgattttgccgactgtgtttctgtatatggctgtgattgggatgtggaattacaggtttaagcctagatttcctcctcatatggacgccaaactatcttatgcagacaatgtaaattctgatgagcttgacgaagagtttgataccttcccgaccgtaagggctccggacattgtgaaaatgaggtacgaccggctgagatctgtggccgggaaggtacagtcggtggctggagacatagccgcacaaggagagcgagtgcaagcgttgctgagctggcgtgatccacgcgccaccgcaatattcgtgacgttctgtttcattattgccatggctctctacattaccccttttaaacttgtcgctctgttatccggttactacttcatgcgacatccaaagctccgacaccgcattccctccgctcccgtcaactttttccggcgacttccagccatgaccgactctatgctgtga

SEQ ID NO: 820 - DNA, 1395 bp, Arabidopsis thaliana
atggacaatctccggaaacttaatcttctctctgtctctctaaccataatctttgtctctcttaccatagccaccaacttacctttctttgaagtgaaatatcccaacaacaacccttttgggatgttactacggccgacaccgatcaagaaccaatccttgggtctaccggctcatgtcgggtcagatgagtgtcgggtttggaccaaagcatgttctgatgagattcttaggctgacttatcagccggataacgttgcgtggcttaaacgcgttaggaggacgatccatgagaacccggagctagcgtttgaggagtatgagactagtaggcttgttaggtcggagctggaccgtatgggtatcatgtatagatatccgttagcgaaaacgggtattcgggcttggatcggatccggtggaccgccttttgttgcggttcgggctgatatggacgcactacctattcaggaagcagttgaatgggaacatataagcaaagttgcaggcaaaatgcatgcatgtggtcatgacgcacatgtgactatgcttcttggtgctgcccatattcttaaggctcgtgaacatcttctcaagggaacagtggttctgttattccaaccggctgaagaagctggaaatggtgcaaagaatatgatcgaagacggagctttggatgacgtggaggctatcttcgcggtccatgtgtcccatatccatccaacgggtgtgattggatcaagaagtggtcctttgctcgcgggatgtggaattttccgggcggttatcacttcggaagatagccgtggcgccgctaatctccttcttgcagcttcttccgcggtcattagtcttcaaggcattgtatcccgtgaagctagtcctcttgactctcaggttgtgtcggttacttcatttgatggcggtcatagtctcgatgtggcgccggacacggtggtcctcggtggtactttcagagctttttctaactcaagcttctactacctcaagaaacgtattcaagaggtactcatggatcaggtcggggttttcggttgccaagcgacagtgaacttctttgagaagcagaatgcgatatacccgccaactacgaacaatgatgcaacatacaatcacttgaagaaagtcaccatagatttgctcggagatagccatttcaccttggctccacagatgatgggagccgaagatttcgccttctactcagaaatcatcccagccgctttctacttcattggcataagaaatgaagaactcggatcagtccacattgctcattcaccacatttcatgatcgatgaagatagtttacccgttggagccgcggttcatgccgccgtggctgagagatacttaaatgataaacattcataa

SEQ ID NO: 821 - skipped

SEQ ID NO: 822 - DNA, 345 bp, Arabidopsis thaliana
atggcgtcgtttgatgaagcaccaccaggaaacgccaaggccggtgagaagatcttcaggaccaagtgtgctcagtgtcacaccgtcgaagcaggcgccggtcacaaacaaggacccaatctaaacggtctatttggaagacaatctggtacaactgctggttactcttactctgctgctaacaagaacaaagctgtggaatgggaagagaaggccttgtacgattacttgctcaaccccaagaagtacataccaggtaccaagatggtgttccctgggctaaagaagccgcaagaccgtgctgatctcatcgcctacttgaaggaatctactgcgcctaagtga

SEQ ID NO: 823 - DNA, 339 bp, Arabidopsis thaliana
atggcgtcgttcgacgaagcacctcccggaaaccccaaagccggtgaaaagatcttcagaaccaagtgcgctcagtgtcacaccgtcgagaaaggtgccggtcacaaacaaggaccgaatttgaatggattgtttggaagacaatctggaacaactccaggatattcttactctgctgctaacaaaagcatggctgtgaattgggaggagaagactctttacgattacttgttgaatcctaagaagtacatccctggaacaaaaatggtgtttcctggactgaaaaaaccgcaagatcgtgccgatctcatcgcttatttgaaggaaggtactgcttag

SEQ ID NO: 824 - skipped

SEQ ID NO: 825 - DNA, 3036 bp, Arabidopsis thaliana
atgacgttgcagagaggtttacctcttctcttgcaacagtacacggcgttgttcaagaaaaaccttttgctttcatggcggagcaaacgagccacgtttcttcagctcttcgcttctttcttcttcatccttctcatcttctgtatccaagcagccatggagaagagtttcgcttcctccacggctctcaaaactgttacggatccgacggcgctgatatcgccgccgattccgccttgtgaagataaattcttcgtgaatcttccttgctatgactttgtttggagcggtaatcgtagctccaaggtcacgcagattgttaatgcgattatgaagaataatcctggaagaagtattcctattgagaaggtacgatcattcgtggatcctgaagcggtagatacgtggcttatggcgaatcctttgttagttccaggagctttgcactttattgaaagaaatgctacagtgataagttatggtattcaaactaactcaactccagagatgaatagaggaaggtttgaagatcctacttttaagtttcagatacctcttcaaattgcggctgagcgtgaaatcgcgaggtcgttgataggagatccgaactttaattgggttgttgggtttaaggagtttcctcacccaactattgaagctattgttgcgttggacactataggaccgacttttttccttgcggttgctatgtttggttttgtacttcagattagttctttgattactgagaaagagcttaaacttcgccaggcaatgacgatgatgggtgtttttgacactgcttattggttgtcatggcttacttgggaaggaattcttactgccatctcggcgctcctgacggttctgtttggaatgatgttccagttcgactttttcttgaagaacagtttccctgttgtcttcctacttttcatgcttttccagtttaatttgattggactagcattcatgctatcagcttttatcagtaaatcaacttcagcaacaactgtcggtttctttgtgtttctggttggctttgtaacacagcttgcaacatcaagtgggtttccctatgccaagaagtattctcgtatgatcagggcactttggtcactgttcccacccaataccttttctcagggtttaaagttgctcgctgatgcaacttcaactcctcaagatcctggtattagttggagtaaaagagcagaatgcggtcctaacgacgacactggttgtgtgcttacaattaatgatatctacttgtggcttcttgggactttctttttgtggtttgttttggctctttactttgacaatataactccaaatgcttctggagtaagaaaatctatcttctactttctaaaacctgggtactggaccggcaaaggtggcaaccgagtagaagaaggtggaatttgtagttgtattggttcagttccacctgtggatcacattaccccagatgacgaagatgtccttgaagaggaaactttagttaaacaacattcaatggagggtttagttgatcccaacgttgcagttcaaatacgtggtcttgcaaagacttatcctgggacgacgaagtttggatgctgcaaatgcaagaaaacttccccttttcatgctctgaagggtttgtggatgaatattgccaaagatcaattattctgtcttcttggacccaatggtgcagggaaaacaactactatcaattgtttgacaggcttatttccagttactggtggtgatgcactaatttatggaaattctataagaagctctgttggtatgtccaacatccgtaaaatgattggagtttgtcctcagtttgatattctttgggatgctttgtctggtgaagaacacctcaaactctttgctagcatcaaagggttgccaccttcatcaatcaactcgatggttgagaagtcactggcggaggtaaaactaacagaagcagggaaaatcagggcaggaagttacagtggaggaatgaaacggcgactcagtgttgcagtttctctcattggtgatccaaagctggtcttcctggacgaacctgtatgtaacatttattctgttgatgtttatttatttaagtccctcttccttttctcatgcgtacttgtcatacatgggttacagactacaggcatggacccgatcacgaggagacatgtgtgggatatcatacaggaaaccaagaaaggtcgtgccattatactaacaacacattcgatggaagaagctgatatcttaagtgatcggatagggataatggctaagggtaggctccgctgcattggaacctcgatcaggttgaaatcccgctttggcacaggtttcattgctaacattagctttgttgaaagcaacaaccacaatggcgaagctggttcggattcacgcgagccagtgaagaaattctttaaagatcatctcaaagtcaaaccaatagaagaaaacaaggccttcatgacttttgttatacctcacgacaaagagaatcttttgacaagctttttcgctgagcttcaagacagagaagaagaatttggaatctcagatatccaacttggtcttgctactcttgaagaagtctttttgaacatagcaagaaaagctgaactcgaaagcgctgcggttgatggaacaatggtcactctcgacttaacatctggttcttcagtcgagataccggtaggggcaagatttatcgggataccgggaacagaaactgcagagaatccacgaggagtcatggtggaggtgtattggcaacaagacgagtcaggatcattgtgcatctcaggacactccacagagatgccaattcctgaaaacattcccgtgacagatccggtggcaccaggacatggcggagtaaacttgttgggacggagaggacgaagacaagttcagggaattgtgattgatcctgagtttgctacttttactagaagcggttccacttcttcccgacgtttttctagaagcggttcttcccgacgtttttcatcgtga

SEQ ID NO: 826 - DNA, 2493 bp, Arabidopsis thaliana
atgcatcccttctgttgcgttacaactgtctccgatcactctccttcgatgcctccgttacctgaaccacaaccgcctctaccgaattacgccgccgattttggttcggcgagatccgaaccgattataactcgatctgcttctcaaagttataatcattcaggtcaattcaataacaatcttattcatagtctctcgtttaatcatcaccagagtgatgtaacggatcgattggggcaacgcgttttagctttgccggcggcggttagagaaccaccggttgatgttaagattaacgatatcgttgggaatggaattgctgggattttgtataagtgggtgaattatggtagaggatggagacctaggtggtttgttttgcaagatggtgttctttcttattataagattcatggacctgataagatctttgttagtcctgaaactgagaaaggatctaaagtcattggagatgagtctgctcgtatgatctctaggcataatcgccgtggcggtagcagtagtagttgccagcttcgtcgcaagccattcggagaagtccatctcaaggtttcttcagttagagagagtagatcagatgataagaggttttccatttttactggtaccaagaggcttcatttgcgtgcggagacgcgagaggaccgaacaacttgggttgaggctttacaagctgttaaagatatgtttccaaggatgtctaatagtgagttgatggctccgactaacaatttggctatgtcgacggagaagattaggttaaggttgattgaggaaggagtaagtgagttagctattcaggactgtgagcaaattatgaagtctgagttctcagcacttcagagccagctggtgcttcttaaacagaagcagtggcttctcattgatactcttaggcagttggagacagaaaaggtagatcttgagaacacagttgtagatgaaagtcaaagacaggctgataatggatgttccggtgaattaagacacgagaagttcagtgaaggcactgccactgagtctgatgatgataatgaacgaggtgatgccgccgaggaggaatttgatgaggaagaaaataccttttttgatacacgtgattttctttcttcaagttctttcaagagtagtggttctggttttcgtacatcatcattttcgtccgatgaagatggctttgagtctgaagatgatattgatccttccatcaagtctattggatgcaattatcctcgcgtcaaaaggaggaagaatttacctgatccggttgaaaaagagaaaagtgttagcctttggtcaatgatcaaagacaatatagggaaggatctcacaaaagtctgtcttcctgtttacttcaacgagccactttcttctttacagaaatgttttgaggatttggaatattcgtaccttcttgaccgagcatttgaatatggcaaaaggggaaatagcctcatgaggatacttaatgtagctgcttttgctgtatctgggtatgcatcaactgaaggaagaatttgcaaaccttttaatccattgttaggtgaaacatacgaggcagactatccagacaaaggccttcgatttttttcagaaaaggtcagtcatcatcctatggttgtcgcatgccattgtgatggcaccggatggaaattctggggagacagcaatcttaggagcaaattctggggtcgatctattcagcttgatcctgttggtgtattgactttgcaatttgatgatggagaaatccttcagtggagtaaggtgactacatcaatatacaatctcatacttggtaaactatactgtgatcactatggtactatgcgtattgagggtagtgcagaatactcatgtaaacttaaattcaaggagcagtccatcatagaccgaaatcctcatcaggttcatggtatagttcaaaacaagagtgggaagacagtggcaactatgtttgggaaatgggatgagagcatacactttgtgacgggtgattgttctggaaaagggaaattgagtgaagatatgtcaggagctcaacttctctggaaacggagcaaacctcctggaaacgcaacaaagtataatctaacacgttttgcaatcacattgaatgagcttacacctgggcttaaggagaggctgccaccaacggattcaaggctgcgaccggaccagaggtatctcgagaacggagagtttgaaatggccaacacagaaaagttgcggctggaacagcgacaacgtcagaatgaattagaactcacatgctataaactgggctgtgtgatgagacaggcgaggaagatgcaggagagaggatggaagccgaggtggttcatgaaggagaaaggaagcgagtcttaccgatacaaaggaggttactgggaagcccgagaggatggatcatgggtagactgtccagacatcttcggccacatcgattccgatcaacaaatgatagagtaa

SEQ ID NO: 827 - DNA, 675 bp, Arabidopsis thaliana
atggcggagaaagaagaggatgtgaagcttctaggtttttgggcaagcccttttactcgtagagttgagatggctttcaagctcaaaggcgtgccttacgagtacttggagcaagatatagtgaacaagagccctttgcttctccagataaatccggtttacaagaaggttccggttcttgtctacaaagggaaaatattatccgagtcacatgtgatcctcgaatacatcgaccaaatatggaagaacaatccaattcttcctcaagatccttacgagaaagccatggctttattctgggccaagttcgttgatgaacaggttggaccagtagcttttatgtctgtggcaaaagcagagaagggagtagaggttgcaatcaaggaggctcaagaactctttatgtttcttgagaaggaagtcactggaaaagatttcttcggtggcaaaacaattggatttttggacttggtcgcaggaagtatgatcccgttttgtcttgctcgaggttgggaaggtatgggaattgatatgattccagaggaaaagtttccagagctaaacagatggatcaaaaatttgaaagaaattgagatcgtgagagaatgtattcctcctagagaggaacaaattgagcatatgaagaaagttgtagaaagaatcaaatcagcctaa

SEQ ID NO: 828 - DNA, 675 bp, Arabidopsis thaliana
atggcggagaaagaagagagtgtgaagcttctagggttttgggcaagcccttttagtcgtcgagtcgagatggctctcaaactcaaaggcgtgccatacgaatacttggaagaagatttgcccaacaagacccctttgcttctggagctaaacccgcttcacaagaaagttccggttcttgtccacaatgacaaaatattactcgagtcacatctgattctcgaatacatcgatcagacgtggaagaacagtccaattcttcctcaagatccttacgagaaggccatggctcgattttgggccaagttcatcgatgaccagatcctaacactagggtttaggtcccttgtaaaagcagagaaaggaagagaggttgctattgaagagactcgggaactgcttatgtttcttgagaaagaagtcactggaaaagatttcttcggtggcaagacaatcggattcttggacatgatcgcaggaagtatgatcccattttgtctagctagactttggaaaggtattggaattgatatgattccagaggagaagtttccggaattaaatagatggatcaagaatttggaagaagttgaggcagtgaggggatgtattcctccaagagagaaacaaattgagcgcatgaccaaaattgcagagacaattaagtctgcctaa

SEQ ID NO: 829 - DNA, 678 bp, Arabidopsis thaliana
atggcgaagaaagaagagagtgtgaagcttctagggttttggataagcccttttagtcgtagagtcgagatggctctcaaacttaaaggcgtaccatacgagtacttggaagaagacttacccaaaaagagcactttacttcttgaactaaatccggttcacaagaaggttccggttcttgttcacaatgataaattattatccgagtcacatgtgatcctcgaatacatcgaccaaacttggaataacaatccaattctacctcacgatccctacgagaaggccatggttcggttctgggccaagttcgttgatgagcagatcctaccagttggcttcatgcccctagtaaaagcagagaagggaatagatgttgctattgaggagattcgagaaatgcttatgtttcttgagaaggaagtcactggaaaagatttctttggtggcaagacgatcggattcttggacatggttgcgggaagtatgatcccgttttgtcttgctcgggcttgggaatgtttggggattgatatgactccagaggatacgtttccagaattaaacagatggatcaagaacttgaatgaagttgagatcgtgagggaatgtatacctccaaaagagaaacatattgagcgtatgaagaaaattatagagagagctaagtctacgttctaa

SEQ ID NO: 830 - DNA, 777 bp, Arabidopsis thaliana
atgacagaaggtggagaatattctccggcgatgatgtcagcagagccattcttgaccatgaagaagatgaagaagagcaaccacaacaagaacaatcagagaaggtttagcgacgagcagatcaagtcactggagatgatgtttgagtctgagacaaggcttgagccaaggaagaaggttcaattagctagagagctagggttgcagccgaggcaagtggctatatggtttcagaacaagagggctcgttggaaatccaagcagctcgagactgagtacaacattctcagacaaaactacgacaacttggcttctcagttcgagtccttaaagaaagaaaaacaagctttagtctctgagttgcagaggctaaaagaggcgacgcaaaagaagacacaggaggaggaaaggcagtgtagtggagatcaagcggtggttgctctaagcagcacacatcatgaatcagaaaacgaagagaaccggaggcgtaaaccggaagaggttagaccggagatggagatgaaagatgataagggtcatcatggggttatgtgtgatcatcatgattatgaagatgatgataatggttatagtaacaacatcaagagagagtattttggtgggtttgaggaagaaccagatcacttaatgaacattgttgaaccagctgatagttgtttgacatcatctgatgattggagaggtttcaaatcagatactactactctcttggaccaatccagcaacaattacccttggcgggatttttggtcatga

SEQ ID NO: 831 - DNA, 2660 bp, Arabidopsis thaliana
atgtcgaagatgaagcatcttctacggaagctccacatcggcggaagtagtggcgtcggcggcggatttgctgaccatcacaggttagacgactcgactagacctatgatcgatcctagccctattcttagtactagccctagccctgcatcgacttcttccgtctcttcctctggttttggtaacgcttccacgacaatgccgagactggatacatttgagcctgttggccgtgatctgacggctgttgatggtgttgatttcaatttgatggaggaggagtaccaagtccagttagctatggcgatcagcgtctctgatcctgatccgagagagaatgcagatacagctcagcttgatgccgctaagaggattagccttggggtttctgctccggtcaccgacgctgattccgccgttgactttctctcgcttcgttattggtctggttgctcgattagcgagggtttaaaggaattaggatcttggctattgcctgcagtgttctcttcgttgcgagtatttctgaatcctaattgtggacataaggtcattaattatgaccagaaagtcagggatggattttacgatgtgtatgggattacatctaattctctttcacaggggaagatgccacttcttgttgatcttcaagcgatctctatttcagataatgttgattatgaggtcattctagttaacagattgattgatcctgaactacaagagctagagaggagagtattcgctttggcttcggaatgtccagactttgctcctggtcaggtgtcaagtgatttgactcagaaaattgcaaatatagttgtagagcaaatgggtggccccgttgaaaatgctgatgaagcattgagaaggtggatgcttcggagctatgaactaagaaattctttgaacactactattcttccacttggtcgagttaatgttggtcttgcacgacacagggctttgcttttcaaggtccttgctgataggattaatctcccatgtatgctggtaaaaggcagttactacactggaactgatgatggggctgtgaacttgattaaactagatgacaaaagtcctaattcgttcttcacatgcagtgaatacattattgatttaatgggtgctccgggtgctctgatcccttctgaggttccaagcagttttcttccagtttcttgcacagatacaagagtatttcctgagaatttggactctttgcaacattcatcccccgtacttgagaaagaaattgaaacgccagcattttcagtttcgaaggaagcagattctagatctggtatggtagcaaacttcttcactggaaaccaggaagaaaacagtgacagatgtgctgttgaaaaacatcaaacagagagatttgagcatgattttgggaagttaatgcactcacagcagatatctggtgaaaatatgccaccattttctgggaaaccgacttgtgcacagaaagttaaagttaaaaatgtctcaaagtatgtcataagtgcagcaaagaaccctgaatttgcgcagaaattacatgctgtgttgttagaaagtggtgcatcacctcccccagatttgtttatggatattaacccacataacttgagggggaagaatttgcttcaagagctccgccaagaaagtagcaattctatggtttctggtattccatgctacccagaaaaggtagctgaacaactgagagaatctgaaaggaaccccacagccgagagttaccaacaatcagtggaggtcgatttgtcaatgaagaggaactttgatttggataatactggtaaagcttcttcatccgaaaatatggaggttggcactgctgatggggagtctgctgtttgtgatagtcatgaccaagggattaatccattgctcggagaagctgcaaagtgggaaattatgtgggaagatcttcagattggcgagcgcattggtattggttcatatggagaagtttatcgtgcagagtggaatggaactgaagtggctgttaagaagtttctggaccaagatttctctggtgatgcattgacacagttcaaatctgaaattgaaataatgttgaggttacggcatccaaacgttgttcttttcatgggagcagttactcgtcccccaaatttctccatcctgacagagttcctacccaggggaagtttgtatagattactccatcggccgaaccatcagcttgatgagaagaggagaatgcggatggctcttgatgtggcaaagggaatgaactacttacacaccagccacccgactgttgtacatagggatttaaaatctccaaaccttcttgttgataaaaattgggttgtgaaggtttgtgattttggattgtcccgcatgaaacaccacacatatttgtcctcgaaatcaactgcaggaacgcctgagtggatggctccagaagtgttgaggaatgaaccggctaatgagaaatgtgacgtgtacagctttggtgtcatattgtgggaattagctacttcacgcgtcccctggaaaggtttgaacccgatgcaagtcgttggagctgtgggattccagaatcgacgccttgaaatcccagatgatatcgatctaactgtggcacagataatccgtgaatgttggcaaacgta

SEQ ID NO: 832 - DNA, 762 bp, Arabidopsis thaliana
atgtacactccatcatacttaaaatattcaataatctcaattatatccgtattattcctccaaggaactcatggagacgacggaggttggcaaggtggtcacgccacgttttacggcggcgaagatgcttccggcaccatgggcggagcttgtggctatggaaatttgtatggccaaggttacgggacgaacacggcggctttaagtacggctctattcaacaacggactcacgtgtggcgcgtgctatgagatgaagtgtaacgatgacccgaggtggtgtctcgggtcaaccatcaccgtcacagctacaaacttttgcccacctaaccctggcctctccaacgataatggaggttggtgcaatcctcctcttcagcatttcgacctcgccgagccagcttttcttcagatcgctcagtatcgtgccggcattgttcctgtctctttccgaagagtaccatgtatgaagaaaggaggaataaggtttacgatcaacggacactcatacttcaacctcgttctgatctccaacgtaggaggagcaggagacgtacacgccgtctcaatcaaaggctcaaaaacacagtcgtggcaagcgatgtctagaaactggggacaaaactggcagagcaattcatacatgaacgaccaaagcctttccttccaggtaacgaccagcgatggtcgcacactcgttagcaacgacgtggctccttctaattggcagttcggacaaacctaccaaggtggtcagttctga

SEQ ID NO: 833 - DNA, 1107 bp, Arabidopsis thaliana
atggagataacaaacgtgatggaatatgagaagatcgcaaaggagaaattaccaaagatggtttatgattactatgcatctggtgctgaagatcaatggactcttcaagagaatcgaaacgctttctctaggattctatttaggcctcggattcttatcgatgtaagcaagattgatgtgagcacaacggttttagggtttaatatttctatgccaattatgattgctcctactgcaatgcagaaaatggctcatcctgatggcgagcttgcaaccgcgagagctacttctgctgctggaacaatcatgactttatcttcatgggctacttgtagtgttgaggaagttgcttcaaccggaccagggattcgttttttccaactttatgtttataaggatagaaatgtggttatacagcttgtgaaacgagctgaagaagctggattcaaagctattgctcttactgtagatactccaaggcttggacgcagagaatctgacatcaaaaacagattcgcgcttcctcgaggtctaacgttgaagaacttcgaagggttggatcttgggaaaatagacaagacgaatgactcagggctagcttcatatgttgctggtcaagttgatcaatcacttagctggaaggatataaaatggctccaatctatcacaagcttgccaattcttgtcaagggtgttattacagctgaggatgcaagaattgctgttgaatatggagctgcagggataatagtctctaaccacggagctcgtcagctagattatgttcctgcaactatagtggccttagaagaggtggttaaagccgtggagggtcggattccggtttttcttgacggtggggttcgccgtggaaccgatgtctttaaggcattggctcttggcgcttcaggtgtctttgtcgggaggccgagcttgttctcgcttgcagcggatggagaagcgggagttaggaagatgctacaaatgctaagagacgagtttgagcttacaatggcactaagtggttgccgttcactgagagagatcagccgaacccacatcaagactgattgggacactcctcattacctctcggccaagctgtag

SEQ ID NO: 834 - DNA, 579 bp, Arabidopsis thaliana
atggtgtctatgctgactaatgttgtctctggtgagaccgaaccctcggcatctgcgacatggacgatgggtcataagagagaaagagaagagttttctttgcctcctcaaccattgattaccggttcagctgtgactaaagaatgtgaaagctcaatgtccttggagaggccaaaaaaatatagaggagtaaggcaacgaccatggggaaaatgggcggcggagattcgagacccacacaaggcgacacgtgtatggcttgggacattcgagacagccgaggccgccgcaagagcctatgatgcggcagcacttcgctttagaggaagcaaagcaaagcttaatttccccgaaaatgttggaactcagacgattcaacgaaattctcatttcttgcaaaactctatgcaaccttctctgacatacatcgatcaatgtccaactctattatcttactctcgatgtatggagcaacaacaaccattagtaggcatgttgcagccaacagaagaggaaaatcactttttcgaaaaaccatggaccgaatatgatcaatacaattactcctcttttggttaa

SEQ ID NO: 835 - skipped

SEQ ID NO: 836 - DNA, 528 bp, Arabidopsis thaliana
atgtggttttttggatcgaaaggagcatctggattctcttctcgttccacagcagaggaagtcacacatggtgttgatgggactggtctcactgccattgtcacaggagcatcaagtggtataggtgtagaaacagctcgtgttcttgcactgcgtggtgtgcatgtggttatggcggtgagaaacactggcgccggtgctaaagttaaggaagatattgtcaagcaagtccctggagctaaagttgatgtcatggagttagaactcagctcaatggaatctgtcaggaaatttgcatctgagtacaaatctgctggagctgttggtgcagtggctaaatatatggtcaagtctgttccgcagggggcggcaacaacttgctatgtggcattgaatccacaggttgcaggagttacaggggaatacttctcagatagcaacattgctaaaccaatagaacttgtcaaagatacagaattggcgaagaagctttgggatttcagcactaagcttactgattcgcaatga

SEQ ID NO: 837 - skipped

SEQ ID NO: 838 - DNA, 1554 bp, Arabidopsis thaliana
atggcttttacgcacgtttgtttatggacgttagtcgccttcgtgctgacgtggacggtgttctaccttaccaacatgaagaagaaggcgacggatttggctgatacggtggctgaggatcaaaaagacggtgctgctgacgtcattatcgtcggggctggtgtaggtggttcggctctcgcatatgctcttgctaaggatgggcgtcgagtacatgtgatcgagagggacatgagagaaccagaaagaatgatgggtgagtttatgcaacctggcggacgactcatgctttctaaacttggccttcaagattgcttggaagacatagatgcacagaaagccacgggtttggcagtttataaagatggaaaagaagcagacgcaccttttccagtggataacaacaatttttcttatgaaccttctgctcgatcttttcacaatggccgattcgtccaacaactgcgtcgaaaggctttttctctttccaatgtgcgcctggaagaaggaacggtgaagtctttactagaagaaaaaggagtggtcaaaggagtgacatacaagaataaagaaggcgaagaaacaacagccttggcacctctcactgtggtatgcgacggttgctactcaaaccttcgtcggtctcttaatgatgacaacaatgctgagattatgtcgtacatagttggttacatctcaaagaattgtcggcttgaagaacccgaaaagctacacttgatattgtctaaaccatctttcaccatggtataccaaataagcagcactgacgttcgttgtggttttgaggttctccccgaaaattttccttctattgcaaatggtgaaatgtctactttcatgaagaatactatagttcctcaggtacctccaaaactccgcaaaatatttttgaaaggtatagatgagggagcacacataaaagtggtgccggcaaagcgcatgacatctactttaagcaagaagaaaggtgtgattgtattgggagatgcattcaatatgcgtcatccagttgttgcatctggaatgatggttttactgtcggacattctcattctacgccgtcttcttcagccattaagcaacctcggcgatgcaaacaaagtctcagaagttatcaattccttttatgatatccgcaagccaatgtcggcgacggttaacacattgggaaatgcattttctcaagtactaattggatcaacggatgaagcaaaagaggcaatgagacagggtgtctatgattacctttgtagtggcgggtttcgtacgtcagggatgatggctctgctcggcggcatgaatcctcgtcctctctctctcgtctatcatctttgtgccatcactctatcctccattggccaactgctctctccatttccctctccccttcgcatttggcatagcctcaagctttttggtttggccatgaaaatgttggttcccaatctcaaagctgaaggagttagccaaatgttgtttccagcaaatgcagccgcgtatcacaaaagctatatggctgcaaccactctctaa

SEQ ID NO: 839 - skipped

SEQ ID NO: 840 - DNA, 1503 bp, Arabidopsis thaliana
atggtcaattttcttttggttttatgttattgtagacttatcctaatccattgcaagacaatccagcttactcagtggttaagtaagtcctttctcacagatgttttggtgactaaggttcctaattgtgtcctatggcaatactttgttgatgctgatgacagtgttcctcaaaagatcgttgttcacaaggatggtccaagggggattcattttagacgagccgggccacgtcagaaggtatacttcgaatctgatgaagtgcatgcttgcatagttacctgtggaggtctttgtcctggccttaataccgtgattagagaaatagtgagcagtctatcttatatgtatggagtgaagagaatactgggaatagatgtaagtttctgtgattgtaatctccttcttaccaaaacaaacacgggtggatatagaggcttttatgctaagaatactgtctccttggactctaaagttgtaaatgatatccataagcgtggagggactatccttgggacctcacgaggtggtcacgataccacaaagatagttgacagcattcaagatcgaggaatcaatcaggtttacattataggaggagatggaacacagcgaggagcatctgtcatatttgaggaaattagaagacgtggcctgaaagttgcagttattggaatcccgaaaacaatcgataatgacatacctgtgatagacaaatcttttgggtttgacactgctgtagaagaggctcaacgagctattaatgcagcacatgtggaagccgagagtatagagaatggtatcggagttgtcaagcttatgggtcgctacagcgggttcatagcgatgtatgccactctagcaagcagagatgtggactgctgtttgattccggagtcaccattttacctggaaggagaaggcggactgtttgagtacatagagaaacgactcaaggagagcggtcacatggttcttgtgattgcagaaggtgcaggacaagatctaatgtcgaagagcatggaatctatgacactcaaagatgcatctggtaacaaacttcttaaagatgttggcctttggctgtcacaaagcatcaaggatcattttaatcagaagaagatggtgatgaacctcaagtacatagatccaacatacatgattcgagctgttcctagcaatgcgtcagacaatgtttattgtacacttctggctcagagtgcagtgcacggtgcaatggctggatacactggctatatcagtggtctagtgaacggaagacaaacctacatacccttttacaggataacggagaaacagaaccatgtggtgatcacagacaggatgtgggcaaggctactctcttcgacaaaccagccgagtttcttgggccccaaagatgtctttgataataaagagaaaccgatgtcggctctccttgacgatggtaactgcaatggcgtggtggatgttcctccagtcaccaaagagatcaccaagtga

SEQ ID NO: 841 - DNA, 710 bp, Arabidopsis thaliana
atgtattcatctccaagttcttggagctcatcacaagaatcactcttatggaacgagagctgtttcttggatcaatcatctgaacctcaagccttcttttgccctaattatgattactccgatgactttttctcatttgagtcaccggagatgatgattaaggaagaaattcaaaacggcgacgtttctaactccgaagaagaagaaaaggttggaattgatgaagaaagatcatacagaggagtgaggaaaaggccgtgggggaaatttgcagcggagataagagattcaacgaggaatggaattagggtttggctcgggacatttgacaaagccgaggaagccgctcttgcttatgatcaagcggctttcgccacaaaaggatctcttgcaacacttaatttcccggtggaagtggttagagagtcgctaaagaaaatggagaatgtgaatcttcatgatggaggatctccggttatggccttgaagagaaaacattctcttcgaaaccggcctagagggaaaaagcgatcctcttcttcttcttcttcttcttctaattcttcttcttgctcttcttcttcgtctacttcttcaacatcaagaagtagtagtaagcagagtgttgtgaagcaagaaagtggtacacttgtggtttttgaagatttaggtgctgagtatttagaacaacttcttatgagctcatgttg

SEQ ID NO: 842 - DNA, 1730 bp, Arabidopsis thaliana
atggatcaaaaagttagacagtttgaggtttgcactcaagacggtagcgttgatcgtcacggcaatccagctatccgagctaataccggcaaatggctcactgctattctcattctaggagtgaatttggttctgtttctgactcgagtgatgggacaagacaatgcagaagcggctaataatgttagtaaatggacaggaactgtctatatcttctctttgcttggtgctttcctcagtgactcttattggggacgttacaagacttgtgctatctttcaagcaagtttcgttgcagggttgatgatgttatctttatctactggtgcgttattgcttgaaccaagtggttgtggagttgaagattcgccgtgtaagcctcattcgacgtttaagacggttctgttttatctgtcggtgtatctaatcgcgttagggtatggtggttatcagccgaacatagctacttttggagctgatcagtttgatgcggaggattccgttgaaggacactcgaaaatcgcgtttttcagttacttttacttggctctgaatcttggatcgctcttctcaaatactgtcttgggttactttgaggatcaaggggaatggccgcttggattttgggcgtctgctggctctgcttttgcggggttagtgcttttcttgattggcacgccaaagtaccgacactttacgcctagagagagtccttggtctagattctgccaagtgttggttgctgcaacaagaaaggctaagattgatgtgcaccatgaagagttgaatctctatgattctgagactcaatacactggagataagaagattcttcataccaaaggcttcagattcttggatagagctgctattgttacacctgatgatgaggctgagaaagtagagagcggatcgaaatacgatccatggaggctctgctcggtgactcaagtcgaagaagtgaaatgtgtattaagactcttaccaatctggctctgcaccatcctctactctgtggttttcacccaaatggcttcactgttcgttgtgcaaggagcagcgatgaagacaaacatcaaaaacttccggattccagcttcaagcatgtctagtttcgacattctcagtgtcgccttcttcatcttcgcatacaggcggtttcttgatccactctttgcaagacttaacaaaacagaacgcaacaaaggtctcactgagcttcagaggatggggattgggcttgtgattgcgataatggcgatgatttccgcaggaatcgtagagatacacagactgaaaaataaggaaccggaaagtgctacttcgatctcaagctccagcactttgagcattttttggcaagtacctcagtacatgttgataggtgcatcagaagtgttcatgtacgttggtcaactcgagttcttcaacagccaagcaccaaccgggctaaagagctttgcaagcgcgctatgtatggcttcaatatctcttgggaactatgtaagcagtttgttagtttccattgtcatgaagatctctacaacagatgatgtgcatggctggattcctgaaaatctcaacaaaggacacttggagagattctacttccttttagctggtctaaccgctgctgatttcgtggtttacttgatttgtgccaaatggtacaagtatattaaatctgaagcaagtttctctgagtccgtaactgaagaggaggaagtctg

SEQ ID NO: 843 - DNA, 1440 bp, Arabidopsis thaliana
atggagtctaagtggctctttggtaggaaacaagaagctgaagttggacccttttctgcttggaatataacaggaacttatagaggtttgccgcatgcccttctccattttttttacgtcttttacacttcaggattgtctacgatgttgtggcttaatgttttagactacttatcaaatgtaaagcgggtattttcaggaacttggaagtttctgaattccttaaatagctcttcgaagtttcaagactttcaaaaagaaaatggtaattctgtggttgagttagtagcagttccaacgaagataactggtgtgcattatgttcagcttggaattttctcctctcaagtgtttcaagaatctccaagagacagattactgaaacggaaactttctccagtaaatgagatggagaagcactgtaatatcgaaatagcagctcaagtatcccgtgtggcttctagtgaaaataatggagacaaaaattattatcacatggaaggattgatggaaagtcctggggtaggcgatgacggagattgtttttcccctttgttactgaacgcaacttctgtaaatgttgaagtctactataacaaagctgtgaactatacactgatggttcttctgttgatccggcaaatggagcacgtgttaaacctaaagcttactacttctcatgcagaatctctatttaatgcatttgcaaccgctgcgttcttcaagttcgtagtcttttcgatttttgagatgagatatcttctggctatatggaaagcaacccgtccttccaatagcggagagggttgggaaacaatgaggagagaactgtcctttctgtacagtcgtttctatgggatccttcttggaggcattttgataatgtaccagttccacaactacatgcagccgattctccttctcatgtactcattttggataccacaaatagtcgccaatgttgtccgggattcaagaaagcctctgcacccatattacatcttgggcatgacagctacacggttagctataccgttatatgtttttggatgcccacacaacttcatgcgtgtagagcccaacaagcattattttggttcacgctgctttgttccccgtcagatgctaccagagaaatacaactaccaccgaagatttaatcgggatgtaagccgcaccactgattgtgttatctgcatgaccgctattgatctcagacagcataccagtgattgcatggtactgcagttttttcctgcttctcttaactatattttttccccaatagacagaatcatgagtgtggttgttctgaaaacagagatggatggatataaaaatggagtgtccaacttgtcggcggtctcttcctccagcatagaggatgttttcggtttgttaggatgtacagacttcactcagattattgcgggtctatag

SEQ ID NO: 844 - skipped

SEQ ID NO: 845 - DNA, 1224 bp, Arabidopsis thaliana
atggaagaagaaggcagcccagatatcatcatcgttggcgccggtatctccggcctttccaccgctgttggactacacaggcttgggatcagaagcatggtgctggaatcttcggagacactgagagcgacaggatttgcatttaccacttggttcaatgcttggaaggccatggaagctctcggcgtttctcagcatattcgcagtctccatgatcgccttgaaggatgggtggttggaacaatttctgcaggaactcctcccacagagatgctgtttccagaatccgaagaatatgagtctcgatgcgtacagaggaagctgttgttagaggctctagcaggtgagttgcctgaagagaccatcaggttttcgtctaaggttgttcatattgaattgtctggatgctacaagaaggttcatctctccgacgggaccattctcaaaaccaaggttttggtagggtgcgatggagtgtactcagtggttggtaagtggctaggcttcaaaaatcccgctacaactgcccggttagcaatccgagggctcacacattttccggaaggccatggatttgggaaaaggttcttccagttttatggagacggcgttcgttccggttttatcccatgtgaccacaacactgtctactggttcctaacccacacctccactgatatagatgaggagacaaattcggaaatcctcaaagagtttgtgctgaacaagatcaaagacttgcctgaaaacattaagaatgtggtggagaccactgatcttgatagcatggtgatgtctcaactgaagtaccgacctccatgggaactgctatggtcaaacatcacaaaagacaacgtgtgcgttgcaggagatgcacttcacccaatgactcctgatatcggacaaggaggttgctcagccatggaggatggagttatccttgctcgttgtctaggtgaagcgataaaggcaaagagtctgaaaggtgaaacagaagaaaatgaagaagagggttataagaggattgaagaaggtttgaagaagtatgcaggagaaaggaaatggagaagcattgatcttataacaacggcatatacagtaggattcatacagcagagcagagggaagtggatgaacatgttcagagacaggttcctgtcgtcttacctttctaggatgctgctgaaaaagtcccatttcgattgcggaagccttgtcccatga

SEQ ID NO: 846 - skipped

SEQ ID NO: 847 - DNA, 975 bp, Arabidopsis thaliana
atggcggataagctcactgacgatcagattacagaatacagggaatctttcaggttattcgacaagaatggtgatggttccattacgaaaaaggagctcggtaccatgatgcgttcaatcggtgaaaaaccgacaaaagctgatcttcaggacttgatgaacgaagcggatttagatggtgatggaaccatcgatttccctgagttcttgtgcgtaatggctaagaatcaaggtcatgatcaagcgccgcgtcacactaaaaaaacaatggcggataagctcactgacgatcagattacagagtacagggaatctttcaggttattcgacaagaatggtgatggttccattacgaaaaaggagctccgtaccgtgatgttttccctcggtaaaaaccggacaaaagctgatcttcaggacatgatgaacgaagtggatttagatggtgatggaaccatcgatttccctgagttcttgtacctaatggctaagaatcaaggtcatgatcaagcgccgcgtcacactaaaaaaacaatggtggattatcagctcactgacgatcagatcttagaattcagggaagccttccgcgtattcgacaagaatggtgatggttacattaccgtgaatgagctccgtactactatgcgctcccttggtgaaacccaaacaaaagctgagctccaggacatgatcaacgaagcggatgcagatggtgacggaaccatcagtttctctgagtttgtgtgtgtaatgactggtaaaatgattgacactcagtctaagaaagaaacgtacagagttgtgaatcaaggtcagggtcaagtgcagcgtcacactagaaatgacagagctggtggcaccaattgggagagggacatagcggtcggggttgccagcaatatcatcgcttcgccaatttccgacttcatgaaagataggtttaaagatttgttcgaagcgctgttatcttga

SEQ ID NO: 848 - DNA, 1329 bp, Arabidopsis thaliana
atggatttctcagggagcttctttgtcatcttcgttaccttcttctttctccctcctctgtcttcagctgggagctacgattctggttcgggtctcgagtcactcgctcgcgggatgcttcattcagccaaggatcctgagttcttcgagtggatgagaggaattaggagaaagattcatgagaacccagagacagggtttcaggagttcaaaacgagtcaactcgttcgagacgagcttgactcgcttggagtgaagtataagtatcctgtggcgaagactggcgtcgtcgcttggatcggatcctgttcgaaacctgttttcggacttagagccgacatggacgcacttccgttacaggaattagtggaatgggaatcgaaaagtaaagtagatggaaagatgcatgcttgtggtcatgatactcatgttgctatgcttcttggtgctgctaagcttcttcaaaccacaaaacacctcatcaaggggacagtaaaacttgtgtttcaaccaggcgaggaaggttatgcaggtgcttatgaaatgctaaaagacgagattctagacgacttagatgggatactcagtgttcatgtctttccatcgatcccatcaggtggtattggttctaggcctgggaccgttcttgcaggtgcaggattgtttacagtcacggttcacggtcaaggtagccacgcagctacaccgcacttctctaaagacccggttcttgcagcttcttccgctgttgttgccttgcaacagattgtttcgcgggaactggatccactcgaagctggtgtggttacagttggatatattgaaggaggtcatgctcaaaacgtaataccgcagagtgcgaaatttggaggtactttcagaagcttaagcaacgatgggcttctatttatccaaagacggatcaaagagatttcagaggcacaagcatcggtataccgatgcaaagcagaagtaaacttcgaagagaaaaagccgtcgcttcacccggtaatgaataacgacgagggcttatacgagcacggtaaaaaagtagcggaagcgatgattggaaagaataacttccatgatttcccggtgacaatgggaggagaggatttcagcttcttcactcaaaagactaaggctgcgattttcgtgctgggggtaaagaatgagacgctaggcgctggtaagccgcttcactcgccttacttctttgttgatgaagaagctcttcctgttggggctgctcttcacgcagctatggccgtttcttatttggacgaacatggtcatagccatgaagaagaggttaagagtgaattatag

SEQ ID NO: 849 - DNA, 1272 bp, Arabidopsis thaliana
atggcggatgttcttatgaatctgtggaacttatctacttgtctgttttcatttcatgtttactatactatggaccctgagagtatcatggctgctgatgggactgattctgctcctgcaaatggtggtttagcaatggaaaatgtatgtgttaaagaaaatggggctgtttctgtcgaaaccgtggacactacttcagaaagtcagaatgagaattcggcaaacagttccactttggatacaattgaacacgtcaaggaggcagctgagggcacacaagttgaacatgtagatgattcaaagtgtatgaaaggcgaaaaagctcaacggaagccaaggcatgagaaactatcaggtggtaagaataattcatcggttcacatcaaaaagagcaaagagggcaaaagtgcagatgctaaagtggcagcatcaaatggttctgttgctcctaatgtacagacaacaaatcctcttaagagcaaatcattcaatgggcgagaggcacaagtcacaaaggtaatcatccctcacaatttgcttctaggtttcttcgctttagcttatgcatatttggatcaagggaagcatgactctgcacctgctgaaagcgctgatggggagaaggtgaaaccaaagtctcaaaagaaacaagcccatgagacatctgaagatgatactcagtcttctaatccgaaagcagacgatggaaaacctcgtaaagttggtgcacttccaaattatggattcagtttcaaatgtgaccaacgggctgaaaagagaaaagagttctatgttaagcttgaggagaagactcatgcaaaagaagaggaaattaatagcatgcaagccaagtccaagatgcttggcctcctccaaaacaaaattcttggtttctcgcaggaaacacaagaagctgagcttaggatgctaaggaagagtttgaacttcaaagccacacctatgcctagcttttatcaagaacctcagccgcctaaaacagagttaaagaagaaaacagttctccccgatggaaaacccgccccagcaaaagctgccataatcccagcaaaggtaagacctgagaaaaagaaacttgaaaaagatgcagaaaccgtaaaccagacttcacatcccacagaagaggaagcacaagtgacagtatcatccaatgctgatgtagaagattcacatgagactgtatctccaaggatgaatgaagacagagccgacaagtccattgaggtatctgaagcggttgctgttgagcattaa

SEQ ID NO: 850 - DNA, 1155 bp, Arabidopsis thaliana
atggagggtgttagtgcaactatgcataagttaaggccttatttgttaatgatctttttgcaatttggagcagcaggaacatatattgttattatggccactcttaaccaaggccagaaccgttacgtcgtaattgtgtatcgtaatcttgtggctgctcttgtccttgcaccttttgcactcatctttgaaaggaaagtgaggccgaagatgacactatcggttttgtggaaaataatggcacttggtttcttagagccagtcttggatcagggttttggttacttggggatgaacatgacatcagcaacatatacatctgcgatcatgaacattcttccttctgtcacatttataatagcttggattttaagaatggagaaagttaacatagcggaggtacgaagcaaagcaaagatcattgggacattggtgggtcttggaggggcactagtaatgacattgtacaaaggtccgcttattcctttaccgtggtctaacccgaatatggatcaacaaaacggacatacaaataattcacaagaccataacaattgggttgttggaaccttgttgattctcctcggttgtgttgcttggtctggtttttatgttttacagtcgataacaataaagacgtaccctgccgatctttcattatcagccttaatatgcctagccggggctgtccaaagcttcgcggtagcgcttgtggtggagagacaccctagcggatgggcggttggttgggatgcaaggctttttgcacctctttatacaggaatagttagctcggggataacgtactatgttcaagggatggttatgaagacgagagggccagtttttgttactgcctttaaccctctctgcatgattcttgtagctctcattgcctcttttattcttcatgaacaaatccatttcggatgtgtaataggaggggcagtgatcgccgcgggtttgtatatggttgtttggggaaaaggaaaagactatgaagtatccggattagatatccttgaaaagaatagcctccaagaattgcctatcacaactaaaagtgaggatgacaacaaattggtttcttctataagcgacaacagcaatgtgaccattcctggtggtgcgcatagtaacacatctggaatataa

SEQ ID NO: 851 - DNA, 2337 bp, Arabidopsis thaliana
atgaacaagacacaaacacaacagaaacttaaccaaagacatatctctctctcctcaaacccacctcttgtctctatgggatcgcaactctcaaacgcaatcgacggtaaagataacaccaaaaccatcggatcagcggatccggaccagcttatggagatcgaatccttggagaagatcttaaattacaagttcaaagacaagagtttgttgctgaaagcgttcacagacgctagttacgttgatgacaagagtgaatcgtacgaactcctagaacttttaggagattcgatcctaaatatgggtataatctatgattttattaagctctaccctaaagaagcacctggtccgttgaccaagctccgagccgtcaacgtagataccgagaaattggcacgggtcgctgtaaatcaccaactctatagctatctccgtcataagaaacccttgcttgaggagcaaatactagaatttgtggaagccatggaaaaatatccattacattcaaatggtcttttaaaagttcctaaagttctagcagacatagtagagtctaccattggagctatcttcatggactgcaactccaccgagaccgtctggaagatttcgaatcatcagaaaatggatttcgagcttagatcagcgaaagagaagcttgaaagagagcagagagagaggaagcaaagagcgaaactgaaactcgaacgcgagaagaaatcaaaggaagctgcgattaagcaacgcgaagccattgaagctgctcaaagagctagaagacttgacgccatcgaagcccagattaaggtcctctatctctattcttactgggctgatcaacatatgcaagagagtttagtatctggagatggaatagtgtttgaacgagtcttccaagctgtttcttttcaaggaaatggagataagattaaactaccaccatcatgttttactgagttgtctgatcaaggagctttcgataaaggtcctttgtattttgagctctctgttgttgaccatgcggataataaaaagacaacacattctggtgttcttgagtttactgctgaagatggcactattggacttcctccacatgtgtggagcaatttgttttcaacgcatgatccaatggatgttcctttggtggaaattcggtatatccgattgcctaaaggcagttacgcgaagcttcaacctgataaccttggtttctcggatttgcctaaccataaagcaatacttgaaactattcttcgtcaacatgctacactttctttagacgatgttctcttggttaattatgggcaggtctcttacaagcttcaggttcttgagttaagacctgccactagcatttcggttctggagactgacattgaggttgatattgttagtccagatatagtttcagatcaaccgaatcagcatgtgctaaagccgcttcaatatgggaaatctgaatctggaacagttgaggaaggtcggtatgattactataagtttgtgattgacgaggctactgtagaaaaagtaatggcaggaagcgtcaaagttattgtaaaggtagatgtggagaaagttggagcggatacggatctctatgtgtcaaagcacccggttctatttccatctcttaatcaacacgagtggtcttcacacgacgtgggttcaaagaccttgatcttggtatcaaaggagagggctttgagctcagggacttacagtataggtgtttacggcttcaaaggaacagtcaagtaccaggtctcagtactggtccaagaaagcattgatggagctaaggttggggaacgggctgtatcatcttcgtcagatgttgatacagtagaatgtaggaactgtaagcattcaattccaagcaggagtatcgcgttgcacgaggtgtactgtagcagacacaacgtggtttgtaaccatcacgggtgtggaatcgttctcagagtcgaagaggcgaaaaaccatttgcactgtgaaaaatgcgggaaagcattgcagccaacagagatggagaaacatttaaaagttttccatgaaccactcacttgtggctgcggaatagtacttgagaaagaacagatggttcaacatcaagggaaagattgtcctcttcgcctaatcgcgtgtagattctgtggagatatggtggaagcgggtaactctgcagctgatactagagacaggatgagaggaatgtctgaacatgagagtacttgtggttcaagaactgcaccatgcgactcatgtggtcgatctgtgatgctcaaagacatggacattcaccagattgctgttcatggcaagagtagctga

SEQ ID NO: 852 - DNA, 894 bp, Arabidopsis thaliana
atggtacttgccgaggttccaaagcttgcctctgctgctgagtacttcttcaaaaggggtgtgcaaggaaaacagtttcgttcaactattttgctgctgatggcgacagctctgaatgtacgagttccagaagcattgattggggaatcaacagatatagtcacatcagaattacgcgtaaggcaacggggtattgctgaaatcactgaaatgatacacgtcgcaagtctactgcacgatgatgtcttggatgatgccgatacaaggcgtggtgttggttccttaaatgttgtaatgggtaacaaggttgtagcattacttgcaactgctgtagaacatcttgttaccggtgaaaccatggagataactagttcaaccgagcagcgttatagtatggactactacatgcagaagacatattataagacagcatcgctaatctctaacagctgcaaagctgttgccgttctcactggacaaacagcagaagttgccgtgttagcttttgagtatgggaggaatctgggtttagcattccaattaatagacgacattcttgatttcacgggcacatctgcctctctcggaaagggatcgttgtcagatattcgccatggagtcataacagccccaatcctctttgccatggaagagtttcctcaactacgcgaagttgttgatcaagttgaaaaagatcctaggaatgttgacattgctttagagtatcttgggaagagcaagggaatacagagggcaagagaattagccatggaacatgcgaatctagcagcagctgcaatcgggtctctacctgaaacagacaatgaagatgtcaaaagatcgaggcgggcacttattgacttgacccatagagtcatcaccagaaacaagtga

SEQ ID NO: 853 - DNA, 222 bp, Arabidopsis thaliana
atgaattttatgaaggacagtttggtcatttttaactcgtggccggagcttacgggaacaaatggtgactatgcggccgtggtgatagagagagagaaccccaccgtcaatgctgccgtgattttggatgggagtccggtgaccgcagacttcaggtgcgaccgggtcagagtttttgttgatggaaaccgtatcgtcgtcaaaacccccaaatccggctag

SEQ ID NO: 854 - DNA, 1905 bp, Arabidopsis thaliana
atgtggcgctgcgtctctcgtggctttcgagctcctgcttcaaagacctcttcactctttgatggcgtctctggatctcgcttttccagattcttctccactggttctaccgatacgagatcctcttatacgatagtggatcacacttatgatgcggttgtggtgggagctggtggtgctggtcttagggcggcgattgggttatcggagcatggctttaacaccgcttgcattactaagcttttccccacaaggtcacatactgttgctgctcagggtggtattaatgctgcactgggaaatatgtccgaagatgactggagatggcacatgtatgacactgtcaaaggaagtgactggctaggtgatcaagatgctatccagtacatgtgtagagaggcaccaaaagcagtcattgaacttgagaattatgggctgcctttctctcgtactgaagaagggaaaatttaccagcgtgcatttggtggtcagagtcttgactttggaaaaggtggtcaggcctatcgttgtgcttgtgctgcggataggactggtcatgctctgttgcatactctctatggacaagctatgaagcataacacacagttctttgttgaatacttcgccttggatctgctcatggctagtgatggcagttgccagggtgtaattgcactaaacatggaagatggaacattgcatcgtttccgttcttctcaaacaattttggcaactggggggtacggcagagcatacttctctgcaacctcagcacatacatgcacaggggatggaaatgcaatggttgcacgggccggtcttccactgcaggacttggagtttgttcaattccatccaactggtatatatggggccggatgtctcatcaccgaaggatctcgaggtgaaggtggtatccttagaaacagtgaaggtgaacgttttatggaacgatatgctcctacagccaaggatcttgcatcaagagatgttgtctccagatccatgactatggaaatcagggaaggtcgtggtgtaggaccgcataaggatcatatctatctccatctgaatcatcttcctccagaagttctaaaagaaaggcttcctggaatctctgagaccgctgccatctttgctggtgttgatgttaccaaagagccaattcctgtcttacccacggttcattataacatgggtggtatcccaacaaactaccatggcgaggtagttaccatcaaaggcgatgatccagatgcagtgattcctgggctaatggctgctggggaggcagcttgtgcatctgttcatggtgccaacaggcttggtgcaaattcactgctcgacattgtcgtatttggtcgtgcttgtgcaaatagggttgcagagataagcaaaccaggggagaaacagaaacctcttgagaaggatgcgggtgagaagactattgcatggctggacaggttgagaaactcaaacgggtctctacctacttcaactatcagattgaacatgcagaggattatgcagaacaacgcagctgtgttccgcacgcaagaaacattggaagaaggttgtcagttgattgacaaggcctgggaaagttttggggacgtccaggtgaaagatcggagtatgatatggaactcggatttgatagagacattggaactggagaaccttttgataaacgcatccataacaatgcattcagcagaagcacgaaaggaaagcagaggagcacatgctcgggaagacttcacgaaaagagaggatggagaatggatgaagcatacattgggatattgggaagatgagaaagtgagattggattataggcctgttcacatggacactctcgacgatgagatcgacactttccctcccaaagctcgtgtctattga

SEQ ID NO: 855 - skipped

SEQ ID NO: 856 - DNA, 1569 bp, Arabidopsis thaliana
atgctacggttttaccactggagatttccgccgtccctcgccgtcgttagaatgctctcatcaccaccccctcctcactcacactctccattctccggcggcggcgtgaattcgaactcagtcggtggaaactccaaacccgagttacaattccctcaatcccaaccccataaactctcttcctctccttcctcttctctgaaatccacggtggcttgttcaaacgccggagctatacggagaagcatggctactgtttctcaggcattctcagagagaacagagtctattgattcggatttaggctcgctcgttgtagtttcattctacaaattcgctgattttcctgagcatgctgatttcaggaagcctctcaaggatctctgcgaaaaattgcgtgtttcaggtggaatcattcttgcaccagaagggataaatggaagtatctgtgggattcgtgaatcagtggaggaagtgttggcatttatacagagagatgtccggttaaatggtttgaggcaagtggagacacctattgttacgcttggaattcctagtgtctcgccaattgaaagagttggaacatatgtgagtcccgaagaatggaacgaactgatcagtgatccagaaactgtagtgattgatgtgcgtaatacctatgagactagaattgggaagtttaaaggagctgtggatccatgtaccacagctttcagaaatttcccatcttgggtggagaatcaatttgcattgaagcaagaaggcaatgaaacgcaagcaaaggtggagaaagaggatttttctgaaatcacccataaagaagacaaagctgaaaaaccgaagacgctgccacgaattgctatgtattgcactggaggaatcaggtgtgagaaagcttcaagcctccttcttagccaaggtttcgaagaggtacttaaaagatcaaagcatttttgttatcaggtatatcatctgaaaggtgggatattaaagtaccttgaagaagtccctaaaaccgagagcttatgggaaggggaatgctttgtgttcgacaaacgtgtatctgtggaacatggtctagctcaaggaacacataaactctgctatggatgcaagcaacctataagtgatgaagacatggaagctccagagtacgagtatggagtttcttgcccttactgttactccaagaaatcagaagaggagaaagaaagggcaagagcaaggcagacacagtttgaggaatggggtgtaattggtggtccggacaaaggtcgtcgacccgccactaaacctgatagtccaaggaagaagatcaatgcaaagcttggatctctgtggggtttgatcgaatttcatagcgaaggagagagtgagagagagattgaagcagtaatggcaggaacatctggattgctcaacgcagtgaagccaaagatccaaacgattgatattcaggccgccgctggatggggaatcgccgccgcagccggtgccatctgggtcgtccaaccatttggttggataaagaagacattcattgacccacccccaactgaagagaagtga

SEQ ID NO: 857 - DNA, 1869 bp, Arabidopsis thaliana
atggcaacaccggagactcgtggcgttgattccgatttagagacagcggagaagataatactccggtgggattcaacaacatctgaagaagctaaagagaatctgattttccaaagcggtggtgatcgagaagaagtagatcggtacttgaaagctgtagatgaagttcaaagacacatctcttcaatctcaatctccgatgaagtcaaagcaacgattcaaatcgccatggctagactcgaggacgagctaagaaatatcttaatctctcagacttctactttcgaacctgattctcttcttctcgattcatcgttatcttcttcctctttcgcttcttcttctcgtacggagcttgaagatgacacttgcgatgacggtaacgaagaagaagagcaacaacaagtggatctggttttaccagatggttccggttcagattccggttcgagacggttatcgaggagtaggagaagcaatagcaaatccacaagcagtatacgagagatcgatcttgtaacaccggaagctgtttctgatctgagatcgatagctcagaggatgatcggagctggttactctcgtgaatgtgttcaggtatacggaaacgtgagaaaatccgccatggaaatgatttttaagcagctagggattgtgaaactagggattggtgatgtgcagagacttgactgggaagctgtagaagtgaagatcagaagatggatccgtgctgcgaaggtttgcgttagagttgttttcgctagcgagaagagactctgtgagcagatatttgaaggaaccatggaagagacttgtttcatggagattgttaaaacctctgctttgcagctttttaatttccctgaagctataagcattagtagaagatcacctgagaaactattcaagattcttgatttacatgatgctataacagatttgttacctgatatggaagagattttcgattcgagttcatcggagtcgattcttgttcaagctacagagattcaatcaagattagctgaagcagcaagagggatacttaccgagtttgagaatgcggtgtttcgcgaaccttcggttgttcctgtccctggaggaactatacatccattgacaaggtatgtgatgaattacctcaacttgatctctgactatagggaaacgttgattgatctcgtcatgacgaaaccatgtcggggtttgaaatgtaccaatgatcgaaacgatccggatatggatatctctgagcttgaaggaatatctccgttagctttgcatatgatatggacaatggtgatgctacaattcaatctagaagagaagtctttgcattacagggacgaacctttatctcacatcttcgtcatgaacaatgtccattacatagttcagaaggtcaaaagctctccggagctaatggagttgataggagacaagtatttaaggaagcttaccgggatatttagacaagcagctaccaagtatcagagagctacatgggtcagggtgttgaatagcttgagagatgaaggattacatgtgagcggaagcttctcttccggtgtatcgaagagtgctttaagagagaggtttaaagctttcaatacaatgtttgaagaggttcacaggattcaatcgacatggtcggttccggatactcagcttagagaagaactcaggatatctctatcggagcatcttatcccggcttatagatcctttcttggaagattcaggggacatatagagagcggaagacatcccgaaaactacttgaaatactctgttgaaaatcttgaaaccgcagtgttggatttcttcgaaggatataccacagccccacatttgagacggtctcagtga

SEQ ID NO: 858 - DNA, 723 bp, Arabidopsis thaliana
atggagacagagaagaaaaatagcaaggaggtagcgctaaaacacctagcgttcgtgagaattgcaacgatccatattctggcttccgtctcaaatctctacgaatacgctaaacaaaactccggtcctctcaaatccgccgtggaaaaggtcgaaggagccgtcaccaccgtcgtcacccctgtctatcagaaattcaaagatgttcctgattctctcctggtctttctagatcacaaggtgggtgaagtttcgtacaagtttgatgagcatgctcctccaatggctaagaaagtggtgaatcaagcacatgtattgatctacaaggcgacagagaaagctcaaagctttgtgaaagaggctcgtaccggtggtcccaaagctgcgtttaactatgctgcaactgagtacaagtttttcgttgtgaccaactcggttaaagtctgggctaaacttaaccagtataaaccaatccatgcaatgggtgacaaagctttgcctgtggctgcacacttttccagtcggtacaacgatttggtgactgatatgactaatatgggttactctttggttggttatcttccgttggttcctgttgatgacattgttaaggcttatgaaaaggaagatgcaaggagaaagaaaggaggggatacggctggaaagaaaggagagactactgatgcggctgatggtgataaatcatcgtctgattcggagtag

SEQ ID NO: 859 - DNA, 588 bp, Arabidopsis thaliana
atgttccttttgattctccttgtgttctgtataacagtttttgcctttgttgttactaacaaaggagctggtgaagctattgaaggaaaaggttataaagagtataaacttggtgattactctacttggttacagaaacgtgttgagaatggtaaaaattggaataagattaggagttgtcttgtggagagcaaagtttgttctaagcttgaagccaagtttgttaatgttcctgtcaatagtttctacaaggaacatcttactgctcttcagtctggttgctgcaaaccttcagatgaatgtggtttcgagtacgtaaacccaacaacctggaccaagaacacaacgggaacacacactaatccagactgccaaacctgggacaacgcaaaagaaaagctctgcttcgattgtcaatcttgtaaagcgggtctactcgacaacgtcaaaagcgcttggaagaaagttgcaatcgttaacatcgtcttccttgtcttcctcatcattgtctactctgttggttgctgtgctttcaggaacaacaagagggatgacagttattcccgtacctacggatataagccttga

SEQ ID NO: 860 - DNA, 867 bp, Arabidopsis thaliana
atgggattgtggaatggaaaaggcaccggaggatttatcctctaccttctcgtggctttctccgtcgccgtcttctctgtttcttacgtcggagacacaacaaaccctattcatcatcatctctcttctctctctgccaccgaaaaaatttggccggatttgaagtttagctggaaacttgtgttggctacagtgatagcgtttctaggatcagcttgtgggactgttggtggtgttggaggtggtgggatttttgttcctatgctcactcttatactcgggttcgatacaaaatccgcagctgcaatatcaaaatgtatgataatgggagcatcagcatcatcagtttggtacaatgtacgagttcgtcatccgacaaaagaagtaccaatcttagattatgatcttgctcttctctttcaaccaatgcttcttctcggtatcactgttggtgtttctctcagtgttgtgttcccttattggctcattactgtcctcatcatcattcttttcgtcggtacttcttcgagatctttttttaaaggcattgagatgtggaaggaagagacattgttaaagttcccagttgctttagcggtgtttgggtttgaagcaagcaaattgtatacagcgaacaaaaagaggttaaacagtggcaacactgaatgtatctgtgaagctacgattgagtggactcctctgagtctaatcttctgtggtctctgtggtctcattggaggtatcgtaggtggtctccttggatccggtggtggatttgttctcgggcctttgcttcttgagattggagtcatcccacaggtaaacacaccatcttatcagttgctagcgcaacagctacctttgtga

SEQ ID NO: 861 - DNA, 654 bp, Arabidopsis thaliana
atgacggattcgggtctaatgatgccggcggagattgctggaattctaaccacggcgattacgagttggtgggatgatgttaatgagtcaactcagtggcaagatgggatctttttcgctctttgtggtgcttatgctcttgtttccgccgttgctcttgttcaactgataaggatccaaatgagagtgcctgagtatggttggactactcagaaggtgtttcatcttatgaactttgtcgtcaatggagcacctttgggattatgttttgttgaatttctctgttgtgtgtgtgcagttcgtgcggttctgtttggatttcacatgcaagtatttcttgttcatcccaaggctctttgctgggtactattggatcttcctggccttctctttttctcggcatacacgctgcttgtgctgttctgggcagagatatatcaccaggctagaagcttacctacagataagctgcggataacctatatttctgtcaacgtggctgtatatttggctcagattgtttttcatgctaagaaggttccctatcgagtcaaaaggaagaaggaagaaactccacgaggttggatctgtgacagctatatgcttcacctgcttcctcataagatgcgttgtggtggctgtatcagcttttga

SEQ ID NO: 862 - DNA, 876 bp, Arabidopsis thaliana
atgggtatggacttgagagttgttccggcggaggaatggttgaatcgagggatagattcgagtcacgacggtgaacatgacctaggcctaatggttacagattttctggaaacgggaggtggtagcggtggtgctggttcctggtgcagcagcgacagcgattctggattcccagatccttcttacctttccgataagattcagtatctcaagtactctatggctcaacacgaaaccgaggttctctcggtggttcgtacattgatgcttactattaaggagaaagatctacactctgtgaaatccggtacatgtaacgctagttgcatcaggttttatctcgctaagcttttgagactttctggatatgatgcagctgtatgttcagctagatggcaaggtggtggcaaagttcctggtggagataatgagtatatagatatcatattgagtgatactgaagttggtcaagatgatcgtttgattgttgatattgatttcagaagtcattttgagatcgctagagctgtggattcttaccaacggataatggaatcacttcctgtggtttatgtaggaactgttgcaagattaaaccagttccttcaagtaatggttgatgcagcgaaattctccttaaagcagaattcaatgccgttacctccatggagatctttgaactacctgcgatccaaatggcattcacctcacaaaaggcatctcggtcctatcgatcaacaaggtcctggaatgttctcaccgggattacatggacagtgtgctgagaatttaaagaggcttcagtttgctctccaggttgaacaagaggccgagagattcatgaagaagaagagcggttttagccgcaggaactaa

SEQ ID NO: 863 - DNA, 1503 bp, Arabidopsis thaliana
atggtgaagaatcttaaagtggatcctcttgctaaggtcactgcctccaccacttccatggtttctgcaaaagagaataagaatcagtcagaggcagagccatcatattatgaaactcttgagacatatcaaggcctgccttgtccttatggtggctactatggatactactatccaggtcttgatggttcagttggagaagcaaaggataatggatactatggttatggaacagaagttcagtacccggtaatgcaaggggaaaatgggtctgtgatctacttgatgccagggtttcagtcttatgatgcaagccaaacttatatgcctataaacccggttggtgtatcgagtcaagcacttcattcgccgatgtatgctgctcaggatgtttcatcgcccacatatttatgggaccctgttggagacaggtatgtgtatggtgttgcttcatataccccacccttgaaacagaacatatcttcttcaagtcataaccacaacaattattattcaaagagcaagaactccttcacgggtcacggcatgggagatcgtcctaaaacaccgcgaaaagcatcacagaacagctatgccccacccccactgcttaaccaagaaaaaggtcgcattgcttacccgatggacccagtaaagaaaaagtctggagctttaaatcgggatgaaacagagaaggcgaaagcgaggacaaaagaaaatggtacaagtatgaatgacttagcaaacggtcaagatcatattaccaatggagaatgtgagtcatgttcgttggatgctgaagggaatgaaagaagcaacggtgttggttctgtgatcagaagggatcaatataacctccctagctttcagaccaaatacgaggaagcaatcttttttgtgataaaatcgtatagcgaagacgacatacacaagagcatcaagtacaatgtctggtctagtactctcaatgggaacaagaagttagacagtgcatatcaagaatctcagaagaaggctgcagacaaaagtggaaagtgcccggttttcctgttcttctcggtgaatgcaagtggccaattctgcggtgtagctgagatgattggacgagttgattatgagaaaagcatggagttctggcaacaagataagtggactggctattttccggtgaagtggcacatcatcaaagatgttccaaatccgcaactacgacatatcatactagagaacaatgagaacaagcctgtaaccaatagcagagacacacaagaggtgaggttgcctcaagggaatgaagtgttgaacatctttaagaactacgcagctaagacatctattttagatgattttgatttttatgaaaacagagagaaggttatggtacagaagaagctaaggttccctccgaagaaagaagaagacttggttgctgattttaaaacaatggagatgtctaatacagtcgaagagggaaacacagagttaaccgggacagtgagctaa

SEQ ID NO: 864 - DNA, 684 bp, Arabidopsis thaliana
atggctgctgaacaacctctcaatggcgccttctacggtccatcagtcccaccaccagctcccaaaggctactaccgacgtgggcacggtcgtggctgtggctgctgcctcctcagcttattcgtcaaagtaatcatatcccttattgtcatcctcggcgtagccgctctcatcttctggctcatcgtccgacctcgtgccatcaagtttcacgtgaccgatgcgtcccttacccgctttgaccacacttccccggacaacattttaaggtataacctagccctcactgttcctgtccgtaacccaaacaagaggatcggactctactacgataggatcgaagctcatgcctactacgagggaaagcggtttagtaccatcacgttaactcctttctatcaaggacacaaaaacacaaccgttctcacaccaacgttccaaggccaaaaccttgttatttttaacgccggacagtctaggactttaaacgcggagaggatatccggtgtatacaatatagagatcaagttcaggcttagggttaggtttaagcttggggacttgaagtttaggaggattaagcctaaggttgattgcgatgatctaaggcttcctttaagtacctcaaacggaactacaactacctccactgttttcccgatcaagtgcgacttcgacttctga

SEQ ID NO: 865 - DNA, 618 bp, Arabidopsis thaliana
atggagtcacggaagattaaagtaatggcgacagcaatagctttaataatggtggctatggtggtggatgccgccggagctgataaagggaaagacaaggaagagtgtacggcgcagctggtcggtatggccacatgtcttccttacgtgcaaggaaaggcaaaatctccgacgccagactgttgctccggcctcaaacaagttattaattccgacatgaagtgtctttgtatgatcatccaagagaggaatgatcctgatttgggtctccaggtcaacgtctctctcgctctcgctcttccttctgtttgccacgccactgctgacatcactaagtgccctgctttgcttcatttggacccaaattctccggatgcccaagtgttctatcagctagctaaaggtctgaacgaaacagtctcagcctctgctcccactggctcggcctctgagcccactagtatgtcttcgaccccaggatccagtgctggtaacaacagtggtcggacgacctctgtgccaggcacgaaccacgctcaaagcttctccaaacaatggctagggctcgaagttgttgcccatttcttcgtaattttttatattttcatcctcgtttag

SEQ ID NO: 866 - DNA, 2148 bp, Arabidopsis thaliana
atggtggtagcaacgaccatagcgctttacgcgagtccagcgagcactgtatgttccacagctcaccaaatcaacgctcatatctcatgtgacctcgatctgaactctagatcttcatcggcgtcttcttccacgagttcgccgactatcggaggtctctctttgcttttctccggcgcttccgtcaaatcatcttcctcttcttcctcatcgcatccatccgtaggagaggaattagcttcaatacgccatgatcgtagcgaggatcggaccttaagcggatccttctgttattctccgagcaaattcattggttcttcatacctaaaacgagatcatcaaagccctgtctcggtgcttcacggtccaatttcatctggtaacagtcctccgatgaggatttcacgcgatcggaacttagatggtggatctgctcttcgtgtaggatctagcagattgttcaatggtttcgtcaggaaagcgataggttcatgtgttgattacgatacagactctgttcttgtcgatgagcagctaccgtttaccatggacgatggtttcgaaggagaaagaagacaaccatatgctagggatttgcttagacgtgctcaattgaaacacaaaatcttcgaagatgaatctgtgatcaaagcattttacgaagctgagaaagctcataggggacagatgagagcaactggtgatccatacctgcaacattgtgtggagactgcaatgttgttggctgacattggagctaattcgactgttgttgtagctggaattttacatgatactttagacgattcgtttatgagctatgattatattctcagaacttttggatcaggagttgctgatcttgtggaaggggtctctaagctgagccagttaagtaaacttgctcgggagaacaataccgcttgtaaaaccgtagaagcagatcgtttgcacactatgtttcttgcaatggcagacgccagagctgttcttataaagttagctgatcggttacacaacatgatgactctatatgctttgccaccagtgaagcggcaaaggtttgccaaagaaactctagagatatttgcgcctttggctaatcgtttgggaatttctagctggaaagttaagcttgaaaatctgtgttttaagcatctccatcctgatcagcaccatgagatgtccgatatgcttgaggattcattcgatgaagctatgattacttctgcgattgagaaattggagcaagcgcttaagaaagaaggcatctcttaccatgttgtctctggacggcacaagagtttgtatagtatctactgcaagatgttgaagaaaaagctaaccatggatgaaattcatgatattcatggcttacgtttgattgttgacaatgagaaagattgttacaaggccttgggagtagttcacaagctatggtctgaagttcctggaaagctgaaagattacatttctcatcccaagttcaacgggtaccaatctttgcatactgtagtgatgggtgatggaactattccgctggaagttcaaatacggacaaaggagatgcatttgcaagctgaatttgggtttgcagctcactggagatacaaggaaggtgactgcaaacactcatcgtttgtgcttcaaatggttgaatgggcaagatgggttgtgacctggcattttgaaaccatgagcaaagacggatcgtcgatctgctcttctgagcccttgtgcagtttcccgtctcacgcagaagactgtccgttttcatataagcctagtggtaaccaagaaggaccagtctatgtgattgtaatcgaaaatgagaagatgactgtgcaagagtttcccgagaattctaccgtgtcggacctgttacgcagagcaggaccagggagctcgagatggtcaatgtacagcatcccggcaaaggaagagctaaggccaagacttaaccagacacctgtaagtgatctgaaatgcaagctgaagatgggagatgtggtggagctgactccagccatacctgacaagtctctgactgaatacagagaggaaattcagcggatgtatgatcgagggcttgcgttttcacggcctcaccgtgcagctactggtaccatggttggctggggaagctaa

SEQ ID NO: 867 - DNA, 1089 bp, Arabidopsis thaliana
atggaggttttcttagagatgcttctcacggcggttgttgctctcttgttttctttccttttggccaagctcgtttctgttgctacggtggagaacgatttgagttctgatcagccgctcaagcccgagatcggtgtcggtgttacagaggatgttcgttttggtatgaagatggatgctcgtgttctcgaaagccagaggaatttccaagttgttgatgagaatgtggaacttgtcgatcggtttcttagcgaagaagctgatcgagtttatgaagtcgatgaagctgttactggaaacgctaaaatctgtggtgaccgtgaagctgagtcctcggctgcagcctcgtcggaaaattatgtgatcgccgaggaggtgatcttagttcgaggacaggacgaacagagcgactcggctgaagctgagtccatttcttctgtctcgccggaaaacgtggtagcggaggagattaagagtcaaggacaagaggaagtaacagaattaggaagaagtggttgcgtagaaaacgaagaaagtggtggagatgtcttagtcgctgaatctgaggaggttagagttgaaaagagtagtaatatggtggaggagagtgatgctgaagcagagaatgaagagaaaacagagttgactattgaagaagatgatgattgggaaggaattgagaggagtgaacttgagaaagcctttgcggctgctgtaaatcttttggaagaatccgggaaagctgaagaaattggtgctgaagctaagatggagttgtttggccttcacaagatcgccactgaagggtcatgtagagaggcacaacctatggccgtcatgatctctgctcgtgccaaatggaatgcgtggcaaaaacttggaaacatgagtcaagaagaggcaatggagcagtatcttgcacttgtctcaaaggaaatccctggtttgacgaaagctggtcatactgtagggaagatgtcagaaatggaaacctctgttggcttgcctccgaattcaggatcattagaagatccgaccaacttagtcacaactggtgttgatgaatccagcaaaaatggtattccctaa

SEQ ID NO: 868 - DNA, 846 bp, Arabidopsis thaliana
atggtgaatgagaagaagatgctcccaaaacgcatcatactaatgcgtcacggtgagtcagccggtaacatcgacgcaggggcttacgcgaccacacccgatcacaagatccctctaacggaagaaggaagagcgcaagcgcgtgaggccgggaagaaaatgagagccctcatatcaacccaaagcggcggtgcgtgtggagagaattggcgcgtgtacttctacgtgtcgccttacgagagaacgaggacgactttgagggaagtaggaaaaggattctcgaggaagcgcgtgataggagtgagggaagagtgtaggatcagagaacaagattttgggaattttcaagtggaagagaggatgagagttgtgaaggagacgagggaacgtttcggtagatttttctatcgttttcccgaaggtgaatccgccgccgacgtctacgatcgtgtttctagttttctggagtctatgtggagagacgtggacatgaacaggcatcaagtggatccatcaagtgaactaaacctagtgattgtgtcccacggactgacatctcgagtgtttctaacaaaatggttcaagtggacggtggcagagttcgagcggttgaataactttgggaactgcgagttcagagtgatggagttgggtgcgagcggagagtacactttcgcgatacaccacagtgaagaagagatgttggattggggcatgtctaaagatatgattgatgatcaaaaggatcgtgttgatgggtgtcgtgtaacaacatcaaacgattcttgttcattgcatctcaatgagtattttgatttgttagatgtcactgatgatgaagaatga

SEQ ID NO: 869 - DNA, 1023 bp, Arabidopsis thaliana
atgttgggaggcaacaatgataaccctgtgccgcaggttctaatgaacgacagccagtttcggtatcaatcaaacacatcgttgaatcagcttcacttgcttgggacgatgagagctggttgtactattgatcctgtaaactactttgctaatgataaccttgctcctatgatgcggcttaatagcacacgcggaagggaaactgaaaacaacaatattatgcagagacagcagaagctgcagatctctttgaattataactacaacaacaataatactgttgttcaagatgaagtcccaaagcagaacttagtgtcaactggtctgagactatcttatgatgatgatgagcgcaactcttctgtaacttcagcaaatggaagcataacaactccagtctatcagtcactcggtgacaatatcagattggacctcaatagacagaacgacgagcttgatcagtttatcaaattccgggcagatcaaatggcgaaaggtgtgagagatattaaacagagacatgtcacgtcctttgtcacggccttagagaaggatgtgagtaagaagcttcaagagaaagaccatgagattgaaagcatgaacaagaagaaccgggaactcgtggataagataaaacaagtggcagtggaagctcagaactggcattacaaagcaaaatacaatgaatctgtggttaatgccttaaaggtaaatttgcaacaagtgatgtcacatggaaacgacaacaatgcagtaggaggaggagttgctgatcatcatcaaatgaaagaagggtttggggatagtgagattgatgacgaagcagcttcttacaattacttgaacatcccggggatgccaagtactgggatgagatgtaagttgtgtaacgtaaagaatgtttcggtcttgctcgtgccatgtaggcacttgagtttgtgtaaagattgtgatgtgtttactggtgtttgtcctgtttgccagtctttgaaaacttctagcgttcaggtcttcttcttctga

SEQ ID NO: 870 - DNA, 522 bp, Arabidopsis thaliana
atggctgaaacatctgatgtatcgccattgaagcgttacagagaacaagaaaccctagtcgaggaagaaacgaacaaacgacaaaagccaacttcgtcatcatcctctgcctcttacaaccaaattctctgtcttctcaacgattcagacgaacaaaaccaacacaacaatgacctaacttccttcataaacgctcttcagcaagaaatatcatcggatgaccaatacgccgtcgtttcagaaacctccaacgtcgaagactcgttttcttcatgtgtttcctcaaaggaagaagaagtggaagatgacagcaaggagaaagtgatgcagcatcttttggaagcttccgatgacgaacttgggatccctaacacagattttggcgagagtaattatgaaaaggctaatgacggttacgtttatggagatagtttgttagatgggtttggtgatgcgttttgggagcttgaagacgaagctgctaattattacacgttgctgcagtctgagctgttcatgtag

SEQ ID NO: 871 - DNA, 1623 bp, Arabidopsis thaliana
atgaagttttggtcacgaccattaacgtttcttataattattatctatctcataattcaacaagtcaactcatcaccaccgtcattatctataccggagcattttctccgatgcctcgacactcaaccatccgaccacggcagtcccaactcaagaaccgccgtgatcccaacaaactcatctttctcaacaaacctaatgaacggcgtcagaaacctccggttcgcttctgtctccacaagaaaaccagaagttatcgtcgccgccgtcaccgaaactcacataagagcaacaatctcttgctgcaaactcctaaacctcgagctaagaatccgaagcggaggccacgactacgaaggcttctcctacacttctccggtacctttcgtaatcttagacatgtacaacttcaacaaaatcgatatcaacatgaaagacgaaaccgtttggatccaatccggagcttcactaggtcagctttactataacattgcaagtaaaagcaaagtccacgcttttcccgccggagtttgtcctaaagtcggcgccggaggacatttcagcggcggaggattcggtaacctcatgagaaaatacggtttatccattgatcatataatcgacgctcaaatcatggacgccaacggtaaagtgtaccgtaaccgtcaagctatgggagaagacgtgttttgggctattcgcggcggaggcggcggaagctacggagtcattcttgcctggaagataaaactcgttagggttccggagaaagtcacagtttttaaactagaaagaacggtgagagaaggagccgttgatttagttcataaatggcaacaagtagctccggttatcgacagagatttgtttatccggttagagattaaaccaataaaccggaaaatctcaaaaggtaagacgattaaagtctccttcatcggaatgtttcttggtttacctgagagacttttaaacataacgaaacagagtttccctgagctacatttaacgaaagaagattgtatggtcaagaaatggatcgaatctagtgttttctgggcgaattatccagaaaaagcaccgatagagttacttctcaaaagagtatcaaccaacgaatactactggaaacgtacttcagattttgttcaagcaccaatctcaaaacagggtcttgcaaagatttttcaaacaatgattgatcattcgccacttccacgacgagtttggatgcaatggaatccatggggagggaaaatggctgagatagcgtctgatgcgacggcgtttgtgcatagaggtggtaatgttttcatgattgagcatttcatgaattggtatagacctggagatgagcttgaagagaagttcttggcgattgcaagaagttttaaagaagctatggctccgtttgtttccaagaatccgagagaagctttctttaattatagagatgtcgatatcggaattactacgccggggtataatgcgacgtatgaaggagctaaggtttatggggatagttatttcaaagggaattatttgagattggttaagattaaagcccggttcgaccggactaattttttccggtctcagcaagggattccggttcttgcttag

SEQ ID NO: 872 - DNA, 1500 bp, Arabidopsis thaliana
atgttaactacgatgcaaagagtacacaacaaaccgattgattctatcggaggttttaagcatttggtaaaacagagtaacggcggtgacggtggagtgacggcgacggatatgcaagaaccgagcatcgagactgataagcttagctacgagattttctctattctcgaaagcaagtttcttttcgggtatgatgatgacctgaagcttatggaatcaagaagcagagacccgagtccagagcaagaaacggcatcaccggcgatggtggaagctttaaacggcgttgttccgggtacagttaagaaccagagaggtaaagtttgtgttttgagtatcgatagtggtggaatgagagggattatacctggaaaagctttggcttatctggaacatgctctgaaatcgaaatcgggtgacccgaatgctcgaatcgctgattacttcgacgtagcttccggttccggtatcggtgggattttcacggcgatgctttttgcgtcgagcgatggtaaccgtccgatcttcaaagcggaagacacgtggcggtttttagctatgaaaggtaaaagcttttacaacaaatcaccaccggggatactaaacagggttatgaaaaccgggtcgggtggttcgggtgggtcaggttcgaagcttgagaaagcgatgaaggagtctttcgaagagcttacgcttaaggatacgcttaaaccggttttgattccttgttacgacctcacgagctctgcaccgttcttgttctcacgtgctgatgcgttggaaacggacggttatgattttaagctgtgggaagtttgtagagctacttgggctgagccaggagtgtttgagccggtggagatgagatcagttgatggtaagacacggtgtgtagctgttgatggtggtttagcaatgagtaatccaacggctgcagcgattactcatgtgttgcataataagcaagagtttccttttgttagaggtgttgaggatttgcttgtgttgtcacttggtacgggacagttggttgatgttaagtatgattgtgataaggttatgaagtggaaggctaagcattgggctcgacctgcggttcggatttctgctgatggagcagctgatactgtggatcaggctgtttccatggcgtttggtcagtgtaggaggagtaactacgtccgtattcaggcgaatggatcaagctttggtccgtgcaaaccaaacatagacacagatgcgagtccaagcaatgtgaatatgcttgtgggagtagcagaggagatgctgaagcagaagaatgcagagtctgttctgtttggtggtaagaaaatcaatgaagaaagcaattatgagaagctggattggttagccggtgaactagtgctagaacaccagaggaggagttgtagaatcgctcccactgtagcgttcaagcaatccggcgacagaagagtcgatcaacagaccattttcaaggatattgattgtatgttttga

SEQ ID NO: 873 - DNA, 1443 bp, Arabidopsis thaliana
atggaagatccacttttattgggagacaatcagataatcaccggaagtcttaagccgacgccgacatggaggatgaatttcacggcggagctcaagaacctcagccgcatggcgctgcctatggccaccgtgactgttgctcaatatctattacccgttatctcagtcatggtcgccggccaccgcagcgaactccagctctcaggcgttgctcttgccacttcttttacaaacgtatccggcttcagtgtcatgtttggtttagcgggtgcacttgaaactctatgtggccaagcttatggagcaaaacaatacgcgaaaatcggaacttacactttctctgcaatagtctcaaacgtacctatagttgttctcatatcgattctctggttttacatggacaaactctttgtttcacttggacaagatcctgacatctccaaggtagctggttcttacgcggtttgtcttataccggcattgttagctcaagcggtgcaacaacctttgactcggtttctccagactcagggtttggttcttcctcttctctactgtgccataaccacccttttgttccatataccagtttgtttgattctggtttacgcgtttggtcttggaagcaatggagccgccttggctattggtttgtcttactggtttaacgtcttgattcttgctttatatgtgagattttcaagttcttgcgagaagactcgcggctttgtgtctgatgatttcgtgttgagtgtcaagcagttttttcagtatggaataccttcggcagcaatgacaaccatagagtggtcattgtttgagttccttatattatcttcaggactcctcccaaacccgaaactcgagacctctgttctttccatttgtcttacaacctcatctctccactatgtcattccaatgggtattggggcggctggaagattagtcatactatttacccttggcagtatacgggtttcaaacgaattgggagcgggtaatcccgaggttgcgaggctggcagtgtttgccggtatattcctttggttcctagaggctaccatttgtagcacacttctcttcatttgtagagatatcttcggctacgcctttagcaatagcaaagaagttgtggactatgtcacagagctatctcctttgctttgtatctcatttttggttgatggattttctgcagtgcttggtggggttgctaggggaagtggatggcaacatattggagcttgggcaaatgtggtggcttactatctcctaggagctccggttggacttttcttaggattttggtgtcacatgaatggtaaagggctatggatcggtgtggtggttgggtctacggcgcaaggaatcatactagctatagtcactgcttgcatgagttggaacgagcaggttaatatcaatctgaaatatttatga

SEQ ID NO: 874 - skipped

SEQ ID NO: 875 - DNA, 2517 bp, Arabidopsis thaliana
atggctgcagttataagaaagttattacctttcccatcaccgaatcctaaaagggataatcgagaaagtgacgatgatgatgaaacaagtagtggctatcgaatcgaatattcattcgccagtgagtataaaggtcctcttattgctaatgtgccacgagctcttcccgttgaagttgatcagattcctacggctcttcccgtttccttttcttccttgcggagtggtatctcttacccagtggcacctctcgttatgactaaggataccaagagaccacctgattctggaatagagaagaagaacggtttcgttgactctgcagctggttctagtgtggttttgatagggcgtgatgttgtttctggctcatcatcatcatcatcatcaaagaggttggatgtaccagaagaagtgaaaagtcctgctgattttcggttatcaccatcatcaccattgtctgcatcagcgagagaggaggatcacttagatgatgacagagtttcggatgtgggacctagagcagtgagattcgttgaaccttttcagagtagtgaatgtgatgagagctcctatgtttctgatggagaaagtatagctgcaacgcatagagctgaaaggaaaggtaaaagaggatcgtgttaccggtgccagttggggaaccggtttactgagaaggaagtctgtattgtctgcgatgccaaatactgtttcaactgtgtgcgcagagccatgggtgcgatgcccgaaggaagaaagtgtcaagcttgcattggttataggattgatgagtccaagagagcaagtctcggaaagtgttcaagaatgctcaagcgccatctcacggattctgaacttcgacaagtcatgaatgccgagatcacctgcaaggcgaatcaattgccttcacgacttatcattgtcaatgacaagcctttaagtgaagatgagctttacacgttgcagacatgtccaaatccacccaagaagctaaaacccggacactattggtatgataaggttgctggctactggggaaagataggagagaaacctagtcagattataagtcctaacaacagcataggaggatacatcagtgagaaagtaagcaatggagacactgaaatttatattaatggccgggaaataaccaagccagagctcacgatgctcaagtgggcgggggtgcaatgtgaaggaaaacctcatttttgggtcgattcagatggttcttaccgagaagaaggtcaaaagcatcccatcgggaacatctggagtaagaagagagcaaaaattgcttgcgctgtgttctctctgccagttcctccggcttcgtctgcagtagaaccatatgatgtgcccttatatgagcagaagatgcttaacaagcttcttttgattggtagcgaaaaaggtggcgccactacaatttacaaacaagcaaggtctctctacaacgtctcattctctttagaagaccgtgaaagaatcaaattcataatccaaacaaatctctatacctatctggcaatggttcttgaggcacatgaaagatttgaaaaagagatgagcaatgaccagtcttcagattgggttttgaaagaaaaggaagacggaaacctgaagatatttccaccatcaagccgtgagaatgctcaaaccgttgcagatctctggagagtaccagctattcaagccacctacaaaagacttcgcgatacacttcccaggaacgccgtttattttcttgaaagaattcttgagatctcgagatcagaatacgatccttctgatatggacatattgcaagcggaaggactctcctctatggaaggactttcttgtgtggacttctcattcccatcaacttctcaagaagagtctcttgagagcgattatcaacatgatacagacatgaagtaccaactcatccggctaaatccgagaagccttggtgaaaactggaaattgctggaaatgtttgaagacgctgacttggtgatattttgtgtctcactaacagactatgcagaaaacatagaagacggtgaggggaatattgtgaacaagatgcttgcaaccaaacagcttttcgagaacatggtgactcacccgagcctagctaacaaaaggtttcttttggttctaaccaaatttgatctcctagaagaaaagatcgaagaggttcctctaagaacctgtgagtggtttgaagacttcaacccattgatcagccagaaccagacgagcagacacaaccctccaatggctcagcgtgctttccattacattggatataagttcaagagactctatgactcaatcttggaacccgtaaatatgcgtggaaggagctttaagccaaaattgtttgtttgtcaagtgagcttggagagtgatactgtggacaatgcactgaggtatgcgagagagattctcaagtggcatgttgaagaaacttccatgttccaagagatgtctactactagcatagaggccagctcgtcctcttga

SEQ ID NO: 876 - DNA, 1956 bp, Arabidopsis thaliana
atgccgtcacgatcaatctcggcaccggttccggttcttgctccggctccgatcgtttcctctttagtcccagcagcgccgtcaggacatcagaataagacaacgcgaatctttccaccgttcgtggtggctggagccggcgccggtttctctcttttcatcactctctccgtctgtttctgtaaattcagccggaaacgttcatcacctccggcggaaaacgcttcctcttcgcctcggagaccgtcgccacgtgagttttcatattcgtctctccgtcgcgccaccggttctttctcgcaggcgaatagactaggtcagggcggatttggcgtcgtgtttcgtggaactatctccggcggcgagaatgtagctgttaaagtaatggattcaggatctcttcaaggagaaggtgagtttcagaacgagttgttcttcgccgccaagcttgactcgcctcacgttgtccctgttattggtttctctcatgatcgaaaacgacgacgtttgcttcttgtttacaagcttatggacaatggtaatctccaagacgccttgcttcaccggagatgccctgagcttatggattggaatcggaggtttttggttgccgttaacattgccgatgggattaagcatcttcatagtcttgaaccacctgtgattcatggtgatattaagcctagcaatgttctattagatagtctcttctctgccaaaatcgctgattttggtttggctaggttgaaagcagagcaagtggagattagtgtagctccggagcgtgatggtgatggatctatggttgaagaagtagagagtgtggtaactactgtgactggttatgaagattttaactttgggttggttgatcagtctccggagagtgttgctaaggttcctgggtctgtgagtgcttctcctgaggcgacgacggttgtctctgtttctccggaaatgggagagaaaacggatgaggatggtggtagtgttgtggtgatgaagaaggggaaagagagtgagagcaaagattggtggtggaagcaggagagcaatgttgaaagagggagagtgaaagagtatgtaatgcaatggattggttcagaggtaaagaaggagagaccaagcagaagtgattggattgaggcggcagctttgtcttcttcgtcaagtaagaaacttgagaagaagactagcaagagactagattggtggttgtcattggaggaagaggatgagaataagaagaagaagaagcggaggatggttagagagtggtggaaagatgagtatcgtagagaactcgctaagaaaaggaagaagaagaagaagatgactttagaagccgagttttgtagtgatgatgggagtagtagtgtgagtcaatggcggcgtggtagtggtagtggtagcagcatagattggtggttagatgggttaagtggtgaacgatggttgagagcaaggggaaatagccatgactcggtgagcggtgagatagctaagagctgcggaattagtagcacgccgagcatgagagggactgtgtgctatgcagctcctgagtactgtaacttggacaacaacgtgtcagagaaatgtgatgtctatagctacggtgttctgttgttagttctgatttccgggaggcgcccgttggagatgacgggctccgcgagtgagatacaacgggcaaacctcatgtcttgggcgaggaagttggcgagaagaggaaaacttgttgatcttgtggatcaaaagttgcaaaacttagaccaagaacaagcagtgttgtgcataaaggtggctttgttgtgtctgcaaagattaccgatttcacgaccgtcaatgaaagaggtcttgggaatgcttaaaggagaagtgaatctaccagagttgcctagtgagttctcaccatcgccaccattaaagacaacgaggaagcagcgccgttga

SEQ ID NO: 877 - DNA, 426 bp, Arabidopsis thaliana
atgttgctttacaagaaaaagaatcagattgttaaaggaaacagaatcttgatcagcgtaacgtttcttggtagtgctggtccgatccggttcgttgctaatgaaggtgatcttgttgcatctgtgattgatactgctttgaaatgttatgctcgtgaaggtcgtcttcctattcttggatctgatttcaacgattttgttttttattgtccaatggttggacctggagctttgagtccatgggaagcaattgggtcggtgggagtgaggaactttatgttgtgtaagaagaaaccagaggagaagaaggttgaggaagataagggaagatcgaattttccgattaatggagctagaaaaggagctggtggaagttttaaggcttggattaataaatctttaagacttaaagtgactacccattag

SEQ ID NO: 878 - DNA, 378 bp, Arabidopsis thaliana
atgatgaagagaccgatcccaagttggccatggtggttattaggaagtagaaaagagaaagaaactgaagctcttaagtttcctacaaagatagctcgagtaaataagaggaaagagcttgaacttgagagctttggttcgtctggctctgaatctgtagatgttgttgctggtgatggacctgaatggtctgttggatggactgagccacatggacctgatttccaaagtgatgatgaaggaaatgatggtggcttcttagtgttggttccttgttatagagctgttgttgaaggctctagtaataataataaccagctcttgagtgctgtcaagaatctccccaatggtttgcctcctggtatgaatcacccctaa

SEQ ID NO: 879 - DNA, 504 bp, Arabidopsis thaliana
atgaaacaaaaccagagcaagttcttgagaataatctcaacacctctaagagctttaggcaaggcacgtgatttctacgtgagaagcatcaccggttgcgcagctcgtactcaatattcctcctccgcctccgtctccgctccttttccaagaagccggagctcctcctccgccgccttctcctcctccgcatcatcccggagaaccaccgatttcgggatagatgaagattacagcgagctagtgagagctgcgtcggtgaggagtttagggcacaagaatgagatagacatgttgatacaagagaagctgcaacagcagaagcaacagaagcaaggagggttgcctaagagctcgagtgctgggatggcgaggatagaggaagaggaagaaacagaggaaggatctgtgaatccgaaggtgaagaagactaagaaagtctctgatcttttgtatcctcgtagcaaatcttacgccgttactactagtacccctatcttgtaa

SEQ ID NO: 880 - DNA, 1190 bp, Arabidopsis thaliana
atgggattctggtcgttgttggaggtggcttctatgccggttattcaagttcttttcatgagtcttgtgggagctttcatggcctctgatcgttgcaagctcttccctgttgaagcccgtaattccatgaacaaggtggtgtttgtactatttgcaccggctctcatgtttgccaatctagctcagacggttacacttgaagacatcatctcatggtggtttatgccggtgaacatgggacttacatttctaatcggaggacttcttgggtggttggttgttaagattttgaaaccacctccttatcttgaaggtcttattgttgcaacttgttctgcaggaaatatggggaacctaccaatcatacttgtcccagcaatctgcgatgaggacaaaagtccttttggtaaccgaagtgtatgtagaaccgtcgggctctcttacgcgtctttctccatggcgctagggggtttctacatatggacatacacattccggctgattaaagggtccgcaatgaaagttcaagccatagaagaatctgagaaaatagcaattaaatcatccaatagtgacttagaagctgatcataagacccatctcctcggtgcaccggaagacaaggaaaacaaagtggtaaaggaaaagacagggttttggagaaaaggagtagacttcctccatgagatattggaggagcttcttgcaccacctacacttggtgcaattatcggtttcattttcggtgcagtaagatggctcagaaatcttatcataggtgatgatgctcctttacgaatagtacaaagcactgcaaaacttcttggagatgggaccattccctgtatgactattatactagggggaaacctcatacaaggtttacgttcttcggcagtcaaaccgatggttgtacttggaatagtctgtgttcggtacatagctatgccaattatcggtataggcattgtactaacagctgcaaatctcggatttcttccagctgatcctttgtttcagtatgttttgatgcttcagttcaccctcccgcctgccatgaatatcggtaccatgacacagctgtacaatgttgctcaagacgaatgctcagtgctcatgctttggacctacttggtcgcgatactggccctcactgtatggtccaccatcttccttcacttgttagtcta

SEQ ID NO: 881 - DNA, 630 bp, Arabidopsis thaliana
atgggtcttaccccaactgcaaccctactcgtcgctgttttcgcgttttgcctcgtcgctgtaacggcgcagttcgcctacgttttgtggtggaaacgtcggttccgtcgtcggagtatcgccggatcagaacgcgacgctttttcctctcgcggtggtgacctaacggctacaccaccgccatcgaaagagcttctttacttcttcttgttctgtctcgaaaacaaacagttcagaataggatctgccaccgctccgccgctccctgcagccgcaccgccggttaatgacgtggcatcaaagtggtcaataaacggagaaaatttactttgcggaccttcggagactttgtttaccatcgctgaagactatactagcgagtccgatcatcggacgggtgagattgatccacgtggaagcatctttacagaggatcatgtaaaggatgatgaagtggaagaggaggtagtcgcgacggatataagcgacgacgaggttgactttagccactataatcaaactacgccgttttctactccatgtgcttccccaccgttttacacgccgtctccttctccgattcgtgatgatctctctaagacggtacgtgaggagagtgtgtacggctga

SEQ ID NO: 882 - DNA, 576 bp, Arabidopsis thaliana
atggatcacacgttgtgcaagcaagttgttcagccagttactaggaaagtgaagaagcatggtaaagatgaatttgatcgtatcaaacaagctgagaagaaaaagagacgtttggagaaagctcttgctacttctgcagccattcgggctgagcttgaaaagaagaagcagaagagattggaagaacaacaaaggttagatgaagaaggagctgcaattgcagaagctgtcgctctgcacgtcctactgggcgaagattctgatgattcatctcgagtcaagtttggcgaagaaacgggtttcggaatggatctgtttagagatgaaagaaccaactatgttcctcgccaaagttgtgctagctatgcggttcaagggattgggtttgtgtcaaatggttatggactaggagatagtaactggtcagtgtcatataagccattcatgaaggatgtctgggataacaacatggtaatatctgcagatttgattgctgctcaggctgtttcgtcactacagatatctgaggacgctgataggaacgcttatgtcttcgagacgatgttcgggggatga

SEQ ID NO: 883 - DNA, 3186 bp, Arabidopsis thaliana
atggggaaaggaggtgaagattgcgggaataagcaaactaatagttctgaattggtcaagtctgatacttttcctgcttggggtaaagatgtgtcggaatgcgaagagaagtttggtgttagtcgtgagaaaggtttgagcactgatgaggtgttgaaacggcatcagatctatggtttgaatgaattagagaagcctgagggtacttctatttttaagctgattttggaacagtttaatgatacattggttcgtattcttttggcggctgctgttatttcctttgtcttagccttctttgatggcgacgaaggtggtgagatgggtatcaccgcatttgttgagccgcttgttatttttctcatcttgattgttaatgccattgttggcatctggcaagaaactaatgctgagaaggcgttggaagctttgaaagagattcagtctcagcaagctaccgtcatgcgtgatgggactaaggtttccagtttgcctgcaaaggagcttgttcctggtgatattgtggaactgagggttggtgataaggtgcctgctgatatgcgtgtggttgctttgatcagttcaactttgagagtcgagcaggggtccttaacaggagagagtgaggcagtgagcaaaaccaccaagcacgtggatgagaatgctgatattcaaggaaagaaatgcatggtgtttgcaggaaccactgtcgtgaatgggaactgcatatgtttagttacagatactgggatgaatactgagattggaagggttcactcacagatccaggaagctgcacaacacgaggaagatacccctctgaagaaaaaacttaacgagtttggggaagttctgactatgatcattgggttaatttgtgcgttagtgtggctcatcaatgtcaaatactttctgtcatgggagtatgttgatggctggcccagaaactttaagttctccttcgagaagtgcacatattactttgagattgctgttgcactggcggttgctgcaattccagaaggtctgccagcagttattaccacatgtttggctcttggcactaggaagatggctcagaagaatgctctggttaggaagctacccagtgtggagactcttggatgcaccaccgtgatatgctctgacaaaactggaactcttacaaccaatcagatggctgtttcaaagctcgttgctatgggttcgaggatcggaactcttcgatctttcaatgttgaggggacctcgtttgatcctcgagatggaaagattgaagattggccaacgggtcggatggatgcaaatcttcagatgattgcaaaaattgctgccatttgcaacgatgctaatgttgagaaatctgatcagcaatttgtgtctaggggcatgcctactgaggcagctttgaaggttttggttgagaaaatgggatttcccgaaggattgaatgaagcttcatccgatggcaatgtcttacgttgttgtcggctatggagtgaactagaacaacggattgccacccttgagtttgaccgtgaccggaaatcaatgggagttatggtggattccagctcaggaaagaaactgctactggtcaagggtgccgtagaaaatgtattggaaaggagtacccatattcagctacttgatggttccactcgagagcttgaccaatactcaagggatcttattttacaaagcctacatgatatgtccttgagtgcattaagatgtctcggatttgcatactcagatgttccatcagattttgccacttatgatggcagtgaagaccatcctgctcatcagcaacttctcaacccatccaattattcatcaattgagtccaatctagtatttgttggatttgttggtttaagggatcctccaaggaaagaggtgcgtcaagccattgcagactgcagaacagcaggtattcgggtcatggttatcaccggagacaacaagagcacagcggaagcaatctgccgtgaaattggcgtatttgaagcagatgaagatatctcctcgagaagcttgacaggaaaagaatttatggatgttaaagatcagaagaatcatctaagacagacaggagggctcctgttctcaagggctgaaccaaaacacaaacaagagattgtcaggttactgaaagaagatggagaagtggttgccatgactggagatggagtcaatgatgctcctgccctgaagttggctgatattggtgtggctatgggcatttccgggacagaggtagcaaaggaggcatctgacttggtgttggcagatgataatttcagcaccattgttgcagctgttggtgaaggcaggtccatctataacaacatgaaggccttcatcaggtacatgatctcttccaacatcggtgaggttgcatcgatattcttgacagctgctcttggaatcccagaaggcatgatacccgttcaacttctgtgggtgaatctcgtaacagatggtcctccagctactgctttgggattcaacccccctgacaaggatattatgaaaaagcctcctcgtaggagcgatgactctcttatcactgcgtggatcctcttccgctatatggtgattggtttgtatgtgggagtagcaacggtgggagtattcatcatatggtacacacacaacagctttatgggcatagacctgagccaagacggtcacagccttgtgagctattcacagctcgcacattggggccaatgctcttcatgggaaggcttcaaagtgtctcctttcacagcaggctctcagactttctcgttcgactcaaacccttgcgactattttcagcagggtaaaatcaaggcatccacactctccctctcggtgttggtggccattgaaatgttcaactctctgaatgcactctcagaagatggcagcctggtgacgatgccaccctgggttaacccgtggctgctcctggcaatggctgtctcatttggactccactttgtgatattgtacgtcccattcttggctcaggtgtttggtattgtgccactgagcttgaacgagtggctgctagtgctggctgtgtcgctgccggtaattttgatagacgaagtgctcaagtttgtaggaaggtgcacgagtggctaccgctactcacctcgcactccctcagctaagcaaaaggaggagtaa

SEQ ID NO: 884 - DNA, 2703 bp, Arabidopsis thaliana
atggaccaaacccaggaaaacacaagcagaatagttggtaccttcggttacatggctcctgaatatgcaatacatggccagttctcggtgaaatctgatgtgtatagcttcggagtgttggtgcttgagattataagcggtaagaagaacaacagcttttacgagacagacggcgcacatgacttggtcacacatgtaagtttaaaggccattaaggattatatttacctcgttaacaataagaaatgtgatagacagaaaaaagctttgctgtggtgtctgcacaagaatgcggcaaaacagggttttttgtaccacaaagtaggtatgaaacaaaccggggccttctcctctcttctcttccttccaatgtttcagctcgaggaggattctacaattcttcgattggccaaggccctgatcgagtgtatgctctggggatgtgcattgaaggtgctgaaccagatacacgtgtctcaaccagacagaagcctggcctggccggagaaacggattttgtgtatggtacgatactccaatagttctttttttggatcactcaaggcagaaccgcatttctatatccacaacgtggatgatattacatccaatttaacagagtttgatcaagtgtgggaagagttagcacgtcgtatgatagctagtactacttctccatcatctaaacgcaagtactacgcagcagacgtagcagccttgacagctttccagataatatatgcactaatgcaatgcactccggacttatctttggaggattgccatatctgtttaagacaaagtgttggtgactatgaaacatgctgcaatggaaagcaaggtggcattgtgtaccgagccagctgtgttttccggtgggagctttttcccttctctgaggcttttagtcgtatttcgttggcacctccgcctcaatccccagcatttcccacgcttccggcagtaaccaatacagcgaccaagaaaggtagcataacaatctcgataggaattgtctgggcaatcattattcctactgtcattgttgtcttcttggtactgcttgcgctaggatttgttgtttataggaggaggaaatcataccaaggatccagcactgatatcaccattacacactcactgcaattcgatttcaaagcgattgaagatgcaacaaataaattctcggagagcaacataattggtcgcggtggatttggagaagttttcatgaagggatctagacaatgggatgacatatgctgtctaattcaatttatgcagggtgtccttaacggtactgaagttgcaattaagaggctgtcaaaagcatcgagacaaggtgcacgagaattcaaaaatgaggttgttgttgttgcaaaactccatcataggaatcttgttaagcttctcgggttttgtctagaaggagaagagaaaatacttgtttacgagtttgtccccaacaagagcctcgactacttcctctttgaccctacaaagcaagggcagttagactggactaaacgatacaacattatccggggaatcactcgaggaattctgtatcttcatcaagactcacggctcacgatcatacatcgtgacctcaaagccagcaacattctcctagatgcagatatgaacccaaaaattgctgattttggaatggcgagaatttttgggatcgatcaaagtggagctaatacaaaaaaaatagctgggacacgcggttacatgcctccagaatatgtgaggcaaggtcagttctcaacaagatcagatgtttatagtttcggagtcttagttcttgagattatatgtggtcgaaataacagattcatccaccagtcagacactacagttgagaatttggtcacatacgcttggaggttgtggagaaacgattcaccattagaactcgtggatccaaccatttcggagaattgtgaaaccgaagaagtgacaagatgcatccacattgcgttgctgtgtgttcaacacaatcccacagatcgccccagcttgtcgacaatcaacatgatgctcataaacaattcgtatgttttacctgatcctcaacaacctggattcttctttccaataataagcaaccaagaacgagatggcctcgactctatgaacaggtccaatccacaaactatcaatgatcttatgagtcttcgtttttttttgtctttaattcttcgtattctcatctctgatagcgttgctctgatttttccaatcaatggctttcctgttgtgtttgtaccaagcgggaaaactggcgtttttacacccaatgataagtatgatacaaaccgtcgccttctcctctcttctctagcttctcatgttgtagctcgaggtgacttctacagtaattcacttggccaagtctatgatcgggtgtatgctttggggatgttcatctcagttgttgaaccaaaggtttgctcaaactgtatcgaccttgcttctaaagaggtgttagaggaatgtaccaaccagacagaaggcattgcctggcccgaaaatgggattctttgtatggtacgttactccaaccgttcgttttctggatcacttgagatggaaccaaagtatatatgcatgtacaatactggagatatcggatccgaaaactttgataacctgtgggacgacttgacaagtcgtatgatagctggagttatatga

SEQ ID NO: 885 - DNA, 1746 bp, Arabidopsis thaliana
atgaccaaagaagtttgctccaacattggactttggttattgctcacgttacttattggtaactatgtcgtcaatcttgaagcctcgcaccatgtctacaagagacttacccaaagcactaacaccaaatctccttccgtaaaccagccctaccggaccggtttccatttccaaccccccaaaaattggatgaacgggcctatgatatacaaaggaatatatcatcttttctaccaatggaacccgaaaggagccgtgtggggtaacatcgtgtgggctcattccacgtcaacagacttaatcaattgggatccacatcctccagctatcttcccatctgcacccttcgatatcaacggatgctggtccggttcagctactattctccctaatggaaaaccggttatcctctataccggaatcgaccctaagaaccaacaggtccaaaacatagccgagcctaagaatctctccgatccttatctccgagaatggaaaaagtcgccgttaaatcctctcatggctcctgacgccgttaacggaatcaacgccagctcgttccgtgacccaaccaccgcgtggctaggccaagacaagaaatggagagtgatcatcggaagcaagattcaccgtcgtggactagccattacttacacgagtaaagactttctaaaatgggaaaaatctccagagccgttgcattacgacgacggaagtggaatgtgggaatgtcctgattttttcccggtcacgaggtttggttctaacggcgtggaaacgtcttcgtttggtgaacctaatgagattttgaagcacgtgttgaaaataagtttggacgacacgaaacatgattattacacgattggtacgtacgatcgggttaaagataaattcgtaccggacaatggtttcaagatggacggtacggctccgagatacgattacggaaagtattacgcgtctaaaacgttttttgactcggctaagaaccggagaatcttgtggggttggactaacgagtcatcgtcggttgaggatgatgttgagaaaggctggtccggtattcagacgattccaaggaaaatatggcttgatagatcagggaaacaattaattcagtggccggttagggaagttgaaagattacgtacaaaacaagtcaaaaacttacgcaacaaagttctaaagtcaggatctaggcttgaagtctatggtgtgacagctgcacaggcggatgtagaagtattgttcaaagtgagagacttggagaaagcggatgtgatagaaccaagttggactgatccgcagttgatttgtagcaagatgaatgtatcggttaagtctggtttaggtccattcggtttaatggttttggcatctaagaatttggaagagtacacatctgtttattttagaatcttcaaagcccgtcaaaacagcaataagtacgttgtgctcatgtgcagtgaccaaagcagatcttcgctgaaggaagataatgacaaaacgacatacggagcttttgtggatattaatcctcaccaaccactatccctcagagccttgattgatcattcagtagtggagagtttcggtggaaagggaagagcatgcattacctcaagagtgtatccaaaattggcaataggaaaaagttcacatctctttgcttttaattatggatatcaaagtgttgatgtcttaaacttaaatgcttggagcatgaactctgcccaaatcagttga

SEQ ID NO: 886 - skipped

SEQ ID NO: 887 - DNA, 4550 bp, Arabidopsis thaliana
atgtggttgctttcgtcttctccatggctctctgagctctcatgttcatattcggctgttgtagaacatacgtcttcagttccagtaccaatccaatggctcagatttgttttactctctccttgccctcaacgcgctctcttctccgccgttgattttatattcctcctctgcttcgctcttcacaagctcttttcttctccttcttcttcttccgaaatcaacggacacgctgagattaggaaacctcttattggtatccgtggaagaaccccaaccagaacaaccgcatggttcaaaacgacggtcgcagtcaccgttctattgtcgttttgctccgtcgtgctctgcgttttggccttcactggcaagcgacggactcagagaccatggaacctcatagacccgctcttttggcttattcacgccgttacacacctagtcatcgccgttctcgtcctccaccagaagagattcgctgctctaaatcatcccttatctctacgaatctactggatttccagtttcgtcctcacgtctctcttcgccgtcactgggattttccattttctctccgacgccgccacgagtctgagagcagaagacgtcgcttcattcttctccttccctttaaccgcctttcttctcatcgcctccgtcagaggaatcaccggcctcgtcacagcggagaccaacagtcctacgaaaccatccgacgccgtttcggtggagaaatccgataacgtctctctctacgcgtctgcttctgttttctcgaaaacgttctggttatggatgaatcctttactcagcaaaggctacaaatctccactgacgctcgaacaagtccccacgctttctccagagcacaaagcagagaggctcgcgcttctcttcgaatcgagttggcccaaaccgtcggagaattctagccaccctatccgtacgactctactccgatgtttctggaaggagatcctcttcaccgcgattctagccatcgtccgtctcggcgtcatgtacgttggtcccgttctcatccagagcttcgtcgatttcacctccggcaagagatcctccccgtggcaaggttattacctcgtcctcatcctccttgttgccaaattcgtcgaggtcttgacgacgcatcagttcaatttcgattcccagaagcttgggatgcttataaggtcaactctaatcactgcactctacaagaaaggtttaaagctcacaggctctgcgcgtcagaaccacggcgtaggacaaatcgtgaattacatggccgtagatgcacaacagctctctgacatgatgcttcagctccacgcaatctggctcatgcctttgcaagtcactgttgcactagtgcttctctacgggagcctaggcgcgtctgttataaccgcggttattgggctgactggagtgttcgtcttcatcctcctggggactcagagaaacaacggataccaattcagcttgatgggaaaccgagattctcggatgaaggccaccaacgagatgctcaattacatgcgagtcatcaagtttcaggcttgggagaatcattttaacaagaggatcctcaaattcagggacatggagtttggttggctatccaagtttctttactccattgctggcaatattattgtcctctggagcacgccagtgcttatctctgctctcaccttcgccaccgcccttgccttgggagtcaagcttgacgctgggactgtgttcaccaccacaaccattttcaagatcctgcaagaacccatcaggacgtttcctcagtctatgatttctctctcgcaggcaatgatctctcttgggagactggactcatacatgatgagcaaagagctgtcggaagatgctgtggagagagccctgggttgtgatggtaatactgccgtggaggtcagagatggaagctttagttgggatgatgaggacaacgaacctgctctcagtgatatcaacttcaaggttaagaaaggtgagctcactgcgatagttggaaccgttggttcagggaaatcttctctgttagcttcggttcttggtgaaatgcacagaatctcaggccaggtgagagtttgtgggagcacaggttatgtagctcagacgtcgtggattgaaaacgggacggttcaagacaacatcttgtttggtcttccaatggttagagagaagtacaacaaagttctcaatgtctgttctcttgaaaaagacctacaaatgatggagtttggagataagactgagattggagaacgcggaatcaacctcagcggagggcagaagcaacgtatacagctcgcacgtgctgtctatcaggaatgcgatgtatacttgctcgacgatgtttttagcgcagtggatgctcataccggttcagatatattcaagaaatgtgtaagaggagctctgaaaggcaagaccgtattactcgttacccatcaagtggatttcttgcacaacgtggattgcatcttggtgatgcgggatggaaagattgttgaatcaggaaaatatgacgaattagtcagctccggattggattttggggaacttgtggctgcacatgagacgtcaatggagctggttgaagccggtgcagactctgcagcagtcgccacatccccaagaacaccaacgtctccccatgcaagctctccgagaacgtcaatggagtctcctcacttaagtgatctaaacgatgagcatatcaaatcatttctcggttctcacatcgtagaagatggctcgaagctcatcaaagaagaagaaagggaaaccggacaggttagcttaggagtttacaaacagtactgcactgaggcttatggctggtggggaattgtgcttgttctgttcttctctctgacgtggcagggatctctaatggccagcgattactggcttgcatacgaaacatcagccaaaaatgcaatatcatttgatgcttccgttttcattctcggatatgtaattattgcacttgtttccatcgttttggtgagcatccggtcatattacgtcacccacttgggactcaagacggctcagatctttttccgacagattcttaatagtatcttacacgctcccatgtcattctttgacaccacgccatcgggaagaattctcagtcgggcatcgactgatcagaccaatgtcgatatccttattccgtttatgctcggacttgtggtctcaatgtacaccactctgctgagcattttcatagttacctgccagtacgcttggccaactgcattctttgtgattccccttggctggcttaacatctggtaccggaactattacctcgcttcttcccgtgaattaacacgcatggactcaatcactaaggctcccatcatccaccatttctctgaaagtatagctggagtgatgacaatccgatcattcaggaagcaggagttgtttagacaagagaatgtaaaacgtgtaaatgataatctcaggatggacttccacaacaatggctccaacgaatggctcgggtttcggctggagctggttgggagctgggtgctctgcatctcggctttgtttatggtattgttacccagcaacgttatcagaccagagaatgtagggttgtccctgtcgtacggactgtccctgaactcggttctgttctttgccatatacatgagctgctttgtcgagaacaagatggtttcagttgaaaggatcaaacagttcactgatattccctcagaatccgagtgggagagaaaagaaacccttccaccttcgaattggcccttccatggcaatgtacatctcgaagacctcaaggtgcgctacagaccgaacactccacttgtgctcaaggggatcactcttgacatcaaaggaggagagaaggttggtgtggttggacggacgggaagcgggaaatcgacattgatccaagtcttgttcaggcttgtagaaccatcaggagggaagataatcatagacgggattgatataagcactctagggctacatgatctcaggtcaagattcggaatcattccgcaagaacctgtcctctttgaaggaaccgtgagaagcaacatcgacccgacagagcaatactctgacgaagaaatctggaagagcctggaacggtgtcaactcaaggatgttgtagctaccaagcctgagaagctcgattctttggtggttgataatggggagaactggagcgtagggcagaggcagcttctatgcttaggcagggttatgttgaaacgcagcagacttctcttcctagacgaagcaactgcatccgttgattcccaaaccgacgccgtgattcagaagatcatcagagaagactttgcgtcgtgcaccatcatcagcatcgcccaccggattcctacagtgatggacggcgatcgagtccttgtcattgatgctgggaaagcgaaagagttcgatagcccggctcgcttgctggagaggccgtctctgtttgcggcgctggtgcaagagtacgctctccgatctgccggaatatg

SEQ ID NO: 888 - DNA, 2997 bp, Arabidopsis thaliana
atggcaaagacgagttgtgaaataatcctctgtttcttcttcttcattttaagcttcagggtcatttctgtttctgcacaacaaacttgtgacaacactgctggtagtttcaaacccaatagtacttatgacaacaaccgtcgtctcctcctctctaccttcgcctctaacgtcacggctcagaacggctacttcaatggttcgttcgggcttggtacagacagagtctacgccatggggatgtgcgctccaggtgctgaacctgatgtttgctccaactgtattaagaacacagcagagggtttactacagatctgtctaaaccagacggacggtttctcatggtctggtgaagaaaccctttgccttgttcgttactctaacaaatccttctccgggctacttggcttggagccgtctaatgatttcttcaatgtaaacgaaataagaaaagaagaccagaaggaatttgatagtgtgtttgatgagttaatgtttcgtacaatccaaggagcatcttcatcggatgtagctcctgaaccggtttacgggaacatatcggtggtgatgcaatgcactccagatgtttcttcaaaggattgtaatctttgtcttgagagaagtcttgatttctataagaaatggtacaatgggaagagaggcaccattatattgcggccaagttgctttttccggtgggaattgtatactttctttggtgcttttgatagtattaatgctagacacccaccgcctcctccacgcccgctttcaccgccccctttaaagacgccttctgtaaccaaccaaaccaatattaccaagaagaatggcaagtccttttttggaatctcaggaggaactatcgcggcgatagtcgttgtagttgttgttacaataatattgattgttgtaggcttggttatatgcaagagaagaaagcaaaagcaagaaattgaacttccaacggaatctgttcagtttgatttaaagacaattgaagcagcaacgggcaacttttctgagcataacaagcttggtgcaggtggatttggtgaagtttacaagggtatgcttttgaatgggactgaaattgcggtaaaaagattgtcaaaaacatcaggacaaggtgaaatagagttcaagaacgaggtggttgttgttgcaaagcttcaacacataaatcttgttagacttctcgggttttcgctccaaggagaagagaagttactcgtctatgaatttgttccaaacaaaagtctcgattatttcctttttgaccctaacaagagaaatcagttggactggacagtgagacgcaacatcatcggtgggattactcgaggaattctatatcttcatcaagattcacggctcaaaatcatacatcgtgacctcaaagcgagtaacattctcttagatgcggatatgaacccgaaaattgctgatttcggaatggcaaggatctttggagtggaccaaactgtagccaataccgcaagagtagttggaacctttggttacatgtctcctgagtatgtgacacatggccaattctcaatgaaatcagacgtctatagttttggagtattgattcttgagatcattagtggcaaaaagaatagcagcttctatcagatggatggcttagttaacaatttagtcacatatgtctggaaactttgggagaacaaaacaatgcatgagctcatagatccctttattaaagaagattgtaaaagcgatgaagtcattagatacgttcatattgggctgttatgtgttcaagaaaatcctgcagatcgaccaacaatgtctacgattcaccaagtgctcacaaccagctcaattactctacctgtgcctcagccacctggatttttcttcaggaacggaccaggatcgaacccatcaagccagggaatggtgcctggtcaatcgagcagcaagtcttttactagttctgtagatgaagcaacaatcacccaacggaggagaaaatcgtaccgagaaattgatattcaatgtgagttttgttgttccatgtgcttctctatttcatctgcacaaaaatgcggaaaaactggtttatttaaacccaacgataagtatgatataaaccgtcacctcctcctttcttctctagcttctaatgtctcagctcgaggcggcttctacaatgcttcgattggacaaggacctgatcggttgtatgcttctgggacgtgtatccaaggttctgaaccagagctttgctcagcttgtatcgactctgcttttattagggtgataaagaaatgtcacaaccaaacagaagccctcgactggtcctcctttaacgaggagtatccttgtatgatacgttactccaaccgttctttttttggattacttgagatgacaccatttttcaagaattacaatgctacagatttccaagtcaacttgacagagttttatcaaaaatgggaggctttgatgcttggtgtgatagctgatgctatctcgtcgccaaacccaaaattctatggtgccggcactggaaaaattgggattcaaaccgtttacgctttcgtgctatgcagtaaggatatatctccatggaactgttccagatgtttaagagggaatgtggataactataagttgtcctgcagtgggaaacctcgtggccatagtttcagcccgagctgttatatgcgatgggatctctatcaattctatggatttattgagtatagggcttctcccacgcttcctcgtgaaaaaggtagaatctcagaactatctgacgatggcggaaagatttctacaagaaatatcctcggaatcactgttgctcttgccttttttatcacggtactgcttgttctagggtatgctctttctaggaggagaaaagcctaccaagagtttgcaactgaaaggaggtcaatgaccacttatggtactgcaccgccagatgatggtaagagactatacagctatttgcattaa

SEQ ID NO: 889 - DNA, 1563 bp, Arabidopsis thaliana
atgaaaaatttaaccagtttcgtaattgttatcttactacaaagcttattgtttcatgtatatggtcgtcatcaaagttcttcgaagaacattttagtagattcatctccatttccttctgatttcctctttggtacagcttcttccgcttaccagtatgaaggtgcgttcttgactgatggaaaaagtttgaacaattgggatgtctttacgcataaaaatcctgggaaaatacttgacaagaacaatgcagatagagctgtggaccaatataatcgatttttggaggacatccaattaatgtcttttcttggagtgaacagttataggttttcaatttcttggtgtagaatcttacctagaggaagatttggagagattaattatttggggataaagtattacaacatatttatcgatgctctcattagtagagggattaaaccatttgtgacgttgaaccatgtcgactatcctcaagaactcgaggaccggtttcaaagttggttaaaccccgagatgcagaaggaatttggttatttagccgatatatgtttcaagcattttggaaaccgagttaaatactggaccacgcttaacgaaccaaatcaacaattaatcttaggctatctaacaggtaaatttccaccctctcgttgctcctcgccatacgggaactgtagccaggggaattcagaaaccgaacctttcatagccgcacataacatgatccttgcacacgcaaaagcggttaacatatacaagaccaaatatcagaaagaacaaaagggaagcattggcattgtggtacaaacatcatggtttgaacccattagtgattccaatgcggataaagaagctgctgagagagctcaatcattttactctaattggattctagatcccgttatatatgggaaatatccaaaagaaatggtagatattcttggaccagccttgccacaattttcgagcaatgaagtgaagaacttagagaagtcgagggcagatttcgttggtattaatcactatacaagttacttcattcaagattgtttgacctctgcttgtaatactggacatggagcttttaaggccgaaggatatgctctcaagttagaccggaaaggcaatgttactataggagaacttaccgatgtaaattggcagcatattgatcccacaggattccacaagatgctgaattatttaaaagataggtacccaaacatgccaatgttcataactgaaaacggttttggagacttgcaaaaacctgaaacaacggataaagaacttctaaatgatacaaaaaggatccaatacatgagtggatacttagaagctttacaagcagcaatgagggatggagcaaatgtgaagggttattttgtgtggtcactattagacaattttgagtggttgttcggatacaaggttcggtttggtctattccatgtggatctaacaactcttaaaaggtcaccgaaacaatcagcttcatggtacaaaaattatatcgaagaacacgtgaatcgaagagatatcgtagataattattaa

SEQ ID NO: 890 - DNA, 1785 bp, Arabidopsis thaliana
atgggtcattgttacagccggaacatctccgccgtcgaggacgacgagatccccaccggtaacggcgaggtttcgaatcaaccatctcaaaatcaccggcatgcttcgattcctcagtctccggttgcttctggtactcctgaagtcaactcatataacattagccctttccaaagcccgttaccggcgggagtagctccatcaccggcgagaactccgggacggaagttcaaatggccgtttcctccaccgtcacctgcgaaaccgattatggcggctttgagacgacgacgtggcgctccgcctcagcctcgagatgagccgatcccggaggatagtgaagatgtagtagatcacggtggtgacagtggcggcggagagaggttagataagaatttcgggtttgggaagaacttcgaagggaagtatgagttagggaaagaagtagggcgagggcattttggtcatacttgttgggcaaaagcgaagaaaggcaagatgaagaaccaaaccgtggctgtcaaaatcatctctaaagctaagatgacgtcgacgttatctattgaagatgttcgtagagaagtgaaattgctgaaagctttatcagggcataggcatatggttaagttctatgatgtatatgaggatgctgataatgtctttgttgttatggagttatgcgaaggtggagagctattggatagaattttggcgagaggtggacgataccctgaagtcgatgccaaacgtattcttgtgcagattttgtctgcaacagcattttttcaccttcaaggtgtcgtgcaccgtgatctgaagccggagaattttctctttaccagcagaaatgaggatgcgatactcaaggtcatagattttggcttgtctgatttcattagatacgatcagcgtctcaatgatgttgtaggaagtgcatactatgttgcacctgaagtactccataggtcttacagcactgaagcagatatgtggagcatcggtgtcataagttacatacttctctgtggaagcagacctttctatggaagaactgagtctgcaatattccgttgtgtgcttagagcaaaccctaattttgaggatatgccttggccttctatatctcctactgccaaagacttcgtgaaaaggcttttgaacaaggaccataggaaacgaatgacagctgctcaagctctagctcatccgtggttacgtgacgaaaaccccggtttgcttcttgatttctcggtctacaagttggtcaagtcctatatccgtgcctcacctttccgacgatcagcacttaaggctctctcgaaagctatacctgatgaagaacttgtgttccttaaggcacagttcatgctcctggatcctaaagacggaggcctatcccttaactgtttcacaatggctttaacaagatatgctactgatgctatgatggaatcaaggcttcctgacattttaaatacgatgcaacctctggcgcaaaagaagcttgactttgaagagttctgtgcggctgcggtcagtgtttaccaactggaggctcttgaagaatgggaacagattgcaacttcagcatttgagcactttgaacatgaaggaaaccgaatcatatctgtccaagaactcgccggggagatgagcgtgggaccgagtgcatatcctctgctcaaggattggatccgaagttcggatggaaagctgagtttcttggggtacgctaagttcttgcatggtgtgaccgtacgaagctcaagctcgagacctaggtga

SEQ ID NO: 891 - DNA, 3864 bp, Arabidopsis thaliana
atgggtgaggaaggttcaatgtttggtctgggaggtgaatttccggttgatgattgtgatggtggttttgagtttgaagatgatgacgagactattgacatcgaaacgctttatcggattctagatgagaagcctgattctgctgaggtagttttctcggcttttgtgggtagccaagaaaacttatcaccagttggttcatctgctgacgagctcaaggattcacagttgctaaatggttcatttgatgaacatgtgaaaatggaagccgggctgagtccttcacctgctcatacttgctctgcaagtcttaaagattggttttcgttaagtcagggtgagcagcctgtggaaacatgtggagtatctcaatctgagatgactagttgtagtatatcgtctagtttctctgatcctgatggcaatatgatggccttcaatcctgtgaattgtgacgttgacactgtttccaagcaggatgataagataatcgattccaaatctatgttgactccatattttgacaacgtgactggatacggagtggggttgggagccaatcataattcgtctgccatgtctgttttttttaataattccaattccctcagtgacagtgcggataactatgtctcttctgcacaagattgctacaatacaagtggtacatccttgtcagaccatacccccaattctgttcagaatttcgcgtttgagttctttcctaataaagaagaagctgtaaatgatgttgagagtggagtaagtgagtctcagtcggatggtgccagccggatgatttttgatagacatggaagagtggataatggatctttagaaaggaaacctcctattgatttttctagtgcaagagggatcagtttcaagtttgaaagtaatccttcagtttctcctgcctgtgtcaaaccctacaacagttttgacagtcatttagctgatagtgaccttgaccggcctaataattattcatgcagttttcaggataataaaactgttcatgtgaaggttaaaccagaggctgaatcagagaaagttgtctacagttcagttccaggggaatttagtgtcagggatgatgcttatctttctggagaaaccaatcgttggtggtctggtgcatcaagctctgcagtctcctatcaaacagatattgaaaaaggatactcatatatggcaccgcaaacagctctacctagccaagacagtggcaagataagctccaatcatttttacgattcagatacatgtttgcaatatgttgtagaagatcccagcccagtgacacaaaacaatgagtataaagactttcaaattcaacaaggagaccgggaatatattcaaccgaggggcattgattctcaattctcaaatgccagctttgaatcagttcaaagccattcttcagaatgtatatccgatagtgatgatgattctgacgtctgcataatagaaccttatggtcaatctgcaatcccacatcgacctctagctatgaaaatgccggtagtttcttcagaatattctacagttagtcataattttaatcaatctggaggcctgaagcttcagtcaaataaagaaaatatgatctttcaagctgcattgcaggatctcactcagcctaattctgaagcaattctgcctgatggtgtcttgacagtcccgcttctgagacatcagcgaatcgcattgtcatggatggcccagaaggagacaagtggcttcccctgttcgggtggaattcttgctgatgatcagggtcttgggaagacagtttccactatagctcttatactgaaggaaaggtctaaacctgcccaagcatgtgaagaaagtacgaagaaagaaatttttgacctagaaagcgagactggagaatgtgcgcctttaaaacccagtggaagaagcaagcattttgaacactctcaattgctttccaatgaaaacaaagttggtggagacagtgtgggtaaagtgacgggaaggccagctgctggaacgcttgttgtatgtcccactagtgttatgcggcagtgggctgatgaattacataagaaggtgactagtgaagcaaatctctctgttctggtataccatgggtctagcagaacaaaggatcctcatgagttggctaaatatgatgttgttgttaccacattttctattgtaagtatggaagtgccaaagcagcctcttgttgatgatgaggatgaagagaaggatggtgtacatgatggtggaactgcagctactggcttttgctcaaacaagaaaaggaaatatcctcccgattctaaaaagaagggttcaaagaagaagaaagttgagtttctgtctggccctcttgcgaaagtttcatggtttagagttgttctagatgaggcacagagcattaaaaattacaaaacccaagttgcaagagcatgctggggccttcgtgctaaacggaggtggtgtttgtctggcactccaatccagaattcaatcgatgacctttacagctactttcgattcctcaaatatgatccttactcttcctacgtattgttctgtagcacgattaagaaccctataactaggaacccagtgaaaggatatcagaagctgcaggctatccttaaaacagtgatgcttcgccgaactaaaggttcacttcttgatgggaaacccataatctctttacctccgaagtccattgagttgagaaaagtggatttcactgtggaggaacgtgatttctactccaaactagaggctgaatctcgtactcaattcagggaatatgcagaagctggaacagtgaagcaaaattatgtaaatatcttgttgatgctcttgcgccttcgccaagcttgtgatcaccctcttctcgtgaatggtgaatacagttttacctgggaatcttctgttggattagctaagaagcagattcagtcagacgcttcattggcaatttgtggtatctgcaatgatgcacctgaagatgctgttgcttcagtttgcggtcatgttttctgtaaacagtgcatttatgaacgccttactggtgatagtaatcactgtccctttgcaaactgcaatgtcagactcaccatctcatcgttatcttccaaaacgagattggacgatgctatgcctgacatgcaggagcgtgctacttcgaatagccttagcccttgttctgatgaagatcttccatatggttcatctaaaatcaaggctgctctagagatcttacaatcactgcccaaagcacatgatttgacagattcaaatcagatctctgaaaacagagaatactccggtctttctataactcctgtgaagaatgagggtatgagcgttgatgttccgattaaggtagctggagaaaaagccattgttttttcccaatggacaaagatgctaaacctacttgaagcttctcttgtaagttcacatattcagtatagaaggctcgatggaacaatgtcagttgctgctagggataaagcagtgcaggatttcaacactctccctgaggttactgtaatgataatgtctctcaaggctgctagtctcggactgaacatggtggcagcttgtcatgttctgatgctggacttatggtggaacccaacaaccgaggatcaagcaatcgatagagcacatcgtataggacagacacgaccagtaacagtagttcgcttcacagtaaaagatacagtcgaagatcggatattagcccttcagcaaaagaagagaatgatggtagcctctgcatttggagaagatgaaaagggaagccgacagtctcacctcacagtagaggacttgagctatctgtttatggctgattcatga

SEQ ID NO: 892 - DNA, 1722 bp, Arabidopsis thaliana
atggcggtaattgtgtggtggctactaacggtggttgtggtggcgtttcactcggcgtcggcggcagtagtagaatcaacgtgggaggttgagtataagtactggtggccggattgtaaagaaggaatcgttatggccatcaacggccagtttccagggccaacgatagacgcagtcgccggagacacggtcattatccacgtcgtcaacaaactctccaccgaaggtgttgttatccattggcacggcatacgtcagaaagggactccatgggctgatggagcagcaggtgtgacccagtgtcctattaatcctggcgagactttcacttacaagttcattgtcgataaggcgggaacacatttctaccatggacactacggaatgcaaagatcatcgggactatacggaatgttaatagtaagatcaccaaaagagaggttaatttacgatggagagttcaatctcttgctcagtgactggtggcaccaaagcattcacgcgcaagaactcgctctttcttctcgtcctatgcgttggatcggtgaacctcaaagcttgttgatcaatggaagaggacagttcaattgttcacaagcagcgtattttaacaaaggaggagagaaagatgtatgcacgtttaaagaaaatgatcagtgtgcacctcaaactcttcgagtcgaacccaatagagtgtaccgtcttcgaatcgctagcacaactgctcttgcttccctcaacttggctgttcaaggacaccagctggtggttgttgaagctgacggcaactacgtcgcaccgttcaccgtcaacgacattgacgtttattccggcgaaacttattctgttctccttaaaaccaacgcacttccatcaaagaagtactggatctccgtcggcgttcgtggccgagaacccaaaactcctcaagcactcaccgtgataaattacgttgatgccactgagtcacgcccatctcatccaccaccggtgactccaatctggaacgacacagatcggagcaaaagcttctcgaagaagatcttcgccgctaaaggatatccaaaaccgccggagaaatcacatgaccagctaatcctcctcaacacacagaatctctacgaagattacacgaaatggtcaatcaacaacgtctcattatccgtaccggtgacgccgtacctcggatcaattagatacggtttaaaatcggcgtacgatttgaaatcgccggcgaagaagttaattatggataattacgatatcatgaaaccgccgccgaatccaaacacaacgaaaggtagcgggatttacaatttcgcgtttggaatcgtcgtcgacgtgattcttcaaaacgctaatgttttaaaaggtgtgattagtgagattcatccgtggcatattcatggtcatgatttctgggttttgggttacggtgaagggaaatttaaaccggggattgatgagaagacgtttaatttgaagaatccgccgttacggaatacggtggtgttgtatccgtttggatggacggcgataaggtttgtgacggataatccaggggtttggttttttcattgtcatattgaaccgcatttgcatatgggtatgggtgtggttttcgtggagggagtagaccggattggtaagatggagataccggatgaagcgcttggttgtggattaaccaggaaatggcttatgaaccggggacgcccttaa

SEQ ID NO: 893 - DNA, 1533 bp, Arabidopsis thaliana
atggcttttcgagcttatattattaactttgtgatcttatgcattctcgtggcatcgaccgtttccgggtacaaccagaaagacgtgaaagcatggtgcagccaaactccaaaccctaaaccttgcgagtatttcttaacccataactcaaacaatgaacccataaagtctgaatccgagtttctcaaaatctcaatgaaactcgtattagaccgagccatcctcgccaaaacccacgcgttcacactaggaccaaagtgccgtgacacacgtgaaaaagcagcgtgggaagattgtatcaagctctacgacctcaccgtctctaaaatcaacgagacaatggacccaaacgtgaagtgctcaaaactcgacgcgcaaacatggctaagcacggctctaaccaatcttgacacatgtcgagctgggttcttagagcttggtgttaccgatattgtccttcctttgatgtcaaacaacgtctcgaatcttctatgcaacacactcgccattaacaaagttcctttcaactacaccccacccgagaaagacgggttcccttcgtgggtcaaacctggtgaccggaaacttttgcaaagctcgacgccaaaagataacgcagtggtggcgaaagacggatctggcaattttaagacgataaaagaagcgattgatgctgcttcggggagtggtaggttcgttatatatgtgaagcaaggcgtttacagtgagaaccttgagattcggaaaaagaatgtcatgttgagaggtgatggtatagggaagacgattattaccggaagcaaaagtgttggaggaggaacgacaacctttaactcagctactgtcgcggcggtcggagacgggtttatagctcgtgggatcacgtttcgaaacacggcgggtgcaagcaacgaacaagcggtagctctaagatccgggtcggatctgtcagttttttaccaatgcagtttcgaagcttaccaagacacactctacgttcactccaaccgtcagttttaccgcgattgcgacgtttatggaactgtcgattttatcttcggaaacgcagccgcggttctccagaactgcaacattttcgcacgtcgtcctcgtagtaagaccaacacaatcacagctcaaggaagatccgacccgaatcaaaacacggggattattatccacaactctcgggtcacggccgcttcggatcttcgacccgttttgggatccacaaagacttatttgggtagaccttggagacaatattctaggacggtttttatgaagacttctcttgatagtttgattgatccacgtggctggctcgagtgggatggtaatttcgctttgaagactttgttctatgctgagtttcaaaatacgggtccgggtgcttcaacttcgggtcgggtcacatggccagggtttcgggtccttggttctgcttcagaggcttccaagtttactgttggtactttcctcgccggtggctcttggattccatctagcgtgccgttcacttctggtctctag

SEQ ID NO: 894 - DNA, 1557 bp, Arabidopsis thaliana
atggattgtattttacttattctgactactcttgttgccattttcatcgtcaagattgttctcctagtcactaaacctaacaaaaaccttccaccgtcgccaaatatatgttttccgatcatcggacaccttcacctcctcaaaaagccactgctacaccggactctcagccatctctcccactccctcggccccgtcttttctctacgcctcggctctcgccttgccgttatcatctcatctccaacggcagccgaagaatgcttcttgacgaaaaacgacatcgttttagcaaatcggcctcgtttcatcatgggcaagtatgtggcttatgactacacctccatggttacggctccttacggtgaccactggcgaaacctccgtcgtatcaccgctttagaagtcttctccacaaatcgactcaacgcttcagcggaaatccgacatgacgaagttaagatgcttctccaaaagcttcacgatttatctgtcgaacgcccggctaaagtggagttacgacagttactaacgggtcttaccctaaatgtgataatgagaatgatgaccggaaagagattcttcgaggaagatgatggcggaaaggcggggataagtttggagttccgggaactagtggcggagattctagagctctctgcggcggacaatccagctgattttttgccggctctacggtggtttgactacaaaggtttggtcaagagagcaaagaggattggagaaaggatggatagtttattacaagggtttttggatgagcatagagctaacaaagacagattggagtttaagaacaccatgattgctcatttacttgattctcaagaaaaagagcctcataactacagtgatcaaaccatcaaaggtcttatactgatgatggtagtaggaggcacagatacatcggccttaaccgtggaatgggcaatgtcaaatttattgaatcatccacaaatactagagaccacgagacaaaacattgatactcaaatggaaacatcaagtagtcgtcgtttgttgaaagaagaagatttggtaaacatgaactacttgaaaaatgttgtgtcggagacactaagactttaccctgtggcaccacttatggttcctcatgtgccatcttctgactgtgtaatcggtggattcaacgttccacgtgatacgatcgtgttggttaacttgtgggctatacatcgagatccaagcgtgtgggatgatccaacgtcatttaagccggagagatttgaagggagtgatcagtttggacattacaatggtaaaatgatgccgtttgggttaggaagacgggcttgtcctgggttgagtttggctaaccgggttgttgggttattattgggttcgatgattcagtgctttgagtgggaaagcggctcaggaggtcaggttgatatgactgaaggtccaggacttagtttgcctaaggctgaaccattggttgtcacgtgcagaacacgtgagatggcttccgagttgttgttcttcggatcagagccaagcaataagaatgtctag

SEQ ID NO: 895 - DNA, 1188 bp, Arabidopsis thaliana
atgggttcttgcttcagttctcgagtcaaagcagacatcttccacaatggtaagagcagcgatctttatggtctaagtctctcaagtcggaaatcgtcttcgactgtagcggcggctcagaagacggaaggggagatattgagttcgacccctgtcaaaagcttcacctttaacgaactcaaactcgccacaagaaacttcagaccagatagtgtgatcggagaaggtggctttggttgtgtctttaaaggctggttagatgagtccactctcactccgactaaacctggaaccggtttggtcatcgccgttaaaaagcttaaccaagaaggttttcaaggtcaccgtgaatggctgacagagatcaattacttggggcaactgagtcacccaaatctagttaaactgatcggttattgcttagaagatgaacaccgtcttctagtctacgagtttatgcaaaaaggaagtcttgagaatcatctattcagaagaggtgcatattttaagccactcccatggtttctacgggtcaatgttgcgcttgatgcagcaaaggggcttgcttttcttcacagcgatcccgtcaaagtgatataccgagacattaaagcctcgaacatcttacttgatgcggactacaacgcaaaactttctgactttggactagctagagacggtccaatgggtgatttgagttatgttagtacaagggtcatgggtacttatgggtacgccgcgcctgagtacatgtcatcaggtcacttgaatgcaagaagcgatgtgtacagtttcggagttttgcttctagagattttatctggtaagcgagcgttggatcataacagaccggctaaagaagaaaaccttgtggattgggctcgaccgtacctcacaagcaaacgtaaggttctcctaatcgtggacaatcggctagacacacagtacctacctgaagaagccgtgagaatggcaagcgtggcggtgcagtgtctctcatttgaacccaagtcgcgcccgaccatggaccaagtggtccgtgccttacaacaacttcaggacaacttgggaaaaccgagtcagaccaatccggttaaggataccaagaaacttggttttaaaactggtactactaagtcatccgaaaaacggtttacacaaaaaccttttggcaggcaccttgtgtag

SEQ ID NO: 896-898 - skipped (3 entries)

SEQ ID NO: 899 - DNA, 1362 bp, Arabidopsis thaliana
atgagagaaggatctcatcttatcgtcttgcctttcccaggacaaggccacataactccaatgtcccagttctgcaaacgcttagcctcaaaaggtcttaagctcactctggtcctcgtctccgacaaaccctctcctccatacaaaacagagcacgactcaatcactgtcttccccatctccaacggcttccaagaaggcgaggaaccattacaagacctcgatgattacatggaaagagtagaaaccagcatcaaaaacaccttaccgaagttggttgaagacatgaaactgtcgggaaatccacctagggctatcgtgtacgactccaccatgccatggcttcttgatgtagctcatagttatggattgagcggtgccgtgtttttcacgcaaccttggcttgtcacagctatttactaccatgttttcaagggttcgttctctgtaccgtctacaaagtacggtcactcgacattagcatctttcccttcgttcccgatgctgactgcaaatgatttgccgtctttcctctgcgaatcgtcctcatacccgaatatactgaggattgtggtggatcagctctcaaacattgatcgagtcgacatagtgttgtgcaacactttcgataaattggaggaaaagttgttgaaatgggtccaaagcttgtggccagtcttgaatattggaccaacggttccatcgatgtatttagacaaacgactgtctgaagacaagaactacggttttagcctcttcaatgcgaaagtcgctgaatgcatggagtggctaaactcaaaggagcctaattctgttgtctatttatcattcggaagtttggtgattctaaaagaagatcaaatgttggaactcgctgcgggtctgaaacagagcggacgtttctttctgtgggttgtgagagagacagagacacacaaacttccaagaaactatgtcgaggaaatcggtgaaaaaggacttattgtaagctggagtcctcagcttgacgtacttgcacataaatcaatcggttgtttcttgacacactgtggatggaactcgacgttagagggattgagtttgggagttccaatgattggtatgccacactggactgatcagcccacgaatgctaagttcatgcaggatgtgtggaaggttggggtaagggttaaggcagaaggtgatgggtttgtgagaagagaagagattatgagaagtgtggaagaagttatggagggagagaaagggaaagagattagaaagaatgctgagaaatggaaagtgttggctcaagaggcagtttctgaaggaggtagctctgataagagcatcaatgagtttgtttctatgttttgttga

SEQ ID NO: 900 - DNA, 462 bp, Arabidopsis thaliana
atgtcgatgattccaagtttcttcaacaacaacagacgaagcaacatctttgatccattctctcttgacgtatgggatccattcaaggaactaacatcatcatcactttctcgtgagaactcagcgatcgtgaacgcacgtgtggactggagagagacgcctgaggcccacgtgtttaaagctgacttgcctggattgaagaaggaggaagttaaagttgagattgaggaggatagtgttttgaagatcagtggagagagacacgtggagaaagaagataagaatgacacgtggcaccgtgtggagagatcgagtggacagtttacgaggaggtttaggttgccggagaatgtgaagatggatcaggttaaggctgcgatggagaatggtgtgttgactgttacggtgcctaaggctgagactaagaaggctgatgttaagtctattcagatctctggttga

SEQ ID NO: 901 - DNA, 906 bp, Arabidopsis thaliana
atggcggatcgtgttaaaggtccatggagtcaagaagaagatgagcagctacgaaggatggttgagaaatacggaccgaggaattggtctgcgattagcaaatcgattccaggtcgatctggtaaatcgtgtagattacgttggtgtaatcagttatctccggaggttgagcatcgtcctttctcgccggaggaagatgagactattgtaaccgcccgtgctcagtttggtaacaagtgggcgacgattgctcgtcttcttaacggtcgtacggataacgccgttaaaaatcactggaactctacgcttaagaggaaatgcagcggaggtgtggcggttacgacggtgacggagacggaggaagatcaggatcggccgaagaagaggagatctgttagctttgattctgcttttgctccggtggatactggattgtacatgagtcctgagagtcctaacggaatcgatgttagtgattctagcacgattccgtcaccgtcgtctcctgttgctcagctgtttaaaccaatgccgatttccggcggttttacggtggttccgcagccgttaccggttgaaatgtcttcgtcttcggaggatccacctacttcgttgagtttgtcactacctggagctgagaacacgagttcgagccataacaataacaacaacgcgttgatgtttccgagatttgagagtcagatgaagattaatgtagaggagagaggagaaggacgtagaggtgagtttatgacggtggtgcaggagatgataaaagctgaagtgaggagttacatggcggaaatgcagaaaacaagtggtggattcgtcgtcggaggtttatacgaatccggcggcaatggtggttttagggattgtggagtaataacacctaaggttgagtag

SEQ ID NO: 902 - DNA, 843 bp, Arabidopsis thaliana
atggagaaacaaatctctctattgctctgtctactcctcttcatcttctcaatatcatcctctctccatgaaaccgaagctcgaaaacacaataaatataaacccgcaccgatcatgagcctagtcccaagaactctctacgaccaaatcttcatccacaaggacaacaacgcatgccctgcaaaaggtttctacccctatgaagctttcgtggaggctacaagatccttcccgaagttcgggagcgtaggaaacttttggacaaggcgacgcgaagtggctgcgtttttggcgcagatatctcacgagacaacaggtggttgggccacggcaccagacggaccatatgcgtggggattgtgttttaaagaggaagtgagtccacagagtaattattgtgatgcttctaataaggattggccttgtgtttctggcaagtcttacaaaggaagaggtcccattcaactatcttggaattacaattacggacaggcgggtcgagcattgggtttcgacggtttacagaacccagaacttgtagccaacaactccgttttagctttcaagacagctctttggttttggatgaccgaacagactcctaaaccgtcctgccataacgttatggtcaaccgatacagaccgacgaaagcagatagagcagcaaaccggactgtcggttatggtttagtcaccaacatcataaacggcggtttagaatgtgggattccaggagatggacgggtcactgaccgggtcgggtatttccaaagatacgctcagttgtttaaagtcaccacaggacctaatttagactgcgagaaccaaagacccttctcctaa

SEQ ID NO: 903 - DNA, 1248 bp, Arabidopsis thaliana
atgggtgcttgtatttcgttcttttcttcttcctctccttccaaaacagcagccacaacgaacaaccacagcaatggaacagagttctcgtcaaccaccggcgcgacaacaaacagcagcgtcggacaacagagccaattctccgatatttccactgggattataagtgattccggtaaactactggaatcgccaaatctcaaagtctataactttctggatctaaagacggcgacgaagaatttcaaaccggattcgatgttgggtcaaggaggtttcgggaaagtatacagaggttgggtcgatgccacgactcttgctccttccagagtcggttctggtatgatcgttgccatcaagagattgaattctgagagtgttcaaggatttgcagagtggcgttcagaagttaacttcttgggaatgctttcgcaccgaaatctggtgaagttattgggatactgtcgtgaagacaaagagcttctccttgtctacgagttcatgcccaaaggaagtcttgagagtcatctttttagacgaaacgatccttttccttgggatttaaggatcaagattgtgattggtgcagctcgtggccttgcgtttctacacagcttacaaagagaagtcatctatagagacttcaaagcttccaatatacttcttgattcgaactatgacgcaaagctttcagatttcggactagcaaagctaggaccagcagatgagaagtcacacgtcacgactaggatcatgggcacatatggttatgctgctcctgaatatatggcaacaggccatttatacgttaagagtgacgtattcgcctttggtgtggttttactagaaataatgaccggactgacggcgcacaacacaaaacggcccagaggacaagagagtcttgtcgactggttaagaccagaactctcaaacaaacacagagtgaaacaaataatggacaaaggaatcaaaggtcaatacacaaccaaggtcgcgaccgaaatggcacgcattacactctcttgtatcgagccagacccaaaaaaccgaccacacatgaaggaagtagtcgaagtcctcgaacacatccaagggcttaatgttgtccctaaccgttcttccactaaacaggccgttgctaactcttcacgttcttcgccacatcactatcgctataaagctggcgcacttggggctgaacgcaagagagcaacgcctggacggtttggatcagtagaaaaataa

SEQ ID NO: 904 - DNA, 1776 bp, Arabidopsis thaliana
atggccactctcctgcaaataggttcaggtgtgatttatagtaatgcccttaggaagacgcttcgacgtcctcagtcttctacatgcatcatagtgaccgaaaccacaccatgtaataagtctcccacagttcagcgtcgttctgcgaactatcagccttctcgttgggaccatcaccatctcctctcggtcgaaaataaatttgcgaaagataaaagggtacgagagagagatttgttgaaggaaaaagtgagaaagatgctcaatgatgagcaaaagacttatcttgaccaattggagttcattgacgatctacaaaaactcggggtttcttatcattttgaagcggaaatcgacaacattttaacatcttcttataaaaaagatagaacaaacatccaggagagtgacctacatgccaccgcactcgagttccgacttttcaggcaacatggtttcaatgtttcagaagatgtattcgatgttttcatggaaaattgtgggaagtttgaccgtgatgatatatatggtttaatatctctttacgaagcatcatatctttcgacaaaattggataaaaacctgcaaatattcatcagaccttttgctacacaacaactcagagactttgttgatactcatagtaatgaagattttgggtcgtgtgacatggtggaaattgtggtccaagcgttggatatgccctactattggcaaatgagaaggctatccaccagatggtacatagatgtgtatggaaaaagacaaaattataagaaccttgtcgtcgttgaatttgccaagattgatttcaacatcgtacaagctattcatcaagaggaactcaaaaacgtttccagctggtggatggagacaggtttaggtaagcaactctactttgcaagagacagaatagtggagaattatttctggacgattggacaaatccaagagcctcaatacggatacgttcgacaaacaatgacgaaaataaatgcactccttactacaattgatgatatctacgatatctatggcactcttgaagaacttcagcttttcactgtcgcgtttgaaaactgggatataaatcgtcttgatgaactccccgagtacatgaggttgtgttttcttgttatatacaatgaagtcaatagcattgcatgtgagattctcagaactaaaaatatcaacgtgatcccattcctcaaaaaatcttggacagatgtatccaaagcgtatttagtagaagcaaagtggtacaaaagtggtcacaaaccaaatttggaagagtacatgcaaaatgctcggatttcaatctcgtccccaacgatatttgttcacttctactgcgtattctccgaccagctctctattcaggtcttggagactttgtcccaacaccaacaaaacgtcgtccgatgctcctcctcagtgttccgtctagccaacgaccttgtaacctcaccggatgaattggcgagaggagacgtctgcaaatccatccaatgttacatgagtgaaactggagcatcagaggataaggcgcgttcgcatgttcgacagatgatcaatgacttgtgggatgaaatgaattatgagaaaatggcacatagctcttcgatactccatcatgattttatggaaacagtgataaatttggcacgcatgtctcaatgcatgtatcaatatggcgatggccatggctctcccgaaaaagccaaaatcgttgatcgtgtcatgtccttactcttcaatccgattcctttagattga

SEQ ID NO: 905 - DNA, 678 bp, Arabidopsis thaliana
atggccgagaaagaagagggtgtgaagcttatagggtcttgggcaagcccattcagtcgtagagtcgagatggctctcaagcttaaaggcgtgccgtacgattacttggacgaagattatttggttgtcaagagcccgttgctacttcaactcaacccggtttacaaaaaagtccctgttttggttcacaatggtaaaatattacccgagtcacaactgatccttgaatacatcgaccaaacatggacaaacaatcctattctaccgcaaagtccatatgacaaagccatggctcgattctgggccaaatttgtcgatgaacaagtcacaatgatagggctcaggtcactggtgaaatcagagaagagaattgacgttgcaatcgaagaagttcaagaactaattatgttgcttgagaatcaaatcacgggaaaaaaattattcggcggagagacgataggattcttggacatggtcgtgggaagtatgatcccgttttgtctagctcgggcttgggaaggtatgggaattgatatgattccagaagaaaagtttccagagctaaacagatggatcaagaatttgaaagaaattgagatcgtgagggaatgcattcctgatagagagaaacatattgagcacatgatgaaaattgtaggacgaatcaaagcggtctaa

SEQ ID NO: 906 - skipped

SEQ ID NO: 907 - DNA, 807 bp, Arabidopsis thaliana
atggctaaagcaggagaaaactcgagagacaaatctagatggagccttgaaggcatgaccgctcttgttacaggtggctccaaaggcctcggagaagctgtagtggaggaactagccatgttgggagcaagagttcacacatgtgccagagacgaaactcagcttcaagaacgcttacgtgaatggcaagccaaaggatttgaggtcaccacttctgtctgcgacgtctcttctcgtgagcaacgagagaaactcatggaaaccgtttcctctgtcttccaaggaaaactcaacatcctcgtaaataatgcgggaacgggtataataaagccgagtacagagtatacagcagaagattactcgtttctgatggctacaaatctcgagtccgcttttcatctctcacagatcgcgcaccctttgttgaaagcctctggttccgggagcatcgtgttcatgtcctctgttgctggacttgtgcataccggtgcatcaatctatggagcatctaaaggagctatgaatcagctaggaagaagcttagcatgcgagtgggcaagtgacaacataagggttaactctgtgtgtccatgggtcataacaactcctttaactagctttattttcagtgatgaaaagttaagaaaagcagtggaggataagacaccaatgggacgtgttggagaagcaaatgaagtatcatcgcttgtcgcatttctctgttttccggcagcttcttatattacaggtcagactatctgcgtcgacggaggtgcttcggtgaatggcttctctttcaagccttag

SEQ ID NO: 908 - DNA, 3387 bp, Arabidopsis thaliana
atggaaataactcaagtaatctatgtcaatggtaagcaagatgcatctcgtagtgtagattacttgattcttttcgctaacctgttgtttttgatgttttcagatcataacaacatagaagcaaacctaacaggtcaggaggaaatgaataccaccatggaaatcgaatcttcgtccgtacctcaatcgaagaactataagaaatggcttcgtatttccatttacgtagtttactatgaaaatggtgggaagagtacatggatgggaacacttgtccaactaatcggcttccctgttctgtttctcttccgcttcttttcccaaaccaaaaatcccaaaccaacagaagcagatttcagaaagttctcttccttcaccattcttggatcagtttacatcgttactggactattagtgtctgctaactcttatatgtcctctgttggtttactatacttaccagtttctactttctccctcatcttggcctcacaattggccttcactgccttcttctcatattttctaaactcgcagaagttcacacctttcattgtgaattctctgtttctccttactatttcctctgccctcctcgtggtcaacactgattcggaaaacacagcaaaagtgtctagagtaaaatatgtgatagggataatatgtaccattggtgcttctgctgggattggattgctgctatccctggtacaactgatcctcaggaaggttttaaagaagcaaacattctcaacggtcactgacttggtcgcttaccaatctctagttgcaagctgtgtggttctcataggacttttcgcaagcggggagtggaaaactttaacaagtgagatggaaaactacaaactggggaaagtgccatacgttatgactttggcctcgatagctatttcctggcaagtctacaccattggcgtcgtgggactgatctttgagtcatcttctgtgttctccaattccataactgctgtgggattgcctatagttccagttgtagcagtgattgttttccatgataaaatgaacgcgtcaaagatcttctccatcattttagctatctggggattcatttcatttgtctatcagcactacctcgacgaaaagaagttgaagactagccacacaagtcctgtaggagatcctcatctactacctgctgaggaaggtcacacaaacatacatagtgaccagaacttagaagcaaaccttatagatcatgaggtggtaactgaatcatcatcatcagctgtgcctcaaaccgagaactataaaaggtggcttcgtgtctccatatacgtaatctttgtcctcttttgccagccactagctacaattctgggtagattgtactatgaaaatggaggaaatagcacatatgtggtaacacttcttcaactcattggcttccctgtactggttctgttccgcttcttttctcgaatcaggcaacccaaatcaacagatacaaatttcagtcagtccccttccttcaccacccttgcatcggtttacttgtgcactggactgctagtgtccgcttatgcttatttgtctgcattggccttcactgcctttttctcatatttccttaactcgcaaaagttcactcctttgatagtcagttctttgcttctcctcactgtatcctctgctcttcttgtggtcaacactgattcagaaaactcaactaatgtatctagagtacagtatgtgatcgggttcatatgtaccatcggtgcttccgctgggattggactgttactatctctgatacaaatgctcttcaggaaagttttcacgaagcatacatcctcagcagtcacggacttggccatttaccagtctctagttgcgagttgtgtagttctcataggactttttgcaagtggagagtgggaaactttgccaagtgagatgagaaactacaaactcgggaaagtgtcatatgttttgactttagcctcggcagctatttcctggcaagtctacactcttggtcttgtgggattgatcttcgagtcatcctctgtgttctccaattccataacagctgtgggattgcctatagttccagttgcggcagtgatagttttccatgatagaatggacgcatcaaaaatcttctccattattttagctatctgcggcttcctttcattcgtctatcagcactacctcgacgaaaagaagttgaatactagccacacaagtgctgtaggagatcttcatctacctgttgaggaaggtcacacaaacatacaaagtgaccagaacttagaagcaaaccttctagatcatgaggaaactgaatcattttcagtacctcaaacgaagaactgtaagaggtggctccgtgtctccatatacgcaatctttgtcatcttctgccaaccacttgctacagttctgggtagactgtactatgaaaatggagggaaaagcacatatgtggtaacacttcttcaactcattggcttccctgtactgattctcttccgcttcttttctcgaatcaggcaacccaaatcaacagatacaaatttcagtcagtccccttccttcaccacccttgcatcggtttacttgtgcactggactgctagtgtctgcttatgcttatttgtctgcagttgggttgctttacttaccagtctctactttctccctcatcttggcctcacagttggccttcactgcctttttctcatatttccttaactcgcaaaagttcactcctttgatagtcaattctttgtttctccttacggtttcctctgccctcctcgtggtcaacactgattcagaaaacacaacaaatgtatctagagtacaatatgtgattgggttcatctgtaccattggtgcttccgctgggattggattggtactatctctgatacaactgctcttcaggaaagttttcacgaagcatacatcctcagcagtcctggacttggccaattaccagtctctagttgcaacttgtgtggtactcataggactgtttgcaagtggagagtggagaactctgccaagtgagatgagaaactacaaactggggaaagtgtcatatatcttgactttggcctcagcagctattttctggcaagtatacactgttggttgtgtgggattaatcttcgagtcttcttctgtgttctccaattccataactgctgtgggactgcctatagttccagttgtagcagtgatagttttccatgataagatggatgcatcaaagattttctccatcattttagctatctggggcttcctttcatttgtctatcagcactacctcgacgaaaagaagttgaagacttgccagacaaaacctgttgaggaagaaacacaaactttatga

SEQ ID NO: 909 - DNA, 1182 bp, Arabidopsis thaliana
atgtcttccacttctttcaccgaccttcttggttcttccggcgttgactgttacgaagatgatgaagacttgagagtttctgggtcgagttttggtgggtactatccagagagaaccgggtctggtttacctaagttcaagacggctcaaccaccacctcttccgatttcacaatcttctcataacttcactttctccgattaccttgattctcctctgcttctcagctcctcacacagtttgatatctccaacaacaggaacgtttccattgcaaggctttaatggaacaacaaacaatcactcagattttccctggcagctacaatctcaaccatcaaacgcttcttctgctttgcaagaaacatatggtgttcaagatcacgagaagaagcaggagatgattcctaatgagattgcaacacaaaacaacaatcaaagttttggaacagaacgtcagataaagataccagcatacatggtgagtaggaactctaatgatggttatggttggagaaaatacggtcagaaacaagtgaagaagagcgaaaaccctaggagttacttcaagtgtacgtatcctgattgtgtttccaagaagattgttgagacggcttctgatggacagatcactgagatcatttataaaggtggtcataatcatcctaagcctgagttcaccaagagaccatctcaatcttcattaccatcatcggttaatgggaggcgcttgtttaatcctgcttctgttgttagtgaacctcatgatcaatcagagaactcttcgatttcgtttgactatagtgatcttgagcagaaaagttttaaatcagagtatggtgagatagatgaagaggaggaacaacctgagatgaagaggatgaaaagagaaggtgaagatgaagggatgtctatagaagtaagcaaaggagttaaagagccaagagttgtggttcagacaataagtgatattgatgttcttatagatggctttagatggaggaaatatggtcaaaaagttgtcaaaggaaatactaatccaaggagctactacaagtgcacattccaaggttgtggagtgaagaagcaagtggaaagatccgcagcagacgagagagcagttctcactacctatgaaggaagacacaatcacgatatcccaaccgcgctacgtcgctcgtga

SEQ ID NO: 910 - DNA, 410 bp, Arabidopsis thaliana
atgttatcccgatcggtggtcaagcatgcgaacaatctcggtcaaattcaagctagacatttcacgacaacgcttatgaaatcgggaccaaagcatagtggtacagagcaaggcgtgaagcgaaacagtgcagatcacagacgtagattgctcgcggctagatttgaactgagaagaaagctatacaaagcgttttgcaaagatccagatcttcccagcgaaatgcgagacaagaatcgttataagctctcgaaattgccgagaaacagtgcctttgcgagaatcaggaacagatgtgtgttcactggtcgatctcgttctgtgactgagctgttccgtgtttctcgaatcgttttccgtggattagcatctaaaggtgctttgatggggataacgaaatcgtcttggta

SEQ ID NO: 911 - DNA, 1140 bp, Arabidopsis thaliana
atgtcttcaacaaaactcatatcgctcattgtctccataacattcttcctcactctccaatgctcaatggcacaaactgtcgtaaaagcttcgtactggttcccggcgagtgaatttccggttaccgacattgactcatctctcttcactcaccttttttgtgctttcgctgatctcaactctcaaaccaatcaagtcactgtctcctccgcaaaccaacctaaattctcaacctttacacaaactgtccaacgcagaaacccttctgttaaaaccctcttgtccatcggcggtggaatagcagataaaaccgcgtatgcttctatggcaagtaaccccacttctcgaaaatcattcattgattcttcgataagagtggctagatcctatggattccacggtcttgatctagactgggagtatccgagcagtgcgacggagatgaccaacttcggaacgctacttcgagaatggcgatcagcggttgtagcagaagctagtagcagcggtaaaccgcgtttgcttttggcggctgcggttttctactccaacaattactattcggtactgtacccggtttcagccgttgctagcagcttggattgggttaatcttatggcctatgatttttacggaccgggttggtccagagtgaccggtccaccagccgctctgtttgatccttcaaacgcaggtccaagcggagacgctggaacaaggtcatggattcaagctggactcccagcgaagaaagctgtcttgggatttccatactacgggtacgcgtggcgtctcacaaacgccaacagtcatagctactacgcgcctaccactggagcggcgatatcaccagatggttcgataggttacggtcagataaggaagtttatagtagataacggagcaacaacggtttataactccacagtggtcggagattattgttatgccggcacgaattggattggttacgatgataatcagagtattgtgacgaaagttagatatgccaagcagagaggtttgcttggttacttctcgtggcatgtcggtgctgacgataattctggtctatctcgtgcagcttcacaggcatgggatgctacgacggcaaccaccagaactatacagaaggtttaa

SEQ ID NO: 912 - DNA, 669 bp, Arabidopsis thaliana
atgacgataaaaagtctctcttttcttgcggctctatctctctttgctttgacacttccattagtaattgcttccgatccaagcccccttcaagacttttgtgttggtgtcaacacaccagcagatggcgtgtttgtgaatggaaagttttgcaaggatccaaggatagttttcgcggatgatttctttttctcgagcctcaacagacctggaaatacaaataacgcggttgggtccaacgtgacaaccgtcaatgttaacaaccttggaggactaaacactcttggtatctcacttgttcgtatagactatgcacccaacggtcagaacccacctcacacccacccacgtgccaccgagatcttggttgttcaacaaggaactctacttgtagggtttatctcatcaaaccaagacggaaaccgtcttttcgccaaaacactcaacgtgggtgacgtatttgtgtttccagaaggactcatccatttccagttcaacctaggaggaactccagcagttgcaatcgctgctttgagcagccaaaacgcaggtgttatcacaattgctaacacaatatttgggtctaaaccagatgtagacccgaatgttcttgcaagagcattccaaatggatgttaatgcggtcaggaatttacaagccaggttctaa

SEQ ID NO: 913 - skipped

SEQ ID NO: 914 - DNA, 1032 bp, Arabidopsis thaliana
atgtctaaatcatcgtataatcacatcttcatcttgatcttgtgtttatgtttgagatcatcatcagccttcacgaatctcaacaccttaagctttgaagaatcactttctcctctctttggagatgccaatctcgtccgttcacctgatgatctctccgttcgtcttctcctcgatcgctataccggttctggtttcatatcatcgaatatgtatcaacatggattttacagctccatgattaagcttcccgctgattatactgccggcgtcgtcgtcgccttttatacatcaaacggagacgtgttcgagaaaacacacgacgagttagacatagagtttctagggaacataaaaggaaagccgtggaggtttcagacaaatctatacggaaatggaagtacacatagaggtcgtgaagagagatatcgtctctggtttgatccttctaaggagtttcatcgttatagcattctctggactcctcacaagatcatattttgggtagatgatgtgccaataagagaagtgatcagaaacgatgcaatgggagcagattatccggcaaagccaatggctctttacgccaccatttgggacgcttctgattgggctacttccggcggcaaatacaaagctaattacaaatttgcccctttcgtagctgaattcaaatctttctctctagacggttgctccgttgatcctattcaagaagtccccatggattgttccgactcagtcgatttccttgagtctcaagattactcttccattaattcccatcaacgcgccgccatgcgaagatttcgacaacgtttcatgtactattcttactgttacgatacacttaggtatcctgagcctctaccggaatgtgtgattgttccggctgagaaagataggtttaaggaaacgggaaggttgaagtttggtggtacggaggcgcgtgaacggcggagaaatcgccggcagcaacgtcggcctgagattgagattgagagtgatcctgacgacagaaaacttttataa

SEQ ID NO: 915 - DNA, 1134 bp, Arabidopsis thaliana
atggccacacatagtctctccttcttcttcagagttcttctcctcctctttcttactctctcagagagaattaaagggcaaggtgtgggaatcaactacggccaaatagcaaacaacctcccatctccggcaagagtcgccgtgctccttcgatcactaaacatcacaagagtaaaactctacgacgcagatccaaacgtcctcttctccttctcaaactcacaagtagatttcatgatcggtttaggcaacgagtatcttcaaaacatgtcaacagatccaaccaaagctcaagattggttacaacaaagacttgaaccacatatctcaaaaacacgaataacctcaatagttgtcggcaacgaaatcttcaaaaccaatgatcatgtcctcatccaaagcctattaccggctatgaaatcggtttacgctgctttaaccaatcttggtttagagaaacaagtaaccgtaacttcagctcattctttagacattctttcaacatcttatcctccttcttcaggatcattcaaagaagagtttattcaatatcttcaaccacttcttgattttcattctcaaatcgaatcacctttcttgataaatgcttatcccttttttgcttataaagatagtcctaaagaagttccattagagtatgttttgtttcaacctaatcaaggtatggttgatccaaacactaatcttcattatgacaacatgttgtttgctcaagttgatgcgctttactctgccattaagactttgggacataccgatatcgaggttcggatatcggaaaccggttggccttctaaaggagatgagaatgagattggagcttcgccggagaacgcggctttgtataatgggaatttgttgaagttgattcagcagaggaaaggaactccggcgaagcaatctgttcctattgatgtttatgtgtttgctctgtttaatgagaatcttaaaccgggtccggtttctgagaggaattatggacttttttatccggatggtaaaccggtttacaatgtcggtatgcaaggttatttacctgatattatctatacttcaagggcaactacaattaaggtaaattcctcttttcattttttatatttacatttttaa

SEQ ID NO: 916 - DNA, 1614 bp, Arabidopsis thaliana
atgagctttaccacatcattaccatacccttttcacatcctactagtctttatcctctccatggcatcaatcactctactgggtcgaatactctcaaggcccaccaaaaccaaagaccgatcttgccagcttcctcctggcccaccaggatggcccatcctcggcaatctacccgaactattcatgactcgtcctaggtccaaatatttccgccttgccatgaaagagctaaaaacagatatagcatgtttcaactttgccggcatccgtgccatcaccataaactccgacgagatcgctagagaagcgtttagagagcgagacgcagatttggcagaccggcctcaacttttcatcatggagacaatcggagacaattacaaatcaatgggaatttcaccgtacggtgaacaattcatgaagatgaaaagagtgatcacaacggaaattatgtccgttaagacgttgaaaatgttggaggctgcaagaaccatcgaagcggataatctcatagcttacgttcactccatgtatcaacggtccgagacggtcgatgttagagagctctcgagggtttatggttacgcagtgaccatgcgaatgttgtttggaaggagacatgttacgaaagaaaacgtgttttctgatgatggaagactaggaaacgccgaaaaacatcatcttgaggtgattttcaacactcttaactgtttaccgagttttagtccagcggattacgtggaacgatggttgagaggttggaatgttgatggtcaagagaagagggtgacagagaactgtaacattgttcgtagttacaacaatcccataatcgacgagagggtccagttgtggagggaagaaggtggtaaggctgctgttgaagattggcttgatacgttcattaccctaaaagatcaaaacggaaagtacttggtcacaccagacgaaatcaaagctcaatgcgtagaattttgtatagcagcgattgataatccggcaaataacatggagtggacacttggggaaatgttaaagaacccggagattcttagaaaagctctgaaggagttggatgaagtagttggaagagacaggcttgtgcaagaatcagacataccaaatctaaactacttaaaagcttgttgtagagaaacattcagaattcacccaagtgctcattatgtcccttcccatcttgcgcgtcaagataccacccttgggggttatttcattcccaaaggtagccacattcatgtatgccgccctggactaggtcgtaaccctaaaatatggaaagatccattggtatacaaaccggagcgtcacctccaaggagacggaatcacaaaagaggttactctggtggaaacagagatgcgttttgtctcgtttagcaccggtcgacgtggctgcatcggtgttaaagtcgggacgatcatgatggttatgttgttggctaggtttcttcaagggtttaactggaaactccatcaagattttggaccgttaagcctcgaggaagatgatgcatcattgcttatggctaaacctcttcacttgtccgttgagccacgcttggcaccaaacctttatccaaagttccgtccttaa

SEQ ID NO: 917 - skipped

SEQ ID NO: 918 - DNA, 1550 bp, Arabidopsis thaliana
atggcctttacgaacgtttgcctatggacgctactcgccttcatgctgacttggacagtgttctacgtcacaaacagggggaagaaggcgacgcagttggcggatgcggtggttgaagagcgagaagacggtgctactgacgttatcatcgttggggctggagtaggcggctcggctctcgcatatgctcttgctaaggacgggcgtcgagtccatgtaatagagagggacctgagagaaccagagagaatcatgggtgagtttatgcaaccaggaggacgactcatgctctctaagcttggtcttgaagattgtttggagggaatagatgcccaaaaagccacgggcatgacagtttataaggacggaaaagaagcagtcgcatcttttcccgtggacaacaacaattttccttttgatccttcggctcgatcttttcacaatggccgattcgtccaacgattgcggcaaaaggcttcttctcttcccaatgtgcgcctggaagaaggaacggtgaagtctttgatagaagaaaaaggagtgatcaaaggagtgacatacaaaaatagcgcaggcgaagaaacaacagccttggcacctctcactgtagtatgcgacggttgctactcaaaccttcgccggtctcttaatgacaacaatgcggaggttctgtcataccaagttggttttatctcaaagaactgtcagcttgaagaacccgaaaagttaaagttgataatgtctaaaccctccttcaccatgttgtatcaaatcagcagcaccgacgttcgttgtgtttttgaagttctccccaacaacattccttctatttcaaatggtgaaatggctactttcgtgaagaacactattgctcctcaggtacctttaaaactccgcaaaatatttttgaaagggattgatgaaggagaacatataaaagccatgccaacaaagaagatgacagctactttgagcgagaagaaaggagtgattttattgggagatgcattcaacatgcgtcatccagcaatcgcatctggaatgatggttttattatctgacattctcattctacgccgtcttctccagccattaagcaaccttggcaatgcgcaaaaaatctcacaagttatcaagtccttttatgatatccgcaagccaatgtcagcgacagttaacacgttaggaaatgcattctctcaagtgctagttgcatcgacggacgaagcaaaagaggcaatgagacaaggttgctatgattacctctctagtggtgggtttcgcacgtcagggatgatggctttgctaggcggcatgaaccctcgtccgatctctctcatctatcatctatgtgctatcactctatcctccattggccatctactctctccatttccctctccccttcgcatttggcatagccttcgactttttggtttggctatgaaaatgttggttccccatctcaaggctgaaggagttagccaaatgttgtttccagtcaacgccgccgcgtatagcaaaagctatatggctgcaacggctctcta

SEQ ID NO: 919 - DNA, 2550 bp, Arabidopsis thaliana
atggcaactgagaatcctattaggatatctggaagcaatgaaagatggtctaattctaggaaggtttctgttcctaatcgaagtggcagtgcgccaccgaacatggaggggtcttttctagctgtggataatctattgtcacgacagggcggctcagtttacaataacttgatgctaccgcgttacgggtttgaggagcccgtgaccactcatccttcttctaaacatagccttaaccgcataccttctccaccgatttattaccctactgagtatcagttcatagacaatcgtgtaggcaaactttctactcataaggaagtttctgaggatgaaagctcccaacagttatctgttaatagtgtttcagataggacagatggattggacattcgtctttcacctggttctcaaagtttggccgatttcaggcaggatgatacttcttctgggcagacccctcaacatagtcggtctaactcttcaaatggtgaagtgaacacagcagatgagagtggtaacttctcagagttgtcagatgatgtcgtggttaaagataatgctgcttcaacggcaagagcttccattggcaatgagaagagtcctgatgaatcgactatcatctccaaaatgaagagtactaacatatccggacctggaacggctaaataccctcgagaaccaaggtatggacagccagaaaggcagccgcatcaacagcaaaataatgcaacttggattcaaggtggcagcaatatgggttctcatggtgtaaacgatgcagttatcggggccggacagtttcattatggacaaccttacaagttctcgggtgatggtcagcccgtacttcagtcttccggttttacaccgcctctgctttacactgctacccaaacggcttatatgacttcaccagctcatgtctataacatgcagtctcctgctgtttattctcctcagtatggttatggaccatacaccaacatgatccctcagtttatgcctggatacccttcccatggttctgttcctgttgttgtcagtccagatttcattcctcagttatctgggccaagtgcaggaagtgtggtccatggaggtgaaatgcagtatgcggagaagctctatgttccaccaggacaaccttcttttccagatcctatgtatatgcagtactgtcaacagtcatttgggcagatggaaccactggctcctaggaaccacaccaatgctcccgagtctcagaaagatgatccaaagttccttcgacaaattagagggccaagtaactctaatatggcaagaccgggaatgggtgttaattactatggaatccagccaaatatgggcattatggtgcagtatctgcctacacatctcggccctcctctttcaccaggtcatgttccttatgtcgaggcatatcctggatggcagccacaagggagcttagaaggtgccaatggccctcgattgtgcaattttcttgaagagctgaaatctgggaaagaagtctcgtctcgtcttaggtttcttcccaattatatgataacaaacttgagtaaaatcttgtttcctttcagtgcggatcaacatgggagccgatttattcagcaaaagcttgagaattgtaaaccagaagaaaaagcagctgtctttagggaaattcttcctcatgcttgcaaactcatgacagatgtgtttggaaattatgtcattcagaagttttttgaatatggaaactcaacacagagaaaggaactcgctgatcaactcatgggacaaatagtaccacttagtctgcagatgtatggttgtcgcgtgatacaaaaggctcttgatgtcatagaacctgatcagagagttcgtttagcacgtgaactagacgggcaggtcatgagatgtgttcgggaccaaaatggaaaccatgtgatccagaaatgcatcgagaacatcccggcagacaaagttggtttcatgttatatgcattccgtggtcaagtttcctcgctctctatgcatccttatggctgccgtgtcatacagaggcttttggagcgttgttcacatgaccatcaatgtaggttcattaccgaggagatactggaatcagtctgcgtcctttccaaggaccaatatggtaattatgtcacacagcatgtcttggagaaagggacatctgaagaaagggagaggattgggagaaaactctcagggcacatcgtgcaacttagcctccacaaatttgcgtcaaatgtaatagagaagtgtctggagtatggtggtcgagttgagcgggatctcatcatcaaagagattgcagggcctgacgagagctataatagtctattgatgatgatgaaggaccagtatggaaactatgtggtgcagaagatattcgagacatgtacggctgatcagcgtttaacattgttcagccgagtgagaatgcatgcatctgcattgaagaaatacacatatgggaaacatattgttagtcgtttggaacagccctctattgaagaaaaccaagaattgaggagatga

SEQ ID NO: 920 - DNA, 3495 bp, Arabidopsis thaliana
atgaaacaacaatggcagttcttgatcctctgtttgctcgtcttgtttctaacggtggactctcgtggcagacggctactcagcgacgacgttaacgacacagctctgctaacggcgtttaagcaaacctctatcaagtcggatcctaccaactttttaggtaactggagatacgggtcgggtcgtgacccatgtacttggcgaggcgtctcttgttctagcgatggtagagtcattggacttgatctacgaaacggtggtcttaccggaaccctaaatctcaataatctcacggcgttgtctaatctccggagtctttatttgcaaggaaacaacttctcctccggagattcttcttcttcttcaggatgttctctcgaggttctggatttatcttcaaactcgcttacggactcttcaatagtggattacgttttctccacctgtttaaatctggtttctgtcaatttctcgcacaacaagctcgccgggaaattgaagtcttctccttcggcgagtaacaagagaatcacaaccgttgatctctcgaacaatcgcttctccgatgagattccggagactttcatcgccgattttccgaattctctgaaacacctcgacttatccggcaacaatgtcaccggcgacttctctcgtctcagctttggtctctgtgagaacctcaccgtattcagcttatcacagaacagcatctccggcgacagatttccggttagtctctcaaattgtaagctcctcgaaacgttaaacctctctcggaacagtctcatcggaaaaatccccggagatgactattggggaaattttcagaacctgaggcagctctctcttgcacacaacctttactccggtgagattccaccggagctttctctgctctgtcgaactctagaggttctcgatctctccggcaacagtctcaccggtcagcttccgcaatcattcacctcttgtggctcattacaaagcctaaatcttggaaacaacaagctctccggtgatttcttaagcaccgtcgtgagtaaactctctagaatcactaatctttacttaccattcaacaacatctcaggctctgttccgatttcgctcaccaactgtagtaatctgcgagttcttgatctgagctcaaacgagttcactggagaagtaccatctggtttctgctctcttcaaagctcttcggttttggaaaagttgcttattgccaacaattacctctcaggaactgtccctgtagagcttggtaaatgtaagagcttgaagactatagatcttagcttcaatgctctcactggtctgattcctaaggagatatggacattgcctaagctctccgacttagttatgtgggcgaacaatctcactggtggaatcccggagagcatttgtgttgatggaggaaacttggaaacgttaatcttaaacaacaatctcttaaccggttctcttccagaatcaatctccaaatgcaccaacatgctttggatctccctttctagtaacctgcttaccggtgaaatccctgtaggaatcggaaagcttgagaagttagcgattctgcaactcgggaacaattctttaactgggaacattccaagtgagcttggaaactgcaagaaccttatctggcttgatcttaacagcaataatctaactgggaatctcccaggtgaacttgcaagtcaggccggactggtaatgcccggaagcgtctctggtaaacagtttgcgtttgtgaggaatgaaggtgggacggattgcagaggtgcagggggtttggttgagtttgaaggaattcgtgctgagcggttagagcattttccaatggttcattcatgtcccaagactcggatatactcaggcatgaccatgtacatgttctccagtaacgggagcatgatctacttggacctttcctacaatgcggtttcaggttctattcctttgggttatggtgcaatgggatatcttcaggtcttgaatttgggacataacttgttaactggaaccataccggatagcttcggaggattgaaagcaattggagttcttgatctatctcacaatgatctccaaggattcttacctggatcactaggaggactctcttttctaagcgacttagacgtctctaacaacaatctaaccggaccaatcccattcggaggccaacttacgacgttcccactcacaagatacgccaacaactctggcctctgcggggttcctctaccaccttgtagctctggttcccggcccacgagatctcatgctcaccctaaaaaacagagcattgcgactgggatgagtgcggggattgtgttttctttcatgtgtattgtgatgcttattatggcgctttatagagcaaggaaggttcagaagaaggaaaaacagagagagaagtacattgagagccttccgacatctggtagcagcagctggaagctctctagtgttcatgaaccgttgagcatcaacgttgcaacatttgagaagccgctgcgaaaacttacttttgcacaccttttagaagccacaaacgggtttagtgctgatagtatgatcggatcaggtggatttggagatgtctacaaggctaaactggctgatggatctgttgtagcgatcaagaagttgattcaagtcacgggacaaggtgatagagagttcatggcagagatggaaacgattggtaaaatcaaacatcgaaatttggtacctcttcttggatattgcaagattggtgaagagagacttcttgtctatgagtacatgaaatacggaagcttagagacagttctgcacgaaaagaccaagaagggtggaatctttcttgattggtcagcgagaaagaagattgcaataggagctgcgcgtgggctagcttttctgcaccatagctgcattcctcatattatccacagggatatgaaatcaagcaacgttcttctagaccaagattttgttgcccgtgtctcagattttggtatggcaaggctggtgagcgctctggacacacacttgagcgtgagcacgctcgcaggtactcccgggtatgtcccaccagagtattaccagagtttccgatgtacagccaaaggagatgtgtatagctacggagttatacttctggagctcctctcaggcaagaaaccgatcgatccagaggagtttggtgaagacaacaaccttgtgggatgggctaaacagctctacagagagaagagaggagctgagatacttgacccagagttagtaacagacaaatctggcgatgttgagctacttcattacttgaagattgcgtctcaatgtttggacgatcggccattcaaaagaccaactatgattcaagtcatgacgatgttcaaagagctcgttcaggttgatacagagaacgacagtcttgatgagtttttgctaaaggaaacgccgttggtcgaagaatcacgagataaggagccttaa

SEQ ID NO: 921 - DNA, 1509 bp, Arabidopsis thaliana
atgaaggagccaacgacggagatagagattgaaacttcagctgtcgcaacgatcctgcctcctcctcttcctccgacggcgtcacctcatcaagcgttagtcgagaggctcaaggattatggacaggaagatgttttctctctctgggatgaactctcaccggaagagcgagatctcctcctcagagatatcgagaatttggatcttccaaggatagatcggatcatcagatgctcacttcattcacaagggttgccagtggcggcaatagaaccggtgccggagaattgtgtgtcaacggtggaggaaagaactaaggaagacagagaaaaatggtggaaaatgggattaaaagctatctacgaaggcaaattgggtgtggtgcttttatctggtggacagggaacaagacttggaagttcagatccaaaagggtgttataatatcggactgccatctgggaaatcactttttcagattcaagctgagaggatcttatgtgtccaaaggcttgcttctcaggcaatgagtgaggcaagtccaactcgcccagttacaatacagtggtatataatgaccagtccatttactcatgaaccaacacaaaaattcttcaagagtcacaagtattttggccttgaaccagatcaagtcaccttttttcaacaaggaactctgccttgcatttcaaaggatggcaagtttatcatggagacacctttcagcctatccaaggcgccggatgggaacgggggagtttatacagctttaaaatcttcaaggttattagaagatatggcttcgagggggattaaatatgtggattgctatggtgttgacaatgttctggttcgagtagctgaccctacttttctgggatacttcatcgacaaaagtgcagcttcagctgcaaaagtagtgcgcaaggcatatccacaggaaaaagttggagtatttgtaaggaggggaaaaggtgggcctttgactgtagttgagtacacagagcttgaccagtctatggcttctgcaactaatcaacaaacaggacgtcttcaatattgctggagtaacgtgtgcttacacatgttcactctggatttccttaaccaagttgcgaatgggctggaaaaagacagcgtttaccatttggcggagaagaagataccgtctataaatggcgacatagtgggactaaaactagaacagttcatattcgattgctttccttatgctccttcgactgcactttttgaggtgttgagggaggaagagtttgcaccggtgaagaacgcaaacgggtcgaattacgacacaccggaaagcgcaagactgttggttctacgactgcatacacgttgggtcatagcagctggtggatttctaacacattccgttcctttatatgcgactggtgtggaagtgtcaccattgtgctcgtacgctggagaaaatctagaagcgatttgtcggggaagaacctttcacgcaccatgtgaaatctccctctaa

SEQ ID NO: 922 - DNA, 1626 bp, Arabidopsis thaliana
atgaacacttttacctcaaactcttcggatctcactaccactgcaaccgaaacatcgtcctttagcaccttgtatctcctctcaacacttcaagcttttgtggctataaccttagtgatgctactcaagaaattgatgacggatcccaacaaaaagaaaccgtatctgccaccgggtcccacaggatggccgatcattggaatgattccgacgatgctaaagagccggcccgttttccggtggctccacagcatcatgaagcagctcaatactgagatagcatgcgtgaagttaggaaacactcatgtgatcaccgtcacgtgccctaagatagcacgtgagatactcaagcaacaagacgctctcttcgcgtcgaggcctttaacttacgctcagaagatcctctctaacggctacaaaacctgcgtgatcactccctttggtgaccaattcaagaaaatgaggaaagttgtgatgacggaactcgtatgtccagcgagacacaggtggctccaccagaagagatcagaagaaaacgatcatttaaccgcttgggtatacaacatggttaagaactcgggctctgtcgatttccggttcatgactaggcattactgtggaaatgcaatcaagaagcttatgttcgggacgagaacgttctctaagaacactgcacctgacggtggacccaccgtagaagatgtagagcacatggaagcaatgtttgaagcattagggtttaccttcgctttttgcatctctgattatctgccgatgctcactggacttgatcttaacggtcacgagaagattatgagagaatcaagtgcgattatggacaagtatcatgacccaatcatcgacgagaggatcaagatgtggagagaaggaaagagaactcaaatcgaagattttcttgatattttcatctctatcaaagacgaacaaggcaacccattgcttaccgccgatgaaatcaaacccaccattaaggagcttgtaatggcggcgccagacaatccatcaaacgccgtggaatgggccatggcggagatggtgaacaaaccggagattctccgtaaagcaatggaagagatcgacagagtcgtcgggaaagagagactcgttcaagaatccgacatcccaaaactaaactacgtcaaagctatcctccgcgaagctttccgtctccatcccgtcgccgccttcaacctcccccacgtggcactttctgacacaaccgtcgccggatatcacatccctaaaggaagtcaagtccttcttagccgatatgggctgggccgtaacccaaaagtttgggccgacccactttgctttaaaccggagagacatctcaacgaatgctccgaagttactttgaccgagaacgatctccggtttatctcgttcagtaccgggaaaagaggttgtgcggctccggcgctaggaacggcgttgaccacgatgatgctcgcgagacttcttcaaggtttcacttggaagctacctgagaatgagacacgtgtcgagctgatggagtctagtcacgatatgtttctggctaaaccgttggttatggtcggtgaccttagattgccggagcatctctacccgacggtgaagtga

SEQ ID NO: 923 - skipped

SEQ ID NO: 924 - DNA, 495 bp, Arabidopsis thaliana
atgaacagttcaggaggttcttgttcgtctttaatggatgtggtggcttatgatcatcatcttcatcatggtcatgatgaagagcttcatgttttagctgtagatgataatcttattgaccgtaaactcgttgagaggttgctcaagatctcttgttgcaaagtgacaacagcagagaatgcgcttagagcattggagtatttgggtttgggagatcaaaatcagcatattgatgcattgacctgtaacgttatgaaggtgagtctaatcatcaccgattactgtatgcctggaatgacaggttttgagctactcaagaaagtgaaggagtcatcaaatctgagagaggttcctgttgtgataatgtcttcagagaatattcctactcgcataaacaaatgtttagcgagtggagctcaaatgtttatgcagaagcctttgaagcttgctgatgttgagaagcttaaatgtcatctcatgaactgcagaagctaa

SEQ ID NO: 925 - DNA, 810 bp, Arabidopsis thaliana
atggcaaaggaagggggcttgggagagaactcaagatggagtcttggaggcatgaccgctcttgtcactggtggctctaaaggcatcggggaagctgtggtggaggaactagccatgttgggagcaaaagtccacacgtgtgccagagacgaaactcagcttcaagaacgcttacgtgaatggcaagcaaaagggtttcaggtcaccacttctgtctgcgacgtctcttctcgtgaccaacgagtgaaactcatggaaactgtttcctctctctaccaaggaaaactcaacatcctcgtcaacaatgtgggaacgtcaatattcaagccgaccacagagtatacagcagaagatttctcttttgtaatggctacaaatctcgagtcagctttccatctctcacagcttgcccacccattgttaaaagcctctggctcagggagcatcgtgctcatatcctctgctgctggagtcgtgcatgtcaatgttggatccatctatggagcaaccaaaggagccatgaatcagctggctagaaacttagcttgcgaatgggcgagcgacaacataaggacgaactctgtttgtccttggtatatcacaactcctttaagtaacgattttttcgatgaagagtttaagaaagaagcggtgcgtacgacaccaatggggcgtgttggagaagcaaatgaagtctcaccgcttgtggcatttctttgtcttccttcagcttcttatattactggtcagaccatttgcgttgacggcggtgccactgttaacggtttttccttcaagactatgccataa

SEQ ID NO: 926 - DNA, 1062 bp, Arabidopsis thaliana
atgaagaagaagatgatagccattggtttcgaaggatcagctaacaagattggagttggaattgtgactttagacggtactatcttagcaaatcctcggcatacgtatataacaccacctggtcatggttttcttcctagagagactgcacatcaccatcttgaccatgttcttcctttagtcaaatcagctttagagacttctcaagttactcctgaagaaatcgactgtatttgttatacgaaaggtcccgggatgggagcgccgttgcaggtttcagccattgttgttagagtattgtcacagctttggaaaaagccaattgttgctgtgaatcattgtgtggctcacattgagatggggagagtagttactggagctgatgatcctgttgtgttgtatgtgagtggtggtaacactcaggtgattgcttatagtgaaggtaggtaccggatttttggtgagactattgatattgctgttggtaattgtttggatcggtttgctagagtcttgaagctttctaatgatccaagccctggttataacattgaacagcttgctaagaaaggagaaaactttattgatcttccgtatgctgttaaaggtatggatgtatcgttcagcggaatcttgagttatatcgaaactactgcagaggagaagctcaagaataacgagtgtacaccagcagacttgtgttattcccttcaagagacggtgtttgcgatgttggttgagatcacagaaagagcgatggcgcattgtgacaagaaagacgttttgatagttggcggtgttgggtgtaacgagcgtttgcaggaaatgatgaggactatgtgctcagaacgtgatggtaagctgtttgcaacagatgaccgttactgcatcgataatggagctatgatcgcttacacaggtctactcgcgtttgttaatggtattgaaacaccgatcgaagactctacctttacacaacgatttcgcacagacgaggttcatgcggtgtggcgagagaaagaagctgtactacttggggataagaaagttgcagcgaattga

SEQ ID NO: 927 - DNA, 1614 bp, Arabidopsis thaliana
atggggaagaacgagaaaacatctctaggtcgagccttagtgaagcaccataaccatatgatccaggaaaccaaggaaaaaggcaaatcctacaaagatcaacacaagaaggttctagaatccgtgaccgaagtcagcgacatcgatgccatcatcgaacaagccgaagaagctgaacgtcttttcgcgattcatcacgattccgcaactcctgttcctatcaatatggatacaggttcgagttcgagtggcataacagctaaagaatggaaagagcaaaggatgagagaagaggctttacatgctagtagtcttcaagttcctcgtagacctcattggacacctaaaatgaatgtggagaaacttgatgctaatgaaaaacaagcttttctcacttggcgacggaaacttgcgagcctcgaggaaaatgaaaagcttgtgttgacaccattcgagaagaaccttgatatctggagacaactttggcgagtgcttgaacgtagtgatttgattgttatggttgttgatgctagagatcctctgttttaccgctgccctgatcttgaggcatatgcacaagaaattgatgagcataaaaaaacaatgcttctggtcaacaaggcagatctgttaccttcttatgtcagggagaaatgggcggaatacttctcccgcaacaatattctgtttgtcttctggtcagccaaagctgctacggctaccctagaaggtaaacccctgaaagaacagtggagagcacctgataccacacagaagacagataacccagctgtgaaagtatatggaagggacgaccttttggatcgattaaaacttgaggctctagagatagtaaaaatgaggaaatctagaggagtttccgcaacttctactgaatcacactgcgaacaagttgtggttggctttgttgggtacccgaatgtggggaagagttcgacaatcaacgcattggtaggtcagaagcgaactggtgtcacatctacccccgggaaaacaaagcatttccagacattgataatctctgaggatctaatgctctgcgattgccctggtttagtcttcccttcattctcaagctcaagatatgaaatggttgcttctggagttcttccaatagaccggatgaccgagcaccttgaagctattaaggttgtggctgaacttgttcctcgacatgccattgaggatgtgtacaacatctctctacctaaacccaaatcctatgaacctcagtcccgcccacctcttgcctcagagcttctaagaacttactgcctctctcgtggttatgttgcctctagtggactacctgatgagactagagcagctaggcagattctgaaagattacattgaaggtaagcttccacattttgcaatgcctccagagataacccgagatgatgaaaacgagacagcggatgacactttgggagccgaaacaagagaaggttcacagactgagaagaaaggtgaagaagctcctagtcttggtcttgatcaagttctagatgatcttagctcgtttgatcttgcaaatggacttgtgtcttccaaaacgaaacagcacaagaagtcacataggaaacaatga

SEQ ID NO: 928 - DNA, 960 bp, Arabidopsis thaliana
atggacggagaagagcttaccgagcaggagactgccttgtacgaccgccagattagggtttggggcgctaatgctcagagaagattgaccaaagctcatatcttggtatctggaattaaggggactgttgctgagttttgcaagaacattgtgctggcaggagttggttcagtgactttaatggatgatcgtttagcaaacatggaggccttgaacgctaactttttgattccgcctgatgaaaatgtttacagtggcaaaactgtggctgagatttgtagtgattcactcaaggatttcaaccctatggtccgtgtttccgtagagaaaggtgatttgtcaatgcttggcactgatttttttgagcagtttgatgtcgtagttataggctatggttctcgtgctaccaaaaaatatgtcaatgaaaaatgtcggaagttaaagaaacgtgtcgcattctatacagtcgattgtagagactcatgtggtgaaatctttgtggacctccaagattacaagtacacaaagcttgaagagatggtggaatgcgaactaaattttccaagttttcaggaagctatatcggtaccatggaaaccgattcctcggagaacagcaaagctctactttgctatgagagtaatagaagtgtttgaagagagtgaagggcgtaaacatggagaatgttcgctactcgatcttgccagagtcttggaaatcaaaaagcaactctgtgaggcaaactctgtgagcgagagccatataccagatattctcttggagagacttatcactggtactactgaattcccgccagtttgtgccattgtgggaggaatattagcacaggtgatcaaagcagtatcaggcaaaggagacccgttgaaaaacttcttctactatgatggtgaagatgggaaaggtgtgatggaagacatttccgactcttttacctcttaa

SEQ ID NO: 929 - DNA, 1737 bp, Arabidopsis thaliana
atggtgtcgcataagtgtgtagaagaatttggatacgcaagctacctggtaccttccaatgcaagagcacccagatccgcccggaagaggcgcagtatcgagaagaggataagtaaagaagatgataatatgtgtgcaattgatctattggccaccgtagctggacacttgtcatttgagagtgggagttctctcatgtctattgacaaactgattgaagatcatcgtgtaaaggaggaattcccggaggaagaaaaacctctaatgccagtagctttatccccttatcggggatctttgagtccctgcggattcagttctgtgataaatggcaaagtagagaatgaggtagatggttttagttactctggtggtagtgatgcttgtcaagtcgggaacttcagtcaagatgtaaaaccggatatcgatggtgatgcagtagttctggatgcgagacctaatgttgtagttagtttaggtagtagtagtagaaccgaagtgccatcaattgggaactgtgtttcccatggcgttcgggatgatgtaaatttgtttagtagagatgatgatgaaaacttttccaagtacattcacccgcgtgttacaaaacattcacctaggactgtacctcgtattggggacagaagaatcaggaagatattggcttctagacattggaaaggaggttcaaggcattcagatacgaaaccgtggagaaattattacttgcaccagcagaggagctatcctatcaagaaaaggaaaaactttgaccacatatctgattccgttactgatgattaccgtatgcgtactaagatgcatagaggtagtagaaaaggtcaaggggcatcctttgtggcaagcgactcccatgtgaaactacggatcaagtcgttcagggtgcctgagcttttcatagagattccagaaactgctactgttggctcattgaagagaatggtgatggaagcagtgagcactttactgagtgatggacaccgagttggtctgatggttcaggggaagaaagtccgtgacgataacaaaacccttcatcagactggtatctctcaggataactcccacctggactctcttgattttagccttgaacccagctcagaaatgcctcaactgttaactagtcacccgttgggacatgcttgtgaggagctgctacctgtgtgccaagctactaaaatagacaatgtgttggaatctgaccatcatgactcagcattattcccatctgactcattaggcaacaataatgtgacagaagattctaaagctatgatttctgtggcgctcaacgaattgtcttctcaatcacaaccaccttcccggaaatctagaagaagtgaacagcagcagcagcaggctgcacaacgcagaattcgtcgacctttctcagttgctgaagtagaagcacttgttcaagcagttgagaaactcggtactggaaggtggagagatgttaagctttgtgctttcgaggatgctgaccaccgcacttacgtagatctcaaggataaatggaaaacgctggtccacacggctaagatatctccacaacagaggagaggagagccagtgccgcaggaacttctaaaccgagtcttgaacgcccatggctactggacgcagcaacagatgcagcagctgcagcagaatgtgaacaagctggagcaggagacacagtctcaaacgacagagggtctgttacttctctaa

SEQ ID NO: 930 - DNA, 1389 bp, Arabidopsis thaliana
atggcaccagctcaaaaccaaatcacttctaaacacgtggcagtgatcggagccggaccagccggtctcataacgtctagggagctccgtcgtgaaggtcacagtgtagttgtgtttgaacgggagaaacaagtcggtggtctatgggtttacacacctaaatccgattccgatccacttagccttgaccccacccgatccaaagtccactcgagcatctacgagtctctccgaaccaatgtcccgagagaaagtatgggtgtcagggacttcccgtttttgccacgtttcgatgacgagtcaagagacgcgagacgttatccaaatcatagggaagttcttgcgtatattcaagactttgctagagagtttaaaatagaggagatgatccggttcgagaccgaggtggttcgcgttgaaccggttgacaacgggaactggagggtccagtcgaaaaactccggcgggttcttggaagatgagatctatgacgccgtcgtggtttgcaatggtcactatacagaaccaaatattgctcatattcctggtataaaatcgtggccaggaaagcagattcatagccacaactatagagttcctgatccattcgaaaacgaggtggtggtggtgataggaaattttgcgagtggtgccgatattagtagggacatagctaaggtcgcaaaagaagtccacattgcgtctagagcaagggaaccccacacatacgagaagatttccgttccccaaaacaatctatggatgcattccgaaatcgacaccacccatgaggatgggtcgattgttttcaaaaacgggaaggtgatatttgctgatagcattgtgtattgcaccgggtacaagtataacttcccatttcttgaaacaaatggctatttgcgcattgatgaaaaacgtgttgaacctctatacaagcatgtctttccaccagcgcttgcccctggacttgctttcgttggtttgccagcaatggggatagtatttgttatgtttgaaatccaaagcaaatgggtggcagcagtcttgtcaggacgagttacacttccctcaacagataagatgatggaagatattaatgcgtggtatgcgtcgcttgatgccttaggtattcccaagagacatactcatacgataggtagaattcagagtgagtacctcaattgggtcgcgaaagaatctggttgtgaactcgtagaacgttggagaggtcaagaagttgacggcggatacctgagacttgtggcccatccagaaacttaccgtgatgaatgggacgacgatgaactcatagaagaagcgtacaatgatttttctaggaagaagttgattagtgttgatccttcttattacctcgaaaatggaagatga

SEQ ID NO: 931 - DNA, 354 bp, Arabidopsis thaliana
atgatgatgaagtcgttgatctgtctctctctcatcctcctcccacttgtctccgtcgtggaaggtctcggtggtggtggtggtcttggtagccggaagccgatcaagaatgtatctgatccggatgttgttgcggtcgccaagtatgccatcgaggaacataacaaggagtcgaaggagaagttggttttcgtcaaggttgtggagggaacgacgcaagtggtctccggtacaaagtacgatctgaaaattgcggcgaaggatggtggtggtaagatcaagaactatgaggctgttgttgttgaaaagctttggcttcattctaagagccttgagtctttcaaggcgttatag

SEQ ID NO: 932 - DNA, 2859 bp, Arabidopsis thaliana
atggaatcgttaccatctccatttggcgatccagctcctaatttatccaattcggagctccgagaaactgcttacgagatcttagtcgctgcttgccgtagcactggaagtcgtccgctgacttacatccctcaatcgccgaaatctgatcggagcaacggtctgacgacggcgtcgttatctccgtctccgtcgcttcatagatctctgacttctacagctgcgagtaaggtgaagaaggcgttagggatgaagaaacgaatcggagacggagacggaggagcgggagaatcgtcgagtcaaccggatcggagcaagaaatccgtcacggtgggtgagttggttcgggtacaaatgcgaatctcggagcagattgattcaaggattcgtagagctcttctcaggatcgcttctggtcagcttgggaggcgtgtggagatgatggtgctacctcttgagcttctgcaacagcttaaagcttcagattttccagaccaagaagagtatgaatcatggcagagaaggaacttgaagcttcttgaagctggtttgatattatatccttgtgtgccgctaagtaaatcagataaatctgttcaacagcttaagcagattatccggtccggtctcgagaggccgttagataccgggaagattacgggggagacgcagaatcttaggagtttagtaatgtctcttgctagtcggcagaacaacaatgggattggttctgagacttgtcattgggctgatgggtttccactgaatcttagaatctatcagatgcttttagagtcttgttttgatgtgaacgatgagttgctgattgttgaagaggtagatgaagttttggagcttataaagaaaacatggcctgtcttggggataaatcagatgattcacaatgtttgctttctctgggtgttggttaatcggtatgtttcaaccgggcaagtggagaatgacttgcttgtggctgctcataacttgatactcgaaattgagaacgacgcaatggagacaaatgatcctgagtattccaagatcttgagttctgttttgagtttggtgatggattggggtgagaagagacttcttgcttaccatgatactttcaacattgataacgttgagacgctggaaactacggtttctttggggattttggtagctaaggtactaggtgaagatatttctagcgaatatagaaggaaaaagaagcatgtcgattcagggcgtgatcgagttgatacctatatcaggtcttcgttgcgtatggcttttcaacagacaaagaggatggtggaacatagcaagaaatcaaaatcccggcagagcacgaataatcttcctgctcttgcgattcttgcagaggatattggtcatttagcttttaatgagaaggcgatatttagtccaatcttgaagaattggcacccgcttgcagctggtgtggctgcagctacgcttcattcgtgctatggtaccgagttgaagaaattcgtctcgggtattactgagttgacgccagatgctattagagtactcactgctgcagataagcttgagaaggatctggtgcaaattgctgtacaagatgcagtagatagtgaagatggtggaaaatcggttataagagagatgcctccttttgaagcagaagtcgttattggtaaccttgtgaaatcgtggatcaagatccgagttgataggctaaaagagtggatcgaccggaatctccagcaagaggtatggaatccgagatcgaataaactcggtatcgctccttctgctgtggatgtactgaggatggtagatgagacattggaagcgtttttcttgttgccgattcttttgcatccagttttacttcctgagctaacgtcaggactagacaagtgtatgcagcattatgtatcaaaggcgaaatcatcctgcggctcgcggaatacgtttctacccgttttgcctgctttaacaagatgcacggtcgggtccagactacatggtgtattcaagaaaaaggagaagccaatggtagcttctcacaggagaaaatcacagctggggacgggtaatgactcggcggaaatacttcagttctgttgcaggatcaacactctgcagtatatcaggacagagatcgaatcatctgggagaaaaacattgaatcgtctcccggaatccgaagttgcagctttggatgctaaaggtaaaatatttgaacagtcgattagttattgctcgaaaggaatacagcaattgtctgaagcaactgcttacaagatcgtcttccacgatctgagcaatgttctctgggatggtctgtacctcggggaagttccttcctcaaggattgagccgtttcttcaagagctcgaacggtgccttgagattatctcctcatcggttcatgacagagtccgaaccagagtcatttcggacatcatgagagcttctttcgacgggttcttattggtcctccttgcaggtggaccatcgcgtggcttcacaattcaagactctgctgccgtagaagaggatttcaagtttctatgcgatcttttctggtcaaacggagacggattgcctttggatttgatcgagaaggtttcgacgactgtcaagagtatacttccgctgctgcgcacggatacagattctttgattgaacggtttaaagcagtgtgtctggagaatcatggttctgacagagggaagcttccgttaccgccgacttctggtccgtggagtccgacagaaccaaacacacttttaagagtattgtgttaccgttacgatgaacctgcgactaagtttctgaaaaagacctataacttgccgaggaagctaacctga

SEQ ID NO: 933 - DNA, 669 bp, Arabidopsis thaliana
atggtaaccgtaagccaaagtcacacgacgacgtttctcttcttcaccacatttctcttgatattcggatcaatctcagccgtccgtttgcttccacgaccaaacactacaacaaccaacgatctagatttcatccgaacaagctgcaacgctactctatatccagacgtctgcttcacgtcactctccggctacgcctctgccgttcaagacagtccggcgaggctagccaagctcgcaatcggcgtttcactttcacaagccaaatccactgcggcttttctctccaaactctcacgctctgccgctaaatactccggtgatggccaccaaacagcttccgccgtaatccgagactgcgtttcgaacgtcgaagacgcggtggacgagatgagaggatctctccgtcaactacgcgacatgaacggcagaggaggcggcacggcagctcggaggtcggtagaaacgtttaggttccagatgagtaacgtgcagacgtggatgagtgcagcattgacggatgaggacacgtgtacggatggatttgaagatatggacgaaggaggattgattaagacgaccgtttgtgatcggctcgaggaagtgaagaggctaacgagtaatgctcttgcccttgtcaacacttacgccaacaatggagctccatga

SEQ ID NO: 934 - DNA, 957 bp, Arabidopsis thaliana
atgaaggcagttaaaagatggagtatagggaacttagcggacattcccgtgtctttgcctggagctcgataccgtgctcctcctccaggaagaagacgagtatggatcatcatggtgctttcactgatcaccatgttctttattatggcttacatgtatcctcatcatagtaaacgtgcttgttatatgatttcatcaagaggatgcaaggctttagctgattggcttccaccttctctgagggaatattcagatgatgagattgcagctcgtgtagtcattagagaaatattgagttcacctcctgttattagaaagaactctaaaattgctttcatgtttttaactcctggtacattgccttttgagaggctttgggacagatttttcctgggccatgaagggaaattctctgtttatatacatgcatcaaaggaaaggccagttcactacagtcgttactttctcaaccgcgaaattcgtagtgatgaggtggtgtggggaaggatatcaatggttgacgcagagagacggttgttagctaatgctcttagagacacttctaaccagcaatttgttttactctctgatagctttgacgatccaggtcaacatggagcaggcaggcatatgaatcacatgttgcctgaaatcccaaagaaggattttcgaaagggtgcacagtggttcaccatgaagcgacaacacgctgtagcaactatggcagacagtctttactactctaaattccgagattactgcgggccaggtatagagaacaacaagaactgcatagctgatgaacactatctgccaacattctttcatatgcttgatcccggtggcattgctaactggactgtaacacaagttgattggtctgagagaaagtggcatcccaaaacatatatgcctgaggatatcacacacgagttactaaacaacctcacggtatag

SEQ ID NO: 935 - DNA, 804 bp, Arabidopsis thaliana
atgaagaaagtcttcggacaaactgttagagaccttaagagagaggtcaacaagaaagtgctcaaagttcctggagtagaacagaaggttctagatgctactagtaatgagccatggggtccacatggatcacttcttgctgatcttgcgcaagcttccagaaattatcatgaatatcagctgatcatggtggtcatatggaaacgccttagcgacaccggaaaaaactggcggcatgtctataaggctttgacagttttggagtacatggtaggccatggatcagaacgtgttatagacgagattagagaacgtgcatatcaaatttcgacattgtccgattttcagtatattgattccggtggtagagatcaaggaagcaatgttaggaagaaatcacagagcctggtggctttggtgaatgacaaggaaagaatagctgaagtcagacagaaggctgctgctaatagagataagtatcgcagctcagcaccaggtgggatgtataagccttcaggcggatatggggataaatatgattacggaagccgggatgaagagcgaagtagttatggaagagaaagagaatatggttacagagatgatgatagaaatagtcgtgatggagatcgtcattccagggactctgaagaccggtatgggagagatggtaatagggatgatgattacaggggaaggagcagaagtgttgataactatgggtcacgaggtaggagttcggaaagagagcgggaggatgatggccattcttcatcacggtatgttaaatttcaagtcgcctaa

SEQ ID NO: 936 - DNA, 492 bp, Arabidopsis thaliana
atggcggaagaacacagacttcaagaaccacgattatgtgctaacaattgtggcttcttcggaagcacagctacacaaaatctctgttccaaatgttttcgagatcttcaacatcaagaacaaaactcttccaccgccaaacatgctcttacccaatccttagccgccgttggcgctgctgcgtcttcctccgtgtcgccaccgcctccgcctccagctgattcgaaagaaatcgttgaagcgaaatcagagaaacgagcggcggctgaaccggaggaggcggatggtccgccgcaagatccgaagcggtgtttgacttgtcggcggcgcgtgggaatcacggggtttcggtgtaggtgtggtttcgttttctgcgggacgcataggtacgcggagcaacatgaatgttcgtttgatttcaagcggatggggaaggataagatcgctaaagcgaatccgattgtgaaagctgataagcttgagaagatttga

SEQ ID NO: 937 - skipped

SEQ ID NO: 938 - DNA, 1287 bp, Arabidopsis thaliana
atggctaattcctcaatcgtagctcttcttcttctctttgttatcgctagttccgtcaatggaggagatcaagagtatccaaatcaatatctaacagaagctttaggtgataaagaatggttagtgtctgtaagaagacaaatccatgaaaacccagaactccttttcgagttacataaaacaagtgctctgattcgtcgcgagcttgatgaattaggggtttcttattcttacccggttgcgaaaaccgggatcgtagctcaaatcggatccggttatcctccggttgttgctctccgtgctgatatggatgctcttcccttacaagaacttgttgagtgggatcataagagcaaaatcgatggaaaaatgcatgcttgtggtcatgattctcataccactatgctccttggtgctgctaaattgcttagcaaacgcaaacgtatgctcaatggaacagtgaggcttctttttcaaccagcagaagaaggtggtgcaggtgcttttcatatgataaaagaaggtgctttgggtgattctgaagcaatatttgggatgcatgttcatactggcttacctacaggagaattagcaacaatctcgggtcctgctttggcatccacaagcattttcagtgtaagaatgagtggtaaatcacccgcttcttcggagacctattcttgtgttgatccggtgttggctgcatcatctaccatcttagcattgcaacttattatctccagagaagtagatcctctcttaagccatgtgctctctgttacatttatgaaaagtggcggttctgagtttgatgtgattccggcatatgtagaatttgggggaactttgaggagtcttacaaccaatggcatcaactggttgataaagcggttgaaagaggtggttgaaggacaagctgaagtacaaagatgcaaagcggatatagatatgcatgaagacgatcatcctatgtatccagcaacagtgaacgatcacaagctacacgaattcactgaaaaggttttgaaactcttgcttggacccgagaaggtgaaaccggctaacaaggtaatggcgggtgaggattttgctttctatcaacaaaaaatacccggttactacataggaatcggtataagaaacgaagaaatcggttctgtgcgttcggttcattcgccttatttcttcctcgacgagaatgtgcttcccattggatcagcaacgtttgctgccttagctgaaatgtatctacaagagcatcagaatcaaactaagtctggagattga

SEQ ID NO: 939 - DNA, 1929 bp, Arabidopsis thaliana
atggacttcttcacttcaagcaaagctaagaaagatagcaaaaaatcatcaggactctttggcaagaaaactgtcagcaagagcactccgggcagccctgctcatccccccggcgctagatccccgcccccatcgtatctttcaaacaaaagagccgaaacagagtacgatttccccatgtccaatgaacaaagaccatactggaaacagcctgcctctgaacgcgtccccaactcccaccctaggcctcccgtgtatggatacggcacgcccgaccatcgtcgagaccacggtagagaaagaatggaggccatgagttatgagccagagaccaacgctccttccagcccatatcatccagctggaaaccgcacgcctgaacgtcctaggaaatcaaccgagtatcgtcgagaacaccaggatcgaatgtatgaagcagatacccgaagcaatgcgagcccatttcacccattcagaagcccttctccatctccattccacacgcctgatcgccgcagagaccactacgacatgtatgagcctgaggccaacaccatgctgcagaatagcgctccagggagcccattccatccagctggaagccgctctccaccaccatacagaacgcctgatcgtcgtagtaactatgataaagagcaatttgaggacctgtacgagcaagatggtgatgtcacaccgcgaaacagctctccaccgagcccgtttcatccagcagcatacaaaacggtcggtactcaaaaactcgatactggcttctttttggggataagtaaatcaaattctctttctagtgagtcacttagactgacaatagaatatgttcttgttatgctgcagtctgatcaacgtagtaaccatggtaaagagcaaattgaggacttttatgagcaagatgacgatgtaacaccacgaaacagctctccacctagcccattgcatccagcagcaagccattcaccaccaccaccacaaccatacagaacgcctgaccatcgtagaagccaccaggataacgaggatttcgaggcaatgtatgagctagatggcgacttaatacaccagaagagcgctcctccgagtcccgttcatggaccatactattcatccagcgacgacgataatcactccacctacctctatccagaaatccgcagcccacttcgttccaggatcgtatccgagaacagcacgatagttgcggccgagacctatgagcaagacaagcagttcgagccgccggagctgcctgacgagtcacaaagcttcacaatgcaggagattaccaaaatgcgaggactcaagaactacgaaagcggcaaggaagagagtcaatcaatgatatccgaggcttacgtatccgtcgcgaattacagagtgaggcagagcgtgtcggaaaccctgcaggcgatcatcgacaagcacggcgacatcgcagcctcctcgaagctgcaagcaatggcaactcggtcttattacctggaatccctagccgctgtggtgatggagctgaaaaagacggttctgagggatttgacgaaaacgcgcgtggcggagatcgcggcggtggtgaaagacatggagtcggtgaaaatcaacgtgtcgtggctaaagacagcggtaacggaactggcggaggcggtggagtatttcgggcagtacgacacggcgaaggtggagaaagaggtgtgcgagagagatctgacggcgaaaaagggggagatggaggagatgacggcggagctggtgaagagggagaaggaaatcaaagaatgcagagagaaggtgacggtggtcgcagggaggctagggcagctggagatgaaaggttcgaaattgaacaagaatctcgacctcttccagtccaaagtccacaaattccaaggagaagccgtccttctccacctttag

SEQ ID NO: 940 - DNA, 1107 bp, Arabidopsis thaliana
atggataaattgaagccaataatagcaatcatatcactccaatttggatatgcaggcatgtacatcattactatggtctccttcaagcatggcatgaaccattggatccttgctacttaccgacatgtcgtcgccacaattgtcatagctccttttgctctcattctcgagaggaaaataaggcctaagatgacatggccattgttccttaggattcttgcccttggattcctagaaccacttttggaccagaacttgtactacataggaatgaaagccacgtcagcaacgtatagttctgcctttgttaatgcacttcccgccattaccttcataatggctgtcattttcaggatagaaactgtaaatttgaagaagacacgaagtcttgcaaaagtgattggaacagcaataactgtgggaggagcaatggttatgacgttgtacaaaggtccagccattgagctctttaagactgctcatagctctttacacggcggctcctcgggcacctcctccgagaccactgatcagaattgggttaccggaactctagcggttatgggtagtatcaccacttgggcaggtttcttcattctacaatcgttcacgttgaaaaaatatccggctgagctttcgctagtgatgtggatttgtgccatgggaacggtcttaaacaccatcgcttcgctcataatggtgcgcgacgtaagcgcatggaaagtcggtatggactcgggcacacttgcggctgtttactccggagtggtttgttcgggtatggcgtattacatacaaagcattgtgattagggaacgaggtccggtttttacgacatcgtttagtcctatgtgcatgatcatcactgctttcctcggcgtgttagttttggctgaaaagattcaccttggaagtataatcggggcgatttttatcgtcttcgggctatatagcgttgtgtgggggaaagctaaggacgaagtgatatcggtggaagagaaaataggaatgcaggagctgccgatcaccaacacatcgacaaaagtggagggtggtggtattaccagtgaagtaaacgaaggtgtgactaacaatacccaagtgtaa

SEQ ID NO: 941 - DNA, 537 bp, Arabidopsis thaliana
atgaagagagaaagatctgatttcgaagaatccctcaagaatattgacattgctaaatgtctgatgatactagcacaaacctccatggtcaaacagatcggtttgaaccaacataccgagagccatacaagcaaccaattcgaatgcaaaacatgtaacaagagattttcttcgtttcaagcccttggtggccaccgggcaagccataagaagccaaagctcaccgttgagcagaaagatgtgaaacatcttagcaacgattataaaggaaatcattttcacaagtgttccatatgcagtcagagttttgggaccggacaggctttaggtggtcacatgagacggcataggtcaagcatgacggtcgagccatcgttcatctctccgatgattccatccatgccggttttgaaacgatgcggtagtagtaagaggattttgagtttggatttgaatctgactccgttagagaatgatcttgaatatatctttgggaagacatttgtcccaaaaatagatatgaagttcgttctttag

SEQ ID NO: 942 - skipped

SEQ ID NO: 943 - DNA, 1083 bp, Arabidopsis thaliana
atggtgagtgaaggagcaacaagaaaagaacttaacctctgtttcgagaatatgaagatggaaggagttttgatctctgagtggaaagatatccctgtggagcttctcatgaagattttaaaccttgttgatgatcggactgtgatcattgcttcttgtatttgtagtggctggagagatgctgtttcccttggcctcactcgcctctccctctcttggtgcaagaagaatatgaacagtttggttctatctcttgctcccaaattcgtaaagcttcagactttagtactgcgacaggacaaaccgcagcttgaggacaacgcggtggaagccatagcaaatcactgtcatgagctacaagatttggacttaagcaaaagctcgaaaatcactgaccattccctatattcacttgctcgtggttgtactaacctgactaaactcaaccttagcggctgcacttcgttcagcgacactgctcttgcgcatttgacaagattttgcaggaagctcaaaattctgaatctttgtggttgtgttgaagctgtatctgacaatacattgcaggctattggagaaaactgcaatcagttgcagtcactaaacttgggatggtgtgagaatataagtgatgatggagttatgagtttagcttatggttgtcctgatttaagaactcttgatctttgtagctgtgttctaatcacagatgagagtgttgtggctttggcgaatcggtgcattcacttgaggtcattggggttatactactgcagaaacattacagacagagcaatgtactctttagctcagagcggagtcaagaacaaacacgagatgtggcgagcggtaaagaaaggaaaattcgatgaagaaggactaagaagccttaacattagtcaatgcacttacctaacaccttcagctgttcaagctgtctgtgatacattccctgctctccacacttgttcaggcagacattcacttgtcatgagcggttgtttgaatctacaatctgttcattgtgcttgtatccttcaagctcaccgcactcacaccgtttaccctcacccggcgcattga

SEQ ID NO: 944 - DNA, 1785 bp, Arabidopsis thaliana
atggggataaagtacttgcccgtctccgtagcatcaacagctctcagctttgttggacttcaagtctggacagagttgtctctcgatagacttcgagcagatgggctgattgccaagaacatttctttaggagactctgagcatgcgcttgagctgcttctgggctcttatttcactattgcgctgcttacaaattttgtgctcaatgtgtatattcttctggtactttctctcaagactctattttttggagatttatatgatgttgaaaccaaaaagttggtggagcgacttgccaattatatcatatacaagggtacgtttctaccactggtgattcccccaacaatatttcagggtgtactgtggacagtttggttgactgttctatgtactttaaagatgtttcaagctttggctagagaccggcttgaacgattgaatgcatctccttcttctacaccttggacatactttcgtgtgtattcagtgctattcttggtcctctctgttgatatgttctggataaaactttcccttatgacatacaatacaattggttccgctgtgtatctgttgttactttttgagccatgcagtatagcttttgagaccttgcaggcgctgttaattcatgggtttcagctgctagatatgtggattaaccacttagcagttaagaactcagactgccaaagatctaagtttattgattctatgacagcaggtcgtttcttttctggtgttatgctttgtttttctattagagcccgaaaatgcattcttgtggacatttttggctcactgttggaatggaaaggcctcctcaaccgtaaccttggtttcttcctggacatggctactttggtaatggcactaggtcattatttgcacatttggtggctgcatggcattgcctttcatctggtggatgcagttttgtttctcaacatacgtgcattgctaagtgcaattttgaaacgaataaaaggatacattaaactaagaatagctctgggtgctctccatgcagccctccctgatgcaacttctgaagagttaagggcatatgatgatgaatgtgctatatgtcgggaacctatggctaaggctaaaaggcttcactgcaaccaccttttccatcttggatgcctgcgatcctggttggatcaaggtctaaatgaggtttattcttgtcctacatgtcgtaagcctcttttcgttggtagaactgaaaatgaggtgaaccctcgcacagtggaagtctcaagtgatgagcagttagcccgtcagcttgaaagacaaaacaatcctgtacatgcactagccactggattatttcctgctgaggtgccagattctgtcgaaaatgatacttcgaggaatttaggattggatccaagttggctgcagacatggtcaagtcagggttctgatgtcgctggtccttctaccacttccaggacagttggacttgggcgggttcagatgatgatgaggcatcttgcatctgttggcgaaagctatgctcaaactgcacttgacgatgctgcttggagtctatggccgatgaacccttcacaagcatccacttcttctacaactgtacctcctggtaatggtggaaggacaggtggtctgcatctgagaactgtatcaaacacgacaaatgaaagcttaacaaatatactagctatggccgagacagtgagggaagtcatgccacacgtgcccgatgaaattattttccaggtaaattttaagtgcatattggattatctgtaa

SEQ ID NO: 945 - DNA, 933 bp, Arabidopsis thaliana
atggcggcaggactctcaaccgccgttacattcaaaccactccaccgctctttctcctcctcctctaccgatttccgactccgcctcccgaaatccttatccggattctctccgtctcttcgatttaaacgcttttctgtctgttacgtcgtcgaagaacggagacagaattctccgattgagaacgatgagagaccggagagcacgagctccacaaacgctatagacgctgagtatctggcgttgcgtttggcggagaaattggagaggaagaaatcggagaggtccacttatctaatcgctgctatgttgtcgagctttggtatcacttctatggctgttatggctgtttactacagattctcttggcaaatggagggaggtgagatctcaatgttggaaatgtttggtacatttgctctctctgttggtgctgctgttggtatggaattctgggcaagatgggctcatagagctctgtggcacgcttctctatggaatatgcatgagtcacatcacaaaccaagagaaggaccgtttgagctaaacgatgtttttgctatagtgaacgctggtccagcgattggtctcctctcttatggattcttcaataaaggactcgttcctggtctctgctttggcgccgggttaggcataacggtgtttggaatcgcctacatgtttgtccacgatggtctcgtgcacaagcgtttccctgtaggtcccatcgccgacgtcccttacctccgaaaggtcgccgccgctcaccagctacatcacacagacaagttcaatggtgtaccatatggactgtttcttggacccaaggaattggaagaagttggaggaaatgaagagttagataaggagattagtcggagaatcaaatcatacaaaaaggcctcgggctccgggtcgagttcgagttcttga

SEQ ID NO: 946 - DNA, 1040 bp, Arabidopsis thaliana
atggttacgagcagcgatcaaatccaaaatggttctgaagagcaatcaaaaagatcagagatttacacatacgaagcaccatggcagatctacgcaatgaactggagcattcgtcgagacaagaagtatcggctcgcaatcacaagcctcatcgagcaatatccgaatcgcgtcgaaattgttcagcttgatgaatcaaatggtgagattcgttcagatccaaatctctgcttcgaacatccttacccaccaacgaaaaccagtttcatacccgataaagaatgtcaaagacccgatcttttagctacttctagtgatttccttcgtttatggcgaatctctgatgatgaatctcgtgttgagcttaagtcttgtcttagtagtgataagaatagtgagtttagtggtccaatcacttcatttgattggaatgaagctgagcctagacgaattggtacttctagtattgataccacttgtactatttgggatatagagcgtgaagttgttgatacccagcttattgctcatgataaagaggtttatgacattgcttggggtggtgttggtgtctttgcctctgtctcagaggatggttccgttagagtgtttgatctccgtgataaggagcattcgacgattatctacgagagtggtgagcctagtactcctttggtgcgacttagttggaacaagcaggatccgaggtatatggctactgttatcatgggcagtgctaaaattgttgtgttggatattcggtttccggctcttcctgtcgtggagcttcagcgacatcaggctagtgtcaatgctatagcttgggctcctcatagctcttcccatatctgctccgctggagatgattctcaggcgttgatttgggatatatcttccatgggacagcatgttgaaggtggtctggatccgattctagcttacacagccggcgctgaggttgagcagcttcagtggtcatcttctcagcctgattgggttgccattgccttctctaacaagctgcagattctccgggtctg

SEQ ID NO: 947 - DNA, 1386 bp, Arabidopsis thaliana
atgggagaagctggtcaatccagagacggagaatctgtcacgcctcttgttggcggtggtaatggggacaatgcggttgcaccacaagtgtttaattctttaccagctcttaatgaagctgcttcttatataactcaagcaacgtcttacttagggagcttagaatatggtggcaaggatactatttcccacccccatgagttgttacgatcaacttccggagttgacgggaattccccagtgagtgtatgcatttcgcctggtgaaaggttttcaacttcttcagaggcatctacatctgatgccaacagcccgtcgagggaatctacagagattctgccacaggcaacaaatgcaatagtgacttcgaatcggttaaatttaaatggaatttcaatgttccaagggctcattgagcgggcacggaggactgttcgtggctcggcagatgacataggatggttacagcgtgccccggagatgcctcctgttgaagatggaactgataggttcaataaaattctggaagacatcggcaatcatggacctctatattttgtggatacgaaaacgaaattctcaaagatgggtttggcgtgtcatattgcgaagattcacagcgagtcctcggttgagaaaaatgcgagagagataaaggaatacatagaggaactctgttggggatctaataagcgggttctacttcttgggcatagcaaaggaggcatagatgcagctgctgctttatcactatactggcctgaactaaaggataaggtcgctgggttggtactggcgcagagtccatatggtggaagcccaatagctacagatatcctccgtgaaggacaactaggtgattacgtcaatttgagaaagatgatggagattctaatctccaaagtcataaagggtgacattcaagcattggaagatttaacatacgagagaagaaaagaattcttgaagaatcatccgcttccccgagaactccccacggtttcattccgcacagaagctagcattagcccagcggttctatccactttatcacacgtagcacacgctgaacttcctctgacaaaccaagccgcaaaactgccagtggtaatgccacttggtgctgcaatggctgcttgcgctcagctacttcaagtcagatacggtgaaaagagtgacgggctagtgacttgctgtgacgcagaggttcctggttctgtggttgttagacccaaacgtaaactagaccatgcctggatggtgtactcttccttgaacgaggttcctttagaagctgatgctgctcaagtttgtgaagcgctcttaactttgcttgtccaagttgagcaagagaggcaacaaaaactcgcaacaaaaatcgattga

SEQ ID NO: 948 - DNA, 816 bp, Arabidopsis thaliana
atgcagctctttccggtcatcctaccgacactatgcgtcttcctccaccttctaataagtggctctggctctactccaccgttgactcactccaatcaacaagtggcagccactcgttggcttcccgccaccgcaacctggtacggaagtgccgagggagacggcagcagcggaggagcttgtggttacggatcgttggtggacgtgaagccgtttaaggctagagtcggagcggtgagtccgattctgttcaaaggtggtgaaggctgcggtgcatgctacaaggtcaggtgtctcgacaagaccatttgctctaagagagcagtcaccattattgccaccgaccagtcaccgtcaggaccatctgctaaagcaaaacacactcatttcgacctcagtggcgccgcctttggacatatggctattcccggccataacggtgtcatccgcaaccgtggcctattaaacatcctctaccgccgaacggcatgcaaatacagagggaagaacatagcgtttcatgtgaacgcaggatcaactgattattggttatcgcttctcattgagtatgaagacggtgaaggagacattggctctatgcacattcgtcaagcgggatctaaggagtggatatcgatgaagcacatatggggagcgaactggtgcatcgtcgaaggaccactcaagggaccattctccgtgaagctcacaactttgtccaacaataagacactctccgccaccgacgtcatccccagtaactgggttcccaaagctacttacacctctcgcctcaacttctcccctgttctctaa

SEQ ID NO: 949 - DNA, 606 bp, Arabidopsis thaliana
atggcaagaggtcgaaagctgacgatgagccagagcgagaggtacctaggaagcagctatagttacggtgacagtaacggaaactccgccaccgacgaatcagagctcacggaggaggacatctggtcacacgccgtcgatcacagcccggagatgctggaatctcatggagcgtggaacacacgcgatgctgtggtgaggaatgggcgcgtgggtggtggtttgtcgctggcgtttgaggacgcgtcatcttcgccgaggatcgtgcaccagatacgtggcggaggagaaggaggaggaggtggtggaggaggaggaagagttgagaggcagttggcgtcgtcggctccggtgaacgtgccggattggagtaagatataccgagtcaactcggttgagtcgatacacgagtctgatgaagaggaggaggaagattccgggatgatgatgccgccgcatgagtacttggcgaagagccaacagcgacggagcagaaaatctggcggcggtggctcggtgtttgaaggagttggaagaactcttaaaggacgagaattaaggcgcgttcgagacgcgatttggagccaaacagggttctacggctaa

SEQ ID NO: 950 - DNA, 792 bp, Arabidopsis thaliana
atggagaataatccaagaagctcatcgtctctccctctagccgggcgtgtagctatagtgaccggagccaccagaggcatgggccgtgaaatcgcgattcacctccactctcttggtgcaagagtcaccatcaattatgtctcgagctcatcaaaagctgaactcttggtttcagaactaaacgactcatctcaattaaagtcagcgatcgcagttaaagcagatgtgtcagacccggaccagatcaacaacttgtttgatcaaacagaacaagagttcggatctaaagttcacatcgtcgtgaattgtgcaggtgttttggatccaaagtatccatctttatccgagacgacactagaagatttcgataacacattcacaataaacacaagagggtctttcttgtgttgcaaggaagcagctaaaagggttatgagaggaggtggtggaagaatcattatgatgtctacatcaatggttggtggtctcgccccgggttatggagtttacgcagcatcaaaggccgccgttgagacaatggtgaaagtgttggcgaaggagcttaagggaagccggataaccgcgaattgcgtggcgccagggccggttgcgacggagatgttttatgctggaaagagtgatgaaacggtgaaaatgcttgcaggggcttgtcctatggggaggatcggtgagtcaaaggatataaccgagattgtagggtttttggccggtgatggtggtgaatggattaacggtcaagttattagagccaatggaggctttgttgtctaa

SEQ ID NO: 951 - DNA, 1962 bp, Arabidopsis thaliana
atgggtttaactcgaaatttcattttatggattcttttgtcatctctcttcacggcgattcaactaacgtcgtctcaacgcaacactccaccaccacgctctaaagacgccgatctctgcaacggcgtgttcgtttcctacacttacttaaccggtaccaagattaaaccaaacgacacgaagaaccagccgtaccggttcgaatcagagatcacggtcctaaacaacggccgcgacgagcttaaatcgtggcaagtctttgttaaattcgcccaccgcgagattcttgtttcagcgaccaacgctgttctctctgacggttctagcctcccggctagcgttgagaacgggacaatcttcgccgggtttccatcggcggatttgaagacggcgatcatgacggccggcgacgtaactcagatggaagcacgtgttgagctcgtgggtactcagtttggagttgctccgccgagtgttccgcttccgaagaacatcactcttgttaatgatggatggtcttgtcctaaacccactcaacaaggtagtaatgttctgcaagtatgttgcacaccgaatccgaacattacaacaagcaaaattggtcaaaagttccttcctaggcaagaaggagatctaaccataatgtacgatgtgaccagagcatatcagtcgagttactcagcgcaggtcactatcgagaatcataacctgcttggtcggcttgacaattgggatctaagttttatgtggatgaaagatgagtttctcttctcaaccaaaggagcttatccaagtgttgtcgattcgtcggattgcatcactggtcctcaagcaaaatactataaagatcttgacttctctaatgtcatgagctgtgcaagaaggccacacatcatagacctacccctgactaagtataacgataccaatgtcgggcgtatcccatactgctgcagaaatggaactattctgccacggtccatggatccagagaagtctaaatcggtttttcaaatagaagtttacaaaatgcctcctgatctcaacatctcctctataacacctccccagagctggcagattaaaggtaaccttaacccggattacaaatgtggccctcctcttcgtgtcagctcaagccagttccctgatacaagcggtttgccttcaaacaagagtgcatttgctagctggcaagtcgtctgcaacatcactcaaccaactcctcctaaatgctgcgtctcattctcttcttatttcaatgactcagtaatcccgtgtaagacctgcgcttgtggaggttgctctagcgacagagtggcgcgtacttgcagcacaacttctccagctcttcctcttccatatcaggctcttctaattccatttgacaaccgaaccaaacttaccaacgcttgggcagtgttaaaaaaccggaaagtcccggacccattaccttgtggagataactgtggagtcagcataaactggcacctagctacagactatcgaggcggatggactgctcgagtcacactcttcaactggggtgatactgatttcgtggattggtttaccgcggttgaactgagaaatgctgcacccggttttcagaaagcgtactcgtttaacggaagtatcatcgcggtcaacgggaagaacacaactgttttaatggaagggctccctggactgaactatctccttgcagagaaagacggaaaaaacccgagtgaagactttcggatacccgggaaacagcagtcggttatctccttcaccaagaaactgactcctggaatcaaagttggttccaaagatgggtttcccaccaaagtactcttcaacggccaggaatgttcactcccttctgtactacccacgagcaacagtcacaggaaacatgtatccacctttcttctcatcctgacaccatttttggctctactgtttcttcggatttaa

SEQ ID NO: 952 - DNA, 510 bp, Arabidopsis thaliana
atgttaccttctccatcatcttcttcagcgccgacgaaaagaatagatccgtccgagctcaaacgcgttttccagatgttcgacaagaacggtgacggtcgaatcacaaaggaagagctcaacgactcgcttgagaatcttggaatctacataccagacaaagatctgactcaaatgatccacaagatcgatgctaacggtgatggatgcgtcgacatagacgagtttgagtcgctgtacagctcgattgtggatgagcatcacaacgatggcgaaacagaggaagaggatatgaaagatgcgtttaacgtgtttgaccaagacggagatgggtttatcactgtggaggagttgaaatctgtgatggcttccttgggactcaagcaagggaagaccctagatggttgtaagaagatgattatgcaagttgatgcagatggtgatggtagagtcaattacaaagagtttcttcagatgatgaaaggtggtggctttagcagcagtaattga

SEQ ID NO: 953 - DNA, 2076 bp, Arabidopsis thaliana
atgcagggggagagggccagtcttggctatttatcagaggccttgaactttgagcatggttcttcttcaagtaatggtgtgatagatcattgggagaatattcacagtcttggtgataatgacttgcaggattacatgattgcaaattctgaatcaaatacttcgcttgcaaactcagtttatcacgagcaacagggtttacgcagatttagccttggtgaggctagctctagtggcacgaaggatgaagcttccagtcacaatgagcaacgaatggaaacaagatgctttgacggacgaggaaatgaaataattgatttagacccagtgtttgcgcagccatcaggcacaaatcaacctgttcagaatgtcaatctgaatgcagagtatatagaaattcacgaggatattaatccatatagaggtcggtctggcttcatagaagctaatggaccagggaccagggtctcacaacctggcagatcttttgaagagaacggtgttggaacaggttcttctgtagagggacgtcgtgcatcctgcaaaagaaaagctcttgaaggcagtattagtcaatcttcttcaggaggttatcatgatttccagcgtggagaaagcagttcgtggaccccaggttctacggtttttaggccaggaaatggtttaaacatatctggctcccttgacaatggaccaagaggaatggtctccggtactgtaccaaattttcctgtttctgcaccaaattttcctgtttctgccattgcagagagctccagtagaaatatatgcgtcaggagtaatccctcagatcatcaagaaactgtaaacccatctacctttgctgcgggaactgttgtcaggcggcctgtccctccatcccagttgaacttgtcaagacacttaccagcagatcagcattcattggacttgagacctggacagtcttttgtcgtttctcgtaacccaaattctactcctgtgagcataccacctggttcaaggactatgctaccaccatttcggtggactgggagctcactagtgggtggaacatcgaactctactgcgcccgttgagagaaatcttcatctagatgaaaccaggtcaagaagcatacccgggaatactcttgagattcccatgtttgcagctcctgaggtaggaaattttgcccgtagtcagagtagcagaaatgtaacaaatggaaacctgaatagtgcatcatcagtgtccaggacaggctcaacaacaagtgttccaccaccaccaccaccatcttctaatctagcgtggacttcttaccagaattcaccacattatcaaagaagaaggactgaaaggtctgaacttgcacgtaggtccttgctttcttcccttgcagcagatgctacaaaccagagatctggtgatcatccaacacttcgttcgttggcccctcctgcctcttcggatgggcttgtgcttcagcctggtggtgataatagtcagatgcataatcgggcttactcgagagcaggtccgttgtttgataggcaaggggatagtgtggttggtattcctcatcctttgcgggccttggcagctgcaagcagaggaagaagcagacttatggtgtcccagatgcagaatgtcttggatgtcatgcgtagggatgctaataataacaacttgcggcttgaggacgttatgcttctaaatcactcagtactatttgatggggctactggtcatgaccggtatagagacatgcgacttgatgtggacaacatgtcatatgaggaattgttggcactagaagagcggattggagatgtttgtaccggtgtaaacgaggaaaccatatcaaaccggttaaagcaacgaaaatacaaaagcaacacaaaatctccacaagatgcagagccatgctgtgtttgtcaggaggaatacaccgaaggagaagacatggggacactagaatgtgggcatgaattccatagccaatgcattaaagaatggctgaaacagaagaatctttgcccaatctgcaagactacaggcttgaacaccgcgaagaagcggaggatagcatga

SEQ ID NO: 954 - DNA, 30 bp, Artificial Sequence
  A primer
aattctagagctgaacttacaagaacatct

SEQ ID NO: 955 - DNA, 34 bp, Artificial Sequence
  A primer
ggtgtcataataaagtgatactacatacatacca

SEQ ID NO: 956 - DNA, 27 bp, Artificial Sequence
  A primer
tttccatcaatctatgatgactttaat

SEQ ID NO: 957 - DNA, 20 bp, Artificial Sequence
  A primer
ggcgacattcctacctccaa

SEQ ID NO: 958 - DNA, 24 bp, Artificial Sequence
  A primer
gctaggacaatctaagccaatcct

SEQ ID NO: 959 - DNA, 25 bp, Artificial Sequence
  A primer
ctgccgcataatcaacgcacgtctt

SEQ ID NO: 960 - DNA, 24 bp, Artificial Sequence
  A primer
tcgtactcgaggaggattgataga

SEQ ID NO: 961 - DNA, 23 bp, Artificial Sequence
  A primer
ccaaaaatgctgtattcgctaca

SEQ ID NO: 962 - DNA, 27 bp, Artificial Sequence
  A primer
caatggctttggtcctccactgttcag

SEQ ID NO: 963 - DNA, 26 bp, Artificial Sequence
  A primer
agtagggaaatagaggtcctgtgaac

SEQ ID NO: 964 - DNA, 28 bp, Arabidopsis thaliana
aattatacaggagaaacaaagcagtgat

SEQ ID NO: 965 - DNA, 24 bp, Artificial Sequence
  A primer
aggtcgaggcgttcccaactcctg

SEQ ID NO: 966 - DNA, 31 bp, Artificial Sequence
  A primer
cttttattaggacaaaatgaagctacattac

SEQ ID NO: 967 - DNA, 32 bp, Artificial Sequence
  A primer
agacatatcaatagacaatagtcacaataatg

SEQ ID NO: 968 - DNA, 28 bp, Artificial Sequence
  A primer
tgtcacaccacaaatcacatctaaagtg

SEQ ID NO: 969 - DNA, 21 bp, Artificial Sequence
  A primer
caattcgcccatgagcatatt

SEQ ID NO: 970 - DNA, 30 bp, Artificial Sequence
  A primer
ggcttataattagagaagtgactgaagtgt

SEQ ID NO: 971 - DNA, 24 bp, Artificial Sequence
  A primer
ctcattttcttcttcatggtcaca

SEQ ID NO: 972 - DNA, 25 bp, Artificial Sequence
  A primer
ggtcgacaatatcactgacagatga

SEQ ID NO: 973 - DNA, 24 bp, Artificial Sequence
  A primer
catataaacttctccccgcatctt

SEQ ID NO: 974 - DNA, 28 bp, Artificial Sequence
  A primer
ccaacccgttagccaactctgtgatctg

SEQ ID NO: 975 - DNA, 19 bp, Artificial Sequence
  A primer
ggaggtcgtgctcaatgca

SEQ ID NO: 976 - DNA, 23 bp, Artificial Sequence
  A primer
ggtgcttcatgagattggtcttt

SEQ ID NO: 977 - DNA, 26 bp, Artificial Sequence
  A primer
cggctcctctgtggccatagatacaa

SEQ ID NO: 978 - DNA, 30 bp, Artificial Sequence
  A primer
tgatatgtttatggagcatgtattagatga

SEQ ID NO: 979 - DNA, 26 bp, Artificial Sequence
  A primer
acaaaacatccaccatatctttagga

SEQ ID NO: 980 - DNA, 23 bp, Artificial Sequence
  A primer
cccaattttccttgtcattttct

SEQ ID NO: 981 - DNA, 22 bp, Artificial Sequence
  A primer
aattcgattcaccagcaaggtt

SEQ ID NO: 982 - DNA, 23 bp, Artificial Sequence
  A primer
gcgatttgcgtattcttgtacca

SEQ ID NO: 983 - DNA, 27 bp, Artificial Sequence
  A primer
ctcgataggccatcaatattcgcagca

SEQ ID NO: 984 - DNA, 23 bp, Artificial Sequence
  A primer
gcgttggttgattgattgtagct

SEQ ID NO: 985 - DNA, 24 bp, Artificial Sequence
  A primer
aaagacttgaaccctgtttggaat

SEQ ID NO: 986 - DNA, 27 bp, Artificial Sequence
  A primer
aatccaaacaatcttcccaatcttacc

SEQ ID NO: 987 - DNA, 19 bp, Artificial Sequence
  A primer
ggcgaacttcccatcatca

SEQ ID NO: 988 - DNA, 25 bp, Artificial Sequence
  A primer
aaatggttgcagtctccctatgtat

SEQ ID NO: 989 - DNA, 27 bp, Artificial Sequence
  A primer
ctggaactatcgaacatccccattggg

SEQ ID NO: 990 - DNA, 28 bp, Artificial Sequence
  A primer
cagttattatcaccgccttacattacat

SEQ ID NO: 991 - DNA, 18 bp, Artificial Sequence
  A primer
tgattcgtggagtgccga

SEQ ID NO: 992 - DNA, 26 bp, Artificial Sequence
  A primer
caagcacgaacacattcaactgtatg

SEQ ID NO: 993 - DNA, 22 bp, Artificial Sequence
  A primer
ccgacatcgaaggatcaaaaag

SEQ ID NO: 994 - DNA, 22 bp, Artificial Sequence
  A primer
accacagggataactggcttgt

SEQ ID NO: 995 - DNA, 23 bp, Artificial Sequence
  A primer
cgtcgctatgaacgcttggctgc

SEQ ID NO: 996 - DNA, 26 bp, Artificial Sequence
  A primer
gaggataacattctgggagctatttt

SEQ ID NO: 997 - DNA, 24 bp, Artificial Sequence
  A primer
tgttcctcaatatcttcccgagat

SEQ ID NO: 998 - DNA, 28 bp, Artificial Sequence
  A primer
tggcgtctttcaagtcctcccatatgct

SEQ ID NO: 999 - DNA, 29 bp, Artificial Sequence
  A primer
aaaatctacaattggaaatacattcatga

SEQ ID NO: 1000 - DNA, 23 bp, Artificial Sequence
  A primer
gcgtaccaattctgaacgagagt

SEQ ID NO: 1001-1953 - skipped (953 entries)

SEQ ID NO: 1954 - DNA, 166 bp, Chenopodium amaranticolor
actgcgtaccaattctagagctgaacttacaagaacatctagctctagcttattacacatatagttgaatttccatcaatctatgatgactttaattcaacatgtcatgtatggtatgtatgtagtatcactttattatgacacccgagttactcaggactcatca

SEQ ID NO: 1955 - DNA, 245 bp, Chenopodium amaranticolor
  misc_feature (1)...(245): n = A,T,C or G
gatgagtcctgagtaaatatgtcagtntccgagtaacgaatcatacactcatcgtacnatccnatagcagacttatagctaggacnatctaagccaatcctagctgccgcataatcaacgcacgtcttgcatttggaggtaggaatgtcgcccctacatagggcgactccataaacttcgtcgagtttgnggccaactgaaaggttataaaagccatagttgattcgagaattggtacgcagtca

SEQ ID NO: 1956 - DNA, 217 bp, Chenopodium amaranticolor
gatgagtcctgagtaagcaatttcaggtttataatcgtactcgaggaggattgatagagctgaacagtggaggaccaaagccattgcaatatgtagcgaatacagcatttttggcaaatctctttgcagattatatggactctactggggttcctggatggtattgtggcccttattttcttcgtcaatctgatcttcgtgaattggtacgcagtca

SEQ ID NO: 1957 - DNA, 247 bp, Chenopodium amaranticolor
  misc_feature (1)...(247): n = A,T,C or G
ctccaagttgccagaagatagttccgaaagtgagagcaatagccacggtaaagacaaatctgacagcngtgtaaggagtattacgccagtatgacaggtgctgtttccacaaacaagccaggacttgtgagaagaatgattgggagtatatagtagggaaatagaggtcctgtgaaccaggtcgaggcgttcccaactcctgaatcactgctttgtttctcctgtataattctgaattggtacgcag

SEQ ID NO: 1958 - DNA, 160 bp, Chenopodium amaranticolor
gactccccttttattaggacaaaatgaagctacattactacaatgtcacaccacaaatcacatctaaagtgaaaaaaacaccttcattattgtgactattgtctattgatatgtctttttctccaatcaatcaatgtcttttgatgaattggtacgcaga

SEQ ID NO: 1959 - DNA, 208 bp, Chenopodium amaranticolor
  misc_feature (1)...(208): n = A,T,C or G
ggactgcgtaccaattcgcccatgagcatatttgtgattttgtgaccatgaagaagaaaatgagctcatacacttcagtcacttctctaattataagccttcttttttcttgngttttttttcttcttcttctcaatgaatagtgcttttgtgttctgactcaggattagattatcaaggcagctatctagttactcaggactcatca

SEQ ID NO: 1960 - DNA, 342 bp, Chenopodium amaranticolor
  misc_feature (1)...(342): n = A,T,C or G
gatgagtcctgagtaattggntngacaaacaagggaaagattcagtgatatatgtttcttttgggtcgacaatatcactgacagatgatcagatcacagagttggctaacgggttggaaagatgcggggagaagtttatatgggtgcttagaagagcagatccaaacgacatttttacagaagctgataaagtaaaaaagcctcaacttcttgcagattatgaagaaagagtaaaagataggggaataatagtaagagattgggcaccacagctagaaatcttggctcatccatcagttggcgggttcatgagtcattgtggatggaattggtacgcagtca

SEQ ID NO: 1961 - DNA, 239 bp, Chenopodium amaranticolor
  misc_feature (1)...(239): n = A,T,C or G
gatgagtcctgagtaacaaacaacgntattagaaagcgtggagagaagttacccatggtggaggatcagtacattggcacgacgttgtctgggataagggattcagcttatcaagccatgacaggaggtcgtgctcaatgcattggtatctatggccacagaggagccggaaagaccaatctcatgaagcacctgcacaacaaagcctttgaagatgtacaggaattggtacgcagtca

SEQ ID NO: 1962 - DNA, 283 bp, Chenopodium amaranticolor
gactgcgtaccaattcaagatgatgcttgatgaattgttcttactaaatggagtgaagaatcttggggattggataccttgtttgaagtacattgatgtacaaggttatgtgaagagaatgaaggttttgggtaagaaatttgatatgtttatggagcatgtattagatgaacataatgctaaaagagaaaatgacaaggaaaattgggttcctaaagatatggtggatgttttgttacaacttgctgatgatcctactcttgaagttactcaggactcatca

SEQ ID NO: 1963 - DNA, 285 bp, Chenopodium amaranticolor
tgactgcgtaccaattcgattcaccagcaaggttactcgataggccatcaatattcgcagcactggtacaagaatacgcaaatcgctcatctggtctgtagtcttcagtctgaaatctctacaacagccatgcattgatgaaacttcctctgaaaatgaatgctttatcgttcagagtttacgttgcatgtcctctgatgttcttgagcttgagcatgacggtgttttgatcaataactactaatgatgaacgtctcacacggccattttactcaggactcatca

SEQ ID NO: 1964 - DNA, 297 bp, Chenopodium amaranticolor
  misc_feature (1)...(297): n = A,T,C or G
cactgcancacatgatcttgtgcctaaagacggtgaaggctcatcgagtgcctatgtagagctcaagtttgatgatcaaagatatcgtactagcacgaaagaaaaagacttgaaccctgtttggaatgaggtattctatttcaatatatccaatccaaacaatcttcccaatcttacccttgaagcagttgtctatagctacaatcaatcaaccaacgctaaggatttccttggtaaagtatgtatcagtggatcatcctttgttacttaccctgaggcttctgaattggtacgcag

SEQ ID NO: 1965 - DNA, 322 bp, Chenopodium amaranticolor
  misc_feature (1)...(322): n = A,T,C or G
tgatgagtcctgagtaaaccacagcgacaaagtcgtgcgcgattttgtcaataaatggttgcagtctccctatgtatacccaatggggatgttcgatagttccagtgtgatgatgggaagttcgccggggtttgacatgtatggtaatgaatttggactcggaaaagctatagctcttcgaagtgggtatgcaaataagtttgttgggaaggtgacttcttatgaaggatatgagggtggaggaagtgtggatttggaaatatgtttgccaccggattcgatgaaggctcttgaatcagatgaggaattggtacgcangtca

SEQ ID NO: 1966 - DNA, 215 bp, Chenopodium amaranticolor
gatgagtcctgagtaacaatcacgttttagcgtcaaatatataatctttcattcacattactttactacaagcagttttgcactctatataaaccatgtattcagttattatcaccgccttacattacataactacaagcacgaacacattcaactgtatgacaagtaaacttcggcactccacgaatcagtccttcggaattggtacgcagtca

SEQ ID NO: 1967 - DNA, 2169 bp, Phaseolus vulgaris
attatcatacctatggctgccatttcttgcatcctttctttgcttctctcttctctaatagctcaagtcagcgcccagtttaacaccgaatactgtgataacaacaaagggaactacacaatcaatagcacctatcacaacaatctcaacacccttctatccacgctctcttcccacacacaaattaactatggtttctacaatttctcacatggtcaaaacaatgacaaagtaaacgccattgggctgtgcagaggagatgttaagccagatgagtgccgcaggtgcctcaacgattctgcactcacaatcacacagctttgtccaaaccagaaagaggcacttctgtggttgaacactagcaaatgcctgttgcgttattctcaccgcacaatattcggggtcatggaatcttctcctggcttctacttgaccaacgttaataatgtaacggaagcagataagttcaaccaagcactctccaacttaatgaggaaccccacagtcgtggctgcatcaggtgactctcgtcttaagtatgctgcggacagtgcaattgctgcaaactttcaaaccgtatatggtcttgtgcaatgcacccctgatttgtctgagacagactgcaatagatgcttggatggggctatctcagaaatcccatcgtgttgtgggaacaagatgggtggtagagttctcagaccaagttgtaatattagattcgaaagcgcaatcttctacgattcaaacgctaaattagaccctgatgtaacaccaccatctccacctccttcctccttcactaacacttcccccaaagaaagcaacaacacaataacaattgtcatcgccgttgtcgtttctattgttgttgttgctgtcgtttccctccttggtctctgcatatatttaaggaggaagaaggcaagaaaaagtccaacagttaatcaagatgatgatgatgacgacattgaaatttctcagtcattgcaattcgacttcgacacaatacgagttgctacagaagacttctctaattctaataaacttggacaaggtggatttggagcagtttacaggggtaggctccccaatggacagatgattgcagtcaaaaggttgtcaagtggatccagccaaggagacacagaatttaaaaatgaagtgcttttaatggccaagcttcagcaccgaaatttagttaggctacttggtttctgcttggaaggaagagaaagactacttatctatgaatttgttcctaacaaaagccttgattatttcatatttgatccagtcaagaaagcacagttggattgggaaatgcgatacaaaatcattagaggtattgcccgagggcttctctaccttcacgaagattctcttctgcgtattatacatcgtgatctcaaagcaagcaatattctcttagacgaagagatgaatcctaagatagcagattttggcatggcaagactggttttactggatgaaactcatgcaaatacaaatagagttgtgggaacctatggatatatggcaccggagtatataatgcaaggacagttttcggtgaaatcagatatctttagttttggtgtattgcttcttgagatcgtaagtggccagaaaaacagtggctttcgtcatggggagaatgtagaggatctactaagcttcacatggagaaactggagggatggaacagccgtaaacattgtagatccatcattggaaaacaattcacgaaatgaagtgatgagatgcatacatattggtttgctctgtgttcaagaaaatttaactgacagaccaaccatggcgaccattatgctcatgctcagtagctattctctgggtctccccattccttctgaacctgcattttatgctaacagtacagctcgaagccttccagccacgtcgtcatgggggcatagttcaagggcaacagcaaaccaatctgctcaagagtcagaaaatgagaattcaatcactgagccgtatcctcgctagattttggtcacggaattcatattcattcaccatcaatgctttagtcttaaacttaaatacagtcttggagctcatgtaattttttcacgcaatgtcttgtttgaataaaccacactttctcttcttgggttcctcttgaagaaaaaaaaaaagctt

SEQ ID NO: 1968 - DNA, 5454 bp, Brassica napus
gatccgaaaactctaaaaatactcgaagaaccgcaaaaatatccaaacgttcactcaaaatcagacccaaatacccaaaatatacctgaattcccgaattatattttccgaaaatctaaatttttttatccgaaacctaaaattaaatccaaaaacccgaactcaaaacttataaaaaatctgaaataccaaaaatatactcaatcacccaaatatacccaatcaccgaaatatacctaatatatacaatattttttgggtacctagtatattgtatatactcattataattaattaatttaaatttttgattttaagtaaagtggcagatttgtaaataagaaagaaatgcaatggctaaatatgtaaataaaaagaaatatttaatctgctatatatgtttccaaataattctcatttaatttgttatcaagttttcaaacgacaaaatctgtaaatgagaaaaaaatacagtgcctaaatatataaaaaatataatatttaatctgttatttttgtttccaaacaatttttatttaatcaactatttaagtttctaaaaagtattaaaaatacttcagttttaataatataaatttatctgtccatttaaaaaaaaaaataagttctaacaaggaacatcggtaaataataaaagaaatgaaatttgaggtaagatttcatttttaaatatatgtgtgttttacgtaattccccttgacaatgtttattaattcaatgaatatatagagcccactatagcgtcgagatagaatcaaatataaaatatgcctcccaccgacagtgtattcgtcgagttaggagacgtgtttttgtcatccacccaacctcagccaattgcttcactggtaaaaaaagtgtgctttttattttcttgtcggcaaacattctattaccaagcccaaaggaaattacatggtatcaggcttacgaaacaaggctcaacaaaacaagacttaaatactcactccatttaaaatagatgatgttttagtgattttttgatgtttcaaaatagataatattttagtgatttttttatttcttattatttttgttatcaaaaactgtgtaactaatgatattttgtagtatgttttataattggtaaaataattttaatttattattttaatatatttttaagataaaataaataaatttcttaataattgtacacaatcttaaaacttcatgtattttaaaacataatgtttagagagagagagagagagagagagagagagagagagagagagagattgtcggctcctctcgtttctttggtcctttaattaacgtctttggatgattttgtatagttttttaaaggttgttaaattgttttgattttaattttgtaagttgtttcgtaaaacattatcacattatcctacgaaattgtttcataaaatattatcaaatttaattttatgaaatatgtttcgtaaaatattgtcgaaattaatttttataaaaagttgtcgaaagtaatcttacaaaacctgttttgcaaactattgtcaaatttagttctacccaaattgtgttcatagaatactgcggagttcaatttcacaaaagttattttgtacatcgttgtcgaatttagttttgtaaatattgtttcgcaaaatgttttggaattctatttcgtaaaagtttggtttggttttcattcaccaaaaatttacgcgttggcgagaaagctcaatcatggttggcgaataagtccaaaatgagtgcgtagctgtaacgtaacatggagagataaaccgacaggcaaatatactaaggaaaataataattgaagtgagaaaataaaaaaaataaaaaagaaggcacatgtgggtgtctcgtcttcgtccataattgactagcttacctcacatcacatcttcatttcctctcacactcccaaacaaactctctctcagatctgatctttgattcactcatcttcgccatgtacggccgagatccctggggaggtccgctcgagatccacgcgacggattccgccaccgacgacgatcgtagccggaacttgaacgacatcgaccgcgccgctctctcgcggccactggacgagacgcagcagagctggcttctcggtcccacggagcagaagaagaagaagtatgtcgatctcggatgcataatcgtcagccgcaagatcttcgtctggactgtcggcactatcgtcgccgccgctttgctcgccggattcatcaccttgatcgtcaaaactgtgccgcgtcaccaccgtaagactccaccgccggataactacaccatcgctcttcacaaagccctcaagttcttcaatgctcagaaatgtaagagtcccggtttgctttctctcttcaagatctgatctgattaatgcgaaactgttttttttgatgatgcagctgggaaattgccgaggcacaataatgtgtcgtggagaggtaactctggtcttcaagatgggaaaggtgattccggaagcttctataaagatttggttggaggctattacgatgcgggagatgcaatcaaattcaacttccccatggcttatgctatgaccatgttgagctggagtgtgattgaatacagtgctaagtacgaagctgctggagagcttgtccatgttaaggagctcatcaagtggggaactgattactttctcaagacctttaatagcactgctgattccatcgatgatcttgtctcacaggtaaccttccgtagaagaagatcttttagcttttctttcatttgtatcttttgactgagttcttacattaggttggatctggaaacactgacgatggaagtacggatcctaatgaccattactgctggatgcggcctgaggacatggactataaaaggcctgtgactacctgtaacggtggatgctcggatctcgctgccgagatggcggctgctctggcttctgcatccattgtcttcaaggacaacagggagtattctaagaagcttgtacatggtgctaagacggtgtatcagtttgggaggaccaggagaggcagatacagtgcaggcactgcggaatcagccaagttctacaattcaagcatgtattgggatgagtttatttggggtggtgcttggttgtattatgccacaggaaacgtaacttatctcgatctaatcacgaaaccaactatggccaagcatgctggtgcattctggggtggtccgtactatggtgtatttagctgggacaataagcttgctggtgctcaggtcagtccacaagaacaactcactgtgtttatttcttttatatgttcatgtcctcttaacgcttatgaatccctgtgcttttcagttactgctgagccggttgaggttgtttttgagtcctggatatccatatgaagaaattgtcaggaccttccataatcagacaagcatagtcatgtgctcgtacttgccttatttcaacaaatttaacagaaccaggggtgagtttggctttaagaaaaactttggattgtagatgaacctgttcttaattttggaaatctaaaaaatgtaaattttggtaatattgtgcaggaggtttgatagagttaaatcatggagacccacagcctctgcagtatgctgcaaatgcagccttcttagcgacattatacagtgactatcttgatgctgctgatactcctggatggtactgtggacctaatttctattcaaccaatgtcctacgagagtttgcgagaactcaggtaatgcggtttcctctttgtacaaatgattaagggaaaatatcaaatagtgacacttttgaccaagattataacttaaaagataacttatcaacactggtctgacacttggtttacaaaacaaaattttgggtgtatccctttgtattaaaatagttgatttaatacatcaaagataacataagcatagttgttttggtcgtaatgtggaaagcacttggtacgtttgattaccataattggactcaactcatcctagctgggtgttttgcagattgattacatactaggtaaaaaccctcggaaaatgagttatctggtgggttttggcacaaaatacccgaaacacgtgcatcatcgaggagcctcgattcccaagaacaaagtcaaatataactgcaaaggaggatggaaatggagagacagcaagaaaccgaacccaaacacgattgaaggagccatggttgctggtcctgacaagcgcgatgggttccgcgatgtccggaccaactacaactacactgaaccgactcttgcagggaatgctggcctggtcgcagcactcgtggcattgtcgggtgaagaagaggcatctggtactatagacaaaaatacgatcttctcagctgttcctccgttgttccctactccgcctcccccaccagcaccatggaaaccttaagaaagctaaaacctgtgtgattaatgtccctgctgccagaagatgaaagaggtatgagaccagatgattagatgtggtgccttgtgtggtacacacaagttcaaccataatcaactaagcatttcgtgtggctttttactagatacgaacccaatttgggtaacttaccacgagcaatttttaaattttcttttttgggggtttgtctttcgagatataacatacatctatgcgttttaatctgtatatgtttgattccaaattgtattcgttgtttttgaactatgtttttagtgggagtgataaaaaaggaattatgaggaataccgtatacctgaactttgtaaccagaaatatacagggagaaacgacctcgaatacgatgagaagagaaaggggaacagagaagtatcactcaaaaagtatttaattacataaggaaaccttagtgattgtgataagtttcacttatgagtcacaacccataattagataaagattagaaattaatgtgaaggaaatatctataacaagaaatgtattagaactttttcgatcaatttagaatttcgaattgctactttttagacaaatttaagtaagaagattaatttggcattagattgtcactatatcctaatagatcttgttgatttcagaagacggttttttatattagatatactaagaaattgtgttgctgtttttgggttaacttttatataaaacaattcgttttaaaaaaaaaaatataatagttttaataattatatttaattagatagaagtataagttaggtacaattgtccacaaaaaataggataaaaaacaatggatttaatattaataactacatgttaatagtcatgtatatatatattttaatttgttaagtttctaataaaaaacaatagattttttattttgaagtccggtggagtagttattgatagggagatatggacgcgtgattggaacccatccttcccatttttttcttt

SEQ ID NO: 1969 - DNA, 4646 bp, Spirodela polyrrhiza
cccccggctgcagcagaggaaggcatctcgctgctaccagtgtaggggaaaggggaggggggggggggagaaccctgctcgagctccgggaaaggggcctgtttttacgatttgaaattcccaatcggaaatcggagaattgagggaaatcggagatggagatcgccgggtaccgaggcgggagcctccgggggagtctccaggggagtctccggcggagtgtctccgcgtggcgttcgccgagcacgagcgacgtcttcggcagatccagtagggaggaggacgacgaggaggccctgaaatgggcggccctcgagaagctccccacctacgaccggctgaggaaggggatcatgaccggcgacggcggggagatccaggaggtggacatccagggcctgggcttccaggagaggaagaacttgctggagaagctcgtcaggaacgccgaggaggacaacgagaggttcctcctcaagctccgcaaccgtatggagcgtgttgggatcgacaaccccacgatcgaagtccggttcgagcatctgaacatcaacgcggaagccttcgtcggcaaccgcggtgtccccaccctcgtcaacttcttcgtcaacaaggccatatggatcctcagcgctcttcatctcatgccgagcgggaagaggcccatctcgatcctccacgacgtcagcggaataatcaagccctgcaggatgactctgcttctcggcccgccgggagccggcaagacgactctgctgctggctctcgcaggaaagctcgacaacaccctcaaggtaaccgggaacgtcacctacaacggccacgggatgcacgagtttgttccccagaggacctccgcctacatcagccagcatgacgtccacataggggagatgaccgtgagagagacgctggccttctcgtcgagatgccaaggcgtgggcacccgatacgagatgctgacagagctgtcgaggagagagaaggaggccaacatcaagccagaccccgacgtcgacgtgtacatgaaggccgtcgccgtggagggccaggagagcgtggtcacagactacatcctcaagatcctgggtctggacatctgcgcggacaccatggtcggggacgggatgatccgggggatctccggtggccagaagaagcgtgtgaccaccggggagatgctcgtggggccgtcgaaggcgctgttcatggacgagatctccaccgggctggacagctccaccaccttccagatcgtcaactccctgcggcagtcggtgcacatcctcggcggcacggcgctcatcgccctgctccagcccgcaccggagacctacgacctcttcgacgacatcctcctcctctccgacggccagatcgtctaccagggcccccgtgagaatgtgctggagttcttcgaatccatgggcttcaagtgcccggagaggaagggcgtcgccgacttcctgcaggaggttacctcgaggaaggatcagcagcagtactgggtgcgcgagaacgagccgtaccgattcgttccagtcaacgagttctcggaggccttcaagtccttccacgtcggcgccaagctgcatgaggagctcagcaccccattcgaccgcagccgcaaccaccccgcggcgttgaccacgtccaagtacggcatcagcaagatggagctcctcaaggcctgcatcgacagggagtggctcctcatgaagaggaactccttcgtctacatcttcaaagtcgtccagctgatagtcctcgcgctgatcgccatgacggtcttcttccgcacgaagctgccccggaacgggctggaggacgcgaccattttctttggtgctatgttcttgggcctcgtcacccatctgttcaacggcttcgcggagctcgccatgagcatcgccaagctccccgtcttctacaagcaaagggacctcctcttctacccgccatgggcgtacgcgctacccacctggatcctcaagattcccatctcctttgtggagtgcggcgtctggatcgccatgacctactacgtcatcggcttcgatcccaatgtcgtgaggatgttccggcactacctgctgctggttctgatcagccaggtggcctcggggctcttccggctgctcgccgccgtcggcagggacatggtcgtcgcggacaccttcggcgcgttcgctcagctcgttctcctggtgctcggcggcttcatcatcgccagagagaaaatcaagaagttctggatctggggttactggtcgtcgccgttgatgtacgcgcagaacgccatcgccgtgaacgagttcctcgggcacagctggaacaagcttgtggacgcgacggggcagacgctgggcgagcggttcctgaggaaccgtgggatatttgtggacaaaaactggtactggatcggcgtgggcgcgctgatcggatacatggtcctcttcaacttcctcttcatcctcttcctcgaatggctcgacccccttgggaaaggccagaccaccgtctccgaggaggctcttcaggagaaggaagcgaacaggacgggagcgaacgttgagctggcgactcggggatccgctgcgacaagtgatggcggaagtgtggagatcaggaaggatggaaacaggaagaagggcatggtgttgccatttactcccctctcgatcaccttcgacaacgtgaaatactctgtcgacatgccgcaggaaatgaaagacagaggcgttacagaggacaagctgctgctgctgaagggggtcagcggcgccttcaggcccggtgttctgacggcgctgatgggggtgagcggacgcgggaagacgactcttatggacgtcctcgccgggaggaagaccggcgggtacatcgaaggagacatccgcatctccggataccccaagaaccaggagaccttcgcccgcatctccggctactgcgagcagaacgacatccactcgccccacgtcaccgtctacgagtccctcctctactccgcgtggctcaggctccccgccgaggtcgacgagaagcagagaaagatgttcgtggacgaggtgatggacctggtggagctgaattcgctgagggggtcgctcgtggggctgcccggggtgaccgggctctcgacggagcagaggaagaggctcaccatcgccgtggagctcgtcgccaacccctccatcatcttcatggacgagccgacctccgggctcgacgcgagggcggcggccatcgtgatgagggcggtgagaaacaccgtggacaccggaagaaccgtcgtctgcaccatccaccagcccagcatcgacatcttcgaagccttcgacgagctcttcctcatgaagcgaggcggcgaggagatctacgtcggcccgctggggcgccagtccagccacctgatcaagtacttcgagagcatcgacggagtgaagaagatcaaggagaggtacaaccctgcgacgtggatgctggaggtgacgaccatctcccaagaggagatcctggggttgaacttcgccgaggtgtacaggaactccgacctctacaagaggaacaaggacctgatcaaagagctcagcacgcctcccccgggctccaaggatctcttcttcgccacgcagttctcgcagtccttcgtgatgcagtgcttagcctgcctgtggaagcagcacaagtcctactggaggaacccctcgtataccgccactcgccttttcttcaccgtcgtcatcgccctcatcttcggaaccatcttctgggacctcggcaagaagaggtcgacctccctagatctgatcaacgccatgggctccatgtacgccgcagtcctcttcatcggaatccagaacgcccagacggtgcagccaatcgtggacgtcgagcggaccgtcttctacagggagaaggccgcggggatgtactccgctcttccgtatgcttacgcacaggtcctgattgaggtcccccacatcctggtgcaaaccctgctctacggactgctggtctacagcatgatcggcttcgactggacggcggccaagttcctttggtacatgttcttcatgttcttcacgttcctctacttcacctactacggcatgatggccgtcgccatgacgcccaatagcgacatcgctgccatcgtcgccgccgccttctacgccatctggaacatcttcgccggcttcatcatcccccgacccaggatccccatctggtggcgatggtactactgggcgtgccccgtggcgtggaccctctacggcctggtggtgtcgcagttcggggagtacacggacacgatgagcgacgtcgatgagacggtgaaggacttcctgaggaggttcttagggttccggcacgacttcctgcccgtggtgggcgtcatggtggtcgtcttcaccgtgctcttcgcctccatcttcgccttctccatcaagaccctcaacttccagagacggtgacgggctcctccctccagatcgcgccttttccggcgatcaccttgaattctcccgcagacggatcggcaggataccaccacgttcttcttgtgcctatttttcttcctttttcatatatattcgttggacagaacctgtaatgcattcttagcacaggagtatctg

SEQ ID NO: 1970 - DNA, 5112 bp, Chenopodium amaranticolor
atgaacataccacagcgtcaatttagcaacgaagaggtcaaccgctgctatttaagatggcagcatttgagaaatgaacacggaatgaacgctccgagtgtgccggaatttatctatttgactaaagtgttgcaatttgctgccaagcagcgacaagaattacaaatgcaacgccaacagcaaggcatttcaggttctcagcaaaatattgttccaaattcttcagatcaagcagaactgccgaataatgcttcctcgcacatttctgcttctgcttccccgcatttagctccgaatatgcaattgaatggaaatgagacctttagcacttctgctcatcaatcaccaatcatgcaaacacagatgccattaaatagcaatggtggtaataacatgctaccacaacggcaatcttcggttggttcattaaatgcaactaatttttcaccaacaccagcaaacaatggagaaaatgctgcggagaaaccagataactcaaaccataataacttaaaccttaataattccgagcttcaaccgcaaaatcgatcattacaagaacacaacatacaggattcaaatgtgatgccaggttcgcagataaattctcctatgccccagcaggcgcagatgcagcaggcacaattccaagcacaacaggcgcaacaagcgcaacaggcacaacaggcacaacaagcacaagcgagactgcaacaggggagaagattacccatgacaatgtttactgccgagcaatccgaactgttaaaggcccaaatcacatctctaaaatgtctagtaaatagaaagcctattccgtttgaatttcaggctgttatccaaaaatctattaaccatcctccagatttcaaaagaatgttactgtctttgagtgagtttgcgagaagaagacaacccacagatcaaaataaccaatcaaatctcaatggcggcaacaatacgcagcaacccggcaccaattcccactacaataacactaacactgacaacgtttctgggcttaccagaaatgcacctttagatagcaaagacgaaaattttgcatctgtttcaccagctggtccatctagtgtacataatgcgaagaatggcaccctcgataaaaattcgcaaactgtaagtggcactccaatcacgcaaacagaatcgaaaaaagaggaaaacgaaaccatttcaaacgtagctaaaacagctcctaatagtaataagacccacaccgagcaaaataacccgccaaaaccgcagaaacccgttcctttaaacgtccttcaagatcaatataaggaaggaataaaagtggtagatatagatgatcctgatatgatggttgattcttttacgatgcccaatatctcacatagtaatatcgattatcagactttattggccaattcggatcatgcaaagtttactattgaacctggcgttctaccggttggtattgacacacataccgctactgacatttaccaaactttaattgcattgaacctagatactacggtaaatgactgtttggataagctactaaatgacgaatgtacggaatcaaccagggaaaatgctctttacgattactacgccttacaattattaccgttacaaaaagccgtaagaggtcatgtattacaatttgaatggcatcaaaattctttattaaccaatacacatccaaattttctttcgaaaataagaaacatcaacgttcaagatgcattgctaacaaaccaactttataagaatcatgaattacttaagttagaaaggaagaagactgaggcagtggccagattaaagtcgatgaataaatccgccatcaatcaatataatagaagacaagataaaaagaataaaaggttgaagtttggccatagactcattgctacgcatactaatttagaaagggatgagcaaaagagagctgaaaaaaaggcaaaagaacgtttacaggctttaaaggcgaacgatgaggaagcctatataaaattattagaccaaaccaaagatacaagaattacacatcttctaaggcaaacaaacgcatttttagattctttaacaagagccgtgaaagatcaacaaaagtacactaaagaaatgattgattcccacataaaggaagcatcggaggaagtggatgatttgtccatggtccccaagatgaaggatgaagaatatgatgacgacgacgacaattctaacgtcgattattacaatgtcgcacatagaattaaagaagatatcaagaagcagccttcaatattggttggtggtaccttaaaggactatcaaatcaagggtttacagtggatggtttcgcttttcaataatcatttaaatggtattttagcagacgaaatgggtcttggtaagactatccagacgatatccttacttacatatttatatgaaatgaagaatattcgtgggccatatttagtcattgttcctttatctacactgtcaaattggagcagtgaattcgcgaaatgggctcctaccttaagaactatatcatttaaaggttcgccaaatgagaggaaagccaaacaggctaaaataagggcaggtgaatttgatgtagttctgactacctttgagtatattattaaagaaagagcacttttatccaaggtcaagtgggtccatatgattattgatgaaggccatagaatgaaaaatgcgcaatccaagctttctttaaccttgaacacacattaccatgcagattatagattaattttgacaggtacaccacttcaaaacaacttgccagaattatgggccttattgaattttgtgttacccaagattttcaattccgtgaaatcttttgatgaatggttcaatacaccctttgccaacaccggtgggcaagataaaattgagttgagtgaagaagagacgcttttggttatcaggagattgcataaagtcttgagaccctttttattgcgtcgtttgaaaaaggatgtagaaaaagaattaccggataaagttgagaaggtagtgaagtgcaaaatgagcgctttacaacaaattatgtaccaacaaatgttgaaatatcgtcgtctttttatcggtgatcaaaataataagaaaatggtaggtttaagaggtttcaataatcaaatcatgcaactaaagaaaatctgtaatcatccttttgtatttgaagaagttgaggaccaaatcaatccaacaagagaaacgaatgatgatatttggcgtgttgctggtaaatttgaactattagatagaattttgcctaagcttaaggcaactgggcatagagtattaattttttttcaaatgacccaaattatggatattatggaagattttttaaggtacattaatatcaagtacctgaggttagatggtcatacaaaatctgatgaacgtagtgagttgttacgtctatttaacgcccctgattctgaatacttgtgctttatcttatcaactagagcgggtggtttgggtttaaatttacaaactgcagacactgtcattatttttgatactgactggaatcctcatcaagatttgcaagctcaggatagagcgcatagaataggtcagaagaatgaagttagaattctaagattgattactacgaattcagttgaagaagttatcctagagagagcctacaagaagctagatatcgatggtaaagtcattcaagcaggtaaattcgataacaaatctacatcggaggaacaagaagcgttgcttagatctttgctggatgcagaagaggaacgtagaaagaaaagagagtctggtgttgaagaagaagaggagttaaaagactcagaaatcaacgaaattcttgctcgaaatgacgaagaaatggctgttcttacaaggatggatgaagatagatcaaagaaggaggaagaattgggagtaaagagccgtctcttagaaaagagtgaattacctgatatttacagtagagatattggtgccgagctcaaacgtgaagaatcagaatctgctgctgtttacaatggaaggggtgcaagagaacgtaagacggcaacttacaacgataatatgtctgaagaacagtggttaagacaatttgaagttagcgatgatgaaaaaaatgacaagcaggcaagaaaacaacgaacaaagaaggaagataagagcgaggcgattgatgggaatggagaaattaaaggcgaaaacattgacgctgataatgacggtcctagaattaataatatatcggccgaagatcgggcagatacggatttggcaatgaatgacgatgatttcttgtctaaaaagagaaaggcaggaaggccccgtggaagacctaagaaagtgaaacttgaaggatctgaaaattctgaaccaccagcgcttgaatcaagtccagttactggcgataactctcccagtgaggattttatggacattccaaaaccacgtacagcgggaaaaacatctgttaaatcagcaagaacttcaacaaggggccgtggtcgcggtcgtggtcgtggtcgagggcgaggacgtggacgaggaaggccgccaaaagcaagaaatgggcttgattatgtccgcacgcccgctgcggcaacgagtcctattgatattagagagaaagttgctaaacaagctctagacttataccactttgctctcaattatgaaaatgaagctggaaggaaactttctgacattttcctctccaaaccttccaaagcactatatcccgactactatatgattattaagtaccctgtcgcctttgataatattaacacgcatattgaaacgctagcttacaactcccttaaagagacccttcaagactttcatctgatattttccaatgctaggatatacaatactgagggttcagtagtatacgaagactctttagaactggaaaaagtggttacgaagaaatactgtgagataatgggcgataactcacaactcgactttactgaatttgatgaacagtatggcaccagacccctcgtcttgcctcctgttgttacttcaagcgtggctgaatctttcacagatgaagcggactcgagcatgacagaagcgagtgtatag

SEQ ID NO: 1971 - protein, 773 aa, Arabidopsis thaliana
MKTQSASPFFFVSFFFFFFFFSSLFLLSSALNSDGVLLLSFKYSVLLDPLSLLQSWNYDHDNPCSWRGVLCNNDSRVVTLSLPNSNLVGSIPSDLGFLQNLQSLNLSNNSLNGSLPVEFFAADKLRFLDLSNNLISGEIPVSIGGLHNLQTLNLSDNIFTGKLPANLASLGSLTEVSLKNNYFSGEFPGGGWRSVQYLDISSNLINGSLPPDFSGDNLRYLNVSYNQISGEIPPNVGAGFPQNATVDFSFNNLTGSIPDSPVYLNQKSISFSGNPGLCGGPTRNPCPIPSSPATVSPPTSTPALAAIPKSIGSNRETEPNNNSNPRTGLRPGVIIGIIVGDIAGIGILALIFFYVYKYKNNKTVEKKNNHSLEAHEAKDTTSLSPSSSTTTSSSSPEQSSRFAKWSCLRKNQETDETEEEDEENQRSGEIGENKKGTLVTIDGGEKELEVETLLKASAYILGATGSSIMYKTVLEDGTVLAVRRLGENGLSQQRRFKDFEAHIRAIGKLVHPNLVRLRGFYWGTDEKLVIYDFVPNGSLVNARYRKGGSSPCHLPWETRLKIVKGLARGLAYLHDKKHVHGNLKPSNILLGQDMEPKIGDFGLERLLAGDTSYNRASGSSRIFSSKRLTASSREFGTIGPTPSPSPSSVGPISPYCAPESLRNLKPNPKWDVFGFGVILLELLTGKIVSIDEVGVGNGLTVEDGNRALIMADVAIRSELEGKEDFLLGLFKLGYSCASQIPQKRPTMKEALVVFERYPISSSAKSPSYHYGHY

SEQ ID NO: 1972 - protein, 476 aa, Nicotiana tabacum
MGQLHIFFFPVMAHGHMIPTLDMAKLFASRGVKATIITTPLNEFVFSKAIQRNKHLGIEIEIRLIKFPAVENGLPEECERLDQIPSDEKLPNFFKAVAMMQEPLEQLIEECRPDCLISDMFLPWTTDTAAKFNIPRIVFHGTSFFALCVENSVRLNKPFKNVSSDSETFVVPDLPHEIKLTRTQVSPFERSGEETAMTRMIKTVRESDSKSYGVVFNSFYELETDYVEHYTKVLGRRAWAIGPLSMCNRDIEDKAERGKKSSIDKHECLKWLDSKKPSSVVYICFGSVANFTASQLHELAMGVEASGQEFIWVVRTELDNEDWLPEGFEERTKEKGLIIRGWAPQVLILDHESVGAFVTHCGWNSTLEGVSGGVPMVTWPVFAEQFFNEKLVTEVLKTGAGVGSIQWKRSASEGVKREAIAKAIKRVMVSEEADGFRNRAKAYKEMARKAIEEGGSSYTGLTTLLEDISTYSSTGH

SEQ ID NO: 1973 - protein, 921 aa, Arabidopsis thaliana
MARVLEAYRVLSSNCSIRIYFHSQVSLPHNQFKRLPPVVAFKFVLPPEIFYGGGTIDEHIGDDTEEEEERDELELTLEISCDQTLNHACGCLFGDRNYILKMEANLEALQNTMQELEERRDDLLRRVVIEEDKGLQRLAQVQGWLSRVKDVCSQVNDLLKAKSIQTERLCLCGYCSKNFISGRNYGINVLKKLKHVEGLLAKGVFEVVAEKIPAPKVEKKHIQTTVGLDAMVGRAWNSLMKDERRTLGLYGMGGVGKTTLLASINNKFLEGMNGFDLVIWVVVSKDLQNEGIQEQILGRLGLHRGWKQVTEKEKASYICNILNVKKFVLLLDDLWSEVDLEKIGVPPLTRENGSKIVFTTRSKDVCRDMEVDGEMKVDCLPPDEAWELFQKKVGPIPLQSHEDIPTLARKVAEKCCGLPLALSVIGKAMASRETVQEWQHVIHVLNSSSHEFPSMEEKILPVLKFSYDDLKDEKVKLCFLYCSLFPEDYEVRKEELIEYWMCEGFIDGNEDEDGANNKGHDIIGSLVRAHLLMDGELTTKVKMHDVIREMALWIASNFGKQKETLCVKPGVQLCHIPKDINWESLRRMSLMCNQIANISSSSNSPNLSTLLLQNNKLVHISCDFFRFMPALVVLDLSRNSSLSSLPEAISKLGSLQYINLSTTGIKWLPVSFKELKKLIHLNLEFTDELESIVGIATSLPNLQVLKLFSSRVCIDGSLMEELLLLEHLKVLTATIKDALILESIQGVDRLVSSIQALCLRNMSAPVIILNTVALGGLQHLEIVGSKISEIKIDWERKGRGELKCTSSPGFKHLSVVEIFNLEGPRDLTWLLFAQNLRRLSVTLSLTIEEIINKEKGMSITNVHPNIVVPFGKLEFLEVRGLDELKRICWNPPALPNLRQFDVRSCLKLPEAATEFPRHANE

SEQ ID NO: 1974 - DNA, 3702 bp, Nicotiana tabacum
tgtcttaaatgaattttgtaatttggcactatatatatacctgcgagagcttgtattataaacacttatctggtgataaaatagccgatagtctatcttgttgtatatggaatgacatagcagaataaaacgaaaacttatcaactctacaaatttagtattttgcaaaactgtgactaacctgtccattaaacatggcttagagacaataatattcttccatctaataaccgtttcacaatcaaaaatatgttggactaacttattgttagtttctcttctggatcttcaatagttggctgccagatgatctatgtgacttcttaacatcgcctcttctggtggggaatatcaagaaacatagataataatcagtaggatataaatactagctaaagttctttaattacattccagtcttaattctttctcttccaggttccttggaagaagttcaaatctgtatcttgttaaggttttccgtttagttttagtttgttggtttagggataaaaagactgcacacttcagaaatactgatccattctgattcctcttgttcttgtctcttttggagcctttgtctccatctctcattaaaatattgttttaagcctgtgcttatgcttgagtttttaactcattagtgtattccaactttcaagtagatctccttatactattattcttaatagtttgacatcatgtttaagataaatgaggagtgctaagtgctaactgctctcattaagaatgtttatttagagaatctgtcctctagcagtaatataataaaaaatgacagatcacagatcacagatcacaaagcaaggagaaacaacagaaaatgatcaatataactattgactcatcgtactacaagcaatattttctttccaacattaatataaatttagctcaacaattgattcactatcagtaattccaaatggaaactcctacctggactgcatatgcagctgcatgtctagctacactgtctctttttctcctttccaaatttctccgccaaaggaaactcaacttaccacccggcccaaaaccatggccaattgtcggaaactttaacctcatcgcccccctcgctcaccgctctgtccacgaactctccctcaagtatggacccattatgcaactccgcttcgggtcttttcctgtggtggtgggctcctcagtcgaaatggctaaggttttcctcaaatcaatggatatcaactttgtagacaggcctaaaatggctgctggcaagtacaccacctacaactattcgaatatcacttggtccgcctacggaccctattggcgccaggcacgtaagatgtgccttatggaattgttcaccgcaaaacggctcgagtcactcgagtatattaggacagaggagttacaatctctcctccatgatttgtataacttaacgggaaaaccaattctgctgaaagattatttgatgacgctgagtttaaatgttattagcaggatggtacttgggaagaggtatttggacgagtccaagaactcgatcgtgactcctgaggaatttaagaagatgttagacgagctgttcttgctaaatggtgtacttaatattggagattatatcccctggattgatttcatggacttgcaaggttatgttaagaggatgaaggtattaagcaacaagtttgacaggtttttggagtatgttctcgacgagcataacgctaggagaaacgctgaggagaattacgttgccaaagacatggtggatgttttactacagtttgctgatgatcccactctggaggttaaactagagagacatggagtcaaggctttcacccaggtacatatcactttaattcacaactcgtggtgtcttatcaatttaagacaaaagaaaaataatagcacacaaaaattaaagtactactctagtatttatgaataatcttattaaccgcgtactagatcctttattgcttctaccacttgggtgccactactgatgatttcttcactaggactaaaggaaaatttgctagaaagtttggaactttatggttgaccgaagatatagttggttccaatgtctatccgcacgttaaaacatataataattaacgaaatcgaactttttctatgaaagttggagggctacgtacgggtcaagtatttctttatttttttggcgcttgatgataagacttaaatatgtattgcacaatcaggacttgctggctggtggaaccgagagtacagcagtgatcgtggagtgggcaatctcagagctgctaaagaagccggagattttcaacaaggcaacagaggaattggatcgagtgattgggcagaacagatgggtacaagaaaaggacatcccaaattttccatacatagaggcaattgttaaagagactatgcgacttcaccccgtggcaccaatgttaactccacggctctgcggagaagactgtaaagtagccggctacgacattctgaaaggaaccagggtcctagtaagcgtatggactatcgcaagagaccctactttgtgggacgagcctgaggcgttcaaacctgagaggtttctcggaaattccattgatgtcaaaggacataattttgagctactgccatttggagctgggagaaggatgtgtccgggatacaacttagggcttaaggtgattcaagctagcttagctaatcttctacacggatttaaatggtcattgcccgataatatgacccctgaggacctcaacatggaggaaattttttgcctctccataccaaaaaagattccacttgctgcctgtgattgagccaaaacttgaaccaaatctttactctgcttgatttagctctatttgtgttccttcaagaaatgtttattctgttttaaatggtgggccatatcgccatatccgctaaggttgctctaatgctctacatattttgtaatgaaatcgtctggttatccaactcaaatcttgtattttagattgaagcaactggcaaaattcaaaagccatgtttaaattggatctgtaggatgaaggtaagggatcatttatttgcttcatctatagtctaaaccgaagatatatgacagcattcataaccacctgcagctttaatggcatacacagaacattctgaaaatccttcaaatgttagaagaagacaggaaaagaaagcaactcaaaggcactgaaaaaaatccctcaaggcgctgtaaaaacaaatacatttacacaaaaatgacttcggcagccttcaccgtcgtaagcagcaaaattgtgtgataaattaacattttcatatcaagaaactgcttccgcaaatttacacctaccacatcagaaaataaacagattacaaaataaaataggaatagaattctattagcaatgaaagcattctatttgcccatacctcgctgctatgaagacttaaacgaataatatttacagaaacgaaccctgcaaaatcaaaaataacaaatattataataaaatgttgtgcagaacaagaatctgattctatataatatgcttggcatatacattggcacacacacctgttgacaaaattatttataaccaggacaactggttataacaagaagcatataggcaacaataaagtgattgatctcatcgtttactgaaatgctatctaaacaccaagctt

SEQ ID NO: 1975 - DNA, 736 bp, Arabidopsis thaliana
ggcaatgtacatctcgaagacctcaaggtgcgctacagaccgaacactccacttgtgctcaaggggatcactcttgacatcaaaggaggagagaaggttggtgtggttggacggacgggaagcgggaaatcgacattgatccaagtcttgttcaggcttgtagaaccatcaggagggaagataatcatagacgggattgatataagcactctagggctacatgatctcaggtcaagattcggaatcattccgcaagaacctgtcctctttgaaggaaccgtgagaagcaacatcgacccgacagagcaatactctgacgaagaaatctggaagagcctggaacggtgtcaactcaaggatgttgtagctaccaagcctgagaagctcgattctttggtggttgataatggggagaactggagcgtagggcagaggcagcttctatgcttaggcagggttatgttgaaacgcagcagacttctcttcctagacgaagcaactgcatccgttgattcccaaaccgacgccgtgattcagaagatcatcagagaagactttgcgtcgtgcaccatcatcagcatcgcccaccggattcctacagtgatggacggcgatcgagtccttgtcattgatgctgggaaagcgaaagagttcgatagcccggctcgcttgctggagaggccgtctctgtttgcggcgctggtgcaagagtacgctctccgatctgccggaatat

SEQ ID NO: 1976 - protein, 1029 aa, Arabidopsis thaliana
MNKLVVEIVDASDLMPKDGQGSASPFVEVEFDEQRQRTQTRFKDLNPQWNEKLVFNVGDLKRLNNKTVDVTVYDDRRDNQPGKFLGRVKIAGAVVPLSESESGVQRYPLDKRGLFSNIKGDIALRIYAAPIDGGDFVSPPPDFAEKVMKEDKRFESQEFQFQNQNQNQNHYEQFEDEINNMETLKPTKKKEKESRTFHSIGAHAGGGGGAPPMSQAKQAYPPPPNQPEFRSDFMRAPGPPTGAVMQMQPPRQQNPEFQLIETSPPLAARMRQSYYYRSSGDKTSSTYDLVEQMHYLYVSVVKARDLPVMDVSGSLDPYVEVKLGNYKGLTKHLEKNSNPIWKQIFAFSKERLQSNLLEVTVKDKDLLTKDDFVGRVHIDLTEVPLRVPPDSPLAPQWYRLEDKKGMKTNRGEIMLAVWMGTQADESFPDAWHSDAHRVSHSNLSNTRSKVYFSPKLYYLRIHVMEAQDLVPSDKGRVPDAIVKIQAGNQMRATRTPQMRTMNPQWHEELMFVVSEPFEDMVIVSVDDRIGPGKDEILGRVFIPVRDVPVRQEVGKMPDPRWFNLQRHSMSMEEENEKRKEKFSSKILLRVCIEAGYHVLDESTHFSSDLQPSSKHLRKPSIGILELGILSARNLMPMKGKDGRMTDPYCVAKYGNKWVRTRTLLDALAPKWNEQYTWEVHDPCTVITIGVFDNSHVNDGGDFKDQRIGKVRVRLSTLETDRVYTHFYPLLVLTPGGLKKNGELQLALRYTCTGFVNMMAQYGRPLLPKMHYIQPIPVRHIDLLRHQAMQIVATRLSRSEPPLRREVVEYMLDVDYHMFSLRRSKANFSRIMSLLSSVTLVCKWFNDICTWRNPITTCLVHVLFLILVCYPELILPTVFLYLFVIGMWNYRYRPRHPPHMDARVSQADNAHPDELDEEFDTFPTSRPADIVRMRYDRLRSVGGRVQTVVGDLATQGERIQALLSWRDPRATALFIVFALIWAVFIYVTPFQVIAIIIGLFMLRHPRFRSRMPSVPANFFKRLPAKSDMLL

SEQ ID NO: 1977 - DNA, 1563 bp, Nicotiana tabacum
ggcacgagattaaactcacattcttgattatcatcttcaatggattcaaagcaatcatcagaattagtgttcacagtaaggagacaaaagccagagctaatagctccggcaaaaccaactccacgtgaaactaagtttctttctgatattgatgatcaagaaggtcttcgatttcaaattcccgttattcaattttaccataaggattcttctatgggaaggaaagatcctgtaaaggttattaaaaaggctatagctgaaacacttgtgttttactatccatttgctggccgtctccgggaaggaaatggccggaaactgatggtggattgtaccggcgaggggattatgtttgtcgaagcggatgctgatgttacacttgagcaatttggagatgaacttcagcctccatttccatgcttagaagaacttctttatgatgttcctgactctgctggagttcttaattgccctttgcttcttattcaggtaactcgtctaagatgtggtggttttatcttcgcgctaagattaaaccacacaatgagtgatgcaccaggtcttgtccaatttatgaccgcagtgggtgaaatggcacgcggtggatctgctccatctatacttccagtctggtgtcgagaattgctaaatgccagaaatccgccccaagtgacatgtacacatcacgaatacgatgaagtacgcgatacaaagggtacaattatccccttagacgacatggttcacaaatctttcttttttggcccttctgaagtctcagcacttcgtcgatttgtccctcatcacttgcgtaagtgttccacttttgaactgctcacagcagtcctttggcgttgtcgaacaatgtccctaaaacctgatccagaagaggaagttcgcgctctttgcattgtcaatgcacgttcgaggttcaatcctcctttgcctactggctactacggcaacgcctttgcattccctgtagcagtcacaactgcggctaaactgagcaaaaatccactaggatatgcactcgagttagtgaagaaaacaaagtcggatgtgacagaagaatatatgaaatctgtggcagatttaatggtgttaaaaggtagaccccattttacagtggtgaggacttttcttgtatcagatgtgactagaggtggatttggagaagtggattttggatggggaaaagcagtttatggtggaccagctaaaggaggagtaggtgcaattcctggtgtggctagtttttatataccatttaaaaacaagaaaggtgagaatggaattgtggttccaatttgtttgcctggttttgcaatggaaacattcgtcaaagaacttgatggtatgttgaaagttgatgctccattagtcaactcaaactatgccattatcagacctgccctttgagatattaattatgtcgaatacttttttttaataccacgattaaaggccatagagtttgtcttcagtgccatatactcggcgtaatttccttctgattttatgtgtatgtagtttcaaatgttgtaagtttgctcttttatc

SEQ ID NO: 1978 - DNA, 28199 bp, Takifugu rubripes
gatcggggtacagtggtcgcacaaaatccaggagaaccgaacagaatcgccctcatccatgtgggcctcaaagtggactgaggtgttgagagggacgttcaccagactggaattgatggtcaatccagagaccgaagccagcaccgcgacaggtacagtggtgtgattcttgccaacccgattggccgccgtcagagtaatattgtggtgtcccggcgtgttgaaagtgtggaggatgttctgacctttgagcaaattaccgtggccaaagttccagaggtaagagacattggacgctgaggaaaatgcagagaaatagtagggtaccccaagggtcagattattgtaatgggtgccattgtgctgaaagacaactgctccaacgggcgtcagaacctcgatcgaaatgctgccggtggtgttggaaacgttattagaggcagccactgtcaccacgtaacaccctgggttattataggttttcactacattcgcaggggcgtgagggagaacaaggtcctcttctcccccaaagtcccactcataagtgtagttaaattctggctctgctctggcttggaattggatcttctctccaaccgcaaagtgtgatttctcggcggtgacgctgatcttggttaaaaccggctgaacgcacacctgggtaacgaagttggccttacttactccactggtaatggtgagagagagcggatgcgtcccatttccgcggtacgtgtgtgagattccggggtttccgtggtgcgtctcattggggcttccatcgccgaagctccactcgtaaagataagacgatgcgttcccagaaacccgggcccgaaagttgacaagggcgtgctctccgacacatcctgacggctctatcccggcgacttgaaagacaaacacctccactggtatgatcgtccaacccgaactcacggcattcatggcagttatgttcactgtgaatctcccgtctttggcgtatttgtgcgagaccgttggctcagacagtgtgtagctcttcccgtcgcccatggagaaggtccatgtgatgttgttgcccgatgagaggtgagctcgaacagtggtggcgctgtggagctcggtgggagaggaactctccgctgttagagactctatctcctcatatgcaaacatctctgtgcataccgctgtagagctgatggtgttatttacagacacacacacgttaaacgggccgctcttttcaaaggtgtgcgccactcgccgaccctgcaacagtgcagaaccgtctccaaagttccactcgtaatgaatcccatagggtgaaggcagagggtgagcttcgaaatcagccgttttcccagcaaggaggagactcggctccgtctgtatgtcgacacgcgtgaggatgctgtagacgctcatgttaatgcttcgactgatgttctcatagcgattggagactgacactactgccgtgtagatgcctgcacagaggaccaaaaaatgggacacaagctgcccgtcaacatccaacattttcatacaaacaggtatattgactgctgtcatcagaaggccaaaaaaaaaattaaccagtcacagaaattacaacaatgtgagaacgtaattggtgcaattgttgcgtctggatgaaaataatatttaacacgaaatttttaaatgttaaaaagattacagagcaaaaaaaaaaaagcttttgaagaataggtttgttcgtgatttttagtggtgctgagagactcgtacctggctgagagtagatgtaggtgacattgctgcttaggaggacctgataaggcgactcagggcaggtgagggaggaagggtagggaggcttgtgttcaaactgctcatatccaccatcaccgaaggaccatctgcagcataatgttgaaatgttaggacgcacacacacgaacattcacacacacacacactcttccctgtctggaaaccttctctaggaggatttaatttagagaagtggaaacttgactcaggatgtctctctggaccaaaaacggagaccaaagagagattgagcaaaagagtgcagcacagagagaccgggtatgaaagggagggagagagggatgaatatgaaagaaatatagaggaaagtggaaagtacggcataagctgccgagcagaggggaaaattctttgtcagcaatctgtttaaactacaagactgctgcaaggccccatcaacacacgggaggaccaaaaaaaaaaaaatagaagtgagagacagatgtggagaaaaaggtgctgccaaaatattaaatctctcccttttttcctcaaccttgcttgttcttaccggacggtggccgggacagccatgtcgatgagcacagatgtggtgagcgtctgggtggagccctgagggaccacgtccggtaccccctttacggtgaggtttgtcatgggctgcagccggtccacagtcacgttgaaatcctctgtgagggtgctgacgtggttcatggccgtcacctggaagaccatcagagaaaagaaggcttctttcacctcagctgtacaacaatgaatgtatagcctggaaatttctggttatttttaaaccagaacagtgaccgacccagagttctgcaactctaaatcgcttactcagacgacacgagtcattttttagagtccggagaattgctcagatcgaatttctgtctacaaaaacacacctggtttgaaacattatattgagggaaggaaactatacatgtgaaacaaacttacggtgagcttgtagacatcggcgtgctggtagataacattgagcaccgtgttgtaataggtgaaaaacggcttgtcgtccaccgtccatttaaaagtgggattagagccttccaacacagaggccgtgtagctctgaaacaaacacaaatcaaagttcattgagggataataaaaggggaaaaaaactaaaatgattataccaccgcccactcaccacaactgactccatgagcaccctccgcgcagggtgtggctgtaccaccagacctcggagcgactcctccagctggacaagcacagtcaggctggcctctgtcacattattgtgggccatcagctccacctgaaccgggcctgtgtgttcctttatcttaagattcagatccagcacggcatacatgctgggctctgcgacctcagccccggagccttcgctcgtactgggatgacagaggcgggaagaaaactcttggggacagtagggatggaatgttgcactggaattactggtgcggtaaaaggccttggtctcgtagcgtgactggacgcggagcagcagtcgggtcctgttcgactccaagaagagcgtgccattctgcggggaggggtggaggactgtcaagtccagaggaggcagcacctggagtgaacacgatgctgaaaccaggtccgattgcttggctgaggtcacctggaatcaaagtaaattttgaaatgcaagtataatgcaatatttatggtagtataatacaagaaaaaaatgttgttaagaaataattaccacctaaaacaatatcggatcagtgcctcctataatatagatgaaacacgcatcttaccagcagattgtagagtccaggctgaggtagtccagccgacagctccgccccccgcagccgagtctcactttgacccacatagagcactctgatggggcaaactgcgttctccagccagctacctctggtaccctccaccagggccttcaagtctagctcggggtcaggaagagggtcagcgccatcaccggccaagttgtctggtggcaccggcgtgttgttgatcccgaaccactcagagaggttgagagcaaaaacgggttgccgccacaaggagtgcggggaggactgacagtggatgagggaggcggggccggcatcgtgctgcagggcgatgacatcaccgcgggacaccaggaggtcttccaactgatcttgaagctgttagacagaacttgtcaaatttccatgcactgaaatttactcataagcatattccaagattaaaaggtggctactggctccttggttactgtacttcaaacacaaactctaaagtgaaagccttaataacccaggagctgaaggttcagcctctcaccagcacatgtgcagccgggcctgctgtcagagagaacagcacctcgtactgtaacgtgtacaggggcatccgcgcctccgagggaagctggtgcccctgggagcagtttagacaggaggaaggctggcagggactcgagaggggcaagcagcggtgctggaatggacaccactgctctagcttgggacaagaaggtggatcagcactcctggactcactggggacacacagagccatcggagaacatgctggacctccacagcctgcaagaaaagagacgtctcagtgtccacacctctttattcaagtcttcagcctgagacaggtgagcaatggaagtttagattgggttgttattacatgtagaaaacaagttccttctctctgggatgtttgcatcaagatcttttgagcatatagatatgataacttctgttacacctcagttctttgctgaggaaataattcagtcagattttggggcagcaagtcctggaagaattgccaactagctggtggagctacaaggaaatgtaaaatgcatgacgaaagtgagaagctgaaagaatcttaaggaagcttataaaggaatacaccggtgggcctgactgctgccccccccccactcctttgtagaactttggggcgcggtggaagtgcaaaccacagattaaaggtttggttttacctaaataaatatcttataatcaaagttcctgaaaaggatggtggaaatggggctttaatgaatagctggatatacagtaacaggacacctaaaggtcatgcaccccaatgttatcacgtcatgtaaaggattaaaagttagcgtaattcaaacattttgctctgtctaaatctgtccactgcttcagaataactggtagtttcacagcagggatgccctcatgtctttagcctctctgtggactccactttctcacatctttcatgtggatttgctcttttcctctctgtcattctctgccgtcagccaacttccttctcagtggacaggttttaagaaaaaaacaaaaaacaaaacaacactgaaagcatttcaaggtttttttctatgtcgtgtccacacaaagagaggagtcatatcagaggggaggtggccttaattgcttccctcaccctttccctcaccgttttgttgtcttttcagcctctatttaaagcctgttgaccaataacagtttaagacaggggctgtcagtgtgcatgcatgtggtcacaggtggcctatggatttctgtcaacaccttttgatgctgaccagccaattgtgtttgtgagtttgacttactgggcagcagcaggtgtaggccaggataacggcagcgaggtctgtatatctggaacaagatgtgtgtttgcgagctcagttcccgagtcacaaactccagcgaggacagacgacctgcccgaacaaagctcaaagctggaaacaggagcacctgcaaggtttgaaacacacagtggggggggcagggtggtgatttctgattgttgcaatgccttgctgaggattcatcctcacctctacgccaccatgagggggcggcggagttgtgatcatggcagctgtggcctgtagtagatggtgggagggaaacacggccaggcccatggcaaagacccctgaatccggaacacgcactgcagaggcaggtgcagaacaaggtcaaagtggggaaacccaggagatcttcagcttttaggacgattagcagttactctggagatgggatccggtgcttctcgcaccctttttctctctttcttaccaaaatatcttcaaatcaaagtggaaaacaacaaaatgacagcagttttctaactgtgaggcccccctcaatttctggcaccccccgagggttggaaaaaaagaaagagaccagaatgggagtgagagcaggaatgaggtttagagtttgtgtgcaggttctgacgatgctccactgctgtgttatcatctacgaaacggtgccagcgagggggagacctgcctttttgaaactaagctccctcatcaataccagtgacacctcactgccaaagatacgtgttctgcaaccatggggggcaaaaaaaaaaaacatatacaatatatatatatttaatggctaaaatgagagttatactttgttaaaaatgactgaaaattctgttaaataaatggttttatatgcgtgttgtcaggcagggctgagcatggattcctctgtgcgggcatctggggcctaccttgagggttgtactggcagacgtaagcccgcctggcattgcaggagtgcgaactggtctggctgcgctgatcgagtgagacgcaaaggttgccacgggcaaccgatgaccaaggcgccaggccctcctctccttcctgagcctcggagccgttcacccagtgtaatttgccagcagagttgacatcacttaaccccagccacacgcctcgctccatggagctcccataggctctatgaatagggacagtcggaaaatcattttaatcgtacgtaaaaccaaaacgtgaccccgcacactgtgaaatgcatctgctcagcgtgtgatcagagtgatcaaatgtttcaggccacagacaaattgcgtggaatctctaaatgactgtacgttcccagacacggctcagctgtcacgtaatctactggctcactgcaatcagccgaaaccagcagatggaagaaaaataagcacggaagagggaagagggaagacagaagagggtcttaattggagaaaaacaaggtctgatgaacaaaatggacattatgtaagtgggagggtggaggaagacgcaagaaagggggaggacacattctgttgttttttttaagtcaaggaccaggcctccagccttacattaacacacacacacacacacacacacacacacacttggaactttggaatccttctcccggggtgttaaagttgcagctgtgcttttacagatgtcgtttccccgaccctcaacactaaacacaggcggcctttggatccgcgcaaggtcagattcattttcgccacaacaaaaacctccgcgcagatgttgagagcacgacaacgctcgctaaaattcatgcagacggagccacaaacacgcaatatgtcagaaatgtgaatccatgaaaaagcggtgcacttatgatgacccggggaggggagatgattgctagcgtttagaattttgcgcagctcaggtgccaattacagtaaatgccacgacaaggttgcgtaacatcaaaccaagggcctcgtcgttgtagcacattaaaacaaacaaacaaacaaacaaacgagactcactgtgtgactttacgtgccagtaggttacgcagtgcatcattcctgactattgccagatccccgccgcgatccaagcactgttttcgagcatcggtccagctcagctcccctggaacgatctggaaacagcgggaggactcttcgtgcagcaccccatcttttggacagtgaggggaggctggcaggggacagaagcagccacgtcatttcccagattcttttaagtcactcaggcaacatcgcaatcgcataaagatgtcggcaagagaaataaaaatcagaacgtaactgtggtgttatggaacaaaacaggagcttaatacaacaactgaaaactgttcagaaaaacaccaaaaggatttaagtgagtattgctatcaccaaggggggaacattttttcttgttcttttaaggttcagtaatcaggctgggattttcattagggaagactgtatgttccctaaatttccctgaaagatgaaaaagtattaacagacatgggtggccaatctttgtaacaccgaaggtttgttgtaatctttttctataaaaggctttttgaaagatgctttagaacggacaaggacgcttgcacacaaacacaggtgacattttctttctgtctttttacagtatcactctaaatctccaaagaaagtaaaaaaaacaggctcatataatcacaaagaaagaaatatactggttaaagcaatcatgataaaaaagaaaatcttttgtcccttgatagattgcgattgtttaacgggataaagtaagaaataatcgcaggatatataatgtcatttcaactcaaaaatatgtcccacgtacagaaccattggccacttctgttacacaacaaaaccagtatttctctatgaaatgtgtaactccatccatataaggtcatcctcacaaattgagagtcagtgccagtaggagtctagtgagggaggccacgcagacgagtatcaaagacgtgaaatgggagagactgtgtataaagacacagcaaaaactccaagggaatctagagaaggtctgtctgactgaagagaacacaatgatccaggttgccactgttcaatatcaagtcgtgactcttcagacgcctgaatcgtgcatttaaacacctctgagactgtgcggtagtttagcggctgctcagaggatcttacctttggcgacttggacaccgtgcttggtgatcttccagtccacatccacatcgacagaaccccagctaacaagtgtgagttggagactctgattggccaccacgagtgtggggcagtgcagctccagtttggggggaagtgtcaccacgacctctccgtgtgcagagaccttaaatcatgaagccaaaaggaaattacttttatcccctcgaggaccctgatcaccgggtataaaaactcactgtcccttattttcctctcaccttgttgtttccagaccatcccatcaaactgaccaggtaacgtccaggatgtccgtacttgtgagaggttgtggtggtcccaccggctccgctggtgttcactcgagaggacaggtctccaaagtcccaggacatggttaccggagcgacggaggaggcggctgagaaactaatgctgctgtgaacattttggattggaagaggcctcagagagatggaaaagttcacctcaaacacatcgtgggccagagtccaacgacattcctgcacagagcagatagcagcgtgagcgcttcctatataagtctacgtgccctgaatgtgggtttaatagagtcattaagaataaaccaatcctgattttctaaaattacatatctttttgtgccatttcacacaatataacagcaacaatgatgggcagatttaaatattttcagaactattaatatatgagagccccccctgatttagttacgcatatatgaaagaatgagctttaaaatatgcctgtacattaatactatagagtggggaagcctgccacagtattagccaaaatgcaacagtgtacaggtggcagcaaaccgacaaagtctcccgtttgttgccttcctgcttgggttcatctctgatgaataaacaaagtaaacaggaaaaaggaaaactacggagctaaaaatcaaacattccagacatgttctgtaaggaagtcgatcgcaggggaaagattgagagcaaaccctctgtttacaacagatgaggcaaaactacagagctccaattacctccataacctgagggtttgtgcaggcagcagaacactgtgattcactgatgaagttcggctccgagtttgtgctgcagaggcactcgtgcctcccccccaagcccccgtagcggtgggaggcagtaaaacacacgctgttgcactgttcgcgtgtgaagtttccgggcgtggacgaagagaagatgactagctcgctccgctccgctcctccgccactgctgctctccttcagacaggcgacgtagttgagatctgcaacaagaggcggcggtcttaaaatgccgtctccacggcgcggagacgctctcgcctgtggaggaaggtgcgacccctaccgcaggtgagcaggctgacgttgagcagtggccggtggcggagcgccggcgggttgtcgcagagcgtggcttccggacgccgaaccttcacgcctttttcccgcagccagctgaccagccggaacagtttacaatgacactcgaaggggttgctgctgaggtcactggacaatagaggcgaccagttaagagcaacactttgcacacaacagaacattaaagctgaattaaattactgctccatctttcttttttaatatttatattcccaataattcagcataaagccaatagcacacatttttccacataagtgtcatttttcctgcattataacaccaggtttaactccacaatgcatttctggtgcattcctataaaagatttaaacaaaaacagcacctggctaacgtgactgtggagcggaggggtgggggggagaaggagcagcctttaaaggcaaaaagagatgaaaagaaatcatctcatcttgccacggaataactaatctcgcttgctccagcctcaagccgacttcctttcatttcaccaggaacttgaaagttcagctcattttattgtttgtgaccaacggcgtgcggtttccctaatttggttgacggtttcttgtgtttatatatgtcaaagaaaaacagagagaaaacgaatagattacgtttacttacatctgagttaaattgcactgacggttgcatgttccttcttcgatggtgctgatctggttgttgctcaaatcgctgacaaaagaacagatgataatcaataaagatgcacttcctgcaccgttaaaagttgatttaatttatgcatttgtatattttttatcccagaaacagagaatgagtcacctaattaaaccagagggccagttatcagatcgcgttgagacttttgatgtcactcccttattctttccacccatctgttttgtttccatgcatttctctcgttttcctttcttctcatcccttttccctttacctccttttcatcctccactcgtaatatccccccaccctcaatccaggagtcgacataatggggctgttgtgtggtggttttggaaggaactgatggaaaccaccagccttctctcatcgcactcatgtgcacacacgtgtgcacgtgcacacacacgagcactgctttgtataagctcaattacagtgttagacttgctccatctcttaaactccacccatttatttatttcccccaccaaccgaatgagcatttaaatagaatgctaaaatgtaatattttgatggcaaagggaggacattttctgtcaaatgaggacattttgtctggtcctcagaactttaaagacatgtttgtgggggtcttggtttgtaaattagagttagttggaattggttttttgatgaatgatgatcagaaccccctgaaaccattcagcactgctggattttgatgaaacatgttgactttaattatgaaggcagctaatatgaggtgcttatgctgcacaaaaagcttgtaaagtctttgttttgggagccataattatcttccaacaataaaaatcctcttatttttaatagaaaagagggtctctaagataatatgtttggaatccaatgttttcaatctgcactcacattgttgacagtggaccacagcaaaaaactcctctgggtaaaacattgatcctgtttccatggagatacctgagcaagataaatatatggttacatatactggggactttaacacagctccaattactgtacagtctgtctggaggtctttgggcagcaatctgccgccatcaccaacagtcaggaaagcaggttaagtcttttgtgctatgaaatgggctgtaataaaaggaaggatttgaaatgtggtcataaaataaagtgtttacgtgcggtggcacacgcaaaattaactcacagctcacgaagtcccacgactcgctccagaaggctgatatcaaaggaggagatgtgattcttggaaagatctctgtgggggacggaaacaacatttaggctacaattaatttaaaaatatcgaatgagtctctcccaattagtcaagagaaatgatctctaatgatattctgggccagaaaaagaaagaacaatggcatcttaaacatgtgtcaccataccacagaagaagaaaccactgtaaattgaaaataaatgttattttctatggcttatgaatgaaaaggcttctcagtagaccagcctggttttcagaggggataaatagcacgtcaggaagtcgagggatgtatcttgacgtgacaccttcatccctggaacgatggtgaatcaggatgtttgacggaggtcttctttattttatgacccaaagctacaaacaccactttactcacattagaaaaccacctgccacaccactgatttacccatttttttctcctatgactgttgtttttgaaccgaattgaaccttagtcattagtgaaaaatacacatctgtggcttccccccccccatttgttgccacatcagtcccaaatctcggctgtttgtgagggatgtttcacacttatataacgtcagacggcaacaaatgtgatgtcattttgcatgcgaccaaagccacaggtggaataaagtcctcatgcaccaacattgctcatcagcagccagaggtggaaatgtggtcaccagtttatgcctctgtgacatgacacatcgattcctcaatcaataagacgcccctgacatggatgtatagatccctgtaacctttgcaattatcgacagcgcgtagaaagtgaactcaacacttccaatcaagtgacctggacaggaagcgagtgagagcacggctttagaggaagagaaaagggggggatggacagagccaaactgaacacactgaagcaaccagttttttttccgtttttttctttaaaggagccgggagatgttgaaatgggcccggtgctaattgtcttaactgtttaaataatccaaaggcaagaaaatgtatgcgagttgattcaatttatcctcctcttccctcgtttcttttttgctgtgtgaaagtaagagagagagagagagagagtgtgagtgagtagagcaagacgcccattcccaaaaggaaacatctgtacattccagacaaactgtgtaagaaagatggaggctaaaggaaaaggagagaaaggagagctctcctctgctgaacccgacgtccagtccaaacggaaacaccgatttagatgctccgctcgcacaggctctatatcaaacacctcatccagtgaaaccgtcagcaacaaacccagacgtgtggcgggtccacatttaacatgtgtaaagcgtctcctccagcccgtggttccgtgcagccattactgcagagggctgacagcagcggagatggggaaggttctcgttgaggtgctggttaatgatgaaggcgccgacgccgtgcaggatgaaagagacacaacaattttctcggagacagacagcgcaggcagctccctgcaccgctgccagtgcctgcaggatcaggaaattccaaattcagagagctctgcaaacttctgatggtctccctcagacacacgtctggtcgcccatcagccaccgaggcaaaggtgtggaacctaatgccaacggtgtctgcgtcagttcatgacgacgctttgagttatcaatcacagattgtgctcagctataaatttcggggtaataagagattatgagattatgggatgttgacacaggtgacggctttactgcatcagccagtgtgttgacagcctcagacctcataagcaatacatgatgtagagccaggtcactactgccggtggcacaggaatctaattcagtcctgtgtgtgtgtgtgtgtgtgtctgtgtgtgtctgtgtgtgtgagtgtgtctctacatgtttaacatgaacatcgcatgggaccttcagtatatctattagcaatgggctcctgttctcagagctacctcaggacacacatggctttactcacatatacacgcacgcgggcaaagacgtagccgtgcacgtgtgcgcacgcacacacacacacacccacacacccacagagcagcggcggcaacagcagcatatggttctgttttactaacggtgtggccaatgatctaaccactccttataaggcctgtctggtgccacttattctgagccggaggatgagaacacacacacacacgagagaacgagagatgtacaggccatcccatttgttgatgatgtcagtaggaagtgaaaaacagaaagaaagtcacttctgtccacacacgaatgggtataaaagttctgcattcagacagggaaactgatggaggtctgtctccagccactgctccactgtggtgacaatgtccaagtccaagttcctctaagcaaaggccggtgctccactaacccactaaacacagacttctctgtggtcgctttcatccccctctgcctggctgtctgactcctgcacgggtgtctccctccccccaatcgcttctgccactttccacaccacttctttccttgtgggacttcagtgatttgcttttatttaaattcccgagggggtgttgagtaaaacatgaagagacattttaggtgcgtggagcgtaaatgtgcaccccaaaagaagtagaggaacacacaaaattggagccattactgtagagattgtctcagtcccatatttagactggatgctcccgccccaacctatttcagatggtagaaaatggatggaaacattcatgtatcagccagacgttaatagaaaatgataaaaagggagccaacagtcaacagtctcgctacatttattgtcaacactagagctgccagccagcacatcatcagccataagtggagggatgtcaaggggagtcgggtactttcccgactgcaggaagtggaggagcgtgaaatcaggaacggaatagtcaaggaaagaggggagctcactgaaaaagtatggacttaggttctgcgtctggggtctgctggttaggttacaaatgctctcctctttaaaacagtctgtccgtttttccagctgctgccgttttgctgccagcagaccaatcaggggcagctgcatacagcagcacaacacacgtacacatacacacacagactcaaagaagtgaaaattgttactgtagacacacatgcaggcttgttttatagcattaacagggtaaccaagagtggaaagaccatccagtgctatgctatggtcccattatgcataattgcataatggtattgtcgatcacagtgctgcaaacctttatcagttatatgaaggagaggtgttggacagcaaggccagagttcgataagcaaaacacaacacacacacacacacacagtgcttcaaacctggaatatctcttcacaagtaatgatgctcctacttttaactccttcagagcatttacattgtagccgtgagtgcgcagcggcacaaccttgactgtcgctatgcaaaaacctgatacgtgaaagaggaggagaaaacaggagactggtaagtggctcggagtctgctgttttcttctcctattaatatgccgcgtacatcctgaactgtgacaaggtcggccttcacacctatagatatctcagccaaacaaaaacaaaacaacaacctagagctgtttttgagtcgatcaatcatcaaggaggacaggcacatgcgcacatgcacacacacttaatatttacttatttagtcttgggtttgtagctgcttctgggagtgagtcattacttactatcaccatggaaacacaacaaagtttcccgagcgtacggtttagccgtcccacttcattaatatcggtgagcgtgtgtgtaggtgggtggttgttgatgaggacggtcgctgtaggaggagtggagcagaagttgtgaatacatttaaacaaaaaaaaaaaaaaaaaaaaaaaaaaaaaggaggagagtttttgtttgcctctggtcgttctgacagctgcacagtctcatgatccggcgcagagctgaaactgttccctgaaaactggtgtaaaaaaaaaaaaaaaacccaaaaaaaacccaagaaacagaaaaacaagtcagcattcctgcagcgagtcgccgagtggaagccactcggtgaggttggaaggccattaaagttcaccaagcgtggccgattggaccggcgaatgtgagcaaaagtgtgttttcggtcaagcttaagtgtttattttagttttgttgagaagggttcccattagctacagctctgtcacagctaggttcccctaaggctttaggacatgattaggtacagatgcatcacagactctatgggacagattggttttggatctcaagctcaaacagcatcgcatcagtcacacacatttgtccctagatttattattattattagatttttgctggaatgtcatactgactgaattgtaatgacgctcccgtcctgtggggggcactgtaggtaccaccatttttgattcctttactgactattgacatcttagattgacagtgggagcaacgcttgtcaatattaattaactgtaatatgaatgagagccaacaattacacagaattgtcatttaatcattttactgaaatgttgctatgattgccgcaggcgtacgtagttgtcaagcaggaactgtcatggcgacaaatgacagacacgcacttctgaaaggctcaattaactcccaggtggtgacagacaaataatatcagtgcttaaaggcactcatggtatgcagctcgagaaatgagtgacaacacagataatccatttcctgtaagtatcacgactacaaccaagttttcatggaagaattttcaagccaaggctaagttgctccccccaggaaaatgactgcactaattaaaaagaaaaactactctccaagaaaaataaaaaaccctaatgaactgcgtatttttgcgaatcgtcaatcaacagaagaggagcaatcaacaaaggctacagagacgctgagagctaaaccttccttcctcacccagttcccataagtggatccacagttacataaactgacttagtgaagtgaaaagtcacatttattatgtgcgcgctggttggaacacatggaccagtgtgtctggggacacctttccaccaactgcagtgcagacatggaatattaagtaaaaatacaactgcagctgtggaggttattttttttttgcagggtggtgtcgaaggttttattttggcagggtggcagcaacatggcggctaaatgtattctcaattaacagcaaacacaaaacgcaccataaataactcaaatcaagactctaatctgtcacaatcatctgcacagacttgcagacgggtaagaaggcctctggtaaattacgctttaggcgttgatcagcagatactttcgctttggattccaaaatttttctccacttctacagtctgaaaaacatgcgtccatccaccctcagacatgaactcgtccatctcagtcgtaacaagcctgtgctgtccctcgccatcacagctcgcttcatttttatagcatctaacgggcgaacggaaagagcacgtctggatggaggaacgactgacaggaagggcagaactggacgctgttgcgggaccgtcagccgtcaccgttctagcctcaaacagtcatactgtgactgcaagtgcagcagatggagtgaaaataataataagagcacattaatcaatagaagaacaaagctgctggaaaccagagaactcgaggggttaaaaaaatgttttattgaagacgatggccttttcagtaaagttcatctgaatttatttaatatggcgtgtgggttggtttggttgttttactttaatgaaatgtttcaaacttggtatatgaagtagatctttaagttatttttattttttttaaaaaggtacgtgagaggaaataaataattgaacacatgtgtgtttctgggttcagaacagaatgttctcagtgcagcagcacaagaggcaaaagattgatcgacaccgcaaacaccaggttcacttctctgaagagctactcgacatgggtacacacacacacacacatacacacgcacgcacgcacgcacaggcgcacacgcatacacagagcgacctttgcccttaaccctctgtcaaccttctaaatattttaatgtttcctttttaaaaaataggatcatctttgcagttttcttgttttaaaaccatcccggaggccataaatctattcgggggatgtgtgatctgagatctttacacctccaaaggtcacaacaattcagtgttcactcagtccgccaaaaacccattcatgaaataaatccacattttctgcgagagaaaaatgcagaactgcagcaaaaaataaaataaataaaataaacagccataaacttgtttgatccgggcctaatagcacgaataatatccgaaaactagtaaatagtttaagtagctgtcgaaaaatggaaacagcaacaacagacggccaaattaatcaacactgatttctttgtttttggagacgctaaatgactgataacaaaacttatcagccattacaccgcgatgctgcgcatcaatatcagataaagctctgatttaggagttctgtcacctccgttcctgcctcaaaatcaatgcaattggttgtttaaaaaagatgaacccaagcttatcttacagcacagaagtagccagcgggatgtcggcggctgctggggccctctccaggccgatgttggtgcagttgacgacgcaggagtgttggggcgccgtcgccagcacgcagctgcagttcgcgggacacgggctgcagctcctgccgccgtcccccggcggcccggagccccgcgcctccaggcaccagagcgccacaaacagaaaggagcagaagctaagcctcgggacgcagacgccatgttttcgcttggataaagtctgtccatttccacaaggcatagctcactcacatctcatcgcctgtgatggttttaagtcctctcagtcggaaccaaaggaacgcgtaacctctcctgcgaggggacaaagacacaagcgggatgcgctttttcccacccccgcgtttgccttcttctttcggtcgggtatggtttctccgagagtcggactgatctacctcagtcttttctggaggaaaaaaaagtttgggagaacttcctcctctctcctcctcctcctcctcctcctcctcgttccagcagttgcagttacacatttctccgcttgaagctggcagcgcatcgacatcatgtctaggtttttatttcattttattttattttaaataaagaaacagaaaacacaaattaaaagagaaaaacgtgatgacccccaatgttgtccttgtttgcaaagtccagtgttgtttttattccctcctttcctctaatatcgctgtgattgtgaccttttgtgccacgctcaggtggggattttcagctgtcagtaaaatcactgggtgcttgttcccgagacataacacgtgtagcctgcaatcccatttccgccacgccgggcacaaaatgacttatttccaagaaacaccttgacaaccagcaggcgggttgaagagaaaccctcttttccttcatgctgaggcggtaaggactgcagtttagttgctctgtgacacctctaatgatgggaaatatgtaaaatcattcagcagaaggagccaacaccctccttttccagaagtatttcctccagccgtgcagggcacgtgcgcgggggtgtattcctgctgtttgacttggccggactcatccattctcctcgcatgcatctggaaacctgtgcaaggactttttaagaatctgtatcccattgattgtttccatccccgtatttctaaaatcactatttcctatgtgacctactgtatgttctggagtgtgtaaaggggcttcgacggagttcacatgcaattttcctcccctgatgccgagtgatgggtcatttacgttcccaccgtgttaatccgagtgaaataatgttgcaccagcctttgcatcacacacatgcttattattacagctacggctgtaaccagaaggtgcaaccaagcatctctaattgaggattttctatcctcttcatgttgattttgccagacgggaatgatcagagcctggtgggagcttccactgcaggccagtgaggagaagagaatgcctactgggtgggagctgggaccagcctgttatactccaatgacatcattgctggttcagtaacggccaagctgattaacgaatggtgacttaaagtaaaactcatcacttcctacaaatgtcattgaaagttgttgagcctgaagtgctggaactgaatggcttctttcagaaggggaggggggtaatgattgtgagctgatagcaggtgctgtaaattgttgggtgttctttttttaaattgagcgttctaagcctggggaataaactctgagctgtattttctgtacatctaatctcaggatgatgacaattataattgcagcatcagctgtgtgggggcagcggttcagtgttaaggaatgaaacaatttcttcaatcacttttgcatatatctgcaattgtcaatttacaggcagttagaacatcatgatttatttatcaaatccaaaaaaacctgttgcatttccactatgtttaaacagcaaaaatccatcctttttgtccatgcggtgtcctgtatgaaagatggacgcacttctctgtcttcgttctggccaggctgggagggtaaaatgagcctggcttctgtttggttatggggagggacctccggaacggccaggaaaagagcacttactgaggccttgctctgtgttattgtagtgctcgaggacggggtcgtgggggtggggatgcaggaccgaaaacacagaaagacgggaaggactgggtctgaagatgagctgcgttctgaaacgaaccagcgcagagaggtttttacttcatcacactgtgctggggcaggaaacctaattacagcaattaaaatgattcagtttgatgtgaactccaagaaaaacatgttatttatgcagttatatatgttggcgtgggctaagttgatgcagctaacaggaaatgtggaaaacgccgttttttttggcgccgcagagcatcaagaagagctgcgagatgactaacgtgttttagtgggtgaaataaaatccattaaaattcataacaatgcaaagaagaagatgattgtaatgttaattaacattttttttctctctctctcccacacacacaggaggagatgaagtttaatcagccataatggatggtgtactgaagagtgtgcacttttctttctccattcttttcttttaactcttctgcatgttgaaagctcttctccgcgagcgtgagagcctcttgtgtgaaattttgctctttctttctctcacattgcagagtctccctgaaaaccctgatggtgcttcctctgctggagaacaccagcagtaaacacctcctgctaatgattatctccgggagaagagcttcttcatgtctgacctctatctatgttggcatttcaagttgaaaatcacctacagatgtaattttgattgtcttaaagggatgtttcaccccaaatcattagttcagttattttctactcaacagcatgaaacatgttcttaaaaatgtcacattccactcggcccagacatgacatgcagttaaatatccacatgtcactgttaaaagctgtgattgttgggcagttgccaggcaacgcagcctccaagatgccaaatggcagccaaatgggaggattacaacagcttcaaaactgttcaagaataagtgccatcgggctcaaggtgccatcaatacacgccaatccacaaacaaggttgttttaatcatttacgaattaagcagaaatgtcccagtaatagctgtaaagtataaaaacatttgtgttgtagctactaatacatatgactaaattccccctcatttctaagggcagcgtgtctgtttggggatttttttttctaaactttcatctctctcaaacacaacattaatgtcctttgacaggctgggaaggtcaagacctggacgctccgatagcttcactccgggggatcgttgcggagacggccccaaactttccacccagaacccacctgacgctccgtggtttttacccactcttttctttctaaaaggaaacctttgatatatttttttcttttttaaaatgacgacgacgagatagaaaatttacataaacgggagaataacaatcaaccacaacgagtcaataaatcttttatttgctgcctcacctgttttcaggcggttttcctttgaactacacacagaagcaaaggatgttcaatgttctccaccggatccctttaaattgatttcatatgagacgtgtgaagttgaccttgctttttcacattattaataacaggagaatgaatctaaccagatctaaagcacttaatggtgattcgctggagtgtattcattaaggggatgaacctttctgcacactgaaaatgcccttcaggtctgtaaacacatcacaaggtcatcgttcagattcagtctttattgtcaactgggttttcctgtaaagtgattgtttttctttgcttaccactataaatacttcatctttgctgtagaacagccactcttaaggggagggggggccagagccagaacctttcttccacctacagctgggttctgtccccaagcaggcaaacaacacctgggtggaaacactctgctctctccatggaagcgtaaacagccacaaaagagtcggtattgttgcgcgaggtcagtaataacaatagtaataatcatagttattattggtgttgttgttcacgaccccgcagtcagagtgacttcggcctctcatgaagccgcaagaaacaatgagctgtgtgaccttcactgggttacatgtacaggtgtgaagtctcctgtctgtctgcctgcccgcctgtctctgtctgtctgtctgtctgtctgtctgtctgtctgtctgcctgcctgtctgcctgtctgcctgcctgcctgcctgtctgtctgcctgtctgcctgcctgcccgtctgtctgcctgcctgcctgcctgtctgtctgcctgtctgcctgcctgtctgtctgcctgtctgcctgtctgcctgtctgtctgtctgcctgtctgtctgtctgcctgtctgtctgtctgcctgcctgcccgtctgtctgcctgcctgcctgcctgtctgtctgcctgtctgcctgcctgtctgcctgtctgcctgtctgtctgtctgcctgcctgtctgtctgcctgtctgtctgtctgcctgcctgtctgcctgcctgtctgcctgcctgcccgtctgtctgcctgcctgtctgcctgtctgtctgcctgtctgtctgtctgcctgcctgtctgtctgcctgtctgcctgtctgtctgtctgcctgcctgtctgtctgcctgtctgtctgtctgcctgcctgcctgcctgtctgtctgcctgtctgtctgcctgtctgcctgtctgtctgtctgcctgcctgcctacctgcctgtctgtctgcctgtctgcccgtctgtctgcctgtctgtctgtctgcccgcctgtctgtctgcctgtctgtctgcctgtctgtctgcctgcctgcctgtctgcctgtctgtctgtctgcctgtctgtctgcctgcctgcctgtctgtctgcctgtctgtctgcccgtctgtctgcctgtctgtctgcctgcctgtctgtctgcctgtctgtctgcctgtctgtctgcctgcctgtctgtctgtctgtctgcctgcctgcctgcctgcctgtctgtctgcctgtctgcctgtctgcctgtctgtctgtctgcctgcctgcctgcctgtctgcctgtctgcctgtctgcctgcctgcctgcctgcctgtctgtctgcctgcctgcctgcctgcctgcctgtctgtctgcctgtctgtctgcctgtctgtctgtctgcctgcctgtctgcctgtctgcctgcctgcctgcctgcctgcctgtctgtctgtctgcctgcctgcctgcctgtctgtctgcctgtctgcctgtctgtctgcctgtctgtctgtctgcctgcctgtctgtctgtctgcctgtctgcctgtctgcctgcctgtctcctctgtccatctctccatcgctttctctttattccactctgtctccatctgtgtgtgtctctcatcactccgtttccgtgtttctctctctgtccgtgtctccatcactctatctctaagtccaactccaactctctccatctgtgtgtctgtctggctctctctttgtctcatcttgctcttttccatctccgtgtctctccatctttccctctctctttctgtctccatctttttctctctccctcagtgtctccatgtctttctgtcttatctttctcacatcatatctctgttactcgtcagctctctgtctttcccctctctctgtatccatttctttatctctctatcaccccgtctcatctcagttctcctctctctctctcaattctctctcctctctccctcagttctctcttctctctctcctctctctctcagttctctcctctctctctcagttctctctctctcctctctctctcagttctctctcctctctctctcagttctctcttctctctctcctctctctccctcagttctctctctcctctctctccctcaattctctcttctctctctcctctctctcagttctctcttctctctctcctctctctctcagttctctcttctctctctcctctctccctcagttctctcctctctctctcatctctctcagttctctcttctctctctcctctctccctcagttctctcctctctctcagttctcttctttctctcctctctctctcagttctctctcctctctcccccagttctctcctctctctctctcagttctctcttctctctctcctctctccctcagttctcttctctctccctcagttctctcttctctctctcctctctctctcagttctctctcctctctctcctctctcccccagttctctcttctctctctcctctctcccccagttctctcctctctctctgtgaggaatcaaagttagaggacagggaagcgagaggtgcattctgcacagcgccaccagcagcgcccgtcgggtttcctctcacagatgatgtgtcgggattggagaattattagaaaatctcgagacgggagtgacacgaaggaatcttgttttctggggatcaactgttttttctcatgaccgctcagagcgctctcctctcaacgtaagaatttatattgttattttccattattttctcgtttgtttgtttttttggcgaataaagcactcgtgtagggtcatctaaaagagacaatttcataaaagaaacttttttaagtctcactaacgtcttcactttaaatcttttagccatttagtcattccagacattatagaacttatagatctgtttgcgtcagctgttgagcgtttttcttacttttgcaagaatcctaattgtaaaaattgattgaagtgagcggaaatacctggagttatgcctcaaaccccacagattcacttgatgggtccatgacagctcagcgcaaagagctgtgttcggggcgcacgctcccgcgccttgagtcggtccaaaacctgtatgtaaactcaacgtacatttttcgagctctttaaaagcaacattgataaaccaagtgctggtgtcatggaaactttaattctacgggtaaaggcttcccctccaagtccctgaaaacaccacaacctccgtgcaatggaaagatggagcccctggatcagaccccagggttccctttatcgccagagcccaactactggtatgaaaccactccttctctcttgctcgtttcctatcctcatctcctcgacatctcctccaaccagtccacccagagtgttcccttccagggcagcagcgccctgctcacagcggtcatatacatcaccgtcttcgtggtgggtctgaccggcaacaccctggccatctacgtggtcttgcgctacgcagggatgaaaacggtcaccaacatctacatcttaaacctggctgtggccgatgagctctacatcgtcgggctccccttcctcgccactcagaacgtgctctcctactggcccttcggctccttcttgtgtcgcgtggtcatgaccgcggactccatgaaccagttcacgtccatcttctgtctgacggtgatgtccatcgatcgctacctggccgtggttcatcccatccgcagcaccaaatggagacacccccgtgtcgccaaggtggtgagcgcagccgtgtgggcggtgtccttcgtggtggtcctacctgtggtaatcttctctgacgtccaggtacgaccgtcacgtcctctgcaagttggaacctcctcaaaatgtttggttaagcgagttcaagttggtattcagaaaaaggattaggagaaaaaaaaaaactatctgaaattattcccaatcctgcaattaaagtttaatcagtagcctaaagtgctgattagcagacagattgaaaccaaacatgaaggccactgtaaaaacctcaaacttcgaagtgaaacctctaaaaagtgcatgttgttcatcatctttcagtcactatgagtaaggataaggatgaggaagaactattgccaagtacgttttcatacatacaaggaatttgacttggtgttttgttgtatgcagtgcagacaaaataacaataatacagcaaaataagaataaagataaggaaatataaaaaataagcatatttacaatacaataagcaatactcatatttaaagtaaaagagtaaaatgtgtttgcactaaattataatcactgctgcaaaaattcgattgaggtttgaagaaaaggacctggaataacattctttcatttcctactccataacctcagcgaaataaaggtccgagatgtcatttggaaccggagttctcgtgacaaaattgaattgaatccttgtttgactgaatatgctggtttatgcagcagctttgtttttttggggggggtttatggaacacatgttcctgaactgtccggatggcgtcaaacgccagtctgggggggttcttctaccatcaaccgatgccaaccaacagatgcttctttaaatcgtgacatatggtgaaaatggttaaaacaacaacaacaacaacaacaaacatgccacctttagttgtttggcaggaaggccagagcactgagccttgaaaaaccaacccccatctgccttaaacaagcagggtaaaactcaacggaggtagatgggaatctttagacatttatggaaataatgtgtttttgatgaaatacaaaaacgaagagggaagcgagctgaataatgcagaggtacagggaggacttctgtgtatgcccccaagcaagtctgtggcaaaacagtgagataataaaacagcttttcagaggaacaagagatgaagggaacatcttctgagaatcttttcagctttggatgccgctgcagtgctgaaggccgtcaggaaacaataactcacgacagtgcctgtaaaacacacaaattcatttcacttctgcataaagactttttttgtttaattcacataagagatttactttgttgtttcaatttctcctaggaaacgtttaactcctgcaacatgatctggccagagcccaagaacgtgtggtccaccgcctttattctctacaccgccatggtgggcttcttcggcccgctgctcatcatctgcctctgctacctgcttatcgtcatcaaggtgcgacacagaatgagcgctgcacaggttggtgctgtagtctccacctgtcccctcaatatctgctgtttgtcgcgcaggtgaagtcctctggcgagcgggtggggttcaccaaacggcgccgatc

SEQ ID NO: 1979 - DNA, 95769 bp, Arabidopsis thaliana
gaattcttcgtaatgtaaagaaaaaacaattattcaaatgaagctttttaatttcgggccgtaaaagttaatgggccatgtgcaattactcacaccatgtttttattcctttccctttttttctttttttcttctttttttccttttcaacgcgaagaatgtttttattttgatctcagttgatttgactgtaggcacagtttttgaattggaggcaaaagtggagcaagtgatcccgccggtgaaggttgaagacggcgaaagcacaactcatgaaacgcgacggatgcgttacggagaggagtttctttcttctcgactttgcaggcctccgatggtcactggcctggagaaatcactggacctctcttcttccttcctccattggtatgtttcttcttcgttttcctttcgattcttactttacgtctatcggcgaatactcttagggttagaattagagatttaggtttctattgcgcgagaaattataagaaattgaagggataatgaagaggaatcaatgaaacggagagaattttcctgcatgtattttttttctgtatatcacagattcataggacatctcgaggagatatttgatgctgagcatcgtgaagagattcttcgatatatctatcgtcaccttgtattcttgcagcagattttaaagaagaagcttgaccagagaagatcctcacatgagttctgtttttctcccttaatttgcagaacgatgatggtggatgggggttacatgttgaaggcaagagctttatgttctgcaccgcactgaattacatatgcttgcgtatactcagagaaggtcctgatgaaggacgagaatatgcgtgtaaactgacgagtaagatgccttggatcgtgacatttttgctcatctacaacaatgaaagttgtttcccatcaatctagttcttccaactaatcttgaacctcgtgccacttttttttgcttcattttctttgttttcgcttaaatcatctaaacattgcccccacacttatcaacacatgttgccccttcacctatctatgaaagagattaagagaagatgtcgaaatagtatttccagaggagtggtgcagcgtttcttaaagatgttgatggtgaatacaaacgaagcagcttgtttgttgacatcggtctagctcaaaccatacatatttgcaaagatgttttggtttgaactagaccgagtacaacaaacaaactcctccgtttgttttcacgatcaccatctgtaagagtaccatctacgtccaaagatgttgcctctagaaagcctattttggcatcttttcttgcaaagatatgtgaaagagaaacgtgtgtccataagtgtagcaatattttcaaatattcagatgattcaagcgaataaaaaaaaggaatcaaaataaatggcatgcggaaatctcaaccatcaatgtcacaatccggtgcattttactaatcagtctgagaaacatgatcgcgtctttaacctgggaaaagtaaatctcttccacaaatgaagtttcatcccaaggaagtaaaggtgttgaaaatccttcgacatttgcttctctagttctatcttttcgccaagtcagtagcagattcaaattaatatattagtgtctgctaaattatgattgggattttacagtaaagttatatggatttgtatactatacaagtcaagttaggattgtccttttttgagaagcataccaaattgtaatccaacaaattctatttaagatagatcataagttggtgtacctttatgtatgcaggtatttaatctaagtggcaagaggtcatatcttctagatcttttatccactacaatagttaacaaaaaaaaattcaatcttttaaatctatcagtttcaaaatctaccgttagacttaacggtatttcgcaagaaaatagtagattttatattttatgagcaaggtttgaaattattataagagcatatttttcttgttgttgtgaatttgtgatgtataaaaatctagaaattgcatttcaatcaacaaacaagataatttcaataaatatggatacgctatcttagggttttgtaatagatcatcatgttagttaaaatattatagatctattcgtgtaaattctttatccaaaaagcactaacagaaaatatgttgagataaacaaaactgaccttggccatagatctggtgacatgatgagtagtatctaacgaaaggctcctgggctttgcgatccttcaacaaatgaagtgtaatttagacaacgtgttaaaagatctagtcgtgtaatttatctaaaaagcactaagggaaaattgttgagataaacaaaactgaccttgtgggctttgtgattcatgcgatgagagatgagatttctcttttcaaatcattccatcgtttttgatagaatagaacacaaatcattacagtttctttcgtggacttaagatcttatatattctttagtgaagaagagagacacgaataaaaagaaaaatgaatataataacagcttttctgatttcagattctctacatgtaagagaatggatcgcttatatgttttctgttgataagtgactaggagacacaaaaaaaatgtgtggttgttgttgaaattaaaactctaattcataaaatttccttcttaattttcgtttgaacaatttaagtttattcttctctttcagtcaacaaatgaaggaaacattaatgctttcctttttattattatatttaccaaaccatattttattttttctaatttatatcattttattaatattgttttccttttgaagcatatctacttttaacaatgtgtcaatggctggttcacaaagaaaagaaaaaacaatgtgtagtggtaatgcttaaatatttttataaataaatcatctctaaattaataatgacgtgattatgatatttattaatttataaaaatgattcccttcatttatctatatactaattaacctaaagaactaatttgaaccaaataaatgttggtttatcgaggtattaagttatcgagtattaatttctaaagattatattcgtacatgcaaaatattaagttagtacgttaaataaatatttgaaagaaaatttttaaacaatgatgtggtgttcttcgtcactttcttagactaaaaataaatcctacgaactatactccaaaatgtgccagaacaacaaaagtaaagttacaaaatcaacaattatatatataaagatgtctataccttaggcatgactttgaggacaaactaaatcccagatattacaacatgaaacaaacaccgaaaacattaaatacttgaaagttgagaccatatataatcttcacacaaatgattaaaggctaacttcttagtccttacagatagattcaaaccaaatctcattagaagcattcgatactaagctcctcgttaccttttggaagttcctttagcttggcaactgccgcttctatctctttcttcttcttttcatcaaatgatgtcttaatcatcatcttcttcattactgtcttttgcatcacgaaacgcgacgctagtgcaaattgttctttatttgaacccttgaaattgtgcatccatatagtatccacacgaaagtcagcattgggaaacggttctgccttctcccataaattgttttgtgctccaccgtcagaagaattgccttcttccccaagaggattgttattctacattcacaacaaattaaagtattgtatcaaatctcaatcaatattataacaaaagtgattttaaagagatcaaagatcaaagcatccaattaaaatggaacatgaaatgaacatataccttaaatgatatttcaacttctatcattttttcagtccacacagctaagattttccttagcacttctacttctcgaggattcttcaaatctaaactcacagataaagatgcaggtgatgttgcatagttggtatcccacttcaccatcccgttgctttcttgcttctatatttaaatacacaattaacaaacatgtcaaactaaatataaatgtttatatccttaagtgtaatttcttgtacctgagggggacatgagatgttgatgctagtatgaggcaagagtcttcctgctacccaatagtttctaccaaactggagtctaggaatttcgagaacgacgttatcactctcacatgggatatattctatggagagaatatcaagacgagctgcacgcacttcaatgctatcaatttggttgcatgacatggacaagatccttaacgttttatgatcaatcttcaaatgaccactggggttgaagaaaatgatttgtaggataagaacctcgagggaggggcaagacgagatgacttcgttgaaaacatcaacctcagcaaagatttgaaacaggtcaaggtacttgagatttttacaattgttaaaagcttgtgcatcttgtaatatgtattgatatagcgagagtgttcttaggcttggatggttgaatgtctctgtggacagcttgagcacattgtcttcacctgttggtgcgaagcgaccattaaaatttgcaaggataagatttttggtgtgtttcatactagtcagtgattggatccaagaagcaagcatcccgtcttccaattggtatgaataatgggatattatgcaagtctctaaatggccattgtgcttgtttataacctgaaaaatgcaaaaatgattaagatttaaataaggacaaacaattatgaagagtctatgttttcaatttatacgtgtttctctttatatcgtatatatatgttgaattttatagaaaaattgttaatatgtaattttatgtatgtgtgtatttattaatctatgtagaaaaaggcatgagatcatacttctctagattattgatcataaatttgtttaacataagataacgtttcgggcgaaataccgttatttgttttaaatgtaacaatgtttcaaaaaaataccgttatttatttccctctaaataccgttaaataccgttatttgctatttattttattttttaaaaaaaacataaatttgatacatatacatgtctatgatttcacatttatatgtatgaaatttcttataagtcctcaaaggcaatataacaattttcatcttttaatccaaaattccttttatcaataactgatttaaacttgtaagattgaatattgagagaaaaatgaaaagaacctcggttataattgacaaaaaaaaaaaaaaaaaactcggttatctgattagcggcacgatctaataattgtggcaggacaatcccgttgatggtgatggtctttcgcatgtcaaagcaaagatttgacacttgtttccatgtatccccccattgtttggacaaaacacatgtctttatcgcttcttctgtggacaattctgataagattttggacaacatatcgtcaggaagttgattaacattatcgattgcatcgatactgattcttttgttcgatgatatagaggatgcattttgtaagagagacatgaatgaagaaaagagagtttgactcaaaaactaaggaaatggaagtatagcttatttgattttattgttgcaaagaggcacatcgtagagtatatatacacaaaaggcaattcaggttaattaattaccttcccgtttttcaattggagaattttgattattattttttgtctacatttcaaaatgagaaagaaaataatcatttaatacgtggaattatagtttagtaatacatggcatgaaaataattttatcaaattttatttcggcatcaaaatttgtgtgttttttttttttttttttgaaattaaacttattgttatgatgcatttattgagacattatttgatcgatagtagcaattttaggagagtgtctgttgtatatatatatgaactatgaagattgaaggctatttgatgtactgtatatatgtaatacttgggacatagctaaatatgcatattgtgtcaatttcttttacttatctagcgttttctgtcaaattcattttcagtttgtagattggtaaaagtgaactgagaaatacaaaatgtctttaatgaaattaggtgtttactatctagtttctaaacttttggtaattcagtagagcggcacaatttgcagtttcctacgaagagatgattatcttgacttttataattagcatcagatatccgatcgccaactaatccctacaagtaaatcagtccaaatagttaagtggtccgcacagaacaagtttgtttgcagtggaaactgaaacatcaaatatgtgcgagtttacatcctaacctaggttctttagtgaaattgatcctctcacaacttacaagtccaaacaaaatatcttcatcacttgagttgagtccatctatcgttactgttttcagacaaatccaatggtccccatatcagcggctgctctcatctccttcgacaagtccacattatatcttatatcgatctatgctattttattatacaaaattagaaacatttagtaagacatcgacacatcggtaattatgtttcatcttatcatatttatcgggaaaaaaaaatgattttctctattaaaaaaaaaaattatccttttttaccattatgtagttgaatttaggttgcttcttaattttttttaaaactgttcaatatttactcacacaattaatattgtgcctttttaaaaatggaagtcctaatttttgttaggctatcaattttgctgactaattaatatattatccataagaaattaacttttatttaggcaaatatctctgctaaacttggcaaacatttatcaaaatctacatttaatacctcaaaggatttcataattgtcttgccaactgaacccaattattagaggtcaaacttgtactactaactttaacaagtcaaagatattaataacttgtactctattcttatcatctcattgcccaaaaaaacaactataaatacttacacaaaacattaccaattcggatctacgattttcaattaactctcttcttttttttttttttttggtttttcatttaagtctattcaatcatggaaaccggtttaaacatcttaaagctatcgctatgcgtcagcctagtcgtggttggatcatatgctcaggctcccgcaccatggaatccatctaatgggtttcgtccggggacatgtgaccactacgagtgtcccacctataaattggtagaggccggatacggctttgagatccgcatgtacgacgctgccctatggatatctactagtcctatcccctccctatccatgactcaagccaccaaaaccggtttccgacggtaaatgaataaatcgaatatataagacttggtgttctttcggtttctttatattataaactgaagttgactacgtttttgggtttatagattaaataggtacatagaaggagataacaagagcaacgtgaagatgaacatgacagctccggtgatcgcacaagcaacgcctggaagatcagtctacacggtctcactctacctcccgaagaagaaccaacagaacccacctcaggccgatgatctccacgttcggtctacgaaaccaacttacgtagccgtgagacagatcggtggctacgtgtcgaacaatgtagccaaggacgaagctgcggctctgatggaaagcctccgggattctaactggattttgcccatcgagaagagcaaaggaaagttgccggcgtattttctcgctgtttataacccgccatctcataccacggctagggtgattaatgagatcatggttccgtttaacatgtagatcatgttaatgacgccctcacgatttgattgttacgtagcaattggattagaagaggtggtttagaaccgatcgatactgtaacagcagcttgcagcttctggtttaaccggtataaattgtatctctggttaagtggtgattaatattgttattttgtaaaggtggggaaaactgtaaccaaaaagtttgataaaagattaaataataactaagattattgaatcaaaattgaaaatcaaacctaaatatcatcgaatcaaaaaaaaactgtaaatgattttttcagtttcgctttttttttttttcagtttcgctttctagaacacttataaagctgtaaaagaaagcacctgatcaaaaccatgaaaaaaaagagtgaaaaataaatattaggaaaatataaattaaagcgataatttatgtaatttcgatatttttaatgcatattatttttgtcggccaacttgttatatttaatcatgtgtttacaatgcaatttaatcctatccgaagatgaaccacacacataaaaccttatctgttacaaaaaaaatgtttatgtttttcttcataaatgtataaaaccttgtatcagtttacgttgcatggccgcaacggaaaacaaatccgccaatggaagcggctctgagcatcttcaagctctcgttccttctcacccttctctccggcggttcagaccttatcgactcgttgccgccgaattgtaaccgagccgagtgtccgagttatgaggttgtccacgccgggaatggctacgagattcatcgctacaacaccaccgtttggatttctaccgaaccaattcaagatatctctctcaacgaagcttctggcaacggttggaaccagtattttattcattattcattcctaaattaactaaggtttttaatcgaaaacgtattcaaaatgcgttttgctaatttgtatgcagattgtctgattacatgaacgggaacaacgattatcaccagaggatagagatagcacttccttatatcacccaagtctctcagaacttgagcaccttcatagtctctttcttcgttcccaaggcattccaacctgatccacctccgggaaacaacctccacgtacagagatgggactcgaggtacgtggcggtgaagcaaattagtggatatgttgcggatcataaaattggaaaacaagtggctgagctgaaggcgagcctacaaggtaccgtatgggccaaggcaattgagaaaagcagagaaaccggcggtgtcggatcggcttgggcttacacggtggcgcaatttagctggccgttccagtggagtcagcgggtcaatgagatttggtttccgtttgaaatggaagatgaagaaactgttagtatcgttactcagtgaacaaaaaaatgaacacttttttatctttttatggtgtagtgacaaagcaaagccattgagataagcctatctcctaaaagttgttaaataactgtccattgtcttactctggtcagcacattccctaaagaaaagaaaatcaaaagagtacttttttctgataagtgataacccacctgaggctacatactcaatgcaactcacagcacctatgtaagaaatgagagctatctatataatcgaacaaaacttctaatcaatgaactcctgattacgcgtttgttccagaccaatagaaaactcaaatccacaaagaacctagcatattataagaccgcttaatagaaacacccctcaagaaaagacccgaattcttgaatcacctggtttatttacaacgatgaagacaacaaaagagcagaagaaaccctaattttctcaatcttttgatgttaacatgagcaggagagtaaaagaaagatttactgatttcaagagagacaaaatccccacagacttttcaaatgttctaagaatgacataatgcaaaaagttttgaaaatgacactccaataacacatatactgtatacatacactctaatagtgatcgtatttgcttttgaaaacgctactcaatcagatttaagaaaaaataagacttgaaatctgtgttatgtcaagcataatactgaaaactctgtctatatttcatttttattctatagatagtccctttttttgccagcatttatacgggtcataataggttaacatgacagttttatactagtactatttttcattattgaacttttatttggaagagggaaaattaggagtcagacagagaatcatatagggacgtggcatatagccactccccacgtggctcgaagccacttgatacaaaacatgtcataatgtgggtcattttttcgtaccattcttctcgaagatttgtaaaatatctctatctcaaccgttggatctagtatgatcaagatacttgaggatttcgaaaaattgtcgagaccttttaagaaggatttttacttctatcatgaagtagctccgaaaatatcggcatctttaaggcccaaaattggcccatcttcgttcttctatgctacgttcatgattcgtgcttctatccaaatcattggttgtagacttgtagtgtcttttttttttttttgttataggttcgttgtagtctctgtacaattatactaacagaaaaaaaaaatatatataagaacagaaagtacacaactgtaaaagaaaagcattaaatatcatatacttttaaaccaatgagggaactccagtgtcatttttggcccgacatcactcacataattgaaggaaccagacacccaaataagtcgaaacaacttgaaaccaccctttgatattatccttacatttttttgtcttcccccgaataaattattttgtgggatattttatcgattcaccacctgaatataaagattggattgtaatctcttcttatcaccaccttgacaaattataaagcaataatctactttggtctttataaaagaagaaagaattttggtaatcttataaccacattgtttcttagacaaagcaatataagtcactttggtaattggtattaatcgtatagtccttctttctaattaatcgtcaaatgtatatttctcgacataaactaacctacattatagtttttttgggctatattctgatatagtattacctactacaattatatggggtttaagttaaaccgtttaaccaaccaaaaaaaatatttatatgatttttttggcccgtacatgtcggttcttgtttctcaggctgtccctctatggctatccaatcgcttacgtccgtccaaagaagattttattcatatcgaataataaatgtttagttgttattatatataacattattattttgggtaaagaatctaacattatagttcacatcaatctttaaaaaggaacctacatgcgaaactattgtgttctttcaaatatatttctctcatcgaattgcctcctacgtggcttctcatgtaccaccacccctcaaggctcaacatatattataacaagaaactttattcgaggataatgtctgtgtatgttctaaatagtgaatatagttaagtattaataatgtatctcaattattatctatttatgaaaattgaaatgctgacaccactgtattagactgttattctgttagttaataaggctaaagttaattgacataatgtgtatgtttacctctctagatttacaaaaaaaaaaaaaaaaaaaaaatgtttacctctcaacagaactaatcagttatcgctactgtaaactaagaaaacgatttaattattatcaagattttaaaattttatcaaatattccttacaaattatttttttgttttgggatatcattttccttctcccatatttttgggacatctatttgataaattcttgaatacaaactgaaattaacacagttgtgttgtggtatagatacgaactgattttagtcggcaatattagttaagaatatttaaccagaacatgaaaagaaaaagaaatcatttaatcctttgaaaaatatttaatgcggtattcaggtgagtatcatatttatcaacaattatttttatagcatgaaagtatttccgaaaaaggagtaacgggcatataaccaacgtggaacaataacggtctcaagaatgcaaaacccacaaagatattattaattgctgattctttgacagtgacagctgcctccgcaactttcttagtgaacgtgtcgattttgttatatgaccccatatgttaataatatgaataagagtcaagtattttgcctataaaaaaaataagtgtcaagtatagaatctttaatttccacacaaaaaagagtatggtctaaagttgatgaacaatgaagtatcgatccatttttctgtaaaactatttgtagcagatttagcaattatattccactaaaaatgaatcttgatattgtttggaatcttaagtttttaaatgtgagagcaccccaacagtaaagaacataatccaaactgtatgtttggataactatatcatttatgatataatgcattgtatctttgatataatatttaagtaatctgtcttaagaaaactatatatggaccacaaatttatttttatgtggttattcataaacactttcttatatataaccgtgaaatatcgcatatttgttccatggtctgtccaaggttgagtctagtttttgataatggcacctaaaatttgaattcggatcaaaatatcatccttctaattaagtggtccgaatttaggtatttatataaacactttataaatcaacacatcggagatatatacaagtatagtatgtatgtggtaataaagagaaacactaggatcctttcgaaaagccataccatacccctttcgaaatttcaagttcattctgcgaacatttaaggacataaagaacgaattagattcatcggaccggttgacgaggtcatggttggtcgccgggtcatgactcatgagttgttataatcaccgaaagtaggtgatgaatacatagaggaggcaaatcagcaataataataaaaaaaaggatacttataaattatgagggaaaactagtacgcaactagtgattatgttgtcagccaacaaactcccataaaatatcaaattcctatcgctctcaaatattgtatgttttatctcgataattcttctttaaatttgacttctgtactttaaccccaaaaaccaaacattgacgtccatgataattaaaacaaaaacaaaaaactgttgacaaaccattttaaacgatttttttactatttagcaaataactaatcacaatggaggctttcgcaaatatcgtcccgatatattcaattttattgatatagatacataaaagagaaaaaaataagtgattagctttagttttgaacagttttgatcgtacgtcgttgtaagatctttatcatctcatctgctatatatacactcctccgagtacataacccaatgtctcagccttcaaagctatcaaaatcaaaaaaattctatcaaacaaggaaatatatcaatggcggtattgtctaaaccggtagcaataccaaaatccgggttctctctaatcccggttatagatatgtctgacccagaatccaaacatgccctcgtgaaagcatgcgaagacttcggcttcttcaaggtgatcaaccatggcgtttccgcagagctagtctctgttttagaacacgagaccgtcgatttcttctcgttgcccaagtcagagaaaacccaagtcgcaggttatcccttcggatacgggaacagtaagattggtcggaatggtgacgtgggttgggttgagtacttgttgatgaacgctaatcatgattccggttcgggtccactatttccaagtcttctcaaaagcccgggaactttcaggtttttaagtgctctgttttcgagttagtgctctgttttttgctctgtgtttgtttttatagttcatgttctatagctttttatgctttattctggattttttttgtggttacgtctcaagttttgttctttaatcttcagaaacgcattggaagagtacacaacatcagtgagaaaaatgacattcgatgttttggagaagatcacagatgggctagggatcaaaccgaggaacacacttagcaagcttgtgtctgaccaaaacacggactcgatattgagacttaatcactatccaccatgtcctcttagcaataagaaaaccaatggtggtaagaatgtgattggttttggtgaacacacagatcctcaaatcatctctgtcttaagatctaacaacacttctggtctccaaattaatctaaatgatggctcatggatctctgtccctcccgatcacacttccttcttcttcaacgttggtgactctctccaggtttgtcgcgttattctttaagttccttctccggttcctgtttcagaacagaagatctaagctttttttatttattaatattttgcaggtgatgacaaatgggaggttcaagagcgtgaggcatagggttttagctaactgtaaaaaatctagggtttctatgatttacttcgctggaccttcattgactcagagaatcgctccgttgacatgtttgatagacaatgaggacgagaggttgtacgaggagtttacttggtctgaatacaaaaactctacctacaactctagattgtctgataataggcttcaacaattcgaaaggaagactataaaaaatctcctaaattgattgatatatctatttaatctataagtgtgtgctacatacagacaatgcatctgtatattttgaagttaatgttatttgttaatccaataactgtaaaaacatgcaagagtgtgtttgtttgtttcgtaatatcaacatcgctcccatcttttatggataatatcaagttgtttaaacacactgttttgatgtaagctacattttactttatgtgtacatcttattgtgttatataaattatttcaaaataaatatgtcctacacggtgcgtggataaataccttgtacacatgatagtatattgttggatcaaatcttgtaacagttttttcttataactttataacaacattaaagatatcgacaaagacattacaaccgaaaatctcaatattacacgtcgaatgtggtccgagaatttcttttgggcaccaatatgtttagtgatatagacatatatttaaatgattcgtcatatacttagaaattccgccaatctttaaagggaaaacgacttgtcattgtatatatttgccatatgataccacatcatcccatggaccaacttgtatatgttcataacgttgatatataaaagtttataacgacaccaaaacttcatataattcttatttttgccgagtgtcgacaaatgtttttatattcttagaaagttttaaaatcttgaatttgtcgaagttcaaagaaaataatcttcatactagtcttacactcttgggagatatcgaaccggaagagtatggtaagtcccaagtcccaacttgttcagaatcctaaaccggttccaatggcaattacgttaacaatgacacctaattcaatcctcataaagaagatgtaactgatcaatgaaataaattacagacaagtgagcagattttgcagttgaataggaatttgataaattagcttctgtgaagcagcacacaatcattgtctaaatgtttcattactaagaatctatggaaatgatgagccatcatttcgtcgacacacacacttagatcatccgaagttaaagagcacactgctttcttgaaatacacgctactttttatttattatatcacttcatttctgccctttcttcttccataagtcaccgaacatcttcttcccagaacttttcctcttcccagacccgtcatccgaatcatcagccattcccggtgatccgacaaacctgcctgcaaaatgcttctccattgacccacactgctctgagaaccgaccattcatctcaacccctccagataaaaccgcagctgcagcatctgctgctttcctccactgctctgtttggaccttcagcttcttcatctcagcttctagagtctcttttgcttcttccacggattcgagcttcttctttagcttcgctgtggtctcattgctttcttccaattcttccccaatctgactcacctttgaagctatctcatcctctttcgcctttgcgcaggacatttccgtatccgtcttcttcaactgatccttcaaggtctcattctcctcgctaagtgataccctttctttctccaagtcatataatctagctttcaatacattgatttggtcttccttagaagccaattcatcattcttcgtcttctcactttcttttgctttctcatcaagaacctcgaacacatctgtctcttgatgtccatctccaggaatgtcatctctctccggagcaggagtgttcggtttcttggatttcttcctatgaagctcttcttgagcacgtttcttggcagcctcggctttagccaactgctgtttgagcaatctcaactcttcttgggcttgtcctagctgtgactccaagccagagatgcgacttccaagcttcttctgactcagcggatctgtatgaggcccaccactccttggagatctacggtcaaggccgagctttggactccggtctgtaatcggacggctgaggtgatgcggatcagaggaagtggacaacagtgatgtccttagcctaggagattgcctctgaggcaactctgaacctctaatactactcacagatcaaagaagacacatatcagatcatagagactaacaacaagaaaaatctaaatcacatttttcatcaagaattgaagtaaaaccctaaccttggttttggcattctgatttatgcaaagttgctgactctccaaaggttaatgatctgatgaaaacgaaaacattcctcagaataaagcagatatatgaactggtaagccacgcgccactaagtgagagtgagaaactcttaaacagattccactattggagtcaaaccagacacaagtgagatataacaacacattgcttttgcttttactcaaaaacgctttagaagatctaagataacaaacttcaatctttcaccaaacgctttagaagatctaagataacaaacttcaatctttcaccaagacttgaatcagatttctcttgaggaaaagtttcttatcttgcatacacacataagtaaatgggttggtctaattgtagaaactaaccttgaggataatgtagagtactttctggggtttcacctgtggaattgaatacgaagaatgattgcgatatagtcttaacaagtaatgcaagcagagaaataataaagaaggacaaagaggaaattgtttttgaatatgctgctggtgtgattaattttgttgatagaaacaagaacacgaagacaagaaaacccaaaatgtggagaaaagagaggtcgtagctttatgtccagagagagagactctcaattcaagaagcagagagatattgaaaaagtagacgttggaagatttgaaataaagctggtgaaagtgaatgacctttgggggaagataaaggacaaaagtgtaatttacatgtcttggagggtgatgtcccacatttacatgtaatcataatgttttgtttttaattatcttttactacattaagattccgtatctttgcatgatttgattataaaagttgccaaattgtaccaattccttcgttcattggaggtttttttaaaaaaaattctaacggatttctactgaatttcacaaaatgtagtacaaaatttggcgtaaacgacagccaaaaaatgggaaacaaggcaattacacaagaagttaagaaccctaaacctaacatacgagctaaatataaaattttgaatcaaatcatgttacttctatttataaagacaaaaaatggtttaagagataaataatttattacacgcatgtgtgggtacccttatcaatcggtctgacattgtttctttctttttgtcggtttcaacaaagttcaaactcttttcttttagtttctcttcttctttttatattccaatcgttctctttttattttttttactttataaaaccgtaaaccaatatattgatatatgttaagcttaatgtatgaatatacccatttttatatctattattttaggtttcaatgtttcattgtacttcaaatttgggattcctaatggtaaatatcataacactactatatgaaaatggatataatgtacaacattcaagctttatattaaagaaacccatacacaatgttgaaaaacaaaaccccgtaacaatctgtgttcaagatgaaatatcaatcactactaattatttttatttcacttttatgtgccaactatctatttatgttttttacataacattaatcactcactacatttttgtagtataaagtaaaagttgacaattgaaaatagtacagagcaaattgtaagtaaaattcagcgccactatgatttttgattgtaagtagcatctacctttaacttttggttctttttatgatgatgttgttgataattcaagtaactaataagagtactacatatcaatcagtacccaaaagaacaaaaaaaatcaagatactgagttttgggagttgtgaaattagaggtccattattctctttttcgaacataaattcatagaagaaagtaagaaaccccataagacacactaacacaaacattagctgctcaaatcaagatattaaatgttgaaaattagttagctgctagtcataaatcataatccattaattatcttttataatttccatcttataacgaacccatacaaagactctagaagacatatatgttgacaaaagccgactctagaaccctaaacccctaattactgctttggtcaacaatcaccaactttgaccttctcttctccatttagaaatttgcaatcaaagagacacaaaacaagtgatcttcaaattttttgtcaatgcagattgaaaaagaagaaccacaaagaattaaagaagctgtaacacaacccaacctttttctattaaaactggaaatcatttcgtttcttttctttcttcctataggaacagacatatatgaatgaagttataatcatcatcagattcagacccatgagtttccattattatcctatttattgccaggtaacttcagttggtgcacatgtcgtcgtggcatgaacctctgccatagacacagccatagccatcatcatctgttcctcaaaactctctggaacaatgaccagaggtggaggaggaggaaagttgtggaagccctcgcctgtcatgtaagaacttacatagctgttgctgcttcctgtttctcccatctcgtaatgatgacgatgatgatgatggttgtctatgccatctacctcttgttctatgtcgtagtaactgtcacaatttccgggaagcatactgtatgaagaaacgttgacattgtgattatgattgtgactggaggattcgccaaccatttggcgttcagcaagtgcggagattgcacaagaaagcccaccagatgatgaagacggtgttgctggttctacgattggagtcactcgtggtggtgaagaaacataactatgattatctgttacatactgcctagaagaggtaatttcccctgaagctgaatttctctgcgtccctgtttcctgttagaatcagtttaaaaagctatgagagaactgaaaaatttaatatcaaaagttatacaaacaaataattttacctgaacagagagccatattgcttccatgaccatcaattcctcaaggtcaacgtcaacctcatcctccctgaagagtttatagacaaatcaaatatatgaatcactcttcatttctaagtgaatctgtgttcatatcacttagctccaaaaaacaaaacaaaaaaagtctaatcacggtgtcattgtaattcagaaatttcatggttacaactactacattactccatatatgaagttgacaaaaaaaaaaaacagagcagccaatggaaagacagacctgtttcctcgcgggcgggaatgttgtctaacaacagatgcgttctgcgatggagcaatttccccgtcatccatgagggagttataagatatggctgcaaaccaagggacaaaaaggaagcctgtcaaaaccgcctttgtttgttcctgatggaagatttaacacgttcttgcagtaaaaataaaccgacctgaagttgaaccatattccatctcgccagtcattgcgcttgtgctagaggaacatgattcaagacgtttctgcattttctcttcatcatcctgcatttctttctgcctcatccttattttggcttctattacccgttgctcttcctgcaaaaagatacagtgacagaatataccacttgagtaaagcaccatttcatcaaagcttatctagaaaaaagttatgttgtgtggaaattttaagacttacaacttgttcaatgcccttttcctcctttgacttgactccacgatactcgacagcatagttgggagttttacaaaaagggcacctcataaatgtcaaggaggacacaaaagggaaaaaacccatcaaattaataagaaattttctcaaacattaagccaaatgttaaagaagcccctaaaagcttatgcaaaggatttaaaatgaaggatactgagtaggccgagctgaattaggattcttcatttgcaaaaaacactctgcaccaaatgaacaaagaatgccatgtcaaatgaaatggaaacatgaatagaacaaagaagctaaagtgttattgaatgtgttacctgtacaaatgcttttcatgcaacatcttgatctattgaggctaggatagtactagaaacacaagaagcaaatatcacaaagttagatcttacatgacaagaatgtagtagttacagagactgagagaaattcacaaaccagaaaacaaattggacattcttcaagatcatgacagctttcatcgtctccaggatagcaaggagcaagcttagactccacaatcagttttctgagctttttaacgtcgacatctttattcacatacaaaccttgaggctttgtatacctttcttccaccacttgcctcttccttcccaacttattacccatcacaaagttttaacctttcttctactaaaccctattctcctattaccttgttaaaagcagagattctgtttcctaatctcacattaacacctaaaattcaatttgtttctacaatgaaacccactggagaaacaaataagcctaatttctaacctaaaggtacatactttaaattggaaacaacctccaccacataacctgcgcaaatggtaaattcaatataagaacacaattggggcaaaaccctaatttgagagagaaaaaccctaactttggaactaattcaattcggggctggttacataaaacattatcaaaccctaattacgtaatttacgtatcgaagttgcaaaatattccacgaattgaaacagaagaaaccctacaagttctgataaaaaagtacggaaaaagaaggataaatcggagaagaaagaaacctgaaaacttcgagggcagaagaaaacaagagacgagagatcaaacaagggtttttgggtaaacgataagagacacgatcagaactttactctgtagagatagaaagagagagaagagagaagcaaagataatacagtgttgtgtgtctctttcgtattatataaaattcatagggaaaaaaaacagagagagattagaacaagttctgtatctgcaaatttctttttaatatttcgacggaaaaatctcagaagagagagagagagagagagagagagagagagatggtgatgatgtggagaagctaaaagggaacaggaaacgatggagtaagagacgagccaaagaatccaactctttgcttctttcttcctctccacgcgcttctttcttcgcgtgtgtttttcattttcgtgtaaaacgacgtcgttacgtttatttatgtttttttttgtttgttgaccaaaaaaggattagaatatacgaaatcttgtgaaggcggttttgtcttaagcaccgagttggatcagaataatgtcttttttaacattttattctttaattgtatctttgtttgtcgcatttgcataattgtatagtccaatattcgtaatttaccatcaaatttattaatggaaaaaaataaagaagttagtatctttggtgtgttacgagactcattatgtgttcaaagttttggtgatatttcataaactagattagtcggcgttaatgttatatttaattgaatttaaaaatggttcttgttgacgacaatatagcttagtaggttctacttctattagctaataatttttaatagacttgtattgtatgttgacgtataatgtttcggataatcgttgaatcaacccaactatataccagaaaaaaccctgaaaataactaccagaaagctagattaagaaagaacgttaaataaaacaagaattgtagatgagacgattaaaatcgtgagtgtgttttgggttgatgaaaggaaatggttcacccaacacaaaattggttaaggttggttagagaaggttaaccatgagttttgttgctatttgcctcagccatttacgcacttacacaaaaacctgttttatatataaacacaagaagattagttcatataatgcttcatttggttgttgtgaactgtatcgcatgttggattctaaaaattgtgaaatagtcacaagaattaaacagtttttagtgaaattactaattttagtgaaatcaaaattcttttagttaaaaacattattttgcaagaaaagaaaaacatgaaatataaatatataaaaaatatggaaaaaaaagtaatacctagttggacttgggtagcaaagacgccccatagagaaaagcccatagttgaggcctgacttcttaatctgctagtcgctttcaatgcctttgtcacacactcacacttcttgttttgataattggttctaaaacccaaatacacagaaaataagagaaccaagtattaatctcgcatatacttgggcttcatggtccttttaaacaacatatgaaagctataataagcccgtttaaaattcggagacatgggccgtactgaaaggtaactcataattactttccaaaacacaacattcgttattggacctaatctcaagagtgacgatccagttaagatgattaaatcaaatcaacaacaacattatctcattagataaaaaagaaaagattttggaagaaaacgaatgatttaaaaatcattgcacagaaattattaatgactcaatattctgaccatagtttatacaattcttccatgtgaggcatctctttgaataatctatcgaactccgtcgtcgtccccattcgtcctcctccgccgccaccgccgtggagctgtctggtatcttcaccgattttactaccgccatcgtaacaacggccgtcgaaagcagagggcgaatcaaaaggaccggcggcgacgatggcgttcttaccggtgagttcttgaacaacggtcttgaagctacgagcatctgtctcaacatactgtgtgttaatgaacacaaccttcatcggctccgatttcactttccctcttccagacattattactaaattaatcgattagagaaacaagaaaagaaaattttgtggtgttgatgattaggttgatcaaatgatcttagtacttagtatatatcagctttagctctcttcctgtgtctttgggtgttcagatgttttgtagatttatatgcatagttgcatacttaggtatttatagagagattaaagagagaaagatataatctctgtggggtactgaagtgactcattcaagtaaattttttcgtattctttttgaaacgattttataatcgtaatcttgtcctacatgaaaacatatgtgacgacctatttttttcttgttttttttcttcctgacgtcatgatacattttcgacgaccaacgttttttatcatattcgttgaattcctaataaatattttcctaattattatattggccgaaaatatttacggctctagtctagaaatgcttaccaatgaattttatgaatgaagaatttttttgactaattaaagactttttatacatctgttgatgaaacaattactgcattctgtatattctttagaatttaacagcaacggtaaacttaaaacaattttgaaactgcaagaaaataacttaatagtaattatttaaaatcaaagattaactacatataattatttttataacctattgttgagaatattaaacaaggtaactatttgttatacaaagcaacaatcattcaacatttactgagatcaatcgaaaagcacatggctttgtgcatagataggacctttgatcattaagacatgttgaccgttaataaaatctagcagccttgaaggaccaaacattaaaatttatatatcactatcaccatcaaaagtattaaaattaccaaaaatcatagtgtattttcattagattgggtcaaagcacgccttctttgatgaaatcctgttacatcacgtgaaacagcctaagaaaaaactactgaaaacttaccaagtatttacacgtgagtagaattttgcacgtccccccacactatttcgttatgacaaaatataatcgtctttgattatgcttctagaaaatagtaaggtgatgtcatttttttcttcaaaaggtgatgtcttttttttccatcgacaaagaaaacactaatggctttagtttattttttcaagataaaaatttctaatcaaaacatcccaaatggggcttttagttaataaccatgttttccctttttccacagccaacagcatatgaaaattttatacggtttaaaacataaaaaataggaggtaacatatactcacatcattgtaaggtaaattttaaatgtttgcatcttgaattatattgatatatagattttattttattttaaatattgatataaatgagtaatggatcatatttttgtagattttactatttaaaagagattagaaaaaaaaaaaaaaaaaagagattagaagttcagcatgatgcacaagaagtcactgatagttacatacgatgtttcatggggagtttcataaagggacccaatcattcattcaattccctgaatttttgttttgttgactcagactttcactaacaaaattcttctcagaaattgcaaattagttcattgtacggttgtacttttgcgatagccctaattattttcagttgttaccaaccacacaaaaattatattggctttaccaaaattttcatatgaagaataaaattatatatggatcagtttaagccttaaggtaaatacaaatcaatccgttatcatttatcactacactacaacttttagaagttgatacgtaattatgtatagtctattttttgtttgttgataaaatttggtgcagtacgttattgtacgtacagttttgatatcaatattaatagactgatgaacatacaaagggaaagtcaagtttggctataacggatcagagtaaggttttgactacaaatcttgactcaggaacctgactgttttttatttgatcgcctttgaaattaagtatatacaaagtttgaacagattagttattttatctcagcttttaccgccggtaatatatagttaactatttcgactggggtaagttatgtccatttgagtttcagcattttggaatttaactttgaatgaatataagtaagtaattaactattgttctgtttttatagcagataaaaattcaccgaagatcaatttcttttttttaaacaatccgtaatattttactttacaaaattaaattccaatcagattcgaaactatgagtttagcttgttacatcgtgtagagttgtgtcttgagattagcccagcccatgtagcacaagttattgggtttgttacaaaagtgaagcccatatttcccaaataaaatatgggtgtttggtggcgtgttctgttgggtgggtgttatgctacatgggctaatctaaaaagttattcagacccaaattgcccacataaattatccaagccctaacacaactatacacttataaacaactttttagtggttttaattcaaatatttaatacgggtgtgatattttccatgctatctatggtatgtacaacttgtttttggtaaccgatccaatttggttgttgtaattcgaaacctaaattactgcgaaaacactgatcgatccgtacagaagcaatttattgataattttgatccacaaattgttcgacaagattggaacagtttaccttatatactattattctgctcatatttaaggaatttttaaaatataccgttataatttagaatcatatcagcagtcagaaacaaatcaattggtactcttatagaaacacattaattcagaaataaatcaatctgtatgattgacgaaaccattaaatttcaacccaaaatttcagccactgatgtaggtttcttatagaagtgtctagagatcgcactggtatataatacgatggaacacaatacgatactatcattctctcaatcataactactttttttttgtacattgtcaattatcaaaaacaaagaaatggtgtccactatctccggttttagcttaattttgttcatagctgccgtcgctagtagcatttcagccgccccttcagccgctctcgtcggaagaaaagtcttcgatgttcgaagctatggtgctcgtggtgacggcaaaacagacaatactatggtagtgaaatttctagttttgtttttgatccaacttattcaacattaatgttctgaatttgttgattaattctaacacatgtttgacttattgtcttgatttggcgttttaggcatttacaaaggcgtggaaagacgcttgccaatggaaaggattacctagagtgtatataccatttggaaccttctacctcggtgctgtagccttcacgggaccatgtaaaagtcggattagtttcatcatcaaaggaactttgttagctccaaaagatcctaacgccatcaaacaagacagctggattatttttaggtacgttgactatctcacggtttcaggcggcggcatccttgacggacaaggaagctactcttggccactcaacaattgccgccaaacccataattgccgggctctaccgatgaacatggggttccagttcgtgagattctcgagactcacgcgcatcaaatcgatcaatagcaaaatgggccacctcaacttcttctcagtccaacactttgatatcacacgcgtcaacattaaggctcccggagatagccctaacactgatggaatcaagataggttcatcaaaccacatgaagatccaccacgttgacatagcaactggcgacgactgcatcgctatcttgtcgggaaccttcaatttggatatcaacaaagtcaactgtggaccgggccatggaatcagcgttggaagtcttgggaagtttaaaggtgagaagagcgttcagggattaattgttaggaattcaatctttaatggtacgagtaatggagtacgaatcaagacatggccttcgccgggtgaaccgaacttagtttcgaattttcttttcaagaatctccagatgattgatgtccaaagcccaatcaacatagatcaacgatactgtccaaatccaccgtgcagctttcaggtaacttccttaacaagaaacaaggttttagtctttttgacatgacctaatttgattttcttctttttattgtagtctttttcaaagattcagataagagacgtgaagttccaaaacatttggggaacgtcgacggccaaggaggcagtgaagttgcaatgtagcaagaatgttccttgcaaaaacgttcagctcttcaacattaacatagtgcaccgtgggagagacggtccagcaacctctgtgtgtgagaatgttggcggttggataggtggcaagatttctcctccgtcttgcatccggtgatccacattttgagtttttattatatgatcctgattagttttttcgtagcttttattatatttgtaattcctgatattctctgatcactcgtttagtttgttcatgtttgaacccttctaaagggaagtgaagatttgaaagagaacaataaatcttatcaatttctttgatagtaactgttataatttccagctatattctctcgagtagaagaagtttgggccaagtcataaaacataaacgtttcagcggattgtaaaagttgatatctccactcgccttttgttttaattttgctgaaaaacgacgaaatctctggacgagtccagccgttttgtattcgtgtcgttgacgcgctctaggtgcgcgtaggattattttacagttcgcgtctttaatttaagtggcacacggtagtcataattgtgaattagtattcattttgtggcctagtataagcccactatggcccaatataagtagcccattgcatctacaactaattgggtattttcctaactatattttggttcattcaaaattactcttcgcatatcttacgcattttgaatgaaccaaaatataatataagtagcccattaaatccttttcagcaaagaatataagctatttaattgatttattttctttttttgataaagaagttgtttaaccttttacacgactaattaccaactagctccgttatctttactttgctataacttaattaacgtgtaacgtgtacgtatcacgtaatgtatgaaccacatattcgatttccagtggtttcacccaccactttggcactttctatacattcttgcattttgattttcttgttctacatgtatttaaagtaatatgaggacaaaatgtatatctacgaaatacttacgtggatatgtaaacatacactcatctcacgttcagtccgaacaaactactaatgtggatatgtattttacagtaatacccttttgatatgtatggtgacattcgaaccaattctgatccagttcaatcatgaacttttgttctacataggctttttcaagattaacgaactttgggccgagcaactttattagatttggttaaaaaaattcgggaactctaaaatgtgaaaaattgtaagaaaaactagttttctttacatcaatattaaataacaattttttttgtaggaatgtgtttgagcgacacaaaactagtccgaaattttgaaatccaaatataatttttcaaagttgaaaaactgaacttcttttccggcgaccattttttagtttgaaatgtttaataattcgggcatataaatgtttatgtataaaatttgccaacaaaaataatgtatatgtataaaatatatcgtgccatattggggatatatgtgagtccatcagtccatgtgagtagtttcaaccacaaaatgatggacatgatcacctatgggccatcacacatgaggaagctttcacgttttaatttacactactaacaaatatctctacatagagactatagagtaatagaccaattattgcttgtctcatcaaatctcaattccatgctgatcatatgctaaaaacatgtatatgtgtgaatacatatatagactgtgaatggtgacataaaccgcactcaaaaccgtaccgcaacagtgcagtaacagtattaaaatttctacatatatatatgtatctatatattttcgttattatttgaaccgcaccgcacttctcccgcacagcaaaacgcagttaccattcggatccatagtatatgactatatcgtaagctattaattagtcattggacaaaagaccctttgaccaacatgttgttactttagttatgtaatcattgggtttttaatttatttagtttagtccttttcccaatcatcagctgattaatagagggcatatggaaccatttacgtataccatatgctttatatccaataaatgtgttagatagtgttgttcattaatcagaagatctgatacgcagccgacctttgatttaattatgttgctaattaaatcagttgttttcattattttatgaagcctgatatataattattgaataggacaaactattgttaactaaagtatcgcaagaacgcaggtttcagagaattttataatttaaatgaaagcaatttgcagccaaagatccattaggttaagagctttggcagttttttcaggtaaagtcggttggtcaaactctctcaaatgcgtcaacaagtctaggtgctatagcctatatagtgttacaataatatgttttcactatatttttataatttatattgctgcttttctacgtggtatgtatcacacgttcgacaaagaaatatcaaaatttataaactttttattttgttaaaggcttaatttataaactttttttggatgtcaatgttaagtaattttttttatataaacatacattatggcaatcaaagttcatatagtttagttattgctaaatatacaatattaaagcctcacataactatataattttgggtactacatattaagtgtttcataaaaaagatttatcaggtttaattaagtaaacaaataacaagcaacgaccatgttactcataataatggtcttgcgagccaatcatatagttttttgtttgataaccacgccaatcataaagtttgttagttaccagttggattaattaatgtagattgctggacagaccgaatcctacctttcaatggatttcagtaaatccaaagccactattcatctacaaaccaaaaattttaagttattatatttgtttcttatttatatatgttcatttttgccaatagacaataataggtatatatgaatcttggggaaaaggtgacttggttcaaccatgtgcttccatgtggtcacatgaactgaaccatattgcatatatatgtacttatcatattgtaactacatacgtttaatgcgcatatatgcatatattatatagttcaaacttcaaaacgtctgattagagaaaataatatatgattatctatgtatatttttcaaagtatagccataaagaacaataaaatttggtgctcgaggtagtcaaattacaattagtcgaatcacttttatgtagacgcatctctaaacagaagttaatttcaattcaaacatgaaatccattttttgtattattgtgcgtgtgtgttaaaagatccatactatttgttagcgatcgagcaggtcttcggtctcatacatttgatcataattttagttcatgtccaaaattgtataccaacgacgttgcgagaaattggtcaacaatatatacaactccaaggatgttaattaaacgatccacttagataattaaaccatataataatttttcttcctgaaaatcgcaaatccagtattttatatcaaacatttatatcgccaatgcccatggggagtttggtttacaaatctgaagctctgaaatggacacctgaagcctggatgttccgttaattaagaatatattaaaatgattaatgtaattagtggactgtgatgcatctacgattgcttcatttcaattttcaagtgggtgtttactcaacgataatggtcatcaccaaccaacttaagttaatcactcaacctaattttgtataaccgaatcttttttcttttcttcttcttaaccgaatggtccgaatctcttgttagaatatttcatgtatactataagactttattctgcataacccaatatacacaattttttaatcccaatttctctaaataacataatacaaaacttcattggaaaatttacgatagcaatttactgaccacgacagatttgtagtgatgtatgaataatagaagccgtagacacaaaactataacaaacatctcgaggacctaaaaaaaaagaagaagtgaaattactaagtactgtagcaagtgtatgttctaaagttccaatgagtaaaatggctcaaacaaccgattcataaaatatattttcaaaaatgaaacatttatatatacccatggtgtttaacaaattcgtaaaatgtcatacattttcggtacacaaataattttataatctcacttacgcgttgaaacaaataagcaagcgcgtaagacatacattacacttttttaaaatgactggaatgcatgacgtttgggcacattaattatgtaatttgttcggtgcttgtgttgtgtgtattcttcgtcagtgagaacgcaaaagttacgaaccaatttatggtttcaagtcaaagacaattgaaaagacagtttatggtttacgtacgtggtggttcgatgtaaaacgttttgatgtggaggccacaacgcgtcttaaccaaaaagccaattgtcacttccattaccagtggaatacaccaaacctggcctattcatatgtttatatgcatgcccatgttttttaatgtcaaatctctaaattctagttggatttaagtttcacgtacttacgtagaagcagacgaacttcggggcagtacttaaatactattatcagacttaattttgaaaaggaattttttttccggatcaacatcgaactaaaggtatatgattagaatctaaaccaactacatccaggttcagtcgtccgactaattttagtactgcatcaacccgagaaaaaaagtataggttatcgaattttcaactagtctcaggtaccaaactataaggatctggttcaacgtactttacaagaattagaccactcaataataccgacagtctcagtctctctaacacgcatgtaattttattatttaatgagatttgaatccaagtaaaataatttacacatttctcaaaatccaactattactacgaccacaagtaatttggactattaggtataaaaatcacttaaaaactaagactaataattgaataagttcccataacgaatgtctcacatcgttggtatcatctcaattgttaaatttgtttgttttatgttacgtgaaactactaataactgcactttccgaaagaagacaaaacagttgatctcaaatattttgttaccgtccaagaggtagttcttccatccttcaatgacattgtaagcacttctaaaacaaaatctgatcaaaactacttcaaacacttctaatacacaaaaattgatctcttaaactagaatgccggaaaaaaatatatctcttaaagtagaaaaatttctaagtgaaatgatcaaatttattacaacttattatccaaagataaattgtgggagataaacaagatgagccattttattgaaaatgataaagagggacgatgaaaatatgtaagtctcgtcagataattattaggacacgtgttaaaagatgagaaaatagtagcgtgaatgacgataataaccattatttctggtatgtatatatatagccttctgtcccaagatgctcatcactcacaatatggacaaaacacaaacttggtcttgaagaaaccaataccaaaaccccaaaccgcagcgtttaatcaagaatcgactatggcttctactaccttacttccttctacttcaacccaattcctcgaccgaactttctcaacttcatcttcctcttcgagacctaaacttcaatctctatctttttcctcaacacttagaaacaagaaactagtagtcccctgctatgtttcttcctccgtcaacaaaaaatcttccgtctcgtcttctctccaatctccgacattcaaaccaccgtcttggaagaaactatgtaacgatgtcaccaacttgatccccaaaacgacgaatcagaatccaaaattaaacccggtgcagagaaccgccgctatggttttagacgcggtggaaaacgccatgatctcacacgagcgccgccgtcatccccatcctaaaacggcggatcctgccgtccaaatagccgggaacttcttcccggtaccggagaaacctgtcgtgcataaccttccggtgactggaacagtaccagaatgcattcaaggagtttacgtcagaaacggagcaaatccacttcacaaaccagtctccggccaccatttgttcgacggagacggtatggtacacgctgtccggttcgataacggctcggttagctacgcttgtcggtttaccgaaacaaaccggttggttcaagaacgtgaatgtggtcgtccggttttccccaaagcaattggagagcttcacggacatttaggaatcgccaagcttatgctcttcaatacccgcgggctatttgggttagtcgacccgaccggaggactcggtgtcgctaacgccggtttagtttatttcaatggtcatctcttagccatgtccgaagacgatttaccgtaccatgtcaaagttactcaaaccggagatttagaaacttcgggtcggtacgatttcgacggtcagttaaaatcaacaatgatagcccacccgaaaatcgatcccgaaacccgagaactcttcgctttaagctacgacgtcgtttcaaagccttacttaaaatacttcagattcacatccgacggtgagaaatcaccagacgtcgagattccgcttgatcaaccaacgatgatccacgatttcgcgatcactgagaatttcgtagtgattccagaccaacaagtggtattccgattgccggagatgataagaggtggttctccggtggtttacgacgagaagaagaaatcaagattcgggattttgaataaaaacgcgaaagatgcttcgtcgattcaatggatcgaagtaccagattgtttttgtttccatctatggaactcttgggaagaaccagaaacagacgaggttgtcgtgattggatcatgcatgacgccacctgattcaattttcaacgaacacgacgaaacacttcagagtgttttgtcggagataaggctaaaccttaaaacaggggaatcaacacgtagaccggttatctcggaacaagttaatctcgaagctggtatggtcaaccggaatttattaggtagaaaaacccggtatgcttatctggctttaaccgaaccgtggcctaaagtgtccggtttcgctaaagtggacttatcgaccggagagattcgaaagtatatttacggagaggggaaatacggaggagagcctctgtttctaccttccggtgacggagaagaagacggaggttacataatggtgttcgttcacgacgaggagaaggtgaaatcggaactccaactcataaacgccgttaatatgaagcttgaagctaccgtaacgcttccgtcgagagtgccttacggtttccacggaacgttcatcagtaaggaagatttatcgaagcaagctttgtgttagttttagatttttgtaggatcttataaatgttaatatgagtgatagtgattagtgacataggattgttgcctgagggattgttatgcattagtccccggcaacgagtttcttgaattttagttatacgtatatactgtgattatgtattatgtatatactatgatcaagtgtccaatgatccaactgtgtacaaagttttgtagtaaagttttaatttacacacagaatttgttagcataaaaatttatagatttgatcaaaactgatttattaaagatggttattaaagtagattaaagtggagttattgttataaacgatgagaaaaatgcattacttataaaaatagctaaatatagtcgacacactaaacttgattatcttagaaggtttatgctgatatcttttctatattatgtaagcttccccaaatatctctgtgagctgcatgtgaatgaactgtgtagagctagagaagcttcttatagaaggaatttgaccttcgaaaatggaaacccgaaaatatctcatgtgatctctgttttgggaatgaggtctactttaatctttctgatcgttctttgtcttttttacaattatcaacaacttttatttatctgctcgtttttcgtctgttcgttttttgttcttcttgcaataattggtattacaaattacgaaattaccacaatacgaattattgtttttttattcttcttcttttaaagtaagaaatccatatccctatacttatatttcgaaattacataaaaaaactaaccttgtattttataaaatattacttaggaataccattagaaatagaatttaaaggtccaaactaattcagttcattaaaataaacaagtcaaaactttatttatgcaatttaattataaaccaaaaagatgcatttatgggtttaacttgttgacagcttattttattcatgaatttacgttgaggttgttgcgatttctactttaagcaaacgggaaacatctcacagttttgacttgtgatcttttatcctactcttattggttctaaagtgcatacacgtaagcgtatacataagcactcgcatttcacagtagccaatcgattgattctaatctttgaacatgtaatacacttcatggccactctttttttccgggaactatcttttttttttgacatggaaaaagaccattttttgatttataacgtgcatactgctgtgtcttttttctaaataaatagtttttatcaaatatgtaatcatactagggaaaatctcatcaagatcatacgtatttttgtacatgacttttaaatagtatattcgccgaaaaatacgttgatgtctcggaatttgacgcctcaaaaacattagaatatacaaaatcaagtaacgagtttgtaggttgaaactaaaatgccacgtaatacagtgcgtagggtccattcgatgtttctagatcaaagtctacacactatagagacttccagatacagatacacattcgaaatcatcaatgaaaaataacaatttaagtatcttcttatcctaatgtgtgtgtgcttttttttagtcaactattttgtgtatattgtaagatgtatcatgttatgacatgagtatgttgctacgtgtcgtgagatatcgaacccaacgcagatatgagtatgttgagctagtttcttcttatgaaacaatcatatatgtctataatgaatagatcacattatctgcctgaaaaaaatcccgtatattactcgacgaaatataaatacccaatgtagctgattttgctttctctggtgacatatccaatttggctaaatttgttaactagtctattataggtttataatagatctagctatgttaaagatactaaagcatcagttacataaatttttggcgcgagtttatatcttttggaattaaaaataagagaatttaaaaataagaagatcattttgtttggccacaggagttctgaaaggtcaggtatgatttttttcttgctcgctcttatgattttgtttttattaatgggttttcaaataagaaaaactgtttttcgaagcccggttcagatccattgttttttgtaaaatataggcccaattcaccataagtccatgaccaaaacaaaaataagatagaaccaatactgaaccaggatcttctctcgctttcgtgatcaatgtcgccaagcttctcgagatcatgtggtcacgtcaattgtataaatacaattattgacgtaacacaatctctacagttccatcgaaatatctcgaaaatttccagttaattctggtaacgtgaacgtatcttccacctcttcaacctacacagctttctagaaatttggctcgcttttctaagtcctctgtatttttttgcacgtttttcaactaagtttcaatatgaatcatttcttctataaataaatgatattttcatcaggtaatgatacattgtgccgaaataaaacgtcaatactcattagtcaaattaattgttcacataatttaaaactgtgttaatccatccagttattttcttacaacaaaataatcttttccatcaacttttaaaataattaaacgcagtgctaagaaatctaaaatcttgatttagaaatccattatggtttctggtcaactgaaatccataatttcctttaacatccaaaatccaaatttgctactatgataatagatttcagacgattttttttcttttttcaatcatagagtccacacgaatatttgcaagttactatataaaacactataatggtcaacagataaaaaaaaggcgaatgaagatatgttacgtaaaaagaaaatactgtaattataaattattactttaaaaagctttaaaatctggccacatgtttttaaagagtggtgtgacgtaacgactagagtcagcacaatccattattgtatcataaatattctcatctataaattacctaaacccttacaggtagtgtcccaaccaaacaaatcgagaaagacgaacacttacaaaaaaaaatctctttgtgagctttagcgatcgtaacaatggcgaacgaggtgattcttcttgatttctggccgagtatgttcgggatgaggacaaggatcgcattgagggagaaaggtgttgaatttgagtacagagaagaagatctaaggaacaagagtcctttgcttctccagatgaatccgattcacaagaagattcctgttctcatccacaatggtaaaccggttaacgaatctatcatccaggttcagtacattgacgaggtctggtctcacaagaaccctattcttccttctgatccttacctgagagctcaagctaggttctgggctgatttcattgacaagaaggtatcttatttcctttgtgcccttgattgaataatgttgaaattgaacttgggatttcataaaaattgaaactttagttgagtttgctagtgattggctcaaatttagggttttgcttgtagactcgtctttgagcttgtatgggtttgtctgatgttataatattacttgagtttgtagttgttagggttagagatctcacctccaaatttcagatttttcttgtggactcatctctgagctagtcagggtttgtcttcttagatagtttaatgttatgttacttgtgcaatttgaggtttttacatactagtttcgctagtagatatcatctttgagctttgtttgggttcatcttagatagtttgatgatatgtttcttttgcaatttgggggtctctaggactggttttgctttgtagacatcatctttgagctttgtttgggttcgactgagttctgacatagcttggtgttatgttactctgtgcaatgtttcagctgtatgatgctcagaggaaggtgtgggcgacaaagggtgaggaacaagaggcagggaagaaggatttcattgagatactcaagactcttgaatctgagcttggagacaaaccttactttagtggcgatgactttggctatgtagacattgcgttgattggattctacacatggtttccagcatacgagaagtttgctaacttcagtatcgaatctgaggttccgaaactgattgcttgggttaagaagtgtttgcagagggagagcgtggctaagtccttgcctgatcctgagaaggttactgaattcgtctctgagctcaggaagaaatttgtacctgagtaaatatgtttctcttgtcatatggttcggacttaagatgctctctgttttactttcgtgtgttgtctttcttaaataatgcagagcatctgtgaggtggtttgagtgtagagaatgtatgtctttgctgtagcagattcctgtgttttctggatttaatggcttgtcctagtttttatgcattgtaactatgagtttaattaatgatcgttaatctataatgattattaatttgttactttgatatgtaattacgccaatacgactcttctacctgaccaagcttatcacgccaatgttgctgtaaaagacaatagtgcagtttggcgattaaaacctccaacatcgagaatggtaagccggtctggatctaataagcccaaattggcatccataagcccaaattgaaattggcatccataactccatattgtagtcaattggaagttatgtggttgatgtgatcattagtgtcggtatgatcagattagccacgggtttagtgtttcttgccgaatttgaattcggtagatcaaataacattactatgatccgcacagttcatgggatttgaatttgatttacgattacaacaacgatattaacacagaactatcctgtaatttttgggatcgattagtaaattttaaaatattatttcaaaggctttatatatataaagaatttagagtataaacatagataaagcattatgtatttataaatcttatgctgatattgaaaaaataatggtgtatgtgatatatttaatagagtgcaatactctctcaataaattagtatagctgttatcactccttgtgtaaatgcgtatttcttgtacatgcatggtaagtagcttgtcctcgtatgtaccggattgtaatgtttgatatcaaatcaagggaatcacgtggtaaatgtacacccacctaactgagagataataatacaaacaactgtgagtaggtggccacgccaaaagtagagactgatgcagcaactaagcaaagtattacttcactcgatcaactttttattttgttaccttcttataaatcaagtcgatttctatattgtcaagtactaattccattctaatctcttacatatacgtttaaggtttgaatcagagcaaaagataatcacactcttttatattaagtgatgttttcactagttgcacacatatgacaattatttaacaaagttgcaaaatacattttaaatcgttacgggtaaaagcttactgtttaaaagatttatatatggaccataatatgctttgaaaaaagctgatgtgacgtaacgggaatcaaaatcctttccacatcattttcttcccctataaaacaaccgtcactcactccttctctactataacacacactcgcttgttcacgcacaacaaaaagcaagaatatataccactttgtgaacttcagagatcctatagcaatggcgaacctaccgattcttttggattactggccaagtatgttcgggatgagggctagagttgcgttgcgagagaaaggtgttgagtttgaatacagagaggaagatttctcgaacaagagccctttactcctccagagtaatcccattcacaagaaaatcccggttctggtccacaacggtaaaccggtatgtgaatctcttaacgttgtccagtacgtcgacgaggcttggcccgagaagaacccgttcttcccttccgatccttacgggagagctcaggctcgattctgggctgatttcgtggacaagaaggtaactaatcccttttgtgccctagatttcttaacttgagtctgaaacaatgtgatttagggttatctgaaaaaatgagtttggttccttctgacataattcgatgttctgtaatggattcagttcaccgacgcccaattcaaggtatgggggaagaaaggtgaggaacaagaagcaggcaagaaggaatttattgaggcagtgaagattcttgaatctgagctaggagataaaccttactttggtggagatagctttgggtatgtagacatttccttgattacattctcgagttggttccaagcctatgagaagtttggtaactttagcatcgagtcagagagtccgaaactgatcgcttgggcaaagcggtgcatggagaaagagagtgtgtctaagtctctccctgactctgagaagattgttgcatatgctgctgagtataggaagaacaatctctgatttgaataatcttgttgttctcttgttgctaagctgtgttctgtttttgtctttgtttttttttttcccctaataatgcgagagagccttagtgaatgtgtgttgtggtttttatgcatcctaagtatggaatttaaataaaatttgtttcgacttaaagagtccaagtatgaagtcacatccttttcaaaagaacaaacacaagaaaaagttggaattcttttttctttttctacttgtctagtaccgcgtatacgaaaatagtataacacccagcaattaataaagtagatggccacgttacaatcatgcaagtagtggctctgcaaacataagataaaaagaaattgggttctcagccacttttgggaggacatgcagactaaagcactctctaaactccgcttagagggaaaacaaaaagacacctctgatctattatcactattattagggtttttttgtttgtttttcttttctttgcttcttaagagataatacattgatcactaacataaaagctggtcagttcccttactttgaggctttgagtggagactccactacggtgtggctcacaccaacagtttttctctgattatccttttgtcatcaactcaccattcaccgaataatataatttatacgtgtgatctttgtttcgaagatcaatacaattctattgtaaaacatatggtttcggtcattcgattgctagaaaagaactagtcaaagcttcatatcgttattgcattactgtcatcaccattcataagttgtaagaagaatagcaaagaggaaaatttgtatttttcatcaccaaaagaaagatttgcatacctttgatttacactctgcaattgtttaaaaggggactactgatgatatttttaacaagctgaatttagtacaatatagtgatatatacaccattagcagcattataaagctactctcattaaactaagaatgaaggaaataataaacttaccaaaatttaaaattggtttaatatggttggccaaaaggttcagatgctctgtttcgagtaaaaatcaccgccaaagtaataaaacatccctttcactatcctgcttgtaattttttctctcggcagaagatgacatcattcatcaataacatattttataaccttgatttatcagactgctattttctcaaaaggtacttatcaaactactatggtaaaatatttatggtttctataaccaccactagcattattaaactactagtctacgagatatcataacgttaccataaaactaatgaaagaaatgataaaaattccacactttgatatttttttaaaaggtttaatatgattgaccaaaacgtttaataatttcgaatggacatgttacccttattaacagcctaacgatgctacacattttaataagatacgactcaatagaaaaagcttcacggatcgaaaccatggcagccgaagtgatccttctcggtttctggccgagcatgttcggaatgaggacgatgatcgcgttagaggagaaaggagtgaagtatgagtatagagaagaggatgtgatcaataacaagagtcccttgctactagagatgaatccgattcacaagacaatcccggttctcatccacaatggtaaaccggttcttgaatcccttatccaaatccaatatatagacgaggtttggtctgacaacaactcatttctcccttctgatccttaccatagagctcaagctttattttgggccgatttcatcgacaagaaggtaaacaacaagtgtcattaaatttcactgtccttgactgtaatttgtttttgagatccttaacaatatatggagtttgtgggagtttaagttacaaggagtttcaactacaaacctaacagtattagacgagttaaagaaaagatattggaattgaaagatttcagatgatagaactttagggttttgcttgtaactcatttgtgcgtatgttccctgtgccacaaggaacagttgtatgtttgtgggaggaagacttgggcaacgaaaggtgaggagctagaagcagccaataaagagtttattgaaatactcaagactcttcaatgtgagctcggagaaaaaccttactttggcggcgataaattcgggtttgtagacattgtcctgattggattctatagttggtttccagcataccagaagtttggtaacttcagcatcgaaccagagtgtttgaagctgattgcttggggaaaaagatgtatgcaaagagagagtgtggctaaagctttgcctgattctgagaaagttgttggatacgttttacagcttaagaagttatatggaattgagtaaggatctctctaaattgccgtttcctgttctgtttagctatttgttgtgttgtgatgtgtgtttctgataatgaaatgaagtctttgttcgaaattcggatgctttgttttgttgaaattcgatgtttggtctgaattcaatgcatatagatgtaaattttgtatcatcagtttttcttagatcttcatcgttgctaaccactacatcgacgtataaataacactttatcatgatttcccttgttgattgtcttgcatgatttcccttgttgatttatctctttggatttagatcatttcaaaagatacaactgtgtttgtttcgtatttctagcaaataacatctgacttttgagattgattaccaaattgtaaattagtaatattaacgacgattgcaattgcactaaaatttaacaatcacttagattatttgaacaaagtattttataaaatgaaaacattagttaacataaaaaacatattcataatcgaaatataattaaaaatatatgatccaaagataattaaaaaattagtttacataataaatatatttgtaacaaaaaccctttaaaaaaagtatttaagagttaaatttacttgcgtgaaaagcggttgaactaataacacctcttacagacccgtaggttgggacaggatgcttagtccgtccgctttgttttcaatgcattgaaattcaacacttagattttttgaaaaccaaaatattttataagaaaaactttagttaaaaaataagtttacataataaaataatttatacaaaaaaccataaaaaattaatctaaggatttaaatttacttgcatgaaaaacggttgaactaataacacctcttacggacccgtaggatgggacgggatgtttagcccagtttgtttcaatgcattgaaattcaacacttagattttttgaaaaccaaaatattttataagaaaaactttagttaaaaaataagtttacataataaaaatatttgtacaaaaaaccataaaaaattaatctaaggatttaagtttacttgcatgaaaaacggttgaactaataacacctcttacggacccgtaggatgggacgggatgcttagcccagtttgttttcaatgcattgaaattcaacacttagattttttgaaaaccaaaatattttatataaaaaaaactttaattaaaaaataagtttacataacaaaaatatttgtaataaaaacaataaaaaaaacatttaagagtttaatttacttgcgtgaaaagcggtttaactaaataacaccttttacggacccgtaggatgggacgggatgtttagtccgttttgttttcaatgcattgaaattcaacacttaaattttttaaaaattaaaaatattttacataataaaaactttagttaaaactaaaaaaatcataatcaaaaatataataaaataagtttacataataaaaatatttgtaacaaaaaccgcaaaaattaatctaaatattaaatttacttacgtgaaaggcggttggactaataacaccgcttacggacccataggatgggacgggatgctcaatccggttgttttcaatgcattgaaatttaacacttagatttttaaaaaccaaaatattttttataataaaatatccaattaaaataaaataaaaacttttgctaacaaaaaaagagaaaaacgaaaaaaattgaggtaaaaagttttaaaaatcaagaggctaaatcccttaattccaaaattctaaatccctaaattccaaacaagagtctaaatacctaaattccaaaagtccaaatccctaaattttaaaattccaaatccctaaattccaaacaagaggctaaattttttaaattccaaattgatgaacaataacataacattcgcctaaaagacatacagtgaacgaaacagtagacaagtatgttatgaatttgtttcggatagaaagttataccaatttatgatcgagattgtagcgttcgcgtgttagcaaacagtcaaagaaccctatacctgaagaacaaaagaagatgctaagtcccagcgaatcaaaatcaaatctcaaaatcaatttaaagtaacaaaaatctcttaccatagaataaaattaaaggatcctggagagtcttcgtccttacttgcttggacccgagaagagtcactacatgcgagttctgtgacacgcaaaaaaacagaaaaacagagtcacagaacaatgaaaagagaatcgatgaaccctagaagaagaccctaacatatacaattataaatcatcgatgacagaatgaaacagaaataaataataattgaaagagagagaaggactataactaagtaacctgatcgcagatagatggctctctcaggttgagattggtgatcctttagtcgatcggaatcacaagtgagatgagagaatgaagacgacgaacaacaagtgtatgctagacaatcttaatctgggggagaaactcttgtctccgtataaataacaggagcgttgaagaagaaaaggaaatcactaacggctagttatgaaaaaaatggaaattaagtaggggaaaaatgttatttaatacctcaacttacaaaaaatggccaaattaaccgtgaactcgtgaaatgaccgttttaactctcaacaaaaagttgacttctgttttaacttttaagtttgcgttgactcggcctaataaaccaccgttaaaaattcttctaacagcgtaattaacagccgttacagaacatccgttaaggtgatacgacgacgttttgtgctatcaacagacctcaaagtcgacgaaacctctgaaaaacccccaaatcaaaacccaaaccctaaaaattattctctctcaaatttttcgatcaaatctgcattatgagctgcaactcaaggaattcgagtggtgaaagtggaggctgcaattcaggaatgatttcaaatgttgaagctggaggtttcaagagtcgtgggtttcctgttaagtgtaaatgtgggctcgaagtcgtcatgtttacatcgagcacgactaagaaccctggaaggcctttctttcggtgcaaaagctgtaaagatgtaagtagatttgatatgagaatgtgatgttttttgtgtttggtcagtaaaagcttgagatggaattgcaggatcatttgttcaaatgggtggaggagtgtatgtatgaagaggttgtagatgctctacccaaaatctccagcattgataacgagataatcaatgcaaaagctgaggttgcagttgaaattgcaaacttaaaggagctaatgatagagttgaaagaagatggaatgtggagcaaaagagaaattcagagatggaaaaagatgacgaaagtgtgcttggtgtgcctttgttttagtgtgattgcaattgtaatatcaatgttctataagaaaaaaaaccaaaaatttgttcttggttattagtgtgtaatcgaatgggagcttagtttgaatgtgatgtctttgttgtttagtttgtgtttggttatgcttttactatgtaatgacatgtagctttggtaatggtaatgaatttcatttgaaagaaaaggtcaacttcttaaaactgagactaagctaatcatatagagagacaagtgcaaacaacaataagaaaccaagacttagattatgtcataaagacaagttcaaacaacaaaaacaaaccgagaatgtcataaagaaagaaagacatatgtcataaagacaagttcaaacaacaaaaacaaacatgagactagcatatcatgttccacgagaacattcaaaccatggtgcaagtccagcaagtccttgcggttgtgcttctccttgtggttgttcagacacttgtgatgttccacgacctcttcccctctgtctttgtgctccacgagttgttcccctttgtctttgtgttccacgacctcttcctctttggctttgtgtttgtgatacattgttctgcccttgtgagccattgttctgcccttgtgatccattgttctgcccttgtgagccattatcctgcccttgtgacacattattctgtccttgtaacatattttcctgcccttgtaacacattaccctgcccttgtgagccattatcatgtccatctgatccttctacatgcccttgtggttcctaatacaaacattacaatcagtttttgaaacagaatttttgaaaatagaaatgaaagatatacaaacctcatttatccttggtcgacctcttggtctctttggtggacttaaaacagtagcatttttgcatgatttcttgttgtgcccttcttgcaagcagttagagcatgtcatgatcctcttttcccttgacattttgttcggatttgaggaagaggcaacttcatttcttcctttccttcttgcataattgcttggccttccggtattgcctcttctccatggtggtggcaagacaggcagcctattcaatcgaccacacaaaggcatcccttggacaggcctaataccacggaaatatgtttctcgccacctatttcttgtgtagtagtcgttcacatagctttcaaccttctttttttccctattatcacacatgttgcatgaacacatgggatcccaaccatttgccatttcctgcagccgcatgtctttaagtccatatcaacaaagtagccaactccattgacatagatttcatgcaaattatccctggacatgtatctctgtgtattctggaccccagcaatcatcttctcaatctcagcatgagctcttggtgtgaactttgttttgcacctgtcagcaatgataaaccttttagctgtcctaaccatgcattgcctcctaatatcctctagaagatctaatagtggtttccgcctagcttgtctaatggttctattgaatgactcactcagattgttgagattgtcgttgcaacatgtaccggttctaaagaatgctctaaaccatgtaatcggactagtaagttggagagacgtgtaggcttggatattgtacctttttaagtctgcatggtaattattgaactcttatacggtgtagctgcgtgctatcttccaaaatagacgttgtagctcaatgtcgtggttgtcccttttccaattatccatgatgtgttttgaacattgtcgatgctcagcttgcggaagaatggtatggatagccttgactaaaccctgcaaaacaacaaaaaaaacacaagtttagtatgattgtctatctcaaattacagtagatatatgaagggaatcttatagaatagagactaacagattgtttatctgaaatgattgctagatcagtcatttcgcatagccccaagcttgtagagagctatctcaagaaccagtcccaattgtcatcattttctatctcgactacagaccaagcaatacggacaattcgattgtcaccatctcttccaactgtggctaatagatgtccttttatgtcccatttcagaaaagctccatctatccctattacaggtctgcaagtttgtttccatgactccctttgagcttgaaaacaaatatataaccggtaaaatctctgcttgcttccaatcactgctcctgcaactgtctctatgttgaactctgtccccggattccgcaataacacctctgcttgataatcccatatcctagcaaaatgagaatcatgactagcacgtctagctctcaaaacttttgtctttgccttagcacattggtctggagtcacttccaacttgtattctcttaagatctcagcaaccatctcatgtttagtgagttttggattcactctcaacctttcttcaaacaaaaacccaatagatgacacctttaacatcttcgaatgtcctgacctcacacaagtatgctcattgtaataagttcgtatttgcatcttatgttttctcttctcataagagcaacggactctgcacggacattcaacaccctcatcactaacatacacacacttagcagcaacaaccatagcttcagaattataaagtttaatgtcataccttgtctttagggaatacatcaaaagagcaagcttgaaatcttcaggagagttataagtcttctccaatgctagtaaaatctcaggatcaccaagatcatttcgagctgcctctactctatcatcatcttcatcatcagaggacaaaggatctggaatcttgtcttcatcccatatatcatctaccctgtcattgtcactagcttcttcttctccattagcctctggaaaatctctttccatgtctaagttaccatcttcttcgacacctaatccagcagtatcatcttcttctctattagtatctactgcatcatcaacctcatcgcagtcttcatctccttggactgcacagtcatcgtcttcatcaagagcaggaacttcagcctctaaatcctcctcttcttcatctctgattctccttcgtttacttcgtctaagtggagcacgaacttcgactgcatctgtcacatcaacgcctgattcttgagcttcatcgtgagcttcctcttctccgccacaagacgtttcacctaaagcttcctcttcctcttgtccaatttcacgacgagttgattcttcaactgcaacatcagcttcctcttccaatctattttgccttcgtttacttcgcctaagtggagaacaaactgcggttgcatctgccacatcaacggactgacctcgagcttcttctccaatttgatttgcttctccttccggcattggttcaactgcatcgtgagcttcttcttccaatctgatttgccttcgtttacttcgcctaagtggagaacgaacttcggccacatttgccacatcaacatttgatactacattcgcttgacctcgagctttttctccaattcgatctgcttctctttccggcgttggtttagctgcatcttgtgctccgtcttctccgccacaagactcagataccacattcgtttcacccccaacttcttctccaatttcatctctttctcctcgcggtggtgcttcaactccatctcccaccaaattctctgattcgtgaagcattggagatccaatcctcataacgacgccattctttctaactaatggcatttcagaaaacgaattgaagcaattagggtttcgattttgattttgggggcaggattaggtttcgatttgggtttagggtaattgattttgttttgagaatttctattctcgattttgatttctctttagcacgaaaacgaggtcgtaagactataataacagatgcttaacggattaaaacggctgtcaattacgctgttagaaggagttttaacggtggttaattagaccgagtcaacgcaaacttgaaagtttaaaacagaagtcaactttttgttgagagttaaaacggccatttctcgagttcacggttactttggccattttttgtaaattgaagtattaaataacattttttctaattaaacttaataaactacttaagaaaaatgggaaaataataattggaaccgactttaatttcacaatgactcttttgcccttccatcgttgacgacattgtttctccttctctcttccacccatttaaaaacgcaaacttggaaaatggagaactgtttaactacgccaacgggctgttttaatgacaaatgttagactgggctcagtaacggatgttgtttcttgtcactaaagaatacgattcatagatttaaaagtaatccatttactttgcttttactttttcatgtgaagagaaacaaaaaaaagttttgttggtgatcaagtttgtagtgtactagtaaaatagtaccatagtatgtgtgtgtgtgatgtggaaacaaaagaatatatagaaaattttatgttttgggtttcatgtattttcttttaacataaaaacaagaacagataagcataatgacgtaagcagtggcctaagcatctcttaaaactccatttaaaaaaacatatcgaattgaataacattgagttgacttgtttaacattcacaccttgcttgctacggtatcttagcttccaagattcaattaatttttcattttttatgttcacagtcaatagtaataagacatcagcatcgcatacaaatttcttatataactcgactagtttactctataaagaatcagcgattggagtatagaaaaggtttaagcaaaatccatcaaagaagagttccttttcacaataatggcggatgaagtgatacttttggatttttggccgagtccattcggagtaagagcgagaatcgcgctgagagagaaaggagttgagtttgagtacagagaagagaatctgagagacaagagccctttgcttctccagatgaatccggttcacaagaagattccggttctcatccacaatggtaaaccggtttgtgaatccatgaacgttgttcagtacatcgacgaggtttggtccgacaaaaacccaatccttccttctgatccttaccagagagctcaagccagattttgggttgatttcgtggacaccaaggtacccaatccaaaatctctgtttaggtttttttttttttttttgtagactgataattgaaaatatttttgggcttgatctgtgaaatggtgcagctgtttgagccagcggataagatttggcaaacgaaaggagaggaacaagagacagccaagaaagagtatatagaagcactcaagattcttgaaactgagcttggagacaaaccttactttggtggagataccttcgggttcgtagacattgccatgactggatattacagctggttcgaagcatcagagaaactagctaacttcagcatcgaaccagagtgtcccacactgatggcttcggctaagaggtgtttgcagagagaaagcgtggttcagtcccttcatgattctgagaaaatccttgcgtttgcctataagattaggaagatatactgtgtctaaaagtcttattgattctttgaacgaaaaaaaaagtcttagaatttcatctcacgttacgtttctatgttcactgatttctatatgattttgttgtacctttctttctattttcaccaaataatatttgtttcttgtcactcaagaatatttgttcacaagctaaatgtttttaatcgctaacgactaatgctagatccaaaatttagttaatttcatatccaatcaattaaaaaatttaaaaaacaaacataagaaaaagaaattttttaaagaaatccaaaaaagaaacaaaatcaaaattttaaaaactatttttaaaaatcggaataaaaaacttgaatccgagtccttgggctcttgaactgaattcaactacagtggaatggatggtacctacataataataggaaaaacaagttgaatgtttggaatcgctaacgactaatgctggatccaaaatccggttagatttcataccattatgtaaatttagtattcaaaaaaaaaacataagaaaaagcttttaaaaatccgaaaaggaaaataatcaaagttttaaaaactatttttgaaaatcctaattaaaaacttgaatgctaaatctacataatagtagaaaaaacaagttgaatatttggaatcgctaacgactaatgctggatccaaaatccggttagatttcataccattatgtaaatttagtaaccaaaaaaataaaaataaaaatcaaaaatatatattttaaaagctattaaaaatttaagaagggatagaaattgacctgtttcttaatgggtaggtgaatgggctttttgttgggctgaatatgagaatccaatccaatctcctccaccaccgtgtctgtcaccgaatgcttccgttgatccatatctcctgaacaagagcattgaagatccgacgccctttgatgtcaaacaaaacctccgacgacgaaggagagtgagagaagatatcgacagacgaagggaggataagaatcagaagcttcttcttcatccacagcgccacgaaattcgaagatgaaatagaagcaggaatcagaagcttcttcttcttccacagcgatcgtgacctctctcgatatggcgttcggcgatgtatatggatcatcaatttcacggtcacgagagatcagcgtttctctttgtaaaccagtcgaatttttatttagaagagagatcagcgattcgatttgtaaaaccgtcggagaggaaagggaagaattttttagggtttagaagaaggaattatgatttctgaaggaaggaaacaagagacttataggaaacaaaaaaaaagaagggaattgatcacgattacgcttcgtttacaacggtcttatttttctaactgcaattacggtcacgtgttgaaattttattaaggtttcaggtggtttagattaaaaatttaaatcatagcaaaacctctgtcacagaggctctgtgtcaacaaataagaaagtcaacggaggatcagtaacaagatcagaagcaatctctgtttcaacaaataagaaacctcacgcataaagagacaaatatgaccgttgttagcaaatttccttttcctcttaacctaaaaggaaacagcctttgcttataataaatagtcatatcatcttcttccttgtcaaatcaaaattctccataacgaaaacaaaagaaaccttctttcatctttttcttttttctcttcatagatgaaatccgaagcaattctctggagaattcgtttccgatcaccgtggtggaggagtgcttcgccgagacattagggtttgttctggaaactcaactcttggatatattttatggcgttatgatgcatgacaaaggtattcagagttctattcacctatgatctccaggtaaaacattccatctgatactgtaaaaagacatgatctttgttcttttcttatgtatctcaatgatcctgcttgtctgtcgtatagttctgctattttacatctcaaggtaattctttacttgaatttttagagacagaacatcatgaagaaacattgattgttctacagggttatcatgcgttgcaaggacatagggttgctcataagctgtggaatgaagggccgaaactattagctcttgcattgcaaagccgaataagcgaggtagttttggcgatcattcattgtcatttttcagctcaatgtctgatcttgctgtggttttcctcagtttttggaatcgacatatatccaggtagagtatgagctctcatctgtttgaacattctcagtttcccttctctggtgtaatagttgatcaggtttaccggtgaatagattgctgcttatacatattgcttgaattctctttctgcatagcggcaagaattggggagggaatattgttggatcatggaactggaatggtcattggtgagacctctgtgataggcaacagtgtctcgatattacatgtaagcgtctcttctccaaaccatttcctggaaattcaatacagagaccatatgattatttttcagtttttcaaagctatttgagttttcactgtcacagggtgtaacgttaggaggaaccggaaacgaaactggtgatcgtcaaccaaaaataggtgaaggtgcattgcttggagcttgtttgactatacttggcaacataagcattggtgctcattaccggactaagggtgcaattctcttcaaagcccaacaatatcaaaacaggtcaattctcagccttttaatattttcatttttaattcaagtaaaaacaaatagggtttttattcacggatttgttaaaaactattacaacttttttactcgagtttttgtttcaattttgaaattatatattttaatatttaaaaaaaaaatttcaattttttaaaaaatattttagatatactatttttttaagtgttgaatcttttaattttgtgtgaactagttggatacaacatccaaacccctaataggtgttctaggttcaacatggtttatacataatataaattttaacacttgatatttttactaactttttttttaattctatagttttatactactattaaataatattttggataaattatatttttaagtgttaaatgtttaatttttgtgtgaactagttggatacaacatccaaagccctaagcggtgttctaggttcaatatggaggtttacacataatataaattcttaacacttggttttttatattaaaaatatttttatatttatatttttatattacaatttttaaaaatatatttaaaagaataatatctgggaaaaactattttgttttaagtgttacgtttttaatttttgtgtgaactagttggatacaacatccaaaccattaagcggtgttctaggttcaacatggaggtttacacataatataaattcttaacacttggttttttatattaaaaatatttttaaatttatatttttatataacaatttaaaaaaaatatttaaaaaaataatatctgggaaaaactatttttgttttaagtgttaaattttttatttttatgtgaactagttggatagaacatctaaacccctaagagctgttttaggttcaacatggtttatacataatataaatttttaacacttgtttttttaattaaaaactgtttttaaatttatatttttatattgctatttaaactttaaggtttttgtatttttcaaataatattttggataaactattttatattttgaaaataatattttgaataaactgttattttttaagtgttaagtttttaatttttgtgtgaactaattggatataacatccaaatccgtaagcggtattctaggttcaacataatttacgcatgatttaattttttacacttggtttttttattaaaaatgttttaaaatttatattttatattgctatttaaactttaaagtttttgtattttttaaagaatattttggataaaatttatttttgaagtgtttcaattttatattttgtgtaaactacttgaatacaacattcaaactcctaagctgtgttctaagtttaacatagtttacaaataatataatttttaacacttatttttttactcaaaaaaaatatattttttttaaaaaatagtattttggatttaaaaaatataatttactacatctcacgtttctatgttcatttatttcgatatgaaatttcttggttgtaccttttttctattttcaccaaataatatttgtttcttgtcactcaagaatattgttcctctctctttaagacttacaatgttgtatctaggctcatagaggcacaagtcaattttaaaaaaagtctggtgcttgttagaaaactgaaaaagtcataatattgtctccaaacgtataaagtattcatattatgcatttctcaaacaaaaatcccaaacacattatatcaattcaatcataagcctaaatttgatcaaaatttttgtccaataattgttcgttttattgtggctataggcaatttgcctttttccaaagcatgtccacttattctaatcttttgtaaaaaaagataatgaaaatggagaattagattcgaaactcttctttattttggctctatatagtgagtagttaccactctctcttctttcacaccgacagctaaaaatggaggaagagattatcctattggattattgggcgagtatgtacgggatgaggacaaggattgctttggaggagaaaaaagtgaaatatgagtatagagaagaagatctgagtaacaaaagccctttacttcttcagatgaaccctattcacaagaagattccggttttaattcatgaaggtaaaccgatctgcgaatcgataatccaagttcagtatatcgacgagctttggcctgacacaaacccgattcttccttcagatccttaccagagagctcaagctagattttgggcagattacatcgacaagaaggttacattttttcttttacgttattgagttctttgcactatataattccctaactatataagcaaaaaacgaatgatgtattgctaattgttttttttggacaaactgtgatcagacatacgtgccatgcaaggcattatggtcagaatcaggggagaaacaagaggcagcgaagatagagtttatagaagtactcaagacacttgattcagagcttggagacaaatattattttggaggaaacgaatttggactcgttgacattgcctttatcggattctatagttggtttcgtacgtacgaggaggtagcgaatctcagcatcgtgttagagtttcctaagctaatggcgtgggcacagaggtgtttgaagagagagagtgtggctaaggccttgcctgactctgataaggttcttaagtcagtctctgatcatcggaagattattttaggaatcgattaagttcacttacccctgttctgtttttcatgttttttctcattttaaaatgtggcgtgtatttcaagtttgtcaataagtatggtatagaccaaggtatgtttgtggtgggatttgagtgaagctatgatctatttttatttggaatccaacttagcaagcatcgaatttgatcaacagagcctattgtttgagttgaaaccaaaccaatcaaaaacaaaaattcaaaccactcttcgtcggaaaaaagaatgacgaattttatttttatttttttgtcgccaacgttaaatgtcgttgaaagcaaaatttgaaaacaaatgtcaaatagagagtaccaaaacaaaacaagagccacgcaacaagagagtacgtttacatggggacttgtactatgattctttaattatactaatgagccccacattatgtgttacctttatccaataacctttttttttttttggttctacagagtacaagctatccaggttgaaaaataatgcacagaagcattttttttttctttttcaaaagcataaattttcatcacagagaacaaccaaaacgttaaatttcttcattgtaggacgcaaacaataaattagaatccattagcaggaaaaacggatttaacaaaaccaaatggactgtagaaattgtttttgataagaatcaaatggatagtaaaattgcaatgtatggatcaaataatttattacccgttttacctttagaataaatatcgtaagcatatataagacttttttgccgtcaattgttgggtaaaatgaaacaaccaaactttatcttttgtttaaatccataaattctacaaaacctgacaagtttattccaaagtaaggtgtaaccgaaacttataaaagaaaatgatcgacgtgattgatacatataaagatattataatctatgtatcattctttctatcattgaatcttgtaaaactcatggaataataaattatacatttctaataaaacaaaactgcaaaagatgaatatgcatggagttgtatcaaatcctcggaaatataacaactccgcatagtaattactcgaataggtattggtcacagaaacttagaaaattcactgttacgaaataacgttcccaattaaaatacgtttaaaccaatttattgaatgatacgtttcagtgtaataagcttattactaaaggcttttaccaatgcaagaatatttcaaacattattccctttattttattgtaacaaaagagaatatttcaaacattcctattctcaaaaattggacatttggccaaccatcttcacatcatgctaatcagatatagagaccagattcatctcaattactacatgattaatcacttctacaaatcagacattaacagtgtaactaatactccattttgaaggaaacaaaaaaaaagggtcgaaagtccatgtgatagctgtctgtctcgtgctaatctcacagccgttggataagtcgtttgctgacttgaatcggagatttcggtggagtacgaagtacaggataactacccattagtttaaaagactgtacgaatgtcgttttcggtaatacttttggggcttttgaccaaaatgggcgttgaataacccgacccgttaacccaacttatttgtattgttttatatattatttcattgttgagcttattatttgtaattttgtatagcattaaacagaatttttttaatgtggtagttgtttttcatgagataacagaaattttcagatttttgtaatctatattattggcttgatttagcaattttggtttgaattgacacaccatatacttaaatgcatgatttactagataaactgaaaattaagtcattctgacaaaaaagtttatacgaacaatatcatttgtgaagcatggttttgttttagcgagctatttatcagaatttttaatatttgtatcatcattcccaatttcccatagatgaaatcatgaaaatacattttactaattctgtttttttttatataattaaaatcattatgaacaataaacactatcagaatctcaatatattctcctctcaaaacttcagtttttttttccatttgctttagttagaaacaaaaataaagaaacaaatcttaaaaagaagagatgatatatttccatgtatatacaactacaagtatagcataaattacaactcacaacatctaaatttctttcttaaaaaacagttacaacgaaactaaatgcagtaaccaattaagggattaaacaatatacaaattggtcaggaatagaatatataaaggtacatgttcatacatataaacacgcattaattatttaattaatcagagcattatatggaagagaatccatagataaacatacagacaaattatttccttttcatcttattctagaaaaatccaattaaagctacttattatagtcgtatagcctatagtttatataaaaccaaaattgtttttaacttataaaatatctttaaaataaaataaaaagagaaaaaaaaagccattttcattttttcatcatcttcgtcttctccattatctctctacccaaatctggcagagaaaaacaaaagaagaagaagaagaaaaactttcgatatggataagagctgtaactcctccggcgattcctccgccgtatccgcctctgcaacgagtagtaccggtaacaatacaacgaacagagatcattacctgagacaactcaataagctgtctcataagatatcaaaaccgacgaactcttcctcctccgtctccgtcgcgaatcgtgaaattgatcttccacctcctccaccgctgcaaatcaatcaagggaatctccatcaacatcaacctcctgtttacaatatcaacaagaacgatttcagagatgttgttcagaaactaaccggttcacctgcacatgaacggatctctgctccgccgcaacaaccgattcatcaccctaaacctcaacagagttcgcgtctacataggatccgtcctcctcctttggttcacgttatcaatcgtcctcctggtttgctaaatgacgcacttatccctcaaggttctcatcacatgaatcaaaactggactggcgttggatttaaccttcgaccaacggcgccgctttctcctctcccgccgttaccaccggttcacgcggcggcggaatcaccggtctcttcgtacatgcggtatctccagaactcgatgttcgcaatcgattcgaatcggaaagagttctctggattatctccgttagctcctttggtctcacctcgttggtaccaacaacaggaaaacgctccaccatcgcagcataacagttttccaccaccacatcctcctcctccttcctctgctgtttcgcagacggtgccgacatcgattccggcgcctccactgtttggatgttcaagttcgcctaaatctccgtacggattactctcaccgagcatacttttatcgccatcgtcaggtcaattagggttccctgtatctccgacgacggtgccgcttcctagccctaaatacaaaggtcattgatcagaaaatcggaaacccttgtcggtcaaagtgagaaaacgtcgtcgttttgaccgtcgcgacaaaattccctttgttctttttgtacatcattagtggagagtggtgggatcatttgtttttttttttgttaattaactcaaagattacttaaatccgtttttttttttactttcttttgttttcatggtttgttcatgttagaaacaaagaagactaggaaaaagaaaggaatacacttttgcaactctattcaatttttataagtttgccattatgatttcatctctttgtaaatcagattgcatacaagagttttttcttcatcgtctattcgatggggtattaaatttttgattggttgattagctataccaaacacttcactgttcctttggttgaattttatgctctgatgctttcattttaagttgaaacttcaaactctgacgagatcattaatttaaacctgtaaagtgtcaaatgactaacgagtgtctattgcttaaatagttcttttgaaatgtatttttatttttatataatcaaattgatgattgatttcagaccaggtaaagtaattggctttacgcagtccaataaactagtccgcttttaaaattaaaaattgataaacaatcaatctacgcaacaagataagagacaagagactttatgatcttcaaattgatgagaaaagaaagcaagtttcgattacacagacattgaaatcgataacaacaaagaaataagaaaagagaaaataaattaaaaagagataaaaagatgattgatggttcagacttgccacaaatatgatgaatgaataagcttttgaagatgagcgaaatggcaagagcgacctcttagatggattaagaaaaacatatggacgagaaagagaagaaattccaaaccctagaagaaaactagcagtttcactcaaaagatcactgctgttcctcggtcggttttggcgctgctgcttccttgatctcatccgcagcatcatcctaatataatccccaccgttacagaatttagtcaatggaatgcgaatcatccataacagaaacaaagaaagaacaaaggtgcggggattatatgaacaaacctgcatatcagatgtccagagagtgagattgtcacgaagaagctgcatgatcaaggtactgtctttgtatgactcttcaccaagagtgtccaactctgcaatcgcctcatcaaaggccttgacgatacataacaacaacaaaaccagtcaaatttatgtccaatgaggtcaagtgttaaaccaagtccaatcacattatcataattgaaagatgagtagattgaaatacctgtttggcgaggttacaggcacgatcaggagaattgaggatctcgtaatagaacacagagaagttcaatgcaagaccaagacgaattgggtgtgttggagcaagctctgcattagcaatatcctgcacagataattacacatagagactataagctcaaaacctagacaatctcaagatcttattcgagaatacacaaatccctaatttaagtctcattatactggaaatctaacaaaccaccatccacggatcacacactagactcaaataaactagatctgagattcggaatcaaacctgagcagatttgtaagcggcgagtgtatgttcggcggcgtctttcctctcttgaccagtcttaaactcagccaagtacctgtgataatctcccttcatcttaaggtaaaagaccttggaatcaccagaagcagcggcagggatgagtctagagtcaagcaacttaaggattccgtcgcagattccggagagttccgtctcgatcttagacctatattcacggatcgccgtgacgtggtcatcgttaccacggctctcttccttctgctcgatcgatgaaatgatacgccacgaggcacggcgagcaccaatcacattcttataagcgacggagagaagatttcgctcttctacggtgagttcatcgccatcaacggcggcggagactttctccataaactctaccatctcttcgtacctctccgcttgctccgcgagcttagccatgtatacgaactcttcacgcccagacgccattgttgtttctagagagaatcgatctaaggaagaagaatcaaagagggaaagatctgagatctgatcaaaaagagagaaacggtttcgattagagaatcgggtgttgtaggtcaagcgagagaggacgatgaatgagtttttgtgtttaatgagggaaagtgataaatgcgttttagaggaaaagagtgaaatttggaaccaagatctaatctgggccgttggatttgtggccggtcctgctttttaaagggggattttttttcacctcaaattaagaacaacataaatacacttttagaaaaattggtaatgtgattattggataaaatttggtcaattaacaaaataattggtaatgtgattttgctactattagtataggcaccttaaggaattataaaattttgggtctagtggttaaaataggggctagttttttgtagatttgttaatatagttatttactaattgtgaaaagaaattggagttgtgagattgatacaataatggaagcaagttgggttaacaaaaatggagacagctcagagggacacatgtgtgttgtgagcatgtcaggggatccaatggaccctttcttctccaactcagctttcacatttttgtgattgctcaaacggttttttttttcttctttcaaaatttaaatacttcggaggttgtctattcttcaaatcttcaaacattcaactaagtacgtaggcgattcttacgagctttttaaaatcattatgttcttaattatgtggttgtatttgtactgaagtaatttattaaaatactacaatatttgtttttcctttttccgttttgcttaatccaatgcttatccagttatcctaatccatgattatgttttttcctatcttactcctttttgttaatttgttttatttgcattagttttcttgatgattatgttttacattcaatgaaataataagattactctatacttttctagcataaatattaactatacaataacatgtattcattgaacgtatagtcatgatatatctaaagatcatacgttagaaaaaaccgtcatataaaaaaggcgaaaattcggatatgttcgaaaaagatttgtggttaatctagctatatagcgtacgcaagtagatcaaaagtttttgataagtattgagataactcctaattataattagtcatttagataatgatgatccttatctaattagctttcttatctctatgactatttatatacgattctctacttgtatagagaccaatcttcatgaaagtgttaatacaccagatgatttgctccgacgtgttgggtgtgggggagatagggacgagagcatgaatcgatgcgaaacgtaaggtttgaaccatatcgaagtgttcattccctaattgccatcccccttaaattttgggacattcaagaaatattaacagagataacattatctgagttcataacatggatttacgagtggtcgggtttgatcatacctagcagagatatggacgattgacaattgtgtgtttttgacggatgagacgtgacattaataacttatacgatgacacttatattaatgcatgttggtgcatgctcaagtcaacataaaataagaggtttggaagcccaacaattgagcatatgtgggatatctccgaggctcccctgccaataattttaattatcttcccttctttttcattcttaacttaaaaaaacttccgtctcgatgtgatctatgactatgatgagtctatcttgtaaatcatatgattcatattgataacttacggtataagttatgataataacaacaaacgcattatcttatttgtcgtcgactgtcgacaacaaaagatcttacaattttattataagtttctgacaattaactttaggataatattttatttatttttgttgaagtctttaggattatacataaaatacttctcaaataccaacgatcaagttactttaaacttcttccaacgaaacaatcattagttcattctcttatggaagccaatcaaatccctctaaagaataaaaccatgaactttgttactactaaaatgttttctgtacttagtttcgtttagtccttaagttgataaattttttttaccaatctttactatttggagtaatgcgattaaataaggtcgaatttcgatagatgaaccgttaacgatttgacgaagacacttttcctcagtgttatcttcgttcgttgacattagacaataatccagttttatcctattatttcagaagataacgaaaatatttcctttgtcactaagattccgaattctttaaatttaccataagtattaaaaacaatttatacgaggtcgaaatcaaccacatatgtagtagaagaaaccccacaacacgacattcgttaaatgtctctcatacttttccctttatataattgttttgcaataagtttttgatgtaatatgtttaaaaattcccaccacatatcaaatactgcagcgatagctcctctcacaaacacacaaacagagtcaaaagcagtgactctgttccaaaagcaaagcagcttcccaagaagatcaaatccgaaaatgtgcgatccaccttaatccctttttattattattattattgttattacatcacttcctataattccggtaaaagttttatttcccataaacttccaaaaatagttggttcctttttattgaagttatctcttcaaataattttattggttcttctgtcttatgaacaagaacagaggagctctgtcttgtttcctcttatttacgtactaccaatcctcatacacacacatgtgtctttggtttcatctccgaaaagtgataatctgttttatttgatttgacttttgagagaacagagcatatataaagaaacagagcagctctgttttttttttttgtgttgcagtttgtagaatcatggagaggtacgaaatagtgaaggatattgggtctggtaacttcggagtagcaaagcttgttcgtgacaaattttccaaagagcttttcgctgttaagttcatcgagcgaggccaaaaggtctctaactctcttgcacctaattcaagaaatttttgtttctatcacttttgtctgattttgtttatttgttgatgtttatgaagattgatgaacatgtacaaagagaaatcatgaaccataggtcgctgatccatcccaatataataagattcaaggaggtataatacaacaatgtcttctcttttgatgttactttatctatcaaattgataattgtgtgaaaacataggttttattgacggcaacacatttggcgttagtaatggaatacgccgccggaggagaactgttcggaagaatctgcagcgccggaagattcagtgaagacgaggtttaattttatcaattctgtcattattatctaaataaacatttgttttaaaaagagaaagaacctaaaagtcttgtaagaaacatttttcaggcaaggtttttctttcagcagcttatatcaggagttaattactgtcacagtcttgtaagaaacataacattctaacttaatcaaaaacgttttttttttcttttcttgtaaacaaaagaattaagagtgtttgtttttttttatgttggaaaatgaagcaaatatgccatagagatttaaagctagagaacacgttacttgatggaagcgaagcgccacgtgtaaagatttgcgactttggatattcaaaatcaggagttcttcattcgcaaccaaagacaacagtaggaacacctgcttacattgcacctgaagtgctctccacgaaagagtatgacggcaaaatcgctgatgtttggtcttgtggagtcactttgtatgttatgcttgttggtgcttatccttttgaagatccttctgatcctaaagattttcggaagacgatcggtcggattctcaaagctcagtatgctattcctgattatgttcgagtttcggatgaatgcagacatcttctctctcggatattcgttgccaaccctgaaaaggtaaacaatgttctctttcgatttcgacttttagatttttattctaattaagatttgattgtaacagagaataacaatagaggagataaagaatcattcttggtttctcaagaacttgccggtagagatgtatgaaggatcattgatgatgaatggtccatcgactcagacagtagaagagatagtgtggatcattgaagaagctcggaaacctatcaccgtagctactggactcgcaggtgctggtggctctggtggaagcagtaatggtgccattggaagtagcagtatggatctcgatgacttggacacagatttcgacgacatcgataccgctgatctcctttcccctttgtgaacaattgtatcaaaaaccaaagatttcatgtttctgaagcctgctgatactactacacattgatgatacacagacgtgaatataattgttcactaaaatgtataattagagtgtgaaaacatttgtctttgattacaaaaatgttctgttagacatttttatacatatgcatggaagatgtatatataaacagaaacataatatctagtcacgttatataacttctgaatgaatgatagttctgtgtgtcaaggtgaaacataattatttttctgcaatttgctagatacaacaacaacacaaataaagaaacattttaaacggaaaaaaaacataaattagtaggtgttaagtagactccaaacagtttgctcaacttgttcccatgattcagcagtccgaagttcgtcccaaatactgaatattgaacccaacacattttcttcatgtaatatacagtaacacctgaaaccaacaatcacagttacttaaacaacataaaaaaggctttaaggctattcttaaccatgtttacgacagtttactacttacattgtacggtaggatggagacaatactttcttcctcgtactgtctgctgtttttgttgttccgttctctgaagatctacttctgattaatggaagtccataattttctagaagcttcttaagaagatcagcgtctcctctaaagacgtccaagtatattggtatcaagtcgcagatgggatctcctgcaatttcctcaactctttcagaaatttcggcatttggattatgaatttgggagatatctcgtagataagacttacctatggttaaatcgctgaagtcaagaatatgactgggacgccatgagttgtgttgaccatcaactgaatcatctgcgtatggttccatgtgaatgttgtcatccattacgtctgagtgtatccaggtgcagggcttgatttcatctccaccatttgtctcctgtgataccagaaatagattatgttaattcgaatggtttctggaaaaaaagaagaagagaaagataagagaagcaaccttgaagacgtggagtaaatctacaaaaaagtcatcgggaatgtattcgtctatcttggtcatcagagcccgaggtatcggatttcccctgagaggttcaaacaaaacaattaccgtgagtaagcttttatcaagagcaaagcaaatggaaacaaagtcatatttcagaaatttcaaacttaccagttttccagacgactagtgacgtccttcttcttttggcacagagcatcgacaaaaactttccattctgctggaatgttcaactcctcatgaacagcattcacattcaacaactccggacgtgtgaccggtggatatggaagtagatgaaggttgcgtagttgttgtccgagaaagaaagccaggttctgagcgtcgttccaggttagatcatctcttctgcaacaacagtttcaaattagagatcatacatctggctttaaagatgagtcatgctaaataaaaaaagaggaaaagaaaactcacagttgggcaaaaatcttccctttgcatcttttggttataatatatggccaaacatgtgaactcaatgaaccaaaagaatcgggtgctggcttcccctggtttttatgttcacgtagcgttttattccaaataccaaatgggaattcgctgtttaacatggatgcatcaaaatcgaaactggagctagagataatatctgggattctcttgccatcccaagggacaactttgtaagatcctttttcgaagaaaagaatcccgcttgctagaacttcaggaatatgtgttttcaaaggagaatcagcccggccaagaatgtcataaaactcaagctgcagaaaagaagacatagagttacaatcataatgattgcacatattgctaaattattatataaagaaaacttgcctcagtaccaagaccgtacatagattgttctagccctccttcaacaaacagtttgatcgcatagtcagacaacagataaaccttacagcaaaaataagcgaagtcagagcaaatagatgaagtaattaggaatagtgaagaacttttctgcgacggtattctaaaagagacaataaactcacagggttgctgccagttccaactggaagcttttcatcttcggtaaccaacggcaagttgtggaaagtacatacttcctctaggcatcgcaaccatttctcagcatttaaagcaatgcatgctccctaacatggaaaccaaagcgaaagttctaagaattgatgattttgagagatacttataaagctataaacaaaagagtacagattcaaatagtaggattcaccttccatattagttctctcatctcaggcttcagaacccaaagcttggatagccaggctctcatttctcgttggcctacagagttccccattgaccatgggaaattgtaatgatctctttctttatcaagaaatgaagcgaggaaatcgatatcatatgaaaatccattcttccacatattatatctcttcgatactccattcacatcctcttcgcggttttcagtctctccacctccattcatccgtgtcctcttctctttcctggtaaggtctgaatagctcaaagtattatcttcttcatcgtgtgtttcttcttccaaatcttcagaattttcatcatcaagagcaagaagcccagcacggcaaactcctttgtgatggtaaccaggcgccatatccaagcacacgaacccaaagttttctttgttcacaaaattctgggtaacagccactgttggttcaagattaaggatacagtgccaccaaccacttggaacataaatcgtttcgccaggtagtagtgtgcactcaatcggtttgtcttcgtccgcaagaaggggataatagtctagccaccactgtacagggattgaaaacattaagagggatacagtaaagacgaatcaaaatggcagtgcttaaacagtttagcaatatacctgcagagatgagggtgtatcaatgctgacatcaccctcatcttcattgacatggactgtaacacctagaggcacttttccagggggatacaatgcccacctatttaaaacattatgacatcatcatcagaatgagaataatattgcaggaaaggaagaaaaattatttgtatttttgtccataaaggtgtctaccttttccgaccgcaaagcagggtgttccaggcgctggtaagagctgggtcaacatgccaagatgcaccagacctctccggaccaactataagccatctgtatggaggacgactttccttgtctaagatctcaaaccaatcttcttgaaacaaatggggcacactatagtctttcaataattctggagcagcttctccaaactacatgaaatgttgaatccttcaaatattctcaccacaaagtttcggtactactacaactctatcactgacgtgaatgaagtctaatataaatgacaaaactgtttctcgtaccttgtcatcgaaaacgtatagaggatcttcatcccgctgagttttcatatatgcgatgtaatccttgaacttcatggaaattttgttggggctcctctgagatattctaaacgggacttcaccatatttctctgagagttggtcgatagtccacgtattactggctggccaagaatcagcaaggccagaaagcaaaacctaaatcatagacaggaacaacatcacatatctgaaaatgttttaacagatcaaaatctcatgtactagcaaagattggaactttacaggtttcttggcgtcgtattccttagaaaactcatccaaggagatatttctcctacgttccacattcccattatcaaaagagaacccgtcaagagatgtattacacctatagaatcgtttatacaagtacaacgacatgaatcctgtaaaagcgcagagtaagtgagcaaaaaaaaaaaacgatcatatcataagagtatggaataaaccaagtatctaccatcaaaatgaaaacattttctgtatgcgtcattttcttgagtaactccttctctgtatatcagaaaaccaatcagtcattacaatttaaagataagcaaagcaaaagtcacatatctaaagacaatttgtatgtatcattgaacatggtaatttcaaagtacttacagatgcaatgttgtttttttccaagaacctttgtattcaagaggaccttttgctcttctgagacacaaactcatccacaatggttcttcattacatagaatatacatcacactgtacatcaaacatatacacataacagattaatcacaaacaatgcctcaacaaaatcctcatctgttcataataagaccaaaatcctgacttgctaagaattcgaattgatctagttagactctagttttgatcaattctttgatgttaattcgatcaataagttaatcttaggaagagaattatagaaaacctgctgacacaagcgaggtgagcaatatctcggggagcaaggtattcgagaagaacacagatggtctcatctggtagaacactgagactaccgagagcatctggtcggcgatctctttgtcctaacgtcgtcattggctataagcttcaatggaatttcgatttctctctctgcgatctgattgcttttttactacctggaattttgaaaactcaagctttttctccacgcggtggcgcgtgatgatccgagtcctcgtttcgtcaccgagtgcgcgtaaatgctttggcgcacgttgtacgcgttaacgatatcgaattaagttacggcgtcgtttcaacgatagaatctgataagaacctcgcgtttagcttacgcaaatcgtttctaaaaggataaaaagaggaaacgcaaaactcgggaacctcaataaataaaacgacgacgttctaaattatgggccttacgacgcagataactaaaacgacacgtagtctttcaattatgggccttaaggcggcaattttttttttttttttttgaaacgagccttatggcggctattatataatcacaaaccgacaagtattcttcctcctcatccaaaactataccaagaggttccaaagtatcactctctcttcttccactatcaattatgggacgatacactcaagttgagtgactcaacgttgcggaatccatcatcatcatcatcgtcatcgtcaaaaggatggaacaacatggcggttctagctcacagaaacctcacgcaatgtgcataccttatccagcacaaggccacatcaacccaatgctgaaactagccaagctcctccacgctagaggcttccacgtcactttcgtcaacaccgactacaaccaccgccgtatcctccaatcacgtggccctcacgctctcaacggtctcccctcgtttcgcttcgagactatccccgacggtcttccttggacagacgtcgacgctaagcaagacatgctcaagcttattgactccacaataaacaactgtttagctccattcaaagacctcatcctccggttaaactccggttctgatataccaccggttagctgtatcatctccgacgcttcaatgagcttcacaattgacgcagcggaggagcttaaaattccggtagttctcctctggaccaacagtgctactgctttaatcttgtatctccattaccaaaaactcatcgagaaagagataattcccctcaaaggtacgaatcgattgaagatcatcaactgaaaaattctcaattaacaatttcgaattccatcagattcgagtgacttgaagaagcatttagagacggagattgattggataccgtcgatgaagaagattaagcttaaggattttccagatttcgtcaccacgacgaatcctcaagatccgatgattagtttcatccttcatgtaaccggaagaatcaaaagagcttctgcgatcttcatcaacactttcgaaaaactcgagcataacgttctcttatctctgcgatctcttctccctcagatctactccgttggaccgttccagattctggagaatcgcgaaatcgataagaacagcgaaatcagaaagctaggattgaatctctgggaagaagagacggagtctttggattggctagatactaaagctgagaaagctgtgatttacgtcaacttcgggagtctaacggttttgactagtgagcagatcttagagttcgcttggggtttagcgaggagcgggaaagagtttctctgggtggtgagatctggtatggtcgacggagatgattcgattcttccggcggagtttttatcggagacgaagaatcgaggaatgttaattaaaggatggtgttctcaggagaaggtactttcgcatccggcgattggaggatttttgactcactgtggatggaattcgacgttggagagtttgtacgccggtgttccgatgatctgttggccattttttgctgatcagttgacgaatcgaaagttctgttgcgaggattgggggattgggatggagatcggcgaggaggtgaagagggagagagtggagacggtggttaaagagctcatggacggagagaagggaaagaggttaagagagaaggtggtggagtggcggcgcttggcggaagaagcttcggcgccaccgttgggatcatcgtacgtgaattttgaaacggtggttaataaagtccttacatgtcacacgattagatcgacctaattgggctttccgtatccaaataggcccattagaaaaggcctgtttgtttccactatcatttgggctggctttaatgacaattttaaaagatgtacttacaagttgcaataatctatagtgttcttctcacttggatcttataaattatgagtacatatccatattgaaactcccaagaaaaaaagtggatataaaggagaaaaaagatatatgaaaaagcttgaatacgaatcatgtagcaaaaaattgaaattattagaaataaaataaatgagtaaaaaagaatatgaatagctcaaatttttatatatattccgtcagaaaaagagcaaaatatgacaagagatttatcttgagccgtctttttaagtttgacagtgttgagtctgtcttcttggggctcaagtcattgctctggttgagaaataaatgaattagctgttttctttttttcagagagagagaggtaaaaatgtgaagattgtacaaattgggaaatgagagagagatcaagaagaaataggttctttggtgttgcttgttgtgatttcaggagcagtcgttgttgcttcgccttctgcagctggtacttgttgtggtactgcttcagattctggaggaaacaaaacaaaaaacatataaaatcagacaatatatagtgtattcctactaatgttgcaaattattctgatttaagtagatgaataatttatgcaatgatcaatatatgatcaatagtgtccaaaacgaatatgcaaatatagacacataaatatatcgttttgggtagaagttgtcagtgtatggtggcttcactggcatgacgattggcgaccaaattgacagatgatagaagagacacatataccaatgtaattgaaacagacagctcactccacatgctatcctttattcactgttctctccaatcattcactctccttttcttttccatttcaatcccttctttttttttttgcttagagtgcatcaaatatatgtttctttttcgagtttaagacagcaaaacggatagatcacgtgcatgaatgatcaatgcaatcacacgtggtgatgaacggtgtcgtttgaataagagggacaacaaatattatagagataaaacactgaactatgtaagttgttaggaattttaactcaaaactatttatattaagagatttgatgatttctgtctattgcattagattacattttattttagatgtgagatttctaaaaaacgtattttcgataaggtggttcttctagtcatcatgagatgatactttttggatcaagaacacactctatttggattaacaatctagggttatgatatcgtgatcaatgaatgcacttttttaaaaaatatatagaggttttgatatcatgttaagttatatgggtttctaaattaaaactaattagtatgagtagacaactagaaatatatccaaagaaatatgaaaaaaaaaaaggaatttattaagtacgtaccggtggaagaagatagtactccttggagaggaggggcaaaagaggaattggatgggtaaacgaggaaagaaggagaagaaaaccgttgatgatgatgttgttgaggattatatggttgaggaagatgatgatggtgttggtatggtactctaggagcttgaagagaatagccataatagtatggagaaggcatgatggttgctcctgatgatgatggtgatgttgctcctcctccataaagctgttgctgctgctgatagtattgtgcttgttgcaactgtgtgttgtacaatgcctgtggcaagtatatgatcatcatcatcatcatcatagtcgatgtctatgtttgcaacaaacatgcatgtgctagtgtttttcatgcattatgtaagtggtcgacatgtgcaagatatgttgtacgtaaaatctattattaatttcacatcttgcactcatgattaaatacgattttgctttatgttcatctttcgtatatgtgtatgtcagtgagagaaaaagggacttacttggtggtacccaaattgatcagggttataggtgtacctgaaaaaacgaaaaattgaatgattctctatcaagaaaaaaagtgtataattttacaaattccggttctacttattaaaatttaaaacatgttattaaaaaagaatagaaataagaacttccatctagtattacattcttgcacgttaatggtttctcaacttccgtatcggactataatgcattgcatgattttttatctacatgactacatattaatgttatcatatttacagcctgacagcaagtggctcaattgacgcattaaattgtctcctaccatatctatcgcaatggaccatctccttatgagaaaaatgcatttataaggattttagatttttagaaattttctaaaaatcgatatataagattttacccgtacgacggatacatgagctggggagctgcagccggtggcagtggtgcagccatcccggtataggttgatggtcctccactttggtactgactcggacttcctgtttgtcctcgacctatatagtaaacaaaaggattgaaaaagatagtacattgctaaacaaaacaaaacaaaattgtcgccgagtacattgctcatttaggtctcaaaaactagtaattcaacgatattaagaaaaatgtttgtattcctttgacccaaaaaaaaaaatgttcatattctcaaaattggatttgattggttatatttatgttgtacactacgcacataattaacaatgtacttattttaatcccaacgagtacaactaatctcgtttatgttatacacgatcaagtatctttagaaaagaaaaagacaattcttgataacgtaccaaaccattaatatatcgtgatcatatagaaactcatcaaataaactaatcctcccgacataaagaaagattttacggaattactcaagtataataaataaacctcgaggcggcgatggtcgaggccgtccaaaagatgcaatattacaattggcttttcttccgtcgatcaccggatttggatcagcgacggctctcgtggctgagtccgactcccgaaacgtcacctaaattaacgatcggagtaacccttaagcataccaaaagagataaaaacattgtgtgaattaagaaaatataacttacgaatccgtagcctttagacttgccggtgtttttatcggtgatgatgacggcttcaagaatctctccgaactgttcgaagtaacgacgcatttcgtcggtaggagtttcccacgctaatcctccgacgaacactttggtgtaagtcgtgtctccgaacggtgatcggtagtagcttgtttgagacattagttaaattaatatcacgattaacaaatatggcagtctccaatgatgatgatatatgtaacccaaaaacagataaaaattgaataaataaataattatggaaaattgtgtttgtctaaaacattagggaaacaaaaaaaaaagagagaattgggatggacaaagttggctgatctttatatcatcaaaggttgtttttggttgggcaaagagaagagagaccaatcaaaaggttgcaaattgcaacccttgaaacggtgtcgttcttgtcttcgaccctacacatatgaagagaagagagaagagggaagagagaagatagagaataagatagttttgggacattttagaattgagattggagggttttgtaacaaggaaacggagagagagagagagagtgtgacaaggcagcacttgagtatgtcttcgctgtctaatttgccaggttttaacattatagctcctccacaactttttattcagaaatcttctttttaattataacgacgttcttctgatgtatatatatttaatatttttatgtaatatgcagatttaattctttcttaactatatatcttaaatactaaaggtacataatttaccagatgtcacgtagtttttgttatttttgaattagtataaccaacggtagattttgaaaatactcatttttggatgttattagaaacaaacttataatgttaatactgattcttacattcttcaatcaaagattggagaataatgtatgctataatgtgtcattattagaaagttattgaatattttgatgtttctaattgtgtagaatttttaggggtgatttaaggaaaaatatcttaaatccttgtagtaagtagtatttaataatatgcagattttgtcaaaactacagttgtttgataagttctatattttgttttatcatttcccatgttcacttttgagttggtctcttgttctcttcctcctgcttgtctctgtaggtttcgtgtgatacatatagaccaataatagttatatttcttttcacatgaaattaatatatacttttctatattagtttagaagcatatgtatatttttttgtattgaataatggaacttattccctattctcacatgctaacatgtacttaaccttcctttaatcattagcttactggaaagctagctatgaacggacgaaaaaagaacagtctggattttagaattacattcttttagttatctctattttcaatacagttataattctaaatttaaatatttattttagaataattattggcataatttcgtgatcccataatctgatttgggtatattatcataaagaaggacatgtatagctaactgacaacccgatcttcatattataaaaaataattaatatatatatgcactcaatcatattgttaaaacgatgtaaagtgtgtgtgtgtcaaatatcaaatatttatttaatgattaagccaaacagattttgtgatgagttttcatgattagtggaagtccattattcttcctaccaaaccatataggaaaataaatcaaaataatattgagtattgacgaagaggctcttgactttcggatagatccctttaaagatttctcatccttcatattttacaactctgaaacgataattatagtgatcatgtagtcatgttgaatcagccataatatttagtgtctagtgcaatattattaaatacatggtccttactccttacttattaataaaatgttttatatgtatggtttcaagccacgatagttggtgtataatccaaatttaacattcttagattataggagacgactctatctaaattaatattctctctacatgcaccctatataaactctcttaacattattaatttaaaatttaaaagtacaaatgtgaaatgtttgaccattgagttatctattttgtttgttttagtgatctaaaccttgtcgttaccatgttcgtcacacaatgaaattgctaaaagaatcatcatctgtccacgaattatttatctagaaattaacgatttcgattaacatattgacttatctaactattttgtactccaaagtagtaccattatgtacatatatatatatatatatatatatatatatatatattaatgtgtccttgccgtgcatatgtatgtgtgtctagttgcatattaagatgaaaggaatatatatacatgtaacatgttgtaaaagattacatgagatgagcttattgcaaagcagctttcatagacgcacgaccatccttattcctcatcattattttaaatccccttttccacttttctttttctcactatgcccaaccctgtataagttgtattttatgcataaagattacacaaactcaatatttataagtgtaattgtttcttatttacaaacaaaaagacattaaaaagagaaactgtagaaagaaaggcttgaaaaggctttataaactatttatgaaaaacaagctagtaatatattgtttaaatgttttaacaaatatatatatatatatatatatatgtaccaacaattatccatgcctgcttattcaaatatcgtccaagaagacaaataatttttttttggcatttgaagtccaagatatatatttgatatatccatttaaaactttgttttaaacccaaagaaaactgtttcttagctatacttaaacaaataagcccaaacaaccaacaatgcttaatcaaatagacttttgaaagtctttgaatattttttcaaaatgcaaattaaatattgttgttttgagatagtttttagtttgattaagaaaacgaaatatggagacaagtaaagcaaagtaggggccaggaaacgtggcaaagagaagagacagttggaagcaagtttagagaggagaaagagagagagagctgtaactgtaagaagaaaattgggaaatccgaaattccaatgaactgtctcaacttcttccacgtggacttcctgtgatgcttagctgctttcaaatattttgttgtctcaatacaataacgtcatcgatgaattaaactttttattacgacaataattgctttcgaccttttaggcaaattgagaattccaactggtcttaatcggcttataaaccacaaaactgcaacgttttgacatattttcagttttctttgattgaacattttccatttcaaaaccaaattcgcaaacaatcaagattcaaaactaaaaaaagaaaaaaaacactttgaaggatatataaaaaataaggttcgaattatggtatctggggtggtggcgcagttggctagcgcgtaggtctcatagctactgagtgatcctgaggtcgagagttcgagcctctctcaccccatttcgttttgtgtgttgaaacaaaaatgtttaccttcttattggagggagcccgtatctacacaatgggcccaaattattgactttttcttcgttaattgaagccaatttattaatttttcgaaattgggccactaagaagcccaccaggtccgaaggctttttttcttcataaatgaggaaatggctcatccggtcatgtcatggtcatcaatgcgtcacaacgcaattatgcaattattcgagagagataacaattaatgatcaaaaaagattaaagcatgaggatattggcacccatctatatcacttgtaaactcgacatatacatatcactcaacgatatgtctcattagtcattatctctttcttcaatactctcacatgttccctaagttttcattcgtataaatttgtccctacaaacaactacacatttaaagaaacaaccgtcacacccaaatcggttaaaaattcattcgccgatatatctatctatccaaaaacaaactattttttattcaatacaatcgttttaattaaaatctttcaattcgactcactcaaaaatttcatcttgagtgttaaagaagaaccattaatgatcggatagtgtagttagaaaggggtttgtaagttataagagatccacatgaggaacttaagagcgggtgatatattgtgatatatgacaatgccttttataatattttgacgtgaaataaagagagaagaggagccccaccaatgttaaaagaagtcacatggaatttctacgttaactaattaaatttactattcatttcataattattcctttgagaattttgcaaaagcccctttttctttgatatagtatggtccatcacattctctccaattgatcatttatgatttgtgcctttccatcgttttcctacgataatacttttctcaaagttaattctatgacttatggcagatcatattactttgtcgtctaaagcagtttctattttcgttttacaaacatgttttggaatttgtttaacttttgaaaactttatcatagtactttatgaaactaatgtcgatgtaattaccaaattagtggaatgacggaaaaactagtgttcgggtttattattattacgatttcaatcatagctacgcaggtcatctttggcgttttgagtgacaagagtcaagacacaagtctagtcttaaaatggatttatatttttaatttcaatgcaatgcggttctatatatctagtttgacaaaaaaaaaataaaaaaaaaataaaaaaaataaattcaacatgaggggacaaaagatggatagctatcaacttctggaaaacgaaatgtcgacttggaattacaaaacttggattcgagtggataataatgaagcctttgttctggccgctgtagattctaatcttattctatacatcgaatagttttactaatgataagtctgatcttgtcgccactaataaaataaataaaaaaattcttttccaatgaaatatctcgacggtaatgtgtttatttaatttgctgcgttttttacatatttgatttttgtgtgaaattctctcatgaatgaaacatgtacagtattgatggtaagtgcggaattccacttatttaacatatcgtaacagaaattttgatgtataacccccctatatatagtataatatagagagtggtggatttggtagctcttaagaccaagttagttgaggaaattaggtgcaaggttctatcaaagatgtttacatatattaagaaatgcgaaattccttttgttccatgcaattgggagtttttttttttgtttgctgatatccaatattcatatgtatatttttttggatttacagaacatagattgaagtacccgaaccttatcaatcttaatatatcatattaaaaatataaaaagaatccctcactgtctttgagtaaacattttcatttttttcacttcacatttttttttttttttttttttttttttacacttcactttgttaatatgtctgggcttggactacgcgtgatggactcatgagtttggaagtgcgttgtcatgcaatgatttctataatcatattgatacagtgtgggtttgtgttgataacaaaaacggattttcttgctgtaaattaagaaaaataaaagaccgagggggctttcatatgaacatcagaacatgtatctttttacgaggtattgtcacgtaataataaacctgggacatgcatgtaattgtcataactcggaaaagtgatggaagccaagacaaaatgacccataccatattgtcgtctagatctaccgtcacacacaagacgaatatctatgtaattatgtatattatatagtacacaagaactagttcgtataaatatctcgtactgcaaaaaggtaaaagcagttactaagagacgtatgtctctagtcatgtacgatatcttcttgtaatgatttttgtttttggcttataaacaaaatgtcattaatcagtttaagtatatatcattggtacagtaaaatttataagataaacaaaaacgcgttaaaagcaccatttttatgcttacgtttgtgatttagtccattgacgagtaaagaaaagttcatctgaaaaatgccgacagatattatataataatggaggaaaaaccaaaataaacaagagtataatataacgacaaaattcgaaaactttttgaaaaaaaaatacacaaaataagaaaaagtttcgtataatttattcggacagcttatatgaattggcaatatacataacgtagtgaaatcgtttgacttttgtcccagctacggttttagacttctagttacgaattatgatcgccttttgttggtacttcaatatcaaaagcatacaaatattgaaccaggtccacttgtgctataataaaacaaaattacttggtgttaaaatgtaggaaatacagtgctgctaatatcgagtaagaaagagcgtagtgaggttaggaaatagggcactgacattaatggaaagacaacgactccacattatttacctataaataagttctagatccactgtatatcgaattacaactaattaattataaattgtttcaagtcaaatgttgggttgagatccacgacacatggttatgtaatgtggaacaatttgacttatcgtttgtcattggtcttaataagagcagataatcaactaccaaattgcttagtgtgaaacagaactatctatattcttaattgttccatccgtattttatcatttatcttgtggtaatttttagtggtaattcatttatttatgtaattactaaaaaaagtcaacgaaatttggaggggatgcacacgagtagagagtagttgtaaattattattaactgtgattagtattattactcacaaatcacaattaataatactatattctaatcacagttaataataatttaaatatatatatatacttattatatatatatatatatattttttttttaaagaagtaaattttaattaagaaaaaactatattctatatatactcttttacgcaaaaccgtacaaaattagaatattgcgggtaaagggcaattatattctccgttaaaatccaaaaatgtataactaactaatcgagtaacatctttgaccaaaaaaaacttacacagtaaaatctggaccagaaaaagtctttttcgttactactattattttaaactcaatatatgattttcattcaattgcaaattattaggcttatgaacctcaacagtggactgtagaaaagtcgatgtaacgtaagagatgatggaatggaaggttgtgaaaaagtaactttatatgcttatcttttgtacataacttttgtatttgtaacgttcggaccgttttgtctctaatatatatatatttgttttattctctgagttgtcatctgtacatctcttcatctaattacatcttcataaaacttcacaaaattattctgcaaattagtaacaaagatattttttaatacacactatatctaaaaactatgaaagaggttttccttcatgtaatacacctttttaaaaaaaaattggtttattatgcatatatagtagacaacggtttactaaaacttcaaactatgtcggtgtctgtcctcataaattttctaagcacagaaaaataagtcgcatgtgacgacttgaatcaaaaataatctttaatttcttcctttgttagaaaggaatagacttcatagaaaataagattcagtaacaattatcttgccggtggaccggtggttaaatgtagctctaaatcaatcagcaccacacatttttttcctaattttgatagctatgattttcattgttgggtttgttcagtctcactctttttcctcaacaatgaatcacctttttacgacccattgtctatttttgattgctgttttacaatatcaaacgtcggcataatgatatatatatgtaacgttatctatacagtcagcttagattaatcacctatccaacgtccctgttccattctttgacctatggacaaaagtgtacatgtagattccaaaattaaattttctatcacacgatcatcacgtgttttagaaccagaaatccaaatcccaaatgtgtgtctgtataccatacactcaaaacaaaattccgattagaataaagaaaacctaaaagatactttgagaataaaaactgcaaatcattttcatgtatcgcacgtcgaatgaaaatcatatagtcatataagtaaatgcattttaactaccattttgattttttttttttttgtgtgcataaatataaattgaatgttatgatttttttgaaaatgtgaaatagtaaaaagcacatgtgatccaaaaattaacacgatccgtgaagttttctttgtcacggtccgccacacacaagaactcgaataccgtgcacttaacttacttatccacgttttactattatccttttacccaaacatcctccgtttcgatgtaagaaagtaacggtctatcggatgtacgagtgtagacagtcagacaccgtcacatatgccacgtcagaactatggagccaccgacatgtaaccgcgtttcaaaatgggacccactttccccgttttatcttaccttttttccttcaaagtatgttgttatttatatggagctgatccaataaattctattcagacattagaatgcaaaaacgaattgttattttggaatcttgaaataatcaccaatcatattttaaggacatatacctgtatctgtatgtgtgtgtttacaaataaatacgtacacactacgatggcataggatgcggctatgagagccgacgattgtgtaattaattaacttctgatttttttggctgattaattaagaaacctacttgtttattttgcatttatttagctaaaagtggttatatatatcggtgtaacccgtttgaataaactaccagttcagttttgaatgatgacatatatgacattttacgcaaaaataccacggtattattagttttgtttaagtttgaagttttataggttaactgtatgtttcgttatctcttcgtttgtttgttttgtgattaatcatacatttcccaaaacacaatatattataaatgctgaatggtaccttgtgtctgtttgcatattggaaatttctggagcaacctgatcccttctctatcaaagaatttaattgataattaatcgttggcgatagcacttttacaaacattttccctttacttgtcaaaaataattatcaagcagaaaaaaaggaaataatgaatcaatttcgagaatcattgaaacagatagtaacaatgttttggagttgttttgtttttaatttctcttcaaagtgaaggctaaggacaaacgctatgcggaatagttttctattgcgtatatatagtcgataataacaatataacatggctaattttgtgttacatcaatcatccaatcttcatatattgtggcttattctatattacattattacaataacatatattttacgtggcttttatgttcgtacgttgtttttatgtgatgatgctatgtcaaatcatccgtagtatcttttttatttgatgagtacaaacatataaaacaaaattgcaaatatttcaccaccctcttacactttatatatttaggtacatgcagatttataaatccactaaataaatatgcatgagctgtgaaacaaaacaactcagtgactcactcgacttatatcatacggaatataagaaaaaatcaaatgaaatttaccaaatttaccataaaatacagattttgaagatcaaataaaagtagaaaatcttatcgtgagtgggatatttaaaagtacaaaatttgcctcgtattgacacaattttaaccttatcgtggttggcgtgtacaagtgggcaactggtctcctaataatgcgtttggtaataaatgatcgtgattcttagaaatatctttttcgcaaaaacattagtctatggataagaagataaattaaccaaatcgatgagtgtaaaaaaaacaaaaccaaatcgaggacatttgtgaagaaactcgtcttattccaattaggggacgatcactcgttttcttgcgagaggaacttggcctaaaccgaccatttttttctcatggaatttgatcatgtgttttttgtcctcctttaaacagttcaaaatttgatgaataaactacaaagtcaacatttttacacattcagatctgcatccaaaacacccatattgtaccttctatattcatgattcttttggtcataatcatgatgttttgtttccactaaactttatgatgtttatataaattccattgacgctataaaacaagctcgatacatctaccttaaaaaagatcattaacttttctacataaaaaaaaaacagtccccgtaaaaaaaaatcatttactatcgacaaaataacctttaggaaatctcatgtttgacctaacacattttttcaaccggttcattaattctataaatgtcaaaatactattattgaacatcttctaatatttttggtcaactactactataaagcatcttctaatttttcagtcgaccaattagtgaacttaattaaaagaaataaatgtttgtttttatgcaccgccaagatttcatatatttttttatgggaagaagaaagagacagaaagagaggtaaaaaacattaaaaagtagaaagaaaacagagcgtgaagttaatacgattatagtactagtaattagcagtagatagtactaattagacatgtacccatgggaagcttctcttcgttctccccccttaaatacgcttaggcatctcaactaatttactctctttcttttgtttatataccaaagccaacggaagtgtttcttaattcattttttgtttgttttggtttaaataattcagtgtctcacgagctgtgtcgagattggatccatacaaaatctgcacgacgcctgcttcttcactctctcccactgttccagcttcaactctcttgatatacagagagagatagagataaagagagagagagtgagagtgatagctctcggagaaattgaagaagacacaatctgattagtattctccaatattccatcaactttttgctgagggaaatctccagatttataatcgtttgtatatatatatatacagagcagcgtagaaaagtacgatttttgcttcttttcctcactcttattcatcttcttgattttgattcgatttggtgtttattcgcttgattaatttaagggttgttggggttttttgtccaatttttctgggttttcgttcgatttcgatttccacgagtttaccaatttcgtctctcctcagaatttgtggatctgcttatgtaaaaattgagtctttttacttgttttgttcgaatttgtttacaaacgcgtgatctcgagtttcagagatctcaaagcttaaatttttataatctgatggacttgttttttatttacagggatcttagatttatagcagcaacaaaaaaatgtcaatgccactacaacgtggcatctctggagtacgagtttctgatagcagtgatgatttgagagactctcaaatgaaagacaaaactgaaagagctcgttctactgagaacaacaacttaaccttaaggtttccttttggtttcctctttagtaatcaatcttcttccaaacacggtggtggtggcgaaaacggtttttctgctgatccatatagtgcaagaagcaggcatagattgatgttgttgtttctcaagatcagtttggttcttattgtggttattgctcttgctggttctttctggtggactatttccatttcgacttcttccagaggtcatgtatatcacaattataggaggttacaggagcagcttgtttcagacttatgggatattggggagatttctcttggtcctaataggtggaaggagcttgaatattgtaatatagaatctgagaattttgtcccttgctttaatgtttctgagaatcttgctctgggttactccaatggtgatgaaaatgatcggttttgtgggcctggatcaaagcaagaatgtttagagttgccaccggtgaaatatcgagtccctcttaggtggccgactggtaaagatataatctggcattctaatgttaagattactgctcaagaagttgtgtcttctggtagcataaccaagaggtgatgaatcgttgcttctctcttgctaaagttgactggttccattgctaatgatgcatttttttccaggatgatgatgatggaagatgatcagatatctttcaggtcagcatctcctatgtctgatgaggttgaagactattcccatcagatcgctgaaatgatcgggattaagaaggataacttcatagaagctggtgtaagtcacacacacattcgaaagagtcaatctttatctatctcattagttcagtttcttatttgctattttccttttaatactgtttcaggtgagaactatcttggatattggatgtggttatggtagctttggggcacatctattgtccaaacagattttaactatgtgcatagcaaactacgaagcttcgggtagccaagttcagctaacactcgaaaggggtcttcctgcaatgattggctcttttatatcaaagcaattgccatatccttctctttcctttgatatgttgcattgcttaagatgtggcattgattgggaccagaaaggtaacagtttaatgacaccccagaatgatttttttcatgtccttaacccgatggaagatccaactttactgtttcaatctgctgtgtagatgggcttctccttgtagaaattgacagggttctcaagcccggtggttactttgtatggacatctccgctcacaaaccctcgtaacaaggatcatcttaaaagatggaactttgttcatgattttgctgaaagcatctgttggactcttttaaatcagcaagatgagacagttgtctggaaaaagactatcaacaccaaatgttatagttcccggtcagtgattcacacacaccactgttgtattacagaatctgcatatggatacatttatggttatttatcaagtcctctaaaaatggatgctttgcctataaacaggaaacctggagtgggcccttctgtgtgtaccaaagggcacgatgttgagtctccttattacaggccgcttcagatgtgtataggtggaacacgtagccggaggtggattcccattgaaggcaggacaagatggcctagccggtctaacatgaacaagactgaactttcattatatggttagtctccgtagtaacaaattgcttctgaatccatatgtctgcagtttttgttatctcattttgattcctggggttggtttaggtcttcaccccgaggtgcttggagaggatgctgagaactggaagataacagtgagagaatactggtctctcttgtctcctctgatattctctgatcatccaaaaagacccggcgatgaagatccatcaccgccttataacatgctcagaaacgtactggatatgaatgctcaattcggtggtctcaattccgccttgttggaagcaagaaaatcagtctgggtcatgaatgtggtccctacagctggacctaaccacctccccatgatacttgaccgtggctttgtcggagttttgcacaactggtcagttcaaaagccttattggattttcattttagccatagaagtgtttctgaacatctctttttcttcaggtgtgaaccattcccgacttacccgagaacatatgacctggtacatgcagacaatctcttgtcgcttcagacaagtcagccccgaaaaacatgtctacttattgatatattcacagagattgaccgattgcttcgtccagaggtacacatttgtttactttgtaaagaacattattgtttcttgtattctggtagctataataaacaaaactttgtacagggatgggtgataatccgtgacacggcacagctggtggaaaaggcgagagagacgataacgcagttgaagtgggaagctcgagtaatagaggttgaaagcagcagtgaacaaagacttctcatctgccaaaaaccattcaccaagcgacaatcaatctgaagaagaagaagaacatagacacaggtttttctccacttttttaatttttttgttccaatgcctcacattttggaatcaaatcatccaacttgtgttggcgatacggggaagaaaggaggaagagatgaaatatatatcccgccggggacgtaagaccgccggtgaaatttctttatctggttccgtgagttcccattttacagaatctagattttttttttctttacaactttggttctataacaactcttattatacagcgaaaaaagaatatgattcaatatttgtgaagatgtttatgaaataagttcaaagctttttagtaaattttcactgagtttctctgtttgttcaccgaatccgagatacttacccaacattgtaccgtaccggaattaacccgagattagttacgattctttttgaaattgattatatgaaaaatctccaaaattgagttaaaccggaaagtgttattcggttttacatgtttccgagaaccggatcaactaaaaagtaaaaagacagtaaaccagaattgaaaccgaaccggaaacataagcgttagaaaagatgctgaattataaaatcaaagaatggagatggctttgcaatttgcattggccaattcatgagattcaaacaaaaagaacaattcaatgtgatggcgtccctgcagctgaagtttttcttagttgacgttggcttctgtttttggatccacgtccttttgcaatgtggcctcggtggtgaacgctaggggaggctgatccaacaacactcttggtggatgttcttttgcgcctgtggtgcaaagaatctccaccaccaaacgcagctctcgctacactatctttgagaacttccctggctcgttgtggcttaatgagctgcttgttatggtaaactagcttagggagaaggctggaaacggtcttgcgtagctggtcctcgcctacattgttctggatcgggtttccgaggatgttcaaagcaacgagagagttgtagttggctacaagctggcctattgctttggtggtggcgatcttgttgaaactaagatcaagaacaataagtttcagcaatctgtgtaagccttctacattgctgatcttgttcccagctaggtatagttctttgatcagtgtacagtttgataaacctgataaatagcttttgattaagacagggaaacaaacaagcattgtatgttttctacttaatgactgcaatcttaccttgtccaatgcgagaaattcggttgtaacttagatcgagtactcttaggcgtgtcaaatctcttagtccttcgataacactgatcttgttcttggaaaggttcaacgcgtggaggcccttaggaagcgatgcaggagtaatttgaactgcagtaaacagaacaatgtccagtaagcaacacacactttagaaaacagaacaatgtgtagtatccaagagtgtgtacctatgaagttgtttgatagatcaatcgacttgaggctggtaaaatgtgagatgctcgggatagctttcaagccgatgctcgagatgtgagccacgctcgatgatttgctcagcgattgaataaggctatttgcgtgcactatagcctctgagacgtttccggactgaaccacatttcctaagggtgatctctcagtattaggagaggttgggaagatggccaagacatccttatcctcgttcactggaaccacggtttcgacatccagtcctcttacccactcgtccactcgcttcattgacgaggactcggcagagaacgcgacccactgattatgatgaggccacaagtttgatgactggttggtgaaatcagcgcaatagtttgtagattcttcttcatggctggattggttgtgctcagcaaagtcagaggtgtatccagactgctggttcttgtttaaaggctgtgactttagcgagacacggtgtttgtgaaggttcctatggctccataggaacaacttccaccagagccgccggctcccagagggaagtatctgcatcgacgaatgtttcttgagcatcactctatctgcacttctatgagacctcactgattcattactaactggaacggtctctttcaggtcatggagatcagaaccatggaaccggccattaaacttgctgagagtggagcaagatcgtttaagcttaggagacgtcacccaagccgtagttttgcctaatccaggatcactgacgtgacctccttcatcctcgtcattgtcatcgccgttttcagaagtatctgtgacttcctccttgcttttcacagattcaacggctcgttcgtgaacgtggaatttagaaaactcacggttcgttgaatccttatcgtcacgttcatcttcgccgtcatatgactcgtgcttgataggactgtccttgttgttaggctcatcattctccaaaggcttcactggctcttcaagtctgatctgaagtattctctgcgttttctgaggttttgaattc

SEQ ID NO: 1980 - DNA, 258 bp, Chenopodium rubrum
agaagatctggcaccacaccttctacaatgaacttcgtgttgctccagaagagcatcctgttttgctgactgaggccccactgaaccccaaggctaacagggagaagatgactcagatcatgtttgagacattcaatgtccctgctatgtatgttgccattcaggctgttctctcactctacgctagtggtcgtactacaggtattgtgctcgattctggtgatggtgtgagccacactgtgccaatctacgagggtt

SEQ ID NO: 1981-1999 - skipped (19 entries)

SEQ ID NO: 2000 - DNA, 610 bp, Oryza sativa
gcttgccaaggagctggcaactaggacctgtcatagcttctgtcataatcaggatccttgcgatctgactcacggtctcgaaatatcgccaccctgttgttttgcctgtttctattaaatgcaggatccttctcagtcttgtttcyatttaccctgctgctagamsaaggcagtagtcaaactcctttcaagggtaatttcaggcccttcacctagcctgttacctgagcttagctccaaggaactggacctatggagagtatttggcaaagttacttcatcacctggtcttccatcagcagcattgccgctgctactgttgttattaaatatccgtgcacgtgccttattgtattcctcctttctttcttcaacacttttctgaaggttggctctagaagagtgagcacctgaactggaattgttatggtagtgcttctgaggtctttgcttgatagcaactttggctatagagttgctctcatcttgaggcagattaacttgaatatctgataggcgcacagcaggcaaccggcactcagctgatgttttgcgaaggatgatacgagaaccagatccatcaggaaggccgttatcttgtagagcaatt

SEQ ID NO: 2001 - DNA, 714 bp, Oryza sativa
gactactagttcaagcttgccaaggagctggcagactagctaaggatggagcagacattttgaagttcattcatgaccctacgccgacagagtttgacttccatggtcttcctacttcttacctgcgtcttgctgcagatcgtctggcacagcattatttcctccagtcaattgctctacaagataacggccttcctgatggatctggttctcgtatcatccttcgcaaaacatcagctgagtgccggttgcctgctgtgcgcctatcagatattcaagttaatctgcctcaagatgagagcaactctatagccaaagttgctatcaagcaaagacctcagaagcactaccataacaattccagttcaggtgctcactcttctagagccaaccttcagaaaagtgttgaagaaagaaaggaggaatacaataaggcacgtgcacggatatttaataacaacagtagcagcggcaatgctgctgatggaagacccaggtgatgaagtaactttgccaaatactctccatagggtccagtccttggagctaagctcaggtaacaggctagggtaaaggcctgaaattacccttgaaaggagtttgactattgccccgtctagcaccggggtaaattggaccaagcctgaaaaggaccctgccatttattgaaaccgggccaaacaacagggttgcccgatattttccagcacctga

SEQ ID NO: 2002 - DNA, 609 bp, Oryza sativa
gcagactaggatctaaaagagaagccctatttactctcaattttccacactaacacgtctttctcattattcagagtacttgtctggcattggcagtcattctgcaacttgtgtcatgatctaactgtaacatgtcttaggcgaatatgtatctatcacctggcggcttaaacttatccagtacatatcgcctaactgtttgtgtcatcgtgagaaaaacaattcaccgacttccaatctgttttgtcacagatatctcaagccagcaagccggtggtgaaggccttcgggctatggggatccgtcaaggccctctcgaggggatacgagtacctgatggggatcctcatcttcgtccccgtcgccgtgctggcgtggttccccttcgtctccgagttccagacgaggctgctcttcaaccaggccttcagccgaggcctccagatctcccgcatcttggcaggcgggaagaagcagagctgagcccgcacaaagtccaccaagtgaccgtacataagcatgcacaggtttaggcgaacagcatyacaagaggttaggtccaggatttatcsgttgtamagttggaraarttttgttcaaggaagcctt

SEQ ID NO: 2003 - DNA, 715 bp, Oryza sativa
  misc_feature (1)...(715): n = A,T,C or G
taaacngggatttcwkggagctggcagactaggacgccaaagttctatgaaaggatctaaaagagaagccctatttactctcaaattttccacactaacacgtctttctcattattcagagtacttgtctggcattggcagtcattctgcaacttgtgtcatgatctaactgtaacatgtcttaggcgaatatgtatctatcacctggcggcttaaacttatccagtacatatcgcctaactgtttgtgtcatcgtgagaaaaacaattcaccgacttccaatctgttttgtcacagatatctcaagccagcaagccggtggtgaaggccttcgggctatggggatccgtcaaggccctctcgaggggatacgagtacctgatggggatcctcatcttcgtccccgtcgccgtgctggcgtggttccccttcgtctccgagttccagacgaggctgctcttcaaccaggccttcagccgaggcctccagatctcccgcatcttggcaggcgggaagaagcagagctgagcccgcacaaagtccaccaagtgaccgtacataagcatgcacaggtttaggcgaacagcatccacaagaggttaggtccaggaattgatcgtttgtacagtggtagaaattttgtttcaaggaaggcgttcgttacaagctgcctgaacttgcctgaaccctttcaraaagkttcccgtttaacttt

SEQ ID NO: 2004 - DNA, 775 bp, Oryza sativa
  misc_feature (1)...(775): n = A,T,C or G
tnccntsatmatggagyggcagactaggagtctcaaaattatgatagcaacaaccagaaggttcatcctcaaccaattkgacgaaaacatggaatcagaacatgggctcaatggacaccatgattggaaggatattcaacaatatatcctctttaaagtctgcatacattcagctgcaggaagctcacaccccatatgacccagacaagatccaggctgcagatcagcttgtcatagaggagctcacgaagctctcagagctcaagcatgcttacagagaaaagaatcctaagcctgtagcggcaacacctcaagatgcacggctgctttctgaaatacaagagcaacagaacttgctgaagacatatgaggtcatggtaaagaagttccagtcccaaatccagactagagatactgagataacacatttacagcagcaaatcgatgaggctaaacttcggaaatcaaagcttgagaagaaactgaaacaaaggggcttactcaacaaggaatctgaggaatctgatgatgaagacaactacttttccatcgagttgacaccaagtttatttacatctgctgttgataatgcataccaatctatacatgatttttcaaagcctttgatcaacatgatgaaagctgcagggtgggatcttgatgctgctgcyaawtgcatttgaaccygcygkgggtttamcccaaggrggggcycccmaaaarktttgsytttccgagkccaaaattttksccmaaaraawttttgggggggttt

SEQ ID NO: 2005 - DNA, 775 bp, Oryza sativa; identical to SEQ ID NO: 2004
  misc_feature (1)...(775): n = A,T,C or G

SEQ ID NO: 2006 - DNA, 1000 bp, Oryza sativa
  misc_feature (1)...(1000): n = A,T,C or G
gggnnnnanggcangtgcaagcttgccaaggagctggcagactacggtgactccaataattttcaagttaatttktcacttgtgcttagcatcttcggcccagtcagtgccgttyaagctgtgatctgtttggtagtaaacaacatccccgacgtcgctgacaaagtgatcaactctcaagctcctyagcagaacgccaaacaggtgaagtggcagcggacctgacttctctggctccctgtagtatctgcccagcactggccttgctgcctttgtctgtttnnttgttcccatcaaaacaaggcaattgtttcagtactcagtgaacttggtaacagtgcaccgtacatacatactatctagcagaggtgaataatgctggcagtgtacttactgcttctacgaggtgataatgaggaatttgggggaaaaggtggtggatgacatgggtgccaatgtcatggtggatgtygttgatccacccgtagtcccgatccaccgttgtyaggccaccgcggaggtagcyccawtcctgcaaatagtggtcattgccagatgtttagccctattttcanwggtttgtaagcmgaaactttatgaargttttcyargttttyagggrntttttnrrgggcccccargggkggscccccaacccmaaaaaacyytgarscmaatttttcaaascttttawyycsgggaaaaamctttggrccccmamcccmwttssggaaaaaaaaaawtttccccccccccscgtatacccnggggraarrgktctcttttgttccccccggkggktggkgtsccmaaawaaratttycccccaatattgtgcccccmmcacttscaaaaaayaccskknytttgtatatggsacaancacmcnctnttntattaywttctcnytgtgnggnacanttctctctatataccmccaaatatatatggnyncnctncacaangngcggannanaganacnnnncncnannagcrctn

SEQ ID NO: 2007 - DNA, 842 bp, Oryza sativa
  misc_feature (1)...(842): n = A,T,C or G
tmccaattcatggagctggcagactactgcattcaaaacaggtattcgtgatgtggcttgatttggtgattatctgcaccaccacggtcacaatgaccttccctggtatcgtggagaggtatatcttttttctgtattgattggatcatagtttttccagaataaagcatgaaaagttgctgtaggttattgagttgggtgcagcctatgagcactctatacttcctctcactctatacttcattaagttctgcttacaaacactgaaaatagggctgaacatctggcaatgaccactatttgcaggaatggagctacctccgcggtggcctgacaacggtggatcgggactacgggtggatcaacaacatccaccatgacattggcacccatgtcatccaccaccttttcccccaaattcctcattatcacctcgtagaagcagtaagtacactgccagcattattcacctctgctagatagtatgtatgtacggtgcactgttaccaagttcactgagtactgaaacaattgccttgttttgatgggaacaaaaaaacagacaaaggcagcaaggccagtgctgggcagatactacagggagccagagartcaggtccstgccattcactgtttggcgttctgctragracttarattgatccttgtcassamttcgggaattgtttataccaacrgttccrcttgaacgscytratgggccaaattctaccccaktgaaatacttgaawtttgggtcccgtnncanaccyntatgaraaagattttycynaaagactctctnnactnanygctcaanagataacacgcgsttntnnaaa

SEQ ID NO: 2008 - DNA, 600 bp, Oryza sativa
  misc_feature (1)...(600): n = A,T,C or G
attttggtrggatttggraaaacttcaatycyttggaatcaargggctacatagggaaaattttcctgtaggawtttcaatcctatgaaattccyttcatagttcctttgattcaaaggggcccgaaaagttkwygtaggttattgagttgggtgcagcctatgagcactctatacttcctctcactctatacttcattaagttctgcttacaaacactgaaaatagggctgaacatctggcaatgaccactatttgcaggaatggagctacctccgcggtggcctgacaacggtggatcgggactacgggtggatcaacaacatccaccatgacattggcacccatgtcatccaccaccttttcccccaaattcctcattatcacctcgtagaagcagtaagtacaccgccagcattawttcacctctgctagatagtatgtatgtacggtgcactgttaccaagttcactgagtaatgaaacaattgccttgttttgatgggraaaataaaccggcmaaggccgccagaaccagtgctgggtagatactacagggggccccmagaagtcaggtccgctgccactttacctgtttagnn

SEQ ID NO: 2009 - DNA, 618 bp, Oryza sativa
gmatttttaccagagattggacctcttgctaagtttccttcaaaacctatatgcaacaagccattccctaggatttttgtaggatttggaaaactttcaatcctttgaatcaaagggctacataggaaaatttcctgtaggatttcaatcctatgaaattccttcatagttcctttgattcaaaggggcccgaaaagttgctgtaggttattgagttgggtgcagcctatgagcactctatacttcctctcactctatacttcattaagttctgcttacaaacactgaaaatagggctgaacatctggcaatgaccactatttgcaggaatggagctacctccgcggtggcctgacaacggtggatcgggactacgggtggatcaacaacatccaccatgacattggcacccatgtcatccaccaccttttcccccaaattcctcattatcacctcgtagaagcagtaagtacaccgccagcattattcacctctgctagatagtatgtatgtacggtgcactgttaccaagttcmctgagttaatgaacaattgccctggttttgaatgggaaaaaaaaaccggcmaagggccccaaamccattccgggkaaaayyy

SEQ ID NO: 2010 - DNA, 727 bp, Oryza sativa
  misc_feature (1)...(727): n = A,T,C or G
gcaagcttgccaaggagctggcagactaattttcccagcactggttttgctgcctcagtctgcaagttaggtccaaaccaacataacttagtaggcgattcttgcaaaataattcattaaaacagcaagagtggcggatggcttcttaacggctyaacmagawgggtaatgtgggatttgtgggaaaagatgatgaatgacatgggttccaatgtcatggtgtacgttgttgatccacccgtagtcccgatcaagtgttgtcaatcctccgcgcagatagctccactcctaatagagcaaaagaaaatgtgagctcattaaaaatatataaactccaaaatagtgaaaagtatttgataatctgcacttcattctacgtaggaaaatggttaaaaaaaggaactactgttttgatatgtccattagcatttcactctggaaggagaccaaaggggctctttcaagtacttgaccacaaggaatctgaggtttgtagcgttcgctccttgcttatggttggaagtwaaggatacatttggcatttagccmtaaggcgatacctaactwccagcctgttgacaacagcagtncctattggctcaaagctgcatgatccctacccyattttttgaaaattttccaggkagtccaaaattataattscccccttttatcnrcaggkwwcccccccttawccccytttggggcmccaananccntkgracnc

SEQ ID NO: 2011 - DNA, 943 bp, Oryza sativa
gacgactcatggagctggcagactaggtaaatttctcgtcttacatgaggggaaacagctgatgttatgttatagtcccatttctgctgatcagaatgtgttgacaatttatttgtgtgcacgcagtacaatgctgatcttggtcgcatcgagaagtgggttatgaggaaggcgttcgacgacgaggagcatccttacctgccgaaggtagaaatggcagttcttttttgtttcttcagatgcaatggtaattttgtccgtgttctgaactaatacttctgaaattctccacagcacatactgtacaggcagaaagagcagttcagtgatggcgtcggctacaactggatcgatggcctgaaggctttcaccgagcagcaggtactaattaccgaccatttccctgtgtcctgtcctataaatcgcctaattaaattgacccccgtttactctgtcatttcttcaggtcagtgatgaaatgatgaagaacgctgccaaagtgtacccgcacaacacgcccgtcaacaaggaggcgtactactaccgcatgatatttgagaggctcttcccgcaggtgactgatgtgtattcaagcgttgtacagtacagtgttatactactacacttgtactagtactaatttggaacctgtgctgaaaatggtgaaacccaatcctgaagcaggaatcgccaaggaaaggttccctggggccccaacataccttttacaacccgggggcgaaacaatttgttggaacctttaaaaggttgccagaacaatcgggcggggtttatattccccaaaaatagctccgccttttggaagaaaccaataacggtaaaaggcacccccccgcggataaaaggggaagaaaaagggaatttttttttttccaggaaaaaagatgtttttttttttaaaaaaaaaaaaataaatattctg

SEQ ID NO: 2012 - DNA, 310 bp, Oryza sativa
ggggtaaacrgctgatgttatgttatagtcccatttctgctgatcagaatgtgttgacaatttatttgtgtgcacgcagtacaatgctgatcttggtcgcatcgagaartkggttatkaggaaaggckttcgacgacgaggagcatccttacctgccgaaggtagaaatggcagttcttttttgtttcttcagatgcaatggtaattttgtccgtgttctgaactaatacttctgaaattctccacagcacatactgtacaggcagaaagagcagttcagtgatggcgtcggctacaactggatcgatgg

SEQ ID NO: 2013 - DNA, 659 bp, Oryza sativa
  misc_feature (1)...(659): n = A,T,C or G
ttggtwgtttwatgcacatttacagtagctggtctacttacaagaattawtttttccttgaccttttagattaaagcccttcatttaatatgattgcttgagagcgaacaaatcaactttctgcatggggtgttgaggcccgtgttccgttccttgacaaaaacttcatcaatgtagctatggacattgatcctgaatggaaaatggtatgtacaccggacatcaacttttattgcagttatttttcttatattgtaaccagtactgtcactttctaacacttattatcctgtaaattttagataaaacgtgatcttggccgtattgagaaatgggttctccggaatgcatttgatgatgaggagaagccctatttacctaaggttgcaaaaagttaaactttttgagtcgtatttgacctataatgtacataaacttccataatgtgcttaaacttataatttatwcgtcttgcacagcacattctaatacaggcaaaaggagcaattcagtgatggtgtwtgggtacagttggattgatggawttgaaggatcatgcaaatgaaccatgktatacykgtctttctactggtyttwaaaactattggacaacttaagcggttwacmatttttcwagccctacaggttntgktttgawt

SEQ ID NO: 2014 - DNA, 1000 bp, Oryza sativa; identical to SEQ ID NO: 2006
  misc_feature (1)...(1000): n = A,T,C or G

SEQ ID NO: 2015 - DNA, 842 bp, Oryza sativa; identical to SEQ ID NO: 2007
  misc_feature (1)...(842): n = A,T,C or G

SEQ ID NO: 2016 - DNA, 600 bp, Oryza sativa; identical to SEQ ID NO: 2008
  misc_feature (1)...(600): n = A,T,C or G

SEQ ID NO: 2017 - DNA, 618 bp, Oryza sativa; identical to SEQ ID NO: 2009

SEQ ID NO: 2018 - DNA, 727 bp, Oryza sativa; identical to SEQ ID NO: 2010
  misc_feature (1)...(727): n = A,T,C or G

SEQ ID NO: 2019 - DNA, 640 bp, Oryza sativa
  misc_feature (1)...(640): n = A,T,C or G
tcgcgcacgccgccgtgggcgggttcgtgacgcacggcgggtggaactcgacgctggagagcctgtggttcggcgtgccgatggtgccgtggccgctctacgcggagcagcacttgaacgcgttcacgctggtggccgccatgggcgtggccgtggccatgaaggtggacaggaaacggaacaacttcgtcgaggcgtccgaggtggagcgcgcggtgaggtcgctgatgggtgggtcggaggaagggaggaaggcaagggagaaggcggcggagatgaaggccgtgtgccggaaggctgtggaggagggtgggtcgtcggacatggcggtgcacaagctctacgaggagctctccacgcagacggcttaaaatactactctctctgttccgtttcaggttataaaatattttgacttcacttaaagttaaattatttaaaatttgattaagataatagctgctgcatgaaccgggagatgaagtcctcgccgccgcggaagtccgggagctcctcggcggggaggcaktggaaccggacgtcgaarcccggagtkctccggaagcgccgggccgctttaaggggggawtaaayccgggsrawttyggggccccccgttggranyccgggaaatttgccc

SEQ ID NO: 2020 - DNA, 843 bp, Oryza sativa
  misc_feature (1)...(843): n = A,T,C or G
kgagctggcagactacgatagttcgatacttaccgtatcttgtgcatactcgctgcctgatactccgtatttatgttagctatatggatgacatgtgggccatttcttgcgtgagcttccgcaacgccgctatcgacgacccgcctccgtccacggcgttccggcacgccgccttcgccgccgccgccttctccctcgccatcctcccctcctccgatccctcgtccatcaggcaccgcaccgcgcgctccagctccgccgcctccaccaagttgccccgcttcctgtccacctccatctccacggcgacgcccatgtcgcgcacgagctcgaaacgcgttcaggtgctgctccgcgtacagcggccacggcgccatcggcacgccgtgccacaggctctccagcgtcgagttccacccgccgtgcgtcacgaagccttcccacggcggcsttggcccaggatgtcccttctgcgggcgcccacgtygggccacacatkgcccctccccttggtcctctycarggaacccctccggsargaactccttcggcstcggcgttccttcgggtwmggccaaccgccrggttgmaagaccckccarcacccaacaggaaaccgtttcccccttgccctcraasmccgccggctattytcaacamcttnsggcggcgcmaaactcnccawtcctcccgmaacsnnaggacwacaacctmwgtcctcggattcgcctttkaanccacsnnaccnaycyctgaggctttyckmggcggctytyttaaacwnaatcacggggccmmnccctctwttttatgcnnacanctctgycccgcncacacacsctc

SEQ ID NO: 2021 - DNA, 795 bp, Oryza sativa
  misc_feature (1)...(795): n = A,T,C or G
tktggttcattgggagtggcagactataatgttttgacactgcaaatgtccaagcctcccacgttccgttacaagagtggacaatatatgtttgttcaatgtccagcagtgtctccctttgaatggtacttggtgcttttcagctgaaatttaattgaattatgtacactggataacattgctaagatagattacttctaattttcatgtgtagtgcatatgtacgaaaggcaaactcagggcaattaatctaacattaacatttattgtctcttgtaggcatcccttctcaattacttcagcacctggggatgactacctcagcattcatgttcgacaacttggtgattggacacgagaactcaagagagtatttgctgcagcttgtgagcccccagcgggtggtaaaagcggccttcttagggcagatgagacaactaagaaaatgtatgaacactccctatgtttaccacaacaaaattttgtactttgtgtgcactaacatttataattttgtccttttggctatgcagcttacccaagcttctgattgatggaccgtatggttctcctgctcaggattacagcaagtatgatgttttattacttgttggattaggaattggtgcgacaccctttattagcatattaaaagatcttctgaataacatcatcaaaatgggaggaaaagaaggtatgtttcygccaatgtcctcccaagtatgccagttnatnanaawwtacccctttccctnacaagccnaaacnycttggngtnawttanrtaaccnttnn

SEQ ID NO: 2022 - DNA, 848 bp, Oryza sativa
  misc_feature (1)...(848): n = A,T,C or G
agantaacggcagtgcaagcttgccaaggagctggcagactatcagtaactttcttagcaggtggccatatatccaggtaatgttttgacactgcaaatgtccaagcctcccacgttccgttacaagagtggacaatatatgtttgttcaatgtccagcagtgtctccctttgaatggtacttggtgcttttcagctgaaatttaattgaattatgtacactggataacattgctaagatagattacttctaattttcatgtgtagtgcatatgtacgaaaggcaaactcagggcaattaatctaacattaacatttattgtctcttgtaggcatcccttctcaattacttcagcacctggggatgactacctcagcattcatgttcgacaacttggtgattggacacgagaactcaagagagtatttgctgcagcttgtgagcccccagcgggtggtaaaagcggccttcttagggcagatgagacaactaggaaaatgtatgaacactccctatgtttaccacaacaaaattttgtactttgtgtgcactaacatttttaattttggccctttggctattcagcttacccaagcttctgattgatggaacgtatgggtttcctggtcaaggttttcgccaggtttaaggtttaatggaaggttggattaggaaattgtttgaacaccctttttttgcgctttttaaaaaatttccttgaaaaacttcctttaaaaattggggggaaaaaaaggggtttttttttcctccagggtttttttcctcagaattatgtccggggggagaaaaaaaaaaattaccctttttttctctttcatttgttgatg

SEQ ID NO: 2023 - DNA, 907 bp, Oryza sativa
  misc_feature (1)...(907): n = A,T,C or G
gctcggnaagcgccacataagtttaatgataccagtcaagcttgccaaggagctggcagactagaaaggacctttctccaatttggtcgtgcaaaatgtgtccggacctgaaaaacaagtgcagtgacaattaaatggacaaggcaaatgtgatttctattaactttgagttctttacgataataaccagtgaggtgaaaaacttaatatcaaacaaaacagctttacagcatccgtgtggagatgttaaacgtcctgccaatacttacttttgtcccagagacaatatcaactccattcttggcatggttcagagcttggagcatggtgatgagtgctgacctggcatccccctcctcatagacgcttgttaggtagttgtgcatctcaatgatattctagcatgaatcaaaggcaaccgtaactacaagttcacaaggaaatgcatggcaaatttctgaagacaaacaaactgcactggaaaaaaaacaattggtctatttaccctttgatccaagtcagcaatttcattcatgactcctttgaaccaatcaaaagagccttgctcacgtgtcacccagtaaaagtaagcatttgtggtcttcaagatcttctttggtcttgagggaaatggtaatagtgttcccagattaacatgtgggctaattcgggccccattgggtggataaagattccggttgaagcattcctggaaaatccgggggaaaacggggggaaccccggaaaaactttaaggggcccgccttaaaaaacccgtaaaattgggggttcctattttttttccccccaaaagaagggtttaagcccctttttttagggggaaaaagggatattatttttttttttttccctcgcggaaacaaggggggggacagaacttcttggg

SEQ ID NO: 2024 - DNA, 548 bp, Oryza sativa
  misc_feature (1)...(548): n = A,T,C or G
ngtanaacgcgggccagtgccaagcttgtcacgtaacgcaataaagcacatgttgatcttgacacccttatgaggattactcaaaaccaaagagggttttgaagacaacaaatgcttatttttattgggtgacacgtgaacaaggctcttttgattggtttaaaggagtcatgaatgagattgctgaactagatcaaagggtacgtgggtaacttatgtgagctaagccatatattttaagtaatgtaatgttctattttgcatctttttcttacaacctttcttcttgatttataccagaatattattgagatgcacaactacctcacaagtgtttacgaggaaggggatgctcggtcagcactcattactatgctgcaagctctaaaccatgccaagaatggtgttgatatagtatctggaactaaagtaagtcacgtctcaccacttgacctcatgctgtactcctataatttgcatcattgttatttgaacttaactattctattactttttttgcaggtccgtacacattttgcaaggccaaa

SEQ ID NO: 2025 - DNA, 713 bp, Oryza sativa
  misc_feature (1)...(713): n = A,T,C or G
ttaactacggcangtgcaagcttgcccaaggagctggcagactagtgctgacctggcatcccctctcatagacgcttgttaggtagttgtgcatctcaatgatattctagcatgaatcaaaggcaaccgtaactacaagttcacaaggaaatgcatggcaaatttctgaagacaaacaaactgcactggaaaaaaaacaattggtctatttaccctttgatccaagtcagcaatttcattcatgactcctttgaaccaatcaaaagagccttgctcacgtgtcacccagtaaaagtaagcatttgtggtcttcaagatcttctttggtcttgaggtaatcgtcataagtgtgcccagatcaacatgtggcttattccgacccattggtggataaagatcagtagaagcatcctgcaaatacggagaaacagaggacaccgaaaacataaggcacagctaaaaacgtaaatggttactatactacacaaagaagataagcatgataaggaaaagagtaatattttatktacttgcaatactaggaagacaactgcagaaaacatacctcctcttcctccattttgatgatgttattcagaagatcttttaatatgctaataaagggtgtcgcaccaattcctaatccaacaagtaattaaacatcatacttgccggaatcctgagccrggrgaaccatwcgggycmtcaatttt

SEQ ID NO: 2026 - DNA, 910 bp, Oryza sativa
  misc_feature (1)...(910): n = A,T,C or G
kgtanattacgggcagntgcaaggcttgcccaaggagctggcagactagtgctgacctggnatcccctcctcaatagacgcttgttaggtagttgtgcatctcaatgatattctagcatgaatcaaaggcaaccgtaactacaagttcacaaggaaatgcatggcaaatttctgaagacaaacaaactgcactggaaaaaaaacaattggtctatttaccctttgatccaagtcagcaatttcattcatgactcctttgaaccaatcaaaagagccttgctcacgtgtcacccagtaaaagtaagcatttgtggtcttcaagatcttctttggtcttgaggtaatcgtcataagtgtgcccagatcaacatgtggcttattccgacccattggtggataaagatcagtagaagcatcctgcaaatacggagaaacagaggacaccgaaaacataaggcacagctaaaaacgtaaatggttactatactacacaaagaagataagcatgataaggaaaagagtaatattttatttacttgcaatactaggaagacaactgcagaaaacatacctcctcttcctccattttgatgatgttattcagaagatcttttaaatgctaataaagggtgtcgcccaattcctaatccacaagtataaacctcaacttgccgtawccygrcmggggaacctagggycncmatcgaaacttgggaacccctwtcccaagggcaattttaagtkttccccmagtnaaaattkttkggtamacacgggggntyncmtcacctnnnnkcynyycccaaagrgggttacacccsgggkgagagccnaaanatntttttkntacacatnanaacctatctccccttwtataaaaacacattctccwcatagywctacrcwnwct

SEQ ID NO: 2027 - DNA, 590 bp, Oryza sativa
atggggacatgtgagtgatggaccaggcaatcagagctgacttgcatctcttcttcatacacgcttgtaaggtaattgtgcatctctattacatttctgtatgagacagtgattatgttagtatctatttattaatctgaaggagagaacatggaagttgcactgaagcagttagactgagtagtacatcatgatcactttcagcaacatcattcatcacgcctttaaaccattcaaaggaaccttgctctctggtgacccagtagaaataagctcttcctggcccattgctcttaaaggtgcagcctaactcagcatcatgcgtgctttgcacatcctgttgaatccaattcactttagatattatgcacttggtttactgtataagaaagaatttgctatagttaagcagtttactccattggattttatgttgttcaggagatccttcagtatgctgatgaaaggcgttgctccaattccaagcccgataagcaaaagaatgtcatatttcttgtaattttgagctggtgcgccgaagggaccatcataaagattttggaaaagctaatgaagaagaccaaagttag

SEQ ID NO: 2028 - DNA, 689 bp, Oryza sativa
ttaggattcatggagctggcagactatcaagataaagattagttagattgaagcatgtaaataactattttggcatatggatgcttggaggaattttagaaaggacctttctccaatttggtcgtgcaaaatgtgtccggacctgaaaaacaagtgcagtgacaattaaatggacaaggcaaatgtgattttctattaactttgagttctttacgataataaccagtgaggtgaaaaacttaatatcaaacaaaacagctttacagcatccgtgtggagatgttaaacgtcctgccaatacttacttttgtcccagagacaatatcaactccattcttggcatggttcagagcttggagcatggtgatgagtgctgacctggcatccccctcctcatagacgcttgttaggtagttgtgcatctcaatgatattctagcatgaatcaaaggcaaccgtaactacaagttcacaaggaaatgcatggcaaatttctgaagacaaacaaactgcactggaaaaaaaacaattggtctatttaccctttgatccaagtcagcaatttcattcatgactcctttgaacccatcaaaagagccttgctcacgtggtccccccgttaaagttagccctttggggcccttcagaacctccttgggtctttaaggtaaccggccaaagttgtgccca

SEQ ID NO: 2029 - DNA, 544 bp, Oryza sativa
tkaactggcrgactatcagaggatttcgggcactgaaggacgaggagggtatgtttttggttggttcttttatgatataaccttagttccctaggattgtctctcattttattgttgaattgcacaggtactttgataggtatggtattatccgtgacataatgcagaatcatcttcttcagatactagccctatttgcaatggaaactcctgttagcttggaggcagaggacataagaaacgaaaaggtttgtgcccgctccttcaataatcatcatacggcaggcagatgtaccaaattagggagggtgacccactttaattctttcatttaagatgtttcttacatgtgttgtatactttcaagtatgacacattgatcttgttaccagtgctgtacgtcagataaatttacacatgaaatcaccatttattgatcatgttatattgcttttwatattttcatccaggttaaagttctgcgttccatgaagcccctgcaactggaagatgtggtgataggacagtacaaaagtcatacaaa

SEQ ID NO: 2030 - DNA, 833 bp, Oryza sativa
  misc_feature (1)...(833): n = A,T,C or G
nmctttaaytgcagtccaagcttgccaaggagctyggcagactatngttcctttcaacttggttattcaggatttgaccactacttcgggaaaggaactagtcggagaacctgkrctnggccttncgcttctcaaatcttgtttttgaacctctcattggtcaaggcagtatataaggaatgtgcagctgatattctcagaggatttcggcactgaaggacgaggagggtatgtttttgttnggttcttttatgatataaccttagttccctaggattgtctctcattttattgttgaattgcacaggtactttgataggtatggtattatccgtgacataatgcagaatcatcttcttcagatactagccctatttgcaatggaaactcctgttagcttggaggcagaggacataagaaacgaaaaggtttgtgcccgctccttcaataatcatcatacggcaggcagatgtaccaaattagggagggtgacccactttaattctttcatttaagatgtttcttacatgtgttgtatactttcaagtatgacacattgatcttgttaccagtgctgtacgtcagataaatttacacatgaaatcaccattttatkgatcatgtyatatwgccttatattttcatccmaggttaaaagttctkgcgttccattgaagcccctggcaactggaaratwttggtrtatggrctgtacaaaagkcmttccaaggggkggnaccacataccctgggatacmccggaagrttagamcgggtccccaaggatagtgttamccccaanatwttgggagaasnkncacntntnyantanat

SEQ ID NO: 2031 - DNA, 616 bp, Oryza sativa
taaacgggacgtgcaagcctgccaaggagctggcagactaccttgcttgtggactagctgcagagcaactttgttctattggtttggtggttgctaccaagacaatttctttatgcccatcaaagaacctcgagatgctaatccacgaaaaacgatacgagaaatgcgaaagaactcaactacggaacgagggcgacccgtgaaaatacctcgatttctgactcgtgccattgaactctttcttggcaacttggacaacttataacgatcccgcggaagatcgggttaaaaaattctaaagctttcgtctcaattcatatttagccgcgagcaatctacgtttgtgatctcgtatatttcgcttctccgacatcttacttagtttccccctcatcttttagcaaaaagccgctccacagtagtaaagtctcatcttttgtattggccgaagtgacaatagtcacattgaaccctcgaatatgctcgaagatctcgaaatgatcttccagttccggggagaattcgcaaaactccgtttccataaagaatttgatggagttttcccatatttcgaccggagaatctaacatagacattactgtcaagattctgacca

SEQ ID NO: 2032 - DNA, 682 bp, Oryza sativa
ctctttttacctttgattgctccattacaagttgacaaggacctggcagactagaaactccatcaaattctttatggaaacggagttttggcgaattctccccggaactggaagatcatttcgagatcttcgagcatattcgagggttcaatgtgactattgtcacttcggccaatacaaaagatgagactttactactgtggagcggctttttgctaaaagatgagggggaaactaagtaagatgtcggagaagcgaaatatacgagatcacaaacgtagattgctcgcggctaaatatgaattgagacgaaagctttagaattttttaacccgatcttccgcgggatcgttataagttgtccaagttgccaagaaagagttcaatggcacgagtcagaaatcgaggtattttcacgggtcgccctcgttccgtagttgagttctttcgcatttctcgtatcgtttttcgtggattagcatctcgaggttctttgatgggcataaagaaattgtcttggtagcaaccaccaaaccaatagaacaaaggttagctctgcagctagtccacaagcaagggttgtaggtccattaccgtccggctcccgaccgaaactaacggggttatcccaactctcggatcggagatgctaacgggacaggaatcgaaggtcctaattttt

SEQ ID NO: 2033 - DNA, 722 bp, Oryza sativa
  misc_feature (1)...(722): n = A,T,C or G
tanngattcatggagctggcagactagtaagatgtcggagaagcgaaatatacgagatcacaaacgtagattgctcgcggctaaatatgaattgagacgaaagctttagaattttttaacccgatcttccgcgggatcgttataagttgtccaagttgccaagaaagagttcaatggcacgagtcagaaatcgaggtattttcacgggtcgccctcgttccgtagttgagttctttcgcatttctcgtatcgtttttcgtggattagcatctcgaggttctttgatgggcataaagaaattgtcttggtagcaaccaccaaaccaatagaacaaaggttagctctgcagctagtccacaagcaagggttgtaggtccattaccgtccggctcccgaccgaaactaacggagtcatcccaactctcggatcggagatgctaacgggacaggaatcgaagtccatatttttctaaattcttaaatgagagagtgaataccataccytaatttcagatttkggcytcgctttaggaactttgaataggtctttcytaaatgggcctaaaatttgggattgaaaggattaatccaaagcccaaagcctccaattttamctttttgaaaatttgaagggaaagggaaaagggggkttaaggggggaaattamcttaaaaatttttccctttanaagaaatwggggttttntyggtataaagggttnn

SEQ ID NO: 2034 - DNA, 765 bp, Oryza sativa
  misc_feature (1)...(765): n = A,T,C or G
twtngattcatggarcytggcagactamattyaaagtaatgagcttggcttgattatcttcatcmaatttagccattagaagactatcaagttctaagcgagccaaatctgaattaggtatggtattcactctctcatttaagaatttagaaaaatatggacttcgattcctgtcccgttagcatctccgatccgagagttgggatgactccgttagtttcggtcgggagccggacggtaatggacctacaacccttgcttgtggactagctgcagagctaacctttgttctattggtttggtggttgctaccaagacaatttctttatgcccatcaaagaacctcgagatgctaatccacgaaaaacgatacgagaaatgcgaaagaactcaactacggaacgagggcgacccgtgaaaatacctcgatttctgactcgtgccattgaactctttcttggcaacttggacaacttataacgatcccgcggaagatcgggttaaaaaattctaaagctttcgtctcaattcatatttagccgcgagcaatctacgtttgtgatctcgtatatttcgcttctccgacatcttacttagtttccccctcatcttttagcaaaaagccgctccacagtagtaaagtctcatctttggtatggccgaagtgacatagtcccattgaacccycsgatwatgcycgaagatcycgaaaggacyttccrttccgggggaratttcgcaaaatccsgttyccwaaagaatttg

SEQ ID NO: 2035 - DNA, 774 bp, Oryza sativa
ataatcgcggcagtgcaagcttgccaaggagctggcagactactccgatccgagagttgggatgactccgttagtttcggtcgggagccggacggtaatggacctacaacccttgcttgtggactagctgcagagctaacctttgttctattggtttggtggttgctaccaagacaatttccttatgcccatcaaagaacctcgagatgctaatccacgaaaaacgatacgagaaatgcgaaagaactcaactacggaacgagggcgacccgtgaaaatacctcgatttctgactcgtgccattgaactctttcttggcaacttggacaacttataacgatcccgcggaagatcgggttaaaaaattctaaagctttcgtctcaattcatatttagccgcgagcaatctacgtttgtgatctcgtatatttcgcttctccgacatcttacttagtttcccctcatcttttagcaaaaagccgctccacagtagtaaagtctcatcttttgtattggccgaagtgacaatagtcacattgaaccctcgaatatgctcgaagatctcgaaatgatcttccaggttccggggagatttgcaaaaatccgtttcccctaaggatttgatgggggttttccccaaattttcaacccgggaaatttttacatgggcattttcggttcaaattttttgccccaaaaagggggaaattccaggccccccggggaaaacctttttgtgtcacaaaaatctccgcggaaaaaacccgagtggtt

SEQ ID NO: 2036 - DNA, 780 bp, Oryza sativa
  misc_feature (1)...(780): n = A,T,C or G
kctggcagactacttgacagtaatgtctatgttagattctccggtcgaaatatgggaaaactccatcaaattctttatggaaacggagttttgcgaattctccccggaactggaagatcatttcgagatcttcgagcatattcgagggttcaatgtgactattgtcacttcggccaatacaaaagatgagactttactactgtggagcggctttttgctaaaagatgagggggaaactaagtaagatgtcggagaagcgaaatatacgagatcacaaacgtagattgctcgcggctaaatatgaattgagacgaaagctttagaattttttaacccgatcttccgcgggatcgttataagttgtccaagttgccaagaaagagttcaatggcacgagtcagaaatcgaggtattttcacgggtcgccctcgttccgtagttgagttctttcgcatttctcgtatcgtttttcgtggattagcatctcgaggttctttgatgggcataaagaaattgtcttggtagcaaccaccaaaccaatagaacaaaggttagctctgcagctagtccacaagcarggttgtaggtcattaccgtcggctccgacgaaatwacggrtyatccaatttcggatcggaatgctamgggmaggatygartccaawtttcaaatyttaatgggrgtgawccacccattcrattggcccyaaaatgarttttmagggaattggggraaaaacycnnncnnycttntttggggrrggkggggnaaattnawgtt

SEQ ID NO: 2037 - DNA, 782 bp, Oryza sativa
  misc_feature (1)...(782): n = A,T,C or G
ctactgtggagcggctttttgctaaaagatgagggggaaactaagtaagatgtcggagaagcgaaatatacgagatcacaaacgtagattgctcgcggctaaatatgaattgagacgaaagctttagaattttttaacccgatcttccgcgggatcgttataagttgtccaagttgccaagaaagagttcaatggcacgagtcagaaatcgaggtattttcacgggtcgccctcgttccgtagttgagttctttcgcatttctcgtatcgtttttcgtggattagcatctcgaggttctttgatgggcataaagaaattgtcttggtagcaaccaccaaaccaatagaacaaaggttagctctgcagctagtccacaagcaagggttgtaggtccattaccgtccggctcccgaccgaaactaacggagtcatcccaactctcggatcggagatgctaacgggacaggaatcgaagtccatatttttctaaattcttaaatgagagagtgaataccatacctaattcagatttggctcgcttagaacttgatagtctctaatggctaattggatgagataatcagccaagctcattaccttgaattgaggaagaaagggtagggaatctaaattcttaagatggtttgwaggttccatrccawtggaccccgagcctttcaaaacctgtagtrangggttyggaanggaanaaaattgkttaaggytcccccttntngtcccanagtcccntnntaacsccnnnanwtngtnanncanaana

SEQ ID NO: 2038 - DNA, 828 bp, Oryza sativa
  misc_feature (1)...(828): n = A,T,C or G
kgagctggcagactagggatgactccgttagtttcggtcgggagccggacggtaatggactacaacccttgcttgtggactagctgcagagctaacctttgttctattggtttggtggttgctaccaagacaatttctttatgcccatcaaagaacctcgagatgctaatccacgaaaaacgatacgagaaatgcgaaagaactcaactacggaacgagggcgacccgtgaaaatacctcgatttctgactcgtgccattgaactctttcttggcaacttggacaacttataacgatcccgcggaagatcgggttaaaaaattctaaagctttcgtctcaattcatatttagccgcgagcaatctacgtttgtgatctcgtatatttcgcttctccgacatcttacttagtttccccctcatcttttagcaaaaagccgctccacagtagtaaagtctcatcttttgtattggccgaagtgacaatagtcacattgaaccctcgaatatgctcgaagatctcgaaatgatcttccagttccggggagaattcgcaaaactccgtttccataaagaatttgatggagttttcccatatttcgaccggagaatctaacatagacattactgtcaagattctgaccaaaaaatggtacattccatgsccctcggragaamgcctttgktcgtgscaaagttcactggacattatcccrgtggtcyttttttcgggacccccaagaaatgggattgggatycgaaaamgractnttccckggccttttaaaaatawarggggcccccttntgntnngtctgygsantnngaa

SEQ ID NO: 2039 - DNA, 806 bp, Oryza sativa
aggccagttccaagcttgccaaggagctggcagactagaactcgagatgctaatccacgaaaaacgatacgagaaatgcgaaagaactcaactacggaacgagggcgacccgtgaaaatacctcgatttctgactcgtgccattgaactctttcttggcaacttggacaacttataacgatcccgcggaagatcgggttaaaaaattctaaagctttcgtctcaattcatatttagccgcgagcaatctacgtttgtgatctcgtatatttcgcttctccgacatcttacttagtttccccctcatcttttagcaaaaagccgctccacagtagtaaagtctcatcttttgtattggccgaagtgacaatagtcacattgaaccctcgaatatgctcgaagatctcgaaatgatcttccagttccggggagaattcgcaaaactccgtttccataaagaatttgatggagttttcccatatttcgaccggagaatctaacatagacattactgtcaagattctgaccaaaaaatggtacattccatgccctcggagaacgctttgtcgtgcaaagtcactgacatattccgttgtccttttcgggaccccagaaattggtttgattcgaaacggtttttctggcttttaaataagggccccttttgggcccgtaaaaaatccttaagcccgcaaaaattttccaaacccatttttcacaattgggtttttaaaaccaagggccgctttttgggaaaaccttgttttaaaaaattccaggggtttcccaccaaagtgggggggtggt

SEQ ID NO: 2040 - DNA, 936 bp, Oryza sativa
  misc_feature (1)...(936): n = A,T,C or G
tagttcmaagcttgccaaggagctggcagactatgagcttggcttgattatctcatccaatttagccattagaagactatcaagttctaagcgagccaaatctgaattaggtatggtattcactctctcatttaagaatttagaaaaatatggacttcgattcctgtcccgttagcatctccgatccgagagttgggatgactccgttagtttcggtcgggagccggacggtaatggacctacaacccttgcttgtggactagctgcagagctaacctttgttctattggtttggtggttgctaccaagacaatttctttatgcccatcaaagaacctcgagatgctaatccacgaaaaacgatacgagaaatgcgaaagaactcaactacggaacgagggcgacccgtgaaaatacctcgatttctgactcgtgccattgaactctttcttggcaacttggacaacttataacgatcccgcggaagatcgggttaaaaaattctaaagctttcgtctcaattcatatttagccgcgagcaatctacgtttgtgatctcgtatatttcgcttctccgacatcttacttagtttccccctcatcttttagcaaaagccgsttcacagtagtaaagtycaacctttggtattggccgaagtkacaatagtyccmttgaacccccgaaaatgcccsaaaatyysaaaakraytttccrgttccgggggaaaattcscaaaacccggttyccaaaaaaattttrggggggttttcccawtttgkcsgggggartwtwncatrgacactctgttagaaatnttccccananargaktntctatcwcctyctctsgaganacacttncttrtaganatacnmtnataknnntnnngtagnanncnnatantanacctctctancactcntngncngttgtat

SEQ ID NO: 2041 - DNA, 548 bp, Oryza sativa
gactctccggcagtgcaagcttgccaaggagctggcagactaggaagatatttcgagatcttcgagcatattcgagggttcaatgtgactattgttacttcggccaatacaaaagatgagactttactactgtggagcggctttttgctaaaagatgagggggaaactaagtaagatgtcggagaagcgaaatatacgagatcacaaacgtagattgctcgcggctaaatatgaattgagacgaaagctttagaattttttaacccgatcttccgcgggatcgttataagttgtccaagttgccaagaaagagttcaatggcacgagtcagaaatcgaggtattttcacgggtcgccctcgttccgtagttgagttctttcgcatttctcgtatcgtttttcgtggattagcaactcgaggttctttgatgggcataaagaaaatggcttggtagcaaccaccaaacccatagaacaaaggttagctctgcagctagtccacaagcaagggttgtaggtccctttccggtcggctcccgaacggaact

SEQ ID NO: 2042 - DNA, 445 bp, Oryza sativa
tggagctggcagactaggtggttgctaccaagacaatttcttaatgcccatcaaagaacctcgagatgctaatccacgaaaaacgatacgagaaatgcgaaagaactcaactacggaacgagggcgaccgtgaaaatacctcgatttctgactcgtgccattgaactctttcttggcaacttggacaacttataacgatcccgcggaagatcgggttaaaaaattctaaagctttcgtctcaattcatatttagccgcgagcaatctacgtttgtgatctcgtatatttcgcttctccgacatcttacttagtttccccctcatcttttagcaaaaagccgctccacagtagtaaagtctcatcttttgtattggccgaagtgacaatagtcacattgaaccctcgaatatgctcgaagatctcgaaatgatcttccagttccgg

SEQ ID NO: 2043 - DNA, 720 bp, Oryza sativa
  misc_feature (1)...(720): n = A,T,C or G
tmrttgactttgcacgacaaagcgttctccgagggcatggaatgtaccattttttggtcagaatcttgacagtaatgtctatgttagattctccggtcgaaatatgggaaaactccatcaaattctttatggaaacggagttttgcgaattctccccggaactggaagatcatttcgagatcttcgagcatattcgagggttcaatgtgactattgtcacttcggccaatacaaaagatgagactttactactgtggagcggctttttgctaaaagatgagggggaaactaagtaagatgtcggagaagcgaaatatacgagatcacaaacgtagattgctcgcggctaaatatgaattgagacgaaagctttagaattttttaacccgatcttccgcgggatcgttataagttgtccaagttgccaagaaagagttcaatggcacgagtcagaaatcgaggtattttcacgggtcgccctcgttccgtagttgagttctttcgcatttctcggaatcgtttttcgtggattagcatctcgagggtcctttratgggcataaagaaattgtcttggtagcaaccaccaaacccattggaccaagggtarctcctgcagctagtccacaagccaagggttgttaggtccattaccgtccgggntnccgaccggaamytaacggantcatccnaantntcggaaytgnnnnnncnaannggn

SEQ ID NO: 2044 - DNA, 1000 bp, Oryza sativa
  misc_feature (1)...(1000): n = A,T,C or G
tggtacctgatcaactcttcaagttcaagcttgccaaggagctggcagactagctacctttgttctattggtttggtggttgctacaagacaatttctttatgcccatcaaagaacctcgagatgctaatccacgaaaaacgatacgagaaatgcgaaagaactcaactacggaacgagggcgacccgntgaaaatacctcgatttctgactcgtgccattgaactctttcttggcaacttggacaacttataacgatcccgcggaagatcgggttaaaaaattctaaagctttcgtctcaattcatatttagccgcgagcaatctacgtttgtgatcgtaaatatttcgcttctccgacatcttacttagtttccccctcatcttttagcaaaaagccgctccacagtagtaaagtctcatcttttgtattggccgaagtgacaatagtcacattgaaccctcgaatatgctcgaagatctcgaaatgatcttccagttccggggagaattcgcaaaactccgtttccataaagaatttgatggagttttcccatatttcgaccggagaatctttacattggcattactggcaaaaatctgacccaaaaaagggcaattccaaagcctccgggagaaaagccttttcgtgcaaagttcctgggaatatccgggggtctttttgggacccccagaaaatggtttggtccaaaaagaatttctcggcttaaaaaaagaggggcccccttggttcctgttaaaaaacttttgaccgcaaaaaaatttccactggggcaattttccaaatatggggttttaaaaaaagagggggacgtttttggggcacaaaacttgattttacaaaactgggggggcttcctaaacaatggggggttttattttttaaaaaaaaaacttcgggcttaaacaccttttgctaaaaaaaggggggaaaaccactgcttccttccttttagaaaaaaaaaacgtcattaaaggag

SEQ ID NO: 2045 - DNA, 854 bp, Oryza sativa
  misc_feature (1)...(854): n = A,T,C or G
ccgtcaaatggnagagtaccccttgcttcctcaattcaaagtaaatgagcttggcttgattatcttcatccaatttagccattagaagactatcaagttctaagagagccaaatctgaattaggtatggtattcactctctcatttaagaatttagaaaaatatggacttcgattcctgtcccgttagcatctccgatccgagagttgggatgactccgttagtttcggtcgggagccggacggtaatggacctacaacccttgcttgtggactagctgcagagctaacctttgttctattggtttggtggttgctaccaagacaatttctttatgcccatcaaagaacctcgagatgctaatccacgaaaaacgatacgagaaatgcgaaagaactcaactacggaacgagggcgacccgtgaaaatacctcgatttctgactcgtgccattgaactctttcttggcaacttggacaacttataacgatcccgcggaagatcgggttaaaaaattctaaagctttcgtctcaattcatatttagccgcgagcaatctacgtttgtgatctcgtatatttcgcttcttcgaacatcttacttagtttcccccctaatcttttagcaaaaaaccggttccacagtaagtaaagtcctcaacctttggtaatgggcccgaagtgaccatttgtcccatttgaaacccctcggaaaattgcctcgaaaagatcttcggaaaatggaattttccccaggtttccccggggggagaaaattttttgcaaaaaaaacttccggtgttttcccccataaaaaaaaaattttttgagggggggggttttttcccccataata

SEQ ID NO: 2046 - DNA, 1000 bp, Oryza sativa; identical to SEQ ID NO: 2044
  misc_feature (1)...(1000): n = A,T,C or G

SEQ ID NO: 2047 - DNA, 798 bp, Oryza sativa
  misc_feature (1)...(798): n = A,T,C or G
ggnnnnnnnggnnnnntggaagyttgccaaggagctggcagactacaatctcctctgccttagagtatggttyccatggctcacttggccatcatgaccttcacaaactcctcatagtttatctgaccatcaccatcaacatcagcctcacggatcatctcatccacctcctcgtcagttagcttctcgccaagatttgtcatcacatggcggagctcagcagcggagatgaagccattttggtccttgtcaaacacccggaaggcctccttgagttcttcctctgaatcagtgtccttcatcttgcgagccatcagattgagaaactcaggaaaatcaatggttccattgccatcagcatcaacctcgttgatcatgtcctggagctcagcttccgttgggttctgccctagtgaacgcatgacagttcccaactccttggttgtgatgcaacctgtaaagttcacaagcaaccaattgtacaatcaattgctgaacagtgtagtcattataactagatactaacagaaaaactaggcacacactacacttcctaataactaataataatgtcaacatgcgtctaattggatccatacgggaatggactgtctgatcctaacactgaagtccaaacgtaattacctgtttgggtttkaaraatggaatgtkttgggtacatagccaattkcatccyccaaaagggccattcttagaagnaaaattttarnaatggggatcatccccaccaaaattcgggggnattactcyaccattaacccaatcayttntggnatw

SEQ ID NO: 2048 - DNA, 763 bp, Oryza sativa
  misc_feature (1)...(763): n = A,T,C or G
kgagctggcagactagtgtcttcatcttgcgtgccatcaggttgagaamtcaggaaagtcaatcgttccatttccatcagcatccacctcgttgatcatgtcctgaagctcagcctcagtggggttctgccctaatgagcgcatcacagttccaagctccttggtggtgatgcagcctgtccagaacgcagccattactcagttagttacatattacatgtcatcaagataaagatggtgaaagaagacacaaatacagttcaaacaatttacctctagggcacttcagtaaataataattaatgaatgattcagtaaaaaaaattattaatgtcatgtaaagatgtgaaagaagacacaaatacagttcaaacaatttacctctagggcacttataattaatgtacagtttaatgagaaagataataatggtgtgtttatcaaatcaaagcagtccccaactccgcatacaaggtcccyttttgttaaagtaggtatataacaggcaagtaattacaaatattgatttcctacagagctttcataaaattttaaccaaaataataatcccatcatctctagattttttttttggaagaagacccatcatccccyagatttggaacattawttttgggcmtggacataargtgggcscymaagcggccccatggaaattggaaccaagttttttaataaataaccytaaaagktgtatccaggttnanacaaggatnggntatgaantccknanacatnnnnt

SEQ ID NO: 2049 - DNA, 548 bp, Oryza sativa
accggccagtgcaagcttgccaaggagctggcagactacttcaaaccaacaagtaattacgtttggacttcagtgttaggatcagacagtccattccgtatggatccaattagacgcatgttgacattattattagttattaggaagtgtagtgtgtgcctagtttttctgttagtatctagttataatgactacactgttcagcaattgattgtacaattggttgcttgtgaactttacaggttgcatcacaaccaaggagttgggaactgtcatgcgttcactagggcagaacccaacggaagctgagctccaggacatgatcaacgaggttgatgctgatggcaatggaaccattgattttcctgagtttctcaatctgatggctcgcaagatgaaggacactgattcagaggaagaactcaaggaggccttccgggtgtttgacaaggaccaaaatggcttcatctccgctgctgagctccgccatgtgatgacaaatcttggcgagaagctaactgacgaggaggtggatgagatgatccgtg

SEQ ID NO: 2050 - DNA, 819 bp, Oryza sativa
  misc_feature (1)...(819): n = A,T,C or G
gawntagawtcatggagctggcagactatcctgcacattgagaaaaargaagaaaaaaaaatcaacagcatacgcaaacaaagggtttcatagttcctgaacttcagcaccatggctctwacaagaagatttatgacaatttggagggtgaaagcatcattgtaccaagattaacacaaatgttgtacaactgcaaacaaaatccaaacgaaattaccaaacattcctgagaagaaaacaaacaacaaacatgttcattcccataaccaaatgctgtcagttttcaaagctacactggttactaccaccaggagagtaactagatggcatctcacttggccatcatcaccttcacgaattcttcgtaattgatctgaccatcaccatcgacatcagcctcacggatcatctcgtccacctcctcgtctgtaagcttctcaccaaggttggtcatgacatgacggagttcagctgccgagatgaagccattctggtccttgtcaaatacacggaaggcttccttgagctcctcctcagaatcagtgtccttcatcttgcgtgccatcaggttgagaaactcaggaaagtcaatcgttccatttccatcagcatccacctcgttgawcatgtcctgaagctcagcctcagtggggttctgccctaatgagcgcatcacagttccaarctccttgggtggtnawncaacctkttcaaaaagcsgccctttacccagttaggttmcmaattacaakgtcctccagawtaaagatkgkktnaaaaaranccccanwnncggtttynacaaantttacncnttag

SEQ ID NO: 2051 - DNA, 512 bp, Oryza sativa
  misc_feature (1)...(512): n = A,T,C or G
twnngawtcatggagctggcagactatgtacaactgcaaacaaaatccaaacgaaattaccaaacattcctgagaagaaaacaaacaacaaacatgttcattcccataaccaaatgctgtcagttttcaaagctacactggttactaccaccaggagagtaactagatggcatctcacttggccatcatcaccttcacgaattcttcgtaattgatctgaccatcaccatcgacatcagcctcacggatcatctcgtccacctcctcgtctgtaagcttctcaccaaggttggtcatgacatgacggagttcagctgccgagatgaagccattctggtccttgtcaaatacacggaaggcttccttgagctcctcctcagaatcagtgtccttcatcttgcgtgccatcaggttgagaaactcaggaaagtcaatcgttccatttccatcagcatccacctcgttgatcatgtcctgaagctcagcctcagtggggttctgccctaatgagc

SEQ ID NO: 2052 - DNA, 692 bp, Oryza sativa
  misc_feature (1)...(692): n = A,T,C or G
gttaaanngngggcagtgcaagcttgccaaggagctggcagactaggatgatgctaaaaatgatccgatcagatctgacggaaaagaaaaacagtgctacaaaaagacgggactcaactgcaatgcaattcagggttcggagagatcagagcaagccttaacagattcacacagaaaaatcaagcaagaagttccatggcacaccggagagactggagagatagaaaaatgttcagcaactacaactagtacggttcggttttcttcatcagggaagacgactgaaaccagtgtttgcatccccttactaatacggcaatgcacggtttcctcctcccagggtactatgccatcatcggcaggggaagtggtgcctcacttggccatcatgaccttgacgaactcctcgtagttgatctggccgtcaccgtcgacgtcggcttcgcggatcatctcgtcgacctcctcgtcggtcagcttctcgccgaggttggtcatgacgtggcggagctcggcggcggagatkaagccgttctggtctttgtcgaacaccctgaacgcctccttgagctcctcctccgagtcggtgtccttcatcttgcgtgccatcaggttkaggaactccggggaagtcgaatggtgccgtttgccgtccgcggtcgaacctcggttgaawcaatgtccytggaanc

SEQ ID NO: 2053 - DNA, 804 bp, Oryza sativa
  misc_feature (1)...(804): n = A,T,C or G
twcaagattcatggrtgcagactagtgtttatcacattgtcaatatgagaatatgatcgtatatcacccaaattaatattggtagaatgaatatagcacaagcatggatggttttgattaacaacagaatggctacacccttgaaaagttgaaacaaacatagagtaattgaataaaccaaatcacaaagatcagagccatttttcacaaacagaaaaatcacaaacaaacagaaagcattgtctacagcataggatgtctctgaatatcaagaatttcggtttggaacatatctatccccacaaaattacatctgaacataaaattaataaagataattttagcctctgacagtatggctactggaactccccctgtgttgatccaaatgatgcttcaacttacttggccatcatgactttaacgaattcatcgtagttgatctgcccatcaccatcaacatcggcctcacggatcatctcttcaacctcctcatctgtcagcttctcaccaaggttagtcatgacgtgacgcaattcagcagcagagataaaaccattttggtccttgtcgaacacacggaacgcctccttgagctcttcctcagaatcagtawctttcawcttgcgggccawcaggkttgagaaattccrgggaaatcgaatngttccatwgccgtyagsaatcaacctcawtggamcaaggcctrggaatttytgcccccarttkgggttntkcccccaaggraaacccttgaaaagttyccaaaayccctagagkagtaaaamacacccngggararaa

SEQ ID NO: 2054 - DNA, 805 bp, Oryza sativa
tawaaatccatggarctggcagactacaaaaacaaatctctcctcccggttggaaactctgattaatatcagscaataaaaaaagtacgtagattattgttgtcgcagaacattgtgtaatcagtaatctgcacattgagaaaaagaaagaaaaaaaaatccaacagccatacgccaaacaaagggtttcatagttcctggaacttcagcaccatgctctacaagaagattatgacaatttggagggtgaaagcatcattgtaccaagataacacaaatgttgtacaactgcaaacaaaatccaaacgaaattaccaaacattcctgagaagaaaacaaacaacaaacatgttcattcccataaccaaatgctgtcagttttcaaagctacactggttactaccaccaggagagtaactagatggcatctcacttggccatcatcaccttcacgaattcttcgtaattgatctgaccatcaccatcgacatcagcctcacggatcatctcgtccacctcctcgtctgtaagcttctcaccaaggttggtcatgacatgacggagttcagctgccgagatgaagccattctggtccttgtcaaatacmcggaaggcttccttggagctcctcctycagaatcagtgtccttcaacttggcgtgccatccaggttkaaraaaactccagggaaagttcaatccgttcccattttcccwtcaggmattcmccctcsgttgaaacaaagtcccyggaaarccycagccccccagtkggggggtttcasscccccaawwkggagssscct

SEQ ID NO: 2055 - DNA, 746 bp, Oryza sativa
  misc_feature (1)...(746): n = A,T,C or G
kctggcagactaggacaggctgcatcaccaccaaggagcttggaactgtgatgcgctcattagggcagaaccccactgaggctgagcttcaggacatgatcaacgaggtggatgctgatggaaatggaacgattgactttcctgagtttctcaacctgatggcacgcaagatgaaggacactgattctgaggaggagctcamsgmancctatccggtgtatttgacaaggaccagaatggcttcatctcggcagctgaactccgtcatgtcatgaccaaccttggtgagaagcttacagacgaggaggttggacgagatgatccgtgaggctgatgtcgatggtgatggtcagatcaattacgaagaattcgtgaaggtgaagatggccaagtkagatgccatctagttactctcctggtggtagtaaccagtgtagcytttgaaaactgacagcatttggttatgggaattgaacatgttcgttgtttgttttcttctcaggaatgtttggtaatttcgtttggattttgtttgcagttgtacaacatttgtgttatcttggtacaatgatgccttcaaccctccaaaattgtcawaatcctcctggtagaaccatgggtccygaaagttcmgggaacctttgraaacccctttggtttgcsgtawnsccgktgraatttntntnncccctcccctnttnyccccaaaggkkcccrgggwnttmccgggnttmcccacaakgttt

SEQ ID NO: 2056 - DNA, 686 bp, Oryza sativa
  misc_feature (1)...(686): n = A,T,C or G
nnaagtacnnnngcctctgatagaatcactgactgccgagctggcagagtatntgacgccaaggttnatcctgtttggggacaccagggttnaggcagcttgcggnncgtccttcaagttttaacttnnacatgcacggcttggcagaccttttcaaaatctggtgaggtttaaccttnagccacaggtgccttgggattcacaaatccagcctgagcagagaccagaaaattgtttactaggtgtatcatcatggcaacaaaagcaaacatcttcagtagttcaacaaccttacctcagctgccctgtcgaagaaaaatgatgccacaaacataattcttctgtccagcgccaccaccaccattccaaatgccaccaaaagaacatttcatgtgagtgcatgcttggtcaactttaagagctttcactacatcatccctgcattttgaataactagcaccagatggtgaagccgacgcttcaaatttgccattgccatatttgtattgccctacaatcacaatgcaattagaacaaaactatcttaccaacatagaaaagataaaattgcatctccaactattgtcacagattggtcatttgtgttgatgaggatttagatttatacacatcactataaataattctaactgcagactgatggttggaaagaatatccagggaac

SEQ ID NO: 2057 - DNA, 580 bp, Oryza sativa
gtacaggcagttccagcttgccaaggagctggcagatgaatatgcattaataatgccatatcccgcaaatccatggcaatcaacccgggaaagtatcaaatacatggacaaatccgactatcccatcaccaatcccacagatctaagctcattcaatgcaacacgaagcatacaggcagatctatcaccaacaagttccgatctcaaccgcccgtctccacatcaagcagagaatcgtagcgaacccccacccagatccccatccccccgcagtcagcacagagaaaggataagccctacagattagctcctccgagacgcagggagggagtggggctcaccttgcttgtggccggcgcccttgtcgacggtgtggcactgggcgcacttggtcttgaagatcttctcgccggccttggggttgcccgggggaacctccgagaacgacgccatctccgccgccgccgctagaacgagaggaggaagaagaggcgaacttacgactctctttatttcctttttatctggctcgtgggctcgtggcgaatccgaggaacacgttccctagtaataaaccaac

SEQ ID NO: 2058 - DNA, 575 bp, Oryza sativa
  misc_feature (1)...(575): n = A,T,C or G
ngactcgattcttggaagtggcgactagggcagcgctcttcggaatcgccaagagcccacgagccagaaaaaaagggaaaaaagagagtcgtagttcgcctcttctttctcctctcgttctcgcggcggcggcggagatggcgtcgttctcggaggctcccccggggcaacccaaggccggcgagaagatcttcaagaccaagtgcgcccagtgccacaccgtcgacaagggcgccggccacaagcaaggttgagccccattcccttccttgcgtctcggaggagctaattctgtagggcttatcctttctctgtgctgaatgccgggggaaggggatctgggttggggttcgctacgattctctgcttgatgtggagacgggcggttgagatcggaattgttggtgatagattcgcctgtatgcttcgtgttgccatgaatggtgcttagatctgtgggattggtgatgggatagtcggatttgtccagtaattgaaaccttcccgggttggatgccaggatttgccggatatggccttattaatgcctattccgttagggcgcttcgcccctt

SEQ ID NO: 2059 - DNA, 508 bp, Oryza sativa
  misc_feature (1)...(508): n = A,T,C or G
tcaactttacgccttttagcagagaatgaattcgctagataaatatgccgggaagcttaattttctccttaacaatcttctgctgaayttgtccctgtttccgccaacaaacggaggctgcagaatataataagagtgtncatgggttcaaaaggatatatagaatcaaaccatctgtaatgcaaacacatctttctatgccacaaacatcgtgctttaaataactaacctttcctgtaagcatttcaaacaaaaggattcccacactccaccagtcagcagccttatcatgaccacggccctggaacaatttctggagccatgtactcaacagtaccacacattgagtttgatctagtgttttcatcaaattcctttgccaggccaaaatcagtcagcatggcctaaataagacaatgaaaaatttccgtaaattcccaaataccaatcagtagataaagtcagagaaggtgaagaaaaatatgtattaaaggatccttacatgtcc

SEQ ID NO: 2060 - DNA, 570 bp, Oryza sativa
tgagctggcagactaggtgcggtgaatcatagcaacttggcaaacaacttacgccttttagcagagaatgaacttcgctagataaatatgccggaagcttaattttctccttaacaatcttctgctgaactttgtccctgtttccgccaacaaacggaggctgcagaatataataagagtgagcatgggaacaaaaggatatatagaagcaaaccatctgtaatgcaaacacatcttctatgcagaaacatcgtgcttaaataactaacctttcctgtaagcatttcaaacaaaaggattcccacactccaccagtcagcagccttatcatgaccacggccctgaacaatttctggagccatgtactcaacagtaccacacattgagtttgatctagtgttttcatcaaattcctttgccaggccaaaatcagtcagcatggcctaaataagacaatgaaaaattccgtaaattcccaaataccaatcagtagataaagtcagagaaggtgaagaaaaatatgtattaaaggatccttacatgtccatcagcatccaacaagatgttctc

SEQ ID NO: 2061 - DNA, 746 bp, Oryza sativa
  misc_feature (1)...(746): n = A,T,C or G
twnnngatycatggagctggcagactagctgatatcttttttgttgcycatttcaaggccatgctcmtgactttggccttgccaaagaatttaatgagaatacaagatcaaactcgatgtgtggaacagttgagtatatggccccagagattattcttggtcgggggcatgataaggcagctgactggtggagtgttggaatcctcctctttgaaatgctcacgggaaaggtgtgctgccaacttgcatgagagggtaatcttcccatttgcattcattcattgctaaataatcccttactctttgcaacacgctgcagcctccgtttgttgggaacagggataaagttcagcagaagatagtgaaagagaagctgaagcttccatcgtttttgtccagtgaagctcattccctcttgaaaggagtaagtttcttaatgcattcgatcacagtatcaaattcctatgttgtgtttcttatctgaaaaagatggcaatccgttgtccatttcagctgctccacaaagaaggtggcaagcggctaggaagcggtccgggcggcagcgatgagataaagaggcacaaatggctcaaaccgatcaactggaggaagctggaggcccggcagatccagccgagcttccgacccaacgttaaccgggctcacttgcatygccaaattygacsaattcytggaccagcattgccggttcytggamtygccggttkgcmacccctgtttnccgg

SEQ ID NO: 2062 - DNA, 912 bp, Oryza sativa
  misc_feature (1)...(912): n = A,T,C or G
gacgccngtccaagcgttgcaaaggagctggcagctagtctttaacatcgccctcttataaacaggaatgttggcatagctcaacactgaattgctcagcaataggctgtttgttacataaatcttcattaggataaagccagataaggggaaaaccaacacagcaaccgtactactgtactacataaaaatataaaatttggggaacagcaataccttcagttcatcgacgtcaaccttcagaaaaacagcatttgtgtgcttctttgctagatcggcaaaaactggagcaatgatgcggcatggtccgcaccatgatgcagtgaagtcaatcacaacctgttatgacgaaaaccaggttaacacacttttgtggtattgctaattcaacatttcaacaattcaaatgactgcaatcagaactaaaatgttatcgaaaaacatatatagttatatacatgaagtgactgtaatagttcccaacctttggactctattaccaaccttaggacagcaagtctacacaaaattgcaaacttcacttatcaaacatctgcatttctgaagcaacatgatacggctcccataaagttagcccatgattttcaggctctagtgttggttaaggttaatccatgcaaattttgaacctaaggaaattctcccaaaaagtatcgcccattgatttttaggggcctcaaaagtggtggggttaaagtttaaaccccattccaaaaattttttaaaacctttcaagggacatttctctcccaaaaaaagggttattccccacaataaagatttttaaagggggcccccataatggtgtgggggaaaaaggtaaaaccccctgccaaaaattttttaacccccccccctcacaagagaaaactagttttgaggtaataattc

SEQ ID NO: 2063 - DNA, 753 bp, Oryza sativa
  misc_feature (1)...(753): n = A,T,C or G
gtanctggcagactaggggaacagcaataccttcagttcatcgacgttaaccttcagaaaaacagcatttgtgtgcttctttgctagatcggcaaaaactggagcaatgatgcggcatggtccgcaccatgatgcagtgaagtcaatcacaacctgttatgacgaaaaccmrggttaacacacttttgtggtattgctaattcaacatttcaacaattcaaatgactgcaatcagaactaaaatgttatcgaaaaacatatatagttatatacatgaagtgactgtaatagttcccaacctttggactctattaccaaccttaggacagcaagtctacacaaaattgcaaacttcacttatcaaacatctgcatctctgaagcaacatgatacggctctcataaagtaagccatgatttcaggctctagtgtggttaagttaatcatgcaaatttgacctcagcactctcctaaagtatgccatgattttaggctctagtgtggttaagttaatcatgcaaatttgacctcagcactctcctaaagtatgccatgattttaggctctagtgtggttaagttaatcatgcaaatttgacctcctgcaggaacaattggrgcacactggactwcggataagggkcgatcccaaatgkggaaaattaattccyataatcgsggtwaaaccgrcccgaaatytkgaaaaacccggaattttnnaaaaagggkcccncccntnnnnnnctnttnggss

SEQ ID NO: 2064 - DNA, 423 bp, Oryza sativa
ttggagctggcagactactagagcctaaaatcatggcatactttaggagagtgctgaggtcaaatttgcatgattaacttaaccacactagagcctgaaatcatggcttactttatgagagccgtatcatgttgcttcagagatgcagatgtttgataagtgaagtttgcaattttgtgtagacttgctgtcctaaggttggtaatagagtccaaaggttgggaactattacagtcacttcatgtatataactatatatgtttttcgataacattttagttctgattgcagtcatttgaattgttgaaatgttgaattagcaataccacaaaagtgtgttaacctggttttcgtcataacaggttgtgattgacttcactgcatcatggtgcggaccatgccgcatcattgctccagtttttg

SEQ ID NO: 2065 - DNA, 912 bp, Oryza sativa; identical to SEQ ID NO: 2062
  misc_feature (1)...(912): n = A,T,C or G

SEQ ID NO: 2066 - DNA, 753 bp, Oryza sativa; identical to SEQ ID NO: 2063
  misc_feature (1)...(753): n = A,T,C or G

SEQ ID NO: 2067 - DNA, 423 bp, Oryza sativa; identical to SEQ ID NO: 2064

SEQ ID NO: 2068 - DNA, 912 bp, Oryza sativa; identical to SEQ ID NO: 2062
  misc_feature (1)...(912): n = A,T,C or G

SEQ ID NO: 2069 - DNA, 753 bp, Oryza sativa; identical to SEQ ID NO: 2063
  misc_feature (1)...(753): n = A,T,C or G

SEQ ID NO: 2070 - DNA, 423 bp, Oryza sativa; identical to SEQ ID NO: 2064

SEQ ID NO: 2071 - DNA, 600 bp, Oryza sativa
  misc_feature (1)...(600): n = A,T,C or G
sttctcsgctnytggggctcyncttmgggtccggtgcacggttcagcacgccgtgccccagggacgccttgatttgctscggcttggtgykttncggcwgccgggamcctgncktaaggcaacttgccgctgctgttactccacgcggtgccacttgtccgtcttctcctcctgctccttgaatgcgctcgccgctgmatctggaggaacgttkccgtcctcaacctccacctygggktyctcctkcttcagccccggcamgtccgccttgaaacacgtcckcctsgggcgtmtccttccagtcgagagcgcrcaggcsaaggcsgmagtttmggactcratgyccasgtaacagccyacggmtkacgcttactangagcaagccaccgmaascganccgaagccaacggaagacccswaaaaayasgttgcyaaaacckanggcaagcttggcmcwggccgycgsgtaaaywacgtcgtgammgggaamacsctggcgaatmcccaacttaaacgcctagcwgcawaaacssccaaaacgccannnnnnmcmwtycarttnaaatggcaatcacnktcyccawaaargccagttnnnma

SEQ ID NO: 2072 - DNA, 625 bp, Oryza sativa
  misc_feature (1)...(625): n = A,T,C or G
tagccaagggaaaccatcacatgaacatcatcaattttcatagtcaacagtacaaattgcaactgcccacttcattaccaagtctctgccagcatcaactaatctcgataawtcycatgtgawgtgcacawtttcyggccttgscaaagaactatcaagcaggcaactcaagcttcacattgttcttccaactgcaacaaccgacatggaattgtcagtacccagagagtctgcaaatgaggtttgacaacagtatccagtttaccttaagaaatagtagtagaagaaatccgcataaagagctgtttggaccaaaccagcaatccaagctggaagaaacagatcgtcagaacttcttttcatatatagaacatgggatatgaaacacaagcatacgaggggcaggcgcttacggatccatctgctgtggtgaccctcagtgaagtaacggtaaatccagtttaggatgtaaaatgcmcggtaggccctgcaaaacmagtattgtgagacttkwaagagacccactkgggacccykaarccytttgaaacgktymccmtttttaarcmtnycccccawaccssaaattkgggccmmngtktttttttaaaaaaatttkgggsscc

SEQ ID NO: 2073 - DNA, 798 bp, Oryza sativa
  misc_feature (1)...(798): n = A,T,C or G
ttwncgattcatggagctggcagactagtgatgtgcacattttctggcgtggcgaagaactatcaagcaggcaactcaagcttcacattgttcttccaactgcaacaaccgacatggaattgtcagtacccagagagtctgcaaatgaggtttgacaacagtatccagtttaccttaagaaatagtagtagaagaaatccgcataaagagctgtttggaccaaaccagcaatccaagctggaagaaacagatcgtcagaacttcttttcatatatagaacatgggatatgaaacacaagcatacgaggggcaggcgcttacggatccatctgctgtggtgaccctcagtgaagtaacggtaaatccagtttaggatgtaaaatgcacggtaggccctgcaaaacaagtattgtgagacttgaaagagaccaactgggaacctagaagcatgtcgatcgttcactatttaaagcatgccctaatccgaatctggacacaatgtatattaaaaaaatgtaggcttaattaatcaagcctagaactaaccaggaaaaatggaagatcgacgaaagagaactaagaatagatgggatgcagctactgcagatagaaccttaaatctgtaaatacccaaactaattgtaaagtcccctccggtttcctccttcggtttccttccyttcactaaaaacttttgtaccaacctccatttyctaattaagggaaatgggctataagggtaaarccmagctytaaccttctttamggtycnnanaanagaattnganwgngnatnca

SEQ ID NO: 2074 - DNA, 668 bp, Oryza sativa
  misc_feature (1)...(668): n = A,T,C or G
tannattcatggagctggcagactagtatcagtttacttaagaaatagtagtagaagaatccgcataaagagctgtttggaccaaaccagcaatccaagctggaagaaacagatcgtcagaacttcttttcatatatagaacatgggatatgaaacacaagcatacgaggggcaggcgcttacggatccatctgctgtggtgaccctcagtgaagtaacggtaaatccagtttaggatgtaaaatgcacggtaggccctgcaaaacaagtattgtgagacttgaaagagaccaactgggaacctagaagcatgtcgatcgttcactatttaaagcatgccctaatccgaatctggacacaatgtatattaaaaaaatgtaggcttaattaatcaagcctagaactaaccaggaaaaatggaagatcgacgaaagagaactaagaatagatgggatgcagctactgcagatagaaccttaaatctgtaaataccaaaactaatgtaaagtcccctccgtttcttcttcgtttccttccttcactaaaactttgtactacctcatttctattaaggaaatggctataaggtagagccagctctaccttcttacgtcaaaaaaagaatagatgggatgcatttcatgtgccmaaaatttatgaccagcaat

SEQ ID NO: 2075 - DNA, 578 bp, Oryza sativa
  misc_feature (1)...(578): n = A,T,C or G
kgarctggcagactaggttwggscatcctcaagctgcttaccagcaaagatcagacgctgctggtccggggggatgccctccttgtcctggatcttsgccttnacgttgtcaatagtgtcsgacgactcaacctcaagggtaatggtcttgccagtcagggtcttcacgaagatctgcatcccaaccctgagcctgagaaccaggtkaagggtggactccytctggatgttgtagtyagccaaggtgyggccatcctccagctgcttgccggcgaagatkaggcgctgctggtccggggggatrccctccttgtcctggaycttggccttgacrttgycgatcgygtccgaggactcgamctcgagcgtgatggtcttgccggtcagggycttracsaagatctgcatagcctscsttasccwgagnrynaktnycagggtggactccttctggatgttgtagtcggcaagggtkcggccgtcctccagctgcttgccagcgaagatkagacgctgctggtyccsgggggatgccctcccttgtcctggatcttnggcctkgacattggtcgatystt

SEQ ID NO: 2076 - DNA, 748 bp, Oryza sativa
  misc_feature (1)...(748): n = A,T,C or G
gaannnnnnnggcagtngcaagyttgccaaggagctggcagactaggcaagatccaggacaagagggcattcccccggaccagcagcgtctcatctttgccggcaagcagcttgaggacggcaggacccttgctgactacaacatccagaaggagtcaacgcttcaccttgtcctccgtctcaggggaggcatgcaaatcttcgtgaagactctgaccggcaagaccatcaccctcgaggtggagtcttctgataccatcgacaatgtcaaggccaagatccaggacaaggagggcattcccccggaccagcagcgcctcatctttgctggcaagcagctggaggatggcaggacccttgctgactacaacatccagaaggagtccaccctccaccttgtgctccgccttcgtggtggtatgcagatctttgtcaagaccctcacaggcaagaccatcaccctggaggttgagagctcggacaccatcgacaacgtcaaggccaagatccaggacaaggagggcatccccccagaccagcagcgtctcatcttcgccggcaagcagctcgaggatggccgcaccctygccgactacaacatccagaaggagtttacccttcaacctgggtgctttsgtctccgttggttggtatkcmgaatytttcgtkaaaaacctttaacttgggaaaraccmttamcttttkggagggtttaaaarcytccggammcccmttttggaaaawkttt

SEQ ID NO: 2077 - DNA, 596 bp, Oryza sativa
  misc_feature (1)...(596): n = A,T,C or G
tacggaggcggagcaccaggtggagggtggactccttctggatgttgtagtcggcgagggtgcgtccatcctccagctgcttgccagcgaagatcagacgctgctggtctgggggaatcccctccttgtcctggatcttggccttgacattatcaatggtgtcggagctctcarnctccaaagtgatggtcttcccagtcaaggtcttcacgaagatctgcataccaccacggagacgaagcaccaggtgragggtagactccttctggatgttgtagtcggcragggtgcggccatcctcgagctgcttgccggcgaagatgagacgctgctggtctggggggatgccctccttgtcctggatcttggccttgacgttgtcgatggtgtccgagctctcaacctccagggtgatggtcttgccggtgagggtcttgacaargatctgcatrccaccacgaaggcggagcacaaggtraagggtngactccttctggaatgttgtagtmagcaagggtcctgcmatcctcmagctgcttgkcnggcaaagattagrcsctgctggtcctgggggaawtgcctcctttkgccctggr

SEQ ID NO: 2078 - DNA, 707 bp, Oryza sativa
  misc_feature (1)...(707): n = A,T,C or G
tccaaggagctggcagactaggttgttttttcattgtttactccatgattataacaagaaatagatcatccgtgttccagcttctgtcttgattgattttctcataagccttcttatgtacagatgcagatctttgtgaagacactcactggcaagaccatcaccctcgaggttgagtcctctgatacaattgacaatgtgaaggccaagattcaggacaaggagggcattccacctgaccagcaacgtctcatctttgctggcaagcaactagaggatggccgcaccctcgcggattacaacatccagaaggagtccaccctccaccttgtccttcgcctcaggggaggcatgcagatctttgtgaagaccttgacaggaaagaccatcactcttgcggtcgagtcctcggacaagatcgacaatgtgaaggcgaagattcaggacaaggagggaattcccccggaccagcagcgcctcatctttgcagacaagcagctcgaggatkgacgtwmactggctgratttcaacattymgaaggggttccmccttggcmcctgggtgctccggcctccgktkttggcccggtaaggttycaaaatgtttttggctaassccytggttggggccggttggccttttgscsccaaaattgaaaggtttttgttaaaaggggggtttwaggttttcmaaagtttccccccan

SEQ ID NO: 2079 - DNA, 683 bp, Oryza sativa
  misc_feature (1)...(683): n = A,T,C or G
atactrkctccaccaaactggctgattactgaccaccacggaggcggagcaccaggtggagggtggactccttctggatgttgtagtcggcgagggtgcgtccatcctccagctgcttgccagcgaagatcagacgctgctggtctgggggaatcccctccttgtcctggatcttggccttcacattatcaatggtgtcggagctctcaacctccaaagtgatggtcttcccagtcaaggtcttcacgaagatctgcataccaccacggagacgaagcaccaggtggagggtagactccttctggatgttgtagtcggcragggtgcggccatcctcgagctgcttgccggcgaagatgagacgctgctggtctggggggatgccctccttgtcctggatcttggccttgacgttgtcgatggtgtccgagctctcaacctccagggtratggtcttgcctgtaagggtcttgacaaagatctgcataccattnngaaggcggagcacaaggtgaagggtgractccttctgggatgtttgtagtcagcaaggggtcctgccaatcctcmaagctgctttcccrscaaaaaattargccccytcctggtcccggggggaaanccccyccttggcccgggaantttgggcctttaaaattttnsggaagggttctcaaaaagar

SEQ ID NO: 2080 - DNA, 573 bp, Oryza sativa
tgcaagggtgcggccatcctcgagctgcttcccagcaaagatgagacgctgctggtctggtgggattccctccttgtcctggatcttggccttcacattatcgatcgtgtcggaggactcgacctccagggtaatggtcttgccggtgagggtcttcacgaatatttgcatgcctccacgaaggcggaggacaaggtgcaaggtggactccttctggatgttataatccgcgagagtacgcccatcctcaagctgcttgccagcgaagataaggcgttgctggtccggagggatgccctccttgtcctgaatcttagccttcacattgtcaatcgtatcggagaactcaacctccaaggtgatggtcttgccagtgagggtcttaacgaatatctgcatctggaagaggcaagaaaggattggaattaacataggtaaaaaaaagcagctggagaataagttggcaccagatcctacgatatcggtactgtcacctcamaatcgcttgaacttatcaatcacatcatacttacacttacaatttggacaggcatcatttaatcataagagcky

SEQ ID NO: 2081 - DNA, 740 bp, Oryza sativa
  misc_feature (1)...(740): n = A,T,C or G
rcagcyctnngaccgggcaagaccatcaccctcgaggtcgagtcctcggacacgatcgatggaaaggccaagatccaggacaaggagggcatycccccggaccagcagcgtctcatcttcgccggcaagcagctggargamggccgcamccttgccgactacaacatccagaaggaatccaacctccaccttgtgcttaggctcaggggaggtatgcagatcttcgtcaagaccctgactggcaagaccatcacacttgaggtcgagtcctcggacacgatcgacaatgtgaaggccaagatccaggacaaggagggcatccccccggaccagcagcgtctcatcttcgctggcaagcagctggaggacggccgcacccttgccgactacaacatccagaaggagtccaccctccaccttgtgctcaggctcaggggtggtatgcagatcttcgtcaagaccctgaccggcaagaccatcacgcttgaggtcgagtcctcggacacgatcgacaacgtgaaggccaagatccaggacaaggagggtatcccccggaccagcagcgcctcatcttcgccggcaagcagctkgaggatggccgcaacttggctgrattacaacwtccagaaggggttcamcctttaacckggttcymaggcycaggggttggawtcmraatttycttgaaaaacctgaaytgscaaaaccmtttccccytgarggtttraawtctycggnnn

SEQ ID NO: 2082 - DNA, 573 bp, Oryza sativa; identical to SEQ ID NO: 2080

SEQ ID NO: 2083 - DNA, 747 bp, Oryza sativa
  misc_feature (1)...(747): n = A,T,C or G
ctggagctggcagactaggccaccacggaggcggagcaccaggtggagtgtggactccttctggatgttgtaatccgcaagggtgcggccatcctcaagctgcttaccagcaaagatcagacgctgctggtccggggggatgccctccttgtcckggatcttcgccttcasgttgtcaatagtgtcggacgactcaacctcaagggtaatggtcttgccagtcagggtcttsacgaagatctgcatcccacccctgagcctgagaaccaggtgaagggtrgactcckktayagatgttgtagtcrgccaaggtgcggccatcctccagctgcttgccggcgaagatgagacgctgctggtccggggggataccctccttgtcctggawcttggccttcacgttgtcgatcgtgtccgaggactcgacctcaagggtgayggtcttgccggtcagggtcttgacgaagatctgcataccacccctgagcctaagcmcaaggtggamggtrgactcntttaggatgttgtagtcggcaagggttcggccrtcctccaagctgcttgccagcgaagatgagacsctgctggtccgggggratsccctcctggtctgggatntggcctntaawtgtcaawngtgtccgaggatccgntrcaaggkgaagktctgccattaagggtttgamgaaawycgcatancyccctggrcctawasccmaagtgncaggttnaaannnntnnnnnnnt

SEQ ID NO: 2084 - DNA, 750 bp, Oryza sativa
  misc_feature (1)...(750): n = A,T,C or G
cgggcgrtaggcagatctttgtagaagaccttgactggcaagacgatcactttggaggtttgagtcctctgtacacgatcgacaacktgaaggcmaagatccaggacaaggagggtattccaccagatyttnaaacggctcatcttcgctggcaagcagcttgaggacggccgcacccttgctgactataacatccagaaggagtccaccttgcacttggtcctccgccttcgtggaggtatgcagatcttcgtgaagaccctcaccggcaagaccatcaccctggaggttgagtcgtctgacacgatcgacaatgtgaaggccaagatccaggacaaggagggtattccaccagaccagcagcgcctcatcttcgctggcaagcagcttgaggatggtcgcacccttgcagattacaacatccagaaggagtccaccctgcaccttgtcctgcgccttcgtggaggtatgcagatcttcgtgaagaccctcactggcaagaccatcactctggaggttgagtcctctgacaccatcgacaacgtgaaggccaagatccaggataaggagggcatccctccagaccagcagggctcatmtttgccggcaaraactccaggatkgccsaacctttccggctwtaaatcccgaagggktcmccctggmccttttctggccccccgggggggtctaamsgktttttgtgacawgnnnncgntttannnatangcgccnscntntnanananas

SEQ ID NO: 2085 - DNA, 700 bp, Oryza sativa
  misc_feature (1)...(700): n = A,T,C or G
tackggcagactagctctcaacctccaaagtgatggtcttcccagtcaaggtcttcacgaagatctgcataccaccacggagacgaagcaccaggtggagggtagactccttctggatgttgtagtcggcgagggtgcggccatcctcgagctgcttgccggcgaagatgagacgctgctggtctggggggatgccctccttgtcctggatcttggccttgacgttgtcgatggtgtccgagctctcaacctccagggtgatggtcttgcctgtgagggtcttgacaaagatctgcataccaccacgaaggcggagcacaaggtggagggtggactccttctggatgttgtagtcagcaagggtcctgccatcctccagctgcttgccagcaaagatgaggcgctgctggtccgggggaatgccctccttgtcctggatcttggccttgacattgtcgatggtatcagaagactccaactcgagggttawggtcttgccggtyaaagtyttaccaagatttgcatkcctcccckaaaacggagrcmaggttaascgttaatccttccggawtttggarttascaagggtctgcggtctcaagctkcttgccggcaagrttrwaccctctggtccgggggaatgcctcctkgyctggatytggcttaamgttcyaaaggtntanaaaatcmccttraggkt

SEQ ID NO: 2086 - DNA, 680 bp, Oryza sativa
  misc_feature (1)...(680): n = A,T,C or G
ttggtccgggggaatgccctccttgtcctggatcttggccttgacattgtcgatggtatcagaagactccacctcgagggtgatggtcttgccggtcagagtcttcacgaagatttgcatgcctcccctgagacggaggacaaggtgaagcgttgactccttctggatgttgtagtcagcaagggtcctgccgtcctcaagctgcttgccggcaaagatgagacgctgctggtccgggggaatgccctccttgtcctggatcttggccttgacgttgtcgatggtgtcagaagattccacctcgagggtgatggtcttgccggtcagtgtcttgacaaagatctgcatgccaccacggaggcggaggacaaggtggagggtggactccttctggatgttgtagtcagcaagggtcctgccatcctccagctgcttgccggcgaagatgagacgctgctggtctggggggatgccctctttgtcctggatcttggccttgacgttgtcgatggtgtcagaagactccacctcaagggtgatagtcttgccggtcaragtcttgacaagatctgcatkccaccamggagccgtagacaaggttaaggttgaatcctcctggaakttgtattcacaagggtcytscaacctycaattgcttkcaacgaaawtaaacccncttk

SEQ ID NO: 2087 - DNA, 700 bp, Oryza sativa; identical to SEQ ID NO: 2085
  misc_feature (1)...(700): n = A,T,C or G

SEQ ID NO: 2088 - DNA, 740 bp, Oryza sativa; identical to SEQ ID NO: 2081
  misc_feature (1)...(740): n = A,T,C or G

SEQ ID NO: 2089 - DNA, 612 bp, Oryza sativa
  misc_feature (1)...(612): n = A,T,C or G
gacnnnnnnnnnnnnnngtnggnagatnaggtggatccttctggatgttatagtcagcaagggtgcggccgtcctcaagctgcttgccagcgaagatgagccgctgctggtctggtggaataccctccttgtcctggatcttggcctttcacattgtcgatcgtgtcagaggactcaacctccaaggtgatcgtcttgccagtaagggtcttcacaaagatctgcataccgccccggaggcgcaggacaaggtgcagggtggattccttttggatgttgtagtctgcaagggtgcggccatcctcgagctgcttcccagcaaagatkagacgctgctggtctggtgggattccctccttgtcctggatcttggccttcacattatcgatcgtgtcggaggactcgacctccagggtaatggtcttgccggttarggtcttcacgaatatttgcatgcctccacgaaggcggaggacaaggtgcaaggtggactccttctggatgttataatccgcgagagtacgcccatcctcaagctgcttgccagcgaagataaggcgttgcyggtccsgagggatgccctccttgtccygaatcttagccttyamattt

SEQ ID NO: 2090 - DNA, 596 bp, Oryza sativa; identical to SEQ ID NO: 2077
  misc_feature (1)...(596): n = A,T,C or G

SEQ ID NO: 2091 - DNA, 683 bp, Oryza sativa; identical to SEQ ID NO: 2079
  misc_feature (1)...(683): n = A,T,C or G

SEQ ID NO: 2092 - DNA, 642 bp, Oryza sativa
gccaaggagctggcagactaggtgcaaggtggactccttctgaatgttgtaatcagccagtgtacgtccatcctcgagctgcttgtctgcaaagatgaggcgctgctggtccgggggaattccctccttgtcctgaatcttcgscttcamattgtcgawcctggtccgaggactcgaccgcaagagtgatggtctttcctgtcaaggtcttcacaaagatctgcatgcctcccctgaggcgaaggacaaggtggagggtggactccttctggatgttgtaatccgcgagggtgcggccatcctctagttgcttgccagcaaagatgagacgttgctggtcaggtggaatgccctccttgtcctgaatcttggccttcacattgtcaattgtatcagaggactcaacctcgagggtgatggtcttgccagtgagtgtcttcacaaagatctgcatctgtacataagaaggcttatgagaaaatcaatcaagacagaagctggaacacggatgatctatttcytgttataatcatggagttaacaatgraaaaacaaccaacaccmgattcctatgaacycccagatttgaagatttcmagggtttcsggarttwtgggggggcccyttcccmttrgccccytw

SEQ ID NO: 2093 - DNA, 612 bp, Oryza sativa; identical to SEQ ID NO: 2089
  misc_feature (1)...(612): n = A,T,C or G

SEQ ID NO: 2094 - DNA, 596 bp, Oryza sativa; identical to SEQ ID NO: 2077
  misc_feature (1)...(596): n = A,T,C or G

SEQ ID NO: 2095 - DNA, 750 bp, Oryza sativa; identical to SEQ ID NO: 2084
  misc_feature (1)...(750): n = A,T,C or G

SEQ ID NO: 2096 - DNA, 748 bp, Oryza sativa; identical to SEQ ID NO: 2076
  misc_feature (1)...(748): n = A,T,C or G

SEQ ID NO: 2097 - DNA, 700 bp, Oryza sativa; identical to SEQ ID NO: 2085
  misc_feature (1)...(700): n = A,T,C or G

SEQ ID NO: 2098 - DNA, 659 bp, Oryza sativa
  misc_feature (1)...(659): n = A,T,C or G
ggagctggcagactacagaagactccacctcgagggtgatggtcttgccggtcagagtcttcacgaagatttgcatgcctcccctgagacggaggacaaggtkaagcgttgactccttctggatgttgtagtcagcaagggtcctgccgtcctcaagctgcttgccggcaaagatgagacgctgctggtccgggggaatgccctccttgtcctggatcttggccttgacgttgtcgatggtgtcagaagattccacctcgagggtgatggtcttgccggtcagtgtcttgacaaagatctgcatgccaccacggaggcggaggacaaggtggagggtggactccttctggatgttgtagtcagcaagggtcctgccatcctccagctgcttgccggcgaagatgagacgctgctggtctggggggatgccctctttgtcctggatcttggccttgacgttgtcgatggtgtcagaagactccacctcaagggtgatagtcttgccggtcagagtcttgacaaagatctgcatgccaccacggaggcngaggacaaggttaaagggtcgactccttctgggatgttggtagtyagcaaggggtccttgccattcytccargctkctttccaacckaanatttaaacccttmctggtcckg

SEQ ID NO: 2099 - DNA, 683 bp, Oryza sativa; identical to SEQ ID NO: 2079
  misc_feature (1)...(683): n = A,T,C or G

SEQ ID NO: 2100 - DNA, 713 bp, Oryza sativa
  misc_feature (1)...(713): n = A,T,C or G
ttggagctggcagactatgarktccggtatgttctgttggaatatgtgtgctgtttgatcggttgttgtgkccttaatcttgtgctagttcttaccctatctgtttggtgattagttcttgcagatgcrgatcnttgtgaagacattgaccggcaagactatcaccctcgaggtggagtcctctgacaccatcgataatgtcaaggctaagatccaagataaggagggcatgsccycggaccagcagcgtctcatcttcgctggcaagcagctggaggatggcaggacccttgctgactacaacatccagaaggagtcgacccttcaccttgtcctccgcctccgtggtggcatgcagatctttgtcaagactctgaccggcaagactatcacccttgaggtggagtcytctgacaccatcgacaanntcaaggccaagatccaggacaaagagggcatccccccagaccagcagcgtctcatcttcgccggcaagcagctggaggatggcaggaccctwgctgactacaacatccagaaggagtccaacctctaccttgtmctccgnctccgtggtggcwtgcagatctttgtcmagacctkaccggcaagacccttamcctcgaaggtksaatyttcygracmccaycgayaasgtcaaagsccanratccmtggacaawggagggtcwtwcccccggaaccnntaanyty

SEQ ID NO: 2101 - DNA, 774 bp, Oryza sativa
  misc_feature (1)...(774): n = A,T,C or G
tggagcyggcagactagctgttccacaggaaactgtttcataaaactaacatatcatacggactcgatggtccattaaaccagacacaagtagacatcagcaccacaaatacttgacgaacagaggctcgggacgaccaggcacatcggcagctccaccaaactggctgattactgaccaccacggaggcggagcaccaggtggagggtggactccttctggatgttgtagtcggcgagggtgcgtccatcctccagctgcttgccagcgaagatcagacgctgctggtctgggggaatcccctccttgtcctggatcttggccttcacattatcaatggtgtcggagctctcaacctccaaagtgatggtcttcccagtcaaggtcttcacgaagatctgcataccaccacggagacgaagcaccaggtggagggtagactccttctggatgttgtagtcggcgagggtgcggccatcctcgagctgcttgccggcgaagatgagacgctgctggtcyggggggatgcctccttgtcctggatcttggccttgacgttgtcgatggtgtccgagctytcaactccagggtgawggtcttgccgtyaaggtcttacaakkkkkgntttcmccmcgaagcggrgmcaagktkaaggkkgaccccyccggawttgtatymcmagggkctgcawcyccagtggtttcaccaaawwargcccccktccsgggaraccccntntnngrttngcnnnanatnngnayktganaganmncc

SEQ ID NO: 2102 - DNA, 710 bp, Oryza sativa
  misc_feature (1)...(710): n = A,T,C or G
ggscanttgcaaagcttgcccaaggagctggcagactaggacaaagagggcatcccccagaccagcagcgtctcatcttcgccggcaagcagctggaggatggcaggacccttgctgactacaacatccagaaggagtccaccctccaccttgtcctccgcctccgtggtggcatgcagatctttgtcaagacactgaccggcaagaccatcaccctcgaggtggaatcttctgacaccatcgacaacgtcaaggccaagatccaggacaaggagggcattcccccggaccagcagcgtctcatctttgccggcaagcagcttgaggacggcaggacccttgctgactacaacatccagaaggagtcaacgcttcaccttgtcctccgtctcaggggaggcatgcaaatcttcgtgaagactctgaccggcaagaccatcaccctcgaggtggagtcttctgataccatcgacaatgtcaaggccaagatccaggacaaggagggcattccccggaccagcagcgcctcatctttgctggcaagcagctkgaggatggcaggacccttgctgactacaacattcmgaaggaggtcmacccttcaaccttgktgctcgscytycgtggtggtatkcacaatctttggtmaakaacccttanagggsmagaacamtwacccttggaggttaaaagctcggnacccattgaaa

SEQ ID NO: 2103 - DNA, 809 bp, Oryza sativa
  misc_feature (1)...(809): n = A,T,C or G
ttcnnnnttmtggagctggnagactatgctagttcttaccctatctgtttggtgattatttcttgcagatgcagatctttgtgaagacattgaccggcaagactatcaccctcgaggtggagtcctctgacaccatcgataatgtcaaggctaagatccaagataaggagggcatccccccggaccagcagcgtctcatcttcgctggcaagcagctggaggatggcaggacccttgctgactacaacatccagaaggagtcgacccttcaccttgtcctccgcctccgtggtggcatgcagatctttgtcaagactctgaccggcaagactatcacccttgaggtggagtcttctgacaccatcgacaacgtcaaggccaagatccaggacaaagagggcatccccccagaccagcagcgtctcatcttcgccggcaagcwtntggaggatggcaggacccttgctgactacaacatccagaaggagtccaccctccaccttgtcctccgcctccgtggtggcatgcagatctttgtcaagacactgaccggcaagaccatcaccctcgaggttgaatcttctgacaccatygacaacgtcaaggccaagatccaggacaaggagggcattcccccggaccagcagsgtytmawctttgccggsaaacttttttangaatggcaggacccttggggratwaaaaattcccraaggggttaacccttnamcttggkgcyccggytccaggggrrggnttccaaaattttctgkaaaaanntnnnnnggnanannnnnnnntctcnnnna

SEQ ID NO: 2104 - DNA, 1000 bp, Oryza sativa
  misc_feature (1)...(1000): n = A,T,C or G
tttnggacccgtactcccgattagtgcaagcttgtcacgtaagatgaggcgctgctggtctggtggaataccctcttgtctggactggccttaattgtcgatcgtgtcagacgactcaactccagggtgatggtcttgccggtgagggtcttacgaagatctgcatacctccacgaaggcggaggaccaagtgcaaggtggactccttctggatgttatagtcagcaagggtgcggccgtcctcaagctgcttgccagcgaagatgagccgctgctggtctggtggaataccctccttgtcctggatcttggccttcacattgtcgatcgtgtcagaggactcaacctccaaggtgatcgtcttgccagtaagggtcttcacaaagatctgcataccgccccggaggcgcaggacaaggtgcagggtggattccttttggatggtgtagtctgcaagggtgcggccatcctcgagctgcttcccagccaagatgagacgctgctggtctggttggattccctccttggtcttggatcttggccttcacatttatcgaacgtgtcggaggaatcgacttccaaggtaaatggtcttgccggttaagggttttcacggatttttgcattgctccacgaaggccggaggacaagggtccaaggtgggaccccttctggaagtttaaaatccgcgaaaagttccccaatctttaaagtggctttccaagggaaaaataaggctttctttggttccgggagggaatccccccttggncctgggtgttttgggctttcaaaatgtaaagcgcgctttggggaaactcaaccccccccagggtgttggctctttccctggtaggggggcgttataaaaaaatatccttctttgaaagaggaaaaaagggtttttttttttgttaaaaaaaccccccggggatttccctccccctcgtgggtccattaaaaaaaaactccccggagtacggggctgagggttttataa

SEQ ID NO: 2105 - DNA, 809 bp, Oryza sativa; identical to SEQ ID NO: 2103
  misc_feature (1)...(809): n = A,T,C or G

SEQ ID NO: 2106 - DNA, 748 bp, Oryza sativa; identical to SEQ ID NO: 2076
  misc_feature (1)...(748): n = A,T,C or G

SEQ ID NO: 2107 - DNA, 680 bp, Oryza sativa; identical to SEQ ID NO: 2086
  misc_feature (1)...(680): n = A,T,C or G

SEQ ID NO: 2108 - DNA, 612 bp, Oryza sativa; identical to SEQ ID NO: 2089
  misc_feature (1)...(612): n = A,T,C or G

SEQ ID NO: 2109 - DNA, 683 bp, Oryza sativa; identical to SEQ ID NO: 2079
  misc_feature (1)...(683): n = A,T,C or G

SEQ ID NO: 2110 - DNA, 809 bp, Oryza sativa; identical to SEQ ID NO: 2103
  misc_feature (1)...(809): n = A,T,C or G

SEQ ID NO: 2111 - DNA, 713 bp, Oryza sativa; identical to SEQ ID NO: 2100
  misc_feature (1)...(713): n = A,T,C or G

SEQ ID NO: 2112 - DNA, 1000 bp, Oryza sativa; identical to SEQ ID NO: 2104
  misc_feature (1)...(1000): n = A,T,C or G

SEQ ID NO: 2113 - DNA, 912 bp, Oryza sativa; identical to SEQ ID NO: 2062
  misc_feature (1)...(912): n = A,T,C or G

SEQ ID NO: 2114 - DNA, 753 bp, Oryza sativa; identical to SEQ ID NO: 2063
  misc_feature (1)...(753): n = A,T,C or G

SEQ ID NO: 2115 - DNA, 423 bp, Oryza sativa; identical to SEQ ID NO: 2064

SEQ ID NO: 2116 - DNA, 890 bp, Oryza sativa
  misc_feature (1)...(890): n = A,T,C or G
traawtcatgggagctggcagactactaagctggttataattaattgtgctcgcaactaaggtatcaacacgtcttggctatagatccacttggaaattaggaaaaggtggagtggagtggagtggagtggaggatccacaaacaattattccacaggtaaaggagcacaatgagtgcctgatgcagatgtggcatggcatctttcaaggtacaatttggggaataccacatcatgatttaaaaaatggatagagatacgtttttttagtgttagttgaccactgacattaggtaaccaaggattcacgttttgctaagattacatgtgaggtttagttgataccttggatgaggcgaacccttaatcggcttctgaccatactttcgccatgagtattcatctggaggtatgtctgctattttgttgctaatggcgggcactttaattgacctcttaattcgcaacttcctgaagaacagagcagcataaataaagttaaagcacataatgctcaatccgacaaatgagagacgcggtagggacaacaagaactacaagaacacagtttacctcctctttgagcaatggcaccttccggttgtggcacacttgccacttccatcctccctctcccgtgcacgccgtttgggcmmtggtgagcgttaccgggttsctcsgaacgggccctratcaatkgaacgggggtttccttcaagtwgkcmcstggsgtmmatktaagggrgaattaaccccsaaaattttccgggrmmnnttgttttaaanttwggggggtcccccttttsccyttaaanawtacccgananntntnwnatnwntnnynnanaaggagantnncntnctcrcatananannaannnntntnntntn

SEQ ID NO: 2117 - DNA, 750 bp, Oryza sativa
  misc_feature (1)...(750): n = A,T,C or G
gatagccctagtgccaccgggacgaatgtcgtcggcgttcatgtcgtcgcttagcatggacggcagcgtggctagcttggaagggaagccgccgttccatttgatcagcggcccggtcgcgagcgacccggtkaacgctcaccatgtgcccaaacggcggttcacggggaaaggggaggatggaagtggcaagtgtgccacaaccggaaggtgccattgctcaaagaggaggtaaactgtgttcttgtagttcttgttgtccctaccgcgtctctcatttgtcggattgagcattatgtgctttaactttatttatgctgctctgttcttcaggaagttgcgaattaagaggtcaattaaagtgcccgccattagcaacaaaatagcagacatacctccagatgaatactcatggcgaaagtatggtcagaagccgattaagggttcgcctcatccaaggtatcaactaaacctcacatgtaatcttagcaaaacgtgaatccttggttacctaatgtcagtggtcaactaacactaaaaaaacgtatctctatccattttttaaatcatgatgtggtattccccaaattgtaccttgaaagatgccattgccamatctgcattagggcmctcattgtgcycctttaacckgtggaaaaaatkgtttgggggatccyccantccaattcaaattcaattcaaccttttcccaaatttccaaggkgggatttttasccaaaaagggttttk

SEQ ID NO: 2118 - DNA, 1000 bp, Oryza sativa
  misc_feature (1)...(1000): n = A,T,C or G
caaaanngtaacttttagggttgacactatcagaaatactctaagcttttgcattgcctgtcgagtccgtactctcagaggatcccgggtaccgagctcgaattcgccctatagtgagtcgtattacaattcactggccgtcgttttacaacgtcgtgatgggaaaacccttattaacccaacttaatcttaatacttgtcttagttgaaactgatcattaaattggaattgcaaagaagttgatcagtagcagtaactgagatgaacgagtattatgaagctatgactgaattttgagatgattaattgttcttagtagtgagatttactaccttggatgaggagagcctttgattggtttctgaccatattttctccaagaataattgtccgaaggtatatcggcgaccttgtcgctgatcgccggcacggtgaccaccttcttctccctgggtttcctgcgaagaaatcggaagcaagaacacggtcaaagatcatggcagaaatggccgagaaacggtggcgagattgacacggatttcttctttggggcaatgggcattttcccgccgggcttcttcgtcggcggtggccctctctggcccacgacgacggtttcttgggtcttcgggtcccccctaaatcgggcggcaaatttttttggccggctttcgaaaatttcttaaaaaacttcgcccccttattgggatttaaaaaaggagttgtcccccccccacaaaatttcacaccccccgttttttttccaaaacttaaaatctgaataccacttctttcccttttagacgtcggcgcaagaaattttttttggggtaattctcaaagttgttaaaaatttatttccttaataaggagtgtttttttcaaaattaaaaaattttttataacgtgggcgtgaaaatatttttttttttcgagagggatttccactcccgaggagatgttatccttgttttaccccccttatatgtaagagccgtt

SEQ ID NO: 2119 - DNA, 708 bp, Oryza sativa
  misc_feature (1)...(708): n = A,T,C or G
gagynggcagactacgttgccgcctcatcgggacgtcgatggccgggttcccgtggcggtggtcgccgtcgtaggtgacgatgagcatggccggctcgccggggtcgcgctccacgtgcttccgcgccgggcacccgcgcaccgtgctgcacttgtagtacccgctgcaatatgtaacgtacgtatagtacgtggagtcagtgtccgccgtcggaatatctctccatcgcacggtcagatattcagaaatcgatgtgttaccgtggataaggcgagcctttgatgggcttctggccgtacttgcgccacgaatagtcgtccgccgggatgtcggcgttccgtgagctgatcgccggcacgcggatgcgccgcctcgccctccacgaagccttcctgcaagttcatcacagaatcgttaatgtcgttttggagcaaatcgatcaagtccttgcagccgtgcaggtgtgtgtgtttaatcaccgttttttcttggagcagtggcagcgctcgccgtcgtcgtcgctgctgcgtttgaggcggccatcagaagcataatctgaagcagactgcattggtggcggcttgtcgccgtcgcctgccgccgggarcaccgcgcgggcgtttgaaamgctcccatcgccgggkganccccctcactgacsaaggggagggaaaaamaaanyttngcscmwcwgtttttggcccynt

SEQ ID NO: 2120 - DNA, 735 bp, Oryza sativa
  misc_feature (1)...(735): n = A,T,C or G
cnngattcatggarctggcagactaggtcagtcgtcctgtgctccgtcgtcgttgccgcctcatcgggacgtcgatggccgggttcccgtggcggtggtcgccgtcgtaggtgacgatgagcatggccggctcgccggggtcgcgctccacgtgcttccgcgccgggcacccgcgcaccgtgctgcacttgtagtacccgctgcaatatgtaacgtacgtatagtacgtggagtcagtgtccgccgtcggaatatctctccatcgcacggtcagatattcagaaatcgatgtgttaccgtggataaggcgagcctttgatgggcttctggccgtacttgcgccacgaatagtcgtccgccgggatgtcggcgttccgtgagctgatcgccggcacgcggatgcgccgcctcgccctccacgacgccttcctgcaagttcatcacagaatcgttaatgtcgttttggagcaaatcgatcaagtccttgcagccgtgcaggtgtgtgtgtttaatcaccgttttttcttggagcagtggcagcgctcgccgtcgtcgtcgctgctgcgtttgaggcggccatcagaagcataatctgaagcagactgcattggtggcggcttgtcgccgtcgccttgccgccggggagcaccgcgccgggcctttggramacgctcccaatcgccgggtkaaccccggtyaccgamgaacggggaacgacgaacytggccnaaaccc

SEQ ID NO: 2121 - DNA, 843 bp, Oryza sativa
  misc_feature (1)...(843): n = A,T,C or G
tttnnnnttnnnggagntggnagactaaatcaagagagtgagggaggtagcagatcaattacatggatatcaatcagtcaatagtctaaactagatatgatgtacatggcaattggcaaatactacgtgcatgaaagagcactaagaaattaaccaatattcaaacggtcaattggattagattagttggtttctatatatagattatagagtctacatgcatagacactactatctagagcaatcttccagtagtttggtcagtcgtcctgtgctccgtcgtcgttgccgcctcatcgggacgtcgatggccgggttccccgtggcggtggtcgccgtcgtaggtgacgatgagcatggccggctcgccggggtcgcgctccacgtgcttccgcgccgggcacccgcgcaccgtgctgcacttgtagtacccgctgcaatatgtaacgtacgtatagtacgtggagtcagtgtccgccgtcggaatatctctccatcgcacggtcagatattcagaaatcgatgtgttaccgtggataaggcgagcctttgatgggcttctggccgtacttgcgccacgaatagtcgtccgccgggatgtcggcgttccgtgarctgatcgccggcacgcggattcsccgccttggcccttcaaggaagcctttcctgcaaatttyatccmcagaatccgttaaaagtcstttttggaaccaaatycgattmaagtycytttgcaaccctttcaaggtktttttttktttaaaammcccssttttttttttttggaammmawtttgcaaacccycyccccccnntntatttnatntcnncnnctncncnttt

SEQ ID NO: 2122 - DNA, 870 bp, Oryza sativa
ccaaaagctccccaagcttgccaaggagctggcagactagccatggcggtcggcgatggcggcggcggcggagtcaggcggcgagggtacgggtgcagcaaggaggacttcttcccggaggagtcgttctcgagctgggaggcctactggcgggcgcttcggagcccgggagcgcggctggccgaacggctgacggcgaggtcgctggacgcgacggagctgcacgaggtgcgggccccggagcggcgccgacatgaagcgcgacctcacgtggtgggacctggcgtggttcggcgtctgacgccgtcatcggcgccgggatcttcgtgctcaccggccaggaggcccggaacgccgtcggccccgccgtcgtcatctcctacgtggtctccggcgtctccgccatgctctccgtcttctgctacaccgagttcgccgtcgagattcccgtcgcaggtaaacaatttaatattaaaccatctactccacaagcgtataatttgcatgatcgagcgctacaagtatttattactacctttttaagtcacgatgcttatttatagcctattgggtatcaataatatggtaaataaaaatcccacaatggttgttttttggcaatttaagatcccaagggtggcaaattttacctggggtataaaattcctttaaaaatccactgaaaaggttttttttaaaaccttttaaaaatccaaatttaaccccttgtgggggggctctcccacaagttttgaatatgccccctagaatttttttttcttacggtaaaaaaaagggggtctttcctacaaagagctcctttgttttttttacaacatttttgctgggagaaaaaagctttttttcccc

SEQ ID NO: 2123 - DNA, 924 bp, Oryza sativa
  misc_feature (1)...(924): n = A,T,C or G
tgattcatggagctggcagactaggtggagtccagaacgcgsnggagaactacgcctacaacatgcgcaacaccatcaaggatgagaagatcgcctcgaagctcccggcagcggacaagaagatttncagatgccatcgaccaggccatccagtggctggacggcaaccagctcgctgaggctgatgagttcgatgacaagatgaaggagctggagggcatctgcaaccccatcatcgccaagatgtaccagggcgctggcgcggacatggccggcggcatggacgaggacgatgctcccccggctggcggcagcggtgctggccccaagatcgaggaggtcgactaagcgcgaaatttgctagtgatccgcgcttcaagttatcttattgcattattagtgtcycttttatgttgtgttaaaaaactttgctgctatgacttatgatgatacccttggtctgtttgggcagtccttttgaattgaagaactgcgttgggagctctatgagaactatgaattgcgtgagaaatttaattattgtggtgcttgcagcscctattattkggtcyctgtcccacgtttattatttgcatgtgcscattgtttgccagcmaattgctgttggngcttytmagccaacatgtaaactgtttggaattgttyccgaattttgggagscntttttwaaagcggwwatttaaaggncggtwwttattgggataycggrrscaattttgggrgagntttttttaamcnggaragganattcyctcgsagataccgggaagcntctctcygnantatagcasnctwttgkgcacanmntctnctscacaswgttntctcgttnkwtwcacactgtanranatncncnagagancnnntatastgncanannatatntnttcaynctctncnrtn

SEQ ID NO: 2124 - DNA, 959 bp, Oryza sativa
gaaaggcattccaagttgccaaggagctggcagactaggctgagaagccaacagcaattgtacaaacaattgcgcacatgcaaataataaacgtgggacagagaccaaataataggcgctgcaagcatcacaataattaaatttctcacgcaattcatagttctcatagagctcccaacgcagtccttcaattcaaaaggactgcccaaacagaccaagggtatcatcataagtcatagcagcaaagttttttaacacaacataaaagagacactaataatgcaataagataacttgaagcgcggatcactagcaaatttcgcgcttagtcgacctcctcgatcttggggccagcaccgctgccgccagccgggggagcatcgtcctcgtccatgccgccggccatgtccgcgccagcgccctggtacatcttggcgatgatggggttgcagatgccctccagctccttcatcttgtcatcgaactcatcagcctcagcgaactggttgccgtccagccactggatggccttgttgatgggatcctcgaccttcctcttgtccgcttccgggaactttcgaggcgaacttttcaacccttgaaagtttttccccccttttttaaggcgtaatttttccaagggctttttttgaaaccaccccttttttttggggccccccaaacccctgaaattttactttttggggcctcctggagaaaattttttaaaaaaactccctctttaaagagaccccccccctttttttgttaatataaattggaaaaaatttatcttctttttccccccgcggggggggtgttttctttcaacccaaaacactttgtgtgttttattttgcgcgccccctcccaaaaagaggtaatgtttcccccccgcgcggggggtagaaaaactccccctcttttttttattgcccatattacaataaatattatta

SEQ ID NO: 2125 - DNA, 920 bp, Oryza sativa
  misc_feature (1)...(920): n = A,T,C or G
ggagctggcagactatatgcaacaaaggccaatgcagaacatcaatggagtagctacacttcaggccacagtaaacaacctttgtagctcttaacgaatttgttctaatggaattgcattcatgtaattcaaagataacaaggtgattgatttaattgaaacaccggtcaggtcattttagcagataagagacaaagcaccagccacctagcatgcatgctactccagcatagtaagttgctatgcaagaatttgccaggctgacaagcatctctaattttcaacaaagtttcaattgttcataaccaattaaactcgagagcgttatcttgaaggcttgaacagagaatccaaaaatgttaagtaaatttccatttatgaatttataaatatcggtccatattacatgtgtgaagattatgcaagtggtgaggacgcacctgaaatcgagatcattatatagtgattcaactgaaattggagcagcagtatttgcactcagaatttctttggtacgcttaacttgcttcttcaacttagccatcgccttgggagactggcggatatcaactccattaccgagttgtttattaaattgatcagcaaatagtttacaggcgcatttccatttcaaggcctccaagtttggagtcccatctaaawccttaacctgtrgawaaatagctggagaaaattgttawagattytggcatctggaacccgggaakrtaggcwtttnccancccaawtttccaaaawtggsngratttyammcsctggggcwttgaaaaaaaatttwaaaaaggggkttyytgggmcttttakaasccncacggggggaaatnamcaaataamatkgggggrtatatttnkngwgtastagcacyccayccgnggtgtacamgagkctntntnnaatw

SEQ ID NO: 2126 - DNA, 858 bp, Oryza sativa
tacagcagagtttcccctaaggactggcagactagctaaatgcctacattacagagatacagaatgccagaatctattactatttcttcagctaattatctacaggttaaggatgttagatgggactccaaacttggaggccttgaaatggaaatgcgcctggtaaactattttgctgatcaatttaataaacaactcggtaatggagttgatatccgccagtctcccaaggcgatggctaagttgaagaagcaagttaagcgtaccaaagaaattctgagtgcaaatactgctgctccaatttcagttgaatcactatataatgatctcgatttcaggtgcgtcctcaccacttgcataatcttcacacatgtaatatggaccgatatttataaattcataaatggaaatttacttaacatttttggattctctgttcaagccttcaagataacgctctcgagtttaattggttatgaacaattgaaactttgttgaaaattagagatgcttgtcagcctggcaaattcctgccttggaactttacaatgcttggagttgccatgcatgtagggtggcctggtgcttggtcccctaacctggctaaaatgaccctggaccgggtgtttcaaattaaattaattcacccttgttaaacctttgaaaattttcctggaattgcaaattccccatttaagaacccaaatttccggttaaagagaggcctacaaaaaggggtttgggtttttacctgggtgggggccccttgaaaagtgtttttaagcgccaccccccccccaattgggaaatggtttccctgccaaaattgggggccccttttgtggttggggaaatccc

SEQ ID NO: 2127 - DNA, 682 bp, Oryza sativa
twtwarkattcatggagctggcagactagttgttcaattttgtccgstcgtatgcttactcaaaagtccactgaaaacccctttttttacatcatctttcacatgcctaagcgatggaagatctgacaaatatatgaaaaattgagcttgctaaatgcctacattacagagatacagaatgccagaatctattactaatttcttcagctaattatctacaggttaaggatgttagatgggactccaaacttggaggccttgaaatggaaatgcgcctggtaaactattttgctgatcaatttaataaacaactcggtaatggagttgatatccgccagtctcccaaggcgatggctaarttgaagaagcaagttaagcgtaccaaagaaattctgagtgcaaatactgctgctccaatttcagttgaatcactatataatgatctcgatttcaggtgcgtcctcaccacttgcataatcttyacacatgtaatatggaccgatawttaataaattcataaatgggaaatttacttaacatttttggattcycygttcaarccttycaagataacgctctcgagtttaatttggkttatggaacaaattgaaamcattgttgaaaaatttagagawgcctggtcagcctggsaaaawtcttgcmatargcaaccttactatgy

SEQ ID NO: 2128 - DNA, 620 bp, Oryza sativa
gcagactagattgatgatatctatgctgtagaattaataggaggagctactcgagtaccaaaattgcaggtgattaaactgaactcgtttttatgtttgaccttgtattgtggggctctaatggcattcaggcacatgactgccatgtttttatttctctcttgtcacttgattctcatcataagtttaatacaatccattacttttagttaacatcttaaaaatttgctatcatatctcaaaggcatttgttaaccacggtaacctactatgcagatgacttaactgtacttctgaaacagttgtgcttccatcattcaccttgttatttttgtaataaaattccattctcctggtacaggctaagctgcaggaattcctgggaagaagtgacctggataagcatcttgatgcagatgaagcaattgttctgggtgcctcactgcatgcagctaacttaagtgatggaattaagttgaaccgtaagttagggatgattgatggttctacttatggttttgtgtttgaaataaatggcccagattatgtcaaagatgaaagcmctgatcaattactggtgccaaggatgaaaaaattgggaattaaggktwaaaakgcyc

SEQ ID NO: 2129 - DNA, 686 bp, Oryza sativa
  misc_feature (1)...(686): n = A,T,C or G
tgkanngcgggcaagttcmaagctttgccmaaggagctggcagacytagragggcacccaggaaacaaattgcttcatctggcatcaagatgcttatccaggtcacttcttcccaggaattcctgcagcttagcctgtaccaggagaatggaattttattacaaaaatwacaaggtgaatgatggaagcacaactgtttcagaagtacagttaagtcatctgcatagtaggttaccgtggttaacaaatgcctttgagatatgatagcaaatttttaagatgttaactaaaagtaatggattgtattaaacttatgatgagaatcaagtgacaagagagaaattaaaacatggcagtcatgtgcctgaatgccattagagccccacaatacaaggtcaaacataaaaacgagttcmgttttaatcacctgcaattttggtactcgagtagctcctcctattaattctacagcatagatatcatcaatcttcattccagaatgtgcaagcacttctttaactggagttagagcctgctccccmataaawtctttccacaaagttcttccaaaattttcacgtgtaaatgggwctcctgtaacaagaagcgaccaattaatttcyacaaggttkgaacctwgaaaaawgtcctgaaaccayggagccmtrgagtttaaaaactatgaa

SEQ ID NO: 2130 - DNA, 26 bp, Artificial Sequence
  A primer
ttatcttagtcagtgctgtgagtcct

SEQ ID NO: 2131 - DNA, 22 bp, Artificial Sequence
  A primer
ccagaagagcatcctgttttgc

SEQ ID NO: 2132 - DNA, 25 bp, Artificial Sequence
  A primer
tctgagtcatcttctccctgttagc

SEQ ID NO: 2133 - DNA, 22 bp, Artificial Sequence
  A primer
ctgaggccccactgaaccccaa

SEQ ID NO: 2134 - DNA, 18 bp, Artificial Sequence
  A primer
  misc_feature (1)...(18): n = A,T,C or G
gactgcgtaccaattcnn

SEQ ID NO: 2135 - DNA, 18 bp, Artificial Sequence
  A primer
  misc_feature (1)...(18): n = A,T,C or G
gatgagtcctgagtaann

SEQ ID NO: 2136 - DNA, 63 bp, Artificial Sequence
  A primer
ggccagtgaattgtaatacgactcactatagggaggcggtttttttttttttttttttttttt

SEQ ID NO: 2137 - DNA, 2000 bp, Arabidopsis thaliana
atcaacttattatttattggcatctatagttagggaaaacgtttcaattgaacatgtacgtgtgcataaatcaaaattttatttaaaatatacagattcgcttaaggagtataataacactccacgaacgaaattgttatgtatatattacatatataatttgtaatcagtgaattaagacattcaaataattgaaattaattaaacttttaccaagaaaataaatttgataaataataattgaaattttggaatgatatcaaaactgccgaaagcacatatgtcggtgttggtagttggcgggccaattagtatacgaatacgaactccttgttcggtgtttcttttacaaattattttcttttattcataatctatttctaattcattagatgtttcttacctgcatttcatgagaaacacatccaaaaaaaaaaactatttacaaacaaaaagttcttcttagacaaaataatatattcacaaagctacaatgtttccaaacttgataagagaatattagtttaggactgtctttaattattgtttacacaagggattcgtaggatcccaaaaaacaatgggttcgttggttttgtttgaaagtgtagatgtaacgactccaaatagccaaaagttgatatcttcagtctatattattgagatcttatgtcccccctgtaattaatttttccagcaatgcgtgcttaaagaatattgtttgagactttagttattgtaatacgacattagtataagtagagccaaaatcagattttaatatctttagtcttaagacatgaaacaagattaagaaaataccttgttttcaaagaaaacggttataaaaaggaggatttgagtttttgacattcagacgataaaaattatgaactaggtctagtcacgtggtcgacgcgtgagagtttccggcgtgaactgcaagtaaaatcacgtagagcatgtgattgacttgaccaaagagtccaaacccaccaactacaaaaaaaaatcaagatataaataactaactctcactagtcactaatataatttttcattacaattcatatatgatctactaacaattgttgtggttatacaaacaaaaaatttatttttcgtaagacggaaattttgaaatcaaattcctcaacactcaaatgaatattcagtagtagtttatcaatgactagattagatatttcttaacgccagtcaaattttggaattatgtggaggacgtacgtttatacatgtgcagactacaacataccaaatgttttattaaaccaaattacaatgttgcaaattggtctattcttttgaataatctgatacattttatctcataactttcttcctttttatttgaattcaatcaaataatattctccacatccccaaccttctttttttttttgcatgactaagtagtttaaggtcaacatttttcataagaagttgcttagaaatagccttgggttcaaataaaatacacatgattttcccgtttccaccaataaatcccaatggattttaatactgaaacggaaatcaatgcgaaactattggagtaagaccaatttattcatcttaatctaccaaattcggatacgatatgtttaatacaagggagattgatgctagcaaaacacaaccatcttaattttttttttttttttttaattagaaattcccttcccaaatggtaattcaatcgtaacaaaagtacgttttgaaatattgttttggatggagattttttccttggttcgcttgttacttttcacttgtttcatcaaatcctaactccttttattttggaccccacatcaactttatttggtctcctcaaggtttctgtttcaactcctatataaaagcaaataactcatacgttaattagtacacaccacaaaaacttgtcataagatcaatatcgatacccccaaaaaaaaaaaaaaacagctacaaagaagtgagaattgacacagcaa

SEQ ID NO: 2138 - DNA, 2000 bp, Arabidopsis thaliana
aaaccctgggattttgggtatctctgagcacgaattctacattctcatggctttcgaacacagaaatgaagacctaaattccttggattcggaagaagatctggagaaaatggagtcagaggtggagcaaatgtcgcgcaaggtttccgagtacaggaaaagcctaccgagtaatctgagcaattctgtgatttcttctcgtagatccaattttcccaacatcgattctttgggctttcgcacaactagcacaggttcgtacgtttctttgcttatatttagttagataccttccttctcctttggtttcagctggaattttagtctctttttctttctagatgatgtaataatagattgatcctctacattattcgtggatcattcttgtgaagaccaagttgtttagcagcagcagacttgccttttgattgtgatgtcgttttttgcatttaggtttgtgtcatgccatgcgtgtagaatattgtgatacttgctactataccctctggatgattatgttcatgagttattacgcttaattctgaggtgatgatacatatacaaggcttttccattacaataaatcatgtatttttgtggcttagaatcgacaagcatgagactatgtgatgatatgtttagctaagctgagagaaaatgattgtttagccaatttttgtttacagataccatgagataagtggccacattaggtgacactaagatttcatagcattgtaatatacacaagtctctagtgaactgctgttgtgataaccaactcatcagttattttgttccttgcaagtttggaagaacctctagtgtcaagagatggagcacatataggtggaatcgaacaagaatctcgagatagcctgattcagctcaaagaaagagtgtacgagaacattgccacagtgcctctagttgtagagagaatgcgagagagtaaagagagaatcgacaagtccatttctttcaatggaactactatgcacccggctttcacaaggcggaaagctagctaactgatcagtttctacttctccctattggctttaccactcaaagaaagctaatgcataggaggagatatggctggtatttctttctactatattagtatcaaccaacatctctcgcatttagaataagagtataccataacctctgttttgattgtgttctacattgaaacaggtctttctctgattttaatatggactcttatagaatcttgggctgattctacaccctgtatgtatatgtaagaatcacataatcagatggttgcacaattgtcaagaacacccaaatccaagcttgcgatttagcaatctcacccgtgtaagaaacttaaaaccataaaaccaattgatataagagcttttctagcaaaaacttaaaaatataattaacaccgtcgaaaatggtggaggctactagagcgagatataaactttatcaccgtttaatcgtgtgggattttgaaatgatatgaacctattgcaaaaagacaaaaaaaaaatataaacggaggaactaggcagtgggaccggagatccaccgaccggaaacgaagaatccatagtaagatagagcccaggggttcggtcgtatcggaccggtcggatttggattctaacgacaagtgagtggacccccagaaacgacagacgtaagcaatgacaacatcaaactcatcgccacgtcagcaacggagttctacttgcgaaacgtgtcccggcagcgtcatccacccacgtgtgttctagaagctcttctcctcctccgtatctcgacacgtgtccactccctctccttatataattgacttttctctcattctttccaagtttcaaaaacgccaagtttcagaggtagagagagagatactacaattgattaggataggatcaggatcatcctcaacaacctcctcctaattcctcctccattcatagtaacaataatattaagaaagagggtaaact

SEQ ID NO: 2139 - DNA, 499 bp, Arabidopsis thaliana
atgcagatcctcgaataccaatgatgtctcagaacatcacctagctagtagtatcctgttgtttcatttgcaatggctgtgtttgtatgatctatctaagtaaacaagtggaaagtgtttgttaatgttactttttactccccattggtgaatcatggtgtatacctgttaaactttgagagcaagtggttatttatttagttagagagttagagcttctccaccaccatattgaataagaagatctttctctcattcttttactttactctggcgtctgaaacagatccagggattccagtagtgaattgggcttaaaaactgttatatgggctttcgaaagtaaaaggttcggtgagctgccaaagaaaagtcagatgcctttaatcgcatttgacgacgattctttacgtgcgccattgactgcatcgtcgtcttcctcacgcgatttggtaatccgattcgtcttcatctgattccctcccttccgagaataata

SEQ ID NO: 2140 - DNA, 1657 bp, Arabidopsis thaliana
gtgaatctcaaactatttatcgatcagaagatgtaataaaagtggcgatgacctaattgcccaattctcataaactctgtttttctttttgtgtttactctgtttttctgctgccgagtgtttgatttgaatgtaatcttcgataatgagtcttgatataataaaatatttcttatcttaaagtttaactaccaattaatgttgatctcattcttcaaagttgactatcattctcctaagtcttgaacgttgacttccaaattaggtcgctctgctactcatcaatcactaatcttcttcctttccctaatcgattccaaaccttctgtggtgatggcaagcttcaaagtcaacaatgttattcatatttgtttgagcgtaactgtcaccaaaaaaggttcctagatcaaaaaagttgaaagttaattagtttccgaaataaaacagaggaacaaaaggaagcgtgtttaagataaaattagggttttcttaggaaagcatataaataaattgcatagctgtcgcaaaacctctgtttactcgagtgcgaagaaacgacggaaatggttattaccaggagacggagacccttttcaattctcgccggaattaggattctcatttcctaggtagattacttgtattcacggaatgtaagtcttaactagggtttccatttaactggtcttttctgctcgaacgatcgtcttttaatctctaaactctttactgaagtagacctattttgaactatttttgtttactaatttagcgattagtcatcgacgacctagtaaacttgttataacgagggtatattattacgtaacgatcagttgcttatatttgttatatcttattagggtttttagcctcttgaccttactcatgcaactattgatctgataaacatttttgagtttgatttcgggaaaattttgatatgtctagtcttgctcagagtctcgagctatatctgaatacatctcgtctgtccatagatcaaaaggctcataacttgtgaattacgaaagctacaaaacaatgggaacacaaacattgtgaatggatattgaaacttatgagttcgatccactcgcatcaatacttacatgggtataatccattaaatctaaagacggactataaggttgtgaatgcaagcaaggcgaagctagagaaggttctagatagatttattacgaagaacgattcaaaaagaatagcttcttgactaataataacttcacattgcctcatctccttgattcaatgatccaatttgaacatccaacgatccatatgttttcaacaacgtcggtcaactttgactagtatacattaaaagactattcttgttgtcttatccagccatggttgatattttctccgattatattgttttataagttatatgaacagtatatgaaaatcttgaaccaatagaaacgacgaatcatacgttactcagcttgactatgaaataacaaagagtattcaagcttggtggcgccgtttgttttttgtttattcactaagttactctaatttagttgtataaatacactctcccatttgtgtatttcttttcatcaaccacaaagatctctctacttcaataaatctccaccttgctttaagaacaaagtcttaacaa

SEQ ID NO: 2141 - DNA, 2000 bp, Arabidopsis thaliana
gtaaaatactagaattgaacactataaaaaattaataaaaattgaagaaaacaattagtacagccatattttacatatgatatttataatatatattagtaaatttataaaattattaatttatactattgatgggagcatatatttatataagattttcaataaaaatattatcttattagtttatcgatttatatcaatttttatattggtctcaactctgcaccaaaaaaaattattaatttataaaaattattaatttatcgaatattaatttataaagattttactgtatagtattattataaaagcgaaagaaacatatatcatcccaaaaattctggttgtcgttacccggtccttcttcttggcatcctctaggtacttcctctcgtgacctccataaaaaaccatgaggatagatgttaagttttaaattttctctatattgccaatctaacatcaagggacctaacttttatatatgtagttataaaaccccattactaactcaaatcacaaaataacccaaagcgatgaaattggataaacatgggcttttgtaatgatataggccgtaattttttgtatattaaatcataatgggtctttttcatgagcctcttctgtagatgggcttcatttatcagatatttattttaacgcctgtaactatctcataattgcaaaattcgaccacgatttcgagaacaaccccggccacttgtttcttccatctgagacgcttatcttgaaaacgtttagaaattaaccaaacggatgttgattgtttgactgttaaataagagacaaaaaacaaaatataatagtctatgtgactacgatataagctaataacgtgtttatgtttttcacctttatatccatttattaatgcgaccccaaaatcagtgctccgtgtaaatgtatttgtcagtttattcacatgatattaccccttctacaccaatcaataaaatatactaccgctttatctttaagtatcttaaataatgttaattctgttcatttcatatgaataataatgaccaaaaaatatagttatcctaatggtttctactagtatttcaacattatagtctaaataataagggatgaaacatataaacaaaaattcggataaacaaatccatgtctattccgatatatttttataatctggattagtaattcgaaaaatgatgataaaagaatataatagtatgtatttttttaagttttttatatatgctgtcatgaccccttatcttattcaaggagagtggtatgggtaacacaggattcaaaaaccgtggatttttcgatattgataaagagatgatatcaatacattaaagattttctttagtattaaaaaagattaaagatgatcgttaaaagaaggaatcaacggacgtgtcggggtaaaaaatatattcaatcgagactgacaaattcttaattaaatgaaagcaatccagaaaacaaacaaaaaagaagaaaagtcaagaaaggcacccccacgcccacctgggtattctatgacccactctttaatgacctctttatttattttaattaatcacgtacgaacgattcattcatcaattgagttacttaacagtaacacactatcattcttaatcaacccttacatataaaagttacataagttgattaagattacctgatatatttcatacggaaatctaaatttataaacacaaacgaacatgttatttatatagtaagacaataactttatctctaacccaaaagaatgaaagaaactagatctgctttgtgtcattttcacataaatgagaagcaaaatcacgaaaccataagagtgtcgtatgaattttgaaagtcaaaataacgtcacacaccattatccaattattcaaaattagccgacaaaaaaactaaacaaatctcaaaaccttgtctataaatacactcaatcctcttcttcaaactcaacatcgtcatctctaaca

SEQ ID NO: 2142 - DNA, 1665 bp, Arabidopsis thaliana
ttaaattagttgatccgttttctttttttaaaactgttttttagtggttattatattatgtttgatgtgattaataaagagccaatggaatcattatttggcatttgttatcaactgatttgaataaattatgtaacgagtgaattttatttgataaatctttaaactttagcgcaggattaaaattatatctatatgatcatctataatataatgtccaaatcatttcacattagtcatccggtttataaaatatcggaaaagacattgaattgtttatcccaacttttgtttatgtttcgagtgtattttttttgtcacaaaaatgtttatttaagccaaaacagagtcagtgtaagagtggaagaagccacacaaacaaaagggtaacttaagaactaaagaagacaagattatcaaaaaggagcgtgacaatcactaaaacagaatccagaaaaaactttatctgttttagaatccttattcaactaatcaaacttaagtaaacctgtaataggaacaattaattatctctttttaggaagcttcagattcagaattcctcctctctcttcagcttgtagcttgtgcatttggttcctattattcaagtgtgaactaggacgtctagacgattcaccaacctcaaaatatcttggcattcttgaagtgatatcttcttcatttaagggaaatattagaccatgtggaagaaaggctgtcttctccatgaagcaatatagtattattcaatcgagactgacaaattctgaaatagtgataatggaagcaatcgagaaagacagaagaatagtcaagaaaggcactcccacgcccacatggcatttcttttatcctcctctcttcatatttttgtagagtattaatgatcaattaataagagcaactccgatggtttagaatcaattggtttttaattttcatttttaaccttattttatattaaaatgttgtttttacaaagttaaaaaaaattagaaaaaacttaatttatttctactccaatgattaagaactattgggttcttaaaaaataacttggatacccactcaatacacaacacatgtcctcttcttaatattaagaaaacatcttaattaagatataaatcttagctaagatttgttgtttgtattatatttaatcagtttaatagataagaattagttaagaattatctaagaaccaaggttggagttgctctaagttacagtgttacacactattattcttaatcaatccaaaatctaaatttccataaacatgtattttatttcaaatacctacaaatattgaactaaaactaaaactaaatttatttcatttaacaaagacgaatgcaaaaaaacttagtgcacagtaatcatagtaattaaacaaagacagatgccaacaaaagaaaaactaaaacacagtaaacaaagaccggtgccaaaaaaagaagaaaatgctatcttttaaagaggaaacaactagatttgatttgtttcactttcacataaaaaatgaaagtcaaaaacgtcctacaccattatccaattattcaaattagccgagacacaaaatcttctctataaataataacactcacacacacaccaatcctcttcataaaactcatcattcctcattcatctctaaca

SEQ ID NO: 2143 - DNA, 1210 bp, Arabidopsis thaliana
aaaacaaatggatcaaccattgatcatagaatgaagtggtcgattgtgaattctcatgtacactataatgattaatgacttttagtatctcaccatctacaccaaaggttgatttatctgtgaaacaaaaatggttttatggttttggacaaaagtccaatttacaagggtgttactgttaagtgttgttgtttataattctgttgggaaatatttatggcgatatttgacatgtggttaagtgtatttttgaattaatctctctttttgtaatttttgtttctttcgtaaattagataaatctgttgagaaatagattcacacgcataacgttcatttgcttcatccagaaaaatattggaaaaactaattaattcagtattatttttgtaaataaaataaacaacaagccaatcataatttaaggtactttcccagttcgacaaaatccaataaagaaaataatatttgtcccttgcccattggttgttgcatggacctagccgagaaagccacgtcagtgaaagtcaacaacttgacccaaataccctcggatacgcaacaaaattacgataccacccacagcacgacttagtcctcaagtcgttaacataagagacggagcaaaactttagttacaaatcgttcctcctcctcctcatcttcctcacagctctcgcttctgatctcttacttgcacagaaatcgaaaattttctaaagcttttgttctattctcttcgttttcctctggtaattgaatcgtcgaatttgaaacttgattttcccgtgtgtatttttttgatgatttgtgatcgtttctaaaaattatagtttgatcttttcatgatccgttgatgattatgacggctaggtatatctcttttctcttttcttttttttttgattaggttttacaattctacaattttagaaagcttgattaggtgatactgagtttgtacttttcggatcattgctcttttgtcttctgcacttgtatgagagtgtgtctctctcatctattttcatatcacggattttttcttcagggtttttaacattagggttttcacaagaggcttgtgatgtggctttactagtttatatgataaattatttccagagaatttcttgtatgctagtcttctttgcatcaaaactaatattttgcttgttttttttttctgcagagtttattaactttcact

SEQ ID NO: 2144 - DNA, 554 bp, Arabidopsis thaliana
aaagcttctattggggaatgtgtttacttgctcgttatatgtggatctaagtacgtggatctcttatgtttttgaagctttataatgacattactttagaagctttctcaactctagctcttgcgttttcattatcatgttacaagaggatcttaaatcaaatcattttggatttttgttatgtttatgttgttataatttatttggatttgattaattgaaaatgaagtgacacctagaacttgctcaaacatgggtattgttgttttccttgttattaggactctgcttaacattacacttttgttaagagtaacaacatacatctaaaatctcataacagaggatagaaatcgtacccactgcaaaaaccagatactcaaattagtccacttcacgacaacagattaatgggcctttaagtatatggacatgggcctttgtcagttataagtctcccttaaccagttgacttgtgttccctctaactttaacaaaagattgttcctgagaaattctagggtttctgaaatcgaggagagatccaatcggca

SEQ ID NO: 2145 - DNA, 1489 bp, Arabidopsis thaliana
tcgttcaaccaacctttcttcttttttacattcaataaacaacatcaaggtgtttttagtctttgtcccatttgcttcttattattattgatactaataaaactacattactatatgtttttctaataatacaaacaaccttactttttctctatatgtgtttacctcgatgttgaactaagctttttttttaatatacagatagatcctgtttaaaaaatttggcttatatatttgttactgtgaatatgatgatcatttcaaggtgatgatgcatttgtaaagtattgatgaggtttgtggtggtaacttattagaattgtttatgtttcactatttttagtttcgcattatgattactttaagttttgatacaaagttggtaccatccaattatttcaatcaagttgttcattcctgccttttcttttactgttttctcacatccaacagatatgtagatcttctgttactacttttgttaatgtatgtgaagcaaaattcaaattaacatagacacatgaattcattaatcaaatttaatcagtgttcatgtatattatcaaactttgtagctcttatttgaaccaaaattcatgtatttttatcatcaaaatactccctttctttcttcttaaacttttatcaaatatatgagccacacgagtatatgacctttgattcaaaagaaaaggggaatagaatactgaacaaaggaaaatgacgcaggtgatgtgatcagttttgtcgaaaaagaatattagttgagatatgttggtttcatacttttgatctttttttgttagtttatgttattactgtatctattagacgatgaattacattatgcatagataaacaattaaatcactagtcattttggcaatcatactttgaaaaaccaccccatccgcaataagtcaagtcatcattaaattaccacatcatgcatgatatcaaatttcatataatattaatatctagtagtagctagtagtactatataataaacattaaataaatcccactagatgcattcttaagagaaatcttccaagaaaaattcagacatattagatgagaaaagaaaaatccaaactagaaatcaatgttgtgttgagttagtgcttaccctcgcagtctcaatctccttcccaaaaagacttttcaaaccaaagaatggtgaaacccttaggaggtaatggtcttcctctctgcatctctctcttcgtttaccagtaaacaaacaacaaaaacgtatttgaaataataaatactattgttttttatttctttttctctctctctctctctcttattgagttttgttgatttctttgctatagaaggaacaagagatgtctctaatgttggttgtaaatcagttgatctcctcctagcttctcttggtggtcttgccgccgctgtagcagctgcttacgccggagaattactccttcgacgccggaaacttgatcaaggtgcttcc

SEQ ID NO: 2146 - DNA, 1513 bp, Arabidopsis thaliana
aaaacatatcaaaagcaaagagagagaaattgttttatcccacaaagtttttatatagttttattttgatttttgtagttgatttgtacgacataaagcattattatataaaatactaaaattattcattgtttcttactttcttgaaatattctttaatttttctgtttcgatgtttcttatgtattatgactgatcttatcttaagtcttacctctttttagcatttacgttttcaactctttaggatatgtcgtattatgtgttggctataatgtgtttggttagaatgttaactttggtgtcggcataatatgtttaattattgaagaaaaagtaaaacagattataaatttaaaaagcatagacttttggataatttcataattaatagaagaagataactattgacaaattcaatttagatgttgattagttcaacaaaaaataaacttagacattagtttgttctcaaaatgagaaaaggatcaatattattgatttatttctatgaccatttaaagaatgtttacaaatgtggttatctatttgattaactatttttttttttttgaataattgggaaaactgtgaaattttaataaatgccgacaaaaagtaagaaaaacaaattattctctatatagtatatactattttaaaatatagatggtacagaagtaaaaggcatccaattcgaaagtttaatatgtaatttatacaagaatttaatataactaatgatgggacctattgtttttatttgttgttgtattattatatggtgacttgactaagatgttttcttctaataataatgccaaatgaaaaaaagataaggtaaagcttaatttacataaattagcatgtgggaagagacttcacagtttatacaaataagtacgcaactattagtagttgttgacctttttgtctaattcaacaagataagcctctcttctacttttgtgaaattttccgtaatcaaatccgtaatcagatttccccatcaatcgataattttctctcgccgcgttttctatttttctcgctcttcccttttaattttcatcccattttcttgaaggagatttctaattattctgtgatctaaagtctgaagctttgtttggttgcatctcgatgatgatgatgatgatggttgattgtaaatgggtagtttcggtttggttgtagcagaagctaagtttgtcaagttaataagagtattttagttttttttttgttaaatcgatttgtgggttcatcatcctacgatcgaaagtttccatctttgataatttgagattctggggatttttactagaatttctagttttttttttggtttgttgatttcgtagctagaagaaatcgatctaggtgtgtatatatatatctattcaatcgaattttagtgaatcgattggcgatcttggtgagagtaatttcagagagatcaaggttactagagcaccaataaaaacacttatttggattgggagatagaaaa

SEQ ID NO: 2147 - DNA, 2000 bp, Arabidopsis thaliana
gaaaaacattaattcatatattaatgttttatattccgtgagaaaatttcaatgttttggaaaattagaacaaattagaacaaattctcgaaagataaattgaaggcattatgatattttcgtacgttctttttacggaaagttctttaacggcatccaaaacgctttcgtacgtggccgagtgctcgcggcgcaataatccttgagaatcataaggtatattccctggaatgtaccttttttgtttttcttataaaaaaactatctggtgcattttgtttttatggagtaatttatccaattaaagtccagtgtgggacactaaacattacaaattttatgtctttagcttagttatcatctgtttttttttaattagaaaagagtagttttctggtgtgagtgttatgtggaagacaaatatgtgacgtggattctaataatgtattgtcgtgatgtggttctttttgcattatttcgttttgattatgtaatagacatatatttaaatggtgcgattatgcaccgaagaaaaacattcgtctccatttttctttatacgaaatttgaccccaaaaaaaaggtaaaacacggcgtccgtgttattatgtagtatcatgtatgacagaaatggcaactacagtagatagtttggaccgaattttattttcacacaattaaatagttatttcaaggcagtaacaaattggtggaaaaaaaaaaaaaaaaggcagtaacaaatattaaaaccgaatattggctaaaattatacatttcaaaacaatattatgaaattgtttaacaaaacaaaatgtgaaaggaacatagaagtaattaatgtactcagattacgatcccatagaacttaaataaaggtgcgtttatgaatgccagatgactcagattagtgattgttcttcccacttagcagagtaattgctctttgtcctttggaatctctctctctctttttatttctctgtgtttcgcttggaatctatattttcgctatttcctggaatgatgatatatatgtatgttagtatgtagtagtcaatatttttgtatattgtgaataagtgactttttcaaggtaaatataggtcagaaacttcaaattcaaaatattaaatattataatattggtgaaaatatatagtcaaaaaatgattttaggttcggttgataatttattcaatgagagtgatttacccgaataagatgattgtgtgtgagcaaaaagattccacaatgatgccaatttaagcttcaacaagtgctttcctattaacaagaacaatttatgtaatatcatttttttcgtttgttttgcaaaactgcaaagtcattttattttgtttactttaataatccttgaaaatgttataacagttatttcctcaaattagaccatcatactattattattgttattatcaaccgttgataaaaatggtagtagcatgtacaactaagatagaccgttacaaaattcgtgtattgttaattattatatagtttccgtatgttgctgttttcagctcaacttgagtaaatataaaatattaaactgtttattctaatattggattcttttgtgtagtggcaacttatttttttctaagctttttttttttacagattacggatttcagtatgaaattgtagatccaatcaactattttcacatatgctaaaaggtatctaaaaagtaaaaacacttaacagattataaacaaaaaagcttttaagataaatgtcacaaattctttaaaaataaacaaataaacagctattgacaaacaaaaaataaaaataaaaaaggagtccttgctgggtccatctcctttgcgttctttttcgtctgttgaattttgaacagagtcacaagtctctctccatataaacctccccaaggtcgacgctacgtaacgaccatctccattactcgactctcctcacctaaagattcaaccttttctctgtttcccaattcagag

SEQ ID NO: 2148 - DNA, 2000 bp, Arabidopsis thaliana
aggaggtccactagtaggtcaagttggctttgtggtgtcgataacatgagattgaccaaagctgtagcttgaccccaaggccacgagggagaaagatctaccaaaccaaaatcatcataacacatctctttctagtatatagcccaccacaaatattaattcttttaatagttatacaccacaaattttatcccccattggccattgactagagtcgttttcgtctttgacagtggtaaaagcttctgtatatgtgaatttaggattccacctttcttaggtttctcattacaagttgatttaacttcttgacttctcaagttgttgttttgtaatttagtaaaaatttgcttacaagtcatacatgattgaatataacaccggctgctaagcctatttttctatcataagtttcgctttcgagtcaaaatgttagtcaacatgaaataaaacacgtttctttatttgttttgcttattgatcaactttaaaatagtcccataaaatagcaaatattaagaaatttcaaatcaatacattagttgccaaaacccgtctgtgatattatactttttgaggctccataataatgacgtgagatttgtttgtgactgaggaagtggaaaataaagttaagcatgtcttactattatcaaatatcagtttttctataacaaagtatgaatgttgatcaaagacaaaaacaaaaaaaaggtgatccacctttctccaaatagaaaggaagtaaggcaatgaatgttttttttttttttttccattgcatttgcttttaaatccttataagaatttgaaagaaaaatatcttatcaactcttagaggtgatctttgggccaaagagggaaccacgtaatcgaatctgaacttctccgcttaaatgggaaattttattagatctgataaacggccaaaagtgatagctcatgattcttaatatagacgtgcatacagagatgttgttaccggccgaagagcagcttcgtaatcaacggacacaaataaaccactattggtccatcaaaattaatacaaaacgaatgaaaactgctgtgtcataagactaaataattttgtatattattatgatttagatggatgcggtctacaaatttttttaacaaaaaccaaccattagtttgtttaagttacttgaaaacaagaaaaggttcagtgaaaggtgatatataagctattattattatacacagagtaaaaggaagaaatgtgaaaaggaagattaatccacactaaaagtaaaaggaagaaaacgggtcaaacaatgaatcgtctgactgagtaataatatacgtcgctgtcatatattttgtataaccataaattttttatattttttccgacccaaattatttttagttttctatagctagttactaaattaaaggtgatgaatagtaatcatgactttatgtcacacgataaggttattatcacctacctttgagtatatttaggattttccgaagacttggacgacccaactcagtttggataaaaccttgtggtctattctaaatttaattctaatttacttctgattatgtggatttatacacggttaaacatcagaggctgaataataattagtttgatagatctgatagttcctctgttttctttttcttttttgagttgattatactgtttgcttttgttgattattagtccaaaacattaaaagaacaaaaacaaaaaaaagtgttcacgctttttggtcgaccgtaacatactttattgaattttgttaaaaaatcattacacaaatgatattatggatgtgtgtggtccaaaaaaccaaatattgactgtagaatgataactcgtagaagtaactcaaagctcctctctgcgcttcttttctctctataaaaccaagtctttgatcatcagatttatatcaaacttcaaaagcgtcaaacataaagttaggccaagaaacccatttaaaaaaaaagagagagag

SEQ ID NO: 2149 - DNA, 2000 bp, Arabidopsis thaliana
gtaattcaaacaatttgaattgagtaggttgttgcttgaagtaggcgttcctcattatacgaatcttttgcgtttctctttgttttcatgccacgtgttgtctctaccgctcacacgccacaagaacattcttgaaaaggcttatcaaacaactttaagaacatatttctattctacccaacagtaagaaaaataaaatatatcagttatttggtttgacatagctagcgtccaactaattagaaatgatcagtttatttacattatcatccaagaaaatgcattgattcataatgattaatacaaattttcattggttattcatgggtacttttcttaccattaatgctaaaaaataaaataaaattcaccaatgtacaataagtttcttaattagcacacttttttgcgtttggtcatctgttttatgtttggttttataagtatagcattacaattattattttagctttaaaaacttaaaatgtaaattttaaacacgtgaatgtgcaagttattatgcatgtggttaataataaagggtacatgtgcgtatgagctgtgaatgtgcgtatatggcagtggacagccgtaaatgtctgaccaaaatcgttttccttatctttttacccaacagtactactactgccttaggttaaaactcatcttgtcggacgcttcttcttacaagtttacgtcttttatattctaaaattgtaacaatatattaagtttgagaaatctttcttattaattattactacgtcatttttatgtgttaactatttttgtcgaagacttttttattcttgatcaattagtccgaaaatcactactaattcgtaaacaaatttttattattaaatacctctctgtttttcctcatttgagaacgtgatataaaatcaacataatcgaatcttcacagttcacactagtttatcattataataagtgaggggattacattttaggtatttagagaaaacggggaaaagataccaaaatatcttagagacccgtggttctatatgtacattttaatttttaatttgctaaagtcagccatgaatactatagtatacctagtcagatttgatgatgatggttgttaaacccaccgctcctcctagtcaaacatcttctacaatttccaaacacattcaaaaaacgcagaaaaaaaaaaaaaaaatgtgtatatgtgttacaattcttaaaagaaaatgtaaagccagataattgttacaagagatgtacaaagctccaagtgtgaagaacatcaacatgaatatgatccatgaaatctaccaaatttccgtgcttgcactttcccatacatttttgtttttcacctaactcttacgaacctaaaataaaataaaatacaaaaaaagggagaaagatttgagcacttgtcgacacatcgtagcatcctacctctgccgacacgtggctcgagacaaatacggaactcccggtcggaacagaaacaaatacttattttgactacctgaaattcgacacgtcatcaccttctagactcaaaagagtacaaaggccaatgagactctaccattcctaacgaagtgtcacgtcacttcctatcaaacctttccttaaatacgttcactgccgcgtcactcctcttttttggtcacgtttcctatttttgtactaatacttcttcttctctctacacatattttgttggtaatcacatcgaagattcgaaattggatcacatttggtaatcaacttttttttccaaagtctccacgtgtatggacgattacatacgtacacttatttattttcgctttggtggataaactcgatgttaccaaaagtatacactatctaattaccgaaccaaaattaatctgaaacccttctatatatatatactttctttgcaataacagagtgaaagcaaacattcaaaaaaaaaaaaaaaccattttttttttcttactcaaatcttttttagtatcattctccaa

SEQ ID NO: 2150 - DNA, 1244 bp, Arabidopsis thaliana
gtctttatgagggagaaaaaatagttgttttagcatatttatacatgaaagaggctacaagtgcaattgtgtatgcaaaaagagtgtgttaggattggtaaattggatctcatggacatataaacgtttttgatgatgacttctcccgtttttttagttgttaccaaagacaaaaagatacaattttgaagatgtttcatggatttattgtcataatcatccgaactagaacttagaaattcaaattagaaaaagattttgtccaatgatgatgatccaagtttggtttgtaatgtgtaaaccagcttttttggaggtaagatattaattgcgcggggaaatcaactagatgacgtgtgaatcgcgaattacaattacgtttttggatggagaactgtcttttttttcctttttatatccctaaaatacttttttgtacattcatttatatcaggaaaaacagagttgtaaccaaattattacagagatattcaaagatatttcaacctatcaactaaagatgacgtgtatattgagaatggcaattgcgtttatgagtgggaaaccaaattatttcattaacatgatctttaggaataccgctaataagagattactaatcactatttgaggttttaatttaaatctttgtagtcctgattttgaatatttcgttttagctaaatcagctccaatttttcccagttatcgtttgtcgaattcatattactgttaatttagttaacttccgaagactattagtacatgattcttcaacaaagcaaataaagaaaagaatcttgatgtcgttctctcaacaattcaacaaaacttggtctcgacgactcgaccgtgtgagatgtttgagaagtcagaacaccacacgtgtcgacataaagcccgcaccacgcacgcttttcgtctggatatatccaaattactttacagaaatcatttgtattgtttgttaataaaaactttgaaccactttgattactatattatttttttggaatttattctggtgacattaatgttctatcctccacgcggttctcataaaccgacttggcttctttatttttcctttatctttctctatatatttacacacacacgcatttgtgcagagatattcaaagattagaaacattcttgatagatacaaaaaacatttttcagacacaaaatcataaaatctttgcctttagtagatcaaagttctttacattaatcgttagaag

SEQ ID NO: 2151 - DNA, 2000 bp, Arabidopsis thaliana
gaaataagggtcaagtcatctttttttttaattaatttaggttaaaaattaagaaaataaaatgacaaataattaaacgattgtgtcaagtaaaggaaaataaagatcttggaatttaatttaatttagaacaaaacagatttctgatagtaaaccgtaaatttagtggtggctatattatgcagcaagattatcagttaactagattttaatctgcggtataccgcggggttatatcttttttaaaaactaaaaagttaatttgtttagtagattaaataaatataattcattttaatattttctaaatgtacaactcttatatatatatatatatattatttagtatacaattactatgtttattttttactgtttaacaatatagaaagaataacacacagtttattaagttaaaatttagattataactaaataattcaaattttaattatattaattttattaatataatgatattttgatatatatatatatatatatatatatatatatgatttcacccatgatatactgtctcgtattattatcgatccaaagccgtcatatcatctaatctcgttcagtgaaattaaacatatctaatagatttcacccatgctatactgtctcgtattacctatcgacccaaactcgtcataccatctaaccccgttcagcgaaactaaaaattattttgttatttttgttttaataatactttaatttaaaagatatataattcaaatcagtttaaaagttttattttaaatggttatttaattgttttaaaattcatatattataaatattataaacccgtcttatcatctaatctcgttcggtaaaattaaacattatttttttattttttgtttgaataatatttttattaaaaaatttataattcacatcaatttaaaagttttatttcaaatgattatttaatttttatacatttcacatattataaatattataaaacgtttttccgttaaatattttaaatgtttaactaactataatatttatttttaataaagtataatattaataaattcctaagatttctcctttttaaaagtaattagaattgatggaaatatattagataaagaaatgctaataattaagaatattaattagttataataattaaatatcaatgacatccactgtaaataagtcccaacttaaggatttatttactaaaatagctccaaaaatgtatatatagatgttatcaaaattcgaattaaaaagttgtaaaaagactcggaggcggtcaaaatcaatttttttattttcttgcataaatttgtgaactccagagaattaagaatgaccagtgatagagctccacgtggatagattgggttccaaagtgggacggcgttaaatataaaaaggccggaagttgtcgaagtagtcttttttcccattatttctgttttcggttccttattttgttcctttgtaataatgagtgacatcaaaaatatttggggacgaattaacaggtaatgtaaatagaaagaaatagaaaattttctttgattttacaatttggattcggattgcataagcaatgacatcaacagtaatacatagctgagaggctgagatgcagtgtctctctctcagggaagatgacaaaaagaatctgatatacacgtacgtatgttgcgagttacatattgatatatcacatgtcataagtcacatgctaacgataaactaataaactaaaacaattatgtcaacatatatcggtgaattgcattatcatcgacctcggtcactgttccgcacatcttggtcgccacggaacatagacaatttttggattgtagtccaattaatgagtcccccaccaaagccgtagtaaaatcgaagtcgttctctaatccaatcatatatatatccataacacacaccaacaacacccacacaacaaaaactagagtcagtaacaacacaagattaaaaagaaggagaaa

SEQ ID NO: 2152 - DNA, 2000 bp, Arabidopsis thaliana
ttaggggtatttctgtctattgattatattttctcggtaatattacgcttgatttgaatccttcgactataatagagattttcttaatttcactttcacgttcaaagattttttcgcattgtcttttggaaaaatagcagagttttttaaaaaataaataagaaacgatacattcaaaaaatattatgtgaagttgagtttttttttacatatagaggaaataaaattgatcatagtcatagacatagaaatttgtcagtggaatcttttctattaggtcaaacaagattcaacttttaacattttatctaggacttctgaattctgatatacaatgatcgatgatattataaataagataaaaaggctttatttgtattatttccttgtaaagtaaagtatttcttaatttcatgtttgttgggtcatgcaaaatatgtttccaaggcaaggtagcggattttttgtgaagaatattagctgggtcccacgtgacacaaaagctatgcggaaaagggtgtttccgtaaactcacttgaaaatttctgctaaccagttttgtccggttaagttcatgttatgtatgttacaatttgggaattgggattcagttaaaccggatcagccgaagacattattatattcgttttgtaactttttgtttagagggtgtcgagttaggttatcgagctgagctgtatataaaaacatctcaaacaaaggtgaggaggggatgcatttgcaaaatggaattaaggggtgtttcgtaatcgtgacagttacgtttttggtttctctcctatgaggcttattttgggcctcaacaagaagtaggcgttttaacacgtttcgtcatctagagccagatgagagggcctaaaccctacctgtggctggttatttattgctttaacttacccgacagatgcgactcaatttgaaatatctcttttgggcctactgatcttattgacgagaggattcatcacccttttcttcggccacttggaaagattatatagattgtatgttttctcttttcattttctatcctcgtgaagtttttatttttatttttttattcagattacgaaaatcttgagaaaaagaataagacccggtgagcgaaaggaatgtgtggcgatggcgatgcctacacagccgtgaagccgagtcatcgattataaaatgagatgtgtcgatgataacattgctagtataattcttggtgtggtccattatttgataaatttatggtatgcgtccctcatgggaagtgtgataagattaaacctagtgttcgatataaaatttcaaattttgtgtcttagccattctattgaattttaaactacggtcagattgaagcttacatatatttgatgtaaaacataaaaatatgtggctgttactcgtacacatttatggttatataaatgaatagtctcaatcacagccgtgctctgtagttgtcaggtattcgtgtggtttgaagtataacattgtcaactatttgtataaagtttctctatactattagttccatgatctagttatatatacaagtcatatcagtttacactaaaccactcgacactcattgataatcgcataccgttactacaaaactaaattcaccttcattgcttattaaaatcaaatcatcacaatagctgatagatcgtggccttagcatttcctcggtaagacttatgaaaaaattaagataactattctttgaaaaaggtaaaggaaaagaagttgggaaaactttggcctttgtgtaccaaaagtagaaaaataatttccagcttgtcattttcctacggtcccaattaattatatctctctctataaatatagtaacacacttagccatcgtacacttactagttacttccaacatttggcttcctttgctttcacgaatagaaaccttagcttcttccatttcttctttctctcctcgtttaaattagtttttgacaaggaagaaaaag

SEQ ID NO: 2153 - DNA, 980 bp, Arabidopsis thaliana
acgtataaaagaggtaaatatgagacaccttagagatagcgagttaagggttcaccatcaccacagatgcgtcttaattttaagtttggctgttgtatgatacgaaattggacaaacattaagctaggaggcatgatggatttaatcatattttagatgggaatgagaggatattaaggtaccaaccctcaaggcatattgtagactggtttggtttggacatgtgaagagttttgaagctgaagtgtttggtcactctagcattagatgttgcaggtgtagttttgtacatacatgtaaatgatgtctctttcttacgcacatttgttgacatagagaagctaatatttgcttaagcatgttgtaagctgtaactttagaatttaacctccactgtaacatattacatatgcaatcaggcaaacgaagattcgatcaaacgggtcattgcaaatccagaagtgtgagaagattgaccattaggaaacttataaagtggttcagtcttttacaaattaaatttcctgtttcaaacaccaatcaaatccaccgaattaccaaagatttcatgtttgcctctatccataatggttggaaaattttcaattttttaagtaatagtttgatattgtggggaaaaaatactattctaaacggtagataggtcttacacgtgagcattccgtaactggacaaggatcaaccaaagagaaagcagggagatccatcacggaacattatctttgtaatcaaaatctgatcgtacacgtgtacactatgatgtccactaacagtccacatctgttgacctgacattctcagacacacgagaggatcttttttctttctaacctctaaaatattttaattttaaaataaaataataaaatccgtatatgtgtctatcgttagcttctacagctcaacgaaacacacagttccgtagcagagttttagttttagcagagttggtgaaatca

SEQ ID NO: 2154 - DNA, 710 bp, Arabidopsis thaliana
tttttagttttaagtttgaataaaaacggggggctctttgccgcccggtcacttaccaaaaaaaaaaataacctactttataaacattttaaccaaaacgttttgtgacctatcatgataatttggtctgcaacatatgtcaacgtaaagtttataggcccaaagacgatcaatattagaatgagtagtagcacttatacttgaaacagtgacccattgggcttaaacagcatctttttgaatcactggtttttttaattaataagaggagttatcagagagacgtcagagaacgtccctgcgattgcttgcagcgggaagtttctttctctctagctccggatttgctttggtatgttactacttcacaatcttcaactccattgattgtatccttgattgcgatttgctcctactatgtaatcgttctcttgtctcagatctaaatttaagctcatctttgaattttagtctgggactgagattctctctatagattcgtcgatccagtcttattcctttgtaatttgtttgagatgatgatgattatgttgctacagttttataattgagtatcttagagtgaagtttttctaatttctcagctattcagaggatctaattttttaataatttgcagtcgaaaaccgtaagctttggcgagtttccgggagaatttgacgaatctgttttgcaacgagtgagaattc

SEQ ID NO: 2155 - DNA, 726 bp, Arabidopsis thaliana
cggagaagccggcgacgaagataggcttgagccgtcgtcggaggccaacggtggtgtaataatggaggatgctcacgcgcaacacacgtgttctctaaccattgagataacaaggggtataaatgtcttttccaaataaactcaaggattaagttaatttcggagaagagaaatttcgtgcttattgggcctggactgaacatgctgttaatgacatgttgtactgttttagattggagctttttggatttcgttatcccacatttaattattgtagaacctttattttttgactacaaaaaaaatatattcttcgctctcataaaataaagaaaatataattgaatttatttatgattcatattcgtataaaaaacatttggctacaagtatcatgtacaaaacattcggctagatttagttagaacaagatttgttataaatcataatggcaatataagagattagagcaagaaacatagcaattattatttgagaccagttttgccccatttcttacgatgataaacgactttgaatattcttcagtccactccacactgcgacgacgacttgagaaaaacaacatagagaaaaaaagaaaaatccaaaccttaggggcaatattgtaactaaaccaaacgacactgagtcaacattctgctttgctataaaggcccaagcacaatttttcagtaaccatgatgaagtgagaaattctgaaaa

SEQ ID NO: 2156 - DNA, 2000 bp, Arabidopsis thaliana
aaatccaatttaagacttgtaatactattcaaatttcttttacaaatacatgatatctatacttcatctttagaatctaccaagtcgaatctacaaattcaggaaaatatcaattcaaagctaatatgcattaaaccctcatgcttaagaatggtgtaggtctaagagagtttttgctcgcaaatcacatcaattcgagaaacgttaatgggatgcgttaatatatttgggaactcgtgttgccttttagtccataaaaacaagatgaatgagagaagtattaaaagctttattcatacacaaaaatgtgtgatctttatattttaagaaatgagaaacaataatgaatggagaaatgtaggacctccataactaattaaggattgataagtgtaaatgaaagagatgaagccaaacgtaacgatcacttgaaaatggcgttaatataataaatatacacattatccttgttccgtttatcattcttcatgcaaagttattaaatacatccatggcccttaattatgacgtttgagctcttggtaatgtaagcagtggacaaccaaataaagctattgtttacggttcctaatctaaataataattaacaatcaaatgcaagtcaaatatgagcaacaagagaagatggaagcacacaacacagccaaaacttttggtgggttctactatttttttccgtccaaaaaggcaaaaacagatacaaaaattgaatacaaatcaaaaacagttaattaaaaactcaaatctgattatattcattcaactactctaataaaaaaaatataatttttgtattttattttatttttctttttgaaataaaaaaaatagttcccacactcaaattgcaactttcggcagccgtttttgtaatcagtagccgactttcctgtctctctccacatctcaccatcttagttttcaatcttttgcctaacattttataattattcggaaaggaaaataaaactaagtgatttaattgtgaagactaataattataaaatgttatttaaggactagtagtaccaatattaagacttttttttaagtctgttatgttaatctttttgttttccctggtttggtcaataaaatagatctctctcattcaatgtctctcacaaagaattttattaattttaaaattaagtgattttagttgtgaagactacgtgcagtccttgctgggtctgccttttgagttttttaaaaatatataaatgggatcaatgttctctgtgaagctctccctcaaaaatcacaactttgctagattttggattttcactttctactctgtaattgagacttactctggcgatcatcatgatcaaaaggttagatttttctataacagcgcttatatttagttggatcatataaaatattgtgggtcttgatcgtatgattgatccatttagtatttcttctacacacaattctaattctgattttgttgagctgtcaattgttctttttagatctcttttcctttttgtggcaaacttttgatttagagtggtttaaaatctttgttggaatttatttttgcttcaattgctgacttgagataaatatttgatcttcctgtactctggagataaacactattaagaaggctaaataaaaacgtaagctttatcttgttttggtcaacttttctgttcttgcttctgtttgtcccaaatctgcaaatatcatttgtaaatcggattggattctggatattagttgtcttttctgcacgaatcaagtttgtttcattatctcaaatctctttatcaactttagtctcattatattttctgagtagaatcttgatgttattgattcaatatttttctcatatttttgtactctttactaattgtttgatgtgtatctacattgatgcagatttgaagcctgattgattcttgatcttatgtttctgcaaagagttggctactagacaaacgtctgcagtaaaattacag

SEQ ID NO: 2157 - DNA, 2000 bp, Arabidopsis thaliana
tagaccactccctttagctttagttgctgtttgctagaaagaggttagatgaattgtatgagcagaacccaaattagttaaacggtgagttagataaattgtagctcattaaagtaattgactggattgttccacctctcaatggtttgttggtgtttgatagtgccaatacttttagtctggccatttagatgagtcagtatgcaatagctggattttataagatttactgagcctactttgcaatcattaagttcagctctgttctaagtattgagtcttttcagctatcgtttcttggtctttttgtatctgtttctattttgacttggctttaccattcttgacagactgtttttgcaccaagaagcttctttggtgtagaagactacgtggatgacgacacaagccggccatacacataccaaaaagagaaaaagtcgaagaatccagacaagcatgtgtcgttcaagcaacgaacagttgcatacatggagccgttcactctagatgtcttcatctcaaagcgctttgtttcggcatctctcacgcaccgtgttacatgtaggcaagttgctgttgcgggaacaaactctaaagacgtaaaagctgttctgaggtcaagatgtgatatcccggcatgtatgtccatagggaggatcttgtctgagcgtgcaaaagaagctgatgtgtacacggcttcttatacgccaagggaccaagacaagtttgaagggaaaatcagagctgttgtccagtcccttattgataacggaattgatgttaaaatttatctcgattagaaaacaaatgtttgttgtgtccgtgctgaaattagtgtttgatttcgattttcctagcaaaccttattgattcagcgagagacaaactaaatccaacaattcatggggaaaaaacaaaacatatgacaaactattttgaaactgaaatcccaagcaagtcactgctcattacttttcaattacttttcaaatctcttttaggcttaatatttgttgtaggctatttagacttccttggaattttttgggaactcactgcataactcagagaaaatgccacctctagttgaattagtctcttatataacacttttatgttggcggcagaaaagtgcaagataggaacaacatttttgaattttcacacgtgtataacgaccatccaatgtagaagaacaacaaacaagactcgagtcaaaataaatagaaacaaaaaaaaaacacgagatacacaatgtcataaacaaaacataagtatgataatcatatcaaattaagaaaaatagattttaatttctataattaacataataatctaaatcaaatatctaaaaaaaactaaaaagatagagttgaaaagctaaactctaaacccaaaattgtaaaacactacctaatccttaatacttaaattattaaccgtaagttaatattcaaacaatatctagtctaattaaaattttggaattattagcttcatttttaattattctaattatattcctagcacaaacaacctcgcgcgaaaaggaaatttatgagagaataggagaaggaaaattcgcagaaacgagaaaacttttaggttgaattgaaagttgaaacctttttttctagttaaagtgttaaatgatcgaaagacgtttcctttaaattcgaaaaccaaaacgcgttttgatatccaaacaaaggattcaaccaaccgtttcgatttcttggaaggtcgaaccaatttcctgagaaaatcttctttgcttttttaaatcaaaaaacttcagattttccagttctatttttcttttacgcgtatcccttttcaatatacatatatatatacagagctagagaagttgcagaatcctgtgttaatcatattacaatctgcattgtgaaattttgcgaattcatctagggtttgatctgactccaaatttgggatttttagggtttaaatctagagatagagagagagagaga

SEQ ID NO: 2158 - DNA, 2000 bp, Arabidopsis thaliana
tagtgaatgtaatgttgctctatcgaggtggagcctcgtaacattggtaaggctacaaaaatgaacatcgctctctctcttctttaagcattcctaaatcgtgtttttgtttttctttttggcagcatcttttattttgtttaaacgcctaaaactgcctttgatcttttttcctttttattgatagaatgagataggacaacaaataccttttttgccgggaaaattcaaaggttgttgatgattccttgtgtccgcaactagaaagagaaaagtctgtcgtatcaaattagatattgacaaaaatgtcaaaatatatgaagaagtgtgaggggaaaccgttgattgaacgtaagacatttgaaaaatggatatgtagtagtttctagatttgcttacaaggaatgttgagttgtatcattttctctaacgcaatagctaacgtgcacgacttttttttttttatgtaaacttcaaacaaaccacgatcaacgcgtttactatttattgcatggaaactatagcaagtgtgacaactcatatcaatttgtgatgaattgattaactacgtaggtagtataatatttgtaagttggttattcacgtaagaaatattgtattttactcttatccagattatttaagaactcgtttttcaatataatgtttgacattttatactcgagttaataaacaaattagctttacattgacaaaattctgttgtatattatttataattaatcttgactatgggtaattaaataatatttttttggaaaaaaatacattggattttctcaaatgatcacacttctattaaaaccaaaatagtacgtatacgctctagacgattctaaatagatgattaatttggctcgattcattaattcaaaaaataataatatttagtgttttaaattagaattaaaatattaaataattatcggatatttcagtgttttaaattattgaggatgatttttgtttagtaatgacgtcagattgtctaaggaatagtttgggaaaaaaatctgaatcaaatatgactaacaaatggttattggttattgaactggaccataacaaaaagacacacacacaaaaaaaaaaactttttttatctggtttgctccatggataagaatatagtagctaggatatcctgatctttagataacggtagaacatgtggcatgtgtttattgtttatttttattttattttgagaacaaaatagttacattgtttggttatatataaaaaaaaaacagaccaaaaagacaaaaccaaagcttaaacaaaaaaagaaaagaaaaacttaattagaccggttaacactaaactggtttatgtaaaacggattcataaatgtatctagacattcacttacataaaattcatcacaaaatttcacccaattacggttttgattcggtatagggaccaccttcaaaattacccaataaataaagagtggataacaactagcataaaataatcaaagcatccactaagacacaaaacacaatttcataaagatgatgatgaatcacataactttaaataaatattctttcaaaaaggcaaaacttttaaataaatatcattcgcctgtcggccaagaaaaaaaaaaagtaaacaaaaataaatatcatacgtattgacaacaaaaaattcatacgccagtccaattacaaattacacaatatttaaaaatttaaataaggaaaacagaagaagatacaatttcaaattaaaaaacaaaatacgtgtatataaaattgaataaaaccccaacagaaacgtgacacaaaagaaaagattggggaagctgacctctgcctttcctcctccattaatcaaggaatataaatcagctttaaactcagtcctcttatggaagacaaaaaagcaaatatttattcgtaaatataacttcagaaccctttcaacaaaactctctctgttctttctccgtggagaagttaaagatgacg

SEQ ID NO: 2159 - DNA, 714 bp, Arabidopsis thaliana
tatcatttttctttttctttttgggtaaatgatcatatatataagtcgattgttgttatttggtgtgagtttgaatgtgatccgtgtgcgtatcaaattttggatgggaaatttgaaacagtaaaaatttgtatattcctcgtttgggaaaaatgtatgttttggttagttatatgcaaaaatgttgttgaagaagtttatacataaaaagttaaatacaaaaagatggtaagaaaacaattgcaatttcatgtttagaggactctcctatagtttaaggtgagaaaaaaatcactagatttgattgataatatgaaagtcagtgattttgcgttttaaaacgtgattctgcatgtaaaatcgtaaggaaaggttagttgtgtctttcgtaaacatgattctacaagaaaagcattttaataaacaaattaaagaatcataaatttcatttagctttttttcattaaaccaagttccacatacaaatacaacttgccaaccataaagtgaaaggagttttatttagctagcctaaaacccattttctcattttgcataatgtgaaatagagtgggatcttaaacagagtcgtctcttgagaacgtggtctcgtatggtaggctctcaattttgacaagacataataatcatcgatctctccactataaaatcaaatttactttacacgacaaagagaaaaagagagagagaaag

SEQ ID NO: 2160 - DNA, 615 bp, Arabidopsis thaliana
caagaaactgtgagtcttccagcttcttttaggcctaccttgtagtcttggggttttgtttctgttttcgaataatggtaacctttgtataacttatttcagtatcgtctcagtttggtactatgtcagttttggtattcttatcttattgaagtaaaaatgtgatagtgtattcgcttttctccctgcagcgttctagtctcgtccaggtgaaaggagggagaccttagacaagaaaatgaaaagaacatatcagaattgtcaaattgggtgttgtagaagaatctaaagtgtttatgtctatcgatccttttctaaacgagaaatttagggatgaaccagaaagaagaatgtataaactgtaagaaacaagtgtgcttttgacaaaagtttttttatttgaatgttaatttctgtgtctttatcacacatattaagttattatccacaaaatgtatctcattggatatttaaaacaaaaggacaataatattaaggaaaagacaaaatagaaaatgacttggccactgtagccgcgttaataatgtgatagcttttatctacaagaagcgttacttggtcgtcatctaccttctcagaaagggagctgcatca

SEQ ID NO: 2161 - DNA, 2000 bp, Arabidopsis thaliana
cctatcatgttcaggatacttttcttatacttctgtcttttttttttttttttttttttggatattccctttccgcttaggttttccttttttcctcctctgtaactaagaagaagtaaactcggattcagacagaacatggatatgggttcacttgtttttcttcttttctttatttttgtttcagtgtggtgttttttgattcaaaagtggatccccattgtacagttaccaaatatggatataaacaaacaaaagttaagggaaatatgtatacaaatttcaaatttaaaatattttgatatgttgtcaaagaattatatataaatatattaatattgcaattttattaaagtaaacttaccaattgatgaaacacaaaaaaaaaagtccttgataaggttgttttacagtaatttgattctaaacctgttgacttgtaatgcatccggaatttggatttcggatagtttcatagaaagaattatttggttctaatgtaaattatgttcatttcgtatttgctaatggtaattaacattaatgactatgtcatattcgttttctaattttcagcgactaacgattaaattgtgttcattttgtagttactgaaaataacgatgagcaactgaacgtgattcaaaatactcaacgctaaaattttcattggtcaaaaacttttaagtcattggcaatggtgtcgtttgaaatatgatcgtgtatgtttgttgggtttttagttatcattgagtgatttttttgctaaacaaattctgaatggtgagttgatgattagtttcaagacttgcaagtagttgagtgatgagatcaagtactagaagaaaaatcaggtaaactttttttgtgttatatatcaaaatttgtgaatatggtctcctccaatatatggactaacgtgtatatttgcgtttaacttaaatgttccgtgaaggagaataaagtggcaaagaatatggatagtgcgtcaggaccacgcgacgtgaggctatcgttgaattaaaaggatgattcgatcgagaaaatgagaaccaatcgccttcgagaataagcaaaaatagaaaacgtatgggttattccacgcgtattgctcttgactactgaagaagaaaccaagaaagatgcttgagattattctacatttcaaaagattccaccttatatgctcattcattatcgcaatacatgcatggttccaagttttaagttagtaacttttttccgaagacaactaatcttcaactaattaccatcatatataccaccattagttggttttgttaaactgtaattcaatgtaaatttattaaaacattttcatttagagtttacggtaaactttcgaatggtaaagttgtagaattcgtactcgtccacttgatattctttttcgaatatgttagtgatgttgatcatatccaatcctagcagagtaaaatgcgatatgattactacatatcatgatatcaacatcaaacaataataagtctaactctccggcgtgtctttgtcctattttacgtacctgattacgttgtcaagtaaccaggcttacggagaacaccgaattgatcatggtcttatcatttgagacattctttaaaacgtttataatttccatatctttgaacgtttacattgccattatcactaaactcttagatacacatgagtttattatttgaaccatggtcaaataataatttactaaaaacagcaagataattaaacttcagataagaagaaactaatattagaaggaaaaaagctatttgcatttaaagaaaccgcgtccttaacaaaaaaaatctcgtgcgtgtccctcccgtgtgtaaaaaaaaaactctttgttccttaaaccgactttatcataaatgcatatatatcctttgccctctccacttttcttttcctcatcataaaaaacattctcagagcaaatttcaagtttatttcattcaatttcgatccgagtaacc

SEQ ID NO: 2162 - DNA, 472 bp, Arabidopsis thaliana
taaaattgtaatgtgtttgttcgttagcaatagtaaatacaatcttcaactctcttcttcacccttccgatttgaatattgaacagtttcttacttgtttccatttggcttcacttcttttttggtcagcttttaagaaaactacatcatcaatttgaccagattgcttagcaataacttgattttaaaatagatataagatacattgtgaaaaaaataaaaaggatacaaaaccaaaaacgctccgatgccgggaatcgaacccgggtctcctgggtgaaagccagatatcctaaccgctggacgacatcggatttgttgttgggtattgactgtgataatatttaatacaatacatgtgttattaaattaaagctgtttcttcgcccaaaagccaaactctgtttcctatttatgtcttctgagatctctcgtagactcttacagtgattaactcaggctgctaagggag

SEQ ID NO: 2163 - DNA, 2000 bp, Arabidopsis thaliana
gggagatggacaatgcaatccaataagaagatagagttgatagtgaagtgaacatgactataacaggttacttgactaaatatactttctttcatccgtttcaaaacattaacattgacaaatttttgtaagttttcgtacaattatcaaactgaaacttcaatttttggaaatattaagaatatgtccatttctctgagaatataatatcttttttggcgtgtgccttccacacacttcttatggctctccttgttttcttgtctcactcatgaaattccgcaagttcttcacgcaatcttatttatacaggaagaaaaagaagagaaaaaaaaatcttagcatctctacgaaaataatatatacattatggaatccattgactgacaaccacaaaaaataaacataaaactttaaaaattaatgttgaaattgagaaggagaaaaacaaacgaatattaatagtgttgtatgaattttgttggcatatataattaatcaagttggccgtggagttaatagaagaggcaaaaatgcatagatcaaacatgttttcttttttctttgtttcgaatatgttttttcgcataagaaataaatatgatgcgtcatttacataaaagaatatcgatcctttcaagttgttgtgtgtgtgtgtatctttaagtacctcttattatttgtgtcttcttccaatcttttatattcgtctcacatggattccaatttcatatacgtgttttttttgtcaacgtatatatcccatatatgctactctcctagaattcctaaaagctatattgagataaaaaaaaaaaaattattattctttctagatatgaaaatatatatgattgcgtgaagaatttgagagattcatgaagcatatcaaaagaaaacaaggagagccgtaagaaatttgtggaaggcacacgccatgaagagattatcttcttctgaaattcgcatattcttttcaaaaaatattgaaaactcagtttgatatttgtgaggaagtcttacaatttaattccaaagttgatgtttggaaacagacaaaggacgtatgtttttcggtcaagcaacttgttatataggttagtagttactccatatatatatttttaattactgtggttagttacactttttgtgttgtcgcaagtcatgcacatttctttctaaaagactaaaagctcttggctatatattttgaactgccccataatatagtaatggactctttatttctgtgtaattatgtgtttacatcatatgctacgtacagaaaaatgataaggcatcaaacttttgtgtagttgtctcatacgagttggaagaagtactacatggacacattcaaaccttatctcattttttatatacagaagaatggaataaaacaaacaaattatctcatttagctttcatgtaatccatcaattaatggagattatacgtttcatatcatccatcaattactgtacatcttgcttagtgtaatacaatatatccaataatttataacatttttggatctaatccatgttcacacaagtcatttttcataaccaggataattttgaaaatgattgtaaattttatagcaattaggaatgaaatttctataatcgaaaacatacactctaaacctaaactaaaaccttaaacctaaatcagaaatcatagaaactaaaccaatactgtaaacattaaactaatatcttgacttaaataaatcttttacttcaaaacctaaatataaggatctattcttaattagttaaacaaaaaaagaaacaaaaacgcaagtgtacgttatatagtatatttgaataatgaaatgttaaaataattagattctttttctagttgatgtagatccccaaccccacgccaataaatatccatccctccagtccaaacagttcacaccacccgagaacacacgattattctccaaagagaaagagaaaaatcaataacctcatagtgtcgac

SEQ ID NO: 2164 - DNA, 1043 bp, Arabidopsis thaliana
tttctgaaactggaatatcaccgctctgttctttaatctagacagataacttctccagaaaaccccaaaattcaaaaacgtaaaaggaagcagctattcatgttcttcacgtgaccctgtacataaacgaatgaaacacataaatgtccaatctcagtatagttaaagaatgtgaaatcattcaaatatgtccacaagaattaaatcctctaaatcttgtttgtaacaatcaatttcttataaataacagccattatcgaggtagggaatacgcaaaagagacaaagaaacttgtgtcgtccctttcacatcaataaataaactctgataaagacgaatactttacaagtatacagccaaaaaaacgtgacctttttaaaaattcaaaatctcttacaggatttttttaattttcaaaccctaaaaatccaaactttctcgcgacccaccagtctccatcgaacggttggaaatattaggtttctgggtttggtaggaagaagaatcaatttgcagatttgttcgagttcgtgatttctccagaggaggaaagtgacagtgaaaatgaaacctggaggatggggtccctatccgttaggttcggatgagagatcatttaaggaaagtgactaaaatatttagcttcggagttaccgagcctagggcttcgaattttgtgtcatttaaagtaacgaatccgtagctaacctacgcatctggcgcagttagctaacttgctaggtttgactgtagcgcggcaaaatctattcgttcaaagttcaaactatagaaagccacgtgtgcatagtgtaaacgtagtcggaccacttttgcagccatatcaaaccgttggagatccgatcgaatacaactacgaaagatattaaaaagcttttgcatgagtaatgtcccgatttgtgtcgtgttgataagtaagttatctttttcccttcatcctttcctcatactcatattgaatctataaacagaacaactttttttaattattgatggacttttattttaggaatgaagagagttag

SEQ ID NO: 2165 - DNA, 995 bp, Arabidopsis thaliana
ttctgttcgtatatttgtaactattatgtgtatttttattttgttagtattactaattcaagtggtttaagttgttgagactctttaaaatctaagcattttataaacaataatatataattattgtttaggctaaatttgtcactaattaaggtttggatacatagtgtctaaactaagctaataatatcacttaacgtttacttgtaacgctaggtgatgatgtcgtcaagtcaattggtacaaggaataaacgagtggtcatatgacattatgaccatatgaattcaaactccagtaatccaatggtaattggattcaatgatcaagacttgaaccacgtaatccacccttatccttagaagctcataaatatcactaaagggacaggcaacacttaaccagtagttgtccaataatttagttttccaaaatgaaaaattattgttgtcatctattttaggtgttttagttcaatgtggattcctcgtcctaacaaatacttgacgaatatatctagactataaaattggttatgagttctacttttttttgtttgtgaaattatcaaaatttgttatatttatttatttattctcattaatttgagtactaatttttaaattatttatactaaaaacaattactaagatacaaaaatggataagagcatggtgtatagatatttaatgggatagaatatttcccataattgtatgtgtgtgagaggttttgttttcgtaaggaaagaaacaaaaaccatttgaccaaagaaaagcaaaagaaggcaaggaatcaaacaacaaatgttgcaaggcagaaataatggacgttatgttaatgtagtgtcgtcacacgtgacttaaaagagacgagtctgcgtgtcaaactaaaaatgtatgcaactataaaaatgggatttgattatctttttagtaccgaagcctaccaaccacatgcacactaattctactcgccaaataaagtgaaaagag

SEQ ID NO: 2166 - DNA, 1716 bp, Arabidopsis thaliana
ttccccatgtgcaagaatgctgaagagaatgagtcctgcgagactactccaaccccaatacaaaagcgttttcatttctcctcttaatgaaatttgaatgaaatgattatggagacgtactagagttgtcagtatatacgcagccaagaaaataaagcatccgtcttggtcttttgtagtatgcatatgtttttcttatatagaaactcaattataattgaagaccagagagtgagagagagagaattgcattaaagaccagtcatagtcataagagagatttattaagatattttctttccttaattagaaaaagtacatacatcatggacatgattcatgatcttgccatttgtaaatcacaagatcgtactgaagaatgtgactgatagaccacaactttggggcctaaacctccattacgctccattgatcattaggttaagaaattaagattttcacgaaactgccaccttgtatctttcgttgtatattttcatgtatatatttaaggatgatttgacactcatgaagttgtcacttcatttcatcaataggttaggtttaaaactagttttagaacaagtcagttttgtgattgggcttttatttaagtggtgcaagattatattaatagggtttattaatttcaaattcacactattactcatataatagtcagaagtatagagttcattatataattccaattttcttttcaccaaaatctgcagaacagaaagtctcaggaatcttcaaacattttgaaaaaatggtcctgaaaagtggaaagaaatttcagattttgcttgcaagagttcaaaaagctactagacaaagatttcatacaaaaaagtgtggaaaggtcttcaataattgtgattaagctttcaattaccgtttaaagacttgtaaataaaatttaatcaatcttttcactaataaatttaaccaattctattttctctacatcatgcactagtaaaaaaaaatttgcctcgaaacaaaaaaaaacacacgatgccgtataggaaggaagcaataaagaattcaaaacgatttgttgttccgtcttcaatgcattacgcgtcgtattagatgaggcttttaacactaaaaagcccaaaccaacggtatcgggtattatcacctaaacccaacccattaaagacaacgcgtagcttcacgcgcttcacgattcgcgtgagaagaactaaccctgaaacgcggacgttgcagattaacggtgaggcatgaacgagcgtgttaatatataatgattcttctctcacgatgatcaaaatacagaagccaacaagtaaaattagtttatgcagataagacaacatttattacctgatacatactttattaggtgataataattgataattgttttttataagccactaataattaaataaaaataatatcagtaccgtgtaaaagcaaaactagtgtaaacataaattttcaattggcaaagctctgatccatccgttttagtaattcgttgacctttgacatttcacttagacagatgtgtgcaagaaagaaaaacagcatgttgcttgctttttccctcaacgagaaaagtcaccctctcttcaattcttcaattctcctccctttataaaccataattcattaattctcttctctctcaacaactacttgtttagagagagtcccaccaccaccactaccacaatccca

SEQ ID NO: 2167 - DNA, 880 bp, Arabidopsis thaliana
ttcttcttcctcaacacgtttttcattgcagactggcaacaattaaccatttccataagaactcactcatatatgataaaaattatttgcttctgaacaatatagtacaaatcattatagtgcctcccataaaattgtagtatcacaacagcattagtatcattatttctcacatactgcagaaacaaagcaatgttcattcaactatatacaagagtctggaaaactaaaataaacagaagaattccaaggttagcttaacttctctccgtttacaaatatctcaaccccaaaattatttttccacaactgaaactgaagcgagaatttaaatcagcatttgaagtttagagatgaatcagagtaataacttacagctttggatgcgttggcgttgcagaaccggagaattgcaaggactagggtttgtgaatttttccaataactttccagctgcagactcagcgagctcgtcctcttctttgaaatcgaatacttcaaagtttttcttcatcgctagggaaatctgaggaaaagccccaccggaaaacggagaatccaagccggagatcggcgatcagaaatcgagggggtcgagtgagggagaaggagagagagaaacgtctaaacgaaataagtcaacaacgaatgccagcgcgtctgaaactcacgcgcggacgtaagtttactctatttataatagtacgtaaataatttaatattttcattacataattcggctatggaatgacaggtatacccttttgtaagccgcgaatttaaaaatgggagacgtgaaagccatcgtcctcttgaactttccaagagttgaagaaaatcacagaaagccttagcacagagaagagagattgaagaagtc

SEQ ID NO: 2168 - DNA, 1586 bp, Arabidopsis thaliana
aaaaaaagatacttaatttgctttgctctgcttcttcaacaacgatggagtcatcactaatttttgtttttcgggctcaaccacttgatcctgagatttagatttccttttggtgatttatgatttttaaaagatttgagaattgggcttttttgtttgtagtgatatgatgtcatgttttttatttttggcttctcgtttcttccttaaatcagttcttactaaatctcatcagttacttttacaatcagaccaaaaaatgtcaaaagtacacagtacttgctttcaaaatcctacgtagcttatgatgtggtcgccatgtcatttatagtactttactaacttgctgacatgtaattgttgaaaaaatattacttttattccatttatcaacacaaaactgggcttaaagcattgggccaacaacagtgaacaacgggatacaaaaagagttcgtagttctgcaaatcgaatacaggaggtccaatatttcaaaagatgcatatttttcttggctaaattggtcaatgttattgttaggcatggcgttgactttagaggcttcctagagattgccagatgagggagtaaaagtcagctttgatgggctttttcatacgtgataagcctaagaatataaacaaacaatgctctaactgaagaatggattgaactatttttaatccaagtctagtttacatacacaaaggtattgtatgttgacatgttgtaatagattcgaattttccacaagtctatctacattgtggtttgagtcattattcatttattccttccaatttagtgaaacttaaatgattatctgaaaacaataaatgattatatatactaaaaaaaaaaaacatatcgctgctactaattttaaacaattacagaaagaaggaagaaaaagaacaattatgcaaacaaatgtcaactggttatatcatgtcgttgtttaaatattataactatattattctcaaaccaaggtattgaacaaacgttatgtcaatgcaatcaaattactcaaacgttaagcataataaacaaaacttgttttttcttttcttttcttttcttcttcttcacgtcatgaattgtgtcctaaatagaagttaagcctctcagatttttttcccggatgataatgtgtagtatttacacgtatagatttttcaattttattgtctcatacaaagattaagattataaaaaacttggcgttgaggaataaaaaataaaaacgtgttcaccacccgccgatttagataccgttttcacatacataattagaatttttccgtccaaattgtttttggtcaaagcctcaatggtcttgaattgacctgttcttaaaacccgacccggatccacctgcttctttcaactaacacacgctcctgatccaaaccattttttcatttttcaaatcattatcaactctctcgcttcttcaacgatcgcataaattccctctttgtctgctcgattcctgatctctagggtttgggttccggagacgaagggggtgtttcgtgtgtaattgagatattgagattattgctttgtaaaactcaaaatct

SEQ ID NO: 2169 - DNA, 2000 bp, Arabidopsis thaliana
atttccttttaaaaaaatagccatttgttttgttttaagataagagctaagacatataactacttcctaattaactttggaaaaaagtatattgtcgcaagttgcaactcttgtgccataaaaagcaagtgttcaacacatgtttatagtgatgcctcatcaacagctcaattaaattgaaacgtaagtataatacacaatcatctacatatttttgcagacattttagcaaataaatcgtagagttgaacttatttacaactcaatgtcattagcattaaatcttttttccaaaataattcattttactttaaattcttaatttaaattgtcaatcacattatcaatcaaatttaatccaaacaaacttcccatcaatcctttaaaattagcataaacgtatttgttaacaatatttaaaacaaagtttttgtttaaataaatattattcttactaaacgttttttgtttaaataaataaatcctgtatttgaacttatttacaatttcatgctactggcattaattatttaggaatgaaaatatttaattaaagatttaaatcttctaaatccttgcttttagatttattatgtcattacctaaaaggcaaaaactattagttttttaaatattattatttatattttaaatttttttaacattactaatatttaaacttataaaaagtttaatatatcaaaaaatcttaacatcattatataatatatagagtttttaaaaatctcaaatttttttccgtcatattttgtgattcaaaatttaaaaaatgaacatatattaaccaattggcgaaaaatatgtgagttcaacgtcccattttgactaaaatatttagagaatgattcataaacatatcataaataagatcaacattaacaaaataaatggtttttttttttgcgggacgagtttggcaggacgttacttaataacaattgtaaactataaaataaaaatattttatagatagatataatatataaatttttatatatattaacttaaaaaaataaattgtcctgcggtatactgcagattaaaatgtatattaatacttacgacggacgtgtacaaaatattatatagccccaaaaatagcgctgcatataaaaaccacatctacctaagcctaccatgtagtgtagttgcatataagacaactataaattaataatgtagtttaatattttttttggattggtttctttgtttttggttaagtttttttttcttgggggtataatgattttagttaagttttgtttaagtttcctcaatgacaaaggtacaatttcggcgttacgtctagtctaaaataatctattaacaaaagaatgtacttaattagtcaatactctactcaatagtaggatatcgtttcagttttgtatgtggatttttttttaaatttttgaaaaattctattcaatttcaataaaaaatttctgaggatagtcaatgaaaaccaaaaaagccataataataataattataaagtaatatatcaaaacgctcatataatattccacatacatttactgtataatcagaaaactaaatagtatagttatcaagggtccctcttaataaaaccaatattattcaactaagatatactttatttatttggagataatttaattttcgtaagcaccatataaaaaaacaatgacgcaaattattattttgtttatgtgataaataaagaaatataaaacgagagaaaacaaaaagagtgagtgatagtgattacaaaggtaagccaaaatttgaatatttaatggataccaccagataagaagaactttgcttcaaagcggcaaagcttaagcttttttctcgcgcccgcctctctctctctctctctctctctctctctctctctctctctctcttctcctctaaccaaatttcccgatgtgaaaaaacaagtttccgatcaactcaaaccaccgtcaccacttcttctctccgac

SEQ ID NO: 2170 - DNA, 805 bp, Arabidopsis thaliana
gagcttagcctgtactaaattcggatataatcaaatcaacaacattaaccagtagatgataaaaattcgaaatgggtcaacccaaaaaaaaaaagtcaaattaaaaatctcacctttgaatgggaaagaagagaagagagaagcgagaggacacagaaaggtgattagttgaagaaagagaaatccaacagacatcaatcagcaacacttcggagaagaaaggtacaaaaatctcgtcggtttttttttttttttttaatgattcatgtcgtgctttcgacgttgtggttgctgataaaaaagtcaaaattgttgtttgactcttccagaagaagaaacaaactcatgattcatgaagcttccttttctctgggcaaaacttggatccaatctttgacattaaatgggccgggcctgtcttttaaagttattatataaaaataatcttaattatcatcatcatgtctgaatatgctttttaacttatgccaaatcacatttttggctcatttaatcaagttaatgactttatataacatgtgttgtgttctagaaaaagcaacagtgtccaaatctcagatgtgtaagaaagaaaatgtcaatggcgtttcaacgacgacaacaaatacttctgtggggactttccctaacgactgaaactattctctgtttctctctgaccatttgaacttttgatgtttgaagtctataaaaacctacgcgagaccttcgaatcttcccaaagtggcgaccttgaattaacacctgcataaagtttccatttttcattcttcgtttcgtgatc

SEQ ID NO: 2171 - DNA, 1417 bp, Arabidopsis thaliana
gttactttcatatcctataaataatgttgcactctcttgatcacccatcaaaagcttttgaaatagtttttggtaaatttgtgacataaatttgtgatatatcaccacatcgtattagtattaaacatttgtttcactcttccaaagagacaaaagcaaaactaaagaccttcaacttcaaggtcaggatatgtaatctaatggtttgtctttgtggcattttgccaccattggttcaaaataccattgctgtatgatcagcctcctcagattctatttgccagactctacggcggtatattcgcttttagaaaaaaaacaattttgtcgaaacttttttttttttgtaaatattgtagattccacacacaagactgtctaagattctttgataagacacgacaaatgcgatttaagatttttcaaagaaatgaggttcgttgattgttccactaggtttggtatatttataatttgaatttttttttttaaagatatttataagaaaacgaaggagtgtgctcgcgtcaagtgtgtactaatagtcgatgacactagtgatacgacgatactggaaagggacatcaatattcattagtaagccatcttagcaaaaacgttgttatcagataagaaaagttctcagactgacgtggctgtcaatctccacaacgtgtttatctcccatttgggtagttacggacaaagacgttgaaaagacaacaatatggtctaaaagattgacatggaaagaaaattgtttatccgacaaagacctcttggtccaacgtggctttcacatcactagtttactatttcacatctcatggaaaattactgaaattagtacttgtctgtattttgttttttcgtcaagtatttgtttgtatactttaggtaattgcgtgccgaagaaacattgctaaattgatatttataccaacttacaatagtttacagttcaaaaatagaaatctccattttgaagatacaccactaattttcttcatttatttaccccataagagaacgagaaaagaacaatagtccgttgatttcgttaaaatctagtttcagaaagacacgtctagatctgtctgatcagggcagatagacacaagtgacgaagcaaaagaaacacaaaaataagataagaactcttaccactaaaagataaaaataagaaaaaaaataaaacaaattcaacgatttgccaagataaaagcagacactgtacataagctccgcattcacttacgtgttggatacttaatttgacactcttctttgtgttttctcttccaccttctttttcggtatatcattcaacaaaattctctcttcatttctttattttgttgttttttttattattattgaaatcaagagaattaaaacagaggctctgcaaaagaag

SEQ ID NO: 2172 - DNA, 2000 bp, Arabidopsis thaliana
tttatcaaaatatttttaagcttttatcatatttttctgacaaaatacatcacatcagttcactaacttggattcaatattacatgtatcaatcaaaatcttagtagctattgttaggttgggcctaacaacactttaaaagcttaatgggtagaattcactttcacaagatagcttatgaaacggtggcatggtacccatgatcttataagccatttactttttttgtttctctcattctttttttgtgtggtatatcctagtgatacttagtcaccgttctttcaatgcgggatgatcttataaactgacatcgatgcccatgtccatgttaagcctatctcaactgtctactttatgtttatgggtcatttctagttagtttattttggacgtttactcttggttggtccatgtggctttgttccacctcggttggttctgtggacgtggaccaaccaaaaaagttgcgatgttttatggacttacgattattcgctgcactaactgttagatttaggtctacccataccttaaaaacctaatggtagaactaatcttcaaaaattagttttgagaaagtggtgtttttcagtttataagccaattacgatttcttctcccttatgatgtgatgttttaatgatagccatttgatagttgttttctcaacaagaagtgatttgatgttaatcacgtggaatcttatcggctaatctacttaattaaaaaaggaatgcagatatgtttaaatataagagttgtttctagaagcattgattgatatagatttgttttacttccgacatggctccacatgttgttcttatcttatattctcatcataagagatgttttttctcatgcgatgtacctatacctgcattagtccaaagtccaaacccacctctcttttattctttcccacgcttccatatcttgtgtccggcaccacgtttccttttttttttattaatacgcaaatttagaagtttctatatagtaacgacataatttaaccggtaggccggtacaggtttcgtagtagagaaaatcaaacaggttttgaagttaatgttacttatcaaaagttctgaccatcttatctcttttagaaaacaatagaaacaaacattccttgacccaaaaatcaaagtaaaaaccattttctcacaagcaacatcgtaatgaatcgtcaatcttcaaaataataaatccatgatattcagtcttcagtcaataatttaaagaaaatgtattttagtattatcttaacataacttaaataagaaaattaagaaaaaattaaacaaaacatggtcgatatataaaactattctgtatttctacaaatcgacgacaaatccacaaccttgactaaccgtacaattcaggctttgacattcgtatttttttgacatttacatttgaacaaagaaataaacacatgacataattgagaagaaaatcgaaggcggcgtttcttacttcatggttgtgagtcttttatgacttatccaatgttaggtattcttaaatctagattagtttcaaaatgaattacacttcactacaataatttatttatttgaactataataacatatctaacccactggtctaatttatatgtgctgatgcagtaataatttaaatgaaaaaactaatgtactacaaactccaaatactatttcaacatatcaaattgtgattaatgattgatttttaatcaatgggaccttgtggactgctctctccaacactctttcgactattattttcgtaaaatcaacttttttgaataaatatctaaacaaatccttaaagtcacgtttgattctctcaattatttctcctttaacactcttttaaacattattatatatttaaaacccttaaaaaccacaccacactccaaaaaaatcaaacccaccattcaaacaaaacacaaaaacaacaaaaaaaccatttccccaaaaaaaaaaaaacaaaaacagagg

SEQ ID NO: 2173 - DNA, 889 bp, Arabidopsis thaliana
ccactttctttgtagtttgtatcctgtagtcaagtctctcaaaactctcaagttaatatatataaagttaaccgaaatcatctgcaaattaaattactggtttagattggtttaagtcaattagtataggcccattgttagcccattagggatgaggcggttcttgagggtttgtcaagcataaaataattcagacaagccggtgaaaaagaaaagtcgtacgcgactctctctctctatcttttatttcctttgggagcaaggcggtctatcactttcagtcgctatatataatcttcctcatcgctccattttctcctacagtctctttctctctctccctgagaaaacaagggagactaatcggaatctcctgcgtatttgattcttccggcgattgtttccttctttatacgctttcgtatattcttgtcaggtaccaaactttttccccctctttggttgtgagcttctaatcatttgttttatcgttctctttgattcagcaatatcgaagccaaaatttgtgtgttggttggtgttggtcaccaaaatttcttagatatgataaaatagggcactttgattttacccccttttttagatcccaaagaaggaggaatagtttaggcgtcttgctatcaattttcgattcgtttgatttggctttagttaatttcaacatcgttgtagctgtgtaagattttattgttacgtagattggtttgctcgtattttcgtgtgtggtgaatttatctgggccatcaatgtttgacattgctagaatctgaatgtttctcatttgcttttctttttgtacagaagcaccattgctccaacagtgacgggtacaggatctagttctgtgtttgtggagtcaaggcagaat

SEQ ID NO: 2174 - DNA, 2000 bp, Arabidopsis thaliana
acaacacagtgatgatctctgttccccaaaaataaagtttcagggaaacattcttatgattcaaagagaatctgattgtttcaagcacaaatccattgcattcaatctcctcgagaaatttcctaaatttgtaacatataattaaatccaaggatcaaacgaaatcgaaaaaggtaagtggataaatggaaattggatctgtggaaatcttcgaggaaagtgagaaacgatgactgaaacagatcagaaactgaatttcatgcagagaggaagaagaagaagaagaaacataaacaaatctggtcttttgtttcttccagttgaaatctatgtgtgtgtgtggttgattttgatcttatatatataaaagaacaaaattaattggaatgttatgcttaatttaattagattaattgagtttaaaactccacgtcgaaaagcataacgagttcaaagtccgcagatcttgccagatgggaataatctattggttttaagttattgggccggagggcccacgtttaattgtgacgtggtttagtgctcgtcaactctttggtccgacatttcacttttttttttatagaaataattctagatatccagtagtcaaacttattgattatctaatttctatatccttactatttttaaaaaaattacttttaacatttctagaatttttcgattttttctgtacttattaactattagtaaaatttattgatgcttcttttggttatgttatagtattgagacaatgtattgtattctaattttgattttttttttcctttttaatgatttgtagattttgttttttcattattatatttgaaaaaatatcttcttatatcttaatcaccagaaaatctaaaaccgatggctatactaatttccggaatatatgaaatgtttatttttctattaaggatccaaagcagctaattaagattaaaaacttgggaagaactagtatcccaaacaaacaatatgatatccagatgtccaaaaggaaaaagaaatggtatcaaaagaaccaagaaatgtgcctagaaatttcatatagttagcttggaaatttctgatttttatgtccaatgtttatttattttttccttataattatacttgtcatacatcacaaagaattgtcaacattgccaaactagtcctaagatgttggaaggtatgatgatagacaacagttctaaagaagggaagatgagattcaggcaacaaaaaacacatatagttcaaaaaaattaggttggtaggatcaattattcaaaaaacatacaccaaatagattttagtaggggttgtttgtccaaaaaaaaactataatagtttacgaaaatagttacaccttgtgaatagattttttgtttgccttcccttgaggtaaattatgtcgcgagaactatatgaacaacaacgagatccacaacaacatttgattacatttttatttgaaccttcacattgatttagtaatgtgggattccaacatcatctaatgttatatgaatggatctaatagatgataaattgttaaatgaactgataatttttttttatttttttatgtgtatttcacatcacattgtttttttttttttttttttaagtaagaaaaagaagaagcacttgagaccgatcagaaaaaaattagaaagatatgatttttgtaagtcttttgaaatttgaatcttgtcccgtgtaattgtgaaatcttacgtacgtcctctttatgacctcgtcttcgctcatttctgccttcccttacgaaatccccaacgaaaaatcttagcttaacaccatcgcgaccggattccaaattccggcccatcgtctcaccgggaaagaccccgcctattgccgccgatttcggttccggtctgctcagatctaatcgagtggcttccttcttcctccagatctcttcactttgaatcggttactcgatctcgattcgcggagggcttttgctagtcgcg

SEQ ID NO: 2175 - DNA, 2000 bp, Arabidopsis thaliana
atgtcttttagtatagactgggatttcatgtttaagatcaaatgtgtaacgccaatgatcaaacacttgtatctttgccatttcaaaaaaatatttctaacgtactcaaactaatcacgagaatagaaaaaaaaaaaaagtaattataatttgtgatagagtattgcatgcatatttttgttgtttctatgtaaaaataatctaaaaggactgtgggaaatctacgaggagtgtgtggaacatgaaagcgtcagttctgtacaaatcgaaacacttcaatgacaacgagatcctgccaacaaacaaacaaccgcacgtgtgttgtttgttcatcatatgttcattaccactcttttgtttttattatcacagcacgataatccaattagagtagcgaattattgttgggaaaaaaaagcaaagatatttgataaaaaggtaaaagaatatgtttatgtcgaccaagaaaaacgaatatgtttctttcattatcaaaaattgacataccgtgttttgtagattgcttaccatttgcatggttgttataaaaatgaacaaatatacggtggaaaaaatctgcaaaattttacaaaattagatttataataatttgatttgctagttgttattgtatataacacacattggaaaaacatggagaaaaatgagatgtagatggagtgagggtccatgaagatgagattgtaacttgtaagattgtcagagtcaaatgaaataagttggaccaaccctctttttttcttttgtaattttcctgccaaattacccataaattcaaacttccatattcaatgttttctgtatattttttaatttatttgtcaacactgccaaaaacatatgaaagagtggagaagaattcaatccatacacaattacacaaccttagatttatatatatagtaatgaaacttttttttttttttacaatgcataatgttagaaagaaaaaaacatatgaaattcatgtaaaaagagcaaaatttatattgaggaagtgtgatattctatgtgaatctcttaattaataatatagatgagtatggtcgtctagaaacagcgcaatgcgccatgccatcggcgtcgaccaagtcgcttagcagctccaccattgaataattgccacgaaagaagctcagacacgagtcacatgacccacttctcttgcatggcttaacctttttttaattttttcctaagttaagattgtcacatcaaaaacctaacttataaccattttttcctgatacaaacattatgaaacaaattagttggtaggatttcaatttatttttaaatgccaaaatgaaatttctactttttttatttaataaagaaataatatatttttttctcattcaggatataaatatatgaattatagaaaataattttttattagtgaaactccatatatatcatatgaattgatgattagcgagcgacaaagttaaggtcagagggagtcatactcctaccgacgtacttaatcagatccggtttaagaactcggtttaattcaatggttcaaattaaaagagagaaaaacaaaacaaacaaaagaacgaagagataaaataactctttaactacttcttcttcttcctcttcttcttcgttgatatttttctctcattttattgactttccgaatctccaaaaatctaacccaaaaaataaacaatagttttttttttctccgcaaaggaaaaatcttttcttcaccaaataatttgtctctttcgcaaatctcagctctctctcgaagtgcctttcaacgataaatttgtgggctttattcatttatagtgttgttttgatgatgacagattctattaccagaaattgatcaaagagaaaaacgttgctctctcttgatttcttttctgtttttttttttatataattaatttgttccggtgaatgatcgtcgtcttatggaaggttgtagctaatttctaatctatagagagagagag

SEQ ID NO: 2176 - DNA, 967 bp, Arabidopsis thaliana
tgcatacagaacaagaagaagatgatcaagaaattagcggaaagagaaaacagagagaaagatgaggaaacttgtcgttgtcgtgtgtagggatgaattagattatcagacagacgaagagccgagttgtttgggagagcttttattaggaaatttctgtttttttgttttccgaaataaaaatattttcttaagaaaatttataggcttttcttatttaattcccctttgataactttttactaggaattggatgagcatgcatcgacccggtttgagagagaataatcagaaccaaagtattgtacttatcatgagattatggatacactcaaaagatacatttaccagcggtacatttgtagacttgtatagtttatcgaaagtgcatgagcatactgacatgagaataacgaatgatccgtttcggttgtagcacaatctttggtagttttgtatgttgcataagttatttttatccgcaatagtggatccccattcccatcagcaagcaataataacaactctacacgtaaagagtctaatttgataatttagtcgactgtttaaaatgatatctctagttgacctttattcagttttctcttttgtcttaccgtctgaatttttgtcccattaattttgtcaaaattttataatcctagtactatctattaattttgctttttcaattttcccacatttaacattaaaaacgaaagtgaaacgtagccactatggaatatgtttcattcatcgttagtgttggcagttgcaggtggggacaagctgcatttccatgttgcttccaaagtcaaacagatcaaagcagcctctttgaccaaaagaatccaacttttttcctcaactttcatggccgccaaaatcaatcactcactttccaccaccaaaaaacctcagattctccaaacccatatcttcgatttcaccataatccaacataaac

SEQ ID NO: 2177 - DNA, 53 bp, Arabidopsis thaliana
gtattactaaaagaaaacttgaatgttttttttttccttttctttagccattc

SEQ ID NO: 2178 - DNA, 2000 bp, Arabidopsis thaliana
gataattgaataagctaaagtcgttggttgatctgatgaaatggttatttcctataaattctattgttacgaaaacgttttagaaagaagaaccgtttaaaagttatcaatcaataaagcaattaatcgaaacagttaaagaagacgattagagaaagtgactgaaagcactgcaagatggcaaatctagacaacgttctttatcatattttttttttttggattaaatatgttgaattggtgaaaaaatgcacatgtttttatcagtcatcgttttccgcgcatctctaacattttcttcattggtttttttaacagaaaataaaataaataaagccaattccgtgtactacatataagaccacatcttttaccaagccaccactccaacccattgcatgtctctttaacctttagttaacattcttactatagaaaatttcgaactgattaagtcacagaaagtttcaaaatgattatacttaatcagttttaatttcattttaagttaataatatatatattacgataaggataaggtttaaaaaaaaaaaacagagtaggtatagataaatcagataatgactgataccacttgttatttttcattgtagctatagtcaaacgatatatttttgtgttacttttttgttgtcagttatctttactggctaattattacgatgtaagtaaaaataggtatagccgagttcatacttataagtcaatatttctaaaagatagtttgaaaagatcgatgagctaaattctttagtttaactgtttaataaaaagtcattggttggttgcgttcaatgtaatggttatttctttcgaaatcaatttttggtttattcagaaagcatatgtaacgtatatattttataaaagacattacgtgaatatttttataaaacaaaaagccattattaagatgatattacgttacttatttaattcaaacgtgaaaagtacaaacttttttaccgcgtgtttattgtcaatttttgccacataatttagctatctagcaaatttatatatatatttttttttatcaccatcaccaaatattaatggtggtattttttaataataattgatatacatctttggtggttgtcagagatgaaaaacgccagtgatagaaatctatagttgtcgtcgttagtgtgtcgagcgtcaatggatcggatcagatgtaatgaatttcaaacaactgaataagatagctagcactttatattttagaaaacaaaatagtttaggtgtagactcttttttttatattaaaaattgttttgccactgacttaatagaacaccaatttgtcgtttttcttttttcttatatagacggaatcccgtgaattcgtgaaaacacgtatatttgttctttttaataaatgtggataacttttaacagattgatggggaacatggtctttgttaattcagtatctcgtaaatttggtcatgtagttatcaaaaaaaaaatttggtcatgtgtacgttttattatatgaatagtattgcgatttcaatctgttaacgttatctatcaaatattatatttcaagaatgtaaagtttcacacatacgtcatttggtttacatgattttaatcaaataatttttttaaatttttttttagtaattaaaatttacgataaaaaagaattgtcgtcataatataaataaaaattggatatgctaatttggttatatgagtgcttctctatatttttaattcgagtgctgggcaaaacaagagtcaacatgttcatttaatttgcttttaaaaaaaagacaagcacattgttttacattaatttatagagtatttggtgcaatgataatgaaaaagcatgtgcaaagaaaaggaaatcatagcacttcctcatgtactccactcactagcgttttctataaaatgtcatgatttgcggtagtgaaaggccaacacaaagaatcattttacctctaaagccaaagaccaac

SEQ ID NO: 2179 - DNA, 2000 bp, Arabidopsis thaliana
ttgagaaaagtagacaaattaaaaagagttttatgtatatcttaattatcgattttattcgtaattgaaattgtatttgtttacggcaaacatggcatatgaagaattctgatacttcaattgaaatgacaaacacttgaagaaaaaaaagtcgagtttacgtacgtataagaacacgcataaatcgaatatttaagagatgaaaaaacgttttaatattctctaccaactatatatatattttttttcctcaatatataatttgtttttaaagttttattaaagatggactactttgctactctattctcctatattattttcaaaatattggatcaaaagatggaaaaaaaacgaaaaataagatgtatacatttttaaaacaaaacgtagctggtgctatgtttacgaagtatgtacgatactcttctgtctcttattctcagccgttcaatgtggacacagtggggtccttctctttctttgtactaagttcgtcacaagtgtcaagtggaaaacctactttaaattattaattaaaagttattattgaattgaaatgcatgcgacaccatttgattaccaatcaacaaatcagttaattatggttttggtgttgtgaaatatactcgagttcttttgggttccactttggatttaaatactgacgtatgattcccttgaacttgaccaaattaagtttatactctttgttacaacaaaacagatatatacctttaacaattacttttttactttttcagttaaccatttttatcgttttttaccgcatcgtcttctccatcgccattacacaaaaacctttggtagcacttaaaaacttttatcagactggccacgtcacgtattgtatattgtggttgtgatcaccatatttaaaaatggcgaaatctaattaaaatattgaatgaagataaaattagttattaatatttttaacgtaatgtaaacattaacataaattatacatagatttattttctacaacatatggatatatattactatacgattatgacactattacaaatccataaattggtatcatcttatcgcaaacttcgttgcacacaaacaatttgactaaacttttgatcgtgctacaaaaattctgtgcacaggaaaaaacttctcgtgaacaattatttcttaccaaaacaagcgacctaaagtttgcaatttctttccccccccaatttggcaagttgacaataagtgtttccctagactttctcgagtaaaattaaacttttatcagactggcctcgagtgattcacacgcgcatctcggtagcgcgtcacgtggcatgtctcgtcttattacagcgtatccaaattgtttatctgttaactgttacgtgtgggaactctatgatttagtttatccacattaatcagaccctcaaacatttacatttaccacctccttattttatttatttctaaatagaccccttcactattcagattcccagatatgagatcacagagattcttacttgatttgacgaaagacaaaagagatggtctaaattaaaaattcgtttgcgcttattagatggcagaatattaaacacattcacgaaattacgtactacctttcgtgcaaactttttccatccaaaagttggttttatatattaaatccaacggtggaaagaaactctatcaaacaaggaccactagatttcagaaattaaaattagggtttattagatattgataatatattatggggtgtttttgtaagaaattcataatgagtggtatagttgagattttatttgtcatttcacattcttttggactcttctgcttacaaaaatgctatatatagtcgtccatttcccttcgtttaaaacttatagcgaaatctctaattacttaatctctgaatgcttaagataataactataatctaagagtaattaattaaacgataagtggttaaatttgttgaggttaaaagtgaagcttca

SEQ ID NO: 2180 - DNA, 1650 bp, Arabidopsis thaliana
tcaacaaagccaatgaaagcttgtttcagttttaggaagaaactactgaactgtccagagggtttgttttggaggtacggtacggatcagattcgtatcctgttcgtacacgtggacccttggacgattctttgtaatcaacggtcagtgttggaaacaggatcgcttgacgtggacctgtaaagcggggattgtctgacacgtggcgctaatgcaccggccaaacaatttggttgtcacgagctattacgatactttccacgtgatttgtttaagattagccgtccagattatgtaatgttggtagacaccgtaaggaatataatctgagaagcagacgaatattattttccacattatacaaacaaatggctgcgtgtgagagactgcgattgtaaaatctggtgttgttattttgctagatgtcaacaaatcagagcaccattggtttaatttcatgaataaaagccactgttatgataaatataataatattaatcaacacatgtattctctgaataaattggaataaaataatgaatgagatgagtttcagacttcggtgattgagaagtgtggtgtggtgaggcagtggagtcagggggctgcttcaacaacaaacattctctctctcttgtctaagcaaagcaacccatataagatatatacctgaagtacacgaccactttctttctccatctcgtctctctttctgtcttcttctttcttcggcagctatggaagtgtgttggcagatacagagaccagcgagtctcagaccgggttttcaggaaaagggtcgggtcaagatcaatactttttctgttgggttttttcctcgctccatttctagtgtaaatctcttttgtttcttctcgtctcaatttttttcgctgatatgtttgtatatctctttagattctacttatcgggaatttaagtgtaaagtgttctactttttcatagtgagatcgccttttcgattagtatatctttaattgaatcaatgtactatttttaaataagattcaactctggtagggtctctggattgggattctcatgttagaacctcgtttgaaattggtaagagtataggaattgacttaatttctctaggaaatgttcaatttcttctggtcaaaatcgtcacctcattgagaataccaactcgaggggagagaaatgattttggggactatgagctagaagtaagagtcagctgaagattcacagtagaatgaaaatgtctcatcttttatagtttgattttaatatccaccttgttttacttatagtgtgattagtttaggtgttcttggagatgaaaatgtctcattcaatatggttttgatttataaatggctaatattcttcttgtttattgctggtgtggctagtttatgtatttgttagagcttgtgaaccaggtgactgaacagttttataatcgatttctaaccatcagacatgtttggctttcagattgcttcattggaaagtcaatacaaatcaaatgggtttctgcatcagatcacggcaagtgcaggttaagaatctgtgataacctttcattgtgattactgattcagtccttttgatgatttcttattttcttaaccaagacttttcaaggaagaagcaaggaag

SEQ ID NO: 2181 - DNA, 220 bp, Arabidopsis thaliana
aactgttttttgtatcatcaataaactccctctgaaatattattgcgtttaaggtaataacaccaactgtttgtaataacaacagaattactgcacattaatttaccaaagtaatagtgatccccagattaaccgatttattttttaattaaaaatgataaaatttaaaggttgttgaaaggtcagaaataaaaagccgcaaaaactgaagaagcaagat

SEQ ID NO: 2182 - DNA, 1924 bp, Arabidopsis thaliana
tgccggtgacatccattgttttctctgtggcgtgaacattagttcgaaaaaattggaaccctaatttcccaaaatgagaaatctatctctttcttctctctctgacaacacaacggcttcaagaattttgaagtccccgattaaaaaaagtaaatcgccgacgagtgaggtaaaaaggtaattacatttgttttgggcctaaaacagttaaatatgcgcaaaagcccaatgtaatatctggcccgttagagctacaagataattaagaagagggctaagaagatgtctagaatattaaatgttagtcgtcacttgaccgctgatgtgaaagtgaacatttgtttttcttgttgatctttttgttacaccatcttaaaatatcttatctgttagtaaagctaactttaaatttataaacataggaataaaaccgttgtcccatatgcatcattattgtcaaagcgataatgactattattaaattacataagactcaatttgctcatacatgacatgaaatggtgtttgaatagtcaatcgcgcagccatgataatgagagtaggtaagacgtatttgctgcgaagatgtgtgactataataatgacatgaacatattgtgataatatataactaaaaataatatatctgatcataagcatgtaaatcatgttactaactaaatgaatctgaaatgtacaacaatcttatatacaaggaaaaagatgagttgaacaagcttataactatggttaaagctctttaaattatgactatttgtagatctaaggaaaattatgaatggaaacatattttatttgtttgaagaattaccaacaagaatatgcaaaataacctaattttatttgtcattgagctcaagttgggcaaaggagctagatgacatattcttcttttgccaaacttgaatattatttatgtagatgaatccgcattatcgaactggcaatacatgatgaggtggaaattaattttcacatgtgtttgttaaaaagcgtgtctgtgtcagagaagataatttaatcaggagatcgagccagagagcctggcggagatcactggaaatcaattattttagtttgataatataataatagtaatagtactaatccttacattagaaatttagaaccaaacaatcaattaaaaaatataattattcattcactaatcattacagtaaatagtaattacttgctagttgccagttcccactctgttgactattcttctctgttccaagaagttgtcaaaagagataaatatgtaaccatcaacgacttcgtcttcctcttcgtcttcgtccacggctctttcacattcgtaaatcgttcctctattattactagaacaagacaatgagaggtttattcttagataaaaattttaaagagatttctatacattttaagactctagctcactgttacattccattcaaaatttcttcttattcaaatgtttctaattattcttaattacgtattgacctttccatttttttttgccaactatgtattgttcacaaaactaattttaatcgaaaaaataccatatacagtactccctaggattctaaatttccaagatatttatttattcaacttcttccataccatgaaaatacgaaaaaataaacaataaaactccgtcaataaaataataatccgttgaaagtcgtcgttcaaagttgggtttttttcttcatattataaaaaaacactcgttcctcttcttttctgagttgctaaaatgccaaatcaactcatataattacacataaaaattcaacatttctctctcaaatttcttcattctttagctccaaaaaatcttcattctttcattctttttcctaaattttagccattgcccaaaactttacagaggattttcagacaaaca

SEQ ID NO: 2183 - DNA, 412 bp, Arabidopsis thaliana
ccttacaagtgagatcattaggtgagtttctttcgaatatccatataagtactgtgaaagtgaaagcttcttatgtaacacctctctacgtttttttttgtaatatataagtctttctaattcagagactcgtattaattaagcaagtttcttaattacgactttgttaatcacggacctttggaacgaggtagaaggtcttgaacatgtgtggaacccaccaaaggaaaaatatcagtagattcaggagagttgttaaattttgcctccacgagtttttttcttttcttcttgttgagtcgtttacgtcacgtcgagaattttctcttttcccgagaaaattaagaaaggatcgtttgattttctaagaagggaaagataaacagtgaattagaaagagaaggaagtttca

SEQ ID NO: 2184 - DNA, 1830 bp, Arabidopsis thaliana
aaaaaagagtttttttgtgtttcaataagagaatgcaggtgaagcttctataagtttgacgaatgtgatgagtctttgagttctataactaaaatgaatgtgatgagtctttgaggctttgagctaagagttatacctactacggtaagaacccgtgttgcgcaattgcaatttcaaaggcttgcattctttcgcctcgtttatttccatttcgatcataagacgatatctcgttaatcttgaggtcaatagaagccttaatgagctcttctccaacccgtttagctgcttcctgaaatacattaaacatgtaatgagaccaagagggaaaaccattgttcaagatcgagtttccttgaccctgaattcttattacattgtaaaaatgtaactgcaaatataacaagcaacaacttcaactagactagtctcttctatctaaccctggaactcgatgccgtcacctctatgaaatccaaccattctctcaatcaagacagaaaatttgtgaaacaactgatgaccaatgaagcaaagacaatgccacctatacaataaaccgtgtagatatcaaaacaaactccaactaaatgttacttaaccggctaaactcttatcaaagttcaagagtgaagcaaagacaatgccaccaatactgtaaaccgcgtaaccaacaaagcaaactctgattaaatgctgcttacgcggcgctacactcttatcaaagtttgaagatttttcaagagacacaacagattcaagattttctggtggctaaacttacaatgacagtacatggaggatctccgcgaatggacttctgcaatgtactagcgtagaacaaacactttttgttaaagtcatcaaccaacatagcatagagttgtttatctgaacagaacactgaaagtcttggttttgtttgtgttccagtaaactgtttcaaaatgaaagaaaatacttattaacaagttcggcaaaaaaaattcaaacttttgtgcattattatatgaaagcacttctagaaagctaccttcttcctgctcctcctgttcctagttttcggactctccactcgagtgttccctctcgcttcaatcacaaacggctttactacagacatagctgataaaagggtcgaaaaatcatgaaccaagtaagcgaaacagaggataataaacatggaagaagaacagagtaagacgaattataccactcacttgttattcgaattggaaactggggataaggtttcaaacgagttccgagaatgtcagagactctaaactgaacagtagaaagagaagtcaaagcagccatgccaagtatcattcgtaaagcatcgaaagtcagaacattaccctcagcggaatttaatcaaacaccttctgtgcaggaataatctctgggggttttatcaacactccaaaaaaactggaactttgtaaataaaattataaatgttcgtacctttatgcaaaatttctcacagcgtaattatctatttcctttttgtcctttatgaaagaggataaggtttttaaataataaatactaaattgtttttaaaagaaactaaaaataaatggaaagtcttaagcgtcgtcaatggttctagagtcttctgcaactttcttttcatgaaactactgtaatcttctgctaacatatataatctcaaacactatcttctccaatttcaattgtcttatctttcgacttttcttcttcttcttcttaagagatttttctccaagaaagttcgctccttttctctgttcttaacaaaaaagtctcggtttttttctctttgttttgggtactagcgtg

SEQ ID NO: 2185 - DNA, 2000 bp, Arabidopsis thaliana
actcaaaagagtgactcttaccggatacaaaatgaaaatagaagtcttggtgagataacaaattaatgtgtaacataacaatataatatcataaaagattccaaatggggcttttgtccacacgtgatatgcaatatgcaaaagaaaaaagaactctctttcgatctgccggtcaataacaatgtgaatatagattaactgattaataagtagtttcttgggtcaatgcatgggatattatatttaagaaatacaccaaaaatgtattcgacgttagccaccacgttccattaaaaattcaaatctaaatgatgattaccgtcgtctacatctatgattacaaattttttgtctactatgcgtttagttatttaccatggtttgacgattatatatataacacacataaattatgacggtttaacgttgtctcttaactcaaaacttaattttacaaaaatattatttaagagttgaatctcatactttaattattcatttggtcaactagaatgcgaaaaatccacaatacttcgtaactaatttcgggtcctttaaatcttgatcacctgttgatcaacaaaagatctacacataaagattgattcatccattgactaaacttttatttatcgaagaaagactatatatatctaatgcatgcatgccatatgcacaataatctaatagtaaatccaatacgtctcagaaagataaaatcgtccataataccaaattttattctaaggttttgatatctctcataatttggaagtgtatgtaaaagtttcttaaacataaatataacatccaaagaaaagttgtaaacacttaacatcttgattgaaggggaatctcgctaataattgtgactgaacgatagtaagtattattgtaaaatatcgatcaaaatttcaacgatatgggcgatccagacccaccactttgttgtcccttagcagacgtcaaccatgaccataattagttaaaaaaaacaccaaacaaaaaccacaacttccttttaattctttttaaattctaaatttcagactaacaaaaagtattcataagctgtttcatgtatgaatttaatatcatgaatactaataacttgagccattaactttaaccaaaaaaaaaaacttgaacaatctaatataattccctgtaacatttaaaagatggagatgggaaaacaagaattctaaagaaacattgtaaaaatgaaacagagacaaatattttcaagcaagtcttgtttcatttcatttctgtttgaaaaatgacaagtttaaagtcatgtctcatatgtgtaatattattaactttaaaatataacaaaataaatatctttgattactttttgaaatgttttttatctcaagaatttggaaattttcgttgattgatacattataaaatctgaaaattagatgtgaaacacgactttttgtccaccaccaatcctcctagaaattatcagtttatcactcgattactgaatgaatgaatgagttatctctgaaaagttgtcgtaccatttattatcccacgcggatttactgccgtgagcatgacgttaccgtatctatctcaaattactaaaattgtcctttccgatggccgtctaaaggaactaactcgagggcattttgtcattttgagaaattgttatgagtttgagtacaaaacaaaaggacacgacgactttgtattatttgcttcaaatcctctgttcttcaccttccttgttccttcttctctccttcttttttatatagattttcctttcatgttgtaatacttttattctattagcgttcatattcagctaaacagacattgcgccgccgttaagtcgaaaggatagaaagaaattaaagaaagaagaagcttgttgtctttgcttcttgaggctctcttcttgtcttgatcatctgttacgttgttccacgaaaagaacagtagctttgtctctccatatagggttattatctgaa

SEQ ID NO: 2186 - DNA, 2000 bp, Arabidopsis thaliana
tcttctaaaggctctgacatatcaggtgtgactcatgtcaggatgcagccttcttcttcttctcaaggctctgaaatatctggtttgactcatctcaggatgcaaccagctccatctccgccttctaggttacgaccagttcacttgatgaataatggtatagcgaattacgatcccgggagaatccctgcatcggtgtttagtaagaatggggatgtggattggagcgaaatatcaaatgagtctttgtttagtctgaaaattgatggctatagaaagtcaaacgctcaagggtctcgtcacagtaatttaaaacctgatgaagttttgatgtcgggtgagttcttgagatattccccttctctggtagtcaaacctgaggatgcaaaagagaaaacatctgaagtggaagaggtaaagaataatgaagaaacaagacttcagagtcacaatcatcgagagaaatacccgtcatttccagatgtcccattgagtagtatccccaacaacttctattgcttatacgcgccgcggacaaaacctgtgtctttttcccttcctgtgggtgagaaaaagagtatgaagagaaagaagagaagaaagaacaagaagaagaagaataaaaaggagaagaagaagaagaagtgttgcacttgcatgtggacttggttgtgctcagtattttcaaagtgagtgtgtgacttgcgttgctctacaaatggagaaagtgtggctgctgctgcaagcaaacaatgtttttgtaatcatgagagttatgtattgacatttaaacaactatctttatttgcatccttaatgcttaatgtattcttacgctaatggttaacagttttcttctatgctttgattccagactattatttatttcattatagaaaatgataatgtattacgaatacaagctgtatgggaaaaatatgatgagtggggttgattataagacaatggattggagaggcatggaagatgcacaattattttgacttttaataataagctcataccaaacacactatctatatacattatacacattcgtcaattatcaagttgttcgaattattacaagttctttgatttggttgattaaaattacaataataccctcaatgccaagagatccgtataacggctgggggatgaataataacttctctggtcatcgaaacaaaggcaaatcatttcaaagcgaaaggaaaaggagaaacgtaaagagggcaaagcccttcttcttcttgttcgagaaggagctgcagcctcagataaggattcttttgatgcccagttgataaaggaagcgactttattttaaccaacgagattttatcatcaggtaagcaaagctgtttgattcgttgattcttttgtatatattgaatatgtttttgttcgctgttgattggtttcttctttggcttttatctataatagggttggttaattggtttgttatttgacaaggatcattgatcaccctcttgagaacatctcgagctttcccagatctatctgagctcctgggtttataaatcgcttccttcacatatcgatggggtgcgtttcttcttccgatttctgtttttgactttatgcagaatgttttggtatttgattgatttggatttgagattctgtttgatgggctttgttcctgcgttatgtgctgcttgggattcatgttcatgatagataaaccctaattttattgctggggaatggtgtttataaggttgttttatgcagatgagatagctatctctgaaagttttatagaaaaatgttttgctaaggaaataaggatgttttttgggcaatgatcaaaagttatggttttgtaacagagcagtggctgcgtgggttgctacagagaacacagatcaactgccgccagtctgaaggatccaccttccaattccattgctcgaccgtgtaagaaaccgagtgtctctgaagatttctggtcaacaagcacagttgat

SEQ ID NO: 2187 - DNA, 2000 bp, Arabidopsis thaliana
caaatgagggaaagaaggttaaaaagctttatcaaatcttgagtttgatcatcggcccttcgacaggagaaaaggctagctatagatacaaaagtaatactaagcataaactaaagagtaaatttaaaacgtgctggtgggtgtatagtcgaagtaagtgaccaatctacactcactgaaaattttaatatcaaaatttaaagctaattcagcatattataaaattatggagtgcgaaactataaaatgaaatcataaaagatcatgcgagattaggtggaacttagcaatcatcctaaattacaaaaactcgatcaatgtgagttgatgtatactgtcatacgactaatagattataaaaagaaaaaagacctaaagcatttttattggaagtctcgtaacaatgtaaaaaaataatcatacaactaatttattagaattccataaaagagtttttagtttgagatatccataaaaaaaattatcttcttaattaaaacactgatatatatatgtactctttttaagtgttttctatttattatttttacaaattataaagtaaaatgatatgaatatcagttaaagagtttatatgtttttttttttggtttcattttaaatcataatataaattatctatttattaacctccattatgcataactctaaagatatattagaattattttaattagtattaattaaggtaactacaaaatatttgatatgtttagaacaaattaatacaatgaatatttttaagatgtaatttgatgaaaattaataaaatattaatataatattaatgaaaattttaagattaaataatattaaaatagtagtatcttaattaaggagatactatggatatcacaccaataggcatgctctaacatatttttttccttttcggaggattctttttatatatatatataaacaaataattaaatagcatcccaatatatacataaacaaagtttaaatcgttttagctatgcctgatttttttataactttttaagaattagataaataataaagcaacatgtctaaatactattctaaaaatatatcaattgttaattgggacagcccaatttgcactggacacggcaacaaatgaccaaattctatacacaaaaacaacaaacgagtaacgtttaaaaatgctgacgtgtcccaatatgatcttacctttgatatcgtttttaaggaaaagttgtgattgtctgagtcagcttgtatgagttcctacgtgttgaactaatcctgacactacctgagggaggtaatcacaacatttttcatatataaccgccccaatttcactgatttcaccttttccttttaccaatcacatcatcccaattatttacgtacttagcttgactagttgtcgttcattacaaccatcttaggtttcttataatcattcctgttacgtagtaaagaactattttacgtaatagataagattagatatcagttgaaattattgactatatagacatcctaattttatttccattgttaaatttgttaatatatctaactatcaaaacctaaatcgacgtgtcacactcaaacttataaagactaaacctattacaagaaataagatcttataggccgaatttgtttggtacgttgatgatccaaatataaataatagtttttctttttctttttaattatgaaaggttaaaaattcataaaaaaaattacccatatttgcttaagacgctagcttttctataaatacagcatagccatgtgtaattgatcatcagataagttccgtggttatcccattaaccttctttctacacaacacaaaactatatataaagatcatacatgtaataacgtcctgcaactattacaatcattctcgcttgaattaacgtggacgtcattgtttttggattgttaatcaaaggcggcgttacttttttttaatataattgtttctttaggatctttgtctctggaaa

SEQ ID NO: 2188 - DNA, 1583 bp, Arabidopsis thaliana
aaacaagacgccttgttttttctctgtgatgtgtttcgacgctttgtcgtttctgtattacttgacgtactgttgtttttagactatccattgcccgaaaacgctatattgttaaaatcgtgtgtcttgtttattcttttgtatctccgtaacttaatcatgaatatcaatcaataccatatgaggttaatgattaccgtgtttaattgaaatggtgtgaagaattaggttaactataccatatgaggttaatgattaccgtgtttataaattgaaatggcgtgaagaattagactacatgacaccaacaagaatgttttcctttatcaggataaacgtgttcacctacccaaggtattatttatttattcaaataatagatattggttatgtttcgcacacacacaacaacaacaaaaattagatgtagaaatatttcactggaattcacctttcaatgttttattgatgaaattgatagagcggagagtattcaaaactttaaaagaatagtttttttaaacagaaaatagataaaaatccaaaagaatagttataagttaaaaaaataattgaaccatagttgatgattttttttccccggatttttggaaatcaaaaatgaattgaagtgaatcaaagttgatgataacaagtgaagaccagtttaagacaaaacaatcggattctttggttaactccgattcatgatccagtttgctgctaagctaagagaaagatcaaaaatgaaattttcgggagtaactggtaggagaatgggagatggaaagccaaaggttggataagtgtataaaaagagagagtcggatgttcataaattttgtaataaagaactgcggttaaaatcttggatccctccactccacggctccactgtgtagagtaaattcttgacgcatgttcatagacatagtaatacgtgaaatgttgtgattcgctttttttcctttggagggaaaatcccccttgtatttgggatctctcatgttccattaaccttatccagattccaatattgaaatatcgaatatatatagtcgtgtatattagtgattaaacatatatcacaacaccactttacagtcacatatacatatatatttgaattaagtgttcaagtttgtaatatgagttttgtggatctagcaaataaaattgaaaggaattatatggataaatttattttgttaattcaatatattttttatggataattaattttaaaaattttactctctttttttttacggctaaaagacgtttacattcaaaatacaaaacaaactgtttttgtgacaaaactaaatcccttgaaatagcagtatagacgtagtagacattaaaaaatctatagagcttttactatcgctactcatcaaactagatataaaatatatataaacgtgattaccgtagtacctacccaaaagcccaaaccctacgtgagcatcacatgcatgatatcgattctataaataatccacacaacaaacactttccagatatcgctagtgttcatttctaacaaatgcacacctcactacacgcatacatacatcatg

SEQ ID NO: 2189 - DNA, 1074 bp, Arabidopsis thaliana
tatcttgtttcccaagaaattctgttttctccaactggtcactgtcgtgttcatattctgtttttccttctctcttatgtctttggttcaaatctgttaaagaaaaaaacgcctgtgaataatacttaataagctcgttcgtcttcgtcaacatacaaaaatatcaactacgtagtaataccacaccttatttatttagacacatacagttcttgtttttcttttctctttgttatatatttcgatatgccctttattttttattctttttataaacatcatgaatgacaacacatgtgtgtccgtttcgctttccggccgtttttacaccgtcacaccattcacaatcccaatgttaaagacacatgaacgttgggataaatatttctttgatttaacggaaaaaaaaattgtacaatgcaatatattattataaatgtatatacaaagatatatatattatatatatatataacgacacatatatatatatatatatatatatatatatatgtcgaggtaaatttgaacgatatataaggggttggtaaaaaaaccaaaaaccaaaaagtgatttttggattttggtttatagttttcagattgtgtattaaaaaaaatgaaaaactaaaaaaggttttataaaaagtcaagtcactttaagaaaattaaaaaccaataaaacataaattttagattttctttaaaatttgacaaaactatcaaaatctaggtttcctattttttagaaaacacactttttcacaatcttggttcggtataaagtagatttttagaaaaactaaaaccaaaaacaacatcaaaatctacaaccattcaaagtatcatgtatcaatttacctactttgggtctggggtcatactcataccatatgtcttttatcatctgtcctttatttatattttcttccatcagtcagtttaaatcaatcattttcttcaactatttaagtcaatccaatcaatcatttaggaaaaatacgtatacgtttttaataccacctacaaaagaaccgtgtccaaacttttgtttcgtccaggaaagaagccgac

SEQ ID NO: 2190 - DNA, 2000 bp, Arabidopsis thaliana
ccgacaaaaccaagaaatgttttttgcccaaatctatttttgcccaaatcgacttaaacctaatatttttgaccattgggccgcccatgtccattacgtccagtccgctaatgtccatgtccgttaacgcccatatccattaatgtccacttcataatgggcttgtccatgcccggtccattaagcgttggacacgggcagcccacgggccgcccgtccattttgacagctatacatcgagcttttggattggagaccttaatcattatatttgaattcatatatatttttcgctaacctgttaaactaatcacatttggtgtccacacttatattttgaccctatgttactatatatatatatatatatatatatatgcatgtgcaattccattgtaaataaccaaatcgatataataaggaatgaacctcggtatgagcttgagtcttgatgttaggaagtgacgatagtctatagtgacctgttttgttatgcggttagaagagattgtggttcaaaatggtcagaatcttttggtaagattaattaagaagttgtagcattttcataaataataaagggtttatttgtataccataatactattttaagcatcaagtacatttatgtcacatctatttccggttagtttaattttattaatttcgtctgtaaaactattcataactaccaaaccccattttcttatttttttctcaaaagaactaccaacagatcttcaacggtcttgttgtcgaattatttatttactttctcggggcctttgttactttataattagaaaaaggcgatggtcaacattctccggttaacccccataatgcaaaatcttattttgggcaaatgagagggtaaaatagtcatttaaagaattccgaccggagtttctcctttgattcctcgcccctatactacgcgtcgtgtcagactcgtaactccgtttgactcaattaccccacatttttcattccatcatttcctttttcattgttttcattgtttttggctagttaacatagccaaactatgttcattatgcaactcacgaaacttaatacaaagatgaatctaataactctggttaacgaagtatattctccgttgacaaaaaaaaaaaaaaacacaaacagagaaaagtgaaatctgttgtattaagaactttgtagctcctacaagccttttcatatattgaaaattcacatatttagcaaaagaaaaaaaagaaaattgaaaaatcattcccgttttcatgtactaaaaagttttaacagtaaatatgcatatatttaggaaatgtatagttgccttgataaattggtaagtttgatttaatatgcatttaaatataaaactctttttacatatacttaatcttcaactatcattctaaagtcatacccttttaacactttatttatcctctcttttttttttttggacaactaactttattttatccaatcagcttttaaaatcttaattaacatggtttggattggacaagctaagtaataatactataatacgccacgtatatatacgacgtatccttcttctcttcacgtataaaataaaaatagtgtgttattgccataacatacgtgttttctaaaatttaaaagaaagtcatttatcatgaaaaggtatcataatcagaataagagtaatcagtttgaaaactagctagttgactaaaacagaaagaaaaatatctttacttgaaacatgtgttgagaattcacattatataaaaggaaaaaaaataaaacatgacttttgcgtagacaatccatagtccaatcaacaaaacgtgtggacggcaagggttccttctagctctctctatttatatctctcactcgccgatttttactagtaattaaccagaacgttcatctaccaacaaatcctcaactccttcttcttcactaatagtataccacaaaacctcaaaattgtaatttattagattatcgtg

SEQ ID NO: 2191 - DNA, 1003 bp, Arabidopsis thaliana
ttagctaacctaacaaaaaaaaaaactgtatttggattcttcttttattgagatgttgatgctattaatccctgaacatgatgggaatgtttgtgtaaattgctcaccctggtacatgcttttgtttatataaaacctagagtgtgtttttacaatgagaaatttcatcatctgcttaatggtttggattagttgtacaaatgttaattctccagatgtgtctctggtagtagttccaccaaattttccaggtccagaaaggaatacactggagtaaaaggtatattctttccaaggagaagaatgtttatagtactcttggtggattgttgcagttgtcaacttgggagagaggatgatatggtgaagtctcctccctctctcccatgtcttgttcattgcaaagtcttgttctttcatgtttcttttcatatacacttgttaatgaataaagttgaaaaaattcgtgaggaaaagtccgaatctatcttctctgcaaaaataaaattaagtaaaagaaacataaagttatggtttaaagatgctttcggaaactccatcattttagtgggagaatcacataaaagattggtcgtcaattatttttcttttattaataaggatgcacatgatgatgaatattaaccgtaatatactaatatagatgacaatgtatttcagtgctaaattatagtaacaattaattgaatgcttaaatgaatcttttattatatactactttatatgtgttttttttgttttaattgagacaatgatgatgcacctagacaagaacgtcctactctctgtgcatgtgcttctcattttatttactcttttaccaaacaaactgttcaacttaatacataatgttggtagcccacaatgtgaaagattaaattaaaactcatccattacctcctgtaagctctatattaaccactttagctcttctgcacacactcacaacaaccaatcatatttattattaaaaaaaagagtc

SEQ ID NO: 2192 - DNA, 1759 bp, Arabidopsis thaliana
gattattttttagtatttgtactaaagaactactgtaatttagttgtcatacttttagcatgaatcattgaatttagagttgggttgatgtaaaccaagctggttagctttcttcataaccgtatgtactttcatatcatattagagagaaaaaaaaacacaatgttgactaattaatgggttctgtctaactagaaaagtggaaattagttgtacgaaaaaagaaaatagcttatctctttctttgtaccttagatttttccttggtataatggatatcgatatgtccaagtccagtgtttgagtgaccaagttgttgctttaatttaatctagttcaaatacgactacttttgtgttgtacctctctaccttaccttcctcgaattttcaattcgtgtgctagtttgccaattgtttctttataattttgtcgtctctatgattgtttaagcatatttaaatatttgagagaaaaaaatactaagagttcagtcgtattttgaaaagtcctcgcactccaagttttaaagttgaattcattctgtcatggaaacgtacctttgtggtttttcatttcgatagacattttttaactcttctgataaattcaaaatgtttttttacattggttaaaatttgttgccaatttcaataaagctttttttttactcgttataaaattaaaaacttgctgagaaattatagtttcatatatactttggaccgacggtcaataccaaaaaactaaaataaaattttggtcaagaatcgggtcaatacaaaatatctccaaagatcgaagagaaagttcaacaggattttaatttaattggtgttccggacctgccggcgccgtattataattcttcaataaattttatattttggattgcataatcaaaactatttgcatagcagacatagatttcaaaataaattgatacgtaattagctatttacataggcaagacaattttacgttacatattttgcatgcttgatattcattctttttttttagcaacctttgctatattcattctattttttcccctttttttgctactatcaatatcatatcagatgtggcggttcttatgcatgggattatgaaaaatgatattatataatagatgtcttcgtagtatttttttattgacaatcaaaataaaataaattagtttaagaaagatcaaaagtctagtgtcaaaatgtccactgacaaaagttagcagtttttcttttatgtaataatccgattataaaaaattgcgttaaggaatcataatgagccatgtgtcagtcatatttaaacgacgacgttggcagcagccacacgtacagcctcaggcaagcataaatagagatgggctctttcctataagtttcccactttgcaaagtgtaacacaaacagttctctttagagaaaaaaagattctctctataaaaccttctctttgtgtctctctttgtggtaagaaaacagagcaactagatctctcttctcctctgctcgttcaatgttataacgatctcgagtatcacaaaagaacaagatgtctattcgaagaatctaccgatgtctgaattctttaatcaaaagatcttgtgctcaatctctatgatcatacgccccatttcacactttgtttcacctctcagtttttttttttgtgtttttttgtccctctttgtttcacttgagaacaaccccctttgaactcgatcaagaaagctaagtttgaagaatcaaga

SEQ ID NO: 2193 - DNA, 2000 bp, Arabidopsis thaliana
cttcggaagattaatcagaggatttaaaataatctaaattcgagattatgttgtataaatatccattttgaaacttgaatgaacaaaaaaccgataaagttttccacgaataagttgttggtgtttttagtaggttcatagataggagggtggaaggtctctagttgggcaataaattgaaaccgcttttttctgacctaccaaatattaatttgatcgaatcattgaaaaaaatacatatataaaattatccatataaaaactatgtagtttgctttaaaatatttcatcgtatgcaatgatatatgcatacttaatccaccacatgtcccttgaaacaaaagcacttaagctctgtgtggttgacattaaatcacacatttcattttgttaaaattaaagtctaaaattttattcatggtagtacatccatcatcaaagaccattttcattgaacaaaataaagtttcaatctctaatcctttgtgaaaattcttactactatatattaattaggtcttttggaatatagacgcgcaacacacattttcttatatatggattgaatggtatccaaatccccaaggtaatgtaatgtaaaaccaagataaagaaaacgagtatgacattgacaattgaacttgtagcgaagtcaggataggacgacttgcggtttctactttctaagccaaagaaacatagttttcattgatttttagtgtttttaaatttgttgttgacttccattaatggaatatttcgtactttgcttcttcttttcgaattttatttacctatataactttgctttattttctacaacacaataagtattgctcataattgaggaagtctatacacacaatattttcctatcctttctttttttctgtcgggaatttcttcatatcctagcatctagattatgattgtacacatacaaaaacagaaaagaactagacttcaaaataatgcaaattagaaacaaaaaattgctccaaaaaaaatatattcaaaactataaataaaatattattatgatttttcttctattttacgtacattgtatatctctagagaagaaaataatttttaaaaaatagtttgggatcaacgtcgcacttattgttttgtcttacaatctcagagtctcaccgtatccaccacgctggtcaacaacttcaacaaaactctcttcctcgaacttcaatcttatcccttcatttcattaccattaattcacaccaacggctaacattgtcctcctcgctaaactgttaattatacgtttggccgtaatgttttgaagtctgcctatatttcttttcaataaatgctcttttaattaggttttaatttggtgaaatccaacctttaaattttctgatgctgttaaatctaagagtttgaattttctaaaatcattgttgtcggttatcatttgtacatcttgatagaactataatatgatcaatataaacttataataataataactgaaaatacaaatgattttgtttgtttgtttataaaaccactgaaaaatgcaagagttaatccactgagttcaaccaaaaaataaagaagtgaattctattagtcataagcttggaccaaaaaatccatctagaagaaaaaaaaaattgaaaaaaaattacaagtttctaagaagatggtgcaatggttagaaaaatctctcaagttattaaatgcatcataaactaatactgtatattactatacacaaaaatcaaagactcccttttttttaattgaatcaaacaaaatccgaaatttcgaaaggtccgacttttcctcacctgaacccgcgttttctctccccctcccaacccaactctccaattcgccggaaaatcaccgccaccgtcacttccggcgtccatatgaactaaagagataagcttttttcttctataatccttcttcttcttcttccttgatctcctttctctgagtttgctgagtttcttaactcagcc

SEQ ID NO: 2194 - DNA, 2000 bp, Arabidopsis thaliana
ctattattcaggaactgttcgtttatgtttaaaatcaaattattgacttctaaaaaataactgaatacatgaaagactttggtggttgtggttcgtttttttaaattggatttaggattttcttttcataaatcttaggtacggagcaaatggatgactgtctcttgatttgtttattttattattcaaaatgtatgcaaagatcttgataacttgaaacataagacattaaaatctaggtggaaaaaaacatttgaaagcaagtttgttccatatataaattgcaatgaaaataagaaaatgtgaaacatattgatggttttttccttttcctttcagtaatgttcttatcaccaatgttttgtttggcacgatcatcaaatgtttagacatgtggatcaacattgtaataattttctcttcaaatgactgactctttttttttttttcaaaataatgtttttcgtaagtgttaggtgtgaagaccatcatgtttttgctagattcttgtagatctcaacattgatatttgtagatatctatcaaatcgttacaaaaagtttgctagattctaaattaatgctaagaaaccagttttctttacaaaatgtttttgtcaatgtcctctcacaatcggctaaaagatgttacaaactataaaggatcctcctccacaacttttgaagattttactctctccagattttgtccaaaaaggactcacaaaatcacacaatgatggtcaactaaaaaaaatcactaaacaacttaaatgaaatgatgacaaaactattcccttttgttgcaaaataaaaaaaaaaaccttttaaatctgcaaagagatccttatatgatatggctgttgtcctggtattatttctccaatttaatttaggaatttcatgtttgacacttatttagggatcgtataatatacgttttttaattgatttgaaaccaaataacatgtactattgccttagtcctcttgcaattcgtttagaagatgttatgattgagacaaaaggatccacccgcaatactttgtccatatttttctctcaagattttgtccaaaagcaaaagagactcacaaatcacacacaatggtccactaaacagagtgcctttattgcatacaaaattcaatcaatttaataaaggaaactcaactgaaaacgatgacaataaaaaataaaaaatgtcccttttgtctttaaataaaataataacccttactgacgtaaagaaaattaaattaagataaccttgtaaaatacttcttacccaaattaaaaaagaaaaaaaaaaagacaacaagaggattaaattgtattagtatcaccatcataccattacacataaataaaatttagtagagtataaacgaatcacgtgtataggaaaatacaaaatacaatgttgaagttaaaatgaatatagaagtagattaattgagcaataaccaccggttttagatcattgattgatatgtaagtaaaatgcaaagtagtagccgacttggcaaagaaaaagaaaaaagaagagagagagaggtaaaactaaaataaaattactaaaagcagaaggaaagttccaggtcacgagggagtagtcgctgtcggattgaaagaaacagaccaaacaaagatctttgaaatcttaaaaaagattcggtgcccaaagattttgacctttgaagacacatttgattatttgtgttttctgacacttcccaaacacataacatcaacacttgacccatttttaagattttgtttcctcttcaaagatcttaccccgcaagatccgatcttccaaatctctctctatctactatactagtacttattaaaccccaccacctctcccttcttatttatgtcacctaacctaacttcttcttctttcattttatcacattcatttcctttgtcttcaatccaaagctttcctcttcttggaaccaatctgctctcttttttattctgagtttgaca

SEQ ID NO: 2195 - DNA, 2000 bp, Arabidopsis thaliana
tactatatatccacttataaattataatatgtttgattatttttctctaatatgtgataatgtggattgtgtactaatcctatatataacttaactatgctcatttgtattttgtttatgagtaatattacatgaaggaaagcgatttttatttacgtatgattgataagtaatgatatggaaagtgatatggtttcatatcatacaatataatacaatgaccgcatgtcaattatttcgtcgcaagaaaacaatggaaaggtcaaactagagatgtgtgcgtaaaaaaaaaaaatgtatgtaactaaaaaggtctaaagatgtaatggtacacactatacacaattagacataattacacatgtggtttagagtattagatattaataatgagcagaacaagctatgtttacaggtgcagagaaccaagatattcctttcttttggttgttgtagatacaaatatattttacaaagctcaatttcaatacaaatgcaagaaccacaaacaacagtcctttcaatttatttggaggtggtcttaactcttaagtatatataaacaataccaccttataacttttaagttttaactaaaccatacttaaatcttttttaatctctataccaaatcttgcaaatatcaaaataactttttctaaccaaagaaagaaaacatttttgaagtccttaacttggaaaggaaaagaacacccgggcaaaaaagattggaagatacacttcctcccgtaacctctttaggcttcgtgctaatatacgctattttgacattctctcctatcatacgcaccttgtattagagatctcccaaagtctcaccactcacatcccttttacgaaatctcagcaagaaaagattaacattttgagaaaagtatatattattgcaacgaaaaaagaagcctcctcctttgtcataaagttcttaatcaattttaatttattgccataatcaaaaaacattttatattttacaaagttcttgaaaaagtaggacactttttaaaataatattcactcatggtacttattttaagctttattatctgccttataacataagcattgaaagtacttgtacattcaactacgtttctgtgcgtatcagagattacgtgtgcttactctactttattaaatttttgacgtaaactgttctaaaacattaaataataatatagatgtatctattgaaataccaaaactttattttataattaatgggaaacaataaaatataatattattcgtttaaagagtctaaagctgcaacggcatcgccatatacagaaagttttaagcgcaggataagagcatgcacactctttcccatttccaagcaaaataaaacctatacatacacatttatactaatactcatatacattagagagagaagaagaaaaaatgtgggatttttcagagaaataattaaaagaaagcaaaagttttttttttcttaaaagcttttgtctctctctcaattgcttcttgttcttgtttgcatccggaaccaaagaaagaaactgtgtggtttcatgatggcacctttggtttctcttcttcattgaagggtcgaatttggtctgagaaaagaagagtggagagagagaaagagaagaggcaagagccccacaagagagacatgcttgtctgtgtagtccctattttgtatgttctttaatctctcccactctgtttttgtcatgtgtaagggttttgtccttcgattttggagtcttctttaaccaaaaaaaaacagattccatgaaatggctttgtctttaattcctctggtttgtcctggatttatcttcttgtagcctctttgctcaatagagctctttttgtctcttcttgtattaaataaaataaaatgaagacttagtaaagaaaaagaaaaactcttgagtcttgctaaagcctagttagtgttgagtgtgggagagacaaaacagaacattgaaaaatctctctgt

SEQ ID NO: 2196 - DNA, 2000 bp, Arabidopsis thaliana
tagatatcgggtagattttcattttccgacttcatgcatgatttagttcttaaaacttgcatgtttggcttctactaagacaaccctcgtttttctgacgactcacgtggtcaaacggtgcacaaaggtcacgtgaggcacgtgcgttctactgtttaaacgcctcttctcttttgcttcttttttgccaatttgaaagagataagaatacaaattaaaaagatgtttcttccactttcctcatcgccgttctatgctcactttctttggtcggatttccaattacattgttaactattagtggtcacataattttttcatgacgtggatcacacttctctttttacatgtctatctccttaattagtatctttaattgctttcgacatcaaaagctaatatctatgttttacactctattagttgtttaatattcacaatattcaatatcaaatctcaccgtatttggaaaatgtttattagttcagtacatgacacactcgtaatcaacattttgaattttttaaaatgttttatttgttcagtacatgacacactcgtacatttcgaattgcttactttttttgctttaacaacgtccaagtacaaaggagattctctaagactacaggatttgactttttaccagagaatctatcaggttaaaaacgatacacacacacacacacaaatttacaaaaacaactctagtctctctacttctaaaagtttaataatttgtttttaactttgaactacaaacgaactccatttattgtttcttggatcacgttaagtaacgtggcagctgaacgttgacctatgactcaaagtgagtcccactctaactatcatcttgacggctcagagttctccacgagtgtgaagtgtcaatcggaggagggggtaaaaccgtaaaagcttccgacacgtcccacgaaaaaggataatacgagaaggctcttctcatcatccaacggctcacgatttaacaagactagtctcgcttctgtctcttctcatacccgtcgatctgtcttggcttttcagctatcgccacctcttctctcttttttgcttatctcttcaattttcggatttaaattttacgaaaaacaaagaattaggataatactatttgtctctctaattctgaccataattaatttttattttcatatttgacttttacaaattcaagtgtgggagttcctttattcttgttgtatcactctcaatgcttaactagatttgacatccacatatgtgtttgtccgcttattatacatatgatgatatgaaaatatatcaatcattatatcattcgtaagctgaaaaattagtatgctatttttttctatgtcgaaacgtaattatttatgaccatatttgaacaataatatcgcattttcaccttttatttttaaccttttaagactttccttttaggtcttctagatgcacactggacagacacgcatattcaagatacgtgtgtttttggaggacttcaaaaaaaaaaaacgagataatgattttcccaaattacataaagaagaaaacaaattgattttcccaaataaaggagtcagaaaaatataatttaggaacaaacaaaaaagatacctttaataataaacaaaaataactctaaaaatattttaaaatgaaattcgtatgaaatataaaccgcataaacttatcgtgaccgccttcaaataaaaataaaaccctttattttctctctttcagccgccgctttcacttacctcttcctcttccttcttcttcttctaccttcttctcgtaaaggttttgctacacactggagctcgcaaatctggctatcgaaaaccacaatcacaaactcaacttcggggccttcaaggccaatcacaagaaagtcatggtgagtcttatttttaattctttttgtttgtttttaccttgctatcaatcttctccagattctgatttggtttcgttttgttcagggacca

SEQ ID NO: 2197 - DNA, 2000 bp, Arabidopsis thaliana
tatgaacacaatcgaatccactagtctttctatatatatacacaaaccaaaaactaccaaagttccgatgcggtattatttatatgagtttgcaagaaaaattccactactcatgccacttttaagatttcttttctgtgtcgttaattttggacacgtgaatatattatagtaggaaaaaatcatatcatataaatgaaaatataatagataatctagcattaaagttttttagatattgatgaattttttataattagtataccaccacttttaatatatttgtctaaatatcaatcatttagttagtttaaatatgaaaaaaactttcacaaattaaaatatggccaagaaatgatagagttccacgcgtcaactcttttctatttttacattatgcttttaaatggatgagcagtataaataatacatgtacatcttaaatcttaatcaatcaataatacaacctatagtatttacttttaaaaaataaaaaatacaagaagtagagaaaacaaaatgaggatgaagaagatcatgagtgtggtgtggatcacgatgctactaatggcgttatttacgatgggaggcgaagcaaagtcggacaaagagtgccaagtgttgtgccataagcactgtctacccacttcctttgttgcagagtgtctcaaatgtcttggaatatgcgggaggactccaccggttgcagttggaaccatgaattctggtgaacacaaataacaaaaatatgatttttatcttataatatagggcgagacatgtctaggcttccttatattgttatctttatcctaaaattcttataattcaatattcccatttaaccatttcaataagatatcgactcctaaatttcaaacattcgtgcgtacttaaatcggtgataaaacatttttagattatataacttgaacactttggaacataattattttagttagctatgatgtcattgatttcgactcagatatgaagtgttgaacattaagttagactgaaaaagtgtttaatacaatggtacaattagatgtaatggcatggaactggatggtaaaatagttttgctacaaatgagcaagaatttgaggtaattggtttgttcaacaaattgaacaattgtgtggtatactagtatgtcattaaataatgtggaatttgctcaaaggagagcatatcacacacactagttgattaagagatgcttccacagaatcaacgacaatctgaagtcagtaactctgttcccacatttttagatacgaaacacacaatctttaacaaaccccctactagtgatgatgttagtccaagccatacatgatacataccagtttaggtccaagaaagctttactgttaggttagatgttacataccaatgaatctttaaataccaattccaccatcatcaaatcgtttatggtgattgttgtgtaactttcaactacactataaatggaaaaatgttttctcgtggtatcaataaaaaagcttttttttttctttgtttttcacggacgtcatggaaaattcaaagaaagatataaatgacacgcaagtaggtgactttacaattttgctatcgttggataaagatcaaaattcaataaaaagcacaagtacagtttggtttggttgttgaaaaaatctttaaatgatttgctaatgtaggtgttacaacttctgtcaatatttcattttgatttttttaatttttcaatagtatttgtccactataattagtgtaaaaactaaaaatcccaaaaagagaggaagataaataatcattttaagaaaagaaaaagaagttggagatggatacggatgacatgtcaagtccgacaaggaaatacatgcacttgtcgtccttctaatcctttgcccttaaacatcgttaaaaacgacaacttctctcttcttcttctctactcttctccattttcttctcttcttctcttctttgtccattttttgacagat

SEQ ID NO: 2198 - DNA, 350 bp, Arabidopsis thaliana
agaatcaaattctgatagaaatattttatcaaactggagaatcaatttgtacataaatcttatatacaacaagttttaattgcatgatttcctgtaaacataagtttacatgaactaggggatggtccttcgcaagtatgagtaacaagcataaacagcattatatatgaaataaatatgagcccacctaaacccattaagggcccattaagattggagatactgcttttttaagagaggtcactttttccacagtgaaaccctaaggaaacttcggcaagctccagagaaacgagagttccgtaatcattttctcttgttgttcctgatcgcgtagctcaagcgaaaaa

SEQ ID NO: 2199 - DNA, 2000 bp, Arabidopsis thaliana
tacaagtatataatcttaaacactaaacaatatagataatatcaacaaaacgtatacaactcacagtttactatacatttaaaatcaaataaaataatattatatattttttaatcatctttacaataaaagtttttagtttaactaaaatataagcctacatgcggtatactgcaggttaatatctagattatagagcttattggatctaaagacgggtcatcaaagatttcctaaactgaagcaaaatatactaaatattcaaatatctatatgttaccaaattataaacaaataagtcaatttaatattttatatacaaaatcaattaaatcttaatcacataaaaattagcacaaaaaaatgtattcaacaattaaaaatttatcaaatctctgtgttatataagttttgatactatattcaaataaagtgtaatataccttttcaatttgtattctttaactaatttaagctaactaatatatttgctaatcttatatctatcaaaaccgactatcgtttcttatctctatattatttttgcaagatttttttggtggatttggataaaagtgcattcgggtcatatggtacattcccctattaaataaatatggtgcactcctatgttattagctaaaatatttagattataattcagagtcatatcattaataaaattaatattaataaaataaataggtttttggcaagacggatttggagggacgggtttttgaatcaacattaataaaaaagtaaaatataattaatccaccgtttcaatacgggttaaatctttaatttattattttttaagaccactaatattaaacatatcaaatcatcctaatttagaaaaaattatataaaaccaaaaatgttatgtagtatgtataatgttactatatataaaattaaactataaaatataaatgtactagagaatgatacaatttgcaaaacttttatatatgaaaaataattcttaaattttaaaaattactactttaaaaaaaaatcacgggacgggtaaagaaattacagaacgtgttttattttggaattgggttatatggtggatgtatttgaatcaatatttataaaattttaaaatattattaatatgctgttttaataggaattaaaaacttcagttttttaacaattgtctcatgaattcgtggtatagttttacttaataacaattataaactgtaaaatataaatattttataaaaataaaattttcaagttttaatatatattactttgaaaaaataaatcatcccgccggttaaaatctagtttcatgtataataatcttacgaataaatatatacaagatgaccaaaatgaaaacaaaatttagataatcaacgcaaatgacatgatacatgccactaaagttttgcttagttccaacgacctttttgcctagttcgtttaatcgttttgtttaaagcatatattatcgtgtcgttaacgaaaaatgagttgagagaacttgatcacgttgattactaaaatctgattagctgtcgatgattacctttaaaattcaagtctattgccattataagatcatgcaagaatgtgggttaaaaaaaagaaaatctagaagtaatcaattatttcggatagtagagtaggtagcgtcagaaaattctgctacaacaaaaggggtattattgtcaatttaataaaataacacggttaggttcgtcgcttacgtgtcgagttcttagataacctttgaatgcaaaaatacgcagtttcgatccaacaaggcaacgctttgtgaccaaacagtcttttttttttcccttataaaacaaaaaaaaaaatgattttcttaataaaaagaagggaaagaaggaaaaacacacaaagcaacttcttcttcttgttcggcttttatcatctctgaaaattgctttatttggttgaattcattggattgttgatcgagattggtttactgattgatcgaaagt

SEQ ID NO: 2200 - DNA, 2000 bp, Arabidopsis thaliana
tcatttatgatttagagaggaatgagatgactcaaaggattgttacagggccattagttgatgtcgtctttaagaaaatttgttggttgatgtcagttttctcggatgatatttctccaccttaacctacttgatacttaacacacaaaacccattaacacattgggcatgttttacataatgtcccaatggcccttttcctttagtgaccaagtcgcgtttcttctccttagtttcacaaacgatataatatcaagtggacagattaactggcctttttgtatcattacttaatttgaagaatggagcttcacttcatccttggaagagaaaggtaggctaagcgacagtagccaaatttcctctccacttacggtttccatgatattcttgatattttaccttcacaaggagcttgtatgtgtggtagttgaatggcatgaatctaagcaatgaaaattgcaagttttatatacataaaaatgttggaatcatcaaaaatgtagcagaacgatctcgactttgacatggaagctgcatattttaccttcaccaccttcgagcatggaagtcattacagttactgatgctaaagttgtggccatgttgattaggtccattaagctcccccctagtgctaatccaagtcctaatagcaaaattgtttgcatttttggttcaccatgtcctttggtttcacaatgagatcctctcgttttatactcgtacctgatatgcaacgatgcaaagtaagactgtgagaacacttgcttccataaaatattaaacaactaggaaaagcatgaggaatatcaagtcaagaggcaagtcgtttgttgttttagccacataataatattacgatcactcgaacagaccgaccaatagagctatattatgattaataggcacttaaatctgttttacattatgtgtatatccaatgtcctatgccaaccaaaaccaaactttttgggtaatatgtttataagaaatagtagacgctgttaaactttctgccccgaattactcttcaatcagacgaaatcaattttccattttttttctctttcatacgataccataagagagtttcctcctacggtgcgaccttctcatttatgtaatcgaacaactaaagcaatgttcctttaaaaaagcactcacttacgcattaagcaactacacgtacgcactcgcatatatacacttatatattttagcaaacaaaaaaaaatactagcatttatatattttggtgcaagaaaatatccataaaggtcttctgcaaacagagtcattgttctgtatgctatacacaaattaaagcctctcgtatacgattatacttctttaagatttttaactattattcatatttggctgagaaaacattaattatacacattttttcaagataaaccatttagtacaacaaatatagtatgaaaattacatacagttatattagtggaccactataatatacctctaaaacatgtataaattaatgtatagtttaagccttttgttgtggtggacaacggtgggattttaatcgctaattaatgattctacacaaaaaaaaataaaaaattaatggcgataaaaaccaaaatagttcatgaggggatccacctaacatgaaaaaatacgaccaattagtggaccgacgacgagtacagtgctccttaactaaccttcttcctaatttatcatttacgttcagactagtgtatacttttatttaagtataatttcgtttaaaaaaatgactagaagcttacagaaaaattgttatatacacaatacactatttaataagtctatgactcccatgcacttgacttacgtaacgagaacgcattcatcatcacctctcaattcattttcacgtctcctcttaattttcaactctttaagctcaccatatatacaaaactctgtttttgattttctctttgatcaaaatcaaaaaacgccgatcacaagttcacaac

SEQ ID NO: 2201 - DNA, 2000 bp, Arabidopsis thaliana
tcctccgatttcataatgatcctactaacattggatcacaacaagttggctcggttatgaatttggtttgcaacatatacagtttttcaaccgctgttaattttagtgttaatcaattatcttggataattgttgatgcaagatcagacattatatccatatatataaatatgttatatagatatgtattaatatctttagccaaagacgataagtctaaaatcatcaacattttttgtccgggtcaatgtaacaactaacaactcctactgtagactagctagttggtcgtctgatcgtctctctgtttgttagcgatctcaacgggtacatgaacagatagttatgcattattgatactcaaattttcttagttgttatgtttttaatatgtaactagattttaatccgcggtacaccgcggagataatttatttttttaagttaatatatataaaaattttgcaaattatatctatttataaattatttttattttatagtttacaattgttattaagtaacgtccttccaaacccgttccgccaaacccgtcctgtaaaaaaagctcgcggtaccccgctaatttaaatttataattaaaataaatattttacgggattgcaattgtgttttagtttgtcaaacaaaattttgttttaaatagttgtcgaaatctagttcaaattttgaagaaataagatttagtgaattgataaaaaatgtatttagttgcgttttgctcattttaagggattgcaattgtcttttgggttgtcaaacattttttgttttaattagttgccgaaatttagtttaaattttggaaaaatctgcgtgatatatgggattggaatatatttagaatgtttttcgtttgttaatcaatttattgctaaaaaactaataattaaaagtcagtggcagcctttgtaaataagttccaactccaggatttatttcacaaaatggctgcaaaaatgtatatatagattcacccatttatttattattcatagtattatagtactatcttcgtgtctttttacttggtgtttaaagtttttgtacaccgattgaatcatttttaattttatttttttaaacatcaatttatctaattaaccaatagaaaaaattatctgtatattataaatcatcaaaaccaataaaaaaaaactaattaatattgcattaaaaattaaaaacatcatctaatttagaacattttttcctactataacattaacatcaactaaatacggagaaaacgttgtactgaggttcttgcattttaaaattttggaaactaagaatgttaaaaaaattatggttacaaatatatatatagtgttataattagtacttatcgtacttaataaaaaagatactaattagttgttgttatattattttctacaaaaataaaatcattcaactaaaatgttctatttgtcagtcgcttcacaaaactatgcatctaccataccagtgatcataattataaaactctgtttttgttttttgtctttacaaccacttaaatacgtcatagctatatatgcattattacaagttctcaaggtggcgcgcgaatgttttaattaaaatattatgtttttcttatgtatttcatctttaatcgaacatagaaaatgtgaaagatttggagcatagacacgaatcagttttttttttttacacgaatcaatattcatagggtaaataatagacaaacgccaacaaaaaaaaaaaagagaaattcacaacggattatcggctcaaattacaaaacaaaaaaaaaatacagagacaacagtatacgtgtaactttccgaatttttttttttttcatatcaaaaataaaagataggccaagataagaccattataaaatgtaaagaccgacccgaaataatactcatgtttaaattatcagcaaagagccaagagaggaaacatcacacattggtgacaaaaattcttaggaaaaccaatta

SEQ ID NO: 2202 - DNA, 2000 bp, Arabidopsis thaliana
tctcttcaaactcaattcatggttaatacaccaattttcaaagttgcaggaaaaaagaagaagagattttaagcttctcaattggaaattgataagccattagaaagttagcgaaaaggatttcaagcatttgttttgggtttgggtttgtgtaaattagcatatactatatcattttttcgattagatagacaagtttggtttatctacttcacaatttgacagaaaaaagagaggaagaagattaatactctcaatccgtttgattttctccttgggttccctatgtgcactatcctttagggtttagtttttgtgaacgtagtcgaaacaaaagaatccggtggagaatataacagaaacaaatctaaaaaatttggcggaggaaacgtggtggtggtcggaaaaagagaaaaaagaagaagatacagttgataggggtaaaatagtctttctcgctagcataaagtactctttttcaaagcccaacctaaaagatctcaaaatcaaaaattttaataaaaaatgatctgttttgacaataagccctttttcaatagaccaaccaatgatttcatgacataaaatacatgtttttccaaaaacatatgaacaacgtaaatccattttgtaagactaccccaaaaagaacactaatataaaatatatagatataaacactattatgtatcgacaaattaaagtaaatttggaatactatgaatactaaaaggattggaatttggaacccttttgtactttttaaagaaaataaagattgacacatggatttttttaatagaccatttcaatatatgtaagacatatctacaactaaagattagagatttaagacatgtaaattcacttctaaacataaaaatgtacttattatatatagataatccttcataagattgatccactataaatacaacagattgaaacttttcattgttcagttcaccaaaacaaataatttaatcatgagcaatttgagaggaacaaataggtttatacttgtggcagtactcgtatcatttgtgtttttaagcatcatgaatgctgaagctcgtaaagaaattggatatccaaaacaaagatttggtgaagaccgaacgaatccgtacgaggaaataacaccaccactaataggaggatgtgatcctaaaaatcctcaaacgtgtctaccaaaacagccagcaaatccgtaccgacgaggatgtttaaaaattacaagatgtcagcgtgatgtataagctttttcgaactatatatgtaacaactaaagattatagttatccaaaaatcaataatcattaaacgaataattatatggtttatcataattatttattttaagatagtctaatagtcagaaaatctgaattgaactgttacgtgtatttcgcttatgcatacaacaaaacaaacttatcacaatttaaggttgttttgagtttttctctatttacttaaaatacggtaaaaaaagcaaaacgcgtttaacaaaaataaaatattcccaaaaaaaacttttatgccctaaagttgattaaagacctttctacacgcatctaatcatctcttctcatcaaaatcacaaaatcacaaattcgattttcctcttctcttcttcttcctcctcctcctctcggattcttccttaaagtttccacctttcgccaccgagaaaacattccggcaaaccctcgtcggaatacttaatctctttgataatctttctctctggtgacgttttgtgaatggtggaaactaatctgattggtgataatcataggctcaccctttcaactaaaagggcgagctttctcatcatccctctctctcaagactctgttttctcattcggttcttgcaaagaaggctggtacttccgttgcattggccttgacccgtgaaccaatcaatcatcatctccgatcatattttcaataataatttctgtgttttgattttttgagaattttgaaaaaaag

SEQ ID NO: 2203 - DNA, 2000 bp, Arabidopsis thaliana
tgattccctaaagccctagctttatgagcttctgccacggaccgggccggaccaacggttaagaacttgattttaactttttaccaaacaaaacttgattttactttttacgttgttcactttttccttttaattccaattttttcttttgatttgtttaccggcatgagaagtagttgctccctaattactttagacgggataagttctcaattcttaaacttcatttcaaaatatcgtcttggataatggatatatgagcgggagccgccaagtgttaaacatagtctagacaaatcaattaaatgttcttctaatttttcctaatggcaatggttaaatctgaatatttcattagccaaatgttgtctagtcaaatgtcgtgaactaaataaaccgcatcatcaagtggaatcgtgggactgggaccatatataatgatatatcatatatgaaataaatgtgtgaatacttgtcttttatcttcttgggtttgattataacattcagaatttcagatggttgtgacttgtggcattaaaatgaaacatcactggtggatctatattctcttctaattttcctctccaccacgatatataatattttctatttttggcaacaaactatattaccttcatatttctgatattttccactgcatagctttctttttgagatacgagttagagttactaatgatttttcacaatattactttgaccttaaaaataaatgaaatgatgatatcccattaactagcaactgaattgatctttatgaaaacatagaggtaagacatgagagttgacataatctcatcgatacatattttaagaatttctcttgttgaatatctaaagtcagaaatcgataattgtctttcaagaaaaactatctttgatcaatatctctgcatattataggtcaacaactaaacatttattttaaatttgttttcaatctctctattctttatccccaccttcgttttttctttaataatgttaaataaaaatatttgtaacgttcatattttgggaagtcttcaacaatattcgacgaacatttagctgtaacgtccaaaagtcaccaacccaaatagaaatttcgaaggccaaaatatatttgtgctaactaacttcaatatcgttaagcttagctcagagcaaataattgtgttggtacacacaattaaaacttaacaaatactacaagattgattgaccaaattataaatgttaaacatatggaccaaaatcgttgaataatatataaagcttttgacatttattagatttgttaataaacatgtgggagagagagactgactagtcttattaattttgtttaatcacgtggtttaaacttagttttgtaaattatcaagaagtaacggaaccgttaattccacgcgtaagtcaagatatttcatcgttaatttttgacttttgacgacggcttgaatcagtcaacgtcacccttcgcgcgtgaactaactaacaccaatgtttggtcaacgtcagacggaacaaaaccgtgatcttcacaaaaatccttaattaccgataagacacgtggatctcaagaaacgcatccacgtcacaccacatgtcagtttcgtttttgctttcccaacaagtttttgatagacgaaaattacggatttacccgtccgttgacacgtaaggcgacaatcacagaagcagcccacccactatttcctcagcccatcacgcgcttttacttgtaaagttaataacaacaaaaagagaagtgatgtgattggcccaattaaaataaaataaaacgtactgttcacacttgatgacttatcttcatgaagcaccaaccatataaatttggtcaggtctttattaaacaaatcaaattatcttcctcactcgttgtttcatttcttagagccgtcgtttcagatttcttcttccagagagagttaaaaagagtaacggtgaggtttggatctaatcgaatcaacg

SEQ ID NO: 2204 - DNA, 2000 bp, Arabidopsis thaliana
gataatacaaagaagtttatctatttgtctatttagcgacctgtttatttaattcgtttgggcttcgttcaattccgcaggctatctttcacccgaagcaactaaactatagtattaaaagtatatatggaatagcttgtaattaggttttataattgctgctaattattactattatcgttattgaatattcaactgaatcgggccatgattagcgatgaggtacatgacaatgaaacatgcatgttcctcaaattccaattgatatgatggaagaaaacaatacaatgcccgacaaatttgaaaatataaattttaaaacaatgttaacaaaggaaataatataagaagaaaatgccaaaatagtggtttttgacgaaaatgtatgagttctaagaaccaatgaaaaataaaataagaagttatctttatagtaacgggaaattcaactaaaacatgttttgatgagatttaagagtttcgattcgagtttaattttattcctatttaaaacttagaaaattctacactattttctctaagttttctactttacactaactctttctatcaatcttcagcaatttattgattgtctcttttatccccctatactgaatatatgagcgatagttgactggtactaagatgtatttagacataaaactgactttgaatatgagaactggcccacctcctttgattatagatccacccctgtatatatgtttttttaataaagcaaccacgtctccgttccatgcatgtaaaacactcatctacaaatgttttaaatacaagacctttttcttacaataataaaacacatatcttatgattggtaacccttagaaaaaggaaaattaatggtgccaaaaaaaggtatgccaaaaacgttttagtgatatgaaaaagaaaaaaaaatgcaaattctatcaaatttggttaaaaaataattggaatttctaatgcaataaaaatcatgtcattgttattacttcaaatatcccaaattcagaaattattcatccttatatttatttatttcgtaaaaaataatctatagtaataagttcatcatagaaatagtctgatatccaagacagaagatcaatacaatcatagtaaaacttagagtgtatacttaaaatttagagagtcaaaattcatcactgtttaataataataatattaaccatgtaatcatctagttggtattcattgacgaaaaaacaaaagtaattgaaatcaaaatcaagaccgatacagaacatggagacacggaagaaaaaatgatgaatccattgttggtgtctattttcctttgttccctcaaaatattctaatgttggtggggttttttccgccatgcaaaaaacgtattgcattttattaaaaaaaaaatccctttttttttctctttactaacccgaaaatttatgtttggatagcaaaaacattccttttttacagttagaaataaataaataaaatcgtcaaatttgttaggaatttttcttctaaaaaaacaagcatacaattccgggtaatgagaaaatgtcacagatcttcggctataaatagaggagtagctagagagcatcttcttatatcaactaaactttgtattcatttccaagtatcactctaaatcatctttttcgaattcgcctcccaaggtccgtctagaaaactaaatcatcttttcgtttttgtatagatcatatcattatgatgatctcgatctctttttctgtccactcgtctacatgtgaccgctattatagttttcgatatccggttttttatgttaactccttcatatagctagattcaacgcatgtttttttatttgtaaagccggaattaattcgaccagtttcttgtatttgtttcttagagtctcttaggaatcggacatctaataatactcaactcaatcagataatcattttcttatctaaattctttgtgttattgtgttattggaacaaaaagat

SEQ ID NO: 2205 - DNA, 2000 bp, Arabidopsis thaliana
tttagaagatttaaatcgttaattaaatattttcatttctaaataattaatgccagtagcatgacattgtaaataagttcaaatacagaatttatttatttaaacaaaaaacgtttagtaagaataatatttatttaaacaaaaaactttgttttaaaatattgttaacaaatacgtttatgctaattttaagggattgatgtgaagtttgtttggattaaatttgattgataatgtgattgacaatttaaattaagaatttaaagtaaaattaattattttgaaaaaaatatttaatgctaatggcattgggttgtaaataagtccaactctaagatttatttgttaaaataactacaaaaatatatatatagatatataatatataaagttttctattcattgtcaattgtttttgagttagaatctcactatttaatagtatgtggggcattcgtttacagcattttactcagtcaaatgggttctattggctctgtagggcaacactgtcttttcataaatatatgtattttctgtttttccatatacttttttttattaacaaaatagacttttcatgtgatataaaaagactttatcttcttaagatcatcttacaccatccacattgcacatttatattggatgtcttcctccacaataaactattaaaagaactaaaatataattattaaaatatgaaaatgtctttaaataaaaattctccttcccataatgtcttttcatagacattttaactgaatgtctctcatttaaagacactatcatattttaataattatattttgattttcttaatattttttttttttgggggcaaacgaaattttcttaatattttataatagagaaagacacccaattaaattgtccattgaggatgctctaaagagtcctctagtgaaggtgctcttatgactccattagtcatacactaaccgtatgcaaagaaaacctatcacttggtggtagaatataattaagtattattaacccaaagcacaccaaaaaaaaaatgtaattaaaatctgtaactaaaatgaattagtcagtcaaaaatatcataactacgaaataaatgtacactaaacactatcaaacgtcccttagtttagattttggttaataaagctatgcgtttacaggcttctaagttttaataatgttggtgcaaacgtggttgaactaattctgaaaacaatttttagcctaaatggatctaacatgaaaatctacatttttctgtttatatgtatcctaattctgtttagaaagggcttcaaacttttggcccaaaactttatatgcatgtatgatatatcaattaattttaccgatggagacttgcatgttatacccattacaggaaaaaattagatagcctaacaaacaagtcatggcgttactcgtgtaaggtggagattttacgttgattttttcaaccaataacaacaacctccggaaaaattatcacaaaaagaaaaaagaccaattcaaacattcaacgacccaaaaaaaacaaaaacactttcaaccaatttagttgattctgccgccttcaaccatttttgttgcatggttctttttccaactttgcatttaaccggtcctttaccaccggtcaatcacaatttctagtcatccaagactaaatcgggcctaatctattgcaccaagccaccaatcaactttaattatccataaaacgacactatctattggcagaagcttcattagtctttttcttcgtgagaccctttgaaacgaggacggaggaagtttcctttgaataatgcagcattttcaacatagaaaattctccaaacgcaacgcagaaatgacctctgctttctccaacgtcaaacttgtttagttttatctatgtcatctctctaattctcttgtaaatctcaataatacctcttcacttaatctttttaatatttctcttttggatggtgaggatttgtgttttc

SEQ ID NO: 2206 - DNA, 895 bp, Arabidopsis thaliana
atgtaaaacatgaacaaatgactgtcccttgatctctgaaacctagtgggtcactcatcaaagccaatgccatttttcgttttctccaggaacaagcgcaaagtttgtcgtgaagatgaacagttatacagcacagatgaagttaagatcaaaaatggtttggagtgtaagatagcttgcggttcttcaaaggtaacacttttatcttcttccctatatcacgcttaccgcttatgagtatatccatgagagaccagcacttgaaagcacgttcttgaaaatctcttgcaggtctcctatgtactagaaacagaagatttgttggtgcgagttaaaaagagaagaaaaactttgtgccacaatcaggattcttgggtaaggcaaatgaggttacaatattacaaaaataacttcttgtgaccagcctgtaacaatctggaagaaggataccaaatcaactcaacttgttcattcactctccaacttaacagagacaaaacaaaaacaaaagtggcaattctccattgttgacttcaccggatagagccaaactgcattctctatcttcataagaagaagaagcaacaaaggatttggctttttgttgtctgtgactgaaaaagaaaacaatcactcacaaaaatgatgttacatatgtaaagtttgtctttattcactctcttgttgtaaagttttgtatgttgttgtaacatttatcaaaaatttcattttgttatggtatgttatatagaaatgagtcaaatgaccataaaaggtttgaccttttccataaacgacgcttcgccctctcctaactctttccctcactttaaaaagattcgatttttgactgcaaaaaagagaatttctaaaagcaaatcggagagcttcggcg

SEQ ID NO: 2207 - DNA, 772 bp, Arabidopsis thaliana
gtttatgtatttcaccctcattaatcattattatgtctctcgctcatcatatacatgcatgattttttttttttttttaacaaattcaatcaattcacaaatgagctaaatcacaatagctccagcgaaaatgcatgatttttaaaatgcttctttcaatgatatagttttattgtaatggaaaaatatttagcaaatagattataaacttacatgagacaagtataaataattattataaacttattaagtttaagatcaaggcttttgtgcaatgtatcaatgaatgttagatgtgatatgatgaaagcaatgttttaaacacatacatagtcattgatcggaatgtgtgttattagaaatgcatgcctaagccgatagggttatctatgtttggtcttggacattatagccaaatttcgaatctaattcttccaatatatatttttttttttttgcttagggccactactagtattgcttatcaattttaagagctcatgaaaatgcaacaatatagtagttgcaaatccttgtttcaagagaaatcaaagggccacttgtgaattgaataataataatatttgcaaataacctttcactaaaccataccaacaaaaccacacagatttggcaaagacataacctttgggagacgtgaaaaggctcaaaatttgacaattgtccttacaaattcgctcattagtgcaattgtgagatttgtttgcatccaaatccaattcataactcacactcgtctcaaattcgaaaa

SEQ ID NO: 2208 - DNA, 2000 bp, Arabidopsis thaliana
aattaaacatgatgattgggtttattaggttcaagtttttttagggtaatagttttcgttatgaaatatgtattttatattaaaaaataatctgaaatctatagtttttacaagtgacaaaatggcaaatttgtaacaataccgtttagacaataatctcaaaatttaaaagcattagattttttttttaagttagtatctctgttcctcattttgtgactgcagtaacatatataatttaactgggtgaaagatcattattgaaaaaaatggcaagcaggccaataaagtaaacttaaaaaaacggaaaaatgaaaagtaaagatttgaagaagtgcttcgaaagaaagagaacaaaaacccacttgcgtaaccctacctcgaaccatgtatgtgttcatctttttttttagttaaaaaaaaaaacgaattttaagtccataatttcttcagagtaattaattggttatattggctataaccatctgtcttttttccaatttgtattatatctcctcgtaaccgtcttttgcctgtagttacgttcttttgttttgtacttgtattatatctcctcataaccgcataatttgtcagaaaatatttgactggtatggtaagcatccgattcaaaaaataatcaaaacgtctgcttcaaaaaaaaaagatcatgtaaacaaataattgaaaccgtcgcgactacaagaaataaaatgtttcataactattcgtaccatttcattaaattctttttcaagaggtagtacgtaaattcttttaaacaagtaatagtgttgcctttttatacaaaacgttaattggcattgggtccctcgaattacatagacgagaggaaaactacaccttaaagcatgataaacacacgtatgaattcaaccaactggaaatttgttttcaaaaacttattaaggtaatgaacttataaatttggatgttcttcgaattctgtgtgtgtaagtgtgtaacaactaaaatagtcccaccaaaaaataggtgaacaatgttcacatatgtaattaactaatgaaaaatagtgaagaggttgcgacttgtgagttgtgattagtttaatgtatggtcaagtgaacaatgagaacccgtctctttccatgtgcaatccatagacgtaaaatgacagtcgtccgattttccctcgtaatctacaagctcgttcttgaaggcaaatcctacggcggatacaacacaaaaatattgccaaatctcaatgacaccaacaacttgttttctttatcttttgtctctccctctgacaatatttaaaaataaataaagatgaaaaaatgtgagcatccttaaaagtttaacctcattgattcgaggcgaaacaaagaaaactcattttcttttaaaaacgcaacatttttaaaaaataggtgctccctttgaagtccactcaatatccctttttagaatctagatattttttggacactcaatcgatattccgaaacttatgtgtatttattatttaattttctttgtttttgaaatattgataaatttattgtatatttttcatattagatacaaatttatctgtaaataaatcatcgccataaattttaaagatttgcctggcatcatgcgttatgtgacaactaacaaccaacaaaggttacatgccgtaggatccattcttttactctgcctatatcagaaattttaaattattgaccaaatattttagatttctttccgtgtaatgcgataatttgaataaagcattcacatgtttcttcctcctgacatgcacgaagcaatttaaaataatactaaatcacattattattttaatactatacaatataaatagctattttgaccaaataatctctctatataatatatatatatatatatatatacatttcactctctatgactctatctcgcttatcaccctcacaatttctctctctaacgtttctaaaacatcctctctctctctctctcataac

SEQ ID NO: 2209 - DNA, 2000 bp, Arabidopsis thaliana
tgttgttgattctgaaattatatgaaaattgggttgttaaagcaatttattctacgaactttgtttgatacctaacctaaaagtctaaaacacaatgttcaaccggttaaatatatatttttttctcatactctgaaatttagtttttacaaaattttcttgtgaccttcatccttaatgtatatagttgactacttgtattattaaattgatatccaaacgtaaaaacctaatcaactacagttaatttccgaaaatcttattagttggaaaagtttcgatcatacaatgctaccacgagaccatcgtctaccaaaagtgggtataatttcacacggacgaactatgcagcttactataattattactctgtagaatcaggcaattattattaattttctcaactaaagaacattagatcacatatgaacacgtgatattaattttttcaagccacacaaccaccattattaccataccaaaagaaaataacaacaataataattttgaatctgaatttgtgacattgagtccatgaacacatgtaaaaaactaaaaattgcttaacaaaatgaagaaaaacaaaatagacacacatgtaaaagataatttgtcttagaccaaattcgtgtttgttgaaaatgaaaaccatctaccatacactatggatttaaaaatataatcgtaagcatgagtatacatgtaaaaaaatttcataacatttcaacatgaagaatagtgtttcagtaccttttaacaacaatccaaaccattgatccatgctttttggttaccaacaaaaagtcaacttttaggtgtaaaaccataatcgtcatgactttcattgaccaattaaaataggtaccattacataaacatcatacataagtttcatataataagtgggccttgtagcatcatactgtagtagaaacagatcagatatatcgtactctcgcacgtaggctattacagcctgtgttcttaaccaatagagtcaaacaaaagtaaagataaaaaagttttgtcgtacgtaaagataaaagtttaaaactgaccaagtcaggcttgtggatggggttataacacgtgtcaaatcggctctttagcttaccgcaaatcttggcggctccgtcgtagaaccaccggggagaatatcacaaccattggataaaattacactttattcgtccttatccaattttaatccttttttttacagcaattaaattttcaaaaaatcatccacattccaggcaccaacatgtcccaagaaagaaaagagtacaatctcaatttataaactatttttgatgataatgtattaaaaaaaaatgtatgatgaaaattgtacttaaaatcaatattgtaggattgaagcaatagaatggttagattcaaggtatcggattacacgctcgtgtttagtctgaagcaaagaacttgaaacgtctcttatgctttttcactttcactaatctctctttatttttaattaattattctttagcttttgcctaaaacagtaaaacacagtacaagaataaaacacataagaaattaattaattaaaaaaaaaagaacacaacactgagattagttttgtctacaaagtccatttgcttcttctgatttgcaaaggagcttaaaccttaaggtataatatgagagatagacaaatgtaaagaaaaacacagagagaaaattagtttaattaatctctcaaatatatacaaatattaaaacttcttcttcttcaattacaattctcattctttttttcttgttcttatattgtagttgcaagaaagttaaaagattttgacttttcttgtttcagatttcagcaaatgggatcgattttaagcttcgtctgggttaaaagcttggatcctatctgaagacagaacaaaggttcttgcttttgattcattgcccattttgagaagatgttcgaaggtcgtcctcgtgattcttgtctagtttcaacacttttcacc

SEQ ID NO: 2210 - DNA, 1083 bp, Arabidopsis thaliana
ttttcctcccttcttcaccatttttcttcaaatccaaggtcgcggaaagacaatcggagaagaaagaagatcagaaaaggtgtgattaagaagaaattgaagaaacgatggtgaaaatcaccagatttgtgtgaggaaatgctctgataccatattagaaatcatgaacaaagagaattgtagaatgattttctatttcctcgaagaataaatgtgttacaatgagagtatatatacaattactctaaaccatctaaaccaatgtacaatctctaaatagctaaaccaatctaatcaaaccggaatactatatacaatctaatagtataagagacaagagcttaggcagtcaaatgtttgtgcaagtttaaggcgaaatcaaaaagagtaaggaagcgaaaaaagagaagaggaaacgagaggagaagctaatggcggtgatacatcctgagagaaatgcaaagaagaaactcaagttagctgcaaagaacaaggctaacaagaaaagaaggattatgagcaataaaatggatagatggtcacactcttaagctcccataaccacattaaaccatttttgtttatgttaacatagaaattattatttgagattagactttttcaggtatttatgatccatttttggtctgttacaatccaattctaaaccattgcatttaacttgtttcttagcagaaaaaaattccgacatttatttgattacataaacttaaaagagataaactttattaaattatgattactaaaaaaaatatttaacaagattatcaatatgattacgtctgttaaaaacaaaaaaggaatttgccacgtggcgacactaaaattacgtaatgttcaagtcaatcaccggcgatgtggcttttctcgccgcgagttgaggcggttgaaattgagtttcgagacgacgtcgtttccaagtaaattgcactagcacgtttaaaaaaaaaatgcaataagaaaaataaaccatgagttcgtcttcttaatacctaaattaaattcgatttttgagacaaagctcgacaagtcgtcggcggcggtgtaaaaatagtcggagct

SEQ ID NO: 2211 - DNA, 1943 bp, Arabidopsis thaliana
tcgccaaaacggcatttgtcttgttgttttataataagtcaatggttatggtcaatgcataagaataataataattttgttaatataattgaaatttacattctattgactttgtattagtattttataaagatgtttatgagaaaaaaactactagaagaccattaaaatggatcttgaaagctgtatgttacagttagatatgttgttcaattgcgacatggaaacatgtctaaggattaggggacgcccatttctgcattttttatatgatttttaacatgcaacttttttttatcttaataaagatattttatattttaataataaaatgacttaaatcttagtcctatacacgagattatttcaataacattcaaagaaaaattgaataccacattattgatctccaaaatgtcaagtgactgtatcgcaaattctatataaattttttcaaaaaggctgataaaattaattatttttttcgaacatatatcttataatttacaccaagcttccaacattaatttcgtaatttaatatctaaaaacttgtaacttttttttttttaatactaagaggttctgaaccgaaacccgtaagctctccagacccgaaaccacatccacatcatgtaaattacatgcatcagtgtatcacttaaacaagaagtcgtgaaacttccatgaatttataaggttgatcttatagtgattttctcataccatataaaatacaccaatgaccagacgtctaatatgtttctgaaattcactataaacaaattagtgttaagacttgtagttacatgcgtcacctaaaaacattgaaatttcatgagttctccggaaaacaaaccaatatatttatttggtgtggaaggtacaaattaagaccgagtctctcaaagccctacgtcggccacataagccaaccaatggatataaaaaaattaaaaactcaactatgacatgttgccaaaaaatctgatatcaatacttttcggcttatccagaaagataggagtcacacgtatataacaaggcaatgtgttgtgtgtatctagatctatttatatgcaactgtttagaaaatgtactaatcctaaattattctacacaaatattcacaagtctacttcatgactttcttggttctatctacggaaaagagacaattctacacaataagcccacgcgctctacattacctcttcataaatacattcttttcacaacatttaatatgaagttttattgtagtattctgatttcttctatgattatataattattccattcaattatggagctacatataacataatttaactagctgaactgatctttcatcaatattacatgatcgtcatggttttcatgaatctatgagtttacatttccctcattaatttaaattctcaaatttacattgataagatttgaattatggtgcggatttatcgacgataaggtccatagactcattactagagggatcaaaagacacttatcagttatcacgcacacaggactgtaatcacatccataaaaccttatactataaccggataccggtttaaacaaagaaccaacattgaaccacaacctaagacattttctatcaaagtcttcacatcacgttctttacgcgcgtgaggtaaaatgttcaacaagttacgtaggtggaggagaaccttcgtaatactttttcattagtcttttcttcatttgattttgcgaaatttctaaataattgcgagctgcataatccctccgactattaacttacaaagtacccttttagccaggctttttctgtcttatttttttgtcattaaactatataaccaaacacaaacatcatctttctccttcatttcacaaacttaaaattctctgtttttgtttcttcttctttcaaaatctcaagcaaaagaaaaa

SEQ ID NO: 2212 - DNA, 2000 bp, Arabidopsis thaliana
tttttaaaaataaaagaaaatgggggcgagaacaaaggaacatgaatccagcgatttgaagcaatgtacacagcaacttcccactatggcatgcactatcctataaaaccctatacctaatctccacgttcctcatttccagttttggcctaatttcttttcataatatgaccatatatcatattacagaattgatcaatataatacacggtttttatttctaaataccttctaaataaggttttttatcagcctaaaatacgactcatttgatacaaagtcaaacagtatacgatttttcaaaaaaaaaaaaaacaacttaattaacttcaattagacaaccatgtttacttaatttgcaacatatctcattggctaaccacaaacatacataactaattgggatcaataaataattcattgcattctcttttctttcgtttgtcattttttttatatatcatatacttaatgtataactaacaaaatccataacaatcacaataatttcacaaactccataacaatcataataattttattatattaaaagcatatctttattatatagtatgtatttatgtataacttacaatatacataacaatcacaataattttacaagacacacgtatcaatctcaataatagcttaaaaatgaaatggaaaaaaatatatactagaagtcggttataaaggacaaactaagctataaaaaatatctcaaatccaaagataaacaaaaattattatttgtactactatacccttagcaaatgtgctctctcaaactcactgattgaatgaaccaacctttgaggtcggcaacgcaatatggatgaagaacaaatcgccttcagcgtcacattcatcaagacctacattgtaatacgacggacgaactaattgtaagatgctgatcatatcatcaatttaagagctaaagattactaatataacaaatctgtttacgttagataactaaaccattcaaaaggaaaataatattaactagttgaacatgcttgttagtgacaaaacatgttcacaagattttgtttgaccaatattgaactatgcaagatggtcatttcctataacaattctttaaagaatactatatagatataaacagttctatctaaatatataactaggttcgattcatttcatctttgatgtcatcattcaacgctttgataattcttttatacaaccaaattaaactaatcaaccatacttattctataccgacgaatcgttttgctacacacataagcagccttaactactcacaagttacaataatccaatcatgcttagtaccaacaagtttggttctcctcctcatcctccggcgaatcttgaaaaacaattattatttgccgtaagactaaaagaccacgcaacgcaacacaactgtcacgggatcatcggtcctcctttttcttcaatcccaaaacattaaaaatgaaaaaacaaaagacgagaatatggtccacctcatcgtcgcatcttttgacacaagtcgcaaaactagtggcctcttctcgtcttaattattaaaaccaaaacaaaacataaaagccatataaaaatcactttaatctccttaattaatcacacttttaattaagccaaaagtaagacaatgattagtgctactaatcttcggtggcttacaagattacgagaacgactcgtaaagaaaaaacgcgtcttccttgtttctttccttctttatcacaacgattatttcctttttcttaacaaatcaaaatcaaacaatatttcacaaattaaattcctttatatatttcctttctttaatctctcttaaagaaaaggaacaagaagaaggtacttttgtcggccggcgcaaaaaccagatctcttcttcacgagtaaaaaccttctctagatcagtttattaagcaaccacccttttgctctgtttctaacaaaccagaagaagaaaaaagtttcaatttttcttgaag

SEQ ID NO: 2213 - DNA, 2000 bp, Arabidopsis thaliana
tttatcatgtattacaagtttggtgtgagtgagagtgttctttatccagaaggcaatgcgtgacccatgcatgatgacacgccgacagatacatttttggttctctgcatcacatatatccacctcacaagtttcatgttttcctttatatacacatcaaaatgtgtcttacgtgcactgttttgaacctggatccaatccatacataacatgatgaataccacgacgacactttagtaatccacacacatgttttataatgcagaaagtaaaattcaaattcgagatatcatgattacatcagcctcccatgagaatttgtagcagatacatccaattgcttaattaatatatgtatacatatttcttgacgcgttatataaaatccgtattattgtctttatttggataacgtgttaccaaaaactcctttaatttatgacttttcaaatatactacatttagattatcaataactataataaaatttagaagaacttacacaaaaaattactacagaaaatatttaaaaataataaatatccccgtttgttcaagatgaaattttgtgattttccagagaattcagtaatctgaattttaggtccatcatcttcagattattctaagtcatttctagtgggacactaattaaaacatcattttagtaaagttttgcactaaaaaacttttccaaagaacactaaaaagtgacatgagtgtgatgcaatatcacaccaaatttggtgtaacactagctgtttccggttaactgtttgcgtcaaataaagagtaaaccgtccggtttgaactttgaagagcgccgcgtgaagaagtcaaatgtcgttgctctttgttttagtcaaatgtagttcgtctcccacatcttactgtcataaatataatattaatctatcactagtatagttgtaccaaaaatgttggctccttgcatttagctttgtttatttgactgtggaaacttgaaatagtcttcttttataatagtcatgcaccgtctcagacctcttattagtcctaaattacctccaccttttcaatatgaataactgttcaaaagctttgagtggtaatacatacatttccgcatttagattcttattcctctctttaatcatggttgatggttgcatacccaaccaaaaaaacaggtaaatatcagacgaatatttttcttttaggctgttttagaatttattttaccatcgagcaaggtcgaaccattaaattgtttctttagacaaagcaagtctaaaactagccaacgttttattttacatatatcacctaatttaagtgatggctcaattttctaatgtaaaagtaagaagaagaaaaacgttttcgaaatgaattgatcttgtagatagatatttccgaagatgctttccaaatcaatattggttagttgttatagactttctttctttttttgtcaactggttagttgttataagttataactatctatctatcttaaagtaaaccgaaacgtgtaccatacgagtaccatccatgacaacgaccagaaaccacagaaactctagaatattttgtaaggcggcatcagtactagtaaactaagtaatgaaggaaaagtcttatagccgacctcttcttcattttaccaacaccacttgcacacacacacacgtgtactaggtcaaaccaaacgtgccctaattattttcctctctttacccccaaaaaaacatctagatactttcatcacaactttggtccgcatattaaaaagagttttagaaaaatatagtaattatctaatcgccaccttcactcttcacactttcctaccacttgtcacgcaacttccttctccacactccacctactactatatatttacacacactttcattacttcttcttcagcaattaaacaatttcttcactgcaattcacaagcaaccttcaaactaaaactcgagagacaagaaatcctcagaatctttaactta

SEQ ID NO: 2214 - DNA, 2000 bp, Arabidopsis thaliana
aaaattgaagaagcttccttacctgtgaaggaattaatcgaaaggtgacgcgacggagaacaaacgacggtgaagtaaaagagattccggcgtgagattcgtctctcttacatagcaaaacgcatcacctgcggttggctttgagattcgctgaaagtttatttttgggctactggagaatcttataaagcccaataagagaccacagagcccaataagttattacaaatctacgacagtattaataaagaccattttctacgttacaaaattttgattattaactgttatagaaaatggttatattgaaacgcatatttggcatttgttatagaagaaagaaaccactcttgctgagtttttgttggttaaagcgtgacctaagtctgtctattgagaagattcatagtccatgaaaaatccgatgctactataaatgattgtttactaatcctagaaaccaaaaacaaataattgttttctcaattcaaaaattgtatggtaaaattttagggtttacacatttaagattttaagtgttatagatttccggtgcacagaagaatggtatatattgtgagtttgtgattagttttgttatgcaaacttctcacgttaggcaactgtaaatataatatctccaacaaagcggtcatgcaatttgttttgttgaaaatttgtatattttactagcggtcatgaatttttaaatcccccacactctattttttaaaatatttttaacgttttgggaccatgatggatgttgaactttcatttcaggatttggtggaacgataaaattggaaaggctttggagtttggaacctgaagaacttataaagttaaaggatgacacgtgactttaataaagaaatgcaattcccataatcatataatagtccaaatttaggaagaaatgggtgacatgagttttaaagaagaaagacgtcatgattccattaaaacaaaccaaattagttggtggcttggtgctgacgtctaccgacttttccaccgtccatccttcgacgatggttctttctaaatgaccttctcagttttttcctgtcatgcgtattattattattagttaataaggctccactactactcggaaagtccgagtacaaataatatgacaataatgtcaaacttattcttagtattggtttaaaagaaggattcaacaagagtacttaatcacgtctcataattaccactttcatccaaacatggtcattactatatgacatgatcgtgttacattaatttggaaagtagtatatgtctttttcctaaaagtttatgtttagatttttgatcactaagaatataatgtcatatatattattaacctttacacctaaatgttatattaattacttgaatgataaaacggaaaatatcgaaagtttaggctaggtctctctagcatctctagtgtatttatttagcaatcccaaaacaaaattgtgttttctacaattttagtattagattaccaaaattgttgtatatagtctggtgattccgttttgatggtcgagatcgaaagaagcaagcatccactatgtggtcgtcacatgcgaatatttctaagtatacaaccatctatcgaaagtttcgaaacaacccaaatataatagtaataaattctgagaattctcctattttttattgatatgaaaaaagcagtaaaatattatgtaaagtagagaggaaccaaaattaaaacgtgcagatttattaaaagaataaagtgggatccaaaaagtcagcgtgaaacatgtgatacgatataacgacacggtcctatgactaagtccactccaatccagtgacgtaaacagcaccatcacccatagcttcctgtgacgcacatccttacgtaaccatcgttgacgctagactttcctctctgatctctctttcttcatgtatatataacaaaaccttcctttcctaattggtatctatctttaaaaacatacttgaaa

SEQ ID NO: 2215 - DNA, 2000 bp, Arabidopsis thaliana
attttattatcagacaataaacatctctttgctctaagaagaaacctatgctagtgaagcgttgactctggaaagatgcaagtgcaacgtgtcgctgaaacattgaaggcgcgtgtagaaaaatgttaagctaaagggaagttcactttctttaaccaagttttgcgttttgcaaattacaactaaagaatccactaaagctaacccaactaaattcaaacatttttctatgtgatcagtttaccatcaaactatttcatatttttgcaatgtgtagtaaaaactttctttgttacattatatgcttcttttataagcaaaaataccatattacattacatgttcatttcatttttgtttggtatttgcgcttacaatttacaaaatgattttgtttgatactatttacatttacatgtgaaattattgtgttcatcgtaaaacgttcaaaatttctaaaaattgtaagaaattattgtaaatgtaaacaaagtcggtttcctataaaaccacacgtctgaaccaccttaatcatcatcacaacatgaaattacaaaagcagcgactttgtcgattgccgtagtttcattgtagcatagataatcccgtcacgtgatgttatctatttttaactgtttcaatgtagtcagaaaagctatttgtttgatttcagaactgtttgattagtggccattgaaaaattctataatctatagtcaatagtctatacacaattgaaaatggtatagttgattttttaaaatacgccattaaataaaattatatatagaacttctctataatcgataaagtcgaacactccaggcaacaagcggaccgaccacggagtctaacgtaagagtattattagtgatactgtaggttttctttgactaacgataaagaaaaaacaaacatgtttaatttctcgtgtcctctatattcatgagtcatgacgttcatacaatttattcttgttttaaatgacgttcatacatcattttcatggttgtctattagttcactagaaaaacgaagtcttgaacgttgaagcgaagcattgaatatcattttataattttatggactaaactatacatttcaatcatctttgcaaaaaagaaaaaaaaaaatgagttagatcataaggagtcaggacaacagctagcacaaaaatctcaaaatcctatactgtttaacccaaaacaaccgtagaacaaatattattatacacccaaaaaaaaaaacatatttgcaatcacattagtttgtaaacacttctatttcgttccataaccaaaaaaaaaaaaaaaaaaaaatcaacattcaattttttattttaaaacatgtttgcatatgttcatggtatgacattgggtattaatctatcacagagagctaaagcccatataaataataacagaaggcccatatctattaataaccaactcttaaccggtccattctaactgtttttctcaaatacaaaacacgtggataacacgaggaattaaaattgaagttaaacaccacaccatgtcgcgtacgaagctgccacatcactgttctattaacacgtggcttaatatgatgcaatatagacccaccgatagctggcgctttctagtttaccaaggtgcgacgtaccagataacaccacctctccacttttgaaaattaaaacgctctcttttggtaattatttagggaaacttcgataattaatcgaataatgaaggactaatttgcagttttaaggaaataagtaagcacacacgttagagaagaaagaccgttccagattgccacgtcatcgtctcctctcaacgagtttctgcaaaacctgaaacgtgctgcaccttgcctctctttctctctcttccttcgtttctctctcgatttgaagagagaaaattcgttcgatttcgttttctcttcttcttttggattttcccggaaaattttggaatcggtgagtctctatcgattactggtcaacc

SEQ ID NO: 2216 - DNA, 2000 bp, Arabidopsis thaliana
attagctttttgacccaaaaatataatctttttatagggtcattgtgatcctaagtatatgataattctttacatacatatgtgcataggggccgcgtgggttacttgaaccaacaaattagctctcttgtatttgtataaaccaagcaatttttaaattctaaaattatattttgaaaagtgaaagaagatacactttttaccaaccgaacaagtctaactgaaccaaaccaaaacttgaagatgcgtatcctacatttgaatattatataagagaaattggtggaaaattatacgaaatttaaatttattgtaagtactattattatttggtaatcggaagttctgatccataggcatcatgtaaatactacaatagttaaatacgaccacatcaaaaccaaatcctaggaaacacatgaggttatgattttaaccaccatactcttactggtaataattcaccaccgagaaaccggagagaacctacaaccagaaagcacctacatcgaattttggaagcaataaagattacattatgtatcagaaataatcgttaatacatgtaacaatgaattatttgtttcgagtgcaaggtttatttatcatgattcacagtatatctaaaataataatttttttgtttagatatattaagagctccctctggcagtttgatttaaacctagaatttgtaatttgtatacttctgatttcaaattcatccctaaaacggtaaaaatatatatttcaacccgaatgttcaaaataaaattatatatgtatatatattcccaaccctacatgcacttagatattattgaacaaataaattaaatagagtaaacaaaagttaattactgcgcgtcggagagaagccttggcgtccaagtcttaccaccgaaaatatgtcgacttcccatttgctttaacttaatttgataatattataaatatactaacattttactgactcgaatacaataatagtgattccagtaaattattaactaataaagaatggcaatgcttttttttttttaagaatgacaatatttcataagattggcaagatgcaattgttttttctatcgtgtgaatctgagaatctcactcaccgcccaatctataaccctgttcaagtttaactatttctagtagcacgttagaaaagagctaaatatagaagactttatcgatgggttttatcttcaacaatatctacgtaggaatatatttcctgtaaaagcatttagtcacgttccttattattaatatctttttaatttcagtgacctaaatattagattgtgggcttgacaatatccctaatactaaatagtagtgttttctctacatatattttgtattttcattttaacgaaaaaagaaatttcatcaaaagactatagctttttcttacataaagcataactttatcttgtacattataatcgtgaaattgttgaaacatttcgagtcaagaattaattaagtaaaactacgacccgtgattcttttcttcctttgtcgacaatccatacgcgtgaatacgtgattagtcaaatgtaaaatgcaaaaagaaaaaacataaaacaggaccataccaataccatattctcactataccaacttcgatttcataaacccaaataagaaaataaaaacaaaaactccacgctgtatttccatgtgtgcgagatacaagaatagactcgacatgcaaaataaaaataaatatgaccaaataatcatataatatcttagaataaataaattaaaaaatcatagtaaccattttataaatttcgtaaccttttctccgtcatcccccacataccactccctataaatgccaagcaaaatagctttcctcgatagttcctaaatcataactacaaaaacttttccttcttcttcctcaacctttgcttcaatcttcaacaactttctttttataaagattttgcaagttaagtgtaaacctacaaaaaccaaac

SEQ ID NO: 2217 - DNA, 2000 bp, Arabidopsis thaliana
taaaacttttggccaattactattaaattttgaaactgaaatgtttagaatatctatgaattgaacccaaaaaataattaagtcaactaaaattgaatccgacaaatgctgttttttgttttgtttggaattattacttattaaggaaataaaaatgatagaatttgtctgagttgatcattagaattcgaatcgaaaaagaccttgccaaaaagagaaagcgaaaatggtttaagaaaacgaaagacttccacttttgtcctttttttttaacatctacttttgtcatagcaaattatctgtaaataagatagggtttatgcttattgctacaatgagcctaatcctatgatgtgtattgcaatttgcaaccatgcgagtttaattatttgtttactgctatagtgatcattttatgatgtgtttttattaattacaaaacagagcatcaaaaatcaaaagaacatatcgcataatcgaactatgctaatacctctcctcaatctttgttgttgttatattcaagtagcttattcttttgttttattttacgattagatttctctagaatttaatttatattatttaatcatacttgatcaaggtttgtagcttaatcaatatcgttatcgtgtcatcctgcagattcaaatgatcaaatctgataatctacttatatgtattatatatattagataccaacaacgaacaaaatcatatttctataacatttgtttggttaaatatatttaaagatttgtaacagttgttcgggttcaaaactatcactttgtagttgtaggatgaggaaaagtcgtgatatgatcatctactaaaatcatgtgttttttaaagaacatgattttcattggatagtttaataaatgttaaaaaaatactaagtgtcaaagaagagatttgaaccatatgtagaatacttgattcgaattttcctgacgaataatctaatatccttttctcaaaagaaaaaaatgtttgttaacttggacacgatattattatccaacttcctttctagatattcatttttaaattacctatatatttttattttctcaaaatatactaaaaattggatagagctattaaataaaaaagatagaatttagagagaaatagcaacataatgaattataatataaatattttgtaaagaaataacaaactttatagttagtttgcctaatatagaaaaaagattacagttatttacccatttgtttgtgtgtaaaaaaaggagtaaaataaacagagaaaagagcttcttgtttttacttgtgaacgttattgacttttcggcctctctctcttctctatacaaatatatggatcttcatttcttcgtatagtgtaagcagtgacgcatccatttatcatcatctccttataaatctcgaatctgccacagagagagcgtgtgacaaaatgagttcataagattccgttatcgtcttcctgattcctccaaatctccggcgaatttgcactctttacctctctttgactccgtgaggttttgttttctccttatcaatcgaattccatttcgtgctcgttacgtgatttttgtagattttttttatggggatggaaacttgtttattatctatagatgatgattttgttttctccatgagaatctatgcttttaaacttttttttttttgttttttgccttcggagctaacttttggtgcttgtctctgtctctgttttctctccactaaaaagataaaaagctttttgccatctttttttttttctcaataatctatcacatcgttttttttctttgtttttttctccatttgtcttcattgagttcatagccacataattattgatttctttttcttttagtgtttctgttactgatgcgtttcattatttatacttctcacttgcagattcgaggattgttagtttcttgtgatgtgtagtctttgaagcaggggatttttattgtattgaggaagaag

SEQ ID NO: 2218 - DNA, 2000 bp, Arabidopsis thaliana
aacttgctttcgatattaaaaatctttgaacgagatggtttgataaagctcgatttcataattttcaaacccgtagttcaacacatgggaatttccaaagtccaaaacccatcacttgctactttcaccaactcatgattatgttttacatcattaacagtttcaatatgtttactttgttcattttttacagtttaaccattcattcatttagatatctttcttagcagcataaatcaaaacgccacaatcacttatgaatcaaaacacgttttattaataaaaacatcataactcaaccatgccacatagtcaacaaggaatatgaagaacggtcaacataactctaagaacattcctcacaacaaacacacatcaaaatcaactatgaatttgaaatcaagataaaaaaaaaaaagaaacatcgtaacataatctatgaccacttggaactattagattttggtcccgaatattaatatcaaacataacaaataactatttatttctaattagtcaggtttcactagaacaccggtatcaattaaaaaaaaaacaatatgcacaatatttttcttatacaatatggaaattgaaatgttaatagaaaattaaagtttaattaataatcttgattagtactatataatataaattaatctgcagactgcaccatcattcttgctacatgtcatgttcatatcaaaagcaaagcaaaaaagctgacaaaaaagtcaaatatattttttactaagaaaattcctcatttctttattgttttgttttcttataaaccgaggaatttccgccatctctctttctctctttcatcgtcctcaccggaacgcgcctactctctttccacatcgtacgtttcctctctctaaattcttcaactttaaaggtgataaaaattgaatctttcccacaacccacaagaaaattcgaatcctttctctctttctatctcttagtcacgctttcgatcagcaatctcctcgaattctggttggttccgtctctgttttctgtacacaaagccctgctgctgttgatacacgtgagccgccattaatgcccctttgttttcttcttccaggtacgttttcttcaaaagggcctttttttttttttttttttttttttggcgttttctttcttcttccgtttctgcttcttctgagaattcttcttcacattacctttgtcttctaggattttctatttcctctaaaatcaggatctttcagctgaatttcactttgattttatttaggttagtcttcattttcattttagatatttatgtttctttttctgagttttttgcattgtcatttgtcatgggaccgacattgctccgacaagcgtttcccaatctggggttgatttttatatgtttccaagtgttttaattcaaataaggtttccggcaaattttgaaacttttcatcttcaaattgctgcttttgggaaaaagtttcagcatttggttcttgtcaattcttatcaatgctatcttaactcttctttgtgcatttctgtttgagttctgtggctaaggttgtttttggagataatttaatctcgagaaatttctcagttttgtttttgggattttgtagaatattaagtcaaagtttgctcttttgcagctgatttaggaagttggtgatcaaattacatctagtgtttgtttccgccagctgaagtgaatcaaaatgtttagttttggccgagcaagaagccaagggaggcaaaacagatctatgtctcttggaggttagaaatctctagattcttgtaattgatttcactgaggaaatggtttatctaggatgattgtgttgaaattttcagtttgctctcttaaaacttgaaagttttgagtgttttttgagactttagtttggaatttaagattggttgatgaggtagttgaagtttttgtggtttggagcttcaaagagtgaagcttttgtggttttttttccatttgg

SEQ ID NO: 2219 - DNA, 2000 bp, Arabidopsis thaliana
agttaaatcttagttcttacttatgagtaaatgtccttagactactcatgttacgatcgatgatgcatgtgtgtgaacttaccttaatggatatacgcggcgaaaacaaagactgccacaaaatctactctttgtgttgttattggtacacatcaatggatgaagaatagtggctcgaaccgcttcattggccagaaaaatataagattagctactacatttttttctaaagtaaaatcaattttgttttttgggatcaatttttgcagaattctatgtagtgattacgacaccacacgcatgcatggcatcatcagagaaaaagattatagatgactagacgcactgatccttctacctttttttctttaaattgaatgattttaatataaacaatttgtaacttgtaatagatttgcacttctcctcctataaatgcgttcgtcaacatctttgctttcgtacggtaaaacaacatctctcgttgaaacaaaatgtgtttgatcattttaaattttctaataccttacgtcttttattttaatttctataagaattgtctgtatggaaagtttttttaagatttttgttgcattttttttaatggacagcttagtcatgcttctctctaatctatagactaacatgcgggtaacatataaatggcttatataaatatattcttaacaaaaaatatcaatattcttttcagcatatcagtgttataattaatttagaatccacgtctagtttatattttcttctttatttgcggccccaataatactacttttggtcaacaatatgaaagtcaaaccagccgctcaaatgtatccttcatgagttcatgttatatttcagtcaatacttttcatatttaaacacttattataattacgtaatatttttttgcccaaaaaaaaaaattacgtaatattcaacatctctaccttgtagagttccaaaacattgtcacaaaatatttataaagaatttattttaactaattaggtcgttaattgtccaagggtttttcatagttgatatagttctgttcaaatatagccatccttaatcgattcatgggatcgtaaattactacttcgagtgttgtaaaaaaaaatgaaacttctacattacaaactcgaatttaatgcatctggagtgatactataaaagtagggatgctctcaggtcgcatttgagagacacagaaatgattttaatggaattaatatattttcagtttttcacaaaaaaaaattgtgtttataacaactgcagattcaatgctgattttatgagtctcacctatagaatttatatttctatattcatagaggcagtataggtgttgacccaacatcgaaagaacacttcgtaaaaaattctttggaacaaggctgaaaatttactcccaaatttagctatccgatgaagataaatcatttaccgtttattaaagaattatcgagattttagtccaaaccaaaagagattatgagcctaagattttgaatttgtattggtaaaagaaattgaacgaaaatttcagaaaaaaatattaataaattgaacgatagagttcacttactacatagtcaactagtgcctagctataatagtttcaaaagacaaaaaaaaacaaaatcggttaactacttccgtgacataattctcattttgatttttgaatccagtctaatttgaaaagtatattcaaaatctttaaatccattaatgataacttttataatacgttgacacacgcaattgtatatacaatattcttgaattttaaatgtaaattctagaatatattgcgatcaccacactaatcaaaatctttgggacaacttgaacccacatttgacttttcttggtcaaatattttggcatcatgcatgatcttctctataaaaaccaaaaggcctcaacgacattcataaactcagtcattatatttatttttgttgtatttcaacgttcaatctctgaaa

SEQ ID NO: 2220 - DNA, 2000 bp, Arabidopsis thaliana
caaatgaaaccttgagatcaacagtttctatttagatagggactgctacttttgtaagtatggtttggatggttcattaaataataataggtattcttactaaatttattaaataataataggtatttctttagtttgtgttaggatatgcttatatttagggagaattagttgttatgacttgtgaattcgatttagggtttgaatggttatggcggttgggacggacaaaaccgtcaacgaatcagactatttttatttacaattcatcaatgaccaaaaaaaatagaagaaaaccgcagcggatcatctacggaccgtttttacatacaaataaacttggtccgcagcggtttattgttcgcctcaaaaatgagatggactaaatcgcagacaaattaaaccgctttgtccgctacctccattcatagtcttactgttataaattacgtgttggggtatttatttatttttcaatattttgatgatacacggtctattatttttcttgtaataaggctttaagaggcaagtgtttagtttaagtattggtttattacattccattagtcattcgattaaagtagctagtgtagaaagaacctagtgccagaagaaaaaagattaaaacacattcgattaaaaacacatttgttacatatctttataaaagttagaaaaccaaaacaaaagttgaaacttgagagtatataatcatggaccggccggtcttgtccatttcttatatttctctattcgaaattgaaagtataattaaagaaatcgtgtgtgtaggatagtgcttatacaccaacatttgattgctagttctatttccttacgtaaacttataagatctccaaattaaacacatacaaaaagttacaagttcaatattcattgcaaagataattttcacatctattaattatgtaaattagtagtatttaagttgacatggacagttaactgttgggaccatcggtccatgtgatttccctgcacctcagattcagtggaagtaagcattaatctttgattttgtttctatcataaattaacttcatcagaaaatttattaatcctatttcaaacaaggtcgtatcaataaaacttttttttttcttcttcgtattaataaacttttaacatcattaattttctgtttgctctttttaaagttttgatcctgatttcctcattattacgtgaaaacaaatcaaaacatacataatcacacatacaaccgaaatatcaaaccattaaactttcatttttcagattacaatattcaaaaaaaaaaaaaaaacagattacaacatttctgatatgtcgttcaaattaaatcatatttattctttgaacttatttatttaatttcaaaatgtaaataaataacattaaaaaaatgtagtacatatatatgtattacaaatatgaaaatctgaatactcttctagagtattcttcacggtgaatattaggtattaggtgcataattaaactctatcaaaattagatttaccctatcttaccatttctttgtaagtatacaagattcataaactctatagaaagtctagttccatgattgcgtctcagctcatgcaaagagagttgtgctcataaaacttgaccaaatctccttttcctttttgtccatctctttaccacttacatattttcccataaaataacgattccatcatattaattaaagcaaaaaataaacaattagttgccccccccccccaaaaaaaaatggtcacaataacaatactagtcaaaacgtgttatatgagtttcccagaagtttccaaggaaaaaaaaagtctttacccgtaaacattttttctccatcttcttgatatcaacaaaacacacctcaacaaaaaaaaaaaaacttcatctctctcagatttcgaaattgacccgtcggtgattcttaatctctcctctctgttcttctccgatcaaacctcattccaaagaaacaaacc

SEQ ID NO: 2221 - DNA, 2000 bp, Arabidopsis thaliana
tatcttatatcgatgacactaacgaatctgctcttgatttaatgaagagtaacataaaaatattatgaatatataaagaggaagtgaacaaaagatatatataaagaagacatataactaacataaagaacaaaggagtctttcgaaatgtttacgtttggctgtccatcgttttggaatctatgcctttttattaaatttttttgtcgaaaacctttttattaatataaagtgttgattagtgtaaccacctaatttgaacacctacacgtaaaatatgtatttatatgattaattatatttagtgatgaggatgactggtggattatagacactctgcatgggtatacagataaagaccctttggtgtccatttcatgcttagttgtcatttttattcatttggctttcatccactcaaaatgacaaatctaccctttgatatacacgtacctaaacataagagtagtataccaactatttttttttataagctaatattactctctgtccttgtttttttatcacatgctaattccactataattggaaatgaacagctaaaaagaaataaaaccagttaaagacttatttttccaaatgcctatacacgtaatctactaaacacgagtttaaaattttcaaattacataaaattaaggtaattttcttaggaacacttaaataccttctcttttgacattataaatgacgggggtaaaatgttggttaggcttcccaattgtttgtcaccatcatcaatctcgtgcagtccgtttgtaaaactttgcagtgtatgtatcttatgatcatatatgaaatttatgactagctagcttaacgcttcaatctttgagtgcaagggagaaaagcctctccattattggctgacatcaataagaaaacatctcattttctttcaaactaaatgattttaaaccggagaagaattcgttaaacatacaatttttgaaattgaacactttgatactaagttagggcatccggtgaaagggctcccaaatatacaatttttgaaccttgtgcctcaaaccatactaaactctctaacttcacgtggtcggctacatcaaatgaaggacgatcgaaagcctagatgttttattgtttcaaactttctagatcgactaaatgtcacaagagaatttttttttttttttttggtaagggatctttcccatatttgagcaaattgatgtcgtcgggaaattagacaggttatctaattttttttatagtgttaaataggcaatttagttattaaatttatatacctttactatgtcagtttttacatatcttaaaatgtattttcaaatttactagtaatcatagtaaatgacgtggtaattttgatatttttatatcgctatttatacgatttggattagattttgttagataaagaaatagtctagctattctaatatacagttgctttaactcaatatttctttaccttagttaatttatatatttttggaagatatttggtccagttgttaatcaaaaatttatttaatgtctttgcattatgttaaaggtttgtttcctaaaaattgcaaatcatactataaatattgcatgaaattcaaatcatgaactgctaaaagtaatcataatgaaatttttagtcgagttctctgatcattcttttttttttaaatccacattggtttgatttttcttgatcgatcatctttaacatcactaatatacaataaacagctgcaaaaccgtggcagactaattaaaaaaaagaaagggtaaagctggaaaatattgacaaagaggacaaatcagaaaagactattgaataatttactctcccttatataaacaccacgagcgtggaagccaaagagcaattttctcccccacaccaaaagataaacctctctctctctatctatcttatgtcaaaagacagatttattaacaaacacaaatcataaatctttttcttcttccgagaaaga

SEQ ID NO: 2222 - DNA, 2000 bp, Arabidopsis thaliana
aatcaagaagtttaaaagctaaacttaaaaaggagttgtaactatcagtgtttgtcctgaaatgaaattgtaatgtatggctccacaattatttttgattaaagatattaggaacaatctgttacaccaattgttttctaataaaaaaaacaaccatgaagagaagaagcaatttcttggaaatagtgatcaaaattaatgtttcaatgagttcatatgtaacttcacaacaaagagatcaatcttcgcacgaagctttatctactttgtcggaaacatatcaactaattatagaagaagtttcatggaaaatttgtcatcaaacaaattcactgtaactatcaatatttgtcttgatctccaaatttgatgtatggctccaccatttttttatgcttgtgaggttaggaacaatccgttgtaccaattttcttctaagaaaaaacaaaaaggaagatgagaagtaattcctcaaaattaatgtatcaacatcaaaatggatgggttcacatgtactttcacagaaaagagagatcaattctcacgaagttttatatatgttggcacaaaacaaatcagacgaaccaaatcttttcgatctaattttctcatatttttatatgttctttctcatagtttatctaggtatttttggtagtactatcatttcaagaacttaaattaacaaaaagaaaacaaaacttaaaatgagctgtgaataaagaagtttaaaaccttttacgattgtcctgaaatggaatttttaactatggctccaccattagttttgattaagatactttgaacaatctgttacaccaattttcttctaagataaaaataccaatgaagaggagaagcaatttcatgcaactagtgatcaaacataatgtttcaacgtcaaaatagataagttcatccaatttcatagcaaagaattttattttttttatttttttaagcaaagaggtcaatcttctcacttaactttatctccattatcgaaaacatatccatggctagttttattcgtacattgaagattcacgatagatgactctacctatcctacgttatttttaataatttaaaatactgattttagattagttactaatatttttatacgaaattttatgtttaaataatttaatgaattaaattcatttttatattgacggtaaaataaatacgagagatatgtccaaaagatttaaatttatgttaaaatatgaaactactactataacttatatttataacatatatatctaccatgaatttataaatttgattcataaaataaaatttacaattaactttaatttattgttatttaagtttaatttctttgttccaaacattttttaaatagttacctagatagtttattcctatttattgtttgtactttcatattctgattatccaaattttctgtttcttaatttaattcctctttattagtttcattcatttttctttttgtttcttagtatttcttctagtggtcaccaatctaaaacttcatataatgcagtctaaaaaaggatccttatatgtaagactaattatgtatttatttattattatatagattttatatttatatttatttgaagaaaaaaggactttcaattgttctatttaaacttgaaaactagcttgatgatgaaccacttctgcctagcatctgttaagagctaccagaaaaatcaagttcgtcattttcacaccttttttttttttttttaaatttctcatcgatcaatttgtatggtttacgattacgtgccctctaagctttctctgtatttcatgtgattttaattgacaacttacaagctttaagtttccagtttttcttcatgtgattatattttccttttctcaaacatcgtaaccatacacgtatagctttttcaacgtttttatgttgatctattagctaataattaacattttacgtgaaaaatgaagggtttaaggaaatttcagca

SEQ ID NO: 2223 - DNA, 2000 bp, Arabidopsis thaliana
ctaattttataattgaaatttataataaaatgacaaatttgtatttaatttcacgggatggggttatatggtgggacgggtttgtgtggataataacacatttgattcttttataagaaaattaaatattataaatgtttatattttaaattttatactacaagtgaaattctagaattgactggtttgggttgataataatttgcgatagaactaggagtgaaatcctagaatgacaatcaaaatataattatataattaaatattaccacgggtaaaattctagaattgacggggttgagtcgatattaatatgggatggtgtactacggatgaaatctgaaaaacaacaatcaaaatacaattatacaatattaaatatttaaaaaaataaacaaatacaacttaaaactttaaaatttgagttataaaattttgtctcgcggtgtatcatacatttaaatcaaacaatagcataaatttaaagatcatcctaaaaaaaattcaattattttttatttaatgaaaatataggcctgcggtataccgcggattaatatctagttgtataaaaacaaactgaactatgtttccctaataaataaataaataaaaaaaaactgaaaaaaacaattcctgaacaattttacatccaattcatagtataacgacatatccaataacacaatttgaattctaatagtaatctctaatacacacttttttatttatcggaatatttttaaactaaattttaatagctacacgagataattgatctattgaagtattaactactaacatagattttaaggtctagttatttcacataaaaactaagttgtccaactactaacgcaattgacaaccacaaccaacaccaatattaagtatgattaccgaccaaatttgaattttataaacatatagaattttttttgccaactcataatcatatttttatatgtattttaatataaggtgaatgattatcttttgtttcatgtcatattgggcataacaaaactagtacaacaaagttgtgtgaaccactccttttatatagttttgttgttgtcttttcttccaaggaagattactagacttagacaagtggattatatatatatatatatatatatatatatatatatatatatatatattaactaatctttcaacacttgtggattgataattattcatacttttaataaaaattccatagttcaatgaatctgtaacaaaaccaagaagtgacgtgatatacttttggaactataatcatattgtgagctcaatggataagaattgattgtagtaaatgatgtcggcagttacaagtgtagttagatatatgcaataactcaaatcggacatgaactcattttaacttatctaaagagaccaccgacgaatcattttgggttcacaaaattgtacttcgatttctaagcctgaatgtgaacgcacgtttttgaatatttcaacacgtgtttcatatttcattacatgcattataacataaatattacatctttgagtctttaactagttgaccaacaaaaaaaaaaactttaactaagtctagctagttttgttactacatatataaaaacaaaaccgaaataaatatttaaaatttataatatatttgtgtggctaaatcaatcaacgtgtcatgaaggtctaattcaagttggtaaggaaatcttttgtttatgtccatttcccacgtgtcactatttgtatgacggctagagaaagacatgttgaattaactagtgactccggattatataagcaagcatctactaaaaagataggaacaacacaatttgattacactgagcaacacaaaactggcgaaccaacgtgactctaacgaagaaaccggcaatggccagtatcactacaatgccgaagaaataacaagaatcataaacgagccagaatattatcccccgggttacaacttgtctaccaccgcaatttcaaac

SEQ ID NO: 2224 - DNA, 2000 bp, Arabidopsis thaliana
ggtatataaaatttttacgatcacctaaattataaaaagaaaaaacaaaacaaaacaaaaagtaaaccgaaaagggtcttgaacggtaaaaattatctctttccttgccttaaggtccaattccagattaaatccgagccaaaatccatcacaaaactggattaattaaggcatgtgctcgatttagcgtttctgaattaaactcttacgtgtatgatatttggatgtgtatataatgtctggggtgagtaaaggaaaccgaagttgaaaaaacaaacaaacttgacaaaagttaattagtttaatggttaaatcatgaaatgtcaccaccgaccacttgatctcccatgctgtagttgaagaagtttgcctcagaccactttagtagcatacaaaaaagaaaataaataagagggtgttattcagttatggatttttctagaattgaaatgcaacactaaaataaacttttaactcaaccgatccatatatgtagatgagttcaaaaccaacaaaaactaaaaaaaaaactatagataaattggtcgcatattaaaagattaaaaaaacatggtgaattaagtatttatctacaaattatactaaatacaacattttttatgttcaaaaaaaattggactgtcattttatctgttatatatatcggaaccacgatatgtaaaaatttaataaaatatcaatttatttttaaattatactttttcttaaaataaaataatcaatcatgaattattctattctcggagtctaaaaaagtaaaatttaaaacaatttaatttatgtagaataatgttttgtatgaaactaattttgttgtctataattaacaagatcgtttatgtttgcaaaaacaaaggaaattttttttttttttttttttaatatctcgaagttcaagccgaaaggcctacatctccgagatgcaggatccacaccagattttcaacaatggaggaatataaaatatcaaaacgacattcatattaagctatgtattatttaagtttataattaatgattttagttaaccaaatacagttgatttatataaaatttggattatcctattgaaaattatgcatgtccaaaacttcttatgagatttatatgtataagtttatataagggtttatataattattaattattttttacataaaagcctaaccagagacaaacattttttttcttctaaataatctatcaattattaatttctagaggttaaactaatgtatatacataatgtgggtgtgaatttttgttggttttgttacattcgtttatttctgttttctttatttttttcagttaagctagattgctaaggaataaaatttgaaattagtttagctcatttaaacaaaatatcggttagattcagacagttcaacctattttgaaaatctattcagttttttttttttataaaatgaaaaatccgaagctcatttctcagtattatagtagagaagtgattttttttgtttaaattagtttagcataagcacacacaaaattgttttacattacatcacatgtgatgatgatgtggataagtgtatcgatcatccgccaatatttactgattactgtaatataaacattaaaatttcttcaaaaatcaaagattctattgtacctttctatttcctctagagatttcctaatgaagaaaaaaccagcaaagtcattatcaaattcgaccgtccattcgaagacgtacacgtctttgtagtcaacaccatttacctaacttcctagaaaaccacgtaacattgcatgtgcctagtttctcttatataaccccaatcaatatatatatatatgaatattgaagataacatcgttaaattgcttttaggttctcattatatcatttctctttaacttcgcaaacttctcctcgataaaatttctctctctaaaaaaaaacaattagaatcttgccttttacagagtaacactacatgccgaca

SEQ ID NO: 2225 - DNA, 2000 bp, Arabidopsis thaliana
tagtgcaagaatctctttatcaacaattatagaggaaaatagcttccttgctcaaccaaattttaacaaaaatgagatacttatagagcatcgaataaactgcaaactgtctggctcaatatgtttttcttaatttgtttataaaaacgaaataatagcttctaaccaatgaaacatctaacaagctcaacaacttttaaattttcaagtagataacactccgaaaatgtcaatatagtacgtacgagtaatatggacccttaaaatctacaccacacgatatgttatcatgtcacaaatgaaatgcaacataacgtatatgagtttggttctgttagtaaacaaattctttgacattgctacaaaagtttgagtatcaaaaaattatatcgatagaatccttttagccaaattatccacgtaatcattttagacgagcaatctttattattgccttagtcggggacataaactattactcgatgatggacaaaacaactatttttaaaagtcttgattttcagtttatatgtttccgctggccgagattttggtaattctttttagcaacttaatttgagatttaaagcatggttagttgtgactgttgaaccaagttttatttaagttaagtgggcttgataaaattgaattgtgtaaatgagaactttggtcttaatggattggttcaattcgtggtagagctacgagaaattgtaaagtcaaatattgagcgtgagaaaataagtcgctctgttttacatctcagaagactcgctcttattcacttcctcaacaccataaaaataagagttgttgagagatcaagtcattcaccactcctagatttatggttgacatgaaatgatttgttgaaaaaataaattcaaaccagtagtaatctcaaacctctatttgaatacacgtttcaagtatgtcttcttcatcgattaagaacttaatcgtttacagacaatcaaatagttttaacaatatctctttattagaaataagtaattcaaaagtattgtatcgttagagctgtgttttcgaatactgacaaaatcagtttagagaagttgtaacctaagatcaatgaatcacataacattatcacataagatgattcaaagggttaaaaaaaaagagttttatcaactcgactcctttcatgctttccttaacaattatgatcttaatttcaataatttttgtagtgttgagaaatttatgttcaaaatagggaatcaagtgtcgagtaagaatgtgtcaatcagaaaatgtcaaacaaataaatcatagaagcatgacaatcgaatacaacattatagtaaaattttgctttctacggtattttgtgttgatctgcaacaaaacaaaattttttttttttcaaaataaccgattttctaaaatagtttaaatgagtttattttattcttacccttattattattattcttttgctaatcttggaattgcatgactaatattttggctaggagaacagaaaaaaggttattgaccaccaatttagcttgacaataatggtttgttttgtaatctctaaaatcggttgatcaaaacaaataaacagaagaagaaaaaacgaaaagaaaagaaagagcaaaatgataagaaaccgagttggtcggtcttgtggggcgggcgtgaagagcattcgagagcgcacaaaaaaaaaaactattacaaccaaaatattacaaatttaaattcttaaaaaatttcaaaatatcacaacaaaaaaaacaatttatttattaaaaacattttgaaattacaaaaaaaaaagaaaaaaaaagaaaagaagaagaggaagagctttttgtgttgaagagagagtttcctatcttctccattcctcccaccatctccctcatcttcatcttcctctctctttctctctttctcaacaatctctattagatctttctccattaccattacctctggctttctcttaaatccaccatcatgag

SEQ ID NO: 2226 - DNA, 2000 bp, Arabidopsis thaliana
ctaagattgtgttacactttcgcagatgtaacgttcctagttcctatttccttttgaattctattattgttacttattgatcatgagattttaatattttattttagtttttgagaggatctagaatttttgaggtataactttttgggtataaccttaagagatgattgattacatccagcttggacaaaagtggctaattgattatatcattccactaaaatgatgatactccggaatgtagactctcaaagcaatcaatgagttgagcttaaggcgcatatcgttccattgattgtaagtcttatttagattcttctaagcttttttttttttttcttttcttttatgttaaattgtgcgaatttcagatcttttgaccttatatattttttagtgtctggaatcaattttgagttcattactatttaataaatgtctttccgtcctaaaagaaggtttgaatccggagcgcaaaggaatcaaccacttgagctacaactaggttaccaacccattttggtaggtttgttgctattaaatacgagagttctcgttctagttccagatacagatatgggcatcatgccatctttaatcatttattttgtgttttgaaatgcattaccgtatacagggccggtcctagcctaaaactggtaaaggctttgctttaggcgccaaaaaatatatgtagtacaaagggcatcaatttctgaaaacattttatagtgtagtggttagctctaaatgtagataattgtttttatggtgcatagtttaaatctcaattttgttattttgtgacttttctaaatgtatgaacttaaaaatgctttagacactcaaatctcttggggcggctcttaccacatgagatggaaatttaagattaagagtgaaaatttgtataaaaatatttaattgtcctaaataagggttcatttatcttgatctcgaacttgtttcgacggatccatgattttacaatctaagatccggtcactatagacatcttattttcatgatcgaataagaactcggataattattcaagctctagtgctagtggattattacgtcaactaatcttgcaatatattattgtttaaatatgggaagaacagaaaaatcaactttttatcaaaaaagagaaggaaaaaaacactaaattgaatttattaaacacgttctccacgtgcgttatagctgttcgtaccaacagcaaaatggaccgtccaccaattagattagaaccattcaatgttatacttttcttttttcacgtgtcacaagaagaacttaaaaatgaatatgaaaacgaaaaataattcctccaatccaaaagaaaaaagattttgaaaattagtacacgatagtgaaatgcactttatcaaaaacacaaacttgttttgttttttcttattatgtttaataattaaaaaataatctttacggttcatataatttgagtttggctacttttcttacttcaatttggctacttgtataaaacagtgagataataatttctttgacgttaaaattacacaatttccaaatgcagaaacttcaacaagagacatgtagggaaagaatggtggcttgtttggcttatttacaatttttaagttttaatccaaagaaaagaagatcccatcactcttttcaacaaaaaaaaagttatcaaattaatcattaaatcagtcacgtaaacgaatgttttcttacaaataattttgggattcgaggaaaattaccaaaaaaaaattaaaatagaataaaataaaataaaatgaaagacttcatgagaaaatagagacgaagttaagttgtgtttggctttgagctttggctacttgggatttaaataccacttttttgcttcttgtacccctgcttcatcatcacgcacacctctcttaacttcttcgatctcttctttttctctacacgattcgattgattcaagtatcaatcaatcgaatccgagataagtc

SEQ ID NO: 2227 - DNA, 2000 bp, Arabidopsis thaliana
tagattccctcttggtgctaaagccgagtacatctacgtaccatttaaaatgatcatggcatgcattggtttatcaaaaaagagcttgatttcttatccttgtattatgtctatcttttggcagcctaatgttggatcggtttctagtagaatttaaagggcatagcaaaaaagatgaaagaggtgaaacatcaaattgtacaaaatcataaccaatcaatatttacaatatgacgcttcttgactcttcacactctttctctcttatgtatggttggttatgtgacaacaatttgctttacatgtttcctcatccgttgtatcttggtagagacacacacacatacacatgtttatcttgatatctattaatccttaccttcttggtttaaattttagactggacaactaaccaaaggtttattcatttaatatggtttagatatgcttcgctgctttctacgaggaagaaacccatgatatgatggatcatccaatccttaatctcatatattacctggtaagctctctcttaaactaatcataaaaattgatcatgaacatctgtctcatacataatcaaaccattgtttctgcttgaaacctaatcttgttgctcaattacagttggtagagatattaccgtttctctggttctgcccaccttgagaaacctgccaccaaaacgacgtgtacacgaaagttaatgatccttagaccagtttaatcccataatttctctgaagaatctcaagctttctatctcatttggatgttagcttcaataatctaagctttaaatcttgatggtctaatctccatttacatgcttttgaataaatctgtttgacacaattttttcaagtctaatgcggttaattaattgattgaccccatctgttttgacataatttcttcatgtcttttaggttttttaaccaattatgatacaaattttaaatattgctaccccaatgtctttgtttgtaactttgtgttaaaggccggatctaccaagatagccctgtctaaatttgatttatgttagtcatgtaggtgatgtatgatatcttataatggtcatgtaggtgatgtatgatatcttataattaatcatgttggaaatcacccccacaataatatatgtaaatatatatcttaattatatcttaaaatatacaattatggtaatcaaacttaacctactaaaagaaaaacattagatgataataatggcatctttgtaatatttgataaaaataaaagttgttatagtctatttatttgtgaagatgtataaaatattgacatttctcttctctatatacgattttcatgtatcttctcctcatacttaatttgattataagtttaaacacttgctgcaattacaaggaaagaagttgacaaagtggaatggtcaatccctattggcaaaaatagatattttatatccagaacatccaaaatggaattcataagtttccgattaaattttgagtgttgacaaaaatagatatttttctatataaaaaaaaaaaattggtatctatccaaaacactacttgtaccaaaatattatatatatatatatatatatatatatatatactatgtattgatgagtatactaatgaatctaattaatttgtttttccttgcaacttgttttagaaaataaattatcaaaaggataggttcgagacgttgactttgattgagacctttactcagtattattatgggtatccattgactttaaacatatcgaccgttgaaaagtcaaaacttaaatgtgaactacgtcattcaaaatttcttctttcttttcagcatagaagtttattcgttaaatcaaaagaaaaactcaatttttctattgaatattatttgattaatttcatggcttaaggaaatatagaatccttctccttctcaaattctcctataaatcaacccttcacgtcaaaactagcttgctacacttaacatatcaacca

SEQ ID NO: 2228 - DNA, 2000 bp, Arabidopsis thaliana
aaatttataatcttatatactacaataattaataacatattagatgtgattcaatttttgatacaagttagaaatcctagaattgcatgtttagatcgatattaatacaaaatggtatactataggtgaaactcttaaattaacaatcaaagtacaagtgtataatcttaaacactaaacaatatagataatatcaacaaaacatatacaactcacagtttactatacatttaaaatcaaataaaataatatcaaatatttttaaatcatctttacaataaaaaaattttagtttaactaaaatatatactgcaggttaatatctagattatagggcttattggatctaaagacggatcatcaaagattttttaaactgaagcaaaatatattgaatattcaaatatctatctgttaccaaattataaacaaataagtcaatttaatattttatatacaaaatcaattaaatcttaatcacataaaaattagcacaaaaaaagtattcatcaattaaaaaattatcaaatctctgtgttatataagttttgatactatattcgaataaagtgtaatataccttttcaatttgtattctttaactaatttaagctaactaatatatttgctaatcttatacctatcaaaactgactatcgtttcttatctctatagtatttttgcaagacttttttggtggatttggataaaagtgcattcgggtcatatgatacattctcctattaaataaatatggtgcactcttatgttattagctaaaatgtttagattctaattcagagtcataccattaataaaattaatattaacaaaataaatagctttttggcaagacggatttggagggacgggtttttgaatcaacattaataaaaaagtaaaatataattaatcgaccgtttcaatacgggttaaatctttaatttattattttttaagaccactaatattaaacatatcaaatcatcctaatttagaaaagattatataaaaccaaaaatgttatgtggtatgtataatgttactatatataaaattaaactatagatataaatgtattagagaatgatacaatttgcaaaacttttctatataaaaaattattcttaaatgttaaaaattactatttaaaaaaaaaaatcatgggacggtaaaaaaattacagaatgagttctattttggaattgggttatatggtggatgtatttgaatcaatatttataaaatttaaaaatattattaatatactgttttaataggggttaaaacttcagttttttaacaattatctcatggattcgtggtataccgttacttaataacaattataaactgtaaaatataaatatttaataaaaataaaatttgcaagttttaatatatattacttttaaaaaataaatcgtcccgcgatataccgcggttaaaatctagtttgatatttatgaagttgtactcaaactcaaaggtcaaaaccaaatgctataatttcatctttgtaatggacctacaaatagaatcataacgaagatcctgactgttgacctaaaccgtggagtccaccagacatatgacttgttgtcggcaacactttggtttttagttaagattaagcccaatagcccaatataagcccattagtgtaggccctattaagtccatctacactcgaaaacttcatcatcatcttcaaggtttaagattggcttcatgaatctccaatcactgttctcagatgattgtttaatcttatctgataaaaatcatttgcttccataattgttactgaatcgtgcagaactgatcaatcacgggtcccaccacattgtttgtttcaagaagctattaacgtcggctgattccaaatggtgatgacacatttttcacgtctccgacaacttcttcttctccaacccaaattcctctcttctcaacctcgtcctctccgttctcctcctccaacatttctccgatcagtg

SEQ ID NO: 2229 - DNA, 2000 bp, Arabidopsis thaliana
ataagttattttctaaaattgaaatatctgaagtctgatcgatttcggacttatagctagtcccagaaacattcagtttatatatatggtcagaaaaagaaactagactaaaacaggaaaaaaaaaatgtcgtcgtcgtcgtctctaataattaagttgaatttggcttagctgaatgtttctggcgttgtccaaatgtgggtgcccaacaggcaacgctcacgtggttctttctcaataccccaacatttatatgtataagttatcctcttcttcttaatatacttatgcttcttaatacgcgtgggttagtttatttgtgtcaccaaaatatttttgaaaacgagactagctagggataaaacgtctttgtggatgaataatgaagttaacatatataagaaaccatgggattttaacaaaaaaaaaaaaaaaaaacatggatcccgtgacagtctgcgcgcgcgcgcgcagcatagtagaggccaagagcgaatgttatttgattcacttttgtttggttcttttgtcaacattcactctttatttcgatactcttgcttccgtatcatggatttttttattacgttgacaactagaatatatgttttattttttttgaaaaagatactatatgttttatcgttcaaaaaagatgagtcaagtactacaatttacctatcattttttttttttgttaaaccataactttcaaattgatccaatgtttcaggacacttactttcaaagtttatcaacacctattgcattttattttcttaagatattaaattttctgtaattgtttatctaaagcatggttagtattctgattttttgacaaaaggaaaataacgacaacatcactaatatttcaacgttccttttttttcctccacaaaattcaacgtttcattttacgcgcacagatttttattttttctatgtatattttgtaacgatttttttaaaaaaatatttgtaatagttattagtatatgctaaatattgaatacaattaatttgctaatttcctttgtagttggtcatgacatgatatctattggtttatgctagttttattgttattcaattttaaactcaaataatgcatattattgatgaaaagatatactacaatattaaacaaaagttaacatagttactgaggaaaatggaatacggagaaattaagaaatgatatattatgtgctatattattattagtcgcaatgatatctttataataaaacacctattaaagaatatttgtcgtttccagttacatctaagatatataatatatatttttttcctagcataaattcccggaaacagcatgtgatgaaggaatatatcttgaagtttatagttgttgaccaaaaaaaacattaattctattatttctatagttataaatttagttagagtatgaaaaacaacaccatcttattcatgataaacacaagacgtataaacacgacaaaaattctttaagaagagttttatttcgatatgattcaaaaagtttcaaaagctgttatagttcgatttcggtgtgttatccatataactaaaaagttggacagctttcattgaaatatactactcaaagaataagaaattactagatttattatgttgtctcatcatgtttatgacttatatgagtatcaacgtggatgaaagtggtcgcttcttcctcatcggaaatcaaaataccgcatgttcatacaaatcaagaaaattataatttacaaatattgtaaagagctaattattttataaacataggatatcaaatgtggacctaaaaaagtttgaaaatgcaccactcaaataattaatgcatacagccaagcaagtaaaacattagaaagacaaaaaataaatacttttaaacaatttatattatatagtttttcatctcaaaactcaacaatataaaccctattccaccatcttctattccctcacaaacaacaacattgttaagaata

SEQ ID NO: 2230 - DNA, 2000 bp, Arabidopsis thaliana
gtggccatatttttaatttttttcggtggcctgagggcataaataattattttatttggatacaagattgtaacttcattcatggatcagcagctccatgtgttcacctcgataacgaaaacgatattttgaattagtcaaattattgattggcgataacgtattgcttctacgaatgttatggaattaattaattaatttcatgtacgtatcatattttcttttttgaaattttgactaacattttaacactttttttggccagtagtgagctgttttatgttttctgatatagtttttctttacagcttattaaaaaatttagtcatgtgatatagtaaaaatttgcgtaattatcttaatttgtgtgaaacatgtcattattaagatagtttatcaaaaacatgtcattattacactttttataaaacataatgaatatcttacaaatctactatttaaactaaacttattcatagatttggtccatatcattttatacttactataatttttattaagtttacttgattttaagtttattgaaaaagtgtgggcacaacaacacacatgcatgtgttggtggtggttgagaaataaaataaaaatgtgaattacaatagcattttcccctataactaacaggttgttctacatgactaaatatcttctaaccagtggcattttcataggcaattataaatagtatattaattagtgtaatatctaaaagaaaaaatgtatataagacaataaaaatacatgtatttaaagctaaatggagaaaaaagaagcaaaagtgttatgctagagatttgatcccggagttgagggtgtcaagtgacccccctttttcctaaataggtccgcccctgtttctaactaacatatttcttcaaaaatgcaaaaacaaattgagatttatcttgtcgcaactttttttttttaatcattatcatgtcgcagtttgatggacccgtgattttgagtttcttcatttttttctatatcattaatattatatatatatatatatgcatatatatttgagtttgagtcagatcaatttatactgattagttgtaaagaatttgaaactttgaagcatggataaagggtttaaataaggttttagggatttaggaattcatgtttaagattcggttagaaagtataggattcagtttttactttttaagatttgtagtttagttgaatatacattggtgctcttttaattatttttaacaaaaagaagaagttatttttaacaagataaagactattaaaaaaatctcttgaaaataaatgatgttttggttcaacaaaacttgaatacattaattattaagggttaacaaaaaaaattattaagggtaatttaaaaactgtgagagaaaaaacattaatcattgctcaagtctttcttcttctttttttggtcgctcaatgctcaagtgtgttctgctttctagagcagcaactttttgacaaaaggaaaaagaaaaacatctttctcaaccttattaaaaatagaacaaacgtgtctaggtagaagaactgtagaaactaactagttagtttcaattgatataagacatagcaaaaacgtgagagattgaatattcacggcgttgtggttttcttttgctaacaatgattttacatgacatttttgcgaaacgttttattttcttaaaaaattgtgttacataattgtttttttgtttgttctataattacgtaacagctcttaacgtttacaataaatatatattttctaacgtttatatttttattagatattttttccccaaacttttttctttattttaaactgagttcgtttaatctttaattatagaacattcttttttttttgtcatcaattatagaacatgttaaaagctcttttatttccaaatattttacaatataaatatattagaggaccgaggaacttattgtacctcatcattcttccttctggttaactgaaa

SEQ ID NO: 2231 - DNA, 2000 bp, Arabidopsis thaliana
aaaaaattaaaaatatggccacatagcgacaatttcgtgataaaacaaatatattaatataatatacatatatatatatatattaaactagtataaaagtaaattttatagtacctatcacataaattgtcaaagataaaattagttattgataatacaatgactatgttatctttatttaaaaaattaaattaatttaaatatttctaaacaattctaaatcaacatcatagtatgataagtttacatttttctgagcgtaatattgaattatttttcaacatttttgtgatttgagttggaacaatatctactccatttgttccaccaaatttgatattgtgagattttcacacaaattaagaaaaacaacttttatattttaaaattattgttttgttagtttaataatattaactatatatctctcttctttttattggtcagcaataaaaaaattaatgatgtgatatagaacatcaatctttgtgaaacaagaaaaaaaataatttttaacactaaatttatgcactagtggaacatttgaaaatgtgtgttatttttagaaacaaaacttatttttgtattatttgtgagaatttttcaaatataaattacttctatataactttttgaaaataatttaatctttaaaagaaaaatattaatctcttaacactaaatttatgctattagtagaacatttgcaaatgtgtgttatttttagaaacaaaacttatttttgttgtgagaaactaagaattcctcaaatataaattactcatatatataagttttgaaatttataagctaatattttttgtaataattggtttattttgattccaaattcagttttcaaattcaagttcaaaattgtttgtaatctttgaaaataaacatgagaaaaatactataaaacttttctaaataaaataataattttatcatttgttcacatggaagtggatgtaaaatgaagttatactagattttaacccgcggtataccgcggtgacaatttatctttttaaagttagtataacttttttttgcaaattatatctgtctataatatatttttattttatactttacaattattattaagaacgtcttgccaaacccgtcccgccaaacccgtcccgtaaaaaaaacatttatttatattaatgttgatcttatttctgatatgtttataaattattgtctaaatatttttgtcgatgcgggacgttgaacccacacattttttgccagttggttaatatatgtttattttaaaaaatttgaatcataaaatatgacagaaaaaattaagatttttttaaactctatatattatataatgatgttaaacaattgtgatatatcaaactttttataagtttaaatattaataatgttttataaattttatatatataaataataatattttaaaaataatatttttgcttataaggtaatgacataataactctaaaagcaaggatttagaagatttaaatctttaattaaatattttcattgataaataattaatgtcagtaacatgacattgtaaataagttcaaatacaaaatttatttatttaaacaaaaaacgtttagtaagaataatatttatttaacaaaaaactttgttttaaaatattgttagcaaatatatttatgctaattttaagggattaatttgaagtttgttgggattaaatttgattgataatgtgattgacaatttaaatcaaaaatttaaagtaaaattaattattttggaaaaaagatttaatgctaatggcattagattgtaaataagtgtcaagtagaggatttatttgctaaaatggctgcaaaaatgtatatataaattaaaaatatgaaataatttaatatgactaaaataaaataatgccacttctaaaggactaacgaaagaatagtcttcttgtaataatattcttttaaaaaaatagaaacgttggtcacgaggcctcatca

SEQ ID NO: 2232 - DNA, 2000 bp, Arabidopsis thaliana
ggatgatgaaaatcctcacctagaccaaactcttgtttgtagctcgatatgcaatgtgcttcaaggtgatgttgttgcggatattgatatgttcatcactttaacaagggattatttccatcttgcaggtttgtctttgttgatcttcaagtgtaagatactagttaagctgagattacaacgcgattaagctgaaactgcataggagagattatttaaatattataaaaattatcctcttatataatttattgtttggtttatctcttatatttaatcgttcgttttgtacgtcagcaagattcttgtaaaggatcaaatatcttcacaaattcacagtatggtacttattggtaagttgattgtgtacaatttataattttttcttatatattattaccgatgatttctagtgagtttatatggaattttatcaaccatttcctaacattttattttcaaagtaaatcatgtattgatggaaatgttttaactccaaaatgaattctttttttctcacgtggataaaagaacatatcaatgttctttatttgtgcattcttctcttctctcattgatataaataacatttatttctccattcttattctagatttgtatttttaagtatttaaagttattttatatcaattataactagagagccaaaatacagagaattgtaacaacaataggtttaaaaaaaattagaatatcaataataacaaaatatatgaataaaaatatataaaaaagcttgaaccaacaataatgaagtttggatggaatttaagaatcaataaaccaataaaatatttaaaatctacatataccaataatccattttagattttacttagaatagtagatttatgatctatcatttatccaaaccaaaattagtgatagtgataattacactttaaaaaatgaaacgaaatactcacaaatgtcattcttatagatttgattcatcatgtaaccaatgtagatagtcttagttatgatggttgttgctaataattattacatcaagactctattaaggttttaccatggaggtagtgtcgtccatgagaacaagcgaacaagtatttggttgcggttttcagaggatattaatcggtctagtttttatgaaacttagctggttttaagtaatcatgcatctcgattcgaatctcaacgtcaatctttcgtgtttttcaatttattctttaaaaagtcggctaaacaaaatatatgggcttgcagtccaaaaatgttcatcttaaactctgcatggaggctataacatgatgttagtatatccgcattgaagaaaattggtaatttgatttgagtaaaatttagatattaaaagtataaattctttttatggattattatcaataattttcatgagttttttttttttgtgtggcgttgatgacagtggtagtgatgatggagggatggtaataacatgatggtcacaacggtggtggtgatgatagtgaaagtggtagttgtgatgatgttgttacttatgtataaaaggtaaaataggtattatatatttatagtttagtgtgaaaaaatatattataggtttatggttaaagtagttagtttttcttcttctttttttcttgccaaattcatgtgactgaaaacgaaaaatctacctccaaggtgaaagtagtaatagaacttttaaggtaatctatgttttccggtaacttcacgccgtcggcgagaatccaaatatttgtatagtttttttttaacaaaacaaaaaaacacaccccacgagctgagcgttgaatagtctattgactcttttccccgaaaaaaaaagaaggcgaattttgatttcttcattaaaaaattggcaaagcagacttcagagttctctcagtataatcttcacctaaatctcatttcaaaggaacaaacaaaaagaaaacacctaaatcgatctgtgaagtcaaaacactttccagtttcagattctgatt

SEQ ID NO: 2233 - DNA, 1055 bp, Arabidopsis thaliana
tttaagatatctgatcataggaatgccacattcagatggaagccagacaccagaacagaaacaaagttgaggtaatcaaagaagccatcttgagagcaaagtggttttgattccaagaactcatatttatcagcataacctctatgttcatgaaacccagaagagcacaatacataactatcaccactcaatctgttattaccagaactagcagtgttcaacttcactcaaatgtggacgaattacagtaaattggctaatcccactactgaattgaccttcaaggtaaaccccaatcatttgccactacgatcaaccaaaaatatagattcttcattcactcttatcaaaagctatacatgaaattcagagtgttctcattcctaaatatggaaagttgaattctatcaacacaatcagatcatgcgacaatgaactagaaaccacgaaccagaaattgttggtaatcgtttagtggacgagattgaatcaaaggttcaagtggtaatcgttttctcctgacgcaaaatcgaaagaaaaaagatcggtagcgtcgcatcctaatcgggtgacccggaaaccaatagttgattcgttttagtggcggtaaaacccggtttgatgaacaaatattaatgggcctggcccatacgaggatgatcgtggcaatgtcgatgataacaacaactcctctattcgggtttatgttgacccggaaaacgaaagcataggacacgtgacacatgtgatgtgagtgaagccaaaaataataatattgggaaaggatgaacacagcagctcagctttcgtcttctccgtcaatccaataaaaaaatcagcaaccgttgtttgtttttaagctttttttacaaaagacgtacacgtctctctctctcactccctctttaagatcagaagctcatttcttcgatacgatcaaccattaggtgatttttttctctgatcttcgagttctgataattgctcttttttctctggctttgttatcgataatttctctggattttctttctggggtgaatttttgcgcagag

SEQ ID NO: 2234 - DNA, 2000 bp, Arabidopsis thaliana
gcagtaaaatatgctattgatatcacgacttgtaaaatatgatagatatcaagcctctattagtagatggatcaaatcatacatcataagttcataacctacgaaaacaacactacattcaagccagatcaataactaatagcccaatgcagtaaaaatgggcctaaaagcttgctcgttttgcgtttatttttgggtgagagaaaagcccataggatcacgaccggtccacagaaacaacaataaatcaagccagaccaataaaaactacggtttgacattgttcccgttacagactaaaccgaaaataaacacgttgtgacgaatggtacgttagttattacgtggttgcgtggaaaagaagaagttccacgtggtgactaaagtttgcacgttgcctcttgacacttttgcttctaacgtaaccatttctaaattttgttttggattcaattaatttccacgatattgaacgtttatattcagaaactcatgtatacatgactttttcagtttccgaccaacaatttaggtctcatttgaattgatttggacatgaaaattgttagaaaagttattaaattgatgtattatttaccaaacttttgttgcattctatcgaaagtcaattacaaaaacaggtgttgatattattgacttaagatcgtttagaagtaagaacagtatattgtcgtgattagtttgacgggtatgatcgaatcgcaagactcaaacaggaccgtcgattttatagggtaaacgattcccacaagtcacggaggctgagagccttgagcgtaggtgctgacctggcacacaaatgtaaaacttggccaccaattaagacacgtgtcttgttaagctccgtccccttaggccacgtggcaactgtttttctttggcagtgatggttcttctttgagagttcgtcggtgtccttatcggaaatgtaagaattcgtaaagaaataaaagttggcaattactataacttaggctgaaatgtctgtattgtccttaagcaataccatcaaaatttaataattttgttaactaacaaaattattgagaacattaaagtgaaaaaaccattcgacatattccaattttttcacattctttgttaaatttctgattttctccttctctatgactgttacacaattgatcaacggacgtaagggtttggagtatattgtacatttttttttcttaaacgagaggagaaaaaaaaaagaagggattcctcatccgcaaatagattcattgaatcaaaaaaaatcccaaccagacaaaaaacattagaatcatgcagtggatcccacttccgaccatttgctgatttttccgtaaatacattctagatatttttttaaaagaaaacgcaatttagattttaaattctagattttaaattctagagaagtaattcgcgcaaaaactgtaatcaaagtttaaattcgaaaattttgattagtttacgttgatcgaacaaactacaaagtaccaaaaaacagttatttatagtttcataatcacaaatggataacgacattagtaacaacattaataacatcatcttagtttaagtcagtagtaatctatggttaaacaaaaagggtaattaagtaatttgcattgctcagttcgcttccattgctggatttaacgggcgaataagaacaccaccaaggatagattggtttatttctagtttcttcggatctataaagtagaagaagaagaagaaaaattctcaatttctctctcacaatctcttcgttttctgtgattttatttagattttcccatttcaatctcttgttagaaattgtatatatacctagatcgattggttcgtagatctgtttgtttttctagggaaagttctttgattctccagaaaattggacgaagctttggattcaaattccagaattaaaaaaaaacagaaaaaaaattctttaggttttcattttgaattcttaccagagagtttca

SEQ ID NO: 2235 - DNA, 2000 bp, Arabidopsis thaliana
gtcacttatatttgtgacaagtactaagttcaaaactcttcatacatttatataggatcttgagaagttttagacactttttttttaaaaaggcttgaagatatcgtgggtaattaacaaaggacgaaaaacaaatcaagtaggagtgtaggacaaaaaaacagtagttggcttttatttttaagttttttggtgaaattattggcctttattttaaaagaacatatagttatattaatgaaatggtgttcgtaaaaacgtgcaactctgacaaaatattctttaaataattggagacgggtagacgcaagatttggaactgttctttggtctcaacaaaagtcagttaatcaaagtttactaataagttttggcatagttgccttcgtaaccaagagggtgaaaacatgaaacaaaatagtgaaaacacttacagttatgttttagccttgctgtttgatcgtagggtggttggtatatgcatggtactgtcattttggtgaattttatgaatttgtaaaaccatataaaagaagaataagatatataggagcaacttccttttagagctttttttcatttaatatattactaaaccgtgtgagtggataaatacaagtctaaggaatcattttgattaaactcattgctactgaaagaatgtgtgagttatagggttataacttaagtactatatacagatatagtttctcttgttcgtccatatttatttaatctttttttgtaacttctcaaataatataaggttataacatttttttttttgtcgtctaatataaggttataacttataattatctttacacgggaaccacattttattgtttgttatataatctgtatactaacaacgacgtaataaaactcttacttcaataatctgacaagatttcgaattagtcactctttaagtctttattaatgcatgtaatatagttgagaacacattgactagagggagtacatttttttaaatggtgaacagcaaattcaataataattaaatatattttttaaaaattaggggatagcttctgattagctagaataaagagggtgaatgaaattatagtgtagcaatttctaaaaaatttagggtatataatctgattattcatgttgactaagaaaaaaaaaaatctaacctaaaaaagaaagatatgattcaacatacaaagcaattgattacccaaatcactagtcgttgggcattaactgctttggtgcaaatgggtctaaacatggaaggcttaggcctgagggatgccttgattttctttgagttgtgacgtgcaaactaaaacctatttcaattatacaccaaataagtaacaactagccctaggacctatattatatggaacattaagcttgcacgatctctacatttcttaaacaataaatagatctattgttgattcaattaatcaatttggtgtaatttttgaatgataatatttaaacattcccaaaaaaaaaggtaataatgtgaacatgcacgagataaaaaatacaaaaaattgtttgcttacacagcaatctaaaacacccgtagacgccaaagcactacagtaactctttcttttaggacagtgacttttaagttttactcaaaaaccaaatagacaaaacaaaactaactaaaacttaaagccacaaaggcccaaagaacaaaacaaaaagcaaacccaaaaaaaaaaaaaaaacagaaaccaaaaaaaagcaaagaaccgtttcttctccatcatcatcatcatcttcttcgcttcttcttcttcttccgtgaagaaggtcaaaaaacacaccaccgcttaaccccaattaccaaaaaatggcaaagcttcaaaatttctcaaattaaacaatctctttacttattcttcttcttcgaaatcgccgccggcttatgctgtttccgatcgttgtctcttctccggtgtatctccggtggtatcttccacgaagaattcataattact

SEQ ID NO: 2236 - DNA, 2000 bp, Arabidopsis thaliana
aagattatttccttgtagtctattctggctaacatatttgatgcattttcttatattgctacttgttaattaattacataaagattaaggatgtattaattttaagattcatgagctgaaggagaacaaaaagagttactatgccatttgcgatattgatgatacttgcgcttctaccacgtcaaacaagaacgctgaatactaatgcgaccgcagcgggaagatgatggcagtggccatgcccatgatggtgatccacatcaagattttagatttatatttctatatatatttttaactataatttttagtttcattcttaaaaaaaaaaaatttggtaaaacttttactagaaattcacatatattccatcgtcactagtttatccctagttagtgcaaatcacaattcgtttttggtcaattacaaaacaacaatgcatatcattttctacattaaaaacaaaaaaaattgttagtaaaaattggtatgtactaatgcaaaaatttcgagacttgaaaaagtttacagcaaacaataaaagtatagatagttgatatatagttcaatcatatttattctcaataaataaaaaggtaggtaaataatcatgagtgaactaaagaaacggtagaaatacaattgtcaccatccaatcacatttaaggtcacatttattaacaattacagctggctggatcatgattcatgacaaattgtattcaacaataattttacagtctcggttcaattataaattattctcccttttttggcaatgataaacgagtcattttcggattaacgtatatagttaggtttttggtcaatcttacgaatttgtacgctgtctattgtctacccaatatatggtctttcttcaatcattttcaaacaaattggaaacaaaaggaaaaagtctttgaatgtatgcacaatgaaaacatcaatgaatagggaagacttcattacaccaacctaacactcgtgcatgctatgtttccttgttgtgcgagagcaagtacggtgaacatactctgccgctatggctcttccacaaatcaataagtggctggtcgtcttaccatcttatgtttcgggtatactggatatcggaatccgttccaaacaacctcttatagatatcacactaaacattactaaaagagatcaatgcccattataaaacatcaaaatagagagatacatatttcacagaacatcaccgtagaaattcattaaatttaagagtttactcgctcgtatcatccaatacggttggtttttctcttaaacgattcttaagcgtcgagagtcttttgaaggccgaataacctttgataatatattccgtaatgcatactttattacgctcaaaattcttcattacatttgcaattttattatgttgtgtttcatttgaaatcaatattatgagttttaattaataatatcatggtattcttataaattatggtatcaatttgacaaattttacgtttataattttcgaatctcctaacaagcagtcaataatattctataaataaccaagtggtcgtgatctactggtttccacttgaggaggaattgccttgttggtctaggttagggatcgattctcctcaagtgccaaattgttagtcatttccataaactaaacgaacttttcggcgttttttttttttttttttgggatcttcgtcataccctatcataattcaaatacggtggtagtaatgtgtgtgtaatttatagatgaaagaaataatattaaataaaaagcaaatgtatatattttatggtatactaaagttagaagttttaaaccatttcacatattaaaaatgaaaaaaatgaaaaggcaacacatttttccctataaataccccaaaccgactttaatcgccacaccattcataaacacacaccgagagaaaatcagaaattaaattagagagagagcagagtgaatcaaaacttcaacttcacccaaaaag

SEQ ID NO: 2237 - DNA, 740 bp, Arabidopsis thaliana
cgaatcttcttgggtttgtcgaacaaaattaaggtgttgggaattgaaatctagggtttctcaggtaacaaccactgatcgagaatgatgaagattcaatcggcgaagattagctaatatattgattgatgataaaccgaaactcataccaaatataattgtttatcctgaataccgaatacgacccatcaattaaagcccatacaatactgggcctataagaaaagaaatgtaaattgtggggaaaaaaaaaggtaaatttacaactttataatatatgcctcaaataattttaacagcttgtttggtcttatatcttgtgatctttgactttcagtctttcacaatggaaattattgaatcttgcatttttattgaattaatttcctatttgtaacagaatactattattagagatatattgattgagaatcgtaaaagataatgtagttgtgtgacaagtgagattcaagaaaagtcaactatatacaacgagagtagcaaaaaagaaataaattcaaatgatttggaaaattgaagaggggaccaattcttgggggtaaggagtagactcgtcgccagagctgactttgaaaacttgacttggtctcattcttctcatctactgcaaaaaccacaatcagtatataacaacaacacatgagtgacttaattctcatagaccaatacagagatacaaagcaatagaacaacaagaacaagaaaacagagaaaaaaac

SEQ ID NO: 2238 - DNA, 1168 bp, Arabidopsis thaliana
ttccatagatataagcagatgcatttacatttgtcctctctactctctagtattgaaatgcacccatatatctttaacaggtctgggaaggaaaaaccaatgatgagaaaccaggaactgttgattctaccatgtaaaatgcgtataaagatccctgcatacggtgggaagatgaagaagtagtgaaagataaaatcagggttgggtttgttttcgttttagcttagacagattttcatttttctttggtttctggttcggacatgactctgttgagtcttttcttaatttcttctagattttgctttcaatctgaaaatttagtatcttctttccttctccatttctcctctgtttccaagttttcaaaacctaaaaggctgattggacaaggataacacatccaattaaaatgttatgtttttgttaatactctataaacctttgtagttagaccattaatttttgtgtgaaactcgcataaaatgagttagttgcaacttgcaagagaaagatatcgattcgtgtcggatccacagtgacaggagtatcggagcttgagtcacggagctaggagggtatggacggaaactaggaaatcgttgaatctatatgcataatttcttaaaatatgaacaatgagtttatatatgttaacaaccatattaatttatacaggttttactacatcatttaaagtatgagggtaaatgagtatattttagacaattacaatttttgtaagaatcatctgcatttaaattcatctgattttattattattttggatgagtatgagtttggcaaaccatatggctaaaacatctagatgatgtctttgcatttcaatatggatttcttttaggctttagccttttgggccctaatgtaacaccaagtctgcgacaccatccaaaaaattaccgcgaaaaaaaaaaaaacttgcgagagagatattgattcgtgtcggatttgacgtggcaggagtatctatcatctatctcgtaattacgtgattaacttagaatctgtttctttcttcacccaccaaaagtagcaaacctttgccacctaaaaatcttaccagttgggtgaaagttgccaaaatagagcttgcttttgtcgcaatcctatatttttcagattgattgttggtgggtttgtgtaa

SEQ ID NO: 2239 - DNA, 2000 bp, Arabidopsis thaliana
gttgtaattaacgacatggaggaagttactcacccaatgcaaattttgtcacccttgtgtcctttgtaggtaaatcattattcagctgggaacaatggatcaccatctgctgcagaggcctctcatattaagtctcccatattcagatccttgcattcaattgatgttagtctccattgcttgaacattgtttttggtcgtattgcactatatcttgttactgttgtgttatcacaaataataagaaaaatctggtttcaatttttatgtaggaagagaagggtttgaagaaaccggttagtctccattgattccacatatgttcttggtcgtatttgcagtatatctttatcactgttaattcacacataataagataaatcttgttttgaatatcttttgtaggaagaaatgtgtttgaagcaaacggggatggcttcaatatgattcaagaagggtagtgtgaccatttgtgcatctaagcaaacgagttgtctgttgaggtttagttatcggattttgaagccgataaaaatgctattcatcagtgttccataagcgagggagaattatgaagagtcgtcgtgtccatacaaagcagagcaagaagattacataacacctacaaaaacatgagattctatatgttgaggacaagtaagcactgtttctactttgctatttcattatttgttttgtctgaaaatatgttatttttggggatatatggtttagaatagagtcggaatctacttgatgcatcatccatcatataaaattctttccgagttttttcttgcgtgtaaatggaatggagatactttctttttatgtttttggtttgcaagtggagatagtaaattaaaagatttcggcgttgatatgtgtcgtccttgttatagagtaaaacgatcaggacatgtaaccaaatgggattgtagtaataccgtcactacatcacgagccgttcatgaaattccggtagtagaattcatccgtaatttcaacaaaactccatatattttggatgatctagagagagcacctttgtggacaatgttattttttggtggtaatcataaataagaaacttcctatccaataatttaacatcaaaaaggcccatctaataaaagtatacttaaaagcccacaaaaagaatccaagtacacgtgttgatgtttgtagaaaagtctactggaattaatgagctgattaaaaaaaaggagcagctaattaagaataagacccacagagagaaaagaaatgagaaacccagaaggatctggaagaagaggaggatccttttcattttttctttcttggataaactctctcctatctttttttttttcttttcttcttctacttttctaatttcttacgacaattctcctcctttcgtacataaaacaaagaaaccctctctttttctcatcttcttcaattttcaaaactcaaaatccttcttcatcgtcgctacatttttctgtgcttctcggtttctgctatcgaacaacaagactcaaaaggtttgctaatttctgttacttttatcgtttctttaaaacggctgatttatggttagggtttcaagatggaacgcagattcttctttcgattttgaatccgaccaaacaaaagctcatatctttgaatcgatgactttgttgtaaacttttacgatttcgtctactttgataaatgttctggtttgcgattgacgatttcaaaacccttttcatttctcttctataaagtcattttcttttattgacattttgatattattgggtttttcagtgtcttgatgattgggttttattctacgctttgatgttccttattcgctcttaggggttcgatgaacttcattagctgacagatgtatattagtctcttcaacgagatttactcatttagctacaagttcttattctgtgttattttattttttttaattattctttgtggttatttctaggtagaaagaatcggac

SEQ ID NO: 2240 - DNA, 2000 bp, Arabidopsis thaliana
tttcaggtttaaaaaacctgttgaagcattagagtgttgatgaatatgagtttccctaaagtagatagtatcttcagtctgaagtatatatgcatgtgttgtttctgatcatagtgtgcatcaaatgggatggttctgaagatcttttgacaaactctttgtctatcaattgatgtttaaggttcaacagcgattcagtttcataaaaggtgatgtttttgcttttgcttttgttagcagatggtaccaaatcaaaaagcttaggatcatatcgagtgccccttatctgatagaggactcaaggaagcagatacttaacctcattaagcatcatgctcaatcttagctccttattgtgctactaaagttccagtctattggtatcctcttccaatcttattatttgtgttgtttttttgtgtgtcctgacgtttcacagtgtccattcttcatcatgtcattctccattcttcaacacatcacaattatattttagctaaatagataaaatttattcatatgatttattctaagagatattcgacatttttcaatataaattttagaaaccaaaaaattgtgtaactcgaaagggaaagttcatatattctttgtgaaccaaatcgaattctctaactgaatagtattttgtgttttcatgattttgaagagccaaatctacttgactactggttgaaaattgaaagaaaccctaataagggacaatgataacgaaagattgggtcctcaaacaatggacaccactattctactgccatttaaaaaaaaaagtttaatatttttgaattttattgttgttgttttctcatttcaaaacatccaaaattccaactaagataagataacttatttgcagtaagaaaaacggataattttatttatttgaatccatccatcaacataaaggtgtgcacaaaggacaatattaggcaaatgacaatgtcacgtaatctacgttgcccaattgaataatttgattatcataaaagttacacaagtttcattattgagtattgagtactgaatagagatatcttcaaccataatgtagctttcacaatttccatacgcgaaaaaaagatatacacaaatggagtgtgtagagtaaactaaactcactctattatgactaacagtcaataacacgtacgtagttatcaaattattaatgagtaaaaaagttccaagttaaattatgtataaattaatcatgtattagcattagattattaaagtgtgaaaaaatgattagattcagacaaccttgaaaataaggagttaaagtcaaagggcgactgcttcacgtaactttagacttacgtcattactaacgtcacctttctttgaaaacctcctccttttgaaaacctcctccttttggcaactttaataatagatccaattttcttggtttttccccccattatttggaaattataaccattttactacaagtgccttctaaattctacaacccaacaaaaaaaaaaaaattatattacatatcatacaaaatagctagataataagtagttgatgttattgttatgaaaaagttggtggcactaaaaacatgtgatggctaatgacccttagatatgtgtagataagcagactaatcatgcaaaaataaatacaaaattgtaaacatcgtaattgtctggacaataaatcataaaattaaaaacataaaaccatttccaaaataaaattgtgtatggaaaaaaatatatattaatctcacttactatataattcattacctccttaatctgcagaaaaatgtgtataattaaagaataaaatatttagagagcgctaattaaactgtaattactttttgagatttttttgggtcagagtcaaaggtcgccgccatctctctctgtgtatataagctatgttcatcttcttcactcaacaaccattctctcttctcttctttatctcaaactctttcttcttccaaatcataaacc

SEQ ID NO: 2241 - DNA, 2000 bp, Arabidopsis thaliana
atttagataatttaataaactaaaatatccacataaaaatttcaaatttatcaaaaataaaacatcaatttgttttttgttttaaattaaagatttgctattgattgcataaggaagaaaactttacaaagccgaaaggcctaagagcccaacacacacaaaagaagaaccattttggatcaagggaaccgaccatgggtattagaagtagtggtataaagcccatcatatcccaacacataacccacgaatgtttaatattaaaagtttgttgttcggctcatgattagcgatgatcatacagaaagtttgtatctaatacgtgccttgaattttatgtgtacaacaaacaaattaaattattcaaaaccataaattataaaaaataattacagaaataaaactatattaagagcgagcctaccatccggtgtgcaactttctagtttatatacagtggcggatcaacgttaatgaggcaaattggttcaaattcatctaaataagactagagttcacaggttcgattcctccttataacaatttgctcccaccaattttttttgctgggtccgcccctggttatatatatacttctacaccaggtttgggttcgagtccacacataattaacgacacaattatagtgcacgatagaatgaactaaaacagctagagcgtagagggctcattgtctataaaaatccttcgttaacttgcaagaaaccaagagtagagggctcacacttaagtctcctacatgacgattatatttcgtcaaaaagaagcaattagttagctttacagcatatcatttcgcctaggttttccatcgtacacgtaaattttcatgcaagaaagcagaaatatacaaatactaacttttagatactgaaaaatgagatcagattctagtcaaattttgttaaaagtatttataaatttaaattgcaagtcctcaaaaagtacgactaaaaatgcttttcttagaaaatgataataaaccggcgttttatatataagtgtttctttttctcttctgtccagaagtaaatcattaagaaccaatatggcttttcttaaactaatctccgtgataatcaaatctttgatcattctccacacaatcccatcaacaacatcgatctcactagatgcaccaacaatgattctaatcggcactactaactatagagatagttgtcccaaaaaaaaaaaaaaaaactaactagagagataaatcatattcaatacatgtactatttctactatacttaagaaaatttgtataccactatcttaactcttaacactgaacatactatacactatcttaactcccaactcttgtaaaagaatatctaattttaagaaaagacttcaaatgcttgttaaatttctagtgaagatgcacattctaaaaactggtaaaatggtaagaaaaaaatatataaaaaaatagccttattaaaatttatatctcctatttctctatccaaactacacggatgaagcttattgttattcatccaccctttttctcaattctgtcctatttcttgtgcatgaaacttctccatcttgtaatcggataaatcatacccaaattttttctttctgaaaacatatatacccgaacattaattactatcgtcctttctcctaattttgttaagaaacatgtttgtttgtttttagtactgaaaaaggatggagatacttgctagatcctatgaaccttttctctctaggacaaatcagtaaccaaacaataacttagcaaattaagcacgacagctaatacataaaatgtggatatcaaacatgcacgtcacttccttttttccgtcacgtgtttttataaattttctcacatactcacactctctataagacctccaatcatttgtgaaaccatactatatataccctcttccttgaccaatttacttataccttttacaatttgtttatatattttacgtatctatctttgttcc

SEQ ID NO: 2242 - DNA, 2000 bp, Arabidopsis thaliana
attaatcaaacttttcctttctttctgttacttaaatgctgggcttgatagtagtataagaaatttgtccacaaagcacaccgcaaagttccaaaagctaaaacccttgtaccttggagtctctgcatgtgagaaaggaatatgagagttaaaaagagttttttcgtaagacaccaaatcatctacaatgacgatgagcgcaactttctatcagtgagcttgcaagctagcgttcttgacttcagaaatgtgattatgattaatagttgagttaatcttccttaccaactttaaagaaagaaaacaatcactatgtcatacattcttcaggggttaaacatgtcggatatgaaagtaaccaaaagaatcctcattgagataagcaagtaataccttccaacctgcgaaattgttcttgtctggtgattctaaacagaaagaatcttattcttgttttagctcttttgttctagactagacactagtgaaagtgaaatttcaagaaaggttacaggatcataccttttgtttggtggaaacagaggattctgaaattcctggctgtggtcacatacatacatcaatcacatatttactagtttctaatgagaaagttcagcttggattcagttcatcttctctcatctttaaggtccgaactatgtccaaactttggcaatatatttcaacaaagactctaacattcttatatgtgagtatgtgacgttgtatctcagtaacttgctcatccaactctctgcgaatattcagattcttgattcaggagctcccaaaacttcggaattccaaatgacgtacacaattgcctaaaacacaagtctcctgcttaaccatgaatagttgagtgaatcaaaatctcactgaacaacgttgtacaagaaatcaaagttcacgatcaaacttacaagcatatccatgaagataaatgagcgaaaactaattacttggcgtatatatcagttttgacgtttggagctgggaagaaaaatgaaactgcaaatcaaataatgtcaccacattaaattatttctgatcgtgtcattattcaactgatagctgttattatttctggtcaacctcttatttgttgtctcttagtaaaagttttcttctagattgaacaatgttttaaaattttgacaagaagaaaaattaattgtttaccgatttaaagacaagaaagatctaagttagtgtatatttaattaatgcagctttagttttttttgttatttggtattttgtcaacaattttttttttataatataatgttcattccacgatcttcggaattgtgcacatccgtcgttcaccaacataattcaaaggaaccagccaattaaacttagaaaaatattgatgcccatgtcacaacaacgaagaccgttgaaacgacggtgttttacacagccaacgaacaagtccagcatggcggtttttgagaaccaataagaaattaaatgtattgtttactctctagagtaaatttattaatttttaaagaattcataatattccataaattaataagtttactagcaacaaaaaggtctgaagtctgtatctgacgatcacgcggcctaattgcgcgtggcaatttcttcaacgcggattttttttttcctgccatttcttgcatcaacgcggattaaaaaaaaaaaaaaaagtgttttcggtaataacccgaaagagaaaatacgtatcggaaaaaatgcaaaattttcaaaaacatttaattttaattttaatttcaagccaaattcgggagcgactttccaaagacgaacaaagccattgaaacggaagagaaggctgctcctttggtcctctctgtttctaccgtcgattcagatctctgcctctcgcaatcgaatcaatttgtgtaacgaatcgacgcgaattatagtggtgaagaagtcgacaattcgattgttgtgtaagttgacgagaggattggatcggtgtgaattcctcctaa

SEQ ID NO: 2243 - DNA, 2000 bp, Arabidopsis thaliana
tttgattgtttgttttactattttttttatcgacaacatatataatatgcaaatttgaatcatatgactatgatacatcgacggcattaacataaaccataacgctagaaatcttaaagtattctaatagcctaatttggtttttattagaattaaaaccctacataatcctggatgtgcgtaacgtagtagttgagctctattcttatacaccagtaaagtaaataaataaaaagaacagaaaatttcatgagcatgcagtagaaaaatcagtcgaatgttataaaaatagggttacagctaagttcgacgaggtgctatttcattggatatcacgaaacttgatcgtcaatatgttttctttttgtcttttttgtttttgggtcaacagatgtataaatgtatttgtatatagcttacatgaagaacacttggttagctaaaaagaaaagctaaaagaaacaaaagaggaggcagctaaaaaacgaaaaaagagccagcattatagatgagcctcttcgtgagcaagtgagtcgtttattgtaagatttgcctcttctaatttttttctttaaaaccttataattgtatttaaacaaatatcttcataagaaaaaatatcaaatagatatcaatgtacttttctttgaaataggatttcgctattaatccttattttaacattcatataactgaccaattatattggtatacagaaaaaaagaattgtatttgtttttttcacattttagtaaatctcatttttttctttctaaattatgattaatatgaaaattaaaatagaaagtgacatgtccttattttaactccttttatttcattcattggtttaatgttatttacctaaggatactaatcattggtttttgaaagataacaataaaaattcattccaaacatgtggtgcaattatatataattacaaagtggatagagtatagaactacaaaatggatagagtttagttataacaactaatttaaaaaagtgttcatttgatagagtctaaaatcaccacttacattgactaaccccaaaaatttgtcctaaacactaatcaatccgaagattataaaatgtcgacaaagaaaataaaataaaataggagtctatgagtcgatggaacttatccaactaaactttaataagaatgaaccaaactcaattttgtaataatatttaaaatacgtttttactctctcccagaatatcccatctctctgattccaattcctcctctctctctttcgtctctctacttcgaattgattgttttaaccgccggtgatcggagcaaactctctgacggtgaccgccggtgatcattttttgtgaacttcacttttggtaagcagctttgacttttgttcataatccttcacttttccttttcaattttgctttttcctctgatctgatcttagttattaagctgttgaatcgcatgatcctttcttctctgattgattatttctaatccttcatgggttttatgacgaatcgtgtcttagggattggttttttctgggttgggtttctaaatttgttggtctaagaacagtgaaattgttgtttcagtgatctcagattctacacttctagtgattgaactgttatggaaaattacaaaatatgtggctctgctttcatttaaattcaatcatcatcatctctgctacttgatgatcaggtcaccttctctgtgttttgtaatctccataacgtaagagtttgtttgatattgcaattttgaataagatgattagcatccaatccaatagctgatgttgaaacctaactctgtaaagactttaaatttgttttctctggctttgtgctcgttgaagggtaacctaaagatttgacctttttgatccaacacttctctttttgtactgtaggtgtataaagcatagttcgttgggaacttttttttacagctttggagtaactacctttcatggtttttggttccaaca

SEQ ID NO: 2244 - DNA, 2000 bp, Arabidopsis thaliana
tcagggtttaaggagaagaggaagatgaaaattgcacgatttcacttttcacttcaatttcgttcttcaatttcataaaactggaaaattagggtttatggacacgtgtgaatactagaaaaaaaaacatccatttttctaatagcggcatggcttaagtccgaaccgaagcggctgaaccgtccaaccggagtttggttgatttctgacttttaaaattttcgttaccaccaaaccgaaattctaatcttaagtccgaaccaaatcgacatttttttattttttaattaaccacatattagttaaaagataattatatgattggtcgccgaatatggaaaaaaaatctacaaaacaaatttgagaaaacagtaaacgaaaagaacgaactaaacaatctgtcttataattaaacaaatgagatatatagaaaatcatgaaacgagaaatataacattcgacattttgtttgattttctactatataacttttccaaatataagtagaaatgtcgatttctaaacaaacccgatctgaataatcatattctccaaatttagttatggcagttcaaacccataatggtgaaggttctcactccagtattttttttattatagcataccaagataaccagaagaatgagccaagaaactaaacaaaactaaaaccaaaactagttccaatcaactcaaacacgaaagtagataaataacaaaccacatgtgatttcaaatttagtttagtctaataaaaaacaaaaagactaaaccggacgaccatacattgggtccctatcgtaaattagcaaacaaattagtgttgcccattttaaaagtttgaactcttctttatttaaaaaaagaagaagaagaattgaactggtcaggaagaaaaaaatagaaaaggagaaaaaggacagagggaaaatggagaaaagtagagtaaaatggcgtcacaccagagagaaggcacaactcacggggaaatcagcagaaccaataccaccgccaccggttactattactattcttgttatcatcatctcccaaaaaaaaaatgttagtattattttcgagtctatttttcaagtttttgttttgtttttaatatctcgactttgccacccaactcctcccactccttcacaactgtgtcctgtcctctgctgatttctcacctttccatcattcatttcattctttcttttttcccatccgtttcttttattcttctttctccttaaatttaaaatctttgaattaaattattggattttattgtttcaaagcgtttctatcatcaaaacccatcttcttcttcttaagattctgaatcattcattgattgatttagcttctcttcgacttcttaattttacagttttttttgttttttaaactttaattgatgcaaataagcaaacttggatcgctgtgagcctgtgataatgatttcttttaggtttgtaggatctgaaggaagctacggtttatttttttttatgggcaatctctaacaggtacaaatcttctcttagcttctctcttacaagatctttaggttatgtcttgttctttggagttgctatctttcttccatgttccagaggtttgccttattttatcacttttgacataataatttattttgcctgttttttgttacttggtttaatattcagatgaatctttgaccatgatctctaaatttggttcctaggcaagatcaaagaaagttcatcacataggagttgatcatgaaccatagtttcctcaaagatctcaactttgtctctagttggattgtaatctgtattgcttaggacagttaaatcttattacatcttggctcgtcatgtcaaaagctgaagatatttgagctttcatatcttacaactaattagtttcgtatgtctacaggtttcttactgtaatttttctgtttcagttctttacgggtatatatatacacataaaacggttaagctctagagaag

SEQ ID NO: 2245 - DNA, 2000 bp, Arabidopsis thaliana
agtttccactggttttctttgttttcgatatcaattttagacactaagagggtgtattcaatctagtattttaagtgatttgtgtaatatttacaaattatatgttattcaaacatgaattttaaaaactctaatggaatacaatgtagttgaactaatgatttaaaaatctacctttaaatccattgttactgaaaacaatttgtagatttgattcttattaattttgaaagatttaagaggatttgaaaagatttctttagttaaaaatacaaaaattcaaatctcatggttttaggtgaaatttgattttttttttataataaatcatatcaacttctctcaaatcattaaaatctaataaaaactaactaaaattcaaatcattcaaaatttaagatccaatatactcccctaattcgtcttacatatcctaccttacactcttgtgtctcatcttctctgccatttgacacagaaaaaaaaagagttaggacggacatatccgaaacaaccaaatagactgtttttaaacagttatatacgaacacgaaggttcagctttgtgatacaccatttatcgtaacaattaaaatatggtaattttaggctaaattatagagtagatcttgtttcaaatattacaatttgcatgcaccaaattgttttacattttcattttccagagaaaaccaaatcattggttagtcacttcggaagtaccaatcccaatattctttacagtaaatacccggaaccgccgagttcgggtgtttcagaaatgaccaatgatgatcaattagtcacttcagagagcttccgggtgaaacgcgcttaaacgatggccttgacaatgacttcctagtactgatgagagagcggtggtgccaaacgctaggaagctgccgaggatgtgacaagattgaaggaaatctgaggttaagacttaaatctttatggaactggattacattttgaggttgatgaattgtattttgattgatattgaaaacatgatgatgtggatatgcaacggccaagtatcgagatttgaattgagatatggatttgatgcacaagtggtcgaagaaagaacgaagtggacaagtacattacctgtaatagtacataacttgtgtggttcactaattcttagagattatgaatcattgtagatgaataggcaagtctatcagacatctctaacttatggcaatcactagtttcttgtacataaagtactatttgcacccaaaaaataaaaatatgtatataaatttactactacttaatgcccattatttttctgttttcaatattgtgatatacattatgcaagtttacacagggatggatccatagcgacattagcattgtagattactaactacgaatattttttgttttttattgttttacaatcaatgtaactaatcaaatattaggaatttacagcaaatgtatcggtaaatatacgggacatagtcagacatatctcaatattttcctttttttaagtctcagtattgttattgtataaattatttataataataaaaaataataataataatagaaaattaagtgggtatctgtaatatttaaaaaatatattgaagaaactttgagatgagtcttttaactattgaagatattcatttaatttttattaatattttttacttttcattattgtagaactcacaaaaaattattgatacgagttatttagtatgtgactcactaaagatcatttatttagtatttatcacatgggggtttattcgttgtatctccatttattacttggaagaccaggagaagagtagaccattagaatattcaaactattcaaagtatttttcacatggttacatttagacgactcaatcatatgcatactcgattccttctataaaaacacacgcagattagtgacccatattttacactcaatctaaagaccatcctctagacagaaaactttttttataaaaaca

SEQ ID NO: 2246 - DNA, 2000 bp, Arabidopsis thaliana
ttggcgatcgatttgcttctagattgcttgcgaaagtctcttccctaaatttacaatctgataaaacaaaaaaaagttggaggttttcgatagagaagaagagatcgggtttaaattattaggatgttgacgaaccgtcgatgaataatccggtttaaattattaagggaaccggtttgtttttggatttggttctttatataccggatagtattatgtaactcatttccaaatgattttaatacccaaagatttttaaactattttacctttgaagaacaaaatttcgatttaaaatcataatttttttttatttttttttttaaatcttggaggttgtgggtcaaagtccgtaatcccccaggcctgaaaccacagcataaaatattagtttcgtcccaagcgtcactcgaaccggcgacctctaagctttgcataaggtctttaccaattgagctaacgacacttggttaaaatcataattaaataagactgatgttaaaaatctctatattatttggaatttgatacacaatttaaaaccaataactgatactctattatactctattaaaatcaactattaggtaacaaatatgtgacataaacattttgcagtccgatgcaaaatatatctttcaatctcaacaatatgttttttcttggtcaacaatctaacaatatgtttaattgcatcttcaaactaaagtcccaaaacatgttttgttctttgcacatggttgtttgtgtggaaccacaataagacaaaggatcgattgcagaatttgaggtcttctagctagttgaccgactaagaatcaatggaccacttattctttaatattatttttcccaactggtttggaaggacttagtgaagaagttacactaaaacttctcgagtcaatcctcatatggtttcttttggcaattcctatctctgcaaaatcaaaggctcttcatatcaattaatatggcaagcaactactttgagacatggcaagaacggaattgttgatcacataataagcaagctctttctcatcaaactacctacaaagttttgcgctctacaagatatttgatcaatcataaaaatggtgatctcgtataatactagtcttcttttagggctaacaaatgattcagaagattacaaatgtgctttgtagaaattagcaatatagtgctttgtagaattttatgaccacaagattggtaagatcatttagtcaaatatatgttttatctcttcttattgattgagatgattatttttctaatgagtcgatccacatgtctaattccaattgatctttgtgatttagtttcatatttgttttctttaacatatgaaatttttttgttagtgtagaaaatctaattttcacacaattaaaaataatttttacaataaattatgattagcaaacacttcaaaaaaatctccattacttaaacacttcagtttcctactactaattaaagttgtttccttttgtttaaattgtgattttgctttaacaataaagatgacggcgcataaaatataattatatataatcatgcattattaaataatgaaaaaatggaaaaaaatgaaagaaaaagaaaaacaaatgttcgaccgttccttatttaaagccggaagtcccatagccttgtggtgtttactttttccaattcggagaaagccaaaagagagaacaaggcaataaaaagaagccaccgtcgctacaaaaagtcgcgatttttattttctctatcccaactgctctctacctttcctcgaaaattccttcaaaacccaattctcaagccttcttcttcgtcgtacctgaaaattctacaatctctggatctacgcgtctacttctgaatttcgatttgggtttcccgggagctgaaattccgtgacttttgggttttctgatttagggtttgttcctcttctcgttctttctcgggttagttttttttttttttttttgtgatttttg

SEQ ID NO: 2247 - DNA, 984 bp, Arabidopsis thaliana
acagatacagttttaatcagattaaatatagagaaatgtttttttggttggtctcattgttatatataagttaatagttaatcatttacctctctttgattagtgtagttttcatgatcttctttaatggttcagtctctctccattttgattaaattccaattatatgagcatatttttcttgaaaaaagtgttcatattaaaaaattaaggataaagttcaattctttttttctcaataaaccctctttttgatttagatataaagttatgaaatatcccattaaaggttctctcaatcagtttcatataactaaaaagatttaaaaacatatatcttcttgttataaagtaaaagctttcaatcaatcatataaaagacagagaaaacaaaatttaaagtttttgttttatttttctaaaagttatttttttttcaagcttgagcattttttcaaaattaatatcaatttttgtataaaacgaaattgtgccgtatgtgatgggttacttttcaaatgttcttagaagcagacaagatcattgaccaaaggaggacaatttcaattttttcctatgtgtgtgtgtgtactcattagaaaattcaaattatttgaaacttcagttgttgaataactaaaaaaaggctaatatttaatttgtcttacaatggtgataatgacatcaatgtaatgaatctacaaattttacaactaataaaattgaaatattttaaagtgtaaagtactaaggaggattaagaataaattcagataagataaatggtaattagcaatatagcaaaaaaagaacaattatttactaaaaagacacgcttttgtgtcttcatataagcttgtcttcaacgttcggctaatccttggtccgtgctaagatcttagatcgatttctaaagtcttcgtcttcttcttcttctgataactagctttttcaatcttctgaagctttaattttttcataccc

SEQ ID NO: 2248 - DNA, 1120 bp, Arabidopsis thaliana
aagcaatgatcacacatgtctacaaaagaatctcattgtaaattttagaggttttaatattcaaaaaaaggtgaccttggttattgtaaaacaacaaaacaaaaaccatttaatccttatgcacgagggatagagacagagatattacttcaacagtacggcacaaatctccaaaggcacgacgaatatttgtgttatttgagttttgacttaatcttcccaagccaatacaaatcgagagtgtggcttgtttctcacggcctttgaattcttttttatctctaaagttgttgtctttcttttatcatcaattgtgtgttgttgacattgtttctcagccaaagtttgagactttggatcgaatcacttatgcccagatgatctctgcatgattaatcacaatttctttttaaaaaattgtttagtcttgcactatttaaggtttgaccgcttctacaataagatatgcactgaatgtgttcgacgaaatgactgagtgagatttaactttcaaatattttgacttcgtgcggtttcttttttcaacagatttaccaaagagacatgttgaagcgactcgagaaagtaggtacattgaattgctcttaattgagagaactgtaagtaaactaaaatttgtgtactgtgttattattattaagctggcttatctaatagtggttttgtcattatatcactcttaggagattattcgagaaatggaaagcttatgtaacatccaggtaaattctgcaaatgggtcctgtttaattgtgttaatctctttcatggaatggaaggtgacaagtgtgaaagcttaaaagtatttttcagaggttggagaaaaagttgacttctttttagacttaatgcaattggaatgtttcaatgttttattgtttattctgtttaatattagaaaggaacatattgcattattgtaccagagagagagctgaactttgaataagtcaagttttgtgaacaaaagcttggtcaacttattaggtgtcttaagtagaagcagaccccatgaatttttatgtatatacatgaaacttgaggaagattgttctctcaattctttgagttcaccaaaataacgttttttttttgtcaa

SEQ ID NO: 2249 - DNA, 1129 bp, Arabidopsis thaliana
gcctaaggatcttgttatctcactacagaagtagtagtatatacttgtaaattcatgaacatttaaagcttaagattttgatatctcactctattttcttaagcatgtgatctcataaagccccaatattgcgttgacacgtcatcattttcggtataatattgttattaagcgtcgcaaagataaaaatatgctttttgatgacttctctggcattctcttctctgcattttataagatcatgttgatggaaagtcttcgactttggttacaagcgtcgatgcccagttggttagatttggatttctccgctatactttgtttctttgtaattaaaaaccatgttgcttcgaactttggaacgtttgggttatgcactgaatgtgttcgatgaaatgcgtgaacgagaatttaaaattcaaagttttgggcagtgggggcccaatgtttgaagccgcccatgaaaagtcatacctccactataggaaatcggagctagaactctgcactcttcttcaggtaagcttctcctaaatccaaagtctgttgctttcgatttcatatcagggtaacattctttcccaatgaattgaaaagttcttgtgttggtatttattccccaaatttgattaatctacagaggaaatagaacttttagctgcaagtaaaatgttgcaaaaacgttcttgtgctctgttactttctagaaaatggagaaagttttagctgcaagtaaaatgttttgcttttgtctttctgttactttcctagaaaatgtgttggctttatttatggttaaggcccagagatgggaatatacaaagttatcttctaaagcaacatggaatataaaactagtaaaacatttagttttttgacttctaatttggtgtcaccgtgtgattttgtgaatggaaagatgtgactctagtggtcaacgaggtctatgatttttctttccttttttatattgcggtcacgatggctttactagttattataataatataagttaggagtctccatagatataccatccaagaggtttcatattttatttgttctgttattgcattgactttataaagattcatacattcaaatccttagaagagctcttgcatatcgt

SEQ ID NO: 2250 - DNA, 2000 bp, Arabidopsis thaliana
ttgaaaaatgtaagtctataacacagttttacatgacatgttaatgactagggtttgccaaaatatataaatacttgatttgattagttatatgtccgaatctgttttaaattatcatacgcgcgccaattacaaattgtttatcacaatatacaaactacaacaccatatttcattatagtaaaaccaaaatttaactacgaatctgaacgtagccctgctttatgataaatatttcccgaaaaaaaatcattagaattcctataatgataaaaaaaacgctggttcttatggtaacaccatgtgaaaagtgatgactttttcatagcagtagaagtagtcaactacctcagataagtactgtaattaaataaactaattgcccaaaatgatacaactttgtcgcattaaattaaaagttaaaccttcactggatgcattaccaaaatggtcatataacaatacgtaatccaactcgctgtagctatcaatctctttatcacaaccaaccaatattcaacaatgttgttttatttatttttcatatggtttatttaatcacctcgacttttttggcatcgatcacatctacaaataaattgttagttagcacgaccgttattattactttatgaagaattgttaatctgaaaaatatccttttgatatcagttggaaatatttttttaaataatttattatgtagagcttgcggctgagtcaaataaaaataaaattgaaaactaaaagcgtgattgacaaaatgactttaaaggctgatttgtttttgaaaaaaccaagttcttaagaacacatttgaaccaatcatcgaaatatatggtggaaatatatttctaccaaagatttgttttttaaccaaataattgaacacaacgctaactgaatattttataaaactgatacagatttattaaaaattttgctaataaacattataaaattgcttttaccaattataggatgtattgtatctcttggactttaatatcgttgacgatcttgacaaataaaaagctggcgtttcattaaattggtatttacaatgagaaaaatgtgtgggatccaaaactggatataggattcgctttactgtatctggatccgaaactctaaaatatgatgtttcttatgatctggattttttcaaactataaatgatttctgaatttccgtgtatgtcaaccaatatttaaaaacagattatatttcttaaatatttttcagattttttgaaaaatattctgtaaattacaaatgcaaataaattatttaagaccgttaaggatcaaatatgtttttagtttattcaaatctctcgttctctcatatcgctattttgtacttagtttagataaaagtattaagtttggcttcttagaatttgatgtttctttttttcgtttttgctatcgacttttgttttttttttttttactattttggtgttatttatctattccttaaattttggttttgtttctgatacttatattttctgtaatttatgtcgcaacttcaaaaataatataaatactttacattgatattaaaaaaaaaaaattgagctctaatgacctttggagctcatgctcatctatggaaaaaaaaatccatgcaggaagaaccaagaggaaacggtatacaaaataatattaaataaataattatttgtcaataaaataaataaaaactcaccaaagtacataacagttcacacagcatgtttttagaaaagatcatatactattggtttcaaagtctttgactttgaatgtttgaacttttcaaggttcgcctactcgccggtcgtctcctttaaccttcgtctctgtgtttatataagaacatatacgtatttgatgattacaaaaagacaattctttatccttctttagatttctgtggaaagttcactatttattaggagagacaatttcaaaaaggaaagctttttgcttggaactgttctgtgagttcta

SEQ ID NO: 2251 - DNA, 2000 bp, Arabidopsis thaliana
acctatctttgtttggtttggtttgtcccacaatatctttactttataacttagtctaaagccgaaataatagtcagtttaaagaattgtttattaaaatatcatacatgtatggaattcagaatataagaaaataccatctgtgaatgtcattgtgttccttcaatattggcgttttagtttcatatttaaaactcatgtttctctcttttggtcgacggagaccaaaacaatactgaatgattggtgtttccgtgtttgtagtttcttaccaaacataggaaatgactctaatacgggtttggtacgactgaagaatccacaaaccattagaaagaattgtgttcatttgaagcatttgacaatcttgatttctttgtttttctttcgttgagaattattgattcaaaaatgaaaagcatgacaatgtacaaaggtttatagcgttatctatgtatttcaccctttggtttttgggtagagcgtatttcaaacctgcaggactagtgtttaaagttttggttataaatgtgtaaaatttacaagggctttgaatgtttcgtagattttgtaagagtttttggattttgtttttcaaaaacttattttcataccaatcaagattttaaaattttggtttccctacaatttagaaaaactattttgttgtaattttccatttatgattttagttttttagttttcctaaaatttaggaaatttagtttttacttcatcaacgttatttatctcaaaaactaaaaaccaatttttgggatttttaaaacaaatatataataacaaaaatctaaaactaaaatctaaaatctagaaactaaaatctaaatccaaaaactgaatcgaaaatcagcatccattcagggccaagatctccaaattttaccagttgcaaaaatgatggatgagaaatattgtaaaagttgattcatttttacatactttttttatttatcaataacgtgaaatttattagtgttttttaaataacaactgtcatgttattttaaccgatatcacactgtttgatatgaaatcacattatttcttcaaatcaaatgcaaaacacacacacacaccatttatttaaggttttgctatatatatatatatatatttttttttttaataacaaatttgctgaaaatttcttatctataaaccaaaataaaaataaaaataaaaatctaagcatatgataaagccatgtttaaaatgggtttgtaccaaactaggctataagacgaggacttacacgagtaataagtggtggggcaatataattctccaaaagtcatgccttcgccagtatcatgtcactcactgtcggaaaatgtagtttatttgcttcctcacacgcatgtcaatgagtgaatctgcgcaagaggaacttgtgcttcgtaatgcagctagattatattcatcacaaaatttgaattatgcatatttccataattgcgttttgtaaggtgaaaacgccactcaacaatagaatttacagtttttcttcaccaataaatttttgaactcataaaaataaaattgtactgttgtgccccaatctatattgattaccattctacattagtatttttatgtatttagaatatttatttattttggatgttttcaaccacccaaatgaagaaggtcgtattctcaataagagataaaaatcaattgatatatccttttcttgccttaaaagtcacaattttgcactataaaatcaaaagtcttaaataaaacgtgaaagttcatattcttgtcaacacgaattcgtcggttgtccttttcattcgttggtatttgtttttggagatgatttccactattttcctcaattttaaagacgacttttctcgttaaattgagaaagaccaaactagtctacatgaaacttcgatagccactatttttgttcttttctttcttttccttcttgttatatacagatctctgaagctcaaatcatctcaaat

SEQ ID NO: 2252 - DNA, 2000 bp, Arabidopsis thaliana
tgaatcaacgactcatatatcacggagcaaaacgcgcatgcagaaaaatccaccaagcgaacaatttggaaagcgatatttctgatgaatcgttgatttccccaatattacgaactttcctgaaatctttcctagccgtcgaatatgaaccaaatttattacctgacctataaacacacacatatgcaggcaaatggacacatgtgttctatgaatcagtgttggtgaagagagagcttgtcgtgtaatgagagttgcatgtgttcaacaactttgtgtatgttttgtaattttcctcttgtgatattttctacggtgagaattccatttgcaaggttacatcaatgggtgaagcctgtacgtccaacatgtgaccagaccttcttttatatcaacggtccaaattaacattacattaacatacacaaatatattatatatttaatactattgttcctgttcttctttttattgtcgttacctcgttagcatcaatgacgaatgaaaatgacaaacgatacattgtgttgttcgaattcgtgttattgttgccaaaacgatgtgataataatggaactatgttcattgtattggcgttgcccgctggtttacaacgatctatttcatcgatgaattttggtaattaacgatataaaattttcaatactaaaagacacacctttttcaacatttctttttataacttatgatgttcccattccattatattatagctcaacttacaaactaacttgtcacatgtaaattactcattgactcgtgacaactattgacggcaatattatcaaactcgtggttggaaatattttaagtccacaaaggaggagaaaataaaattcttgaatattgaaaattcttatacctctatgatataaaagaaaataaaatcaaagagaagtaccacaaaaacaaatttttagtatttaaaaatgccattactttggaaaaggtcccaaaatatcacaaaatctaggcttaggaagggtctctaaacgtttattaagaattactaagcccaaaacttgaaaactcctaaaactctttcttcaaatttagactaatcatttttaattctctccaaaatattagtaacccttgtaaagcctaaacattttagtaaattttatgatttttggtggtaattttggaaaataaagcataaaatgtggtattccgaggactgaccaaatttcaaaaattcaaataaatgattaatatcctaaatcaatcattattttttataattgtttttgagaaacttatattaatactattttcaggcattttcttataaattaccctatggttttagtaggcaacaaaaagatgaacgtctcagatttttttgaattcaatttaatcttaacaaaagcgataaatatcaagaagataattgggtacgtgtattgtgtactatttcaaaattgatatttgcttccataacgtaacgtaacgtaagacccaaagattaacacttggtttcttcatggtcgtagattattaaaagtttataactaatgacgacaaagtttaaacgaaaaacaatattttctcaattttcactagttttttttttttattccagaaaattattagtatacaaccaactatttttacgattataaacttttatttgatgatattcataatttagaaaaaccttaaacggatcttaatgtcaatatcatcagctcatgcaccgcctctcggatatgttgacaaaattaccccatacaatataaaccaccaaaccataaccacaaagggtatattcgtatattataaaaatatctgaatagtcgaacttgtcgttacactcaaaaacgaaatctttccctcctctgttctcaatctttctataaattctcttcttcttcttcttccattttcccaacaacacaaagtctctctctctctgataaaatcttaaaacccacctcgagatcatagtcttcatcaattagccataaaaaagcaca

SEQ ID NO: 2253 - DNA, 2000 bp, Arabidopsis thaliana
ttgttttaaaaaagaagataaattatcacaacaagaatataatctaactcactacaaaatgtaaggccaaagaagagatacgttcactgattggacgtgatggagagagctcacatctcgtctggccttatcatcatcgtaatctattgaagatatatatatggtaagacaaattaactttactcacggattctattctttttacccattctcggttttgtaacgaacgacgaaccaccaactagacaacgaaacgtcccacttgtttccattagttaaatttgggtaacaccaaaatcgcattaacttaataaaacactgttccaatatcaaccactgccatattttctcccttatttttttttgacatcaaaactgattttggagaggctttgaaaccccgactataaatttgatttaggtgttattctgatttatgagtgaatagttacacagtcggagtttgaactgaaagttataggattacatttttggtaaaaaattgttgagtcgtatttttggtagaaaacagtaaaattatgttttttgacagaaaattggaggatagtaattttggaggaaatcatatatatgaaaattgaccaactctctccatatgattgacacataatcactttagcatttgacatgtgtctattaaataattaatgtaagctcttcaacttctaatttataggttaaagatatatttattatttaattttacatcttattttattttacgtatttaattatactattactatatttattttaatattacatgatttttcaataaaaccattttaatagttttcttatactctgaagttttttttttttttttgtaatccaaactcaaagtatgagtgtataatagtcgtggattacttaataatttgagtaagttattctcttaaatgaatatttatattttcttaaattgatatttatataataaatcactaagggtgaaaaatgcgtaaggagttccatcatcaaattcttaggtttctagaatccaacactaacctctgttaaattggtttaaaacaaacgttgtttatgaattatgtatatgatgcattgttgagaacgttgctagaaaaaaatatttttaatactaaaagtaattgtttattgcatgattgaatgattagataaatataaattatatttaaattaaacactacaaaagaatccgaaaaaaccgcgacgtagcgcggataattacctagtagtgttaaaacaaaattggaggaaattttggagatcacatttttaacataaaattagtagaaatatatattttaattattaaataaaaaattaaagtaagcgctaaatgtcattaagaaaattttgtgaaaggcggaaacaaaaattttaaaagaaaaagaaaggactaatcacatcatcgccattcaatgatatagtttgacaatgatatgattcattaactaccattcaataaatcggtttatgaaatctaacggttaaatattagttggtaaagcatgattaattaagataatcactcaacaatcaattcaggaccaacgtcacctagctaccaccacgaaggaaaatgctaatacaagaaccaaatcgtcttattaaccagttatctttttctcatggaccacatttaaatcgtcacggcaattaagctagattttaagaaagaataaatgggatactcaactaattgccacaaattttattacttttaaaactcggctgctcggcccaaacttatccggtacggatggatagacctatcttttatcgtgtaaagaaactcttgggctccactcttgacgttgctcattttatctacttttgttggtttcttagtgacctttgacgtttatttacatagagttgacagatttgaattgacgttttctcaataatgcagaccaaaattttcacgtttcttacatgtacatatatatagtaaaacaaatctctgaagacacacaagagaatcaagaaca

SEQ ID NO: 2254 - DNA, 1773 bp, Arabidopsis thaliana
acacatttatttttaattcgtattcactgccaaagaaagtcaaaaattacaaaagcatttaaaattgatacttatcattgttgttgattgttgaatgattaaatttgtcttttcctcctaaaagtgaatgtttaatgtgttacatgattatttgtctaatcttgcacaataattctattagcttaagatgttgaagaacacgtgagaagagaatttaggttttttttttggtcaaaggaagaatagtaattcgtattcctaagtaaagaaagtcaaactaggaaagaatttatgtaacttcgttaaatgaatgattaatggttttctttaccttaaagtgaatgtttaatcagtgttacgcgccatacggaagtaattgtctaatcttgcacaatcattcaacacgttttcaaagaaaactttttttgttctctatgatgataatagtgttaaatcaaaagtagtacaaaagtaaactaaacttattttagattaaaaatcaccgaaaaaactaaacacgcgttagaaagcatttgacatcacctccaaatttaatttcacgcaagcaagcgtttctaagatatggattctaaacgctatatcactgttttttgtaagataaattcttcttaattttttcaataaaaaaatttaaaattaaaaataaaatcataaactaactgataatgaccaaaggaaccataaacacctagaaaattatatttctgtgttttctatctgcggtttaacgtcagtaacatctaggaaagttattttacgaaagtgaacttggtttttgtttgattgaaatatgtttcagactttcagaagaaaaaaaaagatacttatttaaaatatgttaagattttagttcacttcaaattatgtaaacatgctgatttttttttttttttttttttttttttttgcaatcatccttcaatattgtctgcgaaacagtcaagtttcaagtacgattcacaacatttttcaaaaaatttattcattcatttcactcccaaaactttttaatttacaaaactacccgtacacgtatattggttgaatagaaattttttgaatatttattatattttgagttacatatagactatgatttaatcaaatacacaatgagtcgttaaacaatctaaagaaaaagacacacgaacaaactgataacatagataacatataagcaaaataggtcggaatcaacaattacatatataaatggttgcgtggttaatgatttcatttggtattttcacgacaagatcgtttctaggtacatagaagtcaacttcgttgccatataaactgtataacacttagtcatacaatctggtttatttatcaagttcaaaaatttaatttaatcaaaatatttgtttgcgaaattttcaatcgagaattaaaaaattaaaaaaagttgcgtggttgagttaatcgtttggtctccatcgctgatatcttcaatttctctgaattaatcttcacatagctgtataaagacctagaaaagaaaacagatatactagtaaccaaacttagaatcaagaaagaaaaaaacagctatagagttgaataagaagaagaagaagatgacattttttaaaccaattagaatcatcaattttttattcctatttttcatatttcttgtggtatacgcaaccgtgttctgcaaattttgttcagacactggaaacttcaaaagaagtaagttgaggtacgaaacttccgatgatagttatgaagctaggagtagcc

SEQ ID NO: 2255 - DNA, 2000 bp, Arabidopsis thaliana
tttaaatatctgaaatcctcaatttagactttagttctcaatttcatatcgatccaaactgtttgtctctctctatagatgcttgaaattgtaagttttgaatccattttctgctatattactgaagttaaattccaaattctttgtgaccttgttcggatatagatttgaatgatgcaatgcagctcctgcattcttgaattggtcatgtaagccttttctatttctcagttagtgtttactttcacattattctttaaattttgggattggagtactgaaattacagctactgataccaaaatcctcttatggtacaataaagtctttgctttatatattctttgctcctgagatcctggagtcctcatgtaagctctgtctttgctttatatattctttgatcatatgattcatctgatttgtggaatgtttgtatttcagatttgtgatcttggtttttactcgtacacgttttttgtgagctttatattacattgtcttgaatatattgtcaggggcactggaaacctatcctacatcattaggacacatcaatcagataatcatccagtccaaggtggtaaaatctttatatctagcttctagctgaagaagcttgggacgttgaacgttgttttgagcttttgctatggctaacgacctctggagtgaatactcaagttttctctctttgactcgcaaggtaatatgcttattagcgttattataggtacattgagatagtataatgtgttggttgtttattaatgtgctcattcaatgcatttgctcgatatctctaggctatctatcagaactatcttttcctttacttgatcttattgagttttagacgtatgagatatggttcccttgaaagaatgcaatctacaagtttacaatggtacgtcaaaactgtgttaagtttctttcatcattgaagaattcagaatcttgtttcaacttggactcagcaaacacttttggcaattgaatctcttatttattctaggaaaattacattatcaactatttgttcgttcttgataggaacttgagggtgaatctcttggcgcagaaaaaatgtttcagagaactttttcttatagtttgtgattctcatatctttttttttcagtgatgaatccagaaactattgaagagagctattcatacagactatagagcagtcaccattgttacatcagagcagtcactaatgttgcatcagagcagtcaccaatgttgcatgttaattttgtaggatcacatttggttgacagtaaccagattacaaatgtactctggtatacatacagttggttcgtgatcaacaattgaatagtatctaaaccagaccaaaatgaatccggttctgcttggttaataataccaagtcttttaaattgatgcagaacgtgagatcctagtgaaccaaactgaaacaatatctgaagatgacaggaggcgtaatgaggctagagtatgcaatttgaggtcattcctaaatagataaagcaaatgacatttggtgaatgaagaagctctacaaccatatgttcgcaatttaaaacaaaccgatatcgtttgagatctcagaaatagtgtgatcaccttttttctcctccaatttttgaagatctcaaactttgttttgggcttgaaacataatgtccatatccgcctgccgtgatactatatgggccgagtcaggcctgtcaggcacctgactcttttgagaaaaaaaaagaatcataattgaaattcttcaaggtttactatcggtggagcaacacataaaccctaaattttgggatttagggtttcgcgatttggaagcggattcatggtgagtttcttgttattgttcgtaattccagagaaattttggtatctatgattcatgactgcgcgattcatcttctcgaattgaaacagagagtagttgggtcggaatagctttcaacactgtagcatttgtagcattgtcttttgta

SEQ ID NO: 2256 - DNA, 2000 bp, Arabidopsis thaliana
attgcatttacattatgtagtagtctaataaaatataattatagataatagaaaagtcaatagttctaatatgataacaacaaaagaaaatgtatactttaaaatctgaaaattaccattcttttatttgttatcccaaacataagccatgtactataattaggttattgtaatttattataaaaaaaaaagaaagaatattcctgtacttcatgatttctttttgtaacgaagtacataaaattttcaaatcacatgtggtaaccatgatttaacaaaaaattaagtcggtgacaagcaacgaaacataaataatcgactttgtcaagatatgtataaaaatcgactttgtatttagagaacaaggtcttcattatttttcttttttaacattagagaaagagaactaaaggtctacttcaagaaaacaagaaactaggtgcttagctttaataatatatcaaagaaaaatgggtcaaaaaataaattattacatgagtggggcccggccggccacggaagtaagacctaacgaccagcgcaaccggtcaccagtcaagactattagaagccgggccgtcaaaatcgttgactcggtttttgtttccaactgtttttgtattttgttaaaaataaattaatactaataaataagctgaaaaaaaagaaaagagaaaaggtataatcacgtggaacgcgccgcagtaaacggagcggtggatcaaacttttcgtccgtttgatcaaacagaagagaactagtcaatgctctttcttcatatcacaatttaatagtctcaagacgattacgccacataaccattttctcgtgatttcgacatcaaaatttaataaaaggaactgattgattggtcatcatgttacaagtgtcaaatgagctaatccgttttacagtggcatagtttacgatcaatttacaaatttttggttttataacatacttgtagttaaaactatttataagctatttatagtgagttagcttataaaaccctattcttttatctaaaattatgttttgactcgtttcatgataaaattttatccttttcatcggaataaaaaactttattatttatttggcaaaataattggtgtaaaaattatgtatatgttaataacaaaaaatattaatctgattcataatcttaaaaaagaaaaatttcttgaaataaactttagacattgtaaataaaaaaacattatttttatataatgggatgtttatatgtaattttttataaaaaaataaaagttgtttactagtaatccgattggctttaactatcgtcgccaaaagaataatgtagaactgactttgaggtaaaactaaaagaaatttgtaagataatagtcacattaaatgctaaaattaatacatactgatatatcgtataaaatttatgaaaactacaccttaacctgaatcatacactgtaataaaaaaaacaaattatatataaaccctaaaaactaatcataaatcccaaacggtgtactctctattagctttgaaaggattgcccaattgtttgttaaaaatttctaataatagtacaatgttttgtttcatttttccttttcgtcaacctgttacccaatagcaaatgaagtttttatgtgtgtgtgtgtgtgtgaatttccatgaaaatgaaacgggcttagaatcccggtgtattatgggtcgggtcgtaaccgggcaatgacgcaggatctgacgtaaaactcccaagaatttttttaaaaagtctccggaaaataaaatcaaagttcattaacttaaaaagaaaaaacaaaatcggtccacgtcccaaaccctttttataggagagtcttatgttctggcagaagacttcacagactctttcttaatctctctctctttcaaccaaacccctaaacaaaaaaaaaatacattttctgatctctctaaaaatctttctccttcgttaatctcgtgatctctttctttttctatat

SEQ ID NO: 2257 - DNA, 1669 bp, Arabidopsis thaliana
gctccattgccaaaagtttcttttattcagattctgattctccaagaacaggttcctctggaatatccttttatctttgtccttactagagacaataaatttaaaattggattaagatttgttgtttcctgccattgtaaatcctctcgaaatttgtcgaaaaaaatagaagtttttttttttaagtcttctcattggatacaaaaggtttgaaggaagttgtatctactactatctacttatttagtagctttggtggtttttagctgtattttgtatattggttaaaatgaaacaacatttggtttgtttgtctcatgattcgatttgttctatgttttcttttttaactggagaaattgaatgcataacgatgacatagtaggcccatattctttttgactcttctgggctttgaagataggcccacatgttttgttggaaataggctgagaatacgtatctagttttccaatgtttgtgaacatccttcggcctttttactaacagtgttttgcatgaactaatcatagattatatttcatatcgcagcagaattacagaaattgaaacagaattacagaattatcgcaccaaagaccagtctgcggccttgtattcacgggtttagtcctaccatgtcttatgaccggcgagtttatctctagctgacggacttaaaacccaaattttgacacctcaaaatgaaacaatgatcaactaaactatgacaaaaatgattagccaaaacataactaaactaaggtgatactacgatactagtatgaaaaagatgattttatcacgtctttcacgtttgtaccaaaaaggtgatgcgattaattttttcaacaacttcaaagtgataaatagagaggcattgaacaaacgaaaacgctattcattaaatacattgaagctagacgttcttaggttataagcctgcttcttatttccgcgtctgaagataataccaaaaatctggaaaaaaaaccaagataaccacatattatcacgtgacaatcacatgttaaccttgagtcacttgttatctggcacgtgttctcacgcgccggcacattagactaaacacgcaaggtctttagtacacgtcagcaactgataaccgataattactatgacgtggacgttggttaaagaaaataagaacaacaaacacaacacacaaatcaaagtaaacttttttttgtcgtttctttttttctttggtcaattttttttttacatgttttgtcgtatatcaataaactcttaagtgataaaatacatagaaataaatctgaataatttaattcagcactaattatttttaagcatgaaattataataaagagtataaccattgaagattttattttgatacaaagtgaatctagacgctatatgtgcgataaaactgagaatttaaccatcaacatttcacaattatattcagtaagttataaaaaacattacatcaacgacgttcaatctttttaattattgtcacataatttcaccactctgtcgtcatcttttaacattttgtcgtttactccgtttagtctctctctattaaatcgtataggtattataaatatacgttataaattcttcgaatcatttgtgtatcgtcaaaaagattttatcaaaaggacaaaagaaagag

SEQ ID NO: 2258 - DNA, 2000 bp, Arabidopsis thaliana
aagatctactaatctcacgtcacgcctctaccctcaaatctttgcaacttcggttttatagatctgcttctttttgtacgtttctttgattagctgatctccaaattaacgaaataaatggttcggatttgttactccatttacggattacttggcaagaaaatccttaatttttcttcgcttcttcctcctctcattttttttttcttcactttgacaagcaacttattacagagaagatatctacttgtaacatgaatttgactttgaagtgtttgctagctctgagcctctgaggtccgttagttcttagagtcagatcacatgattgatagattcggtgtctctttctgagatttcagcatatatgtttgattctgtctttttataggttgataaatcgattcatgacccactggaataatgagaaggcttttaggtatgattacgttgaaaaaatcccgctttcactctttgaaagatagctgagccgagatggccagattaaaggtcatgaagttcactgtttcagactatgaagggaggttaggagtttcacaagataactagagaaaattccaactgcaacttgtctcaagaaggaaatgtaattatagataaacgaaagaaagaacagaggaaaagaacagtgatgttgggtaggaaaacaggtgaatgactttcaacgtgcctgaactaaaatgaaaattttcccccataaaatacatagcatcgtaccaattaacgtaacgatcctttcaccctttgtatttctgtgtctagtagttgaagaaatgttggttgaattcagtttggtttctctatggtccatacgtagaacatcaactaaaatcataaagctaattaagaattgtgatatagtgtgatctagcctacgcatctcttgcatgttttgtgtaggacgatttaattgtctctaagaaaacacaactctccttttaaagacacccatatatttcttttaatttatatatatttgaatatatgctcatttaaaaacacttatataaataatcaatgtggatgctctcaaagttttcttgacagattttggtgctaaatttttaaggtacattcctggattttttttcattgttttctattttgtaaattgacttatagagaacttctattgatttttaaaaaaaaatcatagcgcgagtaaatgataacggtaacgatgaaatctaatgagtaatgagaatgaatatgtatacattgatttttgaatttattcgtagtgcgagtaagtgataacggtaagtctgtaacgatgaaatctagtaatgattaatgatttctctttcttatatatatatataaatgaaatcagcgatgtggaactttcgatggatgtaatagtagctttccaaggattgtcttttttttttcttgtccacgaaaatattaactgtagacaattatttgttgtcccatctccaccaagattcctgccttgcaaattccacacgtgttttcactttcttcaccaacctactggatttcactagtttgtctgtaaattaacttgcttgtctacgacagctaaataaataaggaatcgtaaaagactagatttatttaataaagaagttacgtttataacgaaaaaatatttcttagcaaaataagattatcttgtgatgaagtttcatttcaacaaacataagatgaacatgataaaaaaaaaatcataagaataagaacacaaaaagaaatgaaaaaggacctattattaaataaataaactttgacaaaagcaatgcccggagcttaaaaggtcacataaaaattgaaaaatttctaatcacttacacgtcgttcaccgaacacgtggattggaatgagtaataaaattccataaccattagatgaaatgtaacatctgtaatcttgccattaaaatatagtatttatatttggcctgaagctgatgcaacttatacacaaaacctactattattaagatttgacaaaat

SEQ ID NO: 2259 - DNA, 2000 bp, Arabidopsis thaliana
tttgaatggctacttaagtgtggtatcttccgttccaccttatataactgtcttgcttcgtgctccattcatttcatagtgtacttattccataaagatgactttacacttaattcttatcatagttaataagcacttaattctttttctaatgtgtcatgaacacatgtgcacggtaattcgataaagccagtatgctaaagtgtaaaggcacttgtctattcttaagcaataaatcactgaaaacaatatttatcggacaaaaaatcagatgtaatagatcatttatgtttaaatcagtcaaattcaagcatattaaagggtgaagttttatgaagaaaaaattcaactaaaaaaacaaaatgacacttacacagttacactgacataactaaccaaatctaaaatttataaatttgtcacatcgtttaatcgttatctgtagctttattgccttttatctatgtcatctacatagatggagtagtaagctgagaagagaaggagaaatttaaggtcaaagttacccatcttccgacatgcacgtggacggccgaaagttcacgagaatcttagattattccacagtgacacatgtcggcctttgcgtgaggaagttttttggtctctaatttttttttttttgaaatataaaaggagataaaaataaatacgtaattaattatacattttaatattaccgttaaattattcgttataatctcctatattgaaatttgaaaacaaaactttattaactataagcatgataaatatataaccgtttatgataattctgatagtatacgtagtttttttttttttttttggtgagattgtttatgaaattagcaaggtttgacctatcatcaaaccttttacctcatgcaactaattaatgggtgatttcttttttcaaaattgtttttaataataataactaattagtaattagtgggtattttaaataccattatgccatttagctaaggtaaaaaatcaattgttaattataacacccaccaccaacatagattcgtctatggttcattcatcgtgtttaagagttgaaagaaataaattcgcccatcgtgaataatagatatttattcatctcaaacttataactcaaatatatttcaactatatatcgatcaaatagtatagcttttggttaatgacgaatttttattcttttgatccataattcttcttcttcttttttttctgtccggatacatgaaattgatgatacacatttaaaacaacaattcgaatcagggaacaaattacagccacaaccagtgatgatagaccatatatatgatttagtttatttaataaataatgtgtaagcaaatttggctttgctgtaaaaaaagaacacgaattttggcaaaagtttctgttaggaatctggttctattctcctctgcaacctccagtctctcatgaatctggttcggattctctttttccttgtttctatataatttagatacatggttttataattctatcatatgtctattttggatatagtattttaaaaatatatatatttttcataaatggttatggtctattctatgttaatgataatcattagtctttttgtcaactatgtttttttttccaacaaatttagtatgtaaacttttttttactaccgttttattaaatcgacggttgatcagatcaactccggtataacacaacataagtttcgttatcaaaacaaaaacaaaaacagatttttttttgtcaactaccagtgaagattagtcttacgtgtcaagaaaccggataaaaatatataacgtatttgggcaatcagctaagatattaactaacgcggagttcattattaaaatggagtaatgatgttttcagttttctatataaatcacgtcgagaccgtagagtcttacacaacaatccttcttacatttctaccaacaaaacacaaaacacaaacatagcattcaaaactttgaaaa

SEQ ID NO: 2260 - DNA, 2000 bp, Arabidopsis thaliana
attacacgacaggttagtaccatcttaaacattactgtgacttttgtcttgaacattattgtggattattatgtgttgaacatttctatgggttctgtaagccaatatatagcatgaacagcccattggaaaataatttcattaaactccggtacaccggaagttctagatcgaagagaaatagaatgaagaagctaacaaacttttattattaattaacagaatgttacaacaacttaatcaacaatgtcattaactaagcttatatacataagattaaaccaacatcaataaccagaaataaccaatatgtaaaccggtccatatttgcaataattatatctcagaacattcattaaattgttataaatgccatacgtatggcccatatatttttaatactaaaatagcaattttggtgaagaattttccgtaaatccatcacgaatgttagtaggtatgtggtcatgatggatttgttgttttgttgttacagtttcaattacgagtgattgattttaaacccgttgttgatagtttggcaactcattgctatgagttttggtgattaatgatcacataaatttttgaaatttggttgaagaattagcagcaatgaaataaacatgaatttactatcgaaacaagatgttatcaccaaaatatgttggttttaccacaaacaaaaatgcctgatatatctttggtttagaaaagtaagattcacataacatgtattggtacacgtgtcccacctcctttcactgtagatccgcccctatgttgagcagacagataaaacaacacgagcattaaatagatgggacattccatagcccacaagcaatttcacgaaattaaatgagaaatgggtcaagattggatcactcgaaaaactgaggaaaaaaagaagaatacgtaaggagttgaaacggaacgtggactatgtcagcccgaagaacacgtttaatgactatggccccatgcaggaccattcccctttttttgaggtgttaccctgttagatccatatttgttttgaacactatcaaaaaatatttgctaaagaaaaacactatcaaaatatgttacagtattctcttccgttttgcctaaactcgaactcataactttaaacctcctcttttaagattaccatatgcatgtacataaactggtttaacaccaagacaccaaattttaaccacaaaacaccaaacaccaaatacgttggatatcttaacctatttcttactcacttaacctttgtgtgtgtgtgtgcaagtgtattactatatatataaagtaaaatatatgcatatattgttaaaaatatcacattaataatggagacggtttataaaagataagaagttttttctttcacttattgttagttaattttgaataaaacaaatcataatttcacatagtattaaacctatatatgtattacttaaaaaggtaaaatttgatacgagatgaataaacaaaaaaaaatcaaccatttcaaatttacatgttaaaatatctcgatttggatatagtcatatagagatgattttatattgatatataaatcgccttcacttattggcaattagtattgagttgaaaatctataatttttctacatgcattgattcaactattatctttcacatcatgcattaaattagcttgggttccatcgtacattagtgtatacatatgccatcttcttcatcattagataatttttcttataaaataaatgcaattataacaatttgattggatatgtcttgtcatttagttgcggaaaaatcttgacgtctcttcttgtctgaagtcttaagtatataactggaaagtccgtattggagttcaacaaaagaagaaaacgaagacttttagttagatcctacattactgaactcattatatatatctggtgagacattctcctatatatgcagtttcaactttcaaagccagcaaataataaacagaggagaaat

SEQ ID NO: 2261 - DNA, 2000 bp, Arabidopsis thaliana
agcatgacaggcacagtacactaatagtctagtcatcacgtagtaatcaataccaaaatgtcacctagtaagcaaaaactccatgcaatgtctatatcgaagaaaaaaaaaaaaaaaaaaaaaaagcatgatgaatttaacgatcattgatagtaacacagtgctagtctttgttagcatgagtcaaagtcatcagtcggttcatccagaatccaacgatctcataatctactgacccggagaataaggctttcaagtcaacataagtcaaccaacattatattaggcagctcaactttaatatcattcttgactaatatgaattcgtatttgccttttaccaaaagaaaggatagaacatgtatatctcttaaaattcagattttgtggtcattcgtttattcaccaatgaatcttgcagcaaatgttgaaaccacgtcaacttacggaaatttggaaataatgtttcatttaaaagaaaagaaactagtaaaagcaaaaaaaaagaaatacgtgaaatctagaggtcattgattcgattggtacttgatagaaaaccatatcaaatacttcagtctccgatttaagagaatgtacgggtttaagaacaaaaccttttcatagtttaaaaaaaaaaattaacaaaaaaataaataaaaattcaaatgtcttctatatattcatcacaagacttgagatgaccaaaaacacgacgacaaaaaaagatgacttcgaagtcaccaaatacttgtgttactattgcttcttaattagaacacattcattgatgagagactcttttgagtttcttaaaattacaatatttaatattttaatattaaaaaaaaattaagcagaaaaagatatatcgggccaaagtctctcaaacatgtttttttttaatataatgttaaactttttttttttttaaaataacgtttttacaattagtgcatcttgtgtttgaaaatcgaatctaaaaaaaacagaatatatgaattgaacacacaactctaattattaagaccgactccgaaaccagctttggaagcaagcttcataacgtcgatcgtttcttctctcaaataggttttaaagtctcctaaacaagacacgtctatcattttctctcatgcttttctattattttataaatttttaaccttcagatactctctcacataccacaattgaagatgcccttatacttatcactttttcctctcgacttgggatcgtggaatctgcttgccgctttcattaagtgtagaggagtagaagagattaaaggagagcatagatattgggttttgagctttagagagctctacttttctattttttttgtttgtttgttaggaaatccattgaacaccatcaaggattagaagagatttttttttagtataattctactaatacaaaattaagcactaaagtctaaaccgcactcgcaatattttatattcacagtaactataagaagcgaagctaaaaagaaaaacagaaaaaagcttgatgaccaattcaacgatcattgatagtggcaaagtgcgagctgagtctttgttatttgctttcaacataagtcaaagtcatctgcggttcatctaaaatcaaacgatatcaagtgacactgaaaataaagtgtcaagtcgttgttactttcttctttctaagtcaacctacactaatagtcaactccacttaatatattcttcttcgactaatatgaaatggcaaagaagtcgtatttgaatttttccaaaaaaccaacggacaatgcacttatctcttaaaattcaaatttgtaaatcaataaaaaggaatcttgtaggcttgtaggtaatttagaaaccgcattcacacgtgaaactttgaaataaaactaaaagctggtttacaagaaaactaatagggaaaccaaaaatatgaggttaggcgtcttctatatatatatcacaaacttgcaatgaaaaaaaaacgcaactaaggagaaa

SEQ ID NO: 2262 - DNA, 2000 bp, Arabidopsis thaliana
aaaacattagtcaatttggagagagaacaagaatgggaaatgaatagaagcaagtgggtcgtggttgcatattgcattgttgtaattactgttggagcagagtctgcaacactatttactcgtacccattttcaaacgacaaccattccttttatttatatatttattcattacttttgaaataaaactattcatgtcttcatgttctttgtcttcttccttcgtttataacaatgggtccaaaaatcatagaattcacaccatatggatggttacactccttctctccaattaatattcataataagtatgtttggctgatatcgttttcatatttttccattattatatatacattgcgtcttcttctaaaactagtttggatttaaattacaatgttttccacatttcgggccctacttacaagctttttagtatataagtaataagtttacgattaagtaaaatcatctccaattttgaaaatgttacctgaacaatcaagtatagaaagtaagactaaaatagtaaaaccaaatacttctaagaattgttacactagaatagttacactataacagttaatggagctatccacttttgactagtcttgcggatatataaacatctttattcagataactcatggtgacataaaaagattaaaaaagtttatttgataaactaagtatttgaaacaaaacattattttaacacttttaacagaattctaacttataactgactatattgatagtgagtacattatcacaatcctctatacatattttagggttcctcattcaagtatgaggtttctaatacattttacttgggataatggttcttttagcaattcatctcgacataagttagatcgaatttctgttacgtgaagaaaacaaaatttgcttacataatctctcaactgaaaaatccttggaacaaaataaacagtttgtgaagggtggcccaagcccaattaataaatagcgaaagctaaatgaaagcccaatagatattagctcattatagtattttccatacgcttcacaacatctagcgaagaccaatttaccgcagcctgtcaacaacgctagctaccataaaatcatatacacgaatgctcatatttagatcatagctatgtgagctatctatattttctgccgcaagttacacaaactatgaaatttcgtgttaaaaaaatagggaaactatagacggtaagaactaagaaggatcaacacaaacattatgtaatcactctgttttatcaaatcctccctatcagaaactatattatcactctctgtctctgtcaataacatatcagagtcatagtgttcggacttaggaatgaggacgtcaatcacaccaacaaaaacaaatgacaaactctaaagagactttagaatcagacaatcagaacccgaaataaaaacccgacttaagaaccctagaagacttgactggaagtctgaaaaaagatttagtagaatcttgtcaaggtatacaacaagtagcccgagttttgttgaacgtagaaaccaagctataaccatgtcatttaccaaaacattgatatttttttcttttaggccccaaaaaaatacataggacatatagttatattcgattcaaattaaaatctgatgtaggcttattgcaaaaaaaaaaatcaataaactaaaattatttgctttttaattaatgtttggttgccaaaaaaaaacattaaaattatttgaaacaagtcttcaaactaataaatataaaaaaattcgattacaattctactagaatatacaatatagacacatcgttcccatttcctaagacccaattttggtcaactcactctttaataaaatccctctcaccgatcattaaccaaaattaagtagacttcttattttttccatagaaaaaaagaactctttatatcctttctatatttcttctccaaaaaaaaccttaatcatccaagctctttcgaa

SEQ ID NO: 2263 - DNA, 1294 bp, Arabidopsis thaliana
gaaatgtaccacttgtgttgtctatgtaaaccgctgtatgtgtagtagaggattctatagcttgttctcagacattaaccaaggttgtaataaagcggtttcattgtgacttgtttggcataacaaagtatttggttttgttgtttttctgtgcgttgattaatgaaagatgtgactcattgacgtgaacatttatgccaaattttgccattgttgttcttgactatggtagacacataccaaaaagttaggttacctgagtttctggtaagtatagttgctatattgcatttataatgtacataggcttctcacacattatcaaactttggtaagtttgtctctattttttttaccgctctatcttttagccttgctcatcggatatatatgtccgatgacgcttatcttgattgtgtaagcgtatgaccctttttttgttttgtgcggtatctaatgcttatcttgattgtgtaagcgtatgaccttctatttgttttgtgcggtattcaattcaacatgttgaatttgaaaataatagtaagagaagtacaaattgcaaattatactaaattgttataagattgcaattcaattttagcatttagagtgcttattgaaattagaaaagtataggatccgcgtgtttatcatatgggcgggctaggatcaaataggtcgaatcacgaaatcaaataataactaatcaggtcttaacaatgtttttacgatagatttagtcttaaccattcattttgtttggtatgtaattaaaagctaatcaagggcatattctctctctattcgattgtattctctagagaaacgattttcatatatttcctaatcaaaatagcatatttgaattattaatttgtttccctcaataaggttacgaatatgatgcattaattttggatttaaaaaatcttgcttgctcacgaagaaatcagactcaatttttatcgtcatacaatgttttccaaaatatgtgtacatgttcttgcagatgagtctattagtgagggttacttaaacaaaatgttgtatttttggaaaaaaaagtttatttttagatattggttctagattttacatccaatttttgttttaatcataattttagaaattctattatattttttatggtcaaactaaaattagaaatctattaatgatttacatcattccgtaaagcactataaattgtcctaaggcctaaatacattttcgcactcaagtcaaacaaaactcttctattttcctctgtcttcaaaaccacagagatctcttc

SEQ ID NO: 2264 - DNA, 2000 bp, Arabidopsis thaliana
tgctgtaaagtctttccacagcccaaaatatgtctacaacattaagactcatccagtgttgctttagacagtattacaaaagctaccggctatatcccaaatatagcaaaatcaaatgtcttggctgtacgttatcaaaatttccacatttgtattgtacatcacgtaaagaagcctgtgaactttctttctctctctattttttcacaattgttttgctctttgcactaaagaaaagaatatctaatgacaaaaattaacatgactataatataaagataagtaaatacttttacactaaaattttgtagcactaacaagtgttttatgtttttaaatgaatatcgtattcgttttattaaataaaaactttaattcagtttgtaaataatattatatttattaaatccaaaaaaatattatttaaatccatatacagtgatgatgatgctatcacgacaaattagtccaaaatgggcagcgtatattttcttatatgggcctaaacaaaggaaactaactaattataatcaacttatgatcatcagtcaattatgaaaggttatatttgacaggagattgtgtgtttaaaaccattttgagtatatctgttttgaatcatttgagacaattgtgatttttgcttgttctgatcccattcttttagtctcgtgcatatgtgatcttgtattgtctaataaggattatgatctgtcccctaaacttcaaaatttggaggccatgatctgatttttgaatgtggttcttatagttttttgcttgatattttgcagaccaacaaagaatgatggtgaatatccatctaagtcaaatacagattccatttctcttttaatacaaatcaaataagaaaactgaagcttgcaagctcgcttgtactaagtttctgaaagtttttattctcgactaaataatgtccaagatggaagcaagacataagctccattgttgatagaatggagcttatgttggcttttgtttttgtttcaaaatggtttttaacttatgtgtgattgcttagccaaatgtggactctgaagatggttttcagttttagatatgaatgtccttgttactattgttacacagtcacacagagtttacaaaagatcattcatcattgtttataagagaacaaattgataacatatatctttttgatgtggatggatttgttaaccctctagaagaacacccaaatttggctacaaagttgtcaacacattgttcttcgttcttctttgactttgactaaaaataaaaataaacctcggcctaagaaaatagcgtgttcacattggatgattaaggcctggaccgagtatcaaataatatctaaatgggcctagctaagcagttacgtaagctaaatttagggtttgtttttgccgcacctataaaataacaacacagcttcccatttgtaatttctagggttttgcaaaaccaacaccgaagatccaacacgatgggacgaagtaagtcgatcttctcttctcaccaacaatctcaattcgaattccttgagttcgattcgtcatttggtagaatcgtcttttgctttaatccgtgtgaagaaatagtctaagatttcaattatatcaatgcaaggtttttgtatatcaacgccattgattttatcatttcgaaatgtgaaatgttgaattgattcggttttcgtagaatcgtgtttcgtcaatctgtgattcatatgaaattgctaggcttaggattagtttgagattttgattatgtcaatctagggtttagtgtatgaatcgccattggtttgggttttggatttgtttgaggtcattttagggtttttttttgtgtgtggacgcctttgattgaacaattccgatgtaaaatgtgcaggacctgcgagatgttaccgtcagattaagggaaagccatacccgaaatcacgatactgtcgtggtgtgccagatcccaaaatcaggatctacgatgttggt

SEQ ID NO: 2265 - DNA, 2000 bp, Arabidopsis thaliana
tataatatctattttaaagttgaataacgatggctttatatgttgccattcacatcaatcgcatgtatatgagtaacaagtggttctgcttttttgtattaacaaaataataatctgaaccattaaagtatatatgggatgatttgtacggtagaaacgtttatgaattcatcccattatatgtgttccacctatagttaatgtttttttccttttatattaaaacatctttttttacatttttaagttatgattaaaaatgccttctaattctgaaaatattgcatacacttataaaagtttttacataaatacaaaataacatattttgtaaatacagaattttttttgtagttattaaccttttatattctaatatattaatgggtgattgacacaaatagcacaaaaaaactttattattccaaaaatatcaccattttttgaaacttccaaaaatagcatttaaagtttttaatcctcgataattaaataaataataaagtgtttttattaccatttctatcaatcctccaaataaaaatgagagcaaacactaatctaatattaaattgaatcaaaaaacttttaaatagtgaaaatatatatcctaaattggaaataaaaaacccaaatataatactaaaaactaattttaaaataaaaaatctcttttaaatggtgaaaatatatattctaaattggaaataggaaacccaaatataataccataaattaatattaaaatgaatcaaaatttcttttaaatagttgaaatatatactctaaattgaaatagaaaacccaaatataatattttaaatttatttctaatttattttggttgaatagattttagataaaattatggtattattattgtccataaaacttgttttagtgttactaatttctcaaataatgaattgagtgctatttatgtctaaaaaactttttaatgctatttttgtccaaaaaacttaatagtgtgctatttatgggaatttatctattctttaagatattttatttaaattatatattttctatttgattcacattatttgatcgacttttactattcaaacatatatttagaccgtcaaaaaattattttgatctacacttgttacgcttgatccattgaatacatttgatccgctatgcttgatccactttctctattcaatcaatagtttcaaaaagagtatgttaataacaatatttctttttgcatttaacactgttaactcacaaaagtagttttcagacatgaaatagtaaactttagttaataaaaactttgaaaaatactagaaacgtattattcaccgaataaatagttaactaattatatataattttttagttggactatttcaaacaatcggccttcgccgaatctctcgccatcacaaacacatcagcgcttctcaatttgaagttgtgaactatttcatctcgcctgttacattgacatatctccaagattctaattcttaaaacctttttccggttctaaattaattttcgagtatatatcactaaattaataattctataaattaataaaaatatcatagtttagtttattaatttattaaaaatttactgaaacatttcatacttcaccttatacttcagtttcatacttaatcttatacttcattttccaaactatatttaatgttttaactttaaagatctatgtggtcatataattattttaaattacacctgtcgcaatgccgtcacttataatttgtcatataagcaacgtttgttgaccgcattcagcttcatatagtaagaagctgcctttttttaattggacgacgttccatatatttaatttattctcattacagtaaattgttttttaagaacacggaatattactatatataagcatcgagaggtccatggattatcactactctcatcataaaccaaagtatcaaacaataaaagatttttgagaaaaaagagagagagatatc

SEQ ID NO: 2266 - DNA, 1658 bp, Arabidopsis thaliana
ttatgcaaatgtatatttataagtgataaagctataagtgatgaattagataacagtttcaatatactagatctatgctccatcatcatcaattaagaataagctcaatatttaaacgtttgtgtatgaccccacaatataataagactatgaatcaaacgtgtaaagtaatattgtttccttatgagaattaagtacacaagcatgactttattgaccaaaaaaacatagacttagatgcttttagtaatgaaacaatatattttatgaaactctgatgaatcaataacgcgtaatgatattcaagcattaaacaacagtatctcattcaacgatatgattaaataaacaatcgatactaaaatataaaccagacaagtcatatgatgcaatatttaatcacgactattaaagtatgatgaaccgaatgctgataaatatgaggtaacttactcgacgtgggagagaataggaaacggtgagatcggagatggacgacggcaaagttttgtgttaacttggttggctagggcttctgataacgtgttgtagaacaattaagtttaaggattgttcttatatattattcatgagtaagtaataaggagaaatatatgagatacaacttaaggtttagattagaacccaagtaatgtagaaacctctagaatatcctaatgggcccataatagacatccatataatacatattttgtgtgaataacttgagagttttaacttatgttttcgacgttgccggtgaaaaggtaattaagtagttgaattttcaagtcttctaaattccctatggtcgttaaaaggatgaagacaaacaaatataaatgtatggtataggttttccaaattcttacaaaaagacatttagatgatataaacaaatgtttatctttgttgatttatcaaatgaccacgtttattttgttacttttcttcttcttcgtcacccaatgaccattctttgtttgtctcaatttcgttttctgattaaactaattaataaagccatttaatcaaaaaagatttagtgtctttatgtatttgtccactatttcaccttgacttggtctttatgcttctttctctctctcacggtctctctttaagtcgcttgctcatctgttctcaacacaaatcaaacccagcagacacactgttcattgatcaaacaaatcatgtactaccattccctcagttcttattcgatcttgttcttcctcttctccctattccaccatcttccttgtgcttcaagtaaccaaggacttgggtggtgtgagtctctgtttcagtgtgggaacatcaccgctgatttccccttttggggcgggaatcgtcacaaaccttgcggtcatccgttgctggagcttcactgcaacaataacaatatcacctctttatacatctcaaatcaagagttctatgttcgtcagataaatcaaacatctaacactcttacgcttgccagatcagaccttctaggttctttttgctcctcctatgcatacaataccacaaccttgcctcccgaaatctttgagctttccccaacttacaagagcctaaccgtattgtaccattgtgatccaaagctttcttaccgctcgagttatacatgtcctgctctaggtactttttca

SEQ ID NO: 2267 - DNA, 1433 bp, Arabidopsis thaliana
agacaccacctctatcagacaccataaccaccttcttcagtggtgatgatattaacctgaaacactcgctttttattgctttatttctcctctgcattcagactattttcatactccatgcttgttattatctctcttaaagtatcatatcttatcgcacttttgggaagataatttattgcatatcaaactttaacacttattagttattactgtgagtattattcactaatgctctacatgcttttatggaacaagtatgaagtataggactatcttcgttttaaattcccctgtcgatcactttaatccaaaaactttaactttagatactaacacgtgttgaaacgtgtactacgccattccacgcgtcaggaaatcgagcaccgccgaattcatctcgccggagcatcaccgccttcgatcagtcaccgccgatccgtctagtagtgatggatagccttctccttgttgtcgatctcgaatccaaatccaataaacgtcgaagatctgccggatagaacaaagaagctgcttcaaaaatctccaagaaacaccagcgccagggaagcttcatctataacgacacccatattggtgaagtcgattctttgctcttcctgagcaaaaggaattgatgaagatattattccttgaacacaacggtgaaaactaagaggatttgtgaagaaaacggcgacatcgacagaaaacatggatggagatctaaaccagacagagccggttacaaaagctgacctaaagtcagattattcaattcgccgtagcgaaatttacagattccgattaacggaaaacaaaagaaaaaccaaatactaatctccgatggagatcggagaacggaggttctctctctctgaagagtacgagaggggtaaactgggccgcttatttcgcatgtacgttattgggcttctctttgtaattgccctaatggactgttttaatgaaagtatttggccgacaaaaaataatccaaaaactttaacgcttatacgttcactactcaatggaaagtatacacgtgttcgtacaagaatcccctagaatattttcgtcattccgagcccacagcttaaaagtccagaaacatccacacacgacacgcctttctagaaacgattctttttttaataccccacacaccctcagatctattatcaaccgttggattacgtggacaagtccaatgccactcgtatttttaaccattcctcacactcctcaacgtgatgtgaagatactttgctgtttcataacgtcataaagaacagtgacaggcgaaatttctcaagaaagcaaatcggaagaactcacaaaaaaaactaaggtaagagattattatcatcacttttgttcttccttcactcaaaactacgatcaaaatcgtgatttcatcgtctttggtgtag

SEQ ID NO: 2268 - DNA, 2000 bp, Arabidopsis thaliana
aacaaagaacagaacagaagagataagatagaggtcaaacatttacataccggggatattgagagaccggccaaggaggaaggttcataaaagataaaccaatagagaagaatcagacaagtgatgatgaattagggttttgttcttggtaaggcgatccatgattttggggttaaatgtgagagagagagagagagaataaaaagatattcgagtggaggaggaagtacttaagaatctgtgtgttctgttttaaaaattattaagttaagaacggcattactgtgatgttaattagtattctaatttaaaactaatgaacggttctttctataaatatttatttaatgtactagttttaggaagttttccagagacaatattgtaactggggttgacgtgagttttcatataatttgtaactttttgacttttgtttaaaagattaatttggttagttaggagtatttaagcttttttggaagagtttagagtttatggttaacctttttttttaagagattagtgcgttatagttgcaaatagtgcgtttttttccatcagaaaagttagtggaaacatgaacaaattgtcagttaaattatgttatcccacttgaatatttttgcattttgcttttaatttctaacggtccaccaaatcaccaaatggagtattttaattattcttgaattaaaaactcactcaaagatttgcttcttcccatccacccaggcggattgaagtttttagcgtctttttaattatcattttgtatttataatttattagatttttaaatttataatttgaaaattattatcatttatttattttatatcagacttaaatataaaaatattgtttttgagttgttatatttgttacctaaattcttgccaaaaaaaaagaaaaagagagaaaatcttctagcttcgaaaacatctaatactgtaatagtaaaatcattaaaacttttaaattggtttatcaaaactatgtcgtatattcttctccttctccacggaacccacacatagtagagaaacaatatgagcagtttatcacactcttgagttaccaattttctctcatttctcattattccttcactttctttcgaggtacttcatacatagtcgtctttctcaagttgttgtggattgtagagaagacctaataagctagagaatggattcgaggaagtctttatcttccatcgatagcttcaacgattgttacgtttgcttgtaacccaagattcgaaggtcaacaattccacggatgatataccttacttgagtctttatttctaaccagttatatgttacaagctaagtctgattcttgtattcttttctaccattgaaaccaataaaatggtctccttaccaagtaaaacagggttattattatgtactctaacaacattttccgttcaatcaatacaagaagcttttggatttcttatttcttttttttttttgggtttttttctttcaacaaaatgattataaattatttatttttctttaccaataagatttggggttttatgaaccatgatgaaatacttttttgtctttttatgaagaaatgatataactctgtttctcctctcttggtagcaattggctttttatttctcaggtaagtagtctcccccttttaaatccttattgggtgttgtattctcccaacaggcgtgagatgttcgttaaaaacaaaaacaattgctcaagagcatggcgtctggttctgttatgtatgtgtcttgttttaggtaataagagtcaacttcaattttgtggtcactttcttgctaattagttgtgataacagctgttgcttagaaacttcaacggccaagacttcaattttgtctcccagcgtagtagacttggaacttctgatatgactttgatcacaaacaagatatatctttaaaaaaccactttagaaagaaatctatttgccaaatcatccatctttctgaaact

SEQ ID NO: 2269 - DNA, 1410 bp, Arabidopsis thaliana
aatcgagaaatctctaaactttagatgaaattttgaattctgaaatttgggattgaatcgattagtcgcaagaataaggaaaaatgaagagaatttgggattggggtttatgtgggaaggagatgaaacttgtgcgttgggcaagggatcgtcgttcacatcaaaggaaatttcaaggaagagaggaagaagaagtcacggttttagatatttttaagtctttggcccaacagatatttttatttaaaaaaataacattttacgacgttaataaaacatatttacaactttaatggaaatagaaaagtaaaacattttacgacaataaaaaaatattttacaatttttaatgaaaatagagaagttaatataaaaatttaaattaaatcaaatgaatgttgtgtattttcgaatgttaggacttaataagggtttaaggatgtgaaatcttaggaattattattttaaaatcatttcgtcatttagggatcttgatgatgaggatgcccaatctcctatgccacatcatgttgcctaagattagttacatggacatcacattgagcttggggtgagagttcaccataaactaaaagattccagattagacaatccaaaaggtcaacttatcatatctctggaacacttattcaacaaactttgcttaacttacaatgacagattacaaaaacccaaaagatcttttcttaggaggtttgaggaatcctctcctcaagacattctgtaacttttgtttttgctttttatcgacaaccttcttacttagttgtgaatttttgcgctttgatgattcactaaactttaaatacatatcttggaattttttaagtgatttcttcatgcatacttgaaaaattgttagaacatgttgaatattattattgtttcatccgttgaagcggattgagggattgaaactgcaaaatttgaatcatctttggagatttatgctggtattcgttatgttagcattcgaattcaaatccgtttttttagtaccttcaatttgatatattctttaaataattctatactatatactttttttgcattttaaatctcacataccaaatttatattagtcaataaaactacattgcaaactgttcgcctgcttgcatatttcaacatttgtatgcaaccttaagagagaaaaaaaatccttaagaaacataaacgttaatatattcgcatcaagtactgtctagataattgattttctagtcccatggttgaaaagtcatggataagatcaattggtgtgttagtccttaatttgggtcttattagtagctcaattagtttgaccagaagccaatatatatattgacatacatctctcgtttataacaacgaacaatttgcacacaaccacgagactcaagagac

SEQ ID NO: 2270 - DNA, 2000 bp, Arabidopsis thaliana
gaaacaatcggacgatatgaacattatagttacaaactagtaaaaagctataaatatgtaaagtgaaaactatttaaaagggtgaaaattaaaacgtatcaacgttggagtgtttcaaaaatatttggttggataagctcaaactagtcaaattgtctcccctcccaagcgggaacatcacgccatgtccacaataaatccatttttctttctctcaaatatatatagagatacatacatcgatactattctatatattatgtaacaaattagaaatatcatataccacatggtaagttgtataaagagaattattagtgtttgcttattgcaaaattaatacaaaacattttctattgaagagctacaaattaagaaggaaactgaaaaatataataaaaagcagaatatgttacgatatttgtatgagtgtatgagacaacagtatcagataagatcataatccttgcgaccaacctatccaaaagtctcttttttgttttctaatcaatttacaaaacatttaaccaataaaaatataaagatggtgaaaaaaatatggtcatacaacaattgcttcaaagggggatgaactaaaatataccaaaaaaagaagtgaggataggttcatgtgagcccccatcccacttgaccctcttggtaggtccacatttaccatgaacatgtaacccattggttattcatttgtatgtattgttttttgtcaatgacttaattttattttattttcttcttctctgacttttttttgtttatctgactcttctatgtatgtcaaaatgtagcaagataattgaacatatttggattgttgaaaaacatatcgatatttagtgaattagtttctcctccaagcatctagaatgtcataactgtgttgaattgtacataaaatttgatatggattgatcattgataataaatcaatgaattaatgatctattagaatatgaacttttcattcaaatttaattgataataagtggatttgtctatatgtaatattttagtcaaaaaaattgtttcttttcaatgcgatattattatccttaaaacgttttctcgagataatttttttccgagccattaattttagtatgttcagatatagatcgacagaaaaactataattacgtcggaccaattgtagattggattgaatacatatggatcagattctaataccatattagaatatgaggtatctaattcaaaaccaactattaataaatagattgactcatatatgtcttatatactagtcaagatttctttgtcttttctaatgtgggatattattatccctaatatcatgaataaaatcaagagttaatgtttaactatatctaatctatactacccatcttttttcggaaactatatataagttataaaaccaagaaattctcgttatccaataaaaataataattttgactatggttatatatcagtttcaacaacttatatgatgattgatgagaaccttattttatgaaagtacgtggtaatgtgttgtaagaaaatgttcttacgccgttgaaatatttttccaaaaaatgtacataacaaacgtacgatatgtatgtaaaagccgtggtactacatttatttttgtctgcccttctcggaaacttccttcaaagttatttttgccgttcttgaaagcgttgaccctacctttccatttttaaaatgttctctcattttgacccatttttttccataaaccaatcaaattttaactttcaaaaacataaaactaattagatataaaataataacatgtacatgcacttgcctcgtccattcctcacatcatcatatgtctttgtatatatatagatgaaccaaagaaatgaaaaagtaacaacgtcacctaaatctctctcacccaatttgtgtttcttctttctgctaaaaggttataatttttgtttcttggtttggtgagaatcttcaagaaactgaaacaaagaa

SEQ ID NO: 2271 - DNA, 2000 bp, Arabidopsis thaliana
aatttattctacttcaataaaactattggctccaatctccaaattgctcgtaagatatatttctttgacaatgactttcttagaaaacaatacagataagatattatagaaactcactaactgaccaagtgacttgtttgcaccactgtactttcatgtcttgatccgcaactatctgactttaatgtcttgtctcaaatttctcctgctcatttagctttaggtagcatatataatccagctaatttcattggaaaccgatgaactagtaaatttaaatcctgttgttttttgggtttatggttcatattaaatccagaatttaagagtatttttgtaatgaggttttgtagttttaatgttttgaagaatcttggaattacgtttaacacttcaaaacattataactacaaaacctcttttgatgaaagtgattatagaaaagatcatttaacttaacttacataattaatgattaaagatttacatgtcatggaggagtgactttgaagctctgcatcaaaagataatgacactaacacataactcacaaaattaaactacaagtctacaattgaaattaacgggcttacaagcacaatatatacagactgtctgattagttggtccaaaaaaaaaaaaactgtctaatgataacttttttaaaataatataattgtgaagttttatatatcttctataagaaaaggtaaaagaaaataaaaatattcgtgtaattgataagataaatatttagaaaattttcaataatgtttattttttaaaacataattaatataatggttcttacacaccacttcaggtgaaaccaattatcaacgataaatagaatactcaactggtaaacgagtaaactcgtcttgtgtcttatgtcacgaaccagttaaaaataaagaacacatcttctttacatgtagctatgtcgtacgtatgagtttggtcggggccgagcagtaagatttgaatcataattatttttcaacatggtggatgaaatacaaacagtaatcacagataaatctttgaggaaacattgtcttttcttaacaaggtacacatttcagcttgtagtctactcgatttggagagaggaaaacagtagaagacatgaagaacctccaactccgccagcacaactaattcgaagtctcgacaaacaggtttggaatcctctatacgtgaacaaggaaatagactatgtgacggctgtatatatggagatgtttgtttcaagataatcaacaaggagactagcgttgactagaaagtttgcttaaaatctttaatcgaccgatgtatttgctgtaacgacatcttttttttgaataaattttatattttataaaaaacctatttagtatacatacatatatacatatatatttatattcatatatagaaatttaatggagtcatgggttgtgtgtgtggtttgatatacataagcataaagattttcaaaaatgaacgacaatatattaaatcacaaaaacacacactcgaagttggaatccaaggcaacaagagacgataggtccacattatcataaatacaatcaattaaatttcctacaccttatcagaaagatcataaaatcaaatgagcccaccttctccttcaattaagttcttcacccacgcatttagtgggtcacacaaactcttattacttgtgtccctccaaaatttctaattttttccgcattcaaaacatttaatccaaaaaatataaaccaatcgtaatccactaatattaacgtatgagtatcgcatgatacgtatattcacatactacgaccttatttaatgatgaaggagttccatatcacatattcacatcaattgttatataaaacctaaacacattatattcattatatcattccctagcaacttgttcctcattctccgcaaatcaagcatagaaagagactcttggagatcatccaagtatccgattctcagaccctaaaaatata

SEQ ID NO: 2272 - DNA, 2000 bp, Arabidopsis thaliana
actaaatttatctaaacaaagatgctagagcttttgtttgcgtcatctcatcctaatcctcatatcttttaatcctatcctttttgtcccatgccctatatagtaagtatataaaattggcttggtgatgtatatgaacatatgatgaatcatgtgccatttgaaatatagtataatacatgtacacttgtgtaaaatagcttttggggtcttttaatttgttagaatagcatttttagattgtccattaacaaggtagtttcttgaaaaattttaaaagatattcatgcgccacttaattataacggtttaatgaacaattatttgtggcaatagcgaaacaaaatcatgaaattaacaagaataaacagctaatcatgaacttgttttttctcctctttcccactttgtgctggaacgttccttcgcatcttgtagtaatctcacaaaacccattttcaagaaacttgtgtccagtctgaattgagcgtgtggagttttttggacaaatgtagtaaacaaagatttaatcacccaattagggaataataatgacaccattagataagaacatgcgtaattagtgacatctaattattgtttaatcagaaatccgccgtggcgcgtgggtgtatgccctccacaatccttatccctaatgactttttatgtgaaaatgacacgtcattcagaagcaaaaaaattggaccccccaagccttgtagcatgccacgtttcttccaaaattaagaccaagaatggtcttcacactagtttttatgttatacaagttctttagtacttctcctttggattctttttaattactagtttgttttatgaaaaacgtatgttattgattattgagatatcagtattattatatatgcagtataaagttattgatgtgtatattttgtcatgcaaactatatcgtggagaaaataatgttgcttatgacttttgatagttgggcttacatttggataatggatagggtagacaaagataggaggaaagcaataatagcgaaatgaagaacgaatatttggggaaataggacaaatgaatatacttctctttgaaatggagattcacctaaattattaatactaaagccatgcaatgcatccaaacaaatcagtggtcaagcacactcaattatatgtccacgaagacctttagaatcttcacaaccaaaagctattttctacgctacctgataattctgactcaattcttcttcataaaacgtataatgaagctttatgaatgattaattatagacacaaccggccctatctgcgatttctacaaacaatagaacacaaaactttaaaagttactacaaaataccgaattgactatatatatcatattatcagtataaacatgattagattgatcatgtttatcagtaatcatgaaagacaaagagtgtgactattgtaaaccaaattttagaataaaataaataatttatcatactatatacagtattttgttaagtatatgtcatccaatagtaacattatcatttaaactgaaaaatgtttcagctactttaaggaattatagctttattaaaagtatatacttttaggtcacgtgtttagaggtgaagaacaataataattactcaataagttcaccagtcacactccaacatcttattcaaattccttttaaaagctttttaaccgtggctgtttgatgaccatttgacaaaatttagtatattagaaaaaaacaataggatagggataatataggacattagactattagatggacaaaatgaagtattatttaattttccaatgtaccaaccaataagaaagaagtgacgcacagtaaacgacaaaaagctcaagcataaaaacccaaaccttctctgctttctaaacatttcaagaaccttgagaacatcaaaaactaacacagaaagaaaaaaaacagttcctgttctattagattgttttctaaattgtctgaaaatc

SEQ ID NO: 2273 - DNA, 2000 bp, Arabidopsis thaliana
ccaatctcccaatccgcattggctgtcgagacaacgtggatgtaaaataaggctttaagttcaagatcatttacctcaaagccactgagcctttaggttaataacgtcctaaattggctaatgtcttcttatgacatactcaaaatctatttttcttggtcgtcaaaattcaatactaatgatgtatatagatgcatggttcattcacaatatagtgtacttggttttttatgcctttccagtttcctataagtatgtatctatatagtatttgattttctaatccttcatataatcttaataaataatattgagttcaaacataagatatttctttatatatggatagagtctctagttgatcgtgtgtaggtgtttcatctttgaccagtggataacgatcagattatttaatttgaaacgttgtttccactttgtagagcttagactctatgtcactatgaaacgacttgtcaacaaagcattttgagccaaataatttaacatataacttggttaaaagacgagtttacgattattactattcttaaagttaaattatgtaatattttcagatttagttttcagtagtcacatgcttaagaacattaacatcagaatacaaccataatgattaatgagagatgtatgcaaaatatatcaactaatcatgttaaaaagggttgtaccattaattagtgatgcttatctgcttcattaagataataattaattttcaggaaaataaaactattgatttgaaattcttttacaaaatatcgatgaaattaaatcggcaataataaccaaaaatatacttttaattataaatgtgaaaaagggggacctcattatatccataaaaaccccagacaaataggtaagatacaagttgctaaatttaattaaaatcccaacaacaacaacaagattatctttaaaatacaatccatcctaaaccaaaaacaaaatttggtccaccatataaaaaaaaacatcatatgctaatatatagtttccatctaccaaactcaaaataaaagataagaagataagaagataaaaggacattaacgtaattttaatcacagcgtcccaagaaactaatccaaaacattatcgcgataaaaccgtacagagcaaaaagctactaataatattattattgaaataaaaatagatagaaaaaatagatcgttagaaaacgtgtatatatatatatatctgtgtattttgcaatatatcgtttttttttcttcgttatcgcattaatctctctctctgtatcttctcttgagtggagcgaatatccaaaagagttccgagtttctttcatccttcacgagcttatactttttcttctccattcgtttgtttttaacgatcaaaaacaacggcgaaggttagtctccggcggtttcttcgttgagatgtgacgacttttttttttgaacgtttataaagattacatattcatgtatttagatttcttttgttatgttaactgtttcattgatgttcgagttaattttaatttgactcaaacacggtaatttttttttaatcttgatctgttttgttacgtaatttttgggttgattttagcctgaaatgatgattttttttctttctagcttatgtttttcgtgaatcaatctttttcaatataaagattagtattttgttgaaattcattttttatttgattggctatgaggaatcagtttcttgaaatggaaatggtgatttgatttgatatgttcacaatatgaatgaagaagattagggttaatttatatatatgaaacaagaaagtttgtttatttaaggtaattgatatatttgttttgttgttattgccatttttaaggtattggaaataagacagaagctgttagctctgtttctccatggtgtcaagatcttgtgctaattttctagacttatcatcttgggaccttttagattttcctcaaactccacgaactcttccacgcgtc

SEQ ID NO: 2274 - DNA, 2000 bp, Arabidopsis thaliana
taagaaacgaataaatgccgtggagcataaatattagtaacttggtatattaaataagtgagacttacatttgtttttaaaatttggtcaagggtttacatttctcatttaaagaaatgtcataagataaactaaacaaaaattatagttgttgagattaggtagcttgaatgttaactcaaaagtttcatgctttttcattcgctcaattgcttttgttttgaatggagcaatcagaagaaaataagtttaattgttaaaacaagtcgccaacaatttttgaaccattgaaaacataaaccaatatttgaagcatttaagaaagattttttttttgaatcatggatgttgaaaactttgacttcgatcaaaggacaaaattttcaattttcaatctttatgatatcgtaaatcactttatttttgaaaagtgaatcaaaaaacatttgtcgaactctaatagcttgaactcaaaatttttcagtaatcataaaatctccagattttactgcattttttatttttacattcgaattaccttgtttaaatatgtagattatgtactttcgcttttgttttccttaaccatattgttttccttttaaaacatagatgccaaatattaagtttattttagtatcactttaaaccacatatcttaaacaatttagttacattaaattcaaacaatataatgcaagtaaatgaataaagatggggatataaaaaaaggtaaagaaaaacaaaggtaaagattgctttgactaaatatagccaaataggcaaatataattacagtccttcatcttttctctagctttagaatttgtcttcaaatatgaacataattagtatagtattttgataatcactttatagaaagcttgaattatatgaatcaacatcccacttatcaaaagccacacttttcatttcctttttcactctcactttgacattttaactttcctcataattacaaaaaaatattgtattaaatagtaattactaaaattaagaaaattcttagcatctgaagatttagttgactaatctcagacctaatctgtttcagtaaactctatatatgtaaattaaattatatctctgattataaattaaaaacaaaaaaacaaaaaacgtctctttgtatctcctcaaaagccgaaacaaaacctctctttctcacaagtaagcaacttcaaaatctggttaacccaaattacaaaaaaaacaaaaaaataaaaagtcgctctctttcttcttaaaaatctcaactttgtcgtccaaaactccaaatccagaaacccatacgcaaatatccttctacgtgtttgctcctttcacgtttttctcgaatcttctcgcatttaccaatcaaacagattctaaagttccaaactttttctttctttctcaaaccattctctgtttctcaactcttcactttccagtggtaagatttgaatcatgggtttctcaaattcttaacttttcacaaaagcccaccatggaaatcgaatcaggaagttatcaaaacgccaaggtaagtcatcatcagatttgatcacaaagttcttacctttacgaaaactctcttctctttcctcgtaatcatcgatatctgattttgttgattgcagaaggaatcatggagaacagtattaacattagcgtatcaaagcttaggtgttgtatacggagacttgagtatttcacctctatatgtatacaaaagcacattcgctgaagacattcatcactctgaatccaacgaagagatctttggtgttttgtctttcatcttttggacaatcactcttgtccctcttcttaaatacgttttcatagttcttagagcagatgataatggtgaaggaggcacttttgctctttactcgcttttatgtcgacacgcacgagtcaactcgttaccgagttgtcaattggctgatgagcagcttattgagtataagactgattcaattggttcgtcttcg

SEQ ID NO: 2275 - DNA, 1584 bp, Arabidopsis thaliana
cttctgactagccttccaaaactgagattacaaatcaaccaaccaaaaataaagattgaaactttcaatacttgtctcaaaacccgcaagttaaaaattgaagattcaaaagtaccttatccttataaagcttcttgagctctgcaacatcaccaatcccattatcaacaagctttctctgattccttaaaccaactccaggaatcttcagcaaatctggattaccaacaaactcaccacttccactagagctccggtttctacggttcatcctcacaggcttctcatctttctcctcgtcttcatcttctccgtcagactcttcctcgctttcaaccactgctccagcagtagcattaaccggggttaaaccaccagtagagtctgaacaaaacaacgcacgccaagacccagttcgaccaacccaagcccggttcgtaccgtcaattgaacaccggcaagtccggtaaccagctgttgagaaccgaacagacgccggtgccggtttatgaacagtcctctgtagataagcagagaaaccaacaccgcctgaagaaacagaagccgttgtggtcggcatagcggaagtagagaagaaacaagtggagagaggtttagtagtagaacaaggagggagatttttaacgggggtcttaaaccctagagagataaaaccggcggcgagagagttcaccggcgtagagagaacaggggttgaagaagtggtacttttgcacagaatcttctgcatcgtttccgtttacacgagcatttcacatcactcagagaaatagaaaccctagtttcagagagagaaggggataacaaaaaagagggcttttgtgtgggttttggtttggcgcaaagacagaggaagaagaagagagaaagttgcgttttagggtttttaattttattgattaaaatcattaatttcaattttgtggtgtggttaattatttaattaattagaagatatgattatgggattaatacgttttttaataaatcgttatggggaaaaaatgttaaaaaatggtgatgtgtcctgtccttgaggtgttatttgtcatctttacgaagttgtgtagcacacatgacacgtgcggataacaaataagtacataatcatttttttattgtttaaaaaaacgcttgtttttgaattggactggttttttatttgggcctaccctttgttaaaacgatgacctaattgagcttatcgactgtaaatttttcaaaaatgttacagatgcagggcccattagatttaatggaccgattgtgacgtttcaaatttgttcccttttttcctggcacaagtctaacttttcgttttgcaaagatcccttgtctattttctactcgattttgcaaatttgttgtaattctaatttaaatttgttatatgggcttgaaaggcccattatacaattagaagcccaagtgttctaggttagatttctcactcccggaaaaaagaagctgatatataaatggccattgttacttcagcttctactgtgcggcgtcttgatggaggagataaaccctagttcttctgtagacaataagagagac

SEQ ID NO: 2276 - DNA, 2000 bp, Arabidopsis thaliana
ccctgatcaatcagagtagccacgtgggcgggtggtagaaatcgaaattattgcgattattgacttggaaaaaaacaaacacacgttgcattttttgatttacgtatccaaaaagaacaaagaaaaaaaggtaaacgaccaaataatataattttctggggctgtcgtcttccatctttatttcttcttggcgatatcaccatatcttatacgtctctcgaaagattattactcttaagacgattccattaaacactgattgtgagaacttgtactttaacgttatcgaaaagtatacataaatatttttatttttttaggctgattcattcttactgataacaataattttgtgttattctttcttacctagagagttctatagacaagttcgtaactataaaaccaatctttatttcttactcatagctttcaaaactaaaacttgatcagtttaaataaaatatatgggaaatttttgctgaaccaatatattacgtgtcaagatttcattgatcctattaatacaatttattcattttacagttatatcaaatacaaattacaactaagatactcacttatctacacgtcagattgtacaactaagatactcacttatctatatctaattttcgtggttaatattacatgtcaaaattttatggaaataattagtgtttttctactttatataaatttttatgatatattttttttttaaaaaaaggaaagagaaagaaatcaatttccatttgtaaacatatttttggttctgaaaataaataaatgggaaaaaaaggaattaaataacatctgttgttgttagctgatcgacaggtgttgcctgaagcgaccttaaaaaaagaaaaaggacaaaaagttgaagaaaaaaagaggacaaagttcacaaaatgatacaaagactaatacgtgtccttttattaatcctcttttgtaataaatactcttttttcctataaattatattacaaaaccaaagaaaaaaaggaataaaaaaaaacagagagaaaaagcaaaccacacaatattctcttctctctctctttgtttcgctgatagagagagcctctctctaagcaatttagctcgagcgagaaataatcctgagggaagaaaataaaaagaagaagaagaagaagaacatctttacttttgttctctctctctcttctgttcgattttaatttttttgcagatgcgaatatcttctaaagattcatcaactggttagttctttctctcttcttttttctttcctgatttttttatgttgtttttctgtgtagttagcttttcaatcggaagatttttgctattatgtgtcgaatctctcttgttgttttgagctttgtgtttagttttgcttaagaacaaagtttaaattcatctttctatttctgggtaaagctaaagcttcttttttaatttagatccaaggaaacccatgttctactatatgattatggacgttaatggttcgaattttttagggctttcttgtgattgatttcgctgattttccctcctttttctggtttttgtgtgaattttctttgacatgaccgtttggataatgattcgtgagtttttgattagtgctttgtgatctctcaatagggttgaaatcaagataaggatttgagaaaagatcgacgaagttgttgcgattttgggatcaagagagtgatataatcgagtgaggagaattcgtcgtatagattcgtcagatctggttatctccggtacttaattctccttgattcgtcgttttaactatgctaagttagtgtatgaataaagcggcatttgggtcgctgacaaaaacttatttggagcaaggattcttcaacatcatgaaaccattgcttagagtattcgaagaagaagatgaaaacaattgatttctcctaagtccatctttgaaatttaaagctttgttgtggtgtggtgtggaaatctctgattttggagagctc

SEQ ID NO: 2277 - DNA, 2000 bp, Arabidopsis thaliana
tgatattttattcaaataataaatgaaaaaaaactaaatatttagttaatttttctttgagtggaatctcagtctcaatcacagttcgatatgtgaaatctatcatttcccatcgacctatgtcataaaaactacgcaactaacataaccgagtaaatgtgtaataaatcgaagtattttacacaagatgtagctagtggcaagaacaagatgtgacgagcaagtatctcgaaaagaaagtaggagagacgcatggttccaaacctatttatgcgaatactccctgacatgttaaaaaagtttgtgcggcatgcaaatcaaatccatacatagctcatgcagactgatatatatcacatactttcggtattagcctattaggtatccatgtagataaactctcttatgtaatacacatctgaattctatacccttggtcccttgctatattttcggaaaaatgggtaaaacaaccttgaacttttctaaaaacatgtaaaaaatcttcacatttttttgtggaattttaaactctcacctttttaaagtggtaaaataacacctaatatcaataaaatcaatttaaaaacaaacattatactaatttaaataaataaataatcttgtttaagataatttttctagattctattttacaattgtttttttccaaattaaagttatttagttttagtataaacttaatatataaaaattcttatttcaaatctatttgagacataggaaacagtttcgttatcattaaaatcttttgttatgtaaacaatttaaatttattttcttggacaattggtcatatttaatataatagattcaaactatacccaaatttattttgggtcaagtttaggtttgatttatctgctagatataaatatgtattttgtgttgtatatgatatatttttattaaatttataaaaaaggaaattaacaattaatcaaattttaggtgaacgtgaaaccaaactaattttgtaacatggagcgatatagaaatttttataccaaattgaatataaatatatgtttataatttttttttttgatttgactactcaagtttagaaaaaaattatgtttataatttaagtcattttaaattcataacttgaaaagttagaattcaagttagaacaaattcaaacaaaaaataaacagaatgggctaatctataaatgtttatagtttacgtaataatttttaatggcaatgaaactaattaatttttatagcataaaaatcaaattttagaaagaaaaattgcaaactaaaatttgaaaaagtaaatttcaaactaagtttgtttattgtttatttgttaatattaggtgttattttaccatttttaaaaaagttagggtttaaaacttcaaacaaaaaaatgaggttttttttacatgtatttggaaaagatgagaattttattacccttttttcctatattttctctatttcctaacactcgttacagcaataatccatgctgattgtttataaatatttataatttgtcggaaaatgacagctatggcaaatttcacgttataaaactattttttttttttttttgataattgataatataaacttatagttaaatcattaaagagtaacattagcaaaaaaaggttactagaggataaattaacactaggtactgcattctgattggcagtgtgtctccacatgataaaggagttgggaaaatactaaggatataaaaacaaacaatcaaatttgttaatttcttcataggaaatgggttataaaaattaaaagtgaaaacaatttttttttatttttttacctaagtgatgatttgttatcaataccttttaaaatcatcatattgtagcaggctagcagccagtgctttctatataaagaatcaaatatactctgtgactaattacatcaaacacatcaagcaaagtaacaaattccataaacacaattagctaaaagaaagaaacaatc

SEQ ID NO: 2278 - DNA, 2000 bp, Arabidopsis thaliana
ccaaaatatatgatttgacagcttattagtttttacggtttgtttttcgttgtttgattaggtgattcgttgttcacttacgtgactaatatgattgtttattgataagatttggagatgactcgagctcatataaactaagccattgatgtcgaaaaactgtttaaaaaatttagtcgctaatgtatactcacgcggctgtattgtcccgtacgcggccacttttattttgtattgaagtactaacttacgttttaaaaattagactgaaactcaaactaaaatctgttttgtcccgtacgcggccatttttattttgtattaatgttctaaattacattttaaaaattagactcaaactccaactaaaatctccagccagcatatatatatagaatgttgcttagtcaatagtaacaaaataattgcaaatgtaaaggctgcttccaagaaaaaaaaggcagtcctatatcttttaacttgatatcttacaaagttataaaatggattactcacatcatagtctttgaaaaactaaaattattatgaaaaggtacatattaacacacccaaaaataaaaaaaaataaacgttcttgagttggcaacccctaaaagtggatggcaattcagaaatgggcttttaatgtttagattccataaaaagtgaatagatggttcttattctgtgtatgtgagatatcaatatcatcgtgacaaagactatgtgacaattaccatacaatttatcatggaggcaaagcattacaattataatgctaccaaaaatattttgaagttaaaacaaaaaaaacttattaaagttaattaaaagcaagattttcgacagagactaaacagagtcgattgaagctaaaagcacgacaagttttgagaggatgattgagatttgtaactcacccgacaagaaattacccgaaaaggacaaaccaattcaatgaaccttcgtcgaaatcattcacttgaccctttatatagtatagtttatattaacacataagaacttggataattttagtttcctttaacgcatgacatttctatattaaataaaaactattgttgttttttgttctcctgcttaacttaaaatgacagctattaaattatcaggatatttttggaaaccgatgtaaaccgaaaaaaggttattataagactttctttccttctttcttatttgcttaaaagatatatagttcaattttttgttttcttgcttaaagaaaagatagttcaataaaattgtatctatataaaagggattgctaaatagacatacaccgtatttatcggacgagaccaagaagttcaggttattgcaaactttgcctttttgacataaactttagaaaacaaatctgaacctgtctttttctctgattttcataatttttactaattaggttagagaggaacaaacatgaatccgaattatatagacaatcaatttttcataattaagtatgttgatatgatgatatcaatagtgttaatattcttacaagataaagaaaggaacaaaaattcttcgaagaacggaccggatcgatcgtatactcgtagtgctctctctacaagaagtaatcatgtggcatatggatcacgctttatactagcagttagatctaaaacccaatcgggtgggaagatcggaaccgtccatttgtcaacaaaggaagctttctaaattggagttgacgtcaaaagtctccctatttatgacgccataaatagattattcgcgtggatcagacttcggacttctttggatattgccaggttgtttcctttgtcgttcttcgaactttctttatttttttttatttttttttggtttttgtgagactaaagactaaaactatataaatatcatcgccgtataagattatgtcaaaacattacaaaacctagttttgatctaagcgctctctctctaactctccctctctttctctcacaactcaccagaacaattcc

SEQ ID NO: 2279 - DNA, 2000 bp, Arabidopsis thaliana
tggatcgaccaaagcgtttttcagattaatcagatgctcagagatatgtcgatttgattgttccaatgattaagaagagtgtttcattcgtgttacttaatattagaaaacttgttcacgcttgagccaatggtattggcatagttgtcggtcaacgaacaaattagttggcgttattccttcagctaaacggaacaaaaaacaaatatacaattaacaaaatactagatacaaaaagaaaaacaaattaacaatttatgtatattatttctttatagataaaatatttacatctttttaaataatttaatcaatttcgaataatcccaaacaaaactgaaaattaaatcgtaatggagaaaaacctctgattctaacgattaagacttcggatctgaaggaaattatgtggagctgtgagcaagttctattatccttacgccaatttggctttgaagttaaccattttaaattttaatgataaagttgagtataacacgtaatggccttaatggggaaaacatttgagtcacgtagtagttattttccgtgtttaaatttgatttcgccattaagcataaaatcaagccatcatcatggacatgaaccaccaagaaacaacaacgttaattgatgataacatattccccttttctttgtagtaccttttattttcttaacaaatcaaaataatcatacggtttgcaacaaaaaaaagttgaaaaaaacttcttaatttgaagttctcacaatgtataagcacaaaacactaacatttaacttggaagctcagtatttaaaatgcaaaatataaaggccacaactacgataaacaattaagataaagtactggttaacataaaaatagcgaaaccaaatcgtttcaggttatgccagccccgccaaaaaaaggtggctacggatctttggtgaccaatttattagctatccatcaagtctgatagtgatagcaaccaatatgtacgtccatctttatatttattgaaaaataatgatatattgggaggtcaaaaatcggataagcttatgattctttttgtgcatttgcattttatttacccaacatatggaccataatattatatcttctgtttattatggtctatatgctagaatgtaataatacatcggaattttgaaagactagaaacattgctttgaaatcctgtgtattttgcacccaaaaaaaaataaaaaaaattgtgtgtttatatacgcaatttattcttaaccacatagtagttgtaaattgtaaacgcaaacagtaaacataaaacattccatattattgacgttttacgtttgtgtttacaatttgcaattgatgtttgatgataaacgcatcgatcgtcaatatttgatcaacaagactaagatcattgaatgcgactatgcgaccggttgatttattaacagtatccatttggtcctttcaatatcacaaaaatcttaaatttccttttttttttaatatccaagcaaatattctagggtatttctcaaaagtatatgtattttatttatttgtaatcaactgctccttggaattacacttgtatatattttctgatatctaaatacctacttctactttatcaaaaaaaagtttacctacttctaatcaatcttagacacaagtacataaatttttagaccatgcgtttgcgatcttgcgttgacagtcgtacgtctaccccaaaaatcagcaatgtacgtggattgcaactatttgactttttgttccatgtgcaacttaatctgtcaagaaaccccgagaaacaactctaatctcttcactaataaaataatccgacgagcataacgtgtgccatcaacttaatttacaaaataagaaaccttcttaaaaattaatcaaaaaagaaaaagaaaagttaaataatcaaacctataaatattcgtaacgactacaaagtacaagaaagtctcatttgagaataattgagcgataaagaaacggt

SEQ ID NO: 2280 - DNA, 2000 bp, Arabidopsis thaliana
tttattgcttattttggtttccacttgtaagctttctttattcctgtggcagcctaaacgaatcctacaatagcctgaagctcatccattttctgtaaaccagagaatgtctcataattcacaccactgggcattgtcttgcaaatatggatagaccagtaaccctcattttgctaattagcaatgcatggatgtatgaaatgtttattgaatcaggttagatggttcaaagtaggttgtattgtcggtcttagtggaacttggttcgagatagacataagaaccattatatatttatctcggaggtgtattatattagaattagaatctcactctaaaagttcttggacggagctaaaataacatataagagacatgtgcaaatccattcaaaaccaataaactcttcaactgtattataaatcttacaactattaatgtctaattttagctattgccactacggtctaaaatcttcgaaaccgtgtggaccatataaccctgatgagtgggactaataagatttttaacattaccccttagaatagaaaggtcctatgctatgtattagtacaaggaaatttcagcagccacgtttttttaccacaccactgcttatactaattaggaggattacttagcttggtttaagggtttagtaagaaaagtccatcttcttcctctctgtacgccctttgaatctcatctcataaagagacaattctttctagctcccatcacccttttgctgattgctgattagttttcccttttcatatcagatattatatttcgagatttgacatatataatacaatgttttcgataaactacaaaaccaatttcgaaaaacatataagttttgctggaaaaagccgtcgttgatcaaagccacacgacaggttttatgcctaacaacgttgacccattaatgaaaggactcaaaagcaaccctcatagtcacggcaagattcaattacttttcctcggacccaaagttggttcaatttatgaaccagtttctacgtctaagtcagtcgtctcaccttataatctttaaagtctcccgctgcactaatcactccgtttcatcgttttatatatcacttgattttattttatttcataaaatatttttttttaaatacagatttttcttcaactatgttctagacttctagaagccataaaagattacaatattattaaaatgcgggacaaaactacataacgataccatttaacgtacgaaatatttctaatttacctattcgtttataaccagattttatacctgtttagatgtttactgttttaaaaactacacattcatggtcatggaggatatgatatctaaaaccttaggattcaagctttcgcgttcaagtagcaaatcaggcctcttatgtatgcatctgttccggtcttataatcgaggattcacaccaaattaaaaagcatcgatctattcgggtttcatacaatcatactcatgggttacaacagtcaacaaacacatctatctggtcatctggatctcaaactcgcacctcacaacacaatatctaaccgatccggatctcatattcaattcgtggatcacaattagacacatctaattggatctcatagtcgcggatcacaattaaattcatctatacagatatcatactcgcggaccacacatcacatgacataaaacatcacactgaaccctaaggtttagtgtagtgtgcatcagccatggccgagtcaaaatgttaagattttttttttaccatttatagtaaactaatggaagtaaaaaccagtaatgcaaagaaaattcagagaaccaaaggaaatatctatcaagacaccaaaaattctaattgattaatcatgacaacattacgtcgctacccctcgaaccaacatctataaatagaggatcggtgccattaacattcatcatcatcacccacagcacagagacacacacaaaaaacccataaaaaaat

SEQ ID NO: 2281 - DNA, 1500 bp, Arabidopsis thaliana
cgcgaaaagagtgatttaagaaattttaagatgcttgtgatgtgaaaaagaggtgttagaggcaagacgtagctacatatttttctttggaacaatatattaattagacgacaactattgttactctgtttggagttaacgtttgttttgtgctatgttttttgaatatgatcgaaaagttcatgcaatctgcatttccaacctaatttatgggcagcacatttgtgcttttgttaaaatttgctgggcttattcattatactaaaccatgcataaaggcccattaaatatcttattgtaatgtgacggacgaaaaaaaaaacgtgagggaggacgatggcaattgcttacgatatattgtaaagtggatgtgacctgtctgtctacacaatattacaaagatggtcgctattactcctacaaaaaataatacaacgcaaaacaattattgaaaaattattcatcacttttgtatctttcaaactttcacagttcacaccacctaaaaaacagtaaaaagtaacaacattatcactttccacaacaaaatatctaacaactttgagtatacagaaatgtacatagtacatacgtataagcaaaatgaattttgtttctccttttttttcctggtgtatatcgttgcaaacttgcaattgatcaataaaacgcaaagatattatattgaacaaataaataatttttatatagccaagatattatatggatcctcattcctcaaatataataatttacatggcccgcgattatcatgaaagacgttgaaacgtccactaatcgtacctagttgttctgaaaatgaaatgatgattttataaatgatatggttttagacttttgaagttcttcatcacttattgttagatgaaacaacaacgttgcattcaaatctcaaattcctataaatcacagataaaaaagtaattttgttttacacgtctacgtggttacaaatcctaatcacgtaactaaacagtaaagttaaagaatcttgaaaaataaagatctactttacgttttgtagatatttttaattaaaagtgaacgtcaaaaggtaattggatattttcgttaaaatgttatcaatcaaactcggacaacaattagtggtaatttaactatttaaaaaccagactaacccattatcgtatagtgctaattatgaactatgaaccgattaaacaacaaaatttactatataaaatcatcaggtgcttttcttaatctcaacggttaaaaaaaataaccaattagatgtgtccacgtaagcaggcgtaccataagctaccaaccaacacatacaccagattctcaccaacagaggaaaaaagcttctactataaagcacacatcttcttcttcatctctctttcgctctcagaatcctcttttaagtctctgtttcataaataaaactaataaagaagaagaagaaaacagagcaattaaagtccttaaatcttcttcttctccaattca

SEQ ID NO: 2282 - DNA, 2000 bp, Arabidopsis thaliana
cctaaattgtttttgcagaatcttttcctgaattgtttttgcagagcctcatattggatcgattcctaacttgtttcaatggatgatgtattaagtacagagattgattatcctatttctctacttaatcaatgtttctttctacaagacaatatatacacaaaagatgtatttacggaaacaaaatcgatagagacaaaaattagaaaatctgttaataacatttcatcaccatccaattcagataaaccccaataaaatcagttaaaagctttttgatggaagaaagctaacccctaagaaaatattatataacgaacccaaatatactaatcttaaataattggaatcgattaaaattttcaattatttcttatccctctttgaaattgaagaaagagaggatgaaattaattcagatcaaacaattcaaattcaaaaaagctatggaggattaccacctgcatcgtcgaggaagaagattggccaggcatagatctgaattttgtaaggtgatggagaagcaatggacatcaatggtgagtttagaggcaatagattccatgccattagagaaagagaaagagagagaaataatcgcacatttctgagatcgattgatattgatgaattctcctcaattagattgaaggtacaaggagaagaaactcaattagattgaaggataaaacagtcatccatataatataaaagtatctaaatttgtaaggaacatgagatgttcctatatctacaaaagcacagactttaatatgctaatcccataattgatcccttaattgtgtgtgtattcaaaataagcccacttcttataggcaatgtaacacttgactcaaaagccaaagcagccacttaaatagttaagttacattaaacagagaagcagccttccctaagttaagcattcttaatctaaccaaatataattcatatctaacaatgttaacttctctttctattcttaataataacctaacaaattaacttgggtggtgtactattctgagtttgttacttgtcttgtccatgcacggctagtgctggtgctgtcttagaagggcttgaaggtacgtggctgttgatacagaaaatgtttaaagaggagacaagtctttgtcaaagtttgcggatgacggctatgaaatcgaaaacgaattttctttcagtttttcttaaaaatttttttttaccttaaaacaataagttaaataaataaaattaaatcggatttatcttctcggtcgtccgaaaatggcagagttgaatccaagaagttttgtgtgggagttgaggtgggaactacgaaattaaatataatctatgcgctattttacaaatttgttagtccaaatccactatgttgctaatatttaattacatgtttagatcctaattagtttgatgattatataatcaataccaaagaaagtgaagaaataacctaatttatcaacttgccagctagtgaagtagctccttggaggtttcagtaaaaaataataaaagtcgataaaaaaatactacccaacttcatggtttattattaaatgcgatgtggtcgagacaaagtaccacttgagtaccgtactaggatatgctcaacatatttaaaattttgaccaagtcaaattaaccagccagagatgttaacagttaatgtagtagccaccggtccaatgaaattgcaaatgaacaaacgtagcacctgaaaactcgccaccgatcacgatcagcacactttttatgaattggtcaagatattatcttctatcattagatgaatacttgcatgttagtattctctactatcagacggtgtgtatttttttatttatagggttgaacgctttattgtcccatgcacacgtaaaagtcgacctccccatcattttttcactataaatagtggttgatttcaagcagatttcttcaaactaaaacatatatacatcgaaaacaactaagtataaacaatagtc

SEQ ID NO: 2283 - DNA, 1784 bp, Arabidopsis thaliana
gctttgtttttcttgatagtttcctttagtgttgaattgttttgtgatagtcttctctcttcatcatgtgaatcgtgtaaagagtttgtgaaattggtcgttttttttcgttggtgggtttgaagttaatggtcatggaaagtgtcaatttagttgcgttggttgcacgagattttgacctcaagttttagacttctttgagggatttgaactatatgcctaagtctctttgtctatttttcctaattttgtaacacaatctcttgtgccgtcgctacaacttttggtgttctaaatgtttaaattgtggggtttcttaacacagggatgaaaacaggggatgcttatctttcctctggaatgtacatccacgagattgaaatgaaaaagttcttcaatggttattcacttctttggctaagaagactaaccggttcatatactcgagacacgtttagtggagtctataaaaccagaggacatgaacatcgtcttcaatgtaccacaaagattctatctttcttcttcttcttgtggttctctgagtttttatttttgtaagtctacgcaatgtatctatagagttcttgataatgatttgtagatagatacttcagcgtttgctaacataaaacattaataatagtgtaccaatgttcatcaataaatatcaaaattttatgttttttgaaatcttatgtacttgattcactaccgactacttaataagtaatcgttgccttcacttcaacttcaacaagagtgaatctcttttatgtgtctctgttccttttctggtgagtttgatgatagagtttggtcttcattgtggacttgtgtgagattatctctttgaagtcatcttctcgtttaaacgcgttttcttttgcgtttagaaaacgctcttaattttattttagcgcacaagtcaacgacgacaaacctatagggaaagcgacgccgttttctatttattattttagtagtgcgacggtgactttgtcttaatatcaccgacggtgacattagccaaaagtgaaacaaaacccaaaacacaagtttgcaacttttataacatctctctctctctagaagcagaaaagtcagcagttgattctaggacggcgacttgacttgacacctgaaaaatccttaccgtgtttgatagtttttcgaaaacccttcaaattgtttcattttttttaagtcttgagactttaaaaaatcctcgcttgctcttgttttaggtctcctgacaaggtaaagatccttgcttttgtctcttttgttcgaatctcaagtcttgttccaaagttttcttactcttcgaattctttccttgctagtagctgttttttttcctttttagtttctgcgtaatcacgatcaccggaaagactaatccttgtgagcttattgaattttgttaattccttgctttaaattgttcatgggttctgttgcaatctttctaatgatgtgtgcttagtatttaagctttgaaaagtctttgaatttttgcttgttatagctttggactaaagtagagtatggtgtcttcataggaaaaatttggaaacttgtgggagttgattgataagagttgttaagatggcaaatgatgcggctgcatgtgcagaaagggctacaaatgatatgctgattggtccagattgggctattaacattgaattgtgtgatcttatcaacatggatcctaggtatttgtaatcagaaaactctcagatcgctttgctagttttcagttttctttgtggctggga

SEQ ID NO: 2284 - DNA, 2000 bp, Arabidopsis thaliana
atgaatatatccctttataaaattagttaccatatgttctctttgttacatgttgttgaatcatagcaaattacaaatggatgataaacttatggttaatgagatactatagagtaatcaaaaccgtaagataacttaactatcagtataaatgatacattgaaaaatgataactacttgattaccatgatcggatgaaaacttggttaattaataacataacttgtactaattatcacagaactaactgaatcttgggttttaggatgatatgggaggtggagggaatgaagaagatttggtgggaagctgccccattagagcaaaaaacgtgcccaccaactcaaaggcctcattagcccccaatgtgcatttttgttatctttaccagttgcgttttttcttctgttttaaaaaaaaaaatatatctcatagtttgttttaattcaaggtgcatttatttcctggctattaaatctgcaattcttgtacaatagttcttgtctttttcatgaaaataggttttgttttatttgcacaagataaaatatcttcgaagctagtaaaatagtaaaagaaggaaagagtccattaagtttataggtgcatgtgggtttcacagagagttcagaaaatacaaatagaaagctatactttttacaatggagattattcttttgtgtaacgtttttatgtaagataatgtcattttataagttactaattcactcttttttattatttttgttggtgttgtttttctacttctatagatacaaaaacataatatttgagttgttttacactgtcttgtaagttctaattgattaatgttatgaacttagtttatgcaacgttctacaaacaaagagctaattttacaccagcaaaaatccctcaagtcctacaattatatgtccatcacaaccgagttcgaacaatcatataataattatttttgttaatgaaacgaggaacgtatgatatgagaaaaggtcatttcttaatttaaataaatgaaacagtgatatatctttggacgttatctctcgacttgtaaacgagtttaattacattatgcgactcaactttgtaatcaattatttaaagttctcaatttttgtcaattccgttacgtaaattattattagattaacaatttcaataagataacttctcttgaatattttccgaatatttcgttttaattagatattacaactatggttataaaaataaaataaaataaccgtaaaagagtcgtcgaatttggaatataatttgtaatagtactgtattctcctgtcagttttagacacgtggcagttcacgtgtcatatagtcataacccgtacgtttactctttgcctctttcccttttatattcaaaactcctttttgattttgtctatcttatctcgtgaatcgttaattcgttatcaaaagagcttaaaaagctttaaaaaattaacggattagtaataattcaaccgaagagaaacccaaggcaccgaagaacacgatttcagaggtatgatccggaaaaaaaaatccaaagttttgatccttttgttttttggtgagcaaaaaaactggtcctacgctagtcaatggacattctcctaaatttttgtctctgtttttttagattgtaaattataaagtaatttctccaactttctggaaaaatccatccagcaaaagaaaagaataattggttttattgatcaaagatcttcagttttcaaaattaagcactaattatggggttttgtttattaatgtcctaaaaaagagttacacatagagagacattaatgcttgcagtttagtttaaagagttttaagaccatatctcactcaatccttatttccttacatttgtcgtcttttgatgtcatagactcagagatatttatttatcttctttctctctcatttctcattctcatatttacttttgatctcgtggtgttagaatcaaagaaaccgcttcaagg

SEQ ID NO: 2285 - DNA, 1100 bp, Arabidopsis thaliana
ttcacacaacacactgaagaaaaagattacaccggagaaattaaatgatctatgaataaagaggtctggaaatagagaaatgtgagctcttaagagttgttcttgaggagcttgtgagaaagattaattaacggttaattacattgttgaatcaaattactggtaaatggttaggtgaataatttaattttatgtatttgatatccaacattgatcgacgtacgtacgtagtgaggtagaggcttaggttaggaatcaatcgtgaatactatttcaacgttgattcccgcgagctgaatattttttgtgatgtatagtaaaacgcatatgattataggaatcatcataaagattcttgtcatgaagaacaatattaaaccaaattatgcattacgagcaaaataattatacaaaaatactgataattataacttgggtcattgtattttctgtgtaatgtctactatcccttaattagtcggtttaaatcaggaaaaagtataattaatgacactcataattgtatcgttaagacttgaaagtgacggccaagaatacaattaagagccaattagtgatctttcataactttaaaaatctcacaaaagtagaaaaaaaaaattccaacttgatgaccaagaataatactattaaagagctatttaagatgaaaccgcccgaaaccaaaagcattcgatgggtacaccgattactgcttttagcaacaccacggcgtgaccatcaagactaattaactaagaccacattttaaaaaaactattaataattactacaatttgtaattaaaaagatcaacgagaaatgccacgtggacgaatactagcaacgccaagtggaaagagcgttcgagagaacaaggcaaaaccaaatacgcccctagtattctacagatgtcgactggataattacaaaagatttcaataaacagtactaattaatttctagtggtgagtttttgtaaatatctacttcttccaattaccagctgctatataaatccccttctctgtttctcttttcttacatcacaatcacacaaaactaacaaaagatcaaaagcaagttcttcactgttgata

SEQ ID NO: 2286 - DNA, 2000 bp, Arabidopsis thaliana
ctaataatcgaaaatccattttagtagaaaacaaaacaaaacagaaaatcgaaaattcaaacaagtgacaaaaataatattacgacccgtccctttgtttggttgccccgttcgtgtatttgcttggccgttggtgttcccatgcgccacttagcctccaaagtcttctctctaaactccttttttataccataatctctgtttagtttatacttaattgcgctttatcttcttaatcgtcatgtaatccataaaaatcttcgagatatttactttctcgacttaattaattaatacaatttctctatattaaactagtcaacaatatgctcaatatcatatcatacatatatgttttagcccacaggattctcactctccattttcttattattacactgacgtctaatttgacgttgattttaagaaattgaagtcaatatagacaaaatctatctgtgaatatgctgattaatacccttttatgtaatatgtatgtacacgtgatgtacttttaatcttgagtcatacatctatgatattttgcattcattaacatacaatttcccaaaactatgagcaagtttacgtgttacttttgtctttaatcatcattcaatattatcgaaaagttcgttgccatatcatatatttgtggaataaaactaggtaatattgttcttgttttacattaactaatgcatttttttttggggggcacacattaacttatgcatattccaaataaataaactattttgtcgccgtgacacattgataaaaaaaacattctagtgcttcgattgaaaattcaagtttctccaaaatttactctccgctgcatccgcactttacaattgtaaaagagaatacccagtattttgcatagacaaatctattttttttttttttgatgggtattttttatatctatgtcgtaagtacgttacgttagctagctagaacattccctagcaagaactagtagtgagtgaggaagagaaaaaagaactcagcattgcttatacaagagtccatgtttgtggatccaagggaaggtttatctcagctttttttcctcaagagaaaggtgtatcttgcccgtggttactcgattgttgttcgtattcaatttattaaattttatagcttcaagggaaggcatgtgtttcttcttttttaagtgcaatatttttgtttattacataaagtacttcctggaagtttcgtatagactccaatagggtttctctgacttttccaatttcagtgtcggagtacattaactctaaagaaataaacatgcatgaacatgctttttcatattctacatatattttgcagtctataattggtttttccactgtggtttacgctaaaataaataatatgttcttgttaaatggccacaaacaattccgacaccataaatgtgaaacttttaacaaaactatattatcaataactagctaaattatgatcaagaccagtaaacatttcaacacttaacgtaaagaaatgaattggctattgacgatataatttttttccatagaaaactatgcatatgtttgtcacaatttttttctttctttgtattaaagttaagtgttgagtgagagaggtatcataatcatagtaccctcccacgatattgcccacggatcgaatccttagacccgcattttatttttaacttcatatcgcattagtatttaaaagcaaatatatatatcctatgaaataaaaatctcccgccttaaaggccaaaccttaggatctaggtaggtgggtccctctactcagcgaccacacaaactcacatttgtcaatttctcctctctcttaatttattaattattttatttactcatctctgtaacgccccctataaatacaacctctcatttactcattcagaaaccaaaaaatttcacaaaccaaaccaaaaccaaaaaaatagcttatctctctcttatcaccggttcaatcactaaacc

SEQ ID NO: 2287 - DNA, 2000 bp, Arabidopsis thaliana
aagcactcgcatttcacagtagccaatcgattgattctaatctttgaacatgtaatacacttcatggccactctttttttccgggaactatcttttttttttgacatggaaaaagaccattttttgatttataacgtgcatactgctgtgtcttttttctaaataaatagtttttatcaaatatgtaatcatactagggaaaatctcatcaagatcatacgtatttttgtacatgacttttaaatagtatattcgccgaaaaatacgttgatgtctcggaatttgacgcctcaaaaacattagaatatacaaaatcaagtaacgagtttgtaggttgaaactaaaatgccacgtaatacagtgcgtagggtccattcgatgtttctagatcaaagtctacacactatagagacttccagatacagatacacattcgaaatcatcaatgaaaaataacaatttaagtatcttcttatcctaatgtgtgtgtgcttttttttagtcaactattttgtgtatattgtaagatgtatcatgttatgacatgagtatgttgctacgtgtcgtgagatatcgaacccaacgcagatatgagtatgttgagctagtttcttcttatgaaacaatcatatatgtctataatgaatagatcacattatctgcctgaaaaaaatcccgtatattactcgacgaaatataaatacccaatgtagctgattttgctttctctggtgacatatccaatttggctaaatttgttaactagtctattataggtttataatagatctagctatgttaaagatactaaagcatcagttacataaatttttggcgcgagtttatatcttttggaattaaaaataagagaatttaaaaataagaagatcattttgtttggccacaggagttctgaaaggtcaggtatgatttttttcttgctcgctcttatgattttgtttttattaatgggttttcaaataagaaaaactgtttttcgaagcccggttcagatccattgttttttgtaaaatataggcccaattcaccataagtccatgaccaaaacaaaaataagatagaaccaatactgaaccaggatcttctctcgctttcgtgatcaatgtcgccaagcttctcgagatcatgtggtcacgtcaattgtataaatacaattattgacgtaacacaatctctacagttccatcgaaatatctcgaaaatttccagttaattctggtaacgtgaacgtatcttccacctcttcaacctacacagctttctagaaatttggctcgcttttctaagtcctctgtatttttttgcacgtttttcaactaagtttcaatatgaatcatttcttctataaataaatgatattttcatcaggtaatgatacattgtgccgaaataaaacgtcaatactcattagtcaaattaattgttcacataatttaaaactgtgttaatccatccagttattttcttacaacaaaataatcttttccatcaacttttaaaataattaaacgcagtgctaagaaatctaaaatcttgatttagaaatccattatggtttctggtcaactgaaatccataatttcctttaacatccaaaatccaaatttgctactatgataatagatttcagacgattttttttcttttttcaatcatagagtccacacgaatatttgcaagttactatataaaacactataatggtcaacagataaaaaaaaggcgaatgaagatatgttacgtaaaaagaaaatactgtaattataaattattactttaaaaagctttaaaatctggccacatgtttttaaagagtggtgtgacgtaacgactagagtcagcacaatccattattgtatcataaatattctcatctataaattacctaaacccttacaggtagtgtcccaaccaaacaaatcgagaaagacgaacacttacaaaaaaaaatctctttgtgagctttagcgatcgtaaca

SEQ ID NO: 2288 - DNA, 1345 bp, Arabidopsis thaliana
tttcttttctcaccggcgattctctctctctgatcggaccgatgaagaagaaaccaaaacaagtactcacgtggtctcacgtgccttttgtcaattaaacacgttgtttgctaaaatggtccctgaattaaatttgtttctctactctacccccgttaaactatttttcacacaaatcatccaaggcgtctttagatgttaatgatcaaagaaattaggaaaatcaaatcaattacaaatattttagttaatcattcactctcacaagatcacaagtgacaataatggaatgtgtcggtgatctctaattaagcatatgggcaagtgcaataaatgattacatatcccatattaaaagactattattaaaatatagtaagaatatcattacaaatacaaattcgattgctatctaatgacgaaaatgaccctagatcgtaaatgaaaggtttgagaagttgagagccacacatggtacctaacacgtataccacaatcgcaaacgtaaacgcactgtagccaaccgtcccttgttttacttacctaattttgtttttaacttcattgactttattaaaaatcgtcaataatcattttctattcttgtttttttttcgtacaatcgttacttcatacttcatattcacatttttagtcttttataattataaaattccattttctaaatcaaatctagactaattttagactataacatgttagtaattagctgacatgcgaagttaatgtttgacaaaacgcgcgatcatcaacacgcgagtcaagtcgtgtacctacccgctattgtaaaagagtgaaaacgagaagggtattttcgtaagtgcaagcagtatataatgaattcccgtagactcttccctctccaggagtctttagtgttcgttctcttcttcttctatttttgctgtgtgacgaacgagaagactcttttttgaattttgattcttcttcttctccgtttctttcgctacttcctcagcttcgtcaccgtcgaaaattcttcacgttttcctcggaattttccaattgtcttctccaattctcttgcgatcgttgaagatctgaaaaattcgaaggtatgtttcctgaatctctcgtcttcctttatactccattatctcgaattttacattgatcataatgcttcactgagtttcatttaccctttcgtactctctctctttgatccgatggtcataatcacagaatcgagatttcggatctggatctaagcttttatgcgtttgatttcctagatctactgattcatttctgcgtatttgagtgtttatgatttcattcttcttaaacgcagcgtttgatc

SEQ ID NO: 2289 - DNA, 1616 bp, Arabidopsis thaliana
gttttaacgaggagttacttgactttttatccctctttagtgttatttacttagttttgcatattaaggtgctatattcttaaatagattatcaaacatggtcagcaaatcatcctaaaatcttatatataaataaatcttaatgaacaatgcataacttgttactccagttttgatttgttttttttttccttaacaataaaatttctattttgctgaattatttagtgacttttgacgtcaaatgaatcaatcccgataaagtaatgtcatttttttcacacattcgtctgtgtttgtgtatgtgtgtgtataagttaataaaagctattaaatgttaggtgttatgaaaacgtccgtgagcatcatcacttcgtcaccctaagaacctaaatagaaataaatagaaataaacttccaactttataattattcaaagctctttgggtttgttcttaaatgcatacaccttcctatttcctaaaaagccaattactaattaatatctcaccacattttttctgctattattttaaatagtttttcaaatgttgacagccaaaagaaataacgaaaacataatgtcggtacagttttgctagagattgtaaataaacaatctagaaagtgttactaatatgaagtcaacacggcaagaaactcgaaacagcaactggaaatttcaaacaatattaaaactcgaaacagcaaagaacaagaatatatttagtgaaattattgagtaaacattttgaactaattgaatcgatttttgatggcagaatcaatcacggaagccaaaaagagaatatagacattaatcactaattaaagtcgtaagggaggtttgaaaagtaattatggagagacgcttcggcaattaatgcgtctcattttcaatctctctccctatatctatcgtagagtatttaataaactttggctctttcgcctagaattcctctcctccattcgacgattcctcttgtaacaattactacaatattagtctactttcggaaatacatatttcgagactgattttgaacagtgtttcaagaaaaatactgctcgagtagaattatcactttatcaggtcgtttgcatgaaaatcgcatcattttgtatgaaaattcatactatttattttgcaaattaaatagggatttaaatgtgagaaaaatatggtaagggtatgaagaaaacgaatagtgagaaaacgtgtagagcgtgaaatagggaaagaaaaaaaaaggttagagatcaacacacattaaatacattaaaatttaaatgctagtcaataatggtacaacgataaatgtaacccctcattaaatactattagctctttgcacaccagagaaagtaaactaaaatcaattttgaaaacgaaataaaaacgaacatttaatcgtataatatttaatactagtagtaatcaattgaattttttttaaaaaatactattatataacgtgccgcatttaattttgccccatagactttaaaacaatttctacatttcggcccttaaatattggctccgtctatataactctctctgcgtttacacatccccccattactctctctatctctcgatgattcttgat

SEQ ID NO: 2290 - DNA, 2000 bp, Arabidopsis thaliana
agaaaacaaaagaaagaaaatcatatagatgtgaagcagacacgtttaggccacggcaatgacaaaacgtggcaccttgtaattctcttaagctccataattttggcttattgtattaaatagttccatatggtgtttcttatttttttttggcctatttggctttttatgtggtgttgacaattataacttgatccctaagcaatatctactttggatataatacaaatggagcaaaaacacaacactttcatttttgaagaaaattatgtaaggtgattgtgtgtttattagtagtcccaatctaatagagagaaattaaattctaggagtgatcattttctaggatagttaaaacttatggatgactttcatatgagtttagatctggattttggtggggggacataagaaatatagatgcatatgtaagtgtacacaaatgaatgggccacttgacacctaatgatacaaattttcaaagaaaactcagattgcaataatggaagcatatcaatagtagtatgagatctcaatctacaatcttcaataacatttaaaaaataaaatccaacaacaactgtagcgtataggaattgttcatctcttttcatcaaagaatatttaaaattttgttagacaagaattaattaatgatttatatggttgagaaaactttttaaaaagttgtaaaactcatcgaataataaatcatttttaatggaaaatatagtttttatttttattgtgtggtattgctcggactcaaggatacatggagagagaggcagagtcaaatccaatttttcaactatcttatatgatattcttctgtgctttttatagtttgcccgaccataagaactggtcctaactttcattttttttgtttccatagaatatgtattcctatgatttttttttatagaattaattgtgttagttaatgccaaattaagattctcttttttaaaatcactttttgaagaagcacttacaagagagttgtgttaagaatagattccagatggaaaagttggcaagaaaagatgttttaagtttttgccttgtcgtctaatccaacggtcgatcttcgttcatatcaagaatccttatgacgtggaccattctcttccctccatctgtacctcttcccaacctctattttttaatttacatcgaaaataaataagaaggattgcaaaagaaaaaatagaaaaaaaactctctgttcttctttcttcttcttcttcgtcgtaagccattaccatttcttctccctctctctgtttttctttgttgcgtatctgtacttagttttcaaacataaaaataaaacatatctttagctgatgttgtcttcttcttgataaacagattttctacagctttttttctttctaatttaataattcttgagactttttaaaaccctctgcgaaacagatgattcgagttttggtttcttcatctgtgttttgattttttcgtcttttattcttagtcaaacacataaatttcttttactactcttcgtagatgacttctcatgttccaaaacatcctcgtaaatgtactctttctctctttctttcctacacacacgtgtttaatctgtgttgttcttacacgtctttttaacttttgcgtttgaccttttatctgaatcctgtgtttgtgtgtctgtaaatatatatatgtgtgtctatgtgtatagtgctctgtttcttgtgattagactcatatgtcttattttcaatattaactataaatatataagtcacgcctagttattagtttttatcggtacgactaaatattcagacatcagttcacgtttcaaacctgtctcttcacatagttaagaaaataaaggcatcaaaaagattactagtaatgtttgtgtctactttatacatacatatgtcttgtttctttgtgtttttcagaatctgatctcttcgggaacgtttgtttaatttgtttcagcctttgaagat

SEQ ID NO: 2291 - DNA, 555 bp, Arabidopsis thaliana
caccacttcccaaacttcaatcgaacaaagatgacgaacactagtgagatcagaagctgtgaagaagctactaggcaacgaaattatatgttgtcaagagattttttacaagtaaaatatcttcaaaattggatccgtcaaaaatgacaggtgggttatttgactgtattcgagtgggttaattattaatgacgtgtaatccacgtggcagtttaaccgcatttgccgggtttgttcgaaaacttccgttttttattctttacccaaattgccctttaaaaaataacataaaaattggcttattattattttatttttccctcccatgataacagcatttgtcaaagtcgtctttcttttttccttgtcgagagttttgcttcttcatctaaaagatctatacatcttccccaagtagatatgtttcataagcctaacctaacattcttcccctcattcgcgtaggatctgttcttcccaaaacgactcatgccgtccattcgattcggaatatagttgtagaggagatttcatttctaatcaatttcttcggtg

SEQ ID NO: 2292 - DNA, 476 bp, Arabidopsis thaliana
caggggagacaaaagtcatgggtttttgtaggcgggttctctgtttcagatctctcattgttaatacttgtctgaaaatataatggaaatgatatttacgtctttaaatcattgttagttcatttttgttcgattacgtctttaatgtctccgagtaaagcttacgtccttatcctggataggaattaatctgtcccgagtattcctacgttcttatcctggataggaattaatctgtccatgtatccaaacatcacctctcagttaatatctccaatttacacgacgcgctaaaggtgagaggagatctcacttgccttcttcactcactctgcagcaacttcgagatcaagttaaaggtcagattccttaattctccatttcttatttgcttcgttgcagagaagaattaggttttcccgatcttcggattctgattctgattttcttttgcgattattggcttggcgataaga

SEQ ID NO: 2293 - DNA, 2000 bp, Arabidopsis thaliana
tactttttttgtgaaatagaggttatgtgtaataagctaaaagacaaaaaatatgtcaaataccattttaccttttactttatatgaaaaaatatgggtcaaactttttatattatttaactatttagaactatttttattatattatagttattttttttttcatattcatctttttgaattttataaaaataaattatttttaaaaaataatttcttcttccaaaaacaagatgatttatatgtttttaattataattctcgtacaccagcattaaaacatagttttgtacactaacacttatacaccaaatcattttatacatatcttctaaaatatttctatttatctcatatttataaaataaaataataattgttcataaattaataaaaatataatggtgtacaccatcatgtatactattaaattaaccataatggtgtataccattaaatgaaagtaatgattatacatttttacttatgtacactaacatttgtacacttttatgtacactaatctcatattattattatttaaactttgttttgtatattatcacttgacaaaaatggttttatcttttgaatatgaggtgtacacaataggtgaaggtgtacgatattatatacggtgtacaaggtgatttatggtttgatttattatctcattattgcatgtatactattaatatcatgtacaccatattttacattttcgtacaccatcttattatgtagttatacatcattgtatattatcgtttgtacatcactttgtacactgtctataccgtataccacttcttagatcattaagaaacaaaagttatttttgactttatttgactatatgacaaaacaacagaaggctataaaggtcattcactaaaatctctattagatagaaaattgtattagaaaggaaagagaaaagtgtctattctccctatttctaaaaaaactacttactttgcaaattatttgtgaaaaaagtgtctagtttccaacttatctctattgttttctgctacaatatttaataaatcgtactttctcctatacctaaatcaacacggcctttatttgttagagtatctccatgggatagatacccttgctagtttctcaacaaaagaaaaaattattattttaattatataatatattttgtttcaattataatacttaaactaatatttgattgacatgccgcgatttaggctgagaatcgtttctccttgattctcaagtgagaaactcttcttccactctctcttacttttttacttttgggttattattttattattaagtttctcattcagaaatgatgaagatggccttacgtttacattttaaaacaaagaagcatgtagtacttttgaatattgtttctcaccattattgtacttgtggaaaacacaaaagtagttgttgttactttcatcactctatgagcaataaaaatgcagtcctcgatgaaaatgtggctaagaaatgttagggaaatgatccaaaaacctttttgactaactcgttttgacctgtcattactattattacatagttatctcatttttggtctctattgcaagaatcatgaaatcttcttataagagactttggtattacccacaaaacaacttaataattttaccttttgatattatataatccacacaactaacatgaactaactgctgacataatcgtcttaacattaaaaaaaaatgaaatgaatgcatgcattgcatataaatgtacaaatgttggcttgatctcttgacccctacctaagacgtaagaaggtattttagagctgtgaaatgtgtcaagctgagtctcggagtgaaaagggtccggtttagtgaagccaagtaagcaaagccccttgtttttgacggacattatatctcctcctcttctcttctataaattgggcacctttttccaattttacgcacagtcacggagatagatagtaagagagagct

SEQ ID NO: 2294 - DNA, 2000 bp, Arabidopsis thaliana
atgtgatcatttttgtataaaaggaaacaggaagcttaataataagttcaaaaatggcgtggcaaaggcggagccgtcggaggatttttagtttacgagaaaaaaagaaaaagagagaaatatctgaaaaatacgggaaagatgcaggcagctgtcacagccgcaggtaaagagaaggtgtgtgacgtgtctcaataaaacaccgtttctctctataacacgattctgtcattatgtgtctgagcaaaagtgcctccttatttacatctctagaaccgtttactattggccacgtggaagatatcggtaccgttgcgttgttaaaaagggttactagtactcctcgtgaaatgatttggtcccacttcacaagtgttaatgtttctataagaaaaaaaagagaataaagaaagacagaatcgagaggagagagtatcggatcttcctaagccataaacaatgcagcaatacgctccatgcctttggatatttcttcggcaacttgtaaaactgacaatcggagccgtctctttcatcccacggctctcaattatcctctcgaccatatatatcatcgacaacgtgtatatatgtgtttaccaaattatgttttttattttatttttcaaaaaattgcactattaggtggacctacatatgggttcgattcgactccaataaacaagctaatgatgccgcccgatgaccattcaaatattgttggtagtggctttctcctaaatatttgcattttcttaaaagaccctctttgaaaaaatcataattgaaacacgacgtatcacctacatgcacctcttgaaaaatatttccattttattctcaacgaatgtatttattgatgtatattatttcacaacgaaagttcgcatatatgttttctaattggtccctagaatataattatgcgatattaaagttggatgcaagggaaaaaaagataattctgaaaaaaagataattctgaaaaggataattctgaaaaggacaaaatattcctctagaatgtataagagttggtcattttttttttttggggtgaaagtaaagagtttggtcatcttatttcgtttgacgtccttattttggaccgccgtcggaaataagcggtcaactctgaggaggatgcaaattcttttacgtttaaaaaaggggaaaaattgacatcaaaacaattgagtgtagatgactactttattattgaccaattacggaaattcataaattgaaatatatattttgttttgacattggccacattacacgaatattttttttaatgaaagtttatttttaataagttttttaaataataataataattatatatatattttttgcatttgtacccgaacattacaagttatgtaaaagtcgatgaaggcactattttaaactccctcagattttgaaaagccttgaaaactaatattttaattttaaaaacgacacgtgatttaatatagataaagtaatagccaatttagccaccaactcaaagaaaaaagttgtagccaccaactacaaaacctcacaacaacaaaaaaaaaaaaagaagaagaagaagtaataccaaaaggtcattacagtcatttgaagggtaccctcgagactatttctgtgttggctaccatgaaaaagctcacatgcctcaacagtcaacaacaccaccgtaaattgatctaccccgataccaatttgataaatgcgaaagattagcctttccttgcattaagcacaagttaaaacagtgagcgttaccacatttcatttacaagtgcaaaagaaaatttcaaaaaaatcctttccttttaccggatatatacacatcaccacatttgttaatattcaattggcgatactatattctttcattgcactaaccaaccagtctcctttatcatctctccatctcatcatcctcctccatttctctcccattttttcttctgtgtatctgcgggagagagtgaaatagagag

SEQ ID NO: 2295 - DNA, 2000 bp, Arabidopsis thaliana
aattcgaatatcaaatataaattacttataggttcgactgtaaaatgagatatgaaagaaagaaataatatatgatgatgtaatgcatgagaaagtccaaaatgatcggcatatgggattaagcgattccatatagttaagtcaagttactatttcagataaatggataagtttgtcgtctatatgttctgttatctccaaacccaaatctataacattgcgacatttttgaatcgttaacggcaaaataagtggggaggggggggggaaggaaaaaaggaaggacactgagattttgataaagttcggtagccaaatttgtgcatgacttttaagaaaatacgtatgctgatccaaaaacaaacaactaaatagattttagtttgagaaaatcgaagtaacaaaattattatttaatatatagtgtgagaatttaacagctactaataattatcataacacgaattaagtgtaatagtaatatatgtaggaaaatggtttagcaccactcacttgattaactcgacttaaaccaaatataaagtaatatttatagatgtagttggttgtatttttgcaagctttggtactcgatatctaaatttttaatggaaaaattagtcgagtggtaattcgttatatataagaaaatattttgtttgtaattgtgcaaactttagcattggacatctaactatattctgaaaaatcagcggaatgataaaagttcggattttccttctttttatttaagtaaacataattggtgttctgaaaaccaaaagaaggaagaaggcaattaagatttgttaaagttcgtcacgatattgatgtcaagaaaaaaggaaaaaaaaaaaaaatcgtcacgatggtatcgtcaatttgtctagtggattttgaaaagccgtgtgggcttgactttgaccgaacaaggcacacgtatacatctagtactactgaagaaatctctcattagaacgcaaaccacgttccgcacactcttaatatactattagtctattactatcaccaactagttgtcattttttttgtcaaacgtgctaattaattcacaaatagaagtattaaacttcctaattaagcacgcctttactacatttcattattattatacatgtaatcaaccatttcttttatcccacatgtcatttgtagtcctgattttatgactttatgcatcaagttatctttttttttgtcactccatgcatcaagttatctaaacaacataattattgtctgaaaaatctaagatgatatacaacatatgtatttaattacacattaggcttgtttaacaattcttgattatttttactctttttgggtgagttcttgatggatgtcttgaattacaaaactacatattctgaaaatattaaccttgagtttaggccggctatgctataacgaaaaataaataaaagcaactaacccgacagaaatgtcaaccaactatccaaaatgaaaaacaaacgtggagagcgtcatattattagtaggccaatcacacaccaaatgtttgtttaacaaaaaaaataagaatgtcaaccaactatccaaaattaaaatcaagaatacatttcatatgtttccaatatgtttttcttaaacaaaattgggactaaagattggaccaaatacgtgtgcgggtggacccgatagaagccgagttgagtctaaagactaaaaagtaaacaaaaaatgataagaccatcacttagtttattgcatgaaaatgaaaagcacatgctcctctctctctcttctgcctctttccatctagtttcctcttaaaactccattatatatagaaacaaaatcttttctctcttcaacaatcccaccattaaaaaagaagaacccaagatcgactcttacttcgaatctctctcaactttcttcctcagcttacgggaacttccacacatatacatccacaagaacccatatcgaagattcatcctacatatatttac

SEQ ID NO: 2296 - DNA, 2000 bp, Arabidopsis thaliana
ttttactaatcaaagtaattacgaatcagctttccataatcatatcatcgtccaattttattcattactttgctttaggaaactctattcatcttattcctttctaaattgttgattaaagtgatttgaaaaggtaataatctcgtgcatttgttgctaatgtgccaaaatatatttgttttggggttattcaccattttcatgtgaccttgttgtatgttataacttataaccgttgggttttttttataactctttttggtaatattatatatttatatatattaatatacagtagtagtagaaaactaaattatcatcagtttgttgcttttctttaacaaaataaccaattaactaattaaattatattaacattgtttgactgtttgtagtgggtatactagtttactaaataaaatatttttgtcaccagccgtactacaatagcctaatgatacgttaaatttaatcatatttgcgatcattatattgtgagtttttacattctaactaataacaaaaaaatactacctttgtattaaaaggtaggatgttttagctaaaatgcatacacttgaaaaaaataaattgtttttgaaaagaagtattaaataatttaattcaaaaaaattcagccaatgatataaaggctgcataatacaaatggtcataaaatatcaaaatatttaaaatttgcataaaaattggtaaaaagtatatattattttaaaatttttctaaaacatcttataatttgatataagggaagtagtgtttatggaaaatcccgacatatatgtaaccacatttatggaatctccgtctctcaatttccagttagctcacatacacaaattgtatttactcgttgacaaacggtttatatagttgataatgcattagatgtatccataagaaagtcgacaaaataacattgaggcgatcattatagtgtgagtttttatttcctaactaataacaaaaattttaagatagtgataaatcttactctctttgtattaaaatatttttttaaaaaataattatttaatatttaattcaagaaaatttgtcaatgatataaaagattgcataataaaaatgatcataaaatatcaaatgtatttaaaaatttgtaaaacatgatatatattttaaaaaaaaatcctaaaacatcgtatattttgatataaaggaagtaatgtctatgaaaaatcccgacacgtatgtaacaacatttttgagaactcggtctctcgattcgcagttaactcgcatacacaatttatacttactgcttgacggatggtttatatagttgatcatacatacatccatttgaaagagcatgttggtcttaattgcatcaaacattcttatcaacacaaaatgatatacatggcatcagataaaccatcacgaacaaatacaattttgaaaggtaatacacacaaattcactaacactattaaggtaatacacacaaacattcttatcaatttcatgattttctattaaaatgtcattataaaaaaaaaaaaactgaaagaaattggactgaaagagaaataaatttaaccataattgtttggtaaaaatagtaaaatatgccaaaaatgagatttaagaggaaaataaaaagaagaaaaaaaaaacagctgtagtctacatttacatacaagtcgtggactaacagctatactactactaagtactaactctttctctctctaaatatcaaattcaatttaatttttcttctgcaaatggaaccaccgccttcttctctgtcctccaccgcggtggcttccacctccatctccgccgccactgctcctgttcctcctcctctacctcctcacgtgacttcttcttaccccgaatctctcgactcctcccctcgttctcgcaccaccgatggctgggatgaccttcctgctccttctggcggcggcggtggcggtggtggtagcgccgtctcttctaaacttcgtttt

SEQ ID NO: 2297 - DNA, 2000 bp, Arabidopsis thaliana
cacaaattgtgtgcaatatcgtattaataacaataaaaatggaatatatatatacttaggttattgaccaatattgacgacaaaaatttcaaatgaatgtatatatattcgtcattagtggacgaggaaggcaacttcgcaggaaatgatattgcgagcttacatacaaaaaatataaaggccacatggttttcacgtagctatcacacttaaacgtgattacgtgacgtaccttgtttaactaacgtaaccttcatggtcttgcttttttttgttcataattattatcttcatggtcttaccacgttctttgaacgtttcttaactcttgacttctaatcagtagacaaattattacacattagacacatcatatatagacaataggcacattattattgtatgtagtgatcaaaagttcatggtaaatcttttgaattagtcaataactgtagcctaaacattaaaaacaaagattcaaagctacatatttccgactgacttttaacattgtacggatcggaccgtcaagttgatttaaactatgattagtgatgatttatggaaaccctctctaacgtacatgtggagatattgtgtcagctgttatgtcattgtttatagctttccaagttgcaaaggagaccatcattttggacttttttctttctttcttgtaacatctgttaagtatcactagctagacacttgctattaggtccacaacctcgttagtggacggaccagaccataattaagaaattagacacgagtgaccgtagtataaaagattaaaagtgagtttagaaatgtacctgactagtacaatttccagatttcatcgtgacataaaaggtgcatctaaattataaatgatggataataattgtcttaagcatgcaccgttaattttccgtgatcaacgtaaaaaagtagcaatcgagtaataatatagtaatgcaaaagacaaaatgattatcgcaaataattaaccaacccattaagcttataatgcatgcgtattatatcaatcaaatcaaagcattaatatggtccacaagagtagaagacttgtaccgcgcatccgcatgatgttgttaagttgaaaattgcttacaaaagtcctgtttttttcaacctagaatccatttcccacaaaagttagcacttttatcactgttattttccttttaaatactagcgaccctcgatataatctaaagaacgttaggtatttgtaaaatacaattttggagtttatggcatatttttctttcttacctccgctttattattttgtcttgttcatattttagcgagtctaagattttgaatggatgcagcggacaaaacggtttaatttgtctgctattcagtctacttcatttttgggcggacaataaatcgatgcggatcaaatttatttatatgtaaaaacggtccgtagatggtccgttgcggttttcttctattattttttatccagaccactgcgtactataattaatgaatggtaaataaaaaaaggtttgatccattgacgattttgtccgccttaaccatcataaccatccaaaccctaattctaaaatttcaacgtggcagaaaagaaggtaattgaataacaaggtgatatactcttgaaataaacatgaatctacaagctatacttaatagttgcatgtgatgcgcacgagtaccatcttgttgaaatagtggtagtacaatttaagagaaatccaaatactaattaaaaaagccatcatgattaaaataattaggcttgaaatcgtacgtagtcaaaaggtttgtccattaattaagaaattaataaaaatggaccatcatttccacgtatctacaaatctctcttacccccatatgcacatgtctgcgaaccccatcatttaaagccccaacgtagcaacctcaccgccttcaatcatcaaacatccaaactctatcctttcgttttcttgtcagacaaaaactaatactag

SEQ ID NO: 2298 - DNA, 2000 bp, Arabidopsis thaliana
aagctttttcatttgatacattatcactttcaagtgaggtcaactctttaatcaatgtaagttgattttgcaattagaatttgtggcgtagcaaagcgcaattagtttattcatttatttcaattgaatgatgaaagttataagtattgaagatatttgacctttggtatagaagaaatactcaaaataaaacgttgactttagtgttgaatcatacttcctttgtttcttaatatttgtaatttaaggtttttacaagtaaattaagaaaatatataaattttatttaatttatctatttcctataaaaacatcattagttataactaatctaaccaataagaaagtaaaatataattagctaaaaactattaaatatatttttgtttgcatagaaaagtgagaacaacacttataatagaaaaaaagaaatatttaaattacacttagttagaaatcgagaaaatataaaacaatgcgtttcagatataatggctcttcagttcgtgatcggcgaccgaggaaaccaatctatatagaacttagatataggtttaagtatacttttcatccattttttgagcttcttaactcgtagaagaatgtttgttataccttactataaacatggatttatatgcactccttcttgggttgttttctcttcatttactaaaatcagttgaccaataataagatataaaaaaagtacccaagtctacgcagttgttacggcccattagagtaatgaagagacaaaaagcaagcaacacaaaaagcgacccaacttgagcaccgtcacaaaaacggcgtcgttccaaaggatggtcaacaatggtgggaacctctgcacaacaaagagactttcctcgagatttcttatattcgcctgctaaacgctgtcgtattagtgggtagatgaaaaagacagaagggcaaatgagccgtgtcttccataattctcaacaagataagataaggtatggctcgcatttttaggtattgtttaatcttcggttgcgtttcttatctttttttttctcctaattttcatttacagtgatttgatttcagctcattcctgattttcaattttctgatttcagcaaaaagtccttatctatttttttcatttatttaaggcaacttgttttctaaaaataggaatggaaaaataaaccgaaccgatatatttaaccgaaacataaaactaaactaaatcaaattaaaaattagaaaataattgaatagatactaaattctttaaccaaaagaatcgaagctgaatcggtgccgaaccaaagtattttggtaaccaaaaatatccaaaatataattatattttcaaactaaataattaaaaattcttgaaaaattatataaaatagtaaatttattagaaattaaccaaaaatattcacaaatattcaaaacaaattaaccgaatgaatactaaatttaaaaaaaaaaaaacagaatcgaattaaaatcaaaccgaaatactaaattttaaaatcgaaaaaattaataaccgaatggatacgaacggaaaccgaataaataaccgaaaacacatgactaaaaagaggtattttcctccataattaaaaggtgtttaataatagagtgatcggcgaaaggtgtgaaattagctgttttgtcttgaagcggattcatatataaaagagcgtgtgccctctttgcttttaatttcagacaatcttcttcttcgttgcagcttcgtggaaattattttctctttctcttccattattatcttaaaggtccgtcttttatccttcttctttttttgttgttgtcctaaaattagggttcttccttgtgaatattgcttgatctaggaaactaatcaggatctgggtttgtcttttggatctagggttttattatagcatttctgggttctttgttgaccaagaagaagatttgtattgatggaatgttgttgatgttgttgtgaacagtgagaaatcaataag

SEQ ID NO: 2299 - DNA, 1595 bp, Arabidopsis thaliana
ttcttctacacagttaatacacatgtactcttaccatatttcgttaataatacttttagtgtattagtgtaataccatacctcaaacaaactcatcacagataagtctctagggaaagaatgcttgttattggtgagatatacttttcagctcacggtgcactcgatatggaaggaacggaatggtcgtcgacatggagaagtacctattcatatctcccagttaactcgcgaactcgacaagcaaacccgaaacagaatcttttctattcgagagctaggtgatagaagatatgaagattctatggcaatctggtttggttcaaaataatctagacatcttcttaattcttgctcaaacacaagctgcacttgatgtaaaacagttttttttttccgaatgattttacataatattccaaaaaaaaagtaatataccataccttacctatataaaaatcagtggccaatttacgtagttagtgttaggtggccaaacaattctgaattctcactctcaacatctgtattttttttaatatctaaaagttcaaatctacattttctagaggcgagatccacacataaagattcctcccgacgggcgtcgaacctaatacttccacctctaaaatttatcattggaccaacacaaagttggttcaaaatctatattatccacaacattttaaaattctttgcttagtaaagtagagaagaaataatcgtcatctttatttaaaattgatgactgtagtataagcaattaagcatctcttgactacattattgaaatatactccctaatatacacatggctttgtgattttattatagaaaaaagtgctctataatagatgataatccagaggagcatattcgattctaattaggtccattactgtcagattttccagagatatatatcattaccgtttatgcttttgcgtgacctttaattatgaatcacattgagtaaaataaaacattattattatgaatccgatttctctttgatcaattattattcaaattctaccttgtctaaattattattattttcgttagtcaaataaaagtaattttataaacggacagatattaaagccatgaatgataatatagatcgcattcaaaaccgcaccgcaacagtactgtaacaatatcaaaaattatatatatatatatgtatttatgtatttttgttaatatttgaactgtaccgcatttctccaataccgcaaaacgcagtaaccattcgaattaaagcataaagacaattcaaatttggtattttcatatcatttttatttttgactcgttttatatacaattgttttttgtctgaacaaattgacttttaaatgaagaaaattaggagaaataaaatgaaacggaacgagtcatcatcataaacctcgcgtcccttttttttttttgcttccttcactttcttcttctctgtttctcgtgaattttcccgtgaattttcgcggagcttttctcgggaaaataatctaaagaagattcgagattaagacacgtcatctccggtttcgtagagagatctgaagaacgagtctcttctcttctccg

SEQ ID NO: 2300 - DNA, 2000 bp, Arabidopsis thaliana
aataaaagtatcgttcgtttttctctactaattggtcgaggttgttatttaaaaaaaaaaaaaaaaaaggtagttaaattagttaactagatagagcttggagctacagtaacattaaagaataaatgttcccatgtggcatctatctttatgtcctatcctttttttatttttattttcttgtaaatttaactaatcgagtgtacattttgagccaatctcgccacgaattcctacaaagttaaaagtccgtaatcaattaaaatcatgattatgtatttgattttattttggttcttgaaaagttgactaaaccaatatggaccctcctcatagtcacagataatgttaaggaccgtcttctaaaagaaggcaacagaagtcgttacctccatctccatcacaattcgtaaccaacattcttcaaaagaccaaactaaaaatatttatatacatcaattggaaaatatatttaaccgtggataaaaggaaaattagtctatatataacgagtatgcgtgtgtatatacactacgtcttacgcaataacaatgagtcggctacctccccactatacatataagtcatcataaccctaaagtatttgctttagagagaaataccataatgcggagtttcctacgtctccttaaaaacatggttggtccaataccataagaagttaattccaaattgataatcttctaacaaaatgtccaacagtatacaaaaggtttataatttgttgatcataaggtttcatatacgatataagtgatttgcttgttatcaataaattaatgcgataccaagtgtcgttagcttaattggtaaagaccttaggcgaaacttagaagtcaccggttcgagtgacgtttgggacaaaactaatattacatactgtggtttcgggcatggggggattacgggcttcggccagaacctcctgaatttaaaaaaaaaaaaaaaaaaaaaaatttaatgcgatatagtcacgtaaacattcattggtattagattacaatatttgaaccttcacatcatatgtacgcactaatttgattgaacgttgaaattattggagatgaatggtttttaagtattgcgtgaccgaacattacactaacgtattaattactttggtacgacagatgaaaacaccatccccacaatcgcaaaataaagaaggtaggcgaatctccatggaatctcccaagttttgtggctcccattagaatattaaggtttttggtgtcatcttattacaagtttatatccaccatttagtttaaacatctattacgcaattataaaatttcgaagttaattatataaacattcattgttttgtataatatatactattgaccatgtgatgcaatatcaactttgatttttaattggttgtagttaatttgttcgcaagattgttcgacaatagtagctggtttagtcttaatgtttctttttctccatctttagatacattatggatacgaatggtgatatacggcgcacccaaaatcgtatcgcaacagtgctgtaacagtatcaaaatctttacatatacatatgtatttatgtatttttgttactatttgaatcgcaccgcaaaatgcagtcatagtaaaaatacatttgaactagtgtatttatttgaaatgatatcttaaggatagaaccaaagatatactttcctcctatcaaaaaagtatgtagttccataacgacatggctcatcgtaatgtgaaactatataggtcttactcttttactattactattttgactaaagattataaccgaaaaaataatatccgtgatttcacacatatcagacaaaatgattagtggcaatctagcaaatccaaataataaggatgggtaaaaatgtaacatgagaacgacccatccctataaggcctacataaaccgccaatcactcctctaaaaatcttacgaaagaagagaacaaagaagaaattttgaaaatagtgaaa

SEQ ID NO: 2301 - DNA, 2000 bp, Arabidopsis thaliana
acatagtctcgatttttatatagattattttctgatttttgctgatgttttatataaaacaacagagaggtaaggaacaaaactatattttccaaagttggacgagttcattcccatcatcatcaaccaaaaagagtgataaacttcggatacaattttattaatatcttatatatttattttttgaattagtttcgtaagaccacactccaaagattcatgtcttttcatataaccagttagaaattgagatctttgtacttacatttttatttgatcaatcaaatcttcttgataactctaaattgttgtgcaatggtctctcctttattgcaatgttacatattcctagtctctattatggattaggtttataccaaaagttaccaattgcaaacaaataataaatcaaagaaaatgtttgaaacataggaacaagtaatgcatcataaaacctaaggctaacttcaaatctctgtgatgatttcactctgtttcataatcttcctcgtatggtaatcgtcgacataaatgacaggacctctcacgcttaagccacttaaaggacggcggattcagttaggttttaggttttgattttgattgaagatcgaagaagaagaagagacatgcaaggaggaagggggaaataagagaagaaacaaatcactcaccaatggagaagagaaatcgccaaatcggaatgatattgctgtcgttgttgtggtcggagaagatgatttcgagatcggggttttgggttttggttttcgcttaatatcgaaaaagaagaagaacaaaagtgaccgcaaaaaaacctagtacttatttatagtctctttgtaacttcattttgagttttatttcacttaattcataattcttttttcttagttttttttaaggaaaatatgcttttaactttgattaaagataattagtctttttacttaaaaatagagtcattctagttaaccattggtaagaggagtcattctatttatttttgttaaaattatagtcaatttaagcaaatttcagttaaatatcataaaatgcaaacaaacaatctcgcgaagagctatgttaaatcatacaatctaaaacaaggcatctttgtttttgagcatatatccacgattgtcacatatgccaaaagaccaatgtctttaaaatgtttgacaattaatgaatttaatgcacatttagttcaagtttatgccaatttatactaacttcaaaattcatatatgaatacttctcttccattctttccaaaaagaacaacttatacattctagatatgtatgtctatctacatagtcttgatttttatatatattatttttctgatttttgctaatgttttagataaattaaagaagtaaggaacaaaactacattttccaaagttggacgagttcattcccatcatcatcaaccaaaaagagtgataaactttaaatacaatttcatttatatcttcttatttttttcctgcatacagaaaaatatatcagataaagaaaaacctttttttttgtggtcttagatactattattcttaaataaaactccaaaaaataaagtcaaattagatatgtagtgcaaaggcttgttgtttattaactttacttgggccaatatgagattacccaaagaaacatacttggtggtattaataattacaaggcttttagcaaagatgtatatctaagcgcattgaatatacaatgatttggcccaaaaggaccattaatcaaaattatggcgcactgaatatacaatgatttggcccaaaaggcccattaatcaaaattattgcgcaacgaggtcaattttttttttggcttaattgcgaagagaagcaaaacagaacaaacacaaaagtcttcgacgaccaaagaacaagatcatcctctgatttttcagacacatatttgtaatttataaagtttgtagctttttccttagcttgagattacacgaagaagaagaag

SEQ ID NO: 2302 - DNA, 2000 bp, Arabidopsis thaliana
gcgattttttgaacaaggaatagaagtaatgagaacattaaattgtttatcaatttgaagtaaccacattaggttttagtttaagtgaactaaaggcatcggtaggtcctatttttgtgtcgtattgtatgttccatgcatgatgcatggggctatatatatcgtagtcaaacaagaacctaatataatcaaattcgacccatgaggttggtatataatagggagcaaaaatatgaatcttcttggattaaaaaccggtccaaaccacgccttatacattaggagttttatattgaataaaacgatcggattacttgtaatatatgcaacgactgcatcactctcaggtaagaaaaaaacgtagatacatcgaacatacatcaaacgcagacgcgttcactaaccgcgattcaaacacgcacttgatcgatctaggacataggttaggaggcgtcgactcacgtgaccatgtctcttccaaagtcaacataaatgtgccgcgtaaggatagagactacttttgttgttgttttactacgtttctaattttatactaaattttacgtgtttaattattaacctaatggctaaatgtctctagttattaaccaattaaaccctacaaatcgagagaccacgaaacgacagagaaaccccttaaacactttgacagagacaacgtccaattattaattacgttgaattattggcctttatgccttaaattgattctcttactacttcttaattttgttgacctaccaatatatatttacaaagttgtatcatcgggcgtttaatgttgaaacccatgctactattattaatctgcactaccacgtaaattttgcagtaagagctaatgaaacaaaaaaaaatactattgactaataagtaataaatgaccatagctcaatttgtttactaaatacctcaacttgtagcattattctatagagtatcatatagtgttaaaagtgtactgatgcacgcaaatatgtcgttaagttaaatgatacacagaaaaattgctccacacttgcaatacgaagtgttttttaattataatccaaaattttgttggtttgtcctcattatttaatatctaacacttgttatttgggtctacacccgaaatttacaaactaatcgaattatttcccatatgaattataaaatatatatgatggaaataagcaattaagcatgatcaaatcatcatcatatttggatttattaagggatagacataaactttaaactaaatttccgagtatataaaacactaaagtataaaatcagatccgtgtgctgaaattattatttgtgaaacaaaattgatattttaatgaataatgatgtaataaaggttttttttttttgttaaagatgtaataaaggttatgagatgagatcattgataatttgataaacatatgtctacaatatttaacataaattaactaaaaatggatatgatagagaagggataaatttataatttatatttacgaaatgagataaatttagacttgtagctatgcttattggtacttaaaattaacatacatttttcttttaaaaaaccccaacattagctttagcttctcgaccaatgatgaaaattccaagaaaagaaagaaacattcataattgtttttttttcaaacaaaaaaaaagagcggccgttttattataaaaagaagataagctattggaggttgatacaacgctttttgtctcatctccttcttcttctccttctcaaatcttttttttcaggcgtaacgaatcgaatcataaacacttacgcagaaacaaaaactaaactttggatcttttaaccgaccatagagattcgtgggttcttcttagtttcgacagattcttgatccgttttagttgttacgctcatctttgcttttatacatcagacccttctcttctcttccttctttatctaagaaacattagggttctttgaaatcttgctaaaaaaa

SEQ ID NO: 2303 - DNA, 2000 bp, Arabidopsis thaliana
actgagaacaacacaatggaaatcagaagagaaaatgggaaaaggttattcgaacttattaaccatactatcaattttatacagtctatttgaattttattggtatgagctcattcgagtgggaaaacaattttggttcaagtcaatgaaagctaaccaaaacgagtttggtaatttggtcttcttactcaaaatctgtttcaactttcaacaagcaactacacatttgttctactgttgggcttctacttccaattagtgatctgaccaagtatttggggcttctaattaactactacaaattgttttgggcttccgttggttaaagtaattgttataacaaacaaaagagaagagaaattctaaacaaatatcattgcttaagcatatgatgatgctctttaccaatttttatatacattcttttgtttcaacatactttatatcatacgcgctcgtgatcatatcattccgaagcatagaatctcatttgagatttcggatagatcggacatcatatatacgtggatactatttattttcgcatgtgtattttcatgtatggaatctcaaaataattgaaaagattttggaagttttcgtcgactctcacatgcattttggatattcttgtagtcgacgcctcttggatcttgtctagataagaaaaacaatacatgaacacaaatttcaataattgcaaatcttaaagaagaatatggtatgggttcccgtttggcttgtatgacatgacttcggatggtggaggaaatatacatccatgataaattaatatttttatcttataattccggaattaaactgataaactcctaaaaatgaataaatatctatcaaaaaaatataattttttttaccgtcttaaatttattatttattgcaaattatgagaattgttacatagccgaatggatataattgcacattgttgaagatctcctgcacacttgtctctaccaatctgcaaatctgctaataaatcacagtatctgggactcgaaccccagacttttttagtgtacaaaagcattaatgaaccttcggtcaaccaatgaaccaaaaaagcttctaaatatgaatttttaactgacaataaataatttttgatgttgacaacgactattttcattaagtttaaacgaggaagtaaacatttccaattggtgcagaggcctatttccaattactgttaataattagttgtatctttataaattataacagttttaaaactataaaggaggttcctagctccttcatggttgtcatatttgtttgtataatgactctgtcactcttccagtgacataatcaaataatctttgttggaaaaggaaaacaaaaaacaattttctcttttattcgaaacttgtgtattattcacgaattttttttttccttgtagcaaagttttatgacaaacagatttttttttaaaaattatgaatcaaaccttttgtgtataaattaacaactcgtacaatggcctttcacatatgtaaggcaattagcaaataaataaataaaatcaccttcaaaaagtccggtcaaccttttttttttttctttcaaaattctctttaatttccttgttaatatatatgggaactaaaaatgttatttatatgtggaacaatatataccacgttaattacctaaacatggaatattcagactacttctatccaccgccccttttcattgacgtgcaaataattttcacgtaattgtctaaagtccattttagtcttatatagtctcggattgaaacaagaaaaacaattttttcgactttaaaatttattaattattttgaagagttatttttctagtgacaaagttcattacattattttttctcttgcctttttctatttttaattcttgtccacataaggactagctataaataaacaaagccacacgaaaacccaccatcaggtccatcacctcttacattttttctccaaagtctctca

SEQ ID NO: 2304 - DNA, 2000 bp, Arabidopsis thaliana
actcttgtctctctcgaagtcgagaagttggtggcggtgaccactggaccataaaatgtgttcttgttaacaacacgttttaagaaattgcaaaattgagtggacctattgggctttaaatattagtgggtttcctaatttgtacttgttgggccaattttatgacctccacaacttggatataaaatatttggtaaggaattaagtaaataaatactattttattttttgaagcaccaaatgcaatttatggtgttaataaagttttatgataataattaattaatgcaaaataaaaatagttttggggtaaattgattttttttttttgggagaccaacagtcttcaacctcaaaaacgagaagctctagtaaatcatgatcgttttgtaatttattggtttaccaattgattttagtgatatagttttcgaaccgcttaaatgattaataaataaataaattaaattatggattggtgattttgtctctaaataaaaatgttgaatatgaaaggaatagttttgaattgtccttaataatttaacgttgaactattgaatagtcaataattcggtcgctaatagttgactagtacaaacaaaaccgaacagagcatgtattaattggccatttcaaaattcgtgttgcaataattaaggaaagtcagaactttagagaagtaaaccggtggcggttacccataattgccggttcggcgagtggcgtctcggtctccatttgccggttcccattgactaacgcgttagagagtgactgatgggtcgacttttgacttttactatttttcttcttttgtttcttactgccagttatgccccattccctgcctcttaattacgtatgagtgccactcacaaatatttttatttctgaaaatcatttgggggagacaaaaaaaaacaagatataacaaacctgttgttttacttttgttactgacaagtccttcagtcaaaaaataaaaacaagatagataaagaaaatgaaaactgtatttaataatatcctgaatagtcaaaatagaattgtctataaaatctgattttttaaaaaatataaacatatatgatgaagtattcttgtttcatgtatccattcgaaaatataagtaaatcctatgtacaattgaaaaaaaaaaaaaaaaggtaatctagaaacaatgctgatcaagctgtagtattcaacgtaattaacccaagctagggctagtggattctagttttcaacaaaattaacccaagctagggctattctaaagctagtctaaacatgtgggaggtttgataaatcgcctaactttatttgtttaattaggtcagaccatgggtttgatgtttatttgaatttttatactttagagatggtaatatgagatcttacaacaaaaagtcaatgtcctttagtggtgataccaatataagttcgaatttggtttctagcttattggtataaattccattgacagcaaaaaggaatcacgaaaacaatataatctagtactatattcacattttacgcgtaacgcgtttgtaatattcacataattatgtaagtgtgaaattgatcaaatcgcgggagatgctaaataaacaaaatcaaaatcactaataaaatgttcacgataacttagaaagatccaataaaaagatgacggtcggaatttgtatacgatagtaataaaagtattcgtgtttctaaaagttagtaattcattggtctaaatattataatgaggaaaagtcattggtaaggaaaaggtttgaaaaaggagcacataaataaggaccagcgatgcttcctttcacgatgcaaaacacgaaatgaagagacacattctctctactatatataccatttgctcctcttcctctaattccacacattcttcttcaactacaaaacaaaaacactactacacattctttcctcttgttcatttcaaacccaaaaatcaaagttcgaagttgaaagaagac

SEQ ID NO: 2305 - DNA, 429 bp, Arabidopsis thaliana
aaattaaactcccttttacctgatgaaccggtattattgtcaattagttttacaacgaagtaaagagttaaactccaatttatgaaagagtgttttcggttgagtgtggtataataaataaattgttttgcgaaaattaagttttacctttgctataagagtagaagatgttgtcaaaaaatattgaaccgacattaaacacattaaacaaatgtttacaaacaaagaaaaacgcatgaaacacatggaacgtgacttgtgaggaaaacgaaaacacgggcgttgacttaatggccaaagaagggcagtttcaatacgtgtgcacggctttttcttataggtatttagcgtcggagacgactttcgacgagtctttaaattcttatcttcgaatctaaacgaagaaaaacattacaggtagaagcaaca

SEQ ID NO: 2306 - DNA, 445 bp, Arabidopsis thaliana
ttctgtgaaccgtaagcttctctcagtctcagctcaataaaatctcttaggaaacaacaacaacaccttgaacttaaatgtatcatatgaaccagtttacaaataatatttcattccaaacataaacatgttgtattcatcagagagattcagtgaaagcttacataaaccgaaaatctcggtttgatcgggtcggtttgatcggtttccaccgaaatcaacagggctctcagatagactcttttgactgaaaagaaaacaaaaatatttgcatctgatttacgttgaccgtaaaagacaaaaaataaaaataaaaaaagtctagtgtcgtcgtcgtcgtcttcgaattcgccacttcttgtatatacaaaacaaagtaatcgcgaaaacacacaacaatcgctggactctgctactgcgaagaacaacaaattccttgtttatc

SEQ ID NO: 2307 - DNA, 2000 bp, Arabidopsis thaliana
attccaccaagtgttgttagctcaattggcgaaattcgagtgacgcttgagacgaaactaatattacatgctgtggtttcagacctaggggattacgggcttcagtccaaaacctcctgatatttaaaaaaaaaaaaaaaaaacgtatgattccgtttaaacaaatatctagtcagtatttcgttttactgttttgagatttttaacttttgaaacataaattaaaattctgattaaaagttgatttataacgagcaattaaagtgtttcattttagtattttataaaaaattctttcgaatccttcaccctaaaatgttatataacgaccaacgaccaaattttttgttcgactaccaaacgaacaaaaaatgtgttgcgcgcaataacttttgatgatcgcaatcgttggtatcagtctttagcaactgcaaacatgaacatagacttcacattttaggtatttcaccattttctatagtagtagtgtagcaatgtactgtgaattttaattttggtcttactcttagatgatagatttgagttggccgatatgaacattggcgacaatttgttattttcgtctgcgaacctgttttaaaaacaaaacagcttaatacagcccaatgggcctccttactcgaatcaataataagcgatgagtgaatgacacatgttagcaccggagagtaacgtacaaatgataaatgccacgtaagccaggttgcatcgatttgataacacaaacaaagccacacgacacaagagaaatagataagtatggacagtcagcttttgtctttttccagcctttgtttacgtggaatctcggtttctaggacccactacactccttaaataagaggtgcataattttatatttaacaaatacaattagcattagattagtccaaatatccggagtgattttttttggtttttagaatatttatttttttattgtaaattataaaaaatgttatatataatttttttatagataatttttttaattttattagatttatgatatacaatgtattctttttttatgttataaatatttttaataaaatttgtttttaataaaattttggtgaacgattataattatattttgttgtaaattttttatacatttatttttattaatctgtaaatttgtaataaattataatatttgaaattcgaattttaaattttttggtataaaattattaataaacttttaatcaattaatagatcaaaaaaatttatgtccaaattaattaattaaaatttttttaacctacactattgtttaatgttatcacaaattataaatttttaaattaattattttgtttggtcggcaaattaagatattattatcaaaaacatttttttttttttcgcaacacattagttactaaatgaactattaagttcacttatcttatccaatttgtgtctaccctacataaaccttgtacttatccctaaatcactttagataaattgttgaaaatttaatttataaattttgtatttaccaaattaggaaaacaaatatctgaaaatatttatttttaatatcttaacaactcgaagaactgagaaacgcgacaaaaccaatcgtcctcttccgatagccacaaaacaaaaatcagacaagaagaaagaagaacgtttcttctaacagatagagattacaatcaaattgactcttaatttctcaattccgtatctctcatttcatcttcttcttcttctcctttacttaaggatctctggtttctctttctctcctctgtcttatcttctccaaagttacgctttttttcaatgaaaacattttcttgattcctgatttcaaatttcacaatctggatttcgtgtttcgaattcactttgaagaaaaagtttctcaatttcgcctgaaaacccacatgggattggaactaaacactagactgacaagaagaagaagagtaatcatcatcgagtgtttattacgatt

SEQ ID NO: 2308 - DNA, 2000 bp, Arabidopsis thaliana
tggtaaaatactgtgttagtagatctggaccacctggcaacgtctttgcttgcgtaagcagatccacgtcagattttttcttcaaagcttttttacattcacctttaagcaaaagcaaaactcctaaaagatgcatcaaatctaaagattaatttttggtaaaagattccattaaatttttgtcatttttagataatgtaaaattttttattaattaattcgaattggagtacagatggtttagtactgtttaattatagaaagagattagttaacacgcttttggaatattttaatttcaagtgtatcaaaactttattcatattaaccaaaaaaaactttatttcatgcattgaccccaaaaagaattcctctatcattcacattatgtttgaccgacaaatccaagagctttttttggacactacacattgacacgtggaaatgatattcgaataatgatttttttttgcaaattactatttcctcagtttctttttaagtgatgtttaaggttattacacacagattaaaaaaatatataatttttctcttttctatacaaatattattaaatagaatgaatttaaccaataaaaataattgttcaaaaattattaaatatatttaatatttgcataaaaagttaaaaacatcacttaaaatgaaacaattttttttgaactaaaacatcatttaaaaataaagaaagagagtatcataaagcattgtttaccagaacaatcactaaaaatagattatcaaatgagtaaaatgtgttatttattcgtccattttatggaattgtaaaatttgttaacacaaatcatgattccactaaaagttgtcatagaagaaaggcaaaaaaaaaaaaaattataattgtaaacatgtaatatacggggtagtgttgaaatcatccattatgagttgatgaagttaaaatacatatcatggtcatcagtcatcactcatcacaatttaagtttacattttactttttcagtgagacaagttacggttgtgccgctcagattactaaaattgtactataacaattcttttgtcggcaattgaatagcattaaaagtttaatgtccgtattttgcaacttgatacatatatatctccaagtgatttatataaatatcctaaggttttaacacgaagcatgtgaatagtataaacacgacaaaaagaagcattcaatagtaatcttttgactatttcaaactcttcttatatatagatttgtcaaccatattatctatccatgccatcgatgcattatgatatttatggataaaaaagatcatggactaaaaaagtagtaaacgtagtttatagattatgtttgagtgcatattattttatttgctatcatatttatactttcaatcttttctttgtcaacaattctatctttgctttacactctttagtatcttatcatctttggtttaatattttatcaaaatccataaattgaacatacgagttttattcagtttgtcgctttgaagtttggatgattcaatcaaaacacttaagtagagattaaaactcttaaaactccatctaaatcaaagattaacgacccttaaatgatgtgactctactttttgtcaacttcaaagcacccaccgaaactttccatcattttgcaacttacaaagactagcgtgtggtttttacgattagaaaacggcgtgtagtttatatttataattcaaacacggaaaccatttcacgagctgcactccaaaagtacacgcgtcatcgttaaccaatcagaaacgtcaagtgagatcatcagtccagtgattagcttccacgtggaacatcgacgtatctattttcgcgcctttgtaacagcttcatcttcccaaatccaaaacaaacatttttagtttgcgattctcggattcgatcagtgaaattcgaatcgaagcgccgccggaagaatcatcgccggtgtgggagcgtttcccggagcggcg

SEQ ID NO: 2309 - DNA, 2000 bp, Arabidopsis thaliana
ttaaccttgatcttttttataacaaaataaaaataaaaattggcacatgatcaaatcatcaatctcaaataagataaaaccaaaggtgtaataaggttcatttttttgtggagaaaccgagtcaatgctaccaaattgcctatataggcttgaattttatgtaaatgcttttttgaatggaataatccgattttttattttattttttcttatgtaaaattataacatggtatagataaaaaatttgttttgtaataagtgatatttggtctaacggcgcgtatgtatagttcttttacaaaagtgagtaatagtggttttctggttcaaatactattgagaatggtatcagttttgatggacaacaagtgtatgagactcggctataacttctcaattaaccattaaccattaaagaatacaaaatttggattttcgactatactttggttcggatacatcatacatgcatgcacaccataacaactaaactcaaaaggatttgtttttgaacttttgatgataagaaaaagaaaaaaaagatgggacataagagtcatgtacacgtggataaggaaaggagaagagagggacaagggaagagatggagaaagagagacgtaagtattaattcaattgtgtgccctattagctttcattttccacaagcaagaataatattaataattatgtatcatctttgcatttttgtaccaatacatgatacatttgttaggcacacgtctttttcctttttcctcctttttatttctaactttcttccttttattcgtttaatccggctctatcacgttaacacacatatatgttatatcatctttttacaaacatgtttacattagttattagaaaatacatatacttgtaatagtgacattggtaagaagaactctatcaccttcacaatcacacacatatatgttatataatctttttacaaacatgtttacattagttattagaaaatacatatacttgtaaatagtgacattggtaagaagaaaaaaacactattaaatagtgaaaaaatgtttataactctcttaattaacattacttattattgctagcacctaaaatctcccacaaaatatttgttgtaaaacacaaatttacaaaatgattttgtttttaaattagtaacacatgttcatatatacgttaataagaacataccctatatgattttatataaaaaaatttctttgagacgtcttatccttttttctttaataatatgcaattgtgagagtttggatttgaatggtagcattagaagcaaacttgaaccaaacatatttcatgaagtcaaacttgaaccaatgtaatcactaatcacagtgttcgcagtgtaaggcatcagaaaatagaagaagggacatagctatgaatcatataatcttgacacatgttttataggttttaggtgtgtatgctaacaaaaaatgagacagctttcttctaatagacttaatatttgggctaaatgtaccacagttgtgaatttcttacaaaaatgggccgagctacaaaaaactacaggcccactctcaactcttatcaaacgacaccgttttacttttttaaaagcacacactttttgtttggtgtcggtgacggtgagtttcgtccgctcttcctttaaattgaagcaacggttttgatccgatcaaatccaacggtgctgattacacaaagcccgagacgaaaacgttgactattaagttaggttttaatctcatccgttaatctacaaatcaacggttccctgtaaaacgaatcttccttccttcttcacttccgcgtcttctctctcaatcacctcaaaaaaatcgatttcatcaaaatattcacccgcccgaatttgactctccgatcatcgtctccgaatctagatcgacgagatcaaaaccctagaaatctaaatcggaatgagaaattgattttgatacgaattagggatctgtgtgttgaggacg

SEQ ID NO: 2310 - DNA, 2000 bp, Arabidopsis thaliana
ctgatcccacatgacaaaaaatggctgagagaagtttctatttaattccatagagtttgtggtgaaacattcactgtcttgatgtgaaaggggttcgttcctcaggagcccaccaagagaaggagaagagtcttgtgtggtcgtttgctgcatctccattacttcatgttaccaaaagaatacaaaaaaaccccaaacataggttcaggaacagatgatgattatagaaataacaatcttatattatctgacaacaaagtggtaacagtacatcaaaactaggattcttgactgtctctagctatgtgtcagttcctaatatcttccacagagagaaggaaataatgatcatatgccaacataaagaaaatcaaatctttttaaagcacccctaagtgtatcataacatgagaaaaataaacctttaaaggaaagatcactcgattttcacaaagataacaatcacagtgctctgcctctgattaccaagtaacgtttaatgttcaattgccccgagtgaaaccattaccagttatttcaagaagatcataaactctacactcttttttgaagaacccattgtttagatgtcgtaagtagtccagtttcgtctgaaatctctgtctctctaaagtatccaattcaatgaaatcaacaggaatgtggcaatgtgcccataaatcaacattcaaaacatcgaaaacaaagtctcttctttggaaaaaaaaaaaaaaaaaaaaagcctcttctttgtgtctctttcctaaacacaaaacgaacaagcgccacataaacataacaaaagcaaatcaattcatcatctaaaaccgctccaagagaatcactaaattgtgatcaatgacgacggtccacggcgagatcaaggagacggcgccgtgtaaaaatttcacctttgaatttgattgaggagggacatattccacacgtggcacctaaagagtggttaatgataagtatcgacgcaaagtaagtatttaacaatgattaaataaaaatatgaaacaaagaacaatattgggctttcaaattggcgggttgagccaggcccatgcagtagtgcaacgcatgggcgactcgtgaaagcccagatagcaagctatcttaacgggctttctcccttaaaaaatagagttaatatcgtgtgggccgatggcccacatatcagatattaaactgataagaacagatactacacttgatcttagccaaaaggccgagaaaggtatgaatggtttagtccatcaagcttcttttatatacaccaactccaagagtgagcgattaattatttagcgatgtgggacaataccaaaacattttcttagccttcggacaaaagaacaatttggacattattgaattaggttcggttatcttaaccaaatgttttaatcttgatcagcataatccgaattgatccggtctgaaccaattcaatagatctgactaaaaagaataaactgcatacctttctagtttggttaagatgcgaatttcacatcaagagaaagctttaaaaccgtcatcacaaaagggagaaagttactagatgaagctagtaggtggaagtttgagtcatttggccgttactactacgacttgtttaatttttttctctgattcattgaatgctttattaaaaactttatctcataaccagtgtaaaaacaaatattcaaacgttaatcaatccaatttagctttgaaaaatccaccaagaagaagactagtcaatattggttgcgacggtcttgtagaggcgttattatctgttagataatattactataaacagtgagggataaagcagaaatgcttctgtataaatactatcactacttttgatcaaaacaaaaaataccatcactattttacttgtgtgttatttcatcaccttcaccttcaacatcaaacatcacatctctttctcttttatctctttttctcggtcttcaaagagtttcttagttaccaaatca

SEQ ID NO: 2311 - DNA, 1552 bp, Arabidopsis thaliana
tctcgtgcttcctccatggtttccgaggttcccgcttaaactgctaagcttcccgctaaatgtgatgttgatgatggattcatcatcggtggatccgacgcgtagatggctccgtgtacggcggtgctttgacgacggagctaaatcggagcttccgtgtcgtttagcaccaccgattatggagacacacgcacctatgtttctcctttttgttgacctcaaaacaaagtacaaaaagaaaaacagagcaaaaacaaaatctatgcctttctctatctttttattctagggtttgttcaaaagctttttcaggggtttcgctgtgaaatccaaaaatgttgtttctatgaaatcttcttctttgaagaaaggaagaagaaagagacaacaaaacctaaaaatggagtctttgattggctaattttgccgcgctgaattttcgttgtggttagtttgaagaatctttgatgtcaattagatattaaacaattttttgaagcttattattctacacagtccatatctctagtcaactaattatctaattatgttttctctaaattaataattcttcaaaattttaatattttaaaattgtgtctattcattaaaagtcttttgttttcatactttttcacaaatagttgcattttttcaccacaattgttttgctaattatgtttggagttttttgttatatcttaattctcttttagattattgcatatatcatatgtttatctaatactcatgtttttaaaaaggttttatctatttttctttataattttagacaattaccaaatttttcatgaaatttatttttagaatgtatattcatatatatgtttgatttttaaataactacattccttctatactttcaaaactatttattagcttatatcatattaaatttgaaaaaattcacggactcaacaaattttgcagatagagaatgagatcacgtatgatgcagagtgatctcgactctctatctacgaaaattgatcttagcttgaaagattatggatttctctatataagaagacatgtgacattcagttgagcaccatattgtaggcatgaaccaaaacttaacttacttagcatagattgttgatgtgtgtttggatatgtatttatttttttcgtaatcggcttgtctccttcagccgtatttcttttccaaacattgggcctttatgaggcctaaattgggccttagagcccaaggagagttaaaaacaataaataatctatccagaggcattaagtttcaacgaaaaagaaagaaaaatctgtgaggacgaaaactctccgtcgttccggcgagtttctccagtgatcggcaaagtctttccggcatctattgaatttctctaaaccaattagtaagtctcttgaaatttcaattcaacaaacgttttgctgtctactcgaaggttttgactcgtgtttcgatttcaattttgaatcttagacaagtttgctatctcagacaagttcttgttgagttttgtaggaatattatcggtcttgataaaataaa

SEQ ID NO: 2312 - DNA, 2000 bp, Arabidopsis thaliana
gtttcttgtttgaaaaagaacttttaaaccgtctgaaaaataaatctatatataatatagataatatatgcaacccatgcaattgctgctgttcgcctatataatatatgatcgtaagtagattatgattgttagattatcatatcagaaaacactaattcagtccgtatgtgtttcttaatccaaattaaaaaaacgctaacttagtatttacatcatcattttgtgttcaataatataaaatatatgttataataatctatcaaatctttttattaattaattatcaaatatcaagatccatttaaaacgaatcaaatatttctaagttatatgaatttgaagaatcgcttgattattttgattactctatagagtgagatagagaatagaaatcatatggagtataaaattctaaaagatatgtattagaaaaagtaactttaacctagttcataatacgaggtaacacgaatagaagttggccaaaaaagtcgtaaaacattcaattttattaattaacatttataattgtactttattgaagatactcttcaaatctttagttttgcttttaactaacaatcaagaacgtaagatgagggaagcttacgcaggttgatggtaaggggacagagtaggctacgtgtcgatctaacgttggttccaaaaactataattttagcatatgttgcgattgaacgaaacagtcatactcacatcacgtgcctgtactgacacgtgttgacatattactgctgccttttaagttttgatacacactattgagatacttgatagttgagacttgagacttcagagacgcagacaatttgttattttggaggatcattttcttattatctatcaagttgcgggattaaatcataattgacacataaccgtttggtaattatcatacatacactccttagtttgttttttcccttcttttcgtattagatttcttcctcataattctaatattcgaccagattatttagctaataaagctcgggctcgtaatagccttttctcccatataagcacatcggttccttaatggctctctctagcagaaaatctcttttcgataacttaatataaatagtgtttgataaaaaatttttttttatcatacatacacttaacacctggattgcatgaaattggaagcgaatacgcggaaacacaaacgtttgggaaacgtcaaagtgagttttttgaaaaattttagaaagcgggtacatgttgagaatttaaatttgagatgaaattctgtttttggtctctcttgtttttatttgaggtttccatttttatggtatttagcttacataggttagtcttgtggaattgaattcttgtgtagatagaattgaaatttgagaataaattgttgtttttgtgtactctagaattttgtttctttctctctatgggttactctagaaaagattttaaaataattacaatattcagttgttttttgtgtacatataaattaatttttataaaaatattacattatatacttattaagcatcaatgcctctgtagcatagtggtattgcgttcgcttcgtaagcgaaaggccgcgagttcgatcctcgccggaggcttttgccaattttattaactacatataactatatatcagttacaatatttatgggccaaaagctcttcttattggatttgactagggaatctctcagttttttttacccaatggcccaagttcttatatttcagtcatttattttcggtttttctttgaacattaaatgatgggccacaatggagttataaactaaaggccccaattgaaatctctctcaaaaactttcagtcaaatcttgagaacagaaagaaagtccacgcgaggacataagcgcgtgtgatttaaaatcgtcgtcgtcgtcttccacaccgactttaatctgattcttagaatcgccgtttggtttttaaccagagagattatctaccaaggaacg

SEQ ID NO: 2313 - DNA, 415 bp, Arabidopsis thaliana
gaatctgctttaccaacttagttctcaatttcttgagcttttttttttcttctttttattggcttaatacaagtaaggttgttgacttgttgtgatggaccaaagtcaccaaactggtctgttgagaaataaaactattgtttttgagttttagacataagagtcgtgattctccttctttcttgttttgttatctttaaatattatattctacgtgctcttcaagtaaaggatgtgttgaccatttcaccacccaaactaatatcttagaagcaaaagcattgtgaaatttacttgtagaacaaccttctcattcatatataaaagcagacaagcattagcatcatagatacatagagagcttaagcaaaagatctcatactttcaagattgatcgatctctcaagtctcaaca

SEQ ID NO: 2314 - DNA, 2000 bp, Arabidopsis thaliana
tatgaatttttaagaaaaaacattattatgaaattcttttacatgaacagaatctttaaaaaaaaaattatatgtgattttaataaaaaccatgtattactaaaaaataagaatatatttttaaagaaatcacgtgtgatcttaataaaaaatgtgtattactacaaaatatcatgataaaaagagatattaaactgaatagaatgttttttccaaaaaataccatgtgctttttataaatattatgtaataagagaaaataacaaaataaaaagaggatattatgttatcgtatgtatttcggaaaaataacatgttacaaaggacatttacgtaattacacgtgttctccaacatgttttcgacaagatactgtgactcaaggttagtttgtacattcttttcaaatctatagtcatttattataaatactctagattatttctgtttaataaaataaattagtgatagaggatatatgttatatacgttttataaactattcagcttttttttttgcgtcaacaagtatattagattgactcaagcaaatcaatgttgagtaagattgtttacataagtgataatatgtggttcggtacgaactttcgtgctatgtaatctatcttgacattctgtttcaaaaaatcaaagaaaaaaaatcaaactattctttgtcactaaatcgcccccaaatatgtaaaacaaatttcccattcttgtcagaaagatatcatctacactgtaaagaaagtttttctcgtttgtcttggttgataatacatttcatcgtccaaacacttttatctctgcatgtagtgtggttaactttttttgaaggtttacaactccaatatcatgtgttccattattcagataagtacaaaaccatcctagcctttaataatatgtttaatggaagattcaatgttatttttgtttgaattttagtctttttagagagccgtggaaaaatccaatattgaatttatggtccattaaattaaattatttatacatgatttttagtgaatttatctatattaaagcatttaaatatatgagtggtgggtatttcaaattatcaattatggttgaaacattgaaatgatatttattgtgtaggtcagtaagatattttaatataactattattatggtggagaacatcacaatacaagttctatttggaaattaaatttgagtgcttagattatttttttcagtttacaataacatttttttttttttttcagaaatagtgtcaagtatgtttagattattatatgatagcctaaatattggaaacttttgaaaaatgtctaaatttttaatattgaaaattcaaatttgcagtgtcatataataattttttcttctttcacatgtagttaagaatattattaaaattttcaattgatgcttcctttttaatttgttttaccataatccatatagttgtgtttgttgatgcaatatatgtataatttttcgttttttcgatgttagattaagggtttgaaaatactgatacaactatataataaaagtattattagtataataattataatattattaaataattttaggattaaaatttatttattaaaataaataaccttaatatatcttaacatttatttttaagctattaacattataaaatagtaattatgttgtaaatactctctattaataaagcaaatataaatcttacaaataattaaattacaaattttagaagattttaaaaaatattaactatgaaaagaatatatatatatatataaaactaaaataacgaatataaccatgcaaaattgattgtatatatacaattatgtatgaatataattcacgcaacacgtgtcagattttttctagtatattataatgatgtctctgttttctgttctttgaagtcgtgcattctcatctcacacgttccaaggtcaagaaaggatcgttgacaagaactaaagatctccaagaagata

SEQ ID NO: 2315 - DNA, 2000 bp, Arabidopsis thaliana
aaatcgtaaaagtataaataccaagtggatagtctagtggcttagtatcctttagtgaagattgtgctatatacagaatgtactctagtttgaaccttctttattaggaatgtatttatcacaggctggtcctggccgaaaaagaagactacgggtctaaaagttccaaaatttcctcaataatcaaagaaactcttgcaatgctctttatacttgaagctgtaacagatcttaaccattcttgtagatgatgatgaaccaacttttaaacatgataatctaattcgagattttgtaatgtattttcgtaattcttcggtttcagctagatgatgtcaagtgattaataaaaagaaaaagtttgtattgggttaatagttattggtgtttttagttcgaatttctttttctttctcataaaatcttgggacttaggatgataaagttgggatatacttgagaactagaacttttcatacccttcctttgaataatataatattgattcagaaaagcaatagaagttgccacaactaaaatgattggttcatttggttgtctgattatgagacaccattatgtatttttatttttagattttagtaacttaaacccacttactatctttgtattaataagaatatgttgttgattataatttcataaactaatattttaaaatttgattgtgtatgtgtaaaaaggtgtgtggccagaatcaaagagctttagagatgaaggcttgggaccaattccttcaagatggaagggaatatgtcaaaaccaaaaagatgccactttccattgcaataggttcgttttctctcttttacaatttttattctttcaaatttggtgttcaatcattttcacgttaagtaattatcataagatacaaacaaattctggaattatctgttctcatttcttaggagttgacacattcacacacctagtggtggaattatgtgtatttgtttcaaatagaatcgaatttacaatttttcatcaacaaaaagaagacacgtgttgtaacaagtcatatctattttgagtttgagttccctatttcaacatccgtgggtttgttttaggtacaaaaagaaaagtatgactcattttttggaacttttgataatctattgatgggttgtagtaaattttagagtgattggactatacaactatactttaaaaaacatatctataaattatcacttattttaaaaaatagtcagaaaataattgattctaaattatttataaacataaatttcaatattaaatagcatgttttgttaagtaaatcatttaaataaatagcatattattcaatgaaaaattactcaattccatgtgtttttgttttccattatttacataattaacacttacactatagttatctatacaactgaccttatgtttcgtatcccactttacctacttatgtagaatcttttttttatcttacacatttttattctggactttctttttaaccttttttatctgttttcttggcaaaagatagaactggaatctcaaaaagaaacaaaaaagatattcatttatgattccctgtaattacaaggcaaaaactaaaatgataccctgtaatatattcttctatgagaatatgcacaaaatagtcaaattttatcgatacttaagaaaataaccatatgctatagtactttgtcggaaacaagtcggagagtgtgtgaaattacgtaaatgtctttcataacatatttttctctcgaattacatgtgatagcataatatatctcttttatcgtatttttgtttgtattgcatgtcatttataaaaagcacatgagatttctggaaaaatatattatattcagtttaatatttcttgttatcatgttactttgtagtaatatacgttttttagttaatatcacatgaattttattttattttgaaaattcttattttgtaatattacacggtttctgttaaaatcacatgtg

SEQ ID NO: 2316 - DNA, 2000 bp, Arabidopsis thaliana
aacaaaacataaaaggtatacagtttgagccaaaaaaagatttgtaagtaacaatgaagtgctttctcatgttaatagagagtatagagcatattaccctacacaccaaatcaaagcgttttcctatctacggagcaaggttttgttctgtaagatatactctgcatagctaagtaccaaaacaggaaatgaaagcttattggaactacattggtaacaaaccaaatcctcaccttcgaacaaggcaaaggaagaaacccatctactacaagcagcgtttactctttttccactatcaaaagtttgcatctacacaataaaaatccaaactttattacctcctccacaaaacacacaaggaaaatgaagactctttgtgccttaatgcgagtaaacagaatcatgtcgtcgtggttcttgatttgaggaagttgttcaagagtcctactatatacattaacagtaagtccaggacttggatacgtatcatcaattatccggagagtacaaatccaatctaagaaaaaaatccaactttcagattttgggtaaaatgttagagctttcacaaaacaaattatatgtatttgagtcaaatttagggggtttaggataagtaccattgttgcgacattgttttggttctctttgttcaaggacgataccaatgagactgacttcttggttgatgagtttaatggcgtctttgattttgatgagcttcggactgtctctcttcttcgccatctcccggctttgctacaacgttttcaagtattatcctgacgtcattagacagtgataatatggtgaaaatgaccatttgatttcgggaaacatgtcattatttttttttgtcaatatatgtcatttcataacttaactttaaagatgttttatacatcaacttaacgtatggttatttatatatatgaactaaatgttaactaatgatttgaaacatgagaatgtgcagaaaagacatatcactatctaggtataaacatttggatttatttgaattagaataattcgggttggagaattttcggattttatgattattctatttgtttttggttaggaaaggtgacgaattttgatcattttccttcggttttcaaagaaaaaaaaaacaaaaaaaaatagtcataaataaaaattagtttaaccttactaaattttgtctaaaatttgcaaaaaacaaattatatataattttaataaatataactaaatttttcttgatatcaaattatttaagatatgttatttaaaatatgttatttgttataaaattatagctaaatataactaaatgcaccgaattacatttagttattaattgttttcttagctttttcaatctcgtaaaattgttccattaatttttgtttttttcaagtttgaattaactacgtaaattaggtttggagaaagcaaaattagaatacttttgtaatcgaatgtctttgaagatttatagaacaaaagaaattgagcaaaattattacatgttccctagatgagtgtcaggaacttggtatatatggagtttagaagtaaggttaagaaaaaggttggcttcgaggaactggagtgcatttaagtggatgaaccgtgcataaggtactatacaagaagttttgaagggagaacttttgaaggaatgaactaaggaatgaacttttgaaggaatttgaactcttcctaaccaaagtatagaagacttcctaaccaaagtagtgtagtaaacgaaaaacaatcaaaatgtgacaaatcaaaggtaaagactagaccagtctctgctcaactgtatttttcaccaaccattgcaaaaaaaaatcgccgtcttactattaacccacgtgttaatcacaccaactaccaaaaatattcataatccaacttctatataaacttttgtttgaccataaattacaaaaaccatttgaattttctttcttcttcaaaagttcgaaacttttttttttccggca

SEQ ID NO: 2317 - DNA, 2000 bp, Arabidopsis thaliana
gaaatattatatagtgaggactagaaataggagaactatcttgatgagaactagccaggaggcctagacaacaacactcaactccaccatcccaacttttcagacatttcccttcttcatatccttcatgtaagcatgttgcattgcattctggtgtgctataacatttcatctcacactgtttgattcctctgaattgccctatttgattcatatatcaacagtaaaaaaatagtcaatagaacatttaaagatttttattgcccccacataattttttttcttcttctttgcatctactatttactatttagactcaagtggatttccaccaaaaaaaagactcaagtggcaaaactatcattttcttaagataatctatgaaaaaaatgagataattacttataaacagataaattttttacctgaaatcatgggaatatagatgaaagtcaacatcatcaatgaaagtattataagagatgacatttttgtgatggccattagatgtttcttgagaatacaccaagttttttttatcggaaaatatagttagattcaaaagaaagaaaaacctagaaaaagtaatcaaaatcagtgttaagaatccgtaataagaggacatctcttgtcttctttaaaaaaaatattcaacatttttttatgaagtttaatattatatttaggatttacctttctttttggtcaaaatattgatgatttaccttttggttttataatatttctattattcattttaatggttttgactagaattgaataaattaacatcatatgaaccattcaaactcactttaatagatcttccataacatgaaagaatttatcaataatcttccatgatatatttttttaatatatcttccatattaatatattatatagtaaataatatttagcaaatattttatttaatagttttttacatgataattttagtcatatggtttcatcatctagttgcgttccccctttggtattatgtttttttttttaaagtagaattccgcaaataccgattttatgataccgctgtttttggtctatttaaaaaaaaaatacaaaataagatatcttaaaaatggtgtttgtcaaataaaacattgtttataccgcatttataaacagtcttaaaaagttttttaattaaagtgttaataaagtatcatagatttttgaacaacttttccctttataatatttttgaaatatgatatcaaaaaaatgctgtttgtcaaatataattttgttttgtttcattaagtataatcatatgtcagtttggtacaaaaccaaatcaaattggagacaaaagaccgaaacaatttcggttctaacaaaaaccagatttgaattttggtacacaaccaaatcaaatggaaacaaaatacttggtataaaaccagaattttggtttggtataaaaattggaaacaatagaccgaaacaatttcggttctaataaaaaaccagaatcgagatcactgcaaaccgaaccaatgtaatcctcttcggttccaatttttaaagtcaccgtgctttttcgtcattgtctgagaggaagaactgttccgttgacggagcttgatggcccaaccaccgaatcgtcatttctcaatagaaaaaccctttctttgtgattgcttcgttccacgaaattgtaagccaaaggaacattcatcgatccataatcaatatgcacttgcttctaacctcgttgacttcttcttcttcaacctttttgttactcgattaccaattcattgcctggaaattcttgaatcctatcaaagtcttctcctttgatttgtataataaacctaaagtgtctcacagatacgataactcagtttcctcttaaggtctttcttctctcttactaacatttacttttgggttctgttttgattgattgaagcgacatgggtttgacaaaaaactttgcttttcttgtgttttgttgtcaaagatactgtagc

SEQ ID NO: 2318 - DNA, 2000 bp, Arabidopsis thaliana
taatttaaaagtttactaaaagtttcaattttttcaacattttttcaaaaaaagatattataccacaactattacgagtaactaacctacttgcatgaccatttctttactcattttgtttccgtagtagaaataattttttgttagttcgatactccctccgtttcacaatataagttgttttagctaaaaacatgcagattaagaatatttacttttaaaaagttcagataatcatagaagaaacagcataatataaataatcataaaatattaaaataatatataatttgcataaaaactagaaaacaacttaaattgtgatacaaaaaatttgatccaaaacaacttatattatgaaacggaatgagtaggtttaaataaaacatatctaacgcttttgttaaagtgttaaacgttgactaatttatgtcttaaattatgacgtcaatattaaattgaggaattattgtgtatacatgatatttacagaataaatttgtcaattataaatacttatagatttaattgactattttcccttgaaagttcatattttttttcatttttcatttaaaaatttactaaaagtttcaatttttttgacatttttttcaaaaaaaaatatattataccacaactattaaaagtaattaacttacttgccaacaaatgacgatttctttactcattttgtttccgtagtagaaataagtgtttttttagcagagtttctttttgccccaaaaaaaaaggctttattgtcgaaaaaaaaaaagagaggctatggtgtaaccatttattaatagccttcattcacactaacagtacaggcacgaccgcacgagcacacacgtgtggaaggagacaagagcaatgaggttaatgggccctttatgaacagtgagactacgtgagtccaaggcatgaggcatcgtggtccgcaaacggctcattttctgtcatgtgggtgccactcttttttgctcactttctcgatcccttcaaaattaagcaaattcaaagtctactattatttcttaaattttgtgtagctatcgtcaggaatctttagacatttttacacaactaacatttgtcttctcaaccaaagtctacaagaaataaaaatacttttatcttttacttgtatatatgttatcaaaaaaaaaaagtgataaattgacactaaattatgaattaatttaagtgattgactcattttttttcttattccaacttgcattttggattaataataaagttatatgttttataaaacacctaaaaattaagttttaatcttggttttggttttttctacagttagagaaaagccagcaaatataggtttttgttttttttaacccaaacttggtggggtcggcgtgcaatgttacctctattattgttttacttatttatttttgaacttattcatagtcatatactcattgatatgaacaaatgactaaaacttaaaagaatctagaagaaatttcatgaccatcacactattatctaaacacagctacactattatctacatactgctaccaataataaaataatcagaaatgaactttactcataaacaatatcattctctctaaacaaagagtagtaaacaaataatctatctatcaattagtttagtttgaacaactaaaaaaaaaaaatgattcagatccataaaaaccccatcaattccactcatgattacctgtaaactctaagcatatatacaaactgcaacaacatgtgaaaatatgggataatggagaaagatgatacacattatttgacatgtcacatgtgaaaaaaaaaaaatctcaatactaaaataagtacctaatcaattattcacttattaatttcttctggataataataagacccagtcttctttaccactctccacaacaccactctctctttctctgtgtctccttcaaatcttcatctctctctccatctctcttctccacaagaagctgagt

SEQ ID NO: 2319 - DNA, 2000 bp, Arabidopsis thaliana
ttgtatttttaaatgattaaatttgttctctcctctaataaatttcaaattttcctgttattgaagtctatgaaaagtcaaattaacaactaacgtagtaaacgtatctttgaacttttatgtttatggtataaaagcgttgacttttatgtgaaccactttttttttttagtgtagaaactgtttacaacccaagaaggaggcttaatattatcagaataaaaactagacttccatattgagcaagattatgtgaaccaattagacataataatagggttttgattcaagtcatattggcatctacattaataaagaaaatattattaagaagtacatacacatacactgtggaagcccccttggcccaatagttgaccaaatgttcattaatgtttctacaccaagaggtctggggttcgagttctagctactacagtttattagcaaatttgcagattaatggaggcaagtgtacatgaggtctacaacgaagtacaattatagccgttcgccaagattttacgcagagaaaatgttgaagatatccatcaaacgcatggagaatgagaagaatgtgtcgtctgtcgtggatctaataaaggtcggaaggaattgtgtgtagtagaatcgtctatgtaacagttttcataatttgtaataaataataaatttagacggcaaaaaaaaagtacatacactcatatataatagcagaatatataaaactttttaagcaattacatttatggataattattttgtggccgaaaaaactgagggatttatattactactataaaagtaatataattatatagaaatgggtaagagagaatcaaaaacgaaaaaaagcaaaagaggattttgacttgcacacaattgtcctccggcttcacaagtaatcaatctcccacacgaatttgcatgttactactaaacttttcacatttgccaaatggatttttttttgtctttttctgctatataccaatgaacttcaaatttttagatttggaagttttgtgtcactctatgatttctgattctcccagacgatttgtttttttactggataataattagaatattaacagatttgcatcatactttgcaaaatattatgatgtgcatattaaccgaaccaaaccaaactgacccgatctaatcaaattcaaaccaacccaaatcaaacctaagcttagactcaaaccatttggttgcattttgtctcaacccaaatgggtcggttcggttcggtttacaatcgaaccgaaccaataatccaatgtatttattaatttaattaattaattatattaataatattctaaataattctaaatatttataggttgaattttctatgtttttctttctagttttgtttgaattatgcatttgtctcaacccaaatgtttgaattttcatactgtatatttaaattgcataattcaatttttttatttatttattaataatattgtaaaccacaaacacatgtcttgggttttttaggtttttcttttcatggttttgtttgaattatgcaatttaaacatagaatttaatacgttaattaattttttgaatcaaactaaaaccgaaccaaattaaaaccaaaccaaatcaaaccgaaccaaattaaaactgacccaaacactaaccaaaacaaactagttacggttgaatatggttagaattttacaaaatccaaataaactgaactgaaccgaacccaaaccgaacctgaagttaaaccgaaatgtccgcccctataataaacaatgttgagacgtggtgcttaaacagttaaaagtcaaaacgtacgtcgccaaacatttgaaaaaagtgaccaactagtggaccaattctcttcttttgctttctttagagtcaagaaacaaaacaaaacaaaaaaagtaacccataccgccataagaatatctatctatatatacaagactaatacaagagtttagtttgttagttgcaagaac

SEQ ID NO: 2320 - DNA, 2000 bp, Arabidopsis thaliana
tatatgtttagcttgttagtagttcatccccataaactaaagattgcaaaccttaaaccaaaaaagttcacaaaactcctgataatctcccaaagtctctatttggaagatagtcattgcatagttcgaaaaagtgaggaggactacaacaaaagatagtctctgcattcataggtttgaactatttctttattaaaaaaaaaaaaaaatagttagaagacaaaaagtaaaatataatgggaaaaacaaatcttataattcatggggtttccagaactttagttcataatatttcttagtatccaaagtttgattttaggtactccaatttaaagaataagtgaataatttcgtagatagtatatgtaatccaaaagatactatcactagaccattgttcctttggtaaaattggaaatagtttaaaacaagaagaatttcatagacaatatgtaattttaataacagtttgataggaaacaataattttcaattactatccatctatcctttttagaatcgagatacagtaaaccctcgataaactaataatattggaaccgtgaaattttattaatttatcgatgtattaatttatcaataaattaattatagatattttaggctaattttgtaattttaaatactttatgttttaaaaaaatacttatgtataattattatttttttagaactaattacaactaataaaaaaatattatgtatagaaaacaacaaaaaagattttgaatatagtaaaaatattaaaaatgaactttagaaataatgtaaactaaaaatatatagcagagtcgtatttcaccaaaattttcatttataatatattaaaaaatttatacaattattagtttatcgagtattaatttatagaggttttatgtatgctgtatatttaacgaatacatcttttaaatcatatatatgaaagcacgggattatgcggtttcatcaacacactcaaaacttttacctatgagtaaaaattaacaaacaatatacagtgcttaataagaaatatatagttttcatccttcataatacaaactctcctataaaataatatttgtagaaaagaataataatttttaaatatattaaaaaaaaaaaaaaaataacaaaatccggcgggtagcgcggacactcacctagtaaagcttaaaacttaaaggatattccatgggaattaatatgtgatggttatttaatttgattccatcaaatagttaacagaatttaagctgtatatttaatttcgtaaatgaaaatatgttattatttttttactgaaatcgtgtgattattaccaaaactagtagtcaattttgactggtacaaaccaccaccctatccagcttgtaactactaaaaatgatgaaaacaaaatagaagcacacatacaaaatagctttattattgtttcttttaaattcatactcaaactctcaaattcgaagaaaatactaaacaaaattattattttatcagaaacttctttttggcgtcattgcatcagaatcacatgtttatggtccattgacgtaaaaagataacacgttagagaaagagggcaaaagctgtcatcgtctacaattttggaagcaccccaccactgactaaaaaatcaactcgttaataattttcttagaaactactatcaacaaagaataaaataagcatgtgttataaaattagggtgatttatttcaatgtcaatataaagccaccccaatagaatgagtttttctttgtgttaaaggagtagcaatagtagtagtagtaggtgaatttgaattgaaattagtaatctataaagtcttcttcttcttctatctctcctcgtgaccattaaaaaccgagttattatatttataacataaaactttatattataaagtcttcttctcattttctttaaaaaccattccatctctcattgcaaaccaaacaagaagaagaaaagaaacacaaaatcaacaaca

SEQ ID NO: 2321 - DNA, 2000 bp, Arabidopsis thaliana
ctaaacaaacaatgttttctaaaaatggtatgcccaaaaatggtttacgaaaaatagactcaaaaatacaaatgtcattggcgaaaaataaatgacaattaatgaatatacaaataatagataaaaagcaaaatgaaataaattttcaatgtttcatttagttaaagatagtgtatcttgaagatcataacgtattttagattatgtacctgatttataagtggcttataaatcacctaccattttaccagtaaccgatctaatctacacacaaatatcatcttttactcttataagattttaaccatatttttagatctcataagaatcaatgcaatttcatataaaacatcaaaataattctataaattaaaattttctcaagataatatttaattttatttataaatctcttaattagccatctttctacatttatcaaaagatattagctatctgttctcataggcaatatgataaaaaaaaaaactttttccaagttaggggcacaaaaagagtttccctgggacttgggctgagaataatgaagtggctgggaaatgattagttaaggatggcttgatgaattctcaatattctgttgagggaacaaaatatactaggaaggatgcaagtccagtttggtctaaaccattgtacgaaccaaaaacaatcaataaagtaactcagggctcacaaatggtcgataatatttctaaagtttcagttctagaggatgagcaaaaggatttgatgatgggagatgtactagaggtacaagacaagagtctcactgaagggttgaatttcagatattttaaatcacgtttggagtaacaaaaaacaaatgtgagaaggagctcaattagctccaactgaatctagtgttattagggatactttggaaactccaattcaatctttaagatgtaggattgatgaattcatggaaatcggcagatccatctatgaatttagtatggtggtgtttcctaggaattgacaatacaattttacttggtgcaaagtgtcttcggaggtgtccctttctttttcactcggaattggaagttttaatattggcaataaaaaatatcctttcaagaaggataaagtgtcaggcatttgaaacagataattattcagagtaagttttgatggtacagtcccctgaagaatgactcgctttctctaattttttagaagatcttgaattgctatgtgtctccttttcttgctttcttctatttcatgtttatgtaatactaaggcaaactatttagcacaatattctaaacttttattttctgaagttattttttaaaccctttccctcctaattggacaaccaatcatggaattagtttttacgtaatgttttaaactcactatttcacctttattctgacctgttaatggaagacaactatgactttatacattgaaatgttgtcaacctgttatatattaatgttaacatagctaatgacctatcaatgtacgtaaagcgaatgtcaatcatattcgtatccgttaatttcatttaggaaatcaggctcattgccaatccactaagaaacatctctgatagatccaaataataaaaataatataatatgaagcaaaatagaacgaaatatctcacgcggaccaaactttgaactttattataaaacaaatcagcacgtgaaagtaatggtcggttcggtccaagatgccaagaactcctccggtccatccatcaacctaaccttttttggatataaaatttagcaaattccatttccacgaccacacaacaacaacacatccactcgaattttctatttccgaataacaaaaccggtaaactcatcacaaacttaagttactttgtagtttgtgttttgtccttttatgtaatgaagaagatccaactaactactactcaatatttttgtattgaccgttgatttctcagatctgacttttacttctccttcttccagatcggcggagac

SEQ ID NO: 2322 - DNA, 2000 bp, Arabidopsis thaliana
tatacatttttctaactccttaacgtgattgtatttagtgtaatccaaatggttcatgaagtagtatattccgtcgaaatagtttatatctagttttcaaatgtatatctcctagtgaaaattcattatatatcacagacgcaactgtgtaacttgatgcatcttcctgcatgaaaatatattaacaaagactcatttctgttctccttccagatacgaacgcttggaatgctaaggtcaaggttccaatcattacctggtgcatttaatacgtacctggttccttctgataaaacaaggagaagagggttttccttgtcaaaaagatttgcagaggttacacaagattgatgctcgttttatcaacaaagtgattgtggaaagaatgttgtcatacatctactaaattatatctgtatgcaggtcactgcagcaagaagaactgaagcggcaaaattctcccaactctggaatgaaatcatttccagcttccgagaggaagatctaatcagtgacaggtaacaacttaggtattatactacctttcttcatgaataccttattttccgtgccttaaaaccaactattttttcagggagatggatctgttgcttgttccttatacttcagaccctagtttgaaactaattcagtggccaccatttttgcttgcaagcaaggttggtggtctccctttgtcatcaaaaataccgttttcttcttattgctaaacttctcatcttgttacagataccgatagcattggatatggcagctcagtttcgaacaagagattctgacctctggaagcgcatatgcgcagacgaatatatgaaatgtgctgtcattgaatgctacgaatctttcaaacatgtcttgcacaccttggtaattggggagaatgagaaaaggtatttcctcattcatcagaaaagttcttgattatgatttatgaagcactttataaatcattaagaatctataaggaaaccagcactccaacttttctcttctgttgaagctactggctgtcttattagttttgataatagatgttctctaccatgtctctacttgattttctgacgtattgtagtaacatttctcctcctaaggtggcatttttaagtgcgtcaacattcctctgttttgataataaaatagttttcttaacctttcacatatatatgtgctccaacctgcaatttcagtccctctattgaattttcattcatttaattgatactaagaaaagatataatgtcacaggattattggtattatcatcaaagaggtggagagcaacatatcaaagaattccttcctttcgaatttcagaatggcgcctttacctgctctttgtagtaaatttgtcgagcttgttggaattttggtaagtgaacaacatccttgtttaatcattggtattgatttaaggctggttattttttatgccagagacagtgcaatcccctaatttaggtctgtttattattaatgttgtgctggaagggataatacttgtgaaatgttatctagggaactaaatagttatgtatacttatgatgctgcagaaaaatgcggacccagcgaaaagagacacagtggtgctattgttgcaagatatgttagaagtagtgactcgagatatgatgcaaaatgaaaaccggttagtgagctatagagaactcgaaagttctttttatgtagatgtatatagtaaccacacaaacaagatttgacatgggtggcacctttcttcagtgaattggtagaacttgggcatactaacaaggaatccggaaggcaactctttgctggtactgacgcaaagcctgctatactgtttcctccagtggcaacagctcaatggcatgaacaggtaaaatctcaaaacaaattataaggctaattcttagagatactctgtatataatgatctaattcattgttgtagataagtcgccttcatttacttttgacggtaaaagaatctgca

SEQ ID NO: 2323 - DNA, 2000 bp, Arabidopsis thaliana
ttattgattttcttgacaaatgggtggatgacaataaggagtgttgagtttttctatttggtagtcgtaagccaataaaaactatataacagtctatatcacttgaattctgactgattaaattcttttaaaacgaattattctctttggaaatatttctccaaaacttattttaatattataccttgactatttgattattcttcccttttattattgacttttctcctgagaagaacaaaaccttgtctgattcggtttgtcaaggtgtaatatatatttttttttttttatcaattctcatatatataatgatgttgagatgtattagtcaagaattttctatactttttaagcaaaatcatgaaggtttctatgaggcttctgagtcatttcttgagcatgttcatatgtgacgtccctgtagccctcatagattaagaccacaaaacttggtctacacaagttttaacaaaagaaatagcatcaaaaactttgtctggtaaacttagatactttgaattctgtcataactatggtctatggtataagttatgagtggtgaataaggttcctcataacttggttaaagaacatttcttaattaggacttgtcgaaaaagttgtaatacttcatacttgtagtaatatacgtactagtgatgacatgctataaaagtcatattggtttaagaatgataacataaccatttgtatcattagttgtctaattttacaagagccatttgtcacataaatatataaggttacgtgtggaatcaaaaactaggtagctaacaagtctttaatacctatatgtatcgttaattcaactgctgtgtgtaggtttgattctgatcatgcgctcgtgtgcatgaaagtaccacacatgcatggaagtcaacgtacaagttgataatatccactaggtccgatctaaaaattatgtcacttcaactctgtggcacggcattgaagtcatcagccaccatgcatcatctattacgaaaccgatttctttggaatctgaatctgaatgttagtcctagtcccactaaaggttgcttcgtcgtaaaagttaaagttttttttttcaagttttttctttctttctattctataatttccaaaagatcagattacatcaaattcagaaatagaaggatagtttaagttcatttcaatgaaagttgttgtagcgtcactatttttttaaaatatccgtttttaacaaatttagctaaatgacatttactataatgtttgttttgtctattatacataattaagaatcttttaaatggaacgcaaggagtattaaatattgggtttctgaccaaaagaaaggatggcattgattactagagatttcaaattctttcaaatgatatctaagtacgtacaaataatatctaagtacgtacaaataataatgtatttttaaaaataatatgctcatatattggtccaacatttaatggacaataagaagacatggtgtgaatatatctgactcactagccgtgcatggattggctgcttcagaaatttctgcactctatccacttgaaggtgacatatatatacacattttaatagtggttattggtacttacttggagtataaatatacgcacatatcagatcagattgtatcattattgtctacatatctttttgaagccgtcataacttgcaagtaaagaatggtcagtctaatgttctttagttcggcctcacctttatgctcttctccatcaaaaattcccaaggctaggtacttgtttacaattataatgcaagacatggattcaaatattttacgctattaagaagtctttctcttataatcggcttcttgatacacttaacttcactctttcttctacagtttggacttcgagatgaagaaacttggtaaatttttctcatcttgactctcaaaactatgaacagaatatagttttatagttggttatcataagtctcttgtcctaatt

SEQ ID NO: 2324 - DNA, 1816 bp, Arabidopsis thaliana
ttgtatgtcgctatgtctagagtgaaatcaaaggcagggctgaaggttcttattacagacagtaaaggaaaacagaagaatgaaacaacaaatgtagttttcaaagaaatattccaaaaccttaagtagattatttcttcaggtatgatttatttattttgattattataacataaatatcattgtacaaaattatataacatgttaacttagtcatttttatatttgtaggttggaataattattaaaagcatttcgttttcccattttcttaatgcaagcttttttaatatcagtgaagaattatgtagtctattcttttttcttttgttttttttaaaattatgagtttgaagtatgaagaaagacattttctaattattatttgtcaaattttataattcacttacatgttaatgatatacacgaaaatgtacaaatctactatgtgtacacctacatataaaaaatatataattacgttcctaaacgtacataccaactatagaaatatattttccatagtacaaaccgaggaaattacatatactaaacaaaatatggtttgacgagactaaatatatttagttgataccaataatacatgataaacaactacatgtttaaagataatgaatatatagtagagtttctgtggaatacacaaaactgagatttgatgattgattaaactaaaaataatgtgcgtagcacggatactgacctaatttctattctattttaaattacgggtagttaggtaaaatggtattatcagattcctaatatgtaggattaattacaatccaaactccaacaaaatattcaaattttacatttaaataagtaaaacagcgtcgtttaagttacgtcatcttacccatttcagttgactcaacaactgtaacgattgattaccacctatttattatgactacaaattaggtattacatataaagtttagatataaaattcaaaaaatttgaagtttgggttggaattaatcctacgtgtttgtatatgtcaaaaaaaacacaattttcaaattgtatgtgtctgaaaatatgctttcttggtttggattttatctataattcaatgtttttgtcaccctaagatattttacaaaaacaaacctaaagtaagttgcatggaatcataagcacatagaaagaagcaaaacttttaagaagtgtgaaaataaataaacggatataaaagataaatatttgattttataaacggatataaaaaataaacatttatgaataacatttaaattctaaaataatccgtattttaaaagaaattatctaataactctgttttaaatatttcaaccaaacacattcttttttgttaatacaatttaattatttgatttaaaacaacacaacgacaaccgttgttagctgcagacaaacaagtaatacatactgtctttgatcgatgtcaatggtcaatatacgctaaatccatgaacaagcaaacaagcaaacgaacagggtctaactcccacatttttcttaccgatgttatgatcctcgttgaaaatcaaactttttattaatcaaaagactagttataattataattgttatgaatttggtgagtaacacggggtcaatactagtcaaaaagggacaacacgcaaacaagaaaggaaaaagaaatgtgagaaaaaagaaatgtgacaaaaaagaaatgtgagaaaatagaaaggaaaaagaacaacaagacgacataagaaaaagcataaaatcaaaagatacgagaaacgtcgaatctccaaaccgttattcaccaatcaagacc

SEQ ID NO: 2325 - DNA, 2000 bp, Arabidopsis thaliana
atctcattttatccgttcgcattaaagttaaatagattgctgacatattttaaatctaatagaaaatgccatctggcaaataaacaacggacacgattttaaactaaattttaccaaaaagaaaaaacttatacgacttttcttgcttagaagtctttgcattgttaatagattgttgaaaaggtttattcattactttcatgcagagagataacatatcatcgcgtggggatttattcaatccaaagaaaagcttccaaaaactgactttgcttcatgaaacactcactctaatttgcttcatcaatcttaggactgacttttccaaatcaatatgcgaactatcttctaatttacattggtttcgtgttttttcgaaaggagacaactatctttttaaaagcttttctatagtgtgatgacaaaaaaaaaatgtaattgttagttgcaaaagaaaagtacaatagtcttttctagttttgagagtttaaggtttatgatcggaacttagagtttaaatttaaactattttgttaatttttggactgataacagtttttttttgaaaatattgaaacgttgtttacctaatgtaacatgttattctacttaaattactttatattttaataacatataatattgaataggatatcataggatattattacgtaataatatcctatggtgtcattttataagttagcacaagcttgttttaacttataaaatgattctccctccatataaaaaagtttgattttatagaatgtttataccgattaaaaaaataataatgcttagttataaattactatttattcatgctaaactatttctcgtaactattaaccaatagtaattcatcaaattttaaaattctcaattaattgattcttgaaattcataaccttttaatattgattgataaaaatatacataaactcaatctttttaatacaaaaaaactttaaaaaatcaatttttctgattcggagggagtatatgttattgcttagaatcacagattcatatcaggattggaaaattttaaagccagtgcatatcagtagtcaaaattggtaaatgatatacgaaggcggtacaaaattaggtatactgaagatagaagaacacaaaagtagatcggtcacctagagtttttcaatttaaactgcgtattagtgtttggaaaaaaaaaacaaagtgtatacaatgtcaatcggtgatctttttttttttttttttttttttttttctttttggataaatctcaatgggtgatctattgactgtttctctacgtcactattttacttacgtcatagatgtggcggcatatattcttcaggacttttcagccataggcaagagtgatagagatactcatatgcatgaaacactaagaaacaaataattcttgactttttttcttttatttgaaaattgactgtagatataaacttttattttttctgactgtaaatataatcttaattgccaaactgtccgatacgatttttctgtattatttacaggaagatatcttcaaaacattttgaatgaagtaatatatgaaattcaaatttgaaatagaagacttaaattagaatcatgaagaaaaaaaaaacacaaaacaactgaatgacatgaaacaactatatacaatgtttcttaataaacttcatttagggtatacttacatatatactaaaaaaatatatcaacaatggcaaagctaccgatacgaaacaatattaggaaaaatgtgtgtaaggacaagattgacaaaaaaatagttacgaaaacaacttctattcatttggacaattgcaatgaatattactaaaatactcacacatggaccatgtatttacaaaaacgtgagatctatagttaacaaaaaaaaaaagaaaaaaatagttttcaaatctctatataagcgatgtttacgaaccccaaaatcataacacaacaataaccattatcaacttagaaaa

SEQ ID NO: 2326 - DNA, 2000 bp, Arabidopsis thaliana
ttcctgtaaataatacagaaaaatcgtatcggacagtttggcaattaagattatatttacagtcagaaaaaataaaagtttatatctacagtcaattttcaaataaaagaaaaaaagtcaagaattatttgtttcttagtgtttcatgcatatgagtatctctatcactcttgcctatggctgaaaagtcctgaagaatatatgccgccacatctatgacgtaagtaaaatagtgacgtagagaaacagtcaatagatcacccattgagatttatccaaaaagaaaaaaaaaaaaaaaaaaaaaaaaaaagatcaccgattgacattgtatacactttgttttttttttccaaacactaatacgcagtttaaattgaaaaactctaggtgaccgatctacttttgtgttcttctatcttcagtatacctaattttgtaccgccttcgtatatcatttaccaattttgactactgatatgcactggctttaaaattttccaatcctgatatgaatctgtgattctaagcaataacatatactccctccgaatcagaaaaattgattttttaaagtttttttgtattaaaaagattgagtttatgtatatttttatcaatcaatattaaaaggttatgaatttcaagaatcaattaattgagaattttaaaatttgatgaattactattggttaatagttacgagaaatagtttagcatgaataaatagtaatttataactaagcattattatttttttaatcggtataaacattctataaaatcaaacttttttatatggagggagaatcattttataagttaaaacaagcttgtgctaacttataaaatgacaccataggatattattacgtaataatatcctatgatatcctattcaatattatatgttattaaaatataaagtaatttaagtagaataacatgttacattaggtaaacaacgtttcaatattttcaaaaaaaaactgttatcagtccaaaaattaacaaaatagtttaaatttaaactctaagttccgatcataaaccttaaactctcaaaactagaaaagactattgtacttttcttttgcaactaacaattacattttttttttgtcatcacactatagaaaagcttttaaaaagatagttgtctcctttcgaaaaaacacgaaaccaatgtaaattagaagatagttcgcatattgatttggaaaagtcagtcctaagattgatgaagcaaattagagtgagtgtttcatgaagcaaagtcagtttttggaagcttttctttggattgaataaatccccacgcgatgatatgttatctctctgcatgaaagtaatgaataaaccttttcaacaatctattaacaatgcaaagacttctaagcaagaaaagtcgtataagttttttctttttggtaaaatttagtttaaaatcgtgtccgttgtttatttgccagatggcattttctattagatttaaaatatgtcagcaatctatttaactttaatgcgaacggataaaatgagattttagcggttaacttgatcaaaatctaataaaaagttacaaactaaaatgaatgataaatgaaggttacatgcatggagaaattttttactttgtaaatgacttgctgcctaataaaaattagttatttttaatatttaaaagaaaacataatatgtaagttaataagtatgaattgtaaggaagcaaacattcttacgttttgaaaaaagaaaacaaaaagattcctacgtaagtatgtattctctttgcttctccacaaagatattctttgtataggacacaatttactttaaacacacaatacaatatgtatatatactaatcaatgatcgttatatatattctttgtataggacacaatttactttaaacacttttcatgcaatacaatatgtatatatactaatcaatgatcgttatatatgtccatcgtactcaacctcaaacatcttaaata

SEQ ID NO: 2327 - DNA, 2000 bp, Arabidopsis thaliana
ttttgtttactgggcattttcaggcttctcataacagttattgggaatggtcaaaatgtctacaatggattttctgtttacatcaattcaaataatgacccaatgttattttaagactttttaatctttataatttgaattacataataataattttggaaatacaaatattaaaaagaatcgaaattccatatttttaacagtaacttggattaaaaacattatataaagagtaaaaaggattaaaaatgcattggttcataaagaataatggtaaatttgttgttttaatctttatatagtgtttttccaaaattattctttctaattacaattaaaatttttttacataattaattttaatggtaattatgtgaatggtttcggacaatgtacaagttgtactcatcattattccgcttattttcataattattccgcttattttcattgacacaattaaatcttgacctaaatctaaaagattacatataatatattttatccaacagaaaatataaattatttttaaaaatagaattttagtgggttttggggctttaagtgcactgatcatgtctggtccaaaattctaatattgctttccttttttatttttattttgccaagaaaccaattccgggtttaacttccttgtaaaaccatccttttcatatatatgatatttgcagtttagccaaaaaaaaaaagttgaattttaatcaacatttttaagcacgacggtttcaactagtagtaccatatcgcgggttataccattaccggaatttattagagattttcaaaatttacctgattgaaaattagcggattgtagtgttggagccaaactggattagtgactgagtcatcgggtttaccgggccaaccgcggttccgctcgaatctgaatacatttccctcgtcaaaataaaaaaagtcagaggacgattggtcgatgagaaaaacatttaataaaggaaaaaaaaatgaaaaaacaaatggggcctttggagcgatgtgatgacgtggcaacccccggagactttcaaatagcatattgagagttttacatgcatgtgaatatcaagggtaacatctagagtcatatgaattgcgcgtgttatgtcgttgttagtcgttcatgttaacaataatctacgtataccgtttgtgacttttaaaactaagttcatgaacctattacatatagatcaaaatctggaccataattttattggtgtattgttagaaacttaaagttcatatcactttctctatgtttcgtggcctacttgcaattttttaggaatcttttgaccattagttttttaaacgagtttaggactttgatcactaaggtaaatcgtttaaacaatttgggatcacttaattattgacatgattgtatgttttgattgggcatgtcaaacagatctcaatatttatgtaattacaaattattgcatatttcaatacatcaatgtcatggtcttcacaacgtgcctgacaaatcctagttgtttggattccaaattgttaataattcacaagagctctcccataggaagtttcttcgataattctgaatattatataatacaaaatcacaatttggagtttaaagacttttcttctattaaacaaaatagagtcacgtttggagttcgttgatagtcacaacttaacaatgacacattagaatattcaaagttttatcttattgatcagtgattgacattaaaagttgtaatcaagttatataagcgttgtaaactctttttgaatcatcttcacaaactaaaagtcaacatgtatcatatatttcagatctccggcgaagttatcaagggtttgggattgaagacgaaaattctgataaccatcgtctttagtaccttactaattttgtctgttatgttactttcattctcaaacaacttcaacaataaactttttgctgctacaatcaacggtaagaaagaaaaaaataagcatcc

SEQ ID NO: 2328 - DNA, 2000 bp, Arabidopsis thaliana
ttatccataatgttttatatgttcacaattaggaatttgggttgaatagttgaaaacatgaaataagattccggtggctatgaagtatgaataatcattatttggtcaaacataaatttcttttttcaaacgaagaaaaaaatgtcaaagaaaaaacaaatacaggttatcctattatattatttgggaagtacattttaaatgtaaccttaatttttgtaagtaattacataggtatgccattagaaataaaattttaaagagtaaattattttatctctttgaggattaaaaagtcaaatactaatttaattaattaaatttaattaaaaaacgaaatacattattaattttcaaaaataataaccaatcaaaatcaacataaaagatttgatatctaaattttaattaatttaatttaattagaaaaacgaaatacattattaattcccaaaaaagtaaccaattaaaatcaacaaattagatttgatatctaaattataatattaattttttcttaattactatagttcacttctcatctttatatgattctatttttgccgaaaaataatatcatcattatagaaaaataattagagttttttcgcatatgccataatttaaatttttaaaaacgaatataaattgttcaatacatgaaaaaatattataacgggtgaaaaatagatttaagaaaactttctactgagtaacatgtcataatttgaaatatttatattcaattttatacatattatattgaaaatttataatcttatatactacaataagtaataacatattagatgtgattcaatttttaatacaagctgaaaaatcctagaattgacgggtttagatcgatattaatacaagatggtatactacaggtgaaactcttaaattaaaaatcaagctacaagtgtataatcttaaacactaaacaatatagataatatcaacaaaatatatacaactcacagtttactatacatttaaaatcaaataaaataatatcatatacttttaaatcatctttacaataaaagtttttagttgaactaaaatataagcctacctgcggtatactgcaagttaatatctagattaaaaggcttattgaatctaaagacaagtcatcaaagatttcctaaactgaagcaaaatatactgaatattcaaatatctatctgttacaatggttcagacccatattataaaaggaccaaaatgattctaattacgaatgagcaggaagcttgatttatcaggcgtccaaaattaaaatagttatctgattttactcggattttttattttaaagaattgaaactttaaaatgtttcaagaaatcattctaaaaaatattcaattattttttatttaataaaaatataggcggttaatatctaattattattatttaagtaaaatattaaaaaggtagagaatcacaaaatagggcccaagcccaaaatccaacctcatccgaatctcaccttctctcccaccagccaccactctcccctatataacgaaccttcctccttcatgcatttctcaccatctctctcttctttcacgtctctcttccctgaaactttcccgagaaaattctcaatcctctattttctcgagaaaattctcattctcattttctttcagggaaaagttttgttgttgaatacagatttggaaacttcatttgtttttttccgtttttaaccaaaatttttaaaaaagctttcttctgaacgttaatcgtggagagtttcgggtcgggtcgggtcgtaaaaggcgggtttcacggtggtgatagattcacctcctgcttccttctgagggggttagccccgaggctcttcgcctcggcgggtttcaaattcccccaaatctaacaaactcacagattcattttctccattttttttgtttgttgaaaatttgaatccacaaattttgaattcatttgtaaccgttcgttgaagaagaagaag

SEQ ID NO: 2329 - DNA, 1622 bp, Arabidopsis thaliana
tatcacatacatgtgggatagagcagcttgaatctgtgatgaaggaactttaccgtgaaagtggtaataacaaatggcccctaattctattgcacaagagacgggtcaagacgcttttagaaaacccaactcaccggaatctggttgaagaatggattagtaacggtgtcctgtatgcaactccaccaggttccaatgatgattggtatgaacttttagcttctctcagcaccattatttcgacaaaaaacacaaacaatgtttggttactacactcatcttttgttttttttacctttccaggtattggctgtatgctgctgctaagctcaagtgtttgcttgtgacaaatgatgagatgagagaccacatttttgaactcttagggagtacttttttccaaaagtggaaagaaagacatcaggtaaagttatataaacttatatacaatatgtaactttttatactaaaagtgcaactttgagaagtctacaattagaacatttggtttatggttttggtacaggtccggtatacttttgtgaaaggtaacctgaagcttgaaatgccgtctcctttttcggttgtcattcaggtttgtttaccatctcagtcctttttttctccggtttcgatagtttctcaattacgtttcgacaaaatcaggaatcagagaaagggtcatggcatttcccggtctcatgcgaaaacaatgaagagtcttcaagaacttggatgtgtattagcagacaaagtattttagattcacctaagagtaatgggaagattccttagtagctgcaccagcttattgagttcatgtatcatttgttatgagttttcattctttgtcctttgaagattaacacaaaaaacgttcattggttctataataagggactgaacttttctcattagaaagaacacaaaaaattgtagtagaccaaaccgaatcagaccgggttggttaaaccgaattgacgcacgagggttttctattccctttcacggcttcactcactctactttatatagtccacgtcagcatcatttcacgattgcatcaacgagtcattatcaaccgtacgatgcttaaacccaaactgatcaggaccgttgatgaacgtctcttatctccttccccgtcgtagtcgcaggctcgcagccggtaaagcgcatgaaaggatcttcacactttttcaccttctctctatttctctctctctctctctctctctatctctaacttctggtaaggcttctctccatttctcttcttctttcttcgtcttctttcttctgttttggttttcgtttcctgtaatcaacaaagttcttcttccatgtttggagatccctatcaccgcttagacctgtgtttaagcgatttggttaacttcaattgaattttagtttctggaattggtaagggataaggattctaggattcgtggtgattaactctgatctaggtttcttttagctgtgtgctcgtttttttttttttttggttgttggaatttatattgatggttaaagcgtagttggtaattggagtgatttctgatctctgattattgtatttgtggcttttgtttcccgtagcggtggtgatctagaaa

SEQ ID NO: 2330 - DNA, 2000 bp, Arabidopsis thaliana
tctatgcattttcagttttaatgggtccgattggtgaccaatttttacaaaaacaatagacaggaacaacatgtttctttttttttaccatttaacagtaatttttttctccaaattattatatgtggacctcacattattcttaatcgttccttattttttgaggaatcgtagaagaaaattgttctttcccaaatttgatgaggaataaacagaaaaaaaaattaaatatatattaattaaaaattaaatttttaacctccacgtttgtttgatattttttcttaacgtccatgtttatttaatatttaatttagaaaatattttatttattttttcatttttatactatttattttatgtttgggttatcatttacaataacatttattctatttttcttttacactcattcctttttatttttattttataattttttctttttctatttattcttttttaatcatgttcatttttactctttgtattttcttataggttaccaatcggatccaataaattgtgttttttttggctagaaaaacattatgttcagcaccatatgctacactttcacgacgaatttaaaggttctgtggacagaagacaagtcaaccgcaaagcaacccaagttcttgaaagatgcatgagtagaagattcataaatatttttttttttttttttttttaaatataatttgttctcgtcgatcttccaagtaataacattttcatatgaatcgtatctaaataaaattatgttaatcccgcaaattcaaacctacaatatatccactatttttcttctgtcaaaataaactatcggtacttatagatccggaatataacataagatgataaatatttacttttataataacgataagaaataataaaaagctacttttggtaataaaaaaaaatggtagtaggagatttcaaagttgacaataaagcggctcacttctatatttggaggaaaaagtataatggatccgattattaatacaaacctgtacaagtttttgaacgagtaaaaaatcataagtaattcaataatagttaaaaacagtataaaataggggtatgagtcacgaaaaaaattcgaatggtgaccgaatcgcacattaataaaattctctgcatatatatatatatatatttgttattatttgaactgcaccgcactttatccgcagttgaactgcatgtttccattaagactctgagagtaatatatatgataaagcttttatttattataatcaggctcgactcattagggtggagcgaaagtgcgacggtccaaaccttatgcctatttaaaaaaatttacataagaaaaagttttttattttttggaaaaaaaagttgtcaaaatataattgataaaatccccaaatttctttaaaatatatattaaaaggccctgattttatttctaaatgacttttatataccaaagagccaatatttttgtaaaatgttaaaacactcaagatatacttcaaaataattgcaaaagatgcccaaaaaaagttttacctaacaaaaggtccaaaaaaaagcaaacatttaccctaagactcaaatttatgttgggccgggtctggttattattaaaacgatcaaagctagtgttttgttaaaccgcaattttgtagcatttcatatgttaagatttgatggttgaaaggaaaacaaaaattgtgaataataatggttatgagatctaaaacatcaaaggaaaatcaagaagagaaaggtataaaatattgaataaataatatgaatgtggcagttatagtttgatgtagaataaaagattaaacaaaaatcaagagccccaccagccactccttcaaacgtgtcctaccaactctcttctagaagcaattaggctcaccttccacctccaacacctctctccccttctctctccataaaaccctcaacaacagaatcaaaagcatcatcatcatcagaagaagagagtc

SEQ ID NO: 2331 - DNA, 1980 bp, Arabidopsis thaliana
aaattatactggagaaacatcatcacaatcccaatcttgagtttaagaccttggagatgacacttcaacttgaatgacaatgtttatatgtatttttccaactcttgttttttcctaaacaatttgtatattcatctttcaaaagttttcttatgtctaaaccgaagtccgctatacaaagattttgaggaaaactggaaaagtgattttgtgttaaaatcgaattagttacgagaaataagtcccaactaaaacaagaactttatttcgatgaagcctgctttactttaagatggtgttgattggtgaaaaactgtaaagattggctatgcaaatgaagttgtaactgtgaatttaatcacttgaattcacaagttctcagtgaaacagagaagagtgcattaaaattttgtatgatatgacacaaccagtgaaatacagtcaccttgcagtaaaaaaaagctttatcatgtatgtggtgattttttttttaataaccaatcactttaatggttaaaaagttcattttacaatttacaagtttggttataaagtgtatattagatgcttcttattttgggaagtttcgttaatattgctgtgttctgtttactgaataatgttcggcatttgaagacaaaaaaactaaaagaaagtagctttttctgaagtttccgagaaattttcatatgtttgtcatatatattcttcctagccccactagtcgaactcacttgtttttattggtgaattgtttggtcttttggtaacaaagaaaacgatttaaaatctataaattttatatctacatatatctactttacatttattgaaaatacaagaaatattagagtttttttttcttagttgtaccatgaaattgaggtttgagtcgtgttgagttctttaaatggaggtgctccaaattaagaaaatatatattgggagtctctcacttagaaagtagtatgggaaaacatatctattattgaactgcagaatgttgattcaatgattaaagattccaacattaaaaccaccttaaagaaaaataagaagccggtgagataacaacacaaactattggtactacaagatttggctaaaataaaaaacacgttagtacataaccttataaaactaatgtaagaggctaagagttcatgcttttcttttagattacacataatatttaaaagctaaaatgaaatcattttaaagcctgaataattgtttttgtccattcatattattgataaaaaatgatgttacattttatttaattatatatatccacatcagtttttttcttagttttgactacaacaaaaaaaatagttaattttatagaaattttttaaaatatttgttttatgttttaggttgtgtccaacaaagacaaataacttcaagtctttggaggagacttcccaagtcaatctgagattaaacaaaatggtggaagtcccacaatcaaaaaagttatattcatttttcacactaaaatatgatcaaactaattaattacaaaaaaaaaagaagaagaaaaaaagtggagtaaacagaagaaccaagctctggtccaatcctcatatgaccatttctaattctcttaagataaaaccgtgtgggttccatccactttgatcaagacctttcttcttctttcaagtaaacatcacaaacctttaagaaatatgaaagaaaataaaacacattataaaaaatctcacaagacttcaaatttcaatatgttaaatcattcatgcctccacatacagtatttttatttttctctcttgacttagtcttctccatcaaagtattgccccacaaagaaaatctttcacaacatattcggtcctagttgtatataaatgtgtattgattcacctaagtgataaccaccaacaactttttcacttacacagctttaaaaagaaccaaacctttataagtgttttttagacattgggagag

SEQ ID NO: 2332 - DNA, 770 bp, Arabidopsis thaliana
catacaggttcatgaactgatgtctctccatctggcttctcagttatagaataaacagcttgaatgtgtgtttttcagtaatgatatattcatcgaattcataaaaatttatatatgataggatcgtgaactttgttgatagaaaagccgcatcaatacggtatttgttatcagtggtcactcttcgtctttaactacccttaaacctatatatcttgggtgtttatctttgataacttatttcaagttgttacaacatacaacatctgtaaatgtttatagacatcaaagtgaaattgaacccattaaatttttggttccttctgatccggttcaaaggttaaaccaaattgcccaaagagagaagtggcatgttgcaaaggaatatccaattagttgattcatcatcttcaattagattcaagttacagccaattccttcctgaactatataccaaatgcctcaatttagacccgacccggcccaatcttacccagtaagagtcgtcgatacgttctctgaagcgcaagtcatttctggattctcatttaattggccgttcggggccaaataactctttaattttctgcagtctcatttgttattcgaccaaaaataatttatatccctttcctcaagaaatcttcagaaccgacttattagagcttcgagtctcctcaaatcttcttctacgattttttcttctaggtttagagcttttgattctccgatcaatttcgcgatttgttgaactaggatctgaaattag

SEQ ID NO: 2333 - DNA, 2000 bp, Arabidopsis thaliana
ggttctttccaaagatcattaatttacaaggtttataccggacaatgcctccccgactaatagatttacctgcactatatacacacgacaaacatttttaattggacacataatcacacaaaaaaattactagatgaaaaaattaaacacttaatcaactattagactacaatttttactttttctatgaccatttaatattctaatttcactcatttgttgattttaaaactatatcttcataaaaaatggactatatatcttgtttgatgaaatatgttgtttatatataaaagtttcaaaaactaactaatttgtgagctagggtgaaggacatggtactccaaagattgtacaatttctttgtgttcttgaaaaggttattacataacgataaatatagctagaaagatattcaactaaaaattggaatataagagaaaacataaagataatagaaaatgattggtgaatgaagaattatgcagggttctacaagaagaaaacaaaaaaaaaaggcataatgaagtaaaagtgtttgaatctttagagtagtaaaaataatctcaatttgcaaacgtttggaataataacttttctggaaaatctccaagttagtaataaaattgtttgaatcttgtgttggtgtttgtagaattatcatcaaaatcaagctgcttgaaccttaggggttactccttcacttcgttttattggttactgtctccatttgcattgcgatgttttcttctcgtttttactactattactacggtttatgacgcgcctgaactcatcttcaccatctcctatagtaccatttatgaattcaagtgataatcgatgactcaagttttcaatggtgaatcaatttttttttgagatctttctcttgagtatctttctattcacatcaaaatccactatttaatacgccaacatcacgtctaatgaacttgacaattatttctttattttgttttgtttgtatgtaaccaaaatattcagttttggattttgacacaataatttaccaaaaaatgccgtgaaaaagaattctaaaaacagattaatagtttttaacacaaaaagagctatttacttttatttaattggacatttatccatctttcatttttttaaattttatataaagaaaatacatggatatcaatcataaaatcatcaaccaagattgaaaatggtaattatcatttagttttatagaaaattatatctgtgtaagcaaccctgaatattaattgagtttacatgataaaaaatatagcttttgaacaattattttaacaacagtaaatattaatttgctatcttaaattatagtataaaagtgaaattaattatttaaaactataatctaaacatatttataatccaaccgtatagagacttgttgaaaagtaaaataaagttttcaaatgaagaaaatacagaggataattgtaggggccttgattgttttctctttatttggtggtctcatgtaaattatttttctttatagttgactttgacctttaaaacctctataattctctctttccttattcttcctcaaatctttgcaccaccattcttttatgactcagtcttctctctctcttctctcaatgcccatgataacaccaaaccacttgcttctgcttctcacaccacaaaattctctattcaataaataaatctctcagaagaaatttcttcgaattggagaagataaaaaaagttttatcttttcttgattttttttcttttttttctaatcattcacacccaatttaaacgagacttgtccaatctctatccatcaatattgtatcatttcttgtaaagtactctgttttagcttcacacgccattttttgtttttccatttgacttctgtaaaatcctgacaaagaattgtttaagacatacatatacgtgttatatatttgtaaaggaagcaaaaagtgtttggcttttaatttctctctgttggg

SEQ ID NO: 2334 - DNA, 2000 bp, Arabidopsis thaliana
tttattgtatgattgttattatccaaaatttagcggtagctttaatatttctgctccaattctcattttagctgtgattatacaattgtggaaataatagcattacaagtagaggaactggtagatgcaactaaattataagtgtgaatcttagatgagtagatttatctctatcaacatgagaaccagcagaaacttaaaacattatttatgtaagatcaacttcatattttatggcagctgtgttgaattttcttatggccaagcattttaataaaacaaagagaaaattccaaaaattacactcagcttttcttatagtactaggttttatcttttggtgttgagattttttatgaaaatagaaaatgttttaagtgtttttatagaagtagatcaaagtttaatgctcttcgtacgttctatgtatttggactttaatataatcgataatcgtattcagattctttatagaaattacgctctctccaaactattggagaaagcttttaccattaggaattcgaaattttttgttccccaattttgaacatatgataagatcttttaaagaacactcgacaatgtaaaatttaaagtaggtctagcttcttatccgtttaagagaacgatttttttttttaaatgatatgattcacggtttgtaaagttatctattggaaaataaaaaaactgtaagtacaatactgtgatgtcaaaaagaaaaaaaaagtacacccaaactaaatttgtaccacgtgcgagacaaattgtagtctgcgatcttactcactacccgacaatgacatgccccatgccttagttcttgtaagaaaaaagtgatatcctatatacttcactaattattggtaaaattatgcaaaactttcagtgctaaaagtttgatttatactgtactagttgttatttcaacgtagacataccaaaatgtttattcaagaaagcctatatactagcaaaagtaaaaaagaatgtgacatctttgatgaaccaatgtgaaaagtcaacataataaaacttgagttttcagaacaaatttagttgtccattgtttcgatctgttaatcaagaccataaattaactcttaactatatgcatctaataataatattttgtagttagctaagttaagcacatccaactcttaaaaaaagctagtataacgttaggcttataatcattctcttaataataagttatcctaaacaaattattgcaattttttattctccctacttgcactaagtatcattacaccagtaaaagatgatgatcccttaaattaatactaattaaacaagcaattaaggaatgaagaaggtgagacgaaaccgcgtaaaagacctttcttctttgcaccatcctctctccttcatcatttcacaaatccacaaaagaatcaatctttttaacactctctaatgattcaacgaatccaattacccaaccagaaacagcaacacatatagagatatatactattaaacaataacataacaaagaaaccattttttctcttttgttattgacttaaacaaaaactatcaacgaataattatccttttttgagtttttcccatttcttcttcgtctccatttcatcgtcttctcgctgttctgctatattccggtactagatcctctgttttctcatgtttcttttattaccaaatgatttcttcatttattgttgtgtctttgattcttttttgggatctataatgatcgatgaacatttaaagctacgacttttcaggagctcttgtctttttttctttaatctttgattatgttacaaaacaattatgttttttgaagcttgatctgatgtgggttctttgatttcgttccaaagtttgatacttttttggcttctctttatctgattttttttgtgtatgtttgttcatgaaacagtttcgttggatgaggagaagaagaaagtgaaaaaagttgtgaaatagagagagtttgtttc

SEQ ID NO: 2335 - DNA, 2000 bp, Arabidopsis thaliana
actggtttctctatcaagccttattgtttttatggtttctgtattgaagatagatctttccatgaactcggattccttgaaaaggaggtttgtggcttcatgacaaaggttcttccatcgtttataaagaatacatatcaatacataatctttgaaaaacaacatagatatgaccaaaactagaagctaattaggtcaattcgatagtaaatctgattcttttttgttgaatcatcccttttaaaagaattaatagataggaattcaacaacaaaaaatcagattcattattgaatttacatgattgccttcttgctttgaccatctctatcttgctttccatagcatgttttctctaagcgatagaagaatctttgtcgtgacacgacaaacctcgtaatcaaagaattcaaatttatgaaactatttatgttttcggtagagaaatcgtagagcccataagacttgataggattttgtttgtttgtactattcgtaaatggaaccactagttgtccttgtttaattttgttcatatattttcaatgaaaaattagttcaaacataataccatcctacctataactattaaaacaaatatttgaatatgatatcaaacttaattctttcatctatgaccagataatatcatctatcataaactttacgttcatatgctctctaaaaaaaaattctcgaacctcaaacaataattaattatgagcttttatcccttatctttttaaaagaagaaggaagagatctttcactttgtctcctccgttcccgtctcggtcaaactcatttgcagcctattacctatatatataggttattgttccttcgtttgttctactctcaaaattttacgttatgattcaatcgattaagctacgactgcccttctattaaaatttgaaatagcattgctacatgagctgttattttttttttcttgacatttcactgatgctggtaaatcgtgtttgtttatcgtgagtggattgaaattcacaaaataacaaaatgataatcatgaatccggtctctttcaccggactattcaaaagtcccattctatatatacatcagaactcaatgcatgtgatgtgaagagtataagagtatcgattccaacttacatctagtttagctataagctttgacaccatttccagatgatgactttttttagctattgatctcgatatttttggacatggatcgaagaatcaaatataggttggactaatcatcagtggatcgagttgaaaacgtgtgaataagattctaataccatattagataataggtctttaattcaaaacaaatttgcgtaaatttaaataatattccgaaaaaagataaatacaacgtaaatttaaataagtggaagcacatggttcctttgtcatgctccaatcaaccatattggggcattgtatgattgattgtttcaaacaacctgagtttggattcaatacttcaatttgattacatgattgagactttctagctagctcatcatattccacatttacaacacttattggtttttcacatttatatatttatgtctttcatatatgtacatcagtaaatgttagtaatgtaggtttgttttaggatgtaaccagaaaaagaaaaaaagaaaaaaagataatttgaatttctagtatagtagtttgtattagtatgatcagtgtatgacagtttaaattttaagtttggattattgactactaatataattgacaaccaaattaccaactttgcggcaaaatcatagaaatgaactggcatgtaattattggtaaggaataaatgtgaatgaggtccacaacatacacgggaataaaaccagtcttgtgtcaaagctttgttcacaatctctctctctctctctctttcacctttctcactttttctccctaaagcaaccgcaactctctcttccttcttcatcttcgtctctctcgttccaagtttaagctcaagcc

SEQ ID NO: 2336 - DNA, 867 bp, Arabidopsis thaliana
aaacatttacagtttaacaaagcctttgaagatctgaaagagagaagattgttagaagtagttgttgagagtattttgtttgtatattatgagagattaagcacaacatgagaagagcctttaggaatccttaattaggccatctagtttttattgtctctcctctctttgattagattcttcttctaagtgtcatcactattgatttgttgtagcaccaaacttctttaaacctttctattaagaacacacaaatctacaacctttttattttttttaattgtttatgtgatttgttttctgtggcagtgaattttttatattatcaacttatcatgttagctcaagattgcatctcaatttgtacttatcttagtggtaattagaaaaaaaaacaaaattaggctacaatagttttgtttgtttgtttgtttaggtgttagggatagggtttattttttccgaagtttattagtgtttactatttagagtttaatgtttccaaaattttatggtttaatttatactctcagattaggttaaacatttttatttttaaaaatctataatatttttctaattttactttaaattgtagactaaataattgattcagccttatattatatcttaaactttgcaagaatcactttggcttgtaatgaaatgaaatccactgttttcatattcaaagtgattctagtcttgtattaactattaaatattccaatctttaacaacaaagaaaactataatattcaaagccatgtatataataatggacatggtccaataatttggcaatttaaaaaaatattaaagagaaaagtagattcaaataaagtggtctatatttcaaattgcaaa

SEQ ID NO: 2337 - DNA, 2000 bp, Arabidopsis thaliana
agttgtaggaaaaacatcttatgaatttagatccattaaatacgcttatatgcatgtgtgcatgttcaatgtgtagataagttctattctgaataaattgacgaataacaattattgatttcaatttcgttttgagtgtgcatgtcatgtgtctgagatatgggaaaatgaaaaggaaacttccctatatataccgaaacaatagactatcaactttgatctatatatacaaattgtagaaaagccttggatctaactgatatttccttatgtgagatacacattaatgtcttttgttttgcttcttaagattaacgtgttatatattatctctttattttaaaacatgttgaccaaaataatttatgtcttacgtgttgcatatgaaatagatccaatcgaatcagcctcccatatcttgaatctttgatatttggggtctaccattgatatgatttactttgttaattacttgatgttaatatttcattttttcttaagaaattgtaaactaattctttacatatatgcatggcaattaacttagtcaacaggttcaacattttataatgtatccagaatcccagatagtacctgtcctgataaaaccttttcaggatctcatgatatttcttaaaatataacagcttagtgattttaaataacataaaaattagccgacaaaaagaaaatatcataatataattctgaaaataactaataatttactcttttcaagtaattattcaaaataaatttagaaaactaattcaatgtatttcctcattgtcactcttttatttccctctacaaaattatatatatgaagtagttttttttaaaatagagccccataactaacattaggggtccatatatttgcattgtaatttataaacacgtgtagaacattataattatttaaaataaaatttagaacaataacttaatgtatttcctcctcgttagttttcctttttttccctctacaaaattacatatatggaatagttgttctttacttcttttaagtagagccccttaactaacacattaggggtccatatatttgcattataatttataaacacgtgtagaacctggcactgaagtctgatgaatatatatccatttgttttcacaactaccctagctttttgtatcatcggttactttttttttatcacaagaaatttctcgattttgattttgatttttcaatgttgtgaagttgagaagttcaacatgttttggacagatgtttttgaacagtaaattagtattttaaacatgtgaatctatttgcaaacgtaatgacgtgtcgtctgaccatttcttgaatgttagttaattttttagctctagttttgattaatctaccaattaggtcattcatttcagtttaagtcaaatcaacaattaggctcgtcctaacgttttcatttagccaaaacaaaaaaaaagatttcaacagtataaataattcgtccttatcaaaaaattaataaataaaaaagatatacatcattacttacgtaattgtttgtattttgatagttttcgataatttctatgtgacggtttttaaaataaaaataaatgttgaataacaaaaaatagtagtacaatagaatactgaattggtttgtgtagggtcaaaccaacaaatatggaaagaaaagtattatttagttacaacgtgaaaacacaggttcgtgctactactccaatgatacgggtctcaaaatactcaaaactctggcatgtctcaattccacaaattattgtttaatcattctgcttcttctgtaagtttatatataaatgtgtatatactcaacgtaaatatttgcttacctcgtatattttctctcttctcaggcttattaattctctgcagataactgcagaagaaagaagaaagaagaagaagaagagattagagcttgagccataatatataatcccttgatcattagtctaaagaaccacataaaaag

SEQ ID NO: 2338 - DNA, 2000 bp, Arabidopsis thaliana
tcaatagtcacatttggattgcaagcatgggtggatgtatgttaggagtatgtgggacacgtgccccacattgattataatgttttgcgagtattagagtttacaatggctacttagcatctttggtcgtaatgtagtaaagtattaccattcccatgtttagatccctttgatgttgcaatgttttctttatgtgtttattagttatccaaataacattattctaatttcttttttggttggtctttcttataaaaatgtcaattctaagttttgttatcattattttgtattttactaatcaaaaaaatataatattgaaacaatatatatatatatatatatatatttgaaataaaacatatattttttttgtgccccatacaaaatacatgtttagatttgtcactgattctaagaacttattttgtagaaaagtaattttcttaatattctatgaatctttcgaatatgttatgcatttacgttggaactgttaggtttctcataaaacattgtaaaactaaaatataataaggggtgtgtggaattttggctcaaaaagattgtatactttgccagatttattgattttgagactatgttgtgcagcatgtgcacaaaatttgttgattttggtaatagtgacaatatagatccaaagatgatttttaaaaaaattaagtgaatatatagttcatttttatcgtaaataattggttaaattataaaattaaaatattgtataaagagaaattaaagcgattgtaccattgtagcaaccacaaccagcatatatgtttgctcaagatttttaagttgttttatacacgattcaagcatatgatcttaatatcaaaaaggatatattaagtttaatcggctttccattttagttggtagcaattgtaaaaatttaatattatatccttatttattaaatattattattacctaaccttttttgattaacaataatcataaaaaagctgaccatctcaatttgaagataaacaaatagatttaaagaagtgatcaaatcatgtattggtaatgtctaacatgttcttaccacatcttaattcacagataaacatatacatatacattgaatatgtttttatataacacatggttcaagggaacaaaggtgggataaatcctatcatattttctattcttgacttaccttcataagtatctaggttataagtttaaattttctttataaaaaataacaatataaaaagaaacagttaaatttgaaatttactactttttaacaaaaattattcatccatctgtcattcaagtatcaatatagaaaataaacaaattcatgttgtcagccatactgcatgaacatgaatttcttttatctttttactttttttcgtaaaccctcaaaataacatcagtaaaaatggatagcaacataacagataaataaaaaccaaaaacaaaaacaaatccagggtaagttaatatgaaacaaatgcattagatcaaaaacttatttattagtgtagcaacttaaacagaaataataagtctcaaagttaattttttttttaataccaaaaattatatcttttatattttgaatgaccacgaatatctttttcacttgatcgataaaattacatcatacagtacatcttttctaaattaaaacaaatctaaaacatggttaacaaaacaaacgggttaaatgtgaataaacaaaaagtatcgggtgcaaaacataaaaagacaaaaataaaagactgagtccaaaattccaaaaagtcaaagccaccttcctaacttgtctgcatagacgaagaagacaaagaagaagagattcgatcacacaagaaaaattacaattcttcttaatcctcattattatatatataaataaacttcaatctaagcttcttcgtaatttctctttcgttcaatgttattcttttagatctcgaacaaaacaaaatctccagaagaaaaaaccaaattcc

SEQ ID NO: 2339 - DNA, 2000 bp, Arabidopsis thaliana
aatgtgtttttgttttaatgaaacgaaaactgttaaaaatttaatccaaaccggttttagattagtttttaatcttgttgtggtttaggattgaaaagattcatttcatgtggttctttaaaattgtcatatctctcgtttggagtttctatagtatttctgatatagttttagttttgatgtcaacttgattttcattttaccattatacatgtagatgaaatcatattttgtgaacataattcttttttttctgccaaagattagacaattaatatcctcttgaattttgaaaaaaataatgtataacacaattaaatttagagagcggtatgctatctatgtgttacacattgaaagtgtctgtattatgctatctattaaaactatgagacgcatgcatgtatttacctaacaattaatgtccatgttactctaaacttcaagtccaagaaagcatcaccaaagcttcattcaacttgttcattttgcatttatccatgatttttaagctcattgattgtaaattacgaattgtggcattgtatcgtaactttcttcagattcacatctttaacagtttatatcactcatgccaaacaaaaatcgcatcaatcatatttctataagttttatcagtctaccaaataaactctgttgatttaatataatctattagagcatccacaacacaagttattttttcatcaaaaaaaaaaagttttgggttatggatactctaataaacacaagctattgaagtgccatcaagcccaatactatgagacaaacaagcccatgtaattagggttctctagcaagtagaagtcatccaactctccttcttcatgtgatgaaacatcaaatctagaatcatttgcttttggtgaaaatttaaagtctttccttttgctttctatgcatcttaataaagctgcaattaatgagctatttattttcagttttagatttctcctttaataagctgaatgagcataaacctatctaggtttagaaatgtcaacacaatcttttgaagtattatgaatctcttcaaactcatgtacacgctctcgaaacaacaagacaaagtaaataaagcaagacacaaccataaattaatcgagcaatattgtactatcttggtgtaatgtatggaactaattaccgactacggagatcataacacatttattaatacataattacgttttaaaaaacgagaatgacgaaaagttggtccaacactccaactacatataactaatatcaagctttaaatacttgaatgacgtgttgacgaaacaaatatttatcaatacaattgcgtaaccataataataattcaataggacttttattaatcgtgtgattacaaattttacacacacgttgaatattcgacaaatatgacttgatgtggtcctacttcgatgacttctacgttgacttttgctgtttgaggtagagaaggaaaattacctgccatcttttttttactataattaaataaaataaaataaaaactttactttattatattttcgggaaaataaattgacttcaaagtttcatcatcatacaaaggagaaaactttgaagcttcttactttctttacttcacgatccttcttttgcctaatttctcggtttcatttccaaaattctcttttgattctttcttactctttcgctagagaagatttagactgggttttgagtatttctcggaaattttcgtgttttttttttctgggaaagtttccgagatctcggtggagtactttttttggcgacgaaccagtatggtttggtactcaagctgtagaattttgtttctgggtctgcttattttgttggcttcgagctgggttttggatagatgcgagggatttggtgaatttgggtttgaatttcatcatcgtttctccgatcaggttgttggggttttgcctggagatggtttacctaatcgagattcttctaagtattatagagtg

SEQ ID NO: 2340 - DNA, 2000 bp, Arabidopsis thaliana
acgtataaatcttgaccttttaccatggatttgtcctataaaagcttactagagactagagaccagaacgcattaatattattaggtctatcttctatcacttcatagtgtttctttaacactcatgttttgcaagtgtcgttttgtactattggaaaagattattgttataaaaaaaaaaatgaaacaaaactctaaaaaatcagttaatcttagttataaaacattatcctgctagaaatcattgcaactttaataaagtattgagtcttgaatcgttatgtccacttcgtttattttatataaaagtttgtcaactaattaatagctgattttttttttcttttaagagaaagaagatctcgaaatgagaattaaagataagatatatggttaggtagcgagtagaagaccaaagcaagaaactacgaccacgacatcttgcacataagaaaaaaaaaaagtagttcaatttcattttcgctttggtccactttattatttaacaaaaaataatatctaataaattacattaatataacagtccgtgttagactaagacacgaagcctcccccactaaatcgacgcaaataaaaataaacaaatggtggggttaagagtttaattcgagctgtggaatttttttataaatatacaaaaataataatatttaaaataatatatattacgataacaaatttttatgtcaatcaattatattttaagaatcttctaaaatcaaatattattgaactaataatttgaataataattttaattccactattattgaaaatattcatatcattagtttttaagggtgtatagtgaaaaaattcctcaatttcaaatatgttaatacaaatttccctttttaaaaattatcatgaaattggacaaactatatttatattgaaaaagatatataaacttatacaacacaaattgtaaacaaaaataacatgatgttcttcaataaaattataaatcatcaaacctaaactctaaaattgtcaaagtaaaaaacctaaattgacgaattctaatttattatagcgaaattctctgatgtttgtatgatgtcgaagttgattatgagagattttgtaaaattttgtgttttaattttaaccatagtttatctaatttttacgacaatgtagaaagacaggattaagatatttgaaaaattgaagtttttttttataaaatatataattgaataatttcttatagaattttagaaaaaaattttagataaaattaaaaaacacaaatgtaattcttttatgtagaatttggggaaccagactacaacaaatcataaatttctctaaatttacctaaaatcatattaaaaattaataaatcattatgaatcttaaattacttaaaatataaatttgaaaatactcctctaactcagagatcaattttttctaatgcctcgtgatttttttgcatcttgtagcttagtcacctatatatatttttagtggtaacaagattctctgttaaaaaaataataaaaattaaaaataataatagtttattttatgggaaaagacgcgagtggctcccaccagcctcaactttgcccacgtggaaccagccatatgcgcggcgtttagacaacaaaaaaaaagcgtgttgtttctttctctctctagaaagtcaaaaaaaggagacagacaaccaaacactgccttgtcacatctctctctctcttgcttttggcgagtaacgagtaagtccattttccatgtgcccactgtgtcttctctccttacacgccaccatctcctccacctcctcctccctcccttctccaattcccaattctcctccaaaccctagggttagggtttccacgattgcttcaccttcccttctttttttaaaacctcagatcttccgcttcctcgttcttgtctttttgttgagctgagaagcaaaaaaaaagtgttctttggcttcacgaggagccaacaacgaatcg

SEQ ID NO: 2341 - DNA, 2000 bp, Arabidopsis thaliana
gaaaagtttattgttttagggtttatctttgtgagtttcgaaacgtcttagcgcaatggaaggtttaggtttgacacgtctaccaattggtttaaccaaaaatccaatttgcgagtgtttaaccgaattatttaggctttaaccggcatgtgttcttcaaaatctttattcatctatgtcatcaaaccccaaagtatcttatgcatgacatttcccaatcccttgtatatttcaagtttttttttgtttagttattttcattttaccacattttttatttacttaaaagatatcaaatattcattatttataaattaaagtatttttgaaaataacacatatattatcgaacaattcttgagttcatctttacgatgaattctttttttcacttccattctaaatactaaaagcatctacattgcataatcttttattaatgtctccaagaccaaccatggtaaaaatagactaaccatgattaaaattaaaaacattttattttttagatgtctaaaatatcttaaggaagatatttttgacatccaaaaggaaatgtctttaattttaactatggttagtctttaagacatacatgagaggttatgcaatgtgaatggtctaattgtttttcataaatcaaacatgatatatgatctcgtttgattacaaaatctaaactctaattctcttttttaaattcaaaccgatatttaaactcgtttaattataaaatttaaatctaaccgttttttctaaactcaaaccgatatttaatctcgtttaattataaaatctaaattcttttataaatcttaactgacatttaacctcatttacttgtaaaatataaactcgtttataaatccaaacagatagctaattttgtttaatcataaaatataatcattaatcctctctagtaaacccaaacggatatataatttcgttttgtgatagataaattttatagttaaatgaataattttttattaggtagcaacatccgattaggtgattatttacaggaagactgattatggtggtttcgtggttaaaagattcactatggtagttgaatgactaactttgagtcttactactaagatttcaatcatgttagccactgtgaacattttaaatggcaaaataaaaaactcaatgttcgcataatttataatattttagtgaacaaaaaaaaatattgtgttatttttcaaactttttcacataacttatattattttggtcagtaaatgttaacagctatttataaatttgtgtgtatcacgaatttcatatcctttaaattttatcggtcgaaagacaagtttctctagttagcgcttagcagcttccaagttccaacgattcgaaagcaactgatgctttgaccgatttgaaaatgcaaaagattggtctctgtgcatatactatcctttaaatttaaccaaattctttttgtgtaattcagaattttctttttacagttgtagctattcatgaattacaaatattttcaatcatttggttacgtgatggactaatatataaaccaatcaaccatgtgcttgtcgtcatttcttttgtttattaattgtgtttataaacacatatataataagtatgtgtttattctattgttaacacaacgtttatcatgcaatgcaagtcttagtctatgtttagtttattaacggaagataaaatatattattactaatagaaaagaggatacgaccgacgaagtttgaattttccaaaatggcaacctaacttaaataatgcaaaatcattaaacctacaattcttatattatcaataaaaccatataaagactctctatagaaaaaaactatataaagacaatcaaagactctctcgttacaataaccacaaacaacaatacacttctcttgacgcctatctctttctcaccaccaccattaccttcgtcacttctctcttccaagcaatttaaaccttcaactaatccagaa

SEQ ID NO: 2342 - DNA, 765 bp, Arabidopsis thaliana
gtgctatgtttcttgtttttgttttgtttcaatcatatttggattagaagttataatcatttaataatgttttaagctcattcaacatagttatagtttctaactcgttcttgatgactagttcgttggaggagactaattgcttcattattggtttatagaatgattagaacccttaagctctcgaaaaatatataaatagatagatatgtagtcgttttcagttttaacacggtgctacagagtttcttgaccgattcaacacgaattgttgaacatgttaccgagctcttgttttctctctttaacatctctatttgtgtcgctgtcaggaagtaattgtttagacttttcatcgatgtgttatacttcggtttcttgttcttgaatttgtctaagtcttggtttctttcgtttgatttttgattgaataggtaatattgtgtggttatgtagacgtggactcagtctaatggatgataagaatctccaaaactgaagctacgaagaggtacaatacaagccaaggactctttcctccatagagaagtagcgggtcgatcttatggtaatatataagcactaagcagatgggcgtttgatcatataaaccctcactaccattaccaaaaagcaatagccaagagctttttttttcattttctttttgaaagccatggatcggttttcgttcttgaatgttataatggaggttgcgggtattctaaatgaatcccgcaaactctcctcaagaacaaaaagttg

SEQ ID NO: 2343 - DNA, 2000 bp, Arabidopsis thaliana
atgtataatacataaatatacgtgggtcgtttgtttcttaagaatgttaaagttcaccatggatttggtaaagtatttctaataatccaaggttttttgtaatttataaaagtaattaataatcaaaggtttggttgaaaatatattttgtgttaaggtatggttgcatatgtatatatttagcaaggtatttttgcttttctgtacaatgcatatgacatgattatccttttggatgaaaatgagaaaactactatactacaacaactatagaaagcaaaccaaaataataattagaaaaataagaagaacaaatcccaaatgtttttcatatcatatcgcattgcattatgttacaacatagctctgtaatgagaattttgaatttcatacatgtatttcatgttaaattatagtttttgactacataaggtatgttttagcacaatattatagtctttagctacgaaaaagccgatttctccacaaacttgcataaaacaaattcacgtaggtgcacacatgaatttcacatagtcaagatattacggtacaataacagagttagagcatatgcatgattatgcacaaaacatgaagtgtaagtatgaaattcagatttctcattattcgaatttaagtataaatttaacataatgcatttgtaaggatataaaaaatctgatttgccgtgtttaaggtaagtgtttttgttgactccttgttgggacatctagcttcaccgtgtcactccttgaggataagactaaaaatgtcggaaacttctctcaattttatttgaacatgttcgggtttgaaaaccggtttatgtaactatcaagaaataatcaaaacaaaaaatccaaaaataaacttcaatgtgaattttgatttgggctatatatttcaaatttcagtctaaaatttattggcaacaatattattaaaaaaaaaaacctacattgttattacaatggggaaacttatttattaagcggtataaaaggttttatacataagtaacgaaaaagtagtaagtaaacgaccatgagttggtaattaatttgcaaaaatgatggatgatacgtaaaagtttaattatattatgttaaaaattttacttaccttaaaaacaaaagagatcagatttaaagaaaagagaggttagattaaaggaggaagttctacaagaaggagaactatggatatgttttggtcatggaagaaatagtttgctagatttgtaagtgctctgtttttctttttttcaatcatatttggattagaagttataatcatttagcaatttgcaacgtcctcaaagaatgtttgaagctctaattcttctatgttcggttaaatataaatatataatgacggtttggtatagcatatagtttgaccctactgtttatgactcattcatgatgacttgttcgcttgaggaaacaaattttttttttagatagatgtttcattatcttacacggtttcttgacattttcaacacgaatagaggaagtgaatgttgatcacgtacatttgatgaagaagtcaacttgcaatgttaaacatgttcctcttattttctttatataacatcttcatttatgacgcggtcaggaagtcatcatttttagacttttcatcgatgcattatgcttcgggttctttgttcttggatttgtctaagtcttggtttcttcctttgattttggatataatatgtagtaataataatatattgagggttccgtgtacttggactcaatcaaatggatgacaagaatctccgtaagcgaagctaccccgaaatacaagccaaagacttctttttccatagaaaaatagctggtcataatctaaaggtatagtagtttttgaatgtttggttagtagtatataagccctagacagataggtttgatcttataaaccctcgccaccattaccaaaaaccaataagccaagagcttttctcatttttcttcttgaaaccc

SEQ ID NO: 2344 - DNA, 2000 bp, Arabidopsis thaliana
aactcacaagcgtatattgtccagtctaaatttataaaatagtggtgacattagttacataatagtctttcgtcaaaaacaattttttgaccacttttatcattcataattcacacactcatattgtccaatttaaacgtgaactaaatatggtggtaacattagttacttagtaatcttcgttaaataaaaaaagttcaaccgttttatcatttttaacccacacatatatttaacgtgaattatatcacgagttacataatagtctccgttaaatttggaatttagctcaaatttgttgtaagtgaattgcttgttaccaatgtcgtcagtaaaacataacggtaaatgtttctattttgtattataactattttaacataaaagatataaagaaagatttctatgtataatacattatttcgatatatagatttaaattatagttataaatatattttttgcttgatatctctgtaaattaataagacggaatttaaaataattacaataaataaattttaagcaaattagatgttagttaaaagttagatgagaaaacactgtagcatatgaagaaaaaaaaacacaaaaaagtataattagatgtgaagcattaaaaatgttcccattgagatgacgccacgtgtcacaatctgaggtcggcggtcgatgttataccgttgaaatgaggaagaaacggaaaaaaagtttgaaacgttcctaggagggaatggatgacgtgtcataatatgattggagtacatagctgccgttgatcgcgaaagtaatgccaagtcatcagtcgcacatgcctcgtgacttttcttatctttctcttcccaccctaacacgccacgtttcctctacatgtttgccacgtggcttttcactatccacccaccaatattcctaacactaaaattagattaaaatttatttactatgggatatgaaattatgaattgtgaagttatgtgattatggttaggctgatgctacgtaatttgttactctttagtagcagtacaaatgtactttacaaaaagatttggtgtgtttcaagcatatcatacaattctttttatttttacagtacatatccctattttacaataaaaatatcgtattttatttatcaaaatgttgttttgctaataatatttagtaaaataattttaacaatagtaagaaaaagcttgaaaaatcaaattttgtaaatttccccttctacttgttagtaattaatagaaatagataaatattagtttcttttgattttatttttcccaaattcactagcatttgtggaaaattgatgtgagtacaaaactgatgtgatttttctttgttattcctcaaaaatataatttttcaaccttcaattttaagttttttgatggatatgagcagcttttgtcaaatctattaaataaaaagacgtgtgccacaaattatccacatcagcaataagtttttttttaaaacaacatatatatggaaaaataatagctgtaaaatatttatttcccatttaggttaaaaaagtagaaatataattggagataagagacgaaacagctcacagcaaactaatcagtaattagggttatagctttttaaagatttgtttccttttatttcatttttcaaagacaaaagtcggtttgagttaaccacacgcgcttatctaacggttcagatataccaatcatatccatctcgagaaaatcgagaccgtccaaaaattgtgttgattttttaaactttaattttgtttcctctttcgttttcgttcttatcctcaccgaaaaaatttccgttttttcttccttcttaaattccacaatatggacgctctcttccttcttcttcttcgtaaaactatccttctttttcttctctccttgttatgaaatctgagaaacccagaaacaatatttgatttcttcatttacccaattttaaagttttgatttttttttcttctcttcttcgtt

SEQ ID NO: 2345 - DNA, 1986 bp, Arabidopsis thaliana
cacttcaccttcttatctgtcataatctccacaagtattagcgtttgcagatacaataacattctttggttgattcaaattaacatttatcatttccatcagcatctatagaaacttcactaagatcaagtaacaataaaagaatcaaatgacgtatctcctctgaactacagaagtttctgcagagaaagcttaaacctcaaaatcgaaactaagcatagtgatcaaaacattgattcagcgaccatgaatatagaacagatgattataaatggcgcaaacacgcatttgttattcaagcaaagttcaagatcgagcaaacgaaccggtaacagagtcggcgaacggcggcggcgagttttagttagggtctaaaaagaatgtgttacgtgagcacaatcgtaatctcactctactccggcaaagtttgtactgtgccgagtacgaaattacagttctaagatacgaattcgtcttccgatgacgccggcgacggggaccggagattttattaaaacttaaaactattcttcgatatcggaggggagaggaatctggtggcttagagactatgcgactttgtaagagattgaacttggaccgttggattaaggcttacgttagataatctgacggtatttaaaacatgtttgcttgtttagcttatgatccgatgtgtaagagcaaatttgtttagcttatgataaaccctttgatgcttatatagggggagaaagagagagaaagagcaaaaaaaatcgtatttgttttaaagttctttttgtaatacttctttttaaaaattgtatgtgatgtttaaagttttcacacaccaatcacgaattattattattattatttttaattatagtactattaattatctacttaaacaagatttaaccagtatgaaaacaatctgtagaatataaattgttaaaataattaaaaaaatatatttaattttgcattaaaaattgaaaacctcatctattttaaaacaaaaaaaaattccaaaaacattaaaaaaatacataaaaaaaagcaaaaaaaaaaaagcagagggtgtattttaggttagcaaaaggttttagaagatcatttacggcgaatcaaaagatatgacaacatattattgtgggataaaaaaaattattgtgggctaaaagatttgaagtacacgaatttcatttatgtcaaaacggtgttgtaacgtagaacgtagttgttcattctttagctatcaaaattcaaaagatattgagatcgaaaagacgaaaacatacgtataatatattagggatatattattgtagattacctaaaagatttaaggaagcgaattttcactcatctcaaaacgattttgtaacgtggttgtcattctttagctaaacatgatcttttaaatacatttttttttcttttattgttgtattgattccaccattttgattaaagtttttatcttgactaaaaacatttctataagaattcaagaggtgttttaaaaataaagtatatcttgacccacaaataaaaacaagaatttgggtacacattattttccaatttgtataatcatcatatgtccgaccatattaactagtcaagacgttagacttcattcataatacgaattgggtgctagtttggttaaatgcattttatgactacgcattttattcacacaacacaacagaacacaacgtgaaatatacgagaaagacaaatcacaaatctaataatatttgagtttttgacgaggtcaagaaaagtattttaggtccgtcccatcataattattgtaacttgtttgacttttctccaataaacaaaccaacccaaacatacgacatatctcctctctttgataatcgccattaacaaaccaaacctcacggagtcttctcctttttaaaagaagagtctctcttcataatcatatgatctctctctctttccagtttcctctaagcttttctc

SEQ ID NO: 2346 - DNA, 2000 bp, Arabidopsis thaliana
tggtttagactttttagttataataaaaatttcgtatattgttccctttaattaattagccgtaatcaatataatagtttcgctaaaaaaaaaaatcaagagtccagagagactttagactttttttttttttttttttttcttcgccatagagactttagactttcgtacattttagaaaaagaaaaaaagacttttgtaatgtatttgtaattttttcacaaaacttatatgtttagaatttgatcacgacgatatgaacgttagctggaatgaaaataaaataaaactaaagaacaatctaacatgctttcctttgacgggtcaccaaattgaccagccaacatatagatgtgaacttacatggttcatggatgaccataaaatgccaaaaaccacactcaatttttaccgatgtcaatgcgaaccgaatttaatattaacccaaacgaaatgattttgtaccggtgaaatcaaaccgtatataaatgatgtatacaacaacactaatcatttaacattaagaatatatatatcgttagttgaatatatattaaaaaatagcattctgtatacatactaaacatatatcatagtaataattaaactttattttatttgatcaaaccgaaccgcacctgaatcagattcgaactgaaccaaaccgaattgaacctcttttccaaaagtcgaaaaaatcaaaccggattgaacagaactggggaaaaaagaatgtccataccgagacatgattttaggctacatgatttctaaaatacaattacgagtagccaattaaaatattacacgtttaattaatcagataataattcttattaatcacctcaaaaatatttacttcctgtttttgaaccgaagagacttcttcttctccattcttgcttcttcttcctcgtcttcgtcgtcttctgtgtacagacatacctccattttatagagagcgagaaacagagagatcagaagaagaagaggaggacaaaattatagaaggaaacgtttcaatgcgtgcatagaaatcgattctcatatactctgagagattcatatagaagtttctgttagttcgtagctctaagttcttcgttcgttgagagcttggaaaattgtcgcggagtctgtttttgttctcctagatctttgggtggaaacaaacaagctcgcgaagacgagaactctcgccgtatttgggatctggttccgtttagaagattttccaggttcaattttgctcggcgttttgattatttcttcgttggtagtgtttttaagtttttcgattttggattttgtgcggacgatgaataggctttagaatggatccgatttggtttaggatttggagaagctctaattagatttcgtttgatttgatctcgttcctgattctgataacttctggggttgggaagcattcgtgtaatttgttgactgaggcaatgcccgtggttgtgtgtattagaagctgtggtgatgatttgacttttcttggtttggatagagttagaggatttggtttttgtactagtttgaaatggtctcattgaaattgtcaaattaattttcctgtagatgtttgattttttctcttgggatcatcataacaagtttcttcagctacaattggtgaaattgtgttgttctcttcaggaaaaagaaacaaaactttgaaaattaccatcttcaagaatctaagttgtctatttatgcttcacacttttggtgtgacattcttttttttaaatctttatctggtgtagttttcagatttgtatcctatgctcctctatggtttacttatgttctgctctgtattgatatctgatattcaagtatgggtttttgtatgtaaattttaggtttcgactggttctagctgctaagtggaatcgactcattttagctgaagaaacttgttgggagtgggttaaagggatatttgaggctgagttgttgcagtatgcgataaaggtttttatgag

SEQ ID NO: 2347 - DNA, 2000 bp, Arabidopsis thaliana
tttcaattaagcatctttttcttggatttttttttcacaaagggagagctttaactttttgcattaacttatatattttaaattatacatgcatgcataccgacttatataaatcatatggtcaatatgagacttttgatttatattatttgtcaactaagcatcttttcagatgaggttcatgcacctttgttagaattatcggaccagaagatcacatcaacgtttaccaaatcaacaaaaaaatccaatccgtccaaaaaatttggaaactgtttgaaagattcgaaatgttggagcaaggatactcagttccaatctctgagcagaatctgatatgactcatctactcataagactttgcgagatagaccggtacaaaaccgtttccaagggttcataatatatggattaatgtgagttattgtggacgttgtggttgtagaagccgcggtagtcgtggaaacactaattagttatctcctgtaagctatttttattttttttcctcacttcctcttcctcgcagctatgtataattttggttggttatctccaaaactttttatggtcaaacaattttgagaaagtaatttggaaagaaaaaaggtttaagaatatctttttatcgtcaagtcctcctccaaattacttccttaaaactgtttgaccataaaaagtcatagcaaggtattagttattctaatttaaattaaacgcctttttatcaacaacaaaaaaaagaagaagatttgatatgttgaaaagtattagggacgcttattagggcagtattcctagttattgcattttctttcggtcattcgaccttaggatcatacctcaatctgtatgactgtattcgccatgtgaattccaatattacatagtgaccaaatttgatatccaactaaaagtcgatctttgatctaaacgaaatgacaactatttggttagtgattgcaggttggaaagatttaccttctagacctgtcttacgaagctagtattctaaagtaatcttcataaaccgaattcagaaacaaaaaaagaaaaggagtccaaaattgtatgatcatacattaatatcagaatagtctcttttgttaaataaatatctgaagaatatatatctctttgattattttgtggatggcaatgaaactaagaatatatattcattgacttagaagtcgacaaaaaaaaataaaaaaattattgacttaattactagttgaccaatatatatattattaaaagaacatattgtatcgttgaaagcggatcatcgggttttaaaagaaaaacacatcgttgaaacttgaaagtgatgactaataaaaagatctaaacgtgtccggtcacctaccaatgtggttttgcaaattattgtcaagtaccttgactatattaaataaaaaaattcaccgtaacacattgatattcaactgattcctaaaaaaatatacaaactattgggagttgtgagattttttatatcagtgttggtctctttacatttgtgatgtggtgttatagcatatatagtaataaactcaaaaggaaattagatgtgttttgaccatttattaaaatgaaccttttcttgtcaaacatttgaaaaatactagtttttttttttggcaacgttgtaaataatagttaaaaatagattttaagtctcgtttttttatgcatatagtttcattcgctttattagactcaaatatacttttaattaaattttgcagagaattaaaggtaatcatttgccaaggaaaaaccatgcaaatatgcaataagtagaaataatgttaatgagagtaagcgttgacatatattacgtcctggtccgaacattcttaaagttgcgtaacactaataaccttagaagatggttggttgactatcaacatcttattgaccaaatgtttttttttttttaattataaaacagttgctcattgctctagcccagagaaagcagctcaattaagtaa

SEQ ID NO: 2348 - DNA, 889 bp, Arabidopsis thaliana
aatgtgtttgtgtctataaatttgtttgtagtttgttgagattggagttttcggaaatagctcgtcatattatgatttctttgtgtgtggaaaaggtttttttctttttatggattttgtttctatgtttatcagtttatgttcgacaaaatggcacttatctatgtaaacaaacaactgaccctaattggaaaactgattgttgtcatagagttttctcagtttcttctattaagaaaaacttaaccgttggttaaaacgtaattatcaacaaagacttctcttttggtctgtgacgttgattccaacgataagaacaaaacctaatctttgttttcttttgtcaacaatagtactatcacctttgttcttaactatttttttgggaacttaaaattgacaacaccggaattaaaatgtttaatactatcaaaattatatgaaactaagctgtcttttagctatagtttaattcatttctgacctctaaaataatattatccggagattattgtagtttcgtaacgtggttgatgaaactactaggtgttttcttaattagaccacgattttaacattacgttacactaatactctattgcatttttggtagttttcataacaatgattccatgcggcttagtcaaaccgaaatcatattatttgtaaattcaattctgatataatttttctattttgtaccaaacgtaaaccgaaacataaccgaaaccgaaccaaaacttcatttgcgtaatgtagtttcctacgttgttgtatctataaatagtttgtttgtccagcatccatttcataattcctcatttcccggatctctcccatctaaaaataacccgacccatttacgcgacccaaaccggatcaacccgca

SEQ ID NO: 2349 - DNA, 1016 bp, Arabidopsis thaliana
ggcatgttttaatgaagaaaaactttgtaccatttaattccaaaagtatgttttacaatagtttttttttaacctcaagcttatgcgctttttccacaattatcaatcttttgaatccagtcagcagcagtctcaatgatcttagaaacagaatttcttaacaggatatttaaaagaacaagtttcttgacattagagctggaactggaatctggtctctgttttgtgctaaagcaagagcagctcatgtatacgcagtatgtctttttaacttctttattaatcaaaatttgctctgagtgatttgaatacatgtgatttgacaaatgattcttcgaatgtttcagatggtatatatatgttaactttatagtgttattcaaatgggttatacaatctgatggtggaaatagaacttacttttggctgtataaaaattaaaaaacaaagattggcccaatcctggtcttaaagacaaaaatacaaatcttttggtctgaaattacataaaagttagtggatgcaatacaataataaaactttggtttcagagacttgaatgcagcaaagtctacctccaaagctacttggccaaggagttgtgtggttcagacttcaaactgttttttccacaaaatgtacagttccatccatttaaattctaaactattctatccataaacttctattccatttaatgcaagaaaaaaccttttttgtattcattcaattatttatgttttggccggacacaatagttgcagagtcaacatatgtggtctgagttaattaaataatgcaaggatgaagccaacacatgtggtctcaatctcagtaatgaaaagaatcatttctgtggtgcgaattcatattaactatttgcaaagtctgaaaatgataaaccacttgaaaaaaaatcctgaaagaaaagaaagagagaaaaacaagaaaccaagtctgaaactagtgcagaagagaagagctttgtgttttggtggaagtaagaaaacatcacc

SEQ ID NO: 2350 - DNA, 953 bp, Arabidopsis thaliana
aatcatttataaaaagctagtttgaccaaaaaaaaaagatcccactgattttgccaataccaaattttactattcccaattaactgtaccaagcaatatctttttggtttgtaacataattttggcaaagtttcgacatgtatcaaactatcaatcaaatttgcgatactgatttctatatatagtttcaattttatttggatatcacaaataaaaactaaaagtgggttgaagaatttacgaaataattaacataattttggtcggcgctgaccataataattaataaattgcgtcttttagctcttaagtatagtcaaacgttaattttttttagtaaagcaaaagacgtgtcaaagtcaaactaactaaaattagatgttctcatatactgatatacaatcatatttttaattatgaaactatattgcgtcgttgacaaaaaaaaaaacttagattgcatcaataatggttattcttacaaaaaaaaacccgttaataaatgatataaaacaaatgaaaaattaaaaaattcgatatcataaattcatgatattctcttttactcttttagtaattagatctccgaataataaataatcgtttactaaaaacgtcctccacaaaattcggcaagtaaaagaccaaaaccaaatctcttcagggtcaatttcgtaacttcacactaattccataaccatacataaaaacaaacaaaaaaacaaatcctgcgagaaaaatcccaaaaaatcaataatttaaatcactttccatagtttacagacaacacagagcttgcttacgtgttctccaaattttgtatacattattttcacaaaaccagttcctcaacaactagatccatcatctctagcgttcttaaagtttccaacttttttttttattaatttgggccaactttttttggtttgagaattgggcgagggagaaag

SEQ ID NO: 2351 - DNA, 2000 bp, Arabidopsis thaliana
atccccatgtgttttctagacttacaggagatttgttccaagcacgtaaacacaattggcaaaaacaggttcggtcactaggccaaatgcagattcttttactagttggctttagggacctagttcgaatacgaaatctgatatcaaaaaatagttttggtgattcatatataatataataagtactactgtttacgtaaaattgaagaattcaaatgatctcattcaatccaatgattatattttgtcttgtataattctttaattatggttatttgaaaatgaaggaacaaatatattgattagaagaataattaaacaatggtcaacaacggcctcaccacatgataatattaaagaatatctcgtagtacttgaccaaaaaaaataaaaatagcttaaatgtatttagttgaatcggtacttggtattgccgtgtgtgggaaagaaatgttgtcaatgctaaataaatttgccgtgtgaaaaattcaatcaatatgaactctagaacccataatggtagaaagtcttcgactcttggcagagaacaaaacaactattgaaattgtcttcaaataacaacattatcgaaaacttttcaactctagatctagtaacatccaaaggatatgatgctacataggtcttctagttcgaatcacaaagcttgctccaaatcacaaacttacgcatctcagtctccaacttagcggattaacaaaaacttaatttataggtcaaatatcaatttgcaattaaatgaaaacatatttgatctcttccaaatttgagttaattttgatttcccattataacatttagacattaatgagggctggacaaaatattcgttcgatccgcttcgattcggtattcgatttgatttgattcgaaaaattcgaatatccgtaagattttggaccaaatcaaatagaaaaatgtagtattcgtaaaaaccgaagcaaataacaaataatgtttttaagataatcgaatatccgcttcgatccgtatctatcgatatatatttaaatatatagttatatctatatatagatatcataaatagtttatgtattgttgctatcttatatttttatgttaaaatatttatttgatcatttttctctcatgttatatcttgatcaataacatcttaaactatcgggttttagtttttggaattagtttgataacattttgttgaccggtgataataacaacggttatgtttggtatttagaacttattttgtaagcatgttaaataataactttaaatatattatatggttatatagtttacaaatttttttaatatttatatgtatcaaagcggatatccgcaaatatcacaaaaaaatccggatattcgaaatttcggatatctagaaattttcgaatcaaagcaaataacaaaattaagtattcggttaaaacgaatcgaataacaaatatcacaatttttctggatatccgcttggtgcccagacatattcacaatccctaatctctcttctactattgattaaattttcttctcctgaaaaatatacaaataaaataaaaacatgtgcatttggtaccaaagacaacacctttctcaagtcttctctttcatttttttgttgtcgccgtctggttttactttttttctttcttcaaaatcattcattctttaacatcaagcaagaatcaaattctgggcatactcaaattcttcatctttttaatatatatttttgccaagaacaagtcttttactttatctctgcagtttttgtttgctcctttgtgcatttggtgatgattcaatcaatgattgtctcttacctttgatctaatcgtttccgcaaaattctcttctcgttttttctgatttcaagctcaacaatctcaaaataatcaatttttggtagtgtgttaaatctgagaagggtttttgggttttgggtataaagcttgttactttgatctttattttgtgaattcgaagtggaa

SEQ ID NO: 2352 - DNA, 2000 bp, Arabidopsis thaliana
cagttgttattcaatcaagattctttatttagatattacgttgtgaaatccacatataacaatgttgtcaaagttttagagtttcttctttaaaatttgattaggtgaataacattacatataagtaatgaaggaaatgtttgttttgtttcaggaccttaagatgtgagcaccgctggtaacgaactagcggatattacaatttgttttcatatagaaaaatggctagaaaagaagaaccacacaccttaaaatgcaatgatgaaaattgtggcagcatggtcatatgtgttaaaatgcaatgatcataatgggacataacactatgttgttgtatcatgaatcaaggagaacaaagtttttagctaaactcagcaaaattgctacttttaaacttgactagagcgaagttgagaattactactaaaaagtttctgaagattaaataggcaaagaaattacagagacaaataaataaagagagtaatagcttggaagtgaaatttataattcttttgagttataagtcaaacgaatatatatgtttatgagttcaaagctactaaaaaagacaatatatatttttaattctttttttgctaattacactatagcgatgaaatctttggtaagggccttagaagttcacgatttaagaattacatcgattaaagtcaaatttcttgcatccctactcaattttgataacatttgtggtaagattttggaaaggattatttgaaagataaaactgaaacttcatttagttaaacttagcgatgaagtcaacgattaagggtttgtaagaacagatagtgcaccaaactcataattatgcatagagctagaacttggaaacaaatctgatgatcgaaaatcagataaatgaagtttctgctccctcttcataattaaagttgctatttaggtattatagtttcaaatatttttgcatatataaaatacgtccattcaaagacatgcaccataacatgcaaaagtaacataatggagaaaatagtaacatatgttgttattataccatttttgaaattgttaataagcttttcatattttctactattttttaaataacgaatcttggcaaaataaatgagagattattttaaatgactacataagaataccagatttgctattcctttttggtaattgtgtgggaatgaaagtaatgaagtttaaattagacaaaacaagtcaaattaatcaacaattttggttgtatttgctcataacatgaagaccacgtttagtagagttaaaggaaaaaaaacgtgagaggttaaaaagacaaataaaaaaagataaaaagctgttcttctcctggtctcaagtataacctcccctttttcgtataattctatttttagtacaaactttatttatctgtctttttcacccctcccagagaagaagattcaattccacttttgttgttgtttgttccaatttgtgttttgtaatcttcttctctccctaatcttcttcaccgcgcattcatttccttccctccataatccaagcttccgttacaagctctctctctcttcttcctctttttcgtgtttgaattttcctgaaattaaaaaacaaaatctctcaggagcattattgattttgctggaggatttgaaaggtatctaattcttaaattctgtgatcatcttcttttgattcgcataggctggtgtttagctggaaccttgaattcgttcttaccaaaaaaaaattgaattttcttatgatttcaaactcttctaaaaaaattagggtttcgttataaataaaggattggtgattcgatgatcgtaggattgtgttgataatattgctttgtttttgattagattgttgatgtgtttttttttgtgtgtgtgttttaggagagattttgttggtgtgttagttgtttgattttggctgatgttgtgtgagggaggaggaggaagtggtgtatgaagccgagctttaatacggat

SEQ ID NO: 2353 - DNA, 2000 bp, Arabidopsis thaliana
gtacaggattaaaagctatgaagtacgttaccaattacaatctcaagattctcaaccaccggattataactacaagtaccgatttggcgatttgacgaatacagatctatcaattagctagaaattttctttccatgcattttcccaccctcccattagatgatgatgattagaagaccacgatctcattggtgttcactgattcaagagcatttcaagagaatataattcttaattatgaatttgttcaataattaatccccaccccacttttccaaatcacccttacatgttcaccaattgtaacaaataattaaagaatcaaaagtgatttcttttttaatacttattgttgggaaatacttaatgctagtccataactctcttcaattatttaaaggaggagtaagtaagtttttttgcaagtccttttgtggtatccatgtgagttatacattggggagcacaaacttccccactcccacaagccacgtttgtcgcttaaagtttctaagtttttttaattttcgctctttttggtttgttatttatgagtgtatggaagtggagtctcccccttgaacacttcaacatttacactactaatcccgacttagacgacaaacattttttctaagttcgaatgtaattctcctaattcgctttgacctgtttttgaattttatactattcaattttaatttagatatttatctactttagacttgtagaaaattgttttcaatacgagcatatttattacctactatggaaccatttacggatttaccaccataaattagacaccagtattcatataaactatctctaattttgaatttaaacaaacgaaaacaaaacttaaatcttcaactggctaacaaaattttactcatcaataaaacaaagcagtgcattttgttttgcattctaatgtctcttttctcttattcgacctacatcaatagtttcatacaaacaaagtcattttggagcatttttggtctttgtttagacttaattatttatgtaattaggtttgcaaaaaggctagtcatctgctttatgcttactgtcaatccgtcatcattagttggacatcatgcacgagatttggtctcaacaaaaatattaacctatttctacacaacattcaaactaaggcagtcaaaacttatgtacttattgaaatactaattgattagcagagagacgttaaacaatgagcttgaacttgaagtaatcatgttacaacgtgttttggttcatgcttagtgcttaccatcaaattctgcgatttgtgttatttccaacgtatagcatgctacaaaccactcacatgattacacatggaatcgtacccacacgctcgtcgaaatcgcacgttacgcgcgaaactgagtcaaagaggtttatatctgacgtcatcgacacttgaaaccgacatgttttcacacgtggcaaggtcccactggtcaccgacaactacaagaaaaaactgccggcgcagatttagccgtccgactaacgtgcgctttcaattacattatacagaagtctctctttctttcattgacggtgatgaagaccagctcaaagccaggtcaaaatccatcaatcctggcctcatcaatgttaaaaatctttactttcacacatctctagatcttccatagaaggatcaatcaaaagctgtaatctttctttcttcctcgtagctccttctcttgcggatccttgtcggtacacttctacattctcaaatctgattcctttctggagttgctcctgagctacggttcagcttcaattacttcgatctcgtgtaaaaatcacttctagaagctttgataagctttgataggagttggttttactctttagggttttgtttgagtttgatctttattgtatagatgttgtgatcttcgtacactctatatatgtttccaagggtttctatgaggcgtcgctctgctgaagtttctcctacagagcca

SEQ ID NO: 2354 - DNA, 2000 bp, Arabidopsis thaliana
aaaagaaaaaaagaaaaagaggttgtgttgttttccatgagcaaaacaaatgtggtcttaatcttccaaagaaaaactgtagacatattttattaggaaaaatatcgtgaaaaaacataagctttaaaattttgaacgaaagagcatttttcaaactgttatttaaattttaaaattttggttcatttttagtaaaatatttaaattttgttgatttggtcgaattaggtgaattaggtatgaggttaagttaccggttaaaaaaagtattatggagttaacttccagttaacagacgcaattatccaactgtcgtccgtcactatcttcaagtgcatcgatggagatatcaagaacatcatcacctctagaagaatcagacgcaattattgaaagttaatggcgttttggctgcaatgatatctaccaagatctctcccaaaacttttttaatctccttgttttaattttttttttccgaggaatcatatgtaagggtttaacattgttataaaacctaacttttcacataaatgatatttacatgagtagcaaaaaaaaaacttcgagttaacagtctacatctagccaaaacaacaacatctttctttatgtggtcatttaatttagtgaaggaatcaaaatccctcagatcgaaatacaattttcaaaaaaaacacacacaattcttaatcctagcaaaaagcctcgaatacttttaaacttttcttgatttttccagacagcaaagacgtatggaaaacgaaagaggtagttataatgagaaaagataattacttaggaggccgaatatggtctttggctaaacattttggcgattatttatttttcttcccaccgactttcaattcgatgcaaaaaataaagttattataatatcagcaataaactcatctgaaatattagaataagcaaatttcaacaaaaattaactaatctagcctaaccagattaactttacgacatgcctaatccatacaaatcaataaaatttaactattttactaaaagatcaaacaaaactttgggatataaatgatattttgaaagtttatgttttttctcacaaatttgaaaatcgttttttcacattttctatattttattagttaagttaaatagttttgaatctgatgatgtcaaaataaattggtaactcgtgaattgactgaaaaaaaaatccatttacaattataaaaaattaatccattttcaaataccaaacaaatccaagattatttacaattgtcacttttgctaatcttagattatgaggtcatatatcctcacatcttcaaataattcactacattctactactaataaaatgaataaaaaactctttgttttatctatattgaaacaaacaaaacatatgttttgatcggtaacttctatcaatccgcactaggcttacaactctaatcattctcattttttatttttttacctgctttttctttacatttgatcttttactggtttgtgtcaccaatcgaatccataaagacaaccgatataacaatgttaaacaagacgccatggtcatatagtagtatttaagaaagaaaaaaaaaaagagaaagaaagaacaagtgtaagagtaacggaagaatcttgtcccaaccaacaacattggctttaaaaataaaaacgatggaatcttataattgcataaacacacacacacacacaccctttaccctacgggatcgtgctaaatcaaggcccctaactgtcagtaggtcccatccccccctcataaaatggcacactacgtaaataagaagaatggctctaggacattatcgtcattttcttatctgatgcaaaagacttgacttttcctttttgcagacttaaccattcctcctccttccctctctatttaaccaacttaaccaacaattctttctcacttctccactttttttctcggttagtgtcagtttttttgttggctagtctcttcggtcaaa

SEQ ID NO: 2355 - DNA, 1644 bp, Arabidopsis thaliana
gtctctctatctctgtctttctaaatgccatgttaaataatgaataaactctaagcgtttctttgtcactcacactgacaataaaaacttggggatgcatgcatgcaacagctgtatctggagttcttggacaaattcgagaggaagtttgtggtacaaggagcttatgatacacgtaacatcttccagtcgttagacctggcctggacactcctcaggatcttctcccgtgagttgcttcaccgcataccggcaaaaaccctcgaccagttctatagccgagactccaccaattgatcgatcatcccatgcttcttctccaaattgcatctctttttgttttgctcctttgcgctttggtttgcacctctctgtcctttcccaataaaaggtgactgacccaatcgccggctattcttttgaacattcttgtatcctttatttatcaaataaactaaaattaaaagaaccttggagacttgagctgttgctgatcctcgaatactgcttcaattgcgatgatatatctatctaataataataataataattccagagataagtaattccaagaacatacataacatcgacatgcttattattaaactgatgatagtcaattgtaaagaggacaagataataagaaatgtaaattggtcgtcactgatgactatttgttcttctgaaaaaattgccttcaaaattttctgaatatttttaatttataatatgattttgaatcattatctaaatattttagtcgatttgaaatgttaaacacacattttcgttaattagataatattaggtaatatgtatgttttctaaaatttaaattacaatataaagtaaaagatttttttttttttgttactttatgtattatataattattcaaaacagttttaaaatcaaacaaatatgataagagaatcataattttaaatcttctaataataaatattattaatttattattaaatatagaatattccgtgtatgagtcggaaacaatttgaactgaccttttaaattttctatgaacaataaatacaaacggatggagcatccatagaatccgacagcattttaccccacccgccaaaaaattcttgttataaattcttaattgctctgttttaccatactcacgttttcattggctatctttgaccgccttctctacaagtgctataaaaaatttaacagcctcgtttaaacgtgattaccaatgagacggccataatcttaaaaatcactcaaaatctgccaaccattcatgaccttgatatcaaaatacattcaaatgtatagaaatacaaaattcaatagcacctagtaaatttaaaagtaaagctaaacattcatgaccactataattttggatcaaacaatgcaaacgcagcacatgaccgagtccgcgtcagaaaaaggggccaactgctccgtagccgccaagaatctcgcaggtgtggaactttcctcctttattcgatgaatctctttcttcattcttcttcttcgaattgtacgtttattgaaagacaagtatattttcttatttactatataaagtaatttcactttctcagatcccgattcctcttgatcatcgtcttcttctaccaaaattgttgcgcgaca

SEQ ID NO: 2356 - DNA, 2000 bp, Arabidopsis thaliana
gatttagcaacgactgtaaaagtgtaaagtatatgtgtagagataccatctttttcttcgacaatgactgtaaaatctgttaatttttttgttttagtttgtccatatttcttagttggaaattagaaaaatgggaaaaacccacgcttgcagtctatatatttcaatggttgtttttcaaaataaaaattagtagccgagttagctagtatcattagtgtgaaagcaaatgttaaaaattagatatttttctactatattttcttttttagtttttggtttgcgatctactattattccgagatgataattaaggtattaaaccatctccatcaatgattttttattgaaaaactgtttaatataaaaataaaatataatcaaaaagtaagagagagagtaaaattagtctctcaagtgaaaaactctgaaaaacccataagaacacttgtatatcatctattggtcaaatattattttattattaaaatttaattatagaactaatatttattaaaatactaatatatttttttttaaaaaccaataaggtatctcactgatggagatgcctttagaacctaccaattaaatttttacatgtgagtcatttagatgattctaaaagagttagacatctttaatatacaatgtcataatatcaatatggttttccattcgcaagtaaaaagttaaacattatcacacacttacatgaaacaaacgttgattccatgaccttcatgttagataaaaactcgaagatcccataactaaaactccgaataaaaatgtgttgttcgataagttgcgttgaggttcaaataataataaattaaataaatatatacaaaattttcgttactatcgaaactgtatcacactttgcggttttgtcattattcagagtcaaaacatctttacaaactcttgggattcaaatcattcataccttcataaatttaaaagaggcacatttaaagctcaatcacttctttaaatataggtagatagaatcataattgatacagataaacttagtggccaaactactattagtaaccaaactcatcttttcattgaattattttgggtaaaactaaagatttcaaaattggatacatgtagtattttttttgtttggaaagtgtaaatgtgcattgacaggtcccatcgtcatgtcatttggactatggacgttacgcttttgaccactcttttgagattttgaccaaaataaatacatacaaaaaaactttggggctactctgtgaaaatccactatttatttgtacgagagcgtaataaaataaaaataaaaaaagaaacggcacgcagtttgcgttcccaaaaatatgggacgactagtcaaaatatctgcttacgtccgtcaactttaatgttgactgaaccagaataatattaaattattaaatatataaacttgtctttttcccattgtacccttcactctgttagatcttttcgggagaagaagaagataagctttgaataactttcaactcttagatttgaatctaacggctgagaagcctcctgcaaagcatccccaaccgtccagatcaaagcgggcccatcgctccctttagtttcccgaaaaggaaaaaataatacaatctcgaacattagcctggcccatttttgtaattatattatttcctttttagttttactattcaaacaaattcgtatttcattaagtaaaatttctaattgtactggaaaaagtcaaggaattatgcagaaaaatagaaatagccaatttataagatggaaaatacgtattaaaaatgggaatatgaaagaaaaaagagtagagaatattggaataaaaagtaaatagtgacgtggcgggataccctatgcctttacacacatatctcgcagatatataaacagcgtctgcttcacgccaaaggagagagagagagatctgatcggtgatttacttttagttcgtcggagagattttgatcaga

SEQ ID NO: 2357 - DNA, 1723 bp, Arabidopsis thaliana
cttggcataacccatgtgaggtttcacgtcttggcgattgtgcagaggacaaaaaaaacaaatacaagatagaaataaaaaatgaaaactattgaattcaattagtgaagcaagagtgtgaaaattagaattttgaaaagtttggtttgcacataaaggagattgttttatatacataccaatggttgactaaaaatcaagatgacgtggtgggattggccagcggtcgaattcttatgatcgaagttgaaagattgcatttcgttgacaagagattttttctatatcagattcaaactttaaactctaagacacaagttctatacacacaagaatatatatttgtatatttaaccatggtacataacctagactactctccaaaacttgtataaaaaggattttattgtcatcctacaagactacaacgtgtcaacgtctacaatgacctaattaaacagaaccaaaccagtttttaataatgttgggctgaaattcgatttctaacctcttgaccaacaaaacaatcttccatttgaataaactacacgtttttggttcacttgaaaagtttttatcatcgatacgtcaatttatctacatttatcttacgtatgtttggtaaatggtaattgaatatgaacattaaaaaaaaaaaaatcaaacattaaactatgagttacgtcgttaatatgtaattgcttaccaattttttttttgttaaatttaagtcattagagaatacttaagatatactttacgtgtagggttggcggcttgcatgcttcgtgcattagttttagcaatcaaaaagagatctataatgagtatttttgtatgtttgaatgtaagaactaaggaaaaaaaagcgtgtatctatgttttccgtcaaaggccgaatatatatcccgatatagtaatgggccgaaacccaaaactaaaggcacatactaacaaaactacttctatagaaaattatagatgcactcaacacttttgtctatatactattcccaatagtttgttttttatcactaatggtagtagacatgttgatttgcacattgcagctacaaaactacaaaaaaaaaaacgagccatatggatgcttgtcagattgttactgtcacatgaagaaaaccaaagtcttatcttttatttttatacatccaagtagaacacgacacgattggtaaacgaaacctatatagtcaaaaaactcaaaatcaacggattttgtttactgtttgaattatgttcttgttagttagatttattcttttgtatgcatatgtaacaattttgtgtagggaagaaattatagtcataataactcattaactaaaaataaaatatggtctaatgattagactctaatccgaacaataacaaacaattattttcgtttagtgtctctcttattttatccaagaaaaaagaagtgtcaatttataatatcttctggaaagcagccgacagaaaattgtgggctcacatgaaaaaaatttcaatgatgcgtcaaaaagcaaccaaacgactccaaaataaaatcaaatcaaaaatcaaattctctacacgcaactttctttcaaatacaaaaccaatcatctcgattcatccaacccgcgaagacccagaaaccaaaatcgaagacccaacaaaacccacaagtcgaaatctcgaaatccgttgagagtttgttcctttttttgtttgctcggag

SEQ ID NO: 2358 - DNA, 1155 bp, Arabidopsis thaliana
tatgggcctgccatttagctaccgactttgctatttgttgtttacgtgagaaagtgagaaaaagatttaggcaagattcgttttttacattgatcatacgagatcaaaaaggaaaaacaccaaaaccttgatgaagaagtaaaacagatgatgttagctaaaccgagaaagtaaaactatcttaaaccttgatgaagaaggaaaaacaccaaaaccttaatcttaagtttcaaaaagaaaatcaccaaaataacttaaatgtaaaaaggaaaaaaagcaacaaaccccatactccatatcattcagccacaaaatatttgtataagcgaaaattgaagattgataaaagttaaagggtcaaaacttaatttagaagaatgtacatacaataatacaagggttaccttttacactatcaaaaaggttaaggggtcaaatttgaaggaacagttaaattaaggtccaattattgttatttaaaacgctgcgtttagtaacttgctctccaaggagatctagcttgttctactcgcacgtgattataacccattcataactgtatatagatatagacgtcgtccttgtgcttgcagagaaagataaaaacagaaaaagataaggaacttgcagagaaagcaaaaaagaaagaagaagcgaagaagagaaactaagattcaggtaactgcaagctttgaatctcttcattaatttcttgcttatgaattacttatgatcgataatgaggctggtgagttctgtttcactgaatccgcagcaaattttgagaaattcgttagtttttgtttgaatctctcttaggaatttggtcgaacacttggtggatatcttgtttattagtaaatcgttttggaattgttgttttttgcttcgattcagtatcacggggtgtttcttgctaatgattattgctttaattttcttgctgggcttgagctgattattttggttgttgagaatccgaatggttttggttagatgttaggtgaatttgtttatgtttgtgagactttagggttcttgagacttgagtttgattattggattaacataactggttttgatagatgtgaggattgctttgtgtaatatcttaattggatcattcgtattcatgagatttctttctgttttcag

SEQ ID NO: 2359 - DNA, 345 bp, Arabidopsis thaliana
tgatccgttttgatcagtctttatttccttctcaatttaaaagagaaaattaattttgcaattattcggttcggttcgattcgattaagtcagacaaatccgagaagagaaagttattttagaaactaaaccgtatttaaaccgatatgattgtgccgttatctacaagtgctgacgtggcgggaagcatgatctcgtggtttgaaagaagccacgcgcttcctcgtcttcccttcgtcctccgacgtttccaattgggagaagaagaagacgacgatgaagcatttatctgattctgggtctgttgaaaatcaaaattttcttgagaactttttttgaagagtt

SEQ ID NO: 2360 - DNA, 2000 bp, Arabidopsis thaliana
attattttttcttgattgtttatccgattgatcttgtaagagataacttttgattattacataacttacttcaacatgttaaatgacacaataaaatagacaatttatttttgatatccttttgaaaaatattaaataaatatttgtaatgactgtgttgcactaaaaaatcgagataaccccatgagtgataatttggtaacataatctaaacttagagacaattaactaattaagttattatctgagaaataaattagacaatatttttattcgtgtgtgtaatttttgtggtataatattttttcttatattgtttcaattctacggatgttttggataaaaaggttaatcaaatttataaaatgtaaaattttgcttgaacaaatgaaccaaaatgtttactaattggctaattgctggaaaaaaacagttatataatttttgttaacaaaaaaaatgtttgatgtaaataattaattcacagctaaaagtcaatttcctcatttatttttgattaaagaaagtaataaaaaacaattaagtataccattcgctgtacaagagtcgtttagttctgtcggctcgacaaccgactcaagccggctcgagtcgctaagtgaatccactcgctgtctgtcggtggacaaagccggctccaatctgatcactctctctcaccagcacacacacagctctctctcttccctctctctctcccccgctttatactttgttgagtcaaaatcacagacgaagaagaagaagaaacctctctctcactcctctctcctttctctcgtcttattcgcttctcttctacgtaacagattgttcatcttcttctccttgttgcattgaggtgagttcaatttgatctatcaatgtctaaatgcatgctttttgaattatcggatctcttgtgtttgatttcattgatagagatccaattatgatctagatctgaagaatcctgttttttgagttcctattggttaaaaagtttcctcatttagctttagttcgaatctggaatgttaaacgattcggatcgagatttagcagtagtagaattcagttaggtagagtgatatttttatactattagtcttcaattataatataattgcattgagcttttcctacttcactgtatcgttttctattgtaaagattgatcctttttatatattatgcagggggtgttgttgatgttctgacgatctgatttgagtagatctgggtagggggcaaggtctctgggtctacttttgatttgagaattttttaagtgaagtgaagatatgacaagtgctcttggatggagatttccttccactaatggaaatggccttgccccaagtgacacggtaataattacttgattcagtattaacattcatcacacgggtttatggaaaagcttgtttagttgatatactgcaatctttctgagttgcaaagtcagatctggtgtattagcaggatgattaagctgatatgtcccttgcattttgaatctgatttgaaaaaagtacttgagctaagtccattgttaattaatggctttgtaccagtcagttatatctgatagagtgtcatgataaaggttatagtttttccattgcataggagcgaaaaggtcttgttgctcttttaacttattttctgttgtttggtcttgattgcaggagagaaatggggatatgaagatgcatgattcagagcccccaactccacattcaaccacaaagatgagtttgaggtaacgcatatatgtatttggtactgcatgggagctaatcatcgtgataaaattgaggttttatctgtatttgttgcaccaccatcttggtttaacaatgcctgtggaaattaatattatctggattggtttcctatgttatcctttcaaatgagacattttaagcagaaaggcacacctattagcgaattagtatctaactttccccatcccctgcagagaccggacaaccagc

SEQ ID NO: 2361 - DNA, 2000 bp, Arabidopsis thaliana
tagagatcattagagtggtcaatttacaagacaatgagaaaatgataaaggaaatggacgagaactagatagtaattacgtgtgaagaatatagagaatttggcagagaaataataaattgagtgaacaaaagtacacttcttaaaatttaaggaaagtctaggttttatatttttggaggatcttttatcatgttttataaactaaataacgttggtgaattgatcaaaaaaattatttttctttttagattgtttgaaggtggaaaaatatttcggtagtcaatgatttgattaaaataattggattgcggttccaaacttgagtttcgttgaaattattttttttactttttttgcactaaaagatagattatatatgaaattatataaaagtggcgattaacaagataattccataaactaagccgacggataacatgaaatcttctgaaactaaagcccaagaatatggggagcttaccaacactactgctaatggagttttgttggacttatatatcagagtttattggtacaatctacaataataacatctaatggagttttttttttttttttttgggtaaatgacatctaatggagtattgattatttaatattctaaacaaaaaaaaatcaattgaatatctcgtgaagttttttaagcacggtgtatttatttagaggtttcaagatgttctattttctttaatgtatatagattataaattaaaatactaatcaataactccccttagatcttagattttttcatataagtgataacggaaagctactttgggcttgataaaatacgaaaagttacgaggttaggccacatccacgaaaagctagaaagagaggcctgccaaggcctcgtccaaacttgtactactaatcaaattaattaaaatttctttattggtaactttttaatatattcatttggtcaaagctggcaggaaaaaagttttcaacttataattttcttatgaagaagatactgatacaatgcatattaaggtcaaagcaagagtctaacaatttattattcaaggaatataaataattgttaggtaggttcttattgaaatgaagcatttcacaccgtaataatgatatagctgtagaatatgaacaatgcgcgtttgcttgactgtttcgttgtaagtttgtaacaataatggccaccaagtaatctgtcactagaatattgcaacaaaataaaaaccataaatataactataatgatctactaatttattaatttaattaacatgaaaatatgacagcttttgccagcccttgctcgtataatcagtccagataacacattacaacgaaacatataaaataacttttttcaacagaaacgattataatatacatctaaaataattaacagttgaaaattttgatagacatactatatatgaatatgaacttaaataatgacccatttttcgtataatgttaattatttactcgtaaacgcgttatttccacgaaacattaggcaaaactcaagttaatttacgcctggcattgtaacgcggttaaccaaaaagcaaattacgcagagtcaaatcatatctaaaaaccaatataaacataacacgtgtcaatacttaactgatctcagaattaacatcgttaagagaaaacacgtggcagagatctgtgtatccgtttggtgctccttcatgtagatgattcttcaagaaaacttcaaaaactcaaacacgtcaagtttaagaaagaaaaaagacaacaattattttaaaccgccattgaaaagctaagccatgttgtatttttgtatgtggttcgcatgattagtgtcacaccaataattaattattaactatttcccaaccatcgcgtatatatagagctctcttctctcattgttctacaccatcaacaaaaataaagaagagtttataacattaaacagagagagtttcaagattcagacaaagaagagataatctaaaa

SEQ ID NO: 2362 - DNA, 2000 bp, Arabidopsis thaliana
tatgagtaataaacaaacgtggaatatactttcatgagatgcaaagtggcagaggcatcaatgtaggtaggtaagttctctgaggctgcaagaagaatctctgttttttattttaagcagagctttatatatagacgacgccaatggatggctctaagacagtaagacctctgacactcaaatattactggagtatggttcctgataccatattctatattctacaatcttttaacttttactaaaggaacaattcaaaaaaaaaaaaagtaagaaaaattgttatatcatataatgttttcatattcataattatttattcagctattagtttaaaaatggattttttaattaatatattatttgatattgtatatgaaataagaggttcgaaactaaatcaagacgaaaaccaacttatataaaatcaagattaaataatcgcattccattattagacgtacaccagaatcataatcgtatgaaatcaattacaaacaattgatgagaaaaggaatctataattcttcaaggaataatcaaacatggaaggaagaacaaagaaagcatcccatgtggtggggtggaaaataattcaagtgtccattaatatctctctctgtaaggctataaccaatgaataacactgtcaatccggtacgaatacgatcacatcaaaaagtgaaaaatgatgcttaaaccaactaccattaattccttttttggcgtcaacattgatttttcaatttattaagattttttttactaatgtaacatagatgaaagtgaggttttctcgttacaataaaaaaaaaagaagctacatagccagtaagccagagaactaaacgtttcttgtacatgcatgttgcatgagaactcttctagtgagagaactcttggcccaaacaatcaattttttgaaatattaaattaagcttacaaatttgcaagagtgatgattgctatattgcataagaggtatttaacttggatttttttaaaaaaaaaaacaaattgggacgaaaatgtagtctttctttttttgtgtgtgtaaagattaatatgttagaagaatagcttatatattgctaaaaaaaataaaaatgaatagcttatatataaaatagcaaaatcaagaaaacgacattacttttaagctgaatagatatgaattttttgaaatgccaaaagttattatataatagatgaacaaagttttttttaaaatatagttataattttaaaacgtacgggataaattaaaagatcactttttcacgttttctttttttaacaaaacttttgttagataatctgaaatattactcattatttcccatattctattaagtatttgtgaataaattgtatacagctaaacacacataaattacaaatttattgatttaatatactttactactttggttaaaaagtaaacatattcaaattcctttatttcttctactttggagctgcattaaacaacttccttgaataattacgtaattaaaaacaaattaccaaatatttagtcaaaaaataatttagtgaatatatcaaaaataaaaaataaaggaaagtcggacgatactaacaaaattattaaaggaagatgaatttctctttccttgtgcgcaaaatagcaacaagtctccgcgtttcctctctttctctctttcccttatttaaacacacttcgtcttctacctctaaacaatctcaccttctctctccctctctataacaaacattaatacacacaccaaaaaaaaacctgtttatgtctcaaagatctctgattcctcattcttcttctatagcttttggtctccattctcatctcttaatctccagtgagatcagctccaattctaactggtctctctaaataaaaaacagaaataaaaatccaacctttttcaattttcgttcaattttcccggaaaaaaaagcgatccttttgatttttcgatttctccaagtaacaattcaaa

SEQ ID NO: 2363 - DNA, 2000 bp, Arabidopsis thaliana
agagtaattgaatttagggttcttgagagtcaaagttaacaaccctttttgtttgttgggagatcaccctatttataccgtcgggtcctcgtcaaaagtaattcaggtttgaattcataccaaaaaaagaaaatttaggtttgaatgttttttttcatcaaacattgtaaaattatgaaaaaagtatcagattaaaaaacaattggaaataagaaaactctttacttcttgttagtcaagtactgtgaagattagtggatacagattatttgctaaaaacaaagataaatagacaataattgctccacaaaacaaaatctaattgagtaattggtcttcttcttctcattcaagtcgtgcttagctttgaagactctttgatcatctttacaccacaaaatatcggaatcggtacatgtcttggcgaaggagcagcacacattgtgacggaaccatcaaaaaattctacttcttcactcggtgtttgaatcggtttctcatgaaccgtatccggtttagattgagattttccggttttagacggtttaaaataagctttttgtgggtaagaaggtcgtttcttcaagccggagcgaggaaccactttttgacgtacatgtaaaaaggagttacgacaaaagtaatggtaaccaaatccttgttttgtaagaaacggaacggcaaaaaagtcttggacgaagtaacggtgtactaacattatcgacaacttcaaagagagatttgtgttcttcgatgggttcttgttcgtctattgctttcttaggaacgagagcttaatcaattgatagtaagaaataatgagagggttaaaggttatttatagtcattgagttctttactaattggaatccaaatcaaaaaaaaaaaaaaaagaaggaattttactccattacaaattaggaaacatgtttatgtaagtttgtgttgtttctttttttctatgacttaccgatatctgcgttattgttatttccttaatctatatttattaattttcaaaatattatcgcttaacaaaaaatattaaaagattctcgtcttcttctcatttcaagtcttcgttagctacttagcttcgtagactctttaatctattttttaaaaaaacaaacaatgtcgagagaaatatgaaatatgtataatgtattccttgtttgttaaaaaaaacacacactctttaatcatctatctgacgcaaaaattagaaatatgtattctttattaatttcaaaaaaaaattaacatgttattcttgttaaaaaaaaaattaaaaaggagatatgtgttgcttccggaccttccgccatgcaatatcactattttaacatatatatactgtcgcaacaaataaaagctcataaaccataattaattaaatctatttgttggttgaccaaacaaaatattagttgtaaaaaagtaaatatttccaattaaactgatattatttgcttttcacctattctcatcagatattgtcgcttgtattttttaaaattaaaccaaaaacaaaccgaattgttttcgctatacatagtcactcatcgaagttcaaacaaaggccaaaccaaaaggcaaaaccatcggattataaatttatttattgatatactaattttctaaatttgtttatcaaattatttttctcacttttttgtagttcttttatttgtgaaaatttattttattttataatatttaaataaaatataatacatatacattaaactaggttagctgaaatctccatgtgtcatggttgtttctagttagaacttagaagtgaccaatcttacttgtggttgtggaacaagtaactctaaataagttgcaacaacaaaacttcttcaaacctacttctcatcaaacctcaaaaccctaactcctctataaatacacacaaactccttcataatctctccatcatcactcacaatcaaacctctttccagtgacaactcaaacccctaatccccaaa

SEQ ID NO: 2364 - DNA, 2000 bp, Arabidopsis thaliana
gagactgagttctatgataataaattagaagcaaagtttcaaaccatattcatacgattcattatgttagcaacaagaaatatgaatatggtttgaaactttgcttctaattcatcattcgttacacaacgtccaaaatctaaaaaagtttcagattttctcaaaattcagtaaatgggcctctatataatgaggtttgacgttttagagatactttgcacaagaaagaaggttctggtcggatcgttacacaccgacctttgaccggttcatcaaaacgtgtccggttttatgtttaaaccgtcacaaaggggaaaaaagttctttaagattcaattacttaatgattaaattctttgcttgcttcaacatctttacaacttttttattaaacaaaacgacattttcacattcctttatccactaaaattctttgtcagattaatctatatatacatttttgcagctattttagcaaataaatcttagagttagatttatttacaactcaatgccattaacattaaattttttttccaaaataattaattttacattaaatttttaatttaaattgtcaatcacattatcaatcaaatttaatccaaacaaacttcacatcaatcccttaaaattagcataaacttcacattaattatttagacatgaaaatatttatttaaagatttaaatcttctaaatttttgcttttagagttattatatcattacctaaaaggcaaaaaatattaattttttaaatattattatttatatatttaaacttcataaaacattattaatatttgaatttataaaaagtttaatctatcaaaactaattaacattattatataatatataaaattaaaaaaatctcaaaaaaaatttcgtcatattttgtgattcgaaattttaagaatgaacatatatattaaccaattggcgaaaaatgtgtgggttcaacgtcccgcaacgactaaaatattttgacaatgattcataaacatattataaataagatcaatattaataaaataaatagtttttttttgtggacgggtttggaaggacgggtttggcaggacgttacttagtaacaatagtaaactataaaataatttacaaaattttatatatattaattttaaaaaatgaattgtctccgcggtataccgcgggttaaaatctagtttaatttaataaaatcatacatttctgacatgttctgtaacgtttgatgattcataagaatcatcggaagagaatccttccgacttctcctaccacgacgctggcactataacattcgtgtaaacaccattcgtacatataaatcaaatattgaaaattttgtaacaattttttttttaatagtctttaaaatatttttaccaaaatactattaaggtagagagagagaaagaagagcgaagtttgctcccacccatgatcgctcttctctaagaaagaaagaaaaaaaaaagagattcaattgttgcacgttctttcctcaattctgattttgatttacaaccaaaaaagacctttaagtttccttgtgggtctctctaaaaaccgaaacttttctctttctttttcttttcttattaagatctagactctacagagagagattgttggttcacacacatatcaaagttacaatctttctgggaatttgaatgaatacgatcaaaaagagttgaaaaaacgaaaactttacgacgatgctgcaacgagctgcgagtaatgcgtattcatggtggtgggcgagtcatattcgaaccaaacaatctaaatggctcgaacaaaaccttcaaggtctctccttttgaatccatgtctctttatataggtgtttgtttctaaaaagttgagatctttgaggtttgatctattttttgttttggatatgaatttgtagatattgaagagaaggttcaatatgtgttgaagctattacaagaagatggagattcgtttgcgaagcgtgcagag

SEQ ID NO: 2365 - DNA, 2000 bp, Arabidopsis thaliana
gttatctctccacgatctttgttggaagacaaaccaacgtcccacatcaaaaaattagaaaataacattctagtatataattacttacatgaaaagtcaactaaagcgtaaacatagaaaacactatcataaagtgctattaatatctgtttttcgtatagtgattcaagtccaactcaaaattagtttgaggtctttcgggaaaatgtccaaaaacaaatccgtgcgagcttgaaatttttgtataaagtagacaagtttacttgggtttcgggagccaacaatcttgccttcaaacaacttatttgtagtagagtttttggtcgctttatattgtcgctagcgataattttctgatcaagctttacatctttgctggagattcaaatatccagtagttatcttgagtttcacaagagagaattacacaagtgtgtcaaagactagctatagtaattttcgactagctcactcttgaatctcttttattacaaactaggtaattacccgctatattacaagaaaacacgggttttcaaactacaacattagtagcaatatactcgttaaagtagaagtcgactatattacgagtaatagccttagtcgctaatccagagtcgctaaacaaaatagtcgtaactttagtcgctaaatgaccactacgatacgactaatacccgctgtcataacattagtcatattgtagtcgtaaaatataacgactgagttacgattgaatcacataaataacgagtatcgtagagactcctctgcgattatttagcgaccacctagatgaaaaaaaattaataaaataagtagaataaaatgaaagtagtgcttggtacattattatgatttttatttattgaatgtttttgagaaaattcatttaagagtgagattaatggagaatttaacacaacaaaagacttttgattttttctcaattagttttgctagttgaaccaatccaacaagttaactcacaaaccaatcaataatttcttattttattttatttttatgaagtttggtgcattaatttatagaagcaacgagacatgcatggctatgtcctagcgaacatagagtagtagtttatacaagtataccaaagctaaaccagtctcgtgaactatatatatacgtcaacaccgaaactttggaaatgtataatacttgtatagttagtctctgtgtctgatattaaattgtacataaatttctttatgattacagtttttttttcccccgatttatttgacacggtttgggttatatatatgattagtcacacaccgacttgtaatatactctccaatacacgcttttaaatttggtgcgttccaaacggatgataagaacaccatgtcacactaatcgggtagggacgtccactaaccatattgacagttgtatcaactacaactacaccatatataacggtagatccattgcattcgtgtggaatctatagtgtttatatttgcatatatcatgtcaaatgatattttgctaatgtaggtaggtgacgccatagaacttttgaatatattaatatggaatcaatgcttttaagaagtggatggtgattatcatttatcactctatcatcccacgtttcatacacgctgcgacttatattttgatttacttttcttatgggtttggtccaattccaccgctaaacactatgcacaagtgcaaacaaatatttaattaaattcaacttccgatttaatcggtcattcaaatgagactaatgagtccaccaaactccacaattagatacccataaataaaatagaaaattcgaggttatcaacgtgcgataagatccactttttgggttatataataactaaataaatgaacaaaacaaaaatagatttgactaaaatttggctataaataaatttgagtttcaaagaagccaaacccgtcaacacatcttctttaagcatctctctcccttcaaagaaaatatcacaaaa

SEQ ID NO: 2366 - DNA, 903 bp, Arabidopsis thaliana
atgggtttgtgtttgtttacaattggataaagaagcagccaattttatcattttgtacaatccattttagacttgaggctctcacgttgagactcattttgattcaactattcgatgcttccagttccagctgtagttttgtttttttaacgcgctttagtttacgaagggccgagggccaataatttggctatattttcgattatacaaagacaaccactccttattcttctatttaattgataatatttagctgtaaatatcatactaatattatttgaataatgactattcaatataaggtaataaatgactagatcatgatcgttctcttgaatgagttagtgaataagacgtttggtgagaagtgttgacatacaaaatgaagataattttgttcgtgttttttcatgatgcattgtcattcatctaccattcatcgaatttattttatcacatatatatgaatcagaaaaagaaaataaattttttcaggtagatggaatgtccaatataaatttattgaatattagtattatatattgtaatagtgaaattttgtataatatttctgtgatcatataactttatataattattatatttttagaaataaatgataaaattataaagataggctttcttgcacaaaacgtcaaaaacaatcgtataaaacttaaaaacttttaatgtttttttgtttttttttttttaaattgcagatgcttctaggaccctagtttagataacgtaaatcttaacataaaagtcacgtatatcgagaagcttactaattgccaccggtataccgcacgtgtcagaaatatacgagctatacgtgagctatataagcagcaagtgtaaacctctcacgggcaagcatttagcaaaacgcataacaag

SEQ ID NO: 2367 - DNA, 2000 bp, Arabidopsis thaliana
cacctcttttcacaatgcattttgatgagcatgcaaacattaactatacatatctatatatacatttttgcagccattttgtgaaataaatcttgtagttgaaacttatttacaatggttgccactggattttaatatttgtttttgataattagaaaaaaaaatttcgaattaaatatttgatatttaacaatttccctaaaatctctctacattaactacacgattggttactaaaataaaactttcaaaatatttaatatcatttaattactacaaaattatcattattgatattgtttttctgcatgactattacaattcaattataatcatcaaaccgtagagatatttgatagcatttaattactagataattttaaaaataaatgattcataaacatatgataaataagatcaacattaataaaataaaacgggacgggttggcggaacgggtttggcaggacgttacttaataacaattcttaactagaaaataaaaatattttatagatagttacatagatagttacaaattgtaaacttttatatatactaattttaaagtataaattgtctccgcggtataccgcgggtgaaaatctagtatatacatattttaataagatatcttttattatcatttaatgaaaacattaaatatgtacttgttttttgtttctcttataattcaggtactttgaacaattaaatagataatttagcacaaaaggtatactatatccatataacattatatttgtaatctatgtgccatccatttctaaactttgtaactttaacatagttgttgacaatagaagttgcactaaaagattgttttttataattatgtgtaaagaataatttacaaaaaattggtgaaaggatggatatcttttgcaaatttaccaagaaaaaaaaaagaagagaatatcggaggtgagagacgtgtatccacgagccaaccatgtttaatatcaggcttggttcccactattgcatgacatggcatcatccccatggttctttcgatctcgccaggtcatcaacctaagtggaccatttatttcgcatgatacacaccacctgtttatttctttatttgcttttttattccctatacatgctttttgattttgatatatactgttcgaggaaacaatactcctaaatagtatagaaatattttaagaagacagaaatataaataattatattaaaaatcttaacattagttacaatatattaataaattcaacaaacagtttatatatagtttattcatgtttgaagcaaaacaaagtttaaaaacaaatattttcgcatgttactttatcacaaaaaatgatctaattatactaaaaatgataaatttatcgaatctatttaatattttgaaaaggattctatttacactatacatatctatggactacgatagacatttttatttttaacacacgaggccacaaacgaaggtatacgtgatgcatgaacactgtgaagtgtgaagcttcctatataatctacatgttgatgaacgctcgataaaattataaacctaattattagtccaaagaaattctacaaaaattctctatttaaaaaaaaaaagatagtgaaaaaatgtgtccgtaagtaaataagcgaattaaatgtaaaatctgtcccagaaaaacaaacaaaactaaactagaaaagagaaatttgaatttacttttccaaattccatttacacatcaaaattttatttatttgtttatgagtgattatccgaattacctccaccaaataaaaccctatcttatttccccctaaattattagaaaaatataaagtgattaagattcttttgaaagtttgtgtttatactttatcttgtactaagagaaacagaacttccctataaaaagcaaaagcaagtaagaataacgtgttaaactaaaacctcgaaaacaacaaaacccgaaactgaaacagagaatccaaaaaaa

SEQ ID NO: 2368 - DNA, 2000 bp, Arabidopsis thaliana
tattaatttttatatcttattatttattactggtatcgtaagaccaatctctttaacacatcgccaaaaaaaatgtataagagctacattatcagttggcttggattttccttttttctgccttcatcactttgcgcgttaattccttctataatcgtcctcaaatatttttaaattgctatgtgctgaatattttaaattttcataaactttaaagcaacctaataattttctatttctttcaatatatttattgtttttcctatttaccaatttaaataaaatataattttaatacataatatacattaaaaattgaacctcttgctctttcagaagaaaaaaaacaaaaagcaaaaaccctagaattaaatagtactgtcaagttggagtgggtacaggcacgatcgagcaaaacgaaatgtcccatgcatgcctttaattgctttagagttagttcttccaaatcaagaattagttttagttatcaataaataggagtacccactagtagtcgtaccacgacctttcaattcataggacaaacgtcttaccccctgcattattatgcgatatatatgtgaatcatacatcatacatggtgcctaaagaaaatgtgaatcatacatatgaatcttaattattccatacatttaaattatgaaatgcataaaaatgttttcgaaaatgattttataaacatatacgcagaatctcaaagttgctaattgtatactattgctttggtttggttgttaggctaacgtcccatgatccttcggaaagataaatatgcatgacccggagtgatggagcatctaaaattttatggaagctttgctcttaaaaagattaagctgtaattgtataagtatatatagttttaaccaacttgtggttatttttgtagtcgtcgaaatatttattatgggattggaagatcatggtggattgatatgtgtgtcttttctatatatttttaatatttaggtcccattaaatcagtttgtgatttcagaatcctaacatacccttttgagattacttttcctatttatctcgaacataacctcattctaaaactacaacactctattgggacaattctatttggatcaaatttgtgctatagtcatgaatttattactcaaaattaactaaaaagaaatgaacgacacatattttaaatgttttctaggtttaatatcaacttcagatgtggaatattccaaacatgttcgagtttttctattgcaatttcaataataattgatcattgtggacgttttaaatcactagaacattttggcctctcacatgtttcatgattagtctttattttatatacagaattccggattatgagagaaaaaaacacatacttttattaataattacaaatttaaattgaaaatttatttttatgttattacatccaatgaactaatgtcaatgcatggaaagaattacttaggctccgggaacaacaacatgatcccttcacacacatactctaattcaactaaccaagtcttcttaattctgataagtcaaattgaaaatgtcattaccactgattaaaaaggaatcaaaagaaaaaaagcttttagtattgagtattgaccgtcgctatcggtgacaggcagagtcacaagccaaataaaagggaaccgcgtggtacgtacgggctgacgcctagctgctacggtcatgacaataaattgcccaatcaaagtaacatgccaacgtggcgcagacatatcagtcccacatgtctgcccaaaactagccaaagattacgtgaccgcggtccctcttgtcccctgtctcggtctaacgataacaaaccgagcccacttttatgtcgacgtggaatttggctgacgttggttttctccttcttgccactataaatacaaccccatactcgtcgagtttcaatatctcctcatcatcaaacacaaagtctaatattatcacttacaaataccattttaatc

SEQ ID NO: 2369 - DNA, 2000 bp, Arabidopsis thaliana
ctaccttcagtcaccattcctatcaaaacaataggaaccatctcccacggataaatgatgcctcgaagaccaacgcgccgcctctattcttcccttaagactccactccgacatgacgcataacatcactgttgtctaagtacaaaacaacaacaacaaaagacaccacaagctccaacttcgagcaaaaacgatgaagaatcgaggaggctttacgaagagcagaaaaaacaaaactaaggcgatgcaccacctgatttctagatcggagaagaatcccgtcgctaggaggtccaacgaacccaaacgtctcatcaagagccacaaccaccgcagaaaggagaaacccaccacgcaccaccaactagagacgatgggcaatcgaaatctgaaacaaaacgatggagcacgagaggaggagaaacatcaaagacaacaaagagggaggaggaggagccctccccgttcgccggcaaggagtgccgcaaacggagaggcggaggaggcagatcgccgacattatgatttaaacttaatttgtaacaagaaattactctaaaatgatatcggcatagatattgtattagacttcatttttaacaaatatggttgtacaacaaccaacctaaaccatgattagtgaagaagaagcaataaaagtagagtaaataaagcccaaagaattaatgaacaaaaataacaaagaggatgttgacgaaaagtcaactccactaagctggcgacgacaaaaacttctgcgatttaagttaaatttgttgggtcctacttcgaaaccagatcatacggctgacgacgaaagtttgactcgatcctctctcttctttttcgtccgttatgactcttatcatcacacctatcttgatttgtctctccataaaaataaaaaataaaacattttctttttcattcatcttaacaacatgtattttatcaagtttaattacaatagtgtcgacgaaaagaacaagaaaaatgccgacaaaaaaaaaaatactagaacaagaaaaattagaataatgtcgaaaagcgattaagttagtggtttagccgtttgttcatcttctagcctaatagtttggacatctctttctttagtggagtaaaaaatgagtctaatgtactaattaaaccagaatagagataatttcatcctaatacaaattactagattatatacgaagtagtaatacttcatttgttctaaaaacttttttgaaaaaaataaagttttttcgatgaaatgtataattggttaatcagagtaaaaatatgtacaaaagtgtttaactgtgtctaaacggatgactagcagtttaataaggagttttggacagctttaatcactatagttgtaagaaaacaagatgtgagtttgtaagttctctcacaaagtttttttccaaagctctttcaaaaacattgaattgtaggcattacaaatgttttggtgcttaaatgaattgtatcaaaaattgttggtgttacaaattgttacaacaactcatctaataaagacttgattcttctatctcgacaaaagattagagtttgccaaagctcatgggatagtggtgtatagtaaaataaaataaaatgtattgagttctcttggtttttaagtaaagaacatgtatgcaaatatgctcgtaaacgttttaaaaatagtgatgatcaagacttatcactaccgttgcaacaaacacgtgaaggttgaatcctctaattttgtacaaactttgacttttcgaatctaacaaaaaaagaaaaagttgactcttaacaacaaaaattgaatagtaaaaaagactatttatgaacataggaaaagtctaaaccgtgacacattagtcagtcacctaccatacaaattacatcactttaaataccaaattttttattcatttttgttctcttatttactttagtcctctcgaatcccataaagtccacaactctctccttgtagagagagagatttt

SEQ ID NO: 2370 - DNA, 2000 bp, Arabidopsis thaliana
ataaatggaagaaaaataaattgtaaagcgaaattaaatgtttaccgtatataaacatttacgtgtatagtaaggcacgtatttatcattctcgaaaaggaaaagaatagaagtcaatgggtgcaagtaatgagggtatttatgtcatttaggaaatggattaccccagctcacacggcaagtaagtcgataacgaacaaggctcgtgaccggaccatgactagagtcgatatccaaatccaacgaactgacatataaacgggttttgcgtgaaacaacgaataacacgttcacactaaacttatattttatttttaattgatgtatatggttttcactttttagcttatttaaaattcgctttcatagttttgtttttatgcatttacattgagtttttagagtatttttaccgtcttttgttcttcgtttcaaattagaatcttgtcagtaattgtgaaattagaatcttttcagtaattgaatgtgtgtgcagttgaaaacaaggttatcgatctctagtttgatttaacacaaaacatgagataatgctcaaaagattttgatccatcaatttgatatcctcttattgatcattctattctacaaaaaaagtagttttacttttgttaggacaagaagcacaaaagaccaaatttggttagataacacaaatgatggtttgagcggttcaacaacacaaatttggtacgtaactactctgtttgcttataacaacaatactcttaaatgtaaccaccaatatgctaaagatattgttccacttttcaacaaagtaataataatattgttcgaccaatatactagcactgcaaatgatcaggtgaaaataaataatttttcatctttttcattttaaatggtaaaaattagttgaataattttttgtctaaccaatgtaatggttcgagtacatatatatatgatatatgtaataaagaaacatagaacaatatgtttgtaattaaacttgtacatgtacatatatatatatatatacataatacataatcaaatttcatctcacgaaaaaggtggataatcacaatctcaaatattatgttaataagaattttcggaagatcaacatcaatgatccaattttctcaatcagacattattttcctaaatttgcatcaattttgttctagttgactaattgacccaacaaaaaaaaacaatattattcgattcaatagaagtgtatattctaataacattgttttctttttataataatgaaaacaaaacgactttgatcaaattgttatgctgtccactcacacacgcatcatcaataaataaagaaaaaaaaaactcaaacccggtcaaagatatcccaattgctcgttgaccatgataaggacatatccgtcattttaatcttcccacgcttttcctcaagggcttattcgtctttaaacaaaaaaatagacatccactgggcacgtatcttcttcttcttcctcgtctttaatcaaaaccaatttattactctgattgttatttcgcaattcggtataattcaaacgggagatttcgttttccgatcatcaccgatcaacttcttcgccggagaacaaataagtttcaaagcttcttttgacgattaaagtagaataaacagaaattgaatccatgaagaagataaagagaaacctcagagaagaagaagaaggtaattgataaatctaaaacactaattagactctataatatcggccattaatggaggaatcagtttctctctctctctctctgtttctctatgtgtatttattttggtgtgtaccgttgggaagcttgagagcttttaatagctcaaccaatttccaagtggtctctctctctcgaggtcttagggttttagctgttgacttgtcgcagcttcactggagaattgaatgaattttcttatggtttcaggaaggtgatgaatgttgagatcgatttttgatttcaatcaacgttcaacgaag

SEQ ID NO: 2371 - DNA, 2000 bp, Arabidopsis thaliana
ctttttttttatgctaagaatataaatatttcatatgtaaattaggagaatggattaaatttttaggtaacacttaatgtattaaatccattctcctaatttacatatgttaatatttacaatattatcttctatttatcatttttaatttaatcaagttattcaaatctatttatttttttgtcaaaatttcaaatcttattaatataaaaaattatttgagaaattatcataaaacaatctaattaatatgcattattattggataacgatttttggtatttaaaacaatctagttcacttaaatctatgatagattgttttaaataccaaaaatcgttatccaataataatgtatattacaaatttaaaatagtgcttcaaaggaatccaacaagaaaaataaaaaacaacacaagtacacaacaacaataacaacgcaagtaggttaggtacttaggtagcaatgcatgcagcctgattcaaacgatctacatatgtttttaaataaaagatcatgtcatttgattcttcccattgtctattttctataataagtaggttaggtatcaacgcagcctccaaaagcataaaaacaaattgcaaattttccagtggcatatgtatatattagtcacttgaatttcattaaataaaatacgagtagaaacgttgacaaatattacgagtaaacaaaaacaaattggactttggaagcctttacattttgctcacgcaagtaaaaacaaaaggaaaaagaaatactcaattatttgacatagtagaaataagatattcatatgaaagtgaaagccatttgatctttcaaaggtttaatggttttatattaggctaaggtatgcttttcaaacaattgtttaactaaaaaaactgtagatacaaaaaaataatcataatttcagcatattgcaaataagattgtttgttgtgtattacaatttacaaataaaattatatatcgtaagtttataaccataaacagaatctgtctttaattttttagaaggtcacaactgaggaaagaaaataaaagtttttttaatgatttataaaaattacaaaagttaagaaatttcaaaataaaaatgtggtaaacaaaacttcttttatttgttaagacattgctataattttttttcttattaattatttagttatactgaaattaaattttatataattagctgcaaactcataattacttaacttagtctaaaaaccagttatggtcataaactatatattatgagaaaattagtcagtcttacttttttttatgaaattatttcattgcaagttatattcaatctatagataatgaatatttatttaataatcatgataagataagatcaaatatagaagaaaatatacacaagagaaaaaaactaaataaaaagtataattaaataagtacaagtcattatccaaaaatatccaccactcgcgtaaaagcgcgtggaagttaaaaagtcattctcctaaatgaaccaagtcttcaagtctcaactacttcctaaagacaattagaaatttagaaccaaaacaaacgaaacttctctgcaatagccttctccaaatttcctcactttcacgcgtttcagtcttctctatataaacttgtttcatcaacccatcaaaatcccactcaaattctgtttcagtgttcttcaaattctcaatctttctctcaattcatctaaagggttcctcaaagtttcaatctttctctctgaatctaaaccatggctcgttgtagcaacaatctcgtagggatactcaatttcctagtatttcttctctcgatcccaatcttagctggtggaatctggctaagccaaaaagggtcaacagagtgtgaaagattcctagacaaaccagtgattgctcttggtgttttccttatggttgtagcaatagctggtctaataggttcatgttgtagagtcacatggcttctttgggtttatctctttgtc

SEQ ID NO: 2372 - DNA, 973 bp, Arabidopsis thaliana
ttctcacttgactctttctttttgtttcttaacgtctagctcagtggagttcaaatactcgtacgtttcaaatttaatcatcttaaggtttttctaataatcttcgtagctgtctttacttgttttgttactatcactaataaaagatagctagctagtgactatcttatagatagctaatgaagatcaaaaaacttaatcaagctcttaaattttattttaagaaagtatcattggttcctcaatataaattttcggatcgttaatagaggtcaaatgatttttctttgttttgttttgtttcaagattttgcacgggttaaaagttgaataagaataacgaatagagtatagacacttcataaagtgtagtttccctgccacacttagatctcctactaacctcacttagattagatttctctctagtctaaaagtctttaaaccttttaccattgggtttcacaaaattaacattagtagttatgtcttttctttttaaaaacatattttagaataaaccatatctccaaccgaaaactccaaactctctccgacgcttatccgcatagttcttttgtcgattttgagcttcttttatcttaacctttaagattttgattttttccgatgttcatgttattaaccacaagtctacaattaaattattatatttttttaaaaatgattcttgcgcgagaagctacttagtggactcggaaggagaagggaaattggtagaggttttaatttgcaaaacttataataatataatagtagtagtcgtaacaaatggtttagctgattattcaacatggaacttttcaaagaatgtttcagttttagttgaacagacaatttttacccttgtcgtaacaagacaaataacgatttttccgactctcttcattcgatctctctccctctccctctctcgatcggaaaagtttgaatctccggcgatcttctcaag

SEQ ID NO: 2373 - DNA, 1557 bp, Arabidopsis thaliana
caacgtgatcggagctctgccctacttgaaagtcaatcgaaaggcgacttaagcagagcaggcttgatccttttcttacctgcaattctcattttgtaatctaaagttgtggtaatatccttttgtattgtgatataatttggtcaatgagttgatttttgtttcatatttgtgtcttctttttcttgtctcgcatgacaactattctaggtgtaacatatacctcatcaacgagtttggtcattgatcaatgatttgggttaagaaatcagagacagatatatcttaaaagacttcaaagtattataatcacaccaatctcacttatgacacttttcaagtctcacaacccaatccattatttttttgttgtcaaaagcattaagataaaatgcggctgtgatagtgactcactagctaatgcattgacaatgggagttcattagataaagaaaaaatacagtacagtgtaatgtttactatattaaatgttcggttctccggccaaatagatgtaaatctttgagtaattaaaaaaaaaaaatgttcactaactctggatttagttatatgggttgtcaaacttgtcattgcaacaacattcttataaattatagactataaaatataaatcatgatcaatattttattttacttacctatattaaattaaaatatccaaatttaaaaaattctaaacataaaattggaaaatttaaatcaaagtgacacctagttgtaaaattttaatagatttattttttaatgtcaaaaatgcaaacacaaaaaatattataatcatcttttttttttacatatattaaagtaataaattatgattggattcatatgtcaataatatatatgattgattaaaatcttctaaaccttttctattttgcactgtaaaaaaacattttctattataaacaaaaagaaattattgaacactttagatgatgtgttaacacattagtaaactaaatatcctaagacacttgatatttcatcataaaatgtaagaaaattgctaattcttgggggtgtttagcaattagcaatcttttataaatgttaagacacttgacagtaaacttaaatatcctaaagacacttgatattttataatttatgatgaaatatcacattttaatttgatacaaatattggaaccattttaattttataatatgtgacgacaaaaacagaccaaagccaaagaaaggagaaagagaaattagataagaagctagcgtccgaataatatgacacgtgtcaaattatccatcaatagccgtcattaaaaaagcaaaacgtgggacctaaacagcctatctcaaccaagtattgaaataaggaatgacaaaaatagcctcctacgtaaagacaccataaaggccaattcgggtactttctagaaactcaacatttgtttctattaaaaaaacaaatctctcaagcgcgtggctattcaatcgcgtccttttcgcgttcttttagatcttcaaatcaaaattcgttactctcttagattctcagggttttgtgttttttgga

SEQ ID NO: 2374 - DNA, 2000 bp, Arabidopsis thaliana
tagaaaagtaaaatattttcatttaaaatattataaaacagagaagaaaacttatactatttgaccaaggaaaaaaactacctactcacgacacgaccatcacgtttataatgttaatacacagttacaccatacattttttcattgtagttctatacaataatatatcatcgtttgatctaacaagtattcgatagatagtgggaacttttttttcccttttggccttatatttaagaacatggagcctgtgtttctaaaattctatctaaaaaagtatattttgtattgatcatatctgaaattgcatatattgtaaaatattgtgtacaaaaggatccggtccaagattaaacacacaatacttactgagactaaaaggggctaaaccacaagaacaaatccttgaaattgcaatggttaaacttacaaaaaatatgtctcttattaccagatcttaatattgtttaccgaatttctgaactaaactacattttttgcccaaacaaacaaagaactaaactatatttattcaagtcaagtcaaataattgcatgcaggagacaacgcaaaaagatgaaaaaactaaaaattcagagatgaacatcgagaacacaaataacattatccaaatctcattaggatcctattaaccaaccacaaaaacgtccacttcataatggtctaatagtacaatttgtttttatgtagaagtaaaagtgaagttcgaatattcttacattgatttcaatcatattttgctactatagattaacatgtatacatcagcatacacatggtccaacgattgagtctatactgcacaaaactctggagatgaatctaaactttggttcgaaattccggcaatgtatggaaaagaatattcaaaaaaataagaagaagcatattgaccgtttcttgttcaatatactagaaggtaaacgtcaaaaatgtcagcatgttttctttcaaaaacaaaaaaaaaaatgtcagcatgtggtcagaactcagaagttcttaccaagaaaacttaactaacagttaccatttagaccctaaattacttatgttgtatttttgtccgaaaactttgattaaaaaaataaaggtgtaagacgatgaaaaagaacaaaaaattatattgtcactgtatctttcaaaatcattctaaaatgatagacatgtatcttagcgcctccaaacttttccactctatgaaaagttgttcttcgttttttttttttttttttttttttttgtcaattgttcttcgtttttgaacttctattttgcttcgttttgatatttttatgttttcgtttatatttttgaatttttctttctttcgtttgagttgaagaaaaaacagttgttattatgtaagaatttaaataacaatttcaaaaaggaatattttttttggtcttactaaacgtctgaccggcatgtttgaaatatttcagtttcttgttgcttcttgatttaaccatccgaatctatctaaaccaactaaccaagtgattgaacaagaactaaaccgatttttctttgatttgatctgaatccttaagtagtaaagtccaaaacagcaaatactaaaactgaacacaaactggagccgaactgaatcccgaaggaacaggtgttacctattccgacaacgataaatctcctatttttgggatgttttatctattgaaaagttgttgaatgaggatggtctaatgatttttccggtctctccttacaaattacacttttatggttcaatccactcttaaaaaataattgaagtcaagattttcagcctgtggtcggaaagtccttacacgaaactgaagtatgatataaatttatctttagcatatggtcgaaaagtctttacaataaacttagttaaatagtagtaaacatatacactagctacacgtatttcatctttattatggtcacacatactacacaaccaacaaaaactacaagacgataacaacaaa

SEQ ID NO: 2375 - DNA, 2000 bp, Arabidopsis thaliana
tactagaacaaaaagtacattctttatcgtcatgatatatattcttatggcaaaacaaaagaaaaattaaaatattctgatgtgtgattctttttcaagtttgtaactgggtgatgaaaataacatgggattattgtctgatttatatgaaagaaatgaagaactggctttaattatctttaatgaaactcgttcgagtatttatttgcctatttggtaattaatttgcggtttccaacattgaaaaagagttgaaaatgtaacgattgtctttcaaaaaacgcattatgaaaatggaaccatgtccatgttaatatcactctcaccattcttagtgttattaactaatatatattatggaagagttttctgttctcttaatgtgtacatatcatcatggtaaacatccaatcaaacaaagccatgtcaccattttttttttttaacactaaattataattacaatgttcatttaataaatatttatttctattaatattaattattaacaaaaaactaataaaataaaaaatgattttaaaatagtaaaagtcataatgtgaaattttattagtaacaataatattattaaaattttaacataaacacaattaaaaatgatcatacttcaaaatacaaaagaaaaaaagaagacaaaattcagaaaaagaatcaaaagatacatatgacatgtgaacaaatgggtagattagtatatattacatgttatacacataatcatgtagtcaactttttttaagttagttattgaattattaaatttttatggtcatacagcctaatttctcatgtatcaattagaccattgtcgacaaaacaaaatagaaaaaatagttgaattgattaggctccatgtttgactggtacgccgtgtacttgtcaatgttccggacggcgaatagtatttttgatattaggaaatggggtttaccttcaaaatattggtgtggacggatttgtggatacttgatcagatatcaaaggcggcacaaaatgaccaacgatcgacgaaacagtgcccaaaatcagagtcagaagtgactagctcgatagcatgatcgatgccctttcacccatttaaaccattccacctagaacacttcaacacgactgaagctaaaacttttgcatatctcatagagatatgtttgataaggttgctgaaaataacaacttctactataattttgtcttttattatttcgaccttctcttaagaaattcgcccaaaaaaatttccaaatcaaaaagttgttattatcctaacagatcttaaattatatgtttcgattttcggttatatactggtaaaatctgaaatccgaacattaaaaaaaaattgaaacccaaacggatactcaaaaacacctacaacccaaccattataccaaaaaataaaatccaaacgtaaacccaaaaaacacaaaacaatatatacacatatttttggattttaaggatcatttggagcgtttttctatatacatcgtttaggtttttggagtttttcgattcaaaaatcgaatcagaacatatttcgattctatggtcgcattttttttttttcgagaaccattccgaacccgtataaatccaaaacgaaccgatcgaaacatattcagtaccttccgaaatctccctatctaaaaaatccaaaaccatgtcttaccctacaaatccaaaacccgaattaccctaataaaatccgattcaaagtccgaatgtctaaaaaatccaaaaccctattttaccctacaaatccaaaacccgaattatcgtaataaaatccaatccgaagtccgaatgttcaagcctaattgagctactcactaacacacatcacacatgtgtaaatcacacctaacttctccttctatatatacgcctttgaaagaccaatcctaacttttcattgtttactctttcgtcttccttttcagagttcaatcacacaacacctctcttcaatagcaataacc

SEQ ID NO: 2376 - DNA, 2000 bp, Arabidopsis thaliana
tctcactttggtttcccaactctatggtttgctaaggtttcatgttagttcaactagtcatttcagttttgttttgcggttttcggattgtttggattatgtttagattttttgtttaaatcagatattgaatatcacatgcataccgattcaaaatccgaaatatccaaaccgaagtcgaaccacattctataattatttttatagatattaattagaatctatttccaaaaactcgaaatccgaaaacaccaaaccgaattcgattcgataatcaaacgcccagacctaagtaaaaccctacaacttttgaatccaattttttttgtcgttctttctttttcctcctagtttttctccagacgagaactccctggtaagtttttgttctttgttcaattataactgtttatttcaaattttaatcattgttttttcattaatcattctaactgtagaaatctaaggacaagtttgtttcttcttattgtagaggtttagttctcgtgtgatttgatgatactttacacatgtgctaataatgattttgtgtttagttttccaaaataacgttgttgcttcatttcgtttgaatttgtgttggatccgacccaagctcgactcttttactatttaagagatgttatgccacattttaacctaagatttaagataggtttatttcgctgaattgtctaagagtttagaaaggcaatatagacctaagtttttactatttaagcaacgtttgctacattgtcggtgaagatatccccccctctagcaagtagcaacattagtgaaattgttttatgaatccatgtatctttacgcagtcactacgtatgttgtctcatatcgatcgaagtgcatgctttcaatatattcattagtaagtagtcccgatgggaacagtgaatttggtagattagggagattgtgatctatgatgcttagggtagaaatatatgtttctaatttgaatgcacttaaaactagatttgaatttgctaaagatattaaaaattgttatttttgtgtgtcgaaggtgtttgatgcacagtttaggccaatcctaatagtgttcatgatacttggtcaatgagaattgatgattaaggtgagattagtggactaaaatggacctgttgttttcattgccaattgatttcctaatttgcaaatggaagttcagataaattgggtgtttaatagagcaattaaaaccatggaagtaatctaccttatttaattgtttcacccatgatccatagcttatcttatttgctaatctggtttcattattttgtttaatcttattgtttagtagtttcccacttttcctttcgaattgaatgtctctttatttacttgtttacgccatctatccacctagtttaattagtataacatacacttaagtgtgttatagtctaattctttgtggattcgatcacaatattgtgctacaagtgacttaactgtactcttcccgttttacaattcatatttaaaatttgacggacctatagtccactcaatttagctggtattgtaaatgtctacaaaatgaaagtcatgaatacattttcacttcaaagtacgttttttatttgtttgagatgtcaagcacatgtttatttcgttgttttccaaataatatctaggagaggaaggttatcaactatgatctctatctttctagtttgtggtcacgcatgagtgacttcaccggtcatttcataccttcgactttaacatatgacactgtacacgtaccatgttaaaaatgtgtggatagtaaccttttctagaaacccccttatttgatttttgtatatcgaatgacaaatccatgtgatgtgacctaaccataataatacaatgcaaaactaaaacgtgattcggccaaaactatgacaacctaaaaagctagagagtaatatatatagacatacacctgaagagttacgtatagcataataatacatttattcaat

SEQ ID NO: 2377 - DNA, 2000 bp, Arabidopsis thaliana
cgaagagtaaaacaattgatatcactcacgggtctgtctagttctcgtatttttggcatcactctctgaagccacacaacatgagtcttccttcaacttctccaataatatattggcgttgccgacaccaaatgtcggctctgagtataagtgggagaaggttgggcttgggcttccagatctatttctatattatggggccataaatacatgcaaaatgttatccattagattaattgaactggttgactcaacccaactcaaataaatttgggttcgagatttcttatgggagaatataacccatctatttatttgatgggttgaaacttatatacttaagactcaaaagtttaaactggctatataggttatacgagtgttggaagtaattttgtgtctatcaactcgattatataaatgcggacaaatatacacacgacacaagtatacacacaactaacatgttcaattaaaaaaaaatgcggcaatcattcatcaagtcactagcaaacaacaacacagctagttcacatattcgatttatacaagtcaaactaccaattcttttcagtatcatcgtcaagatctaaagtctaacaacgtaattataaacaagaggaaatacattaacattaagagcttaacagattttgataattaatttaataacaggatgacaaaaaagtaatatcttaaaaaatgtttcatagtccaccattgaattttctaaaataaaatgccagaggtaaagctaaacaggaagataccctttagacacaattaatagacttaagttagccacatttcataaacaagattatcagttaaagagataaggttagatttatctaattggtctaatgatatccctccatatattatgttatttgatctatatcaactcatgattataacaaaacctaattgctttgaactgtataaaaaccaacatttaaaatcttaggattggatcatacaataatttgatctcatgtatatgatattgtaaaatagatgattttggattcattttacattttaaacattcatgactcagcaaagtaatttgctaattaaagtataaaataaaccaatattcgcattttgaacgagtcaaagttcttgcttccgcactaatccagcattagcaaattttcattataatatagatttttttgtatcattaacgatattggttttaattgtactaaaagtaaacgagataaggtttaatttgtccacttgtactaaactaatcattcagatagtactaattatatatttttaaatatattaatttccatttaaaaacataaagtaaatcatacacgaatatttttgtaatcttttgacttattaacagaaaaaaatcagcatcttaattttgcataccaaatattatccatccaattgaattgatataactaatcaagatttttttccctttttccacatatttctaaaacatcttaaaacatttaaagaaacaaaatcaaaatataaatggataaggttgagatatggtgtgatagtgaccaccgaactttcggtacaacgacatacatcggattaaacggagacagtaacccgaaacgtccggcaaaagtccaaacttaaaccaatgaaaactctccacgtcagcaagaccgtgtctataccgtcaaagtcgccgttagcgtgcctaggactattctatatttaggaacatgtgtttccagactcataaatacgtataaatattcgtattcaatacgtaatcgtatttttatacgatattgtcgttataaatgtaaatgagaatttattccatttttctcgttcagtgttgttttgcatttcaccttcttttgtatatctctcttcctatatcattaacctgcgctggttaaagctcttcacctacgcacatcgccggcgatttatgatcatctgagtctttcgggtatattcacaggctagagaaagagatcttaatcggaaaagtttatatggaggtt

SEQ ID NO: 2378 - DNA, 1965 bp, Arabidopsis thaliana
ctgatgaacaaaagcaagttaagctttttggtctttgatgatttcttatggaggaaaaatgtttatatattgattcaagtggaacatgaatcagatatgcatatatctttatacatgtgttaagtatatatatgtaagttcatttattcatttccccttgttctgtctgtacaaccaaaggcctacacaagagttcttgtaatcgacacgtgagttttacgatttcgatcattggagtagctcaacggaagaacattagtagcacagggtcaccttcgtatttcttttgatattttctcgttgtagggttaaatcatgtgcatcttccttacccttgatgaatctggatatggcgtttctctaatagaattgcgattatcatcatcttagatacagtttgtgcctaacaaatccaacctaagctagttacttaatcattttcttttggggaagtgaaaatggcatttgatttcaggataattcttaaccaaagctgctaagtgaagaacttgtgtcagtgtgcattccatttcccaagtgatgaggaaatcttcaaaagtgttcatgtctagagtgtaagagggcactcgaacacagtggttcgccgtttcctccattatatatacctctactttgccccttttagttttacttgtcacaaaactttccagatacatatttactgcacaaaaactaaattattttgagtaaaaattaccaacgcaccagcaggttatttttttttattttttttacggtgtattgaagaaaatttcaaaactacataatcgtaaataagagttttattaaattttacacaattagatgcattttttcatctgatccaactttctatatctcttcttttttgtgaaactgtatttttagaaaaataatgtgtttttgacggaaaatttggtggattgatttgggttaaccccttttgacaccccttagttccactaatagtttttttatcctacacataaatttctataaacttttgtaatcagatatagtcacatacatatggtagtaagaattaactaataggctatatctgaaaatggaaaatggaaaccgtctttttaataatgagctcaacaagaggattttctagatgcttgatataatcgaaatattgaatacacctaatggcttcagaaaatataatattgtttctagttctcataatgtatgttcttggaagcccaaaaagaaaattaaaaaagatcttctccatgatctcctctttaattattgtaaatgaggtattatacgcgcaatgtcattcacgacgcacgcataaccatttgactctttgattgcgttatacttaacattaagctatagttaaatgtttagtttcgagtgttttgattggataattttaatttgcttggttcctgttcggattagtttgtgtgtttttaacctttatagattgtgttatataccttttaatctcttaaataaagcaaacaaaaaacagtaataatacataatggttagttattcgggtaataaacaaaaatatgtgacatttgagtcaataagaaccagccactgcccgcagaccacagcaagtcttttgtttttgtttttttttgggtcaaaaatattagttaagtctattcacgttttatttaagttataaagaacaaataattggaaaaaggtagtgtttcacgagatcgaatattttcttgttttttgtgcaagtctgtaatcagactaaaatatcattaatttcatcgtatgttcttaaagtattaaaatattgatcgtagcatgtggaaaatgttgattattattcttattttaaggtcttcattttttgtagtcttgcgacgacccttgactttaaatcctttataaaggcctcgactaaaatgagatgtaccaacaacacaaaacttgtactcacaactaaaagaagaactcaaacgcaagacagaaagatca

SEQ ID NO: 2379 - DNA, 885 bp, Arabidopsis thaliana
cgatttgcatgtgttgcgattcacatctcgtagcgaaatcgattctaaatccatggaattctcctaggataacgaagctaggtttcgtaccagtcgttcgccgttttccagctactactaccgtcaaggcttcggcggtggattcacctgagagttcttcaaatttcgccaagcgtatggatcaagcttggattatctcacaggttcgtatctccagagagttgttgatgtgtataattttgttgaatctgagtaatcacaagaactgatccttgatgtagtcatgtacgagtgaagagctatatgcaattttgtatgagattaagaacttggatctgtgatgaaatgttgtaaatttcagattatgaggtgaatagtatcagcaagtttcaaaaggatttgtatcgaaaatctgtaattgcaaagtaccttttagttggtttctagcaaaaaatgtttgttcacaattcatttgatttgtgcatatgatgagaacatgttagctacttaatcaggttgtagctgttctctatgatccctgagtgatgaggcttaagcaggcttatctcgcaacgcaatgtagttttgtagctttgcatgtacaattgttggattctctgctttttctctaatattgctcttagagaatctatcaaaagttcagactttgaagcctttcttctagcacttgcaatttgatattgagctcgtgtgaattttctagatgttacttgttgacctgtgtttcgattcaatgattttctttgtctgtttttttcttcactgcagcaaccaagtcctgttggatgttcatcgtgcaattcaaagggtcatgtggaatgcaaatggtgtgcgggtacaggattcttcatccttggtgataac

SEQ ID NO: 2380 - DNA, 2000 bp, Arabidopsis thaliana
tcttgtgtgtgttttattatatcccctcggattgtcgtaaaacgattccatcttcttccttgtctctgctcgagtttgatttatagtttatgtacactttcttgagaatcttgattcccttctgtataacattttgatatcattcatgtttccactgtttaacttaagaacacttctgtcggatagtcttaacttgcaaagtctccataggacttattatatttgggttgtgttgtccaaaacaaacaagtgaaacatagccactctttcaagtttgaagccattggttcatttgtacattattaggtgagacagatttgtcgctttcgtatatttctttctaatattccaggagatgtttactataaattaaattcatcttttttatagttgggattggaaaatgaaagcacgagaagtctctgttagattaaaagagttaggtgacccaataggttatatataatgatagataatgtgtgaccgtccactaccatccataagtatgtataatgacaaattctttatattatttgcttgtggagaataatacaaaagaaaagctaagctggagtctcttcatgaccaactcaaataagggtgtctcatttttgtaaacaggtcacgtacacgtttctggataacttaatttgatttatcattatcactgttattataattagacatggtcacatggacaatacccgatgaaaccgaaccaaaaccgaataggttttaattactgaattgatcttaatttttatatccaaagaatcgcaaccaaatccgatatctaatagatactctaaagtatcgggaatataaatatttatcttaaaaatattatttatatttataattgtaatagtccaatacaaaaatgatattttaattaaaatgatatcttcttaatatatttcttatattcttaattaaaaaaaaaaaaaaaactatcttaaatgatatatacgaaaataagaataatcattatgaaaataaataaaacaacggaaaacttataatacgatacaatacattatcaagcacacaaaacaactaaaaacacataacttaatcagtacaaaatttgagaaattcaattgcttaccatttgagaaattcaatcgctctaccattcgtaacaattttattatccgttgaagtaaaagaataagggagtgcatgaaatgaatatgctattacagattaataatgttgacctataaaattcgtgatagattaattcaagttctaaagtaagcccaattatttttgtttcaaaaaaaaaaagaacatgcccaaaactatttttgagttgattttactttttttatccaaaagaaaaattgttttccctaaggcctccaattattgggccggggctgttaacagaagcactaaaaagagctctatactagaatcactgaagcagaactctccctaaagacctcaaattattgagcagaactctagtatacgcacacggcgtgagaatgaagaatcagataaatcttctccataatgtaatcactttgacaagtccttaactttgaagtttgaacttcgacaaatccacaaacaaacaataatcaatgcccactttatcacgtccccaactttgaactttgacaatcaacacaaaataatcaatgccacacatgttattttgtaaagctctaagggctacaaacttctccatcccccaatccaaaaacgtatcaaatttgtctcaacatacatattaaaaatttcaaactgatgtattccaatccaaattttacgttgatgaaatatactaacgtagatttcacgtcatgatttgagtggctcttagacattatcttggcaattacgcatacttttctgctgactttagttatagctctgacttcttataagtcaagttatgtttcaatgaaaaatgaaaacccacatctttatttctaccaaatttttctctcacttttcttaaacaaaatcattattcttaaaaatatttc

SEQ ID NO: 2381 - DNA, 2000 bp, Arabidopsis thaliana
atcagaccaaaccgtatttaattatatccaaaatcttatataaaattgtgattatcacaaagaaccaagatttgtacggtgtcgacacaaaacaaagaagagaaacaaaaactatttcaaacatgtcccgactaatcttcgttcgctcatatgcaattatgcacgtgtctacacatgcgaataatttgttcaaatatttccttttgtcatctacacctaccacatgtaatttaagacctcactagctgtgattttgatatttaagaatataccacatacagttttaaactaaatatttgatatgaatgaactactaatgcaaagttgcaaactaccgctaacaatcaaactcctattaagttatgttttcaaaacaggttcattgctttaatgaacgtcactaattcaaacctaagtaaaaaacttaacttttgtgtgagtatctacttgcagcaaataattactttttgttttgacaatatgttcttttggagtttttctcaatattttgcaaagagttggagtctaactctctgcttaaaaatcctacggagatgattacacctcttgcactatttatacatatccttcaaagttttttgaagtctaaattctctttacacgacatagacaaactttcttactttggatggtgaaaaaatctggttaacataccaaaagagtggtgcaatagtggttactattattaacgtcatttcacgatattgtaactagctagttcaacagttaaaggtaaatttatatcattttttttggggacaaagtaaatatatagtatcattgtttcaataatttctgcattaatatatatatccacagcattaatatatttttcataatgtcatggtagataagatttgctcgaaaaacgaccctactgaattaacaattttttttgtttatttgtcaacaatattttttttttcctgaattaataagtttctgtgaagctaccttcttcttactgagcgtctcctgtgggttcccatatacactgttttctatcacacactttgttgtttacttgtatgtattggaatggttcataaactccataaaccaaaagaatcgggtccaattttttttccaatatctaaataaattttactctataaccaaaataaccaaaattgaactaaaggaatttcgatatcattacacattacattttaaattctataaccaaaaaaaaaacgaaaaatatataaaagactaataaattgtccctacttttctaaatgaataagtttcggtgaagctacctttattacccagcgtctcctatgggttcccttattacactgttctgttctctatcacacacacactttgttacttgtctctatatatcattttaaaattaatatctttttttttcagacacaccatctttgaatcttcttcactcaaagctttgtcatattcaacgaagactttctttaaacaaaacttttaccgcatttaatactcgtcaactacacacacacacactatacatttattcagcttgtgttgtgtatatatattgtgttattcctcaacttggttgttgtattcaatttctcattcctccttaagttttctctacacaagaagatagagataaagacttgacctttttcaagtcttccttggtgttaatactctgcaaattcttgaggtatgtctctgattcttacatgggtcgattataaaagatgaataaaatcataaagtctccacctttatggagttattctgaatgtgtttgttgaaatgtctgaatgagattagatttttatccatcgtcggctataataaatgtgtttggtggtgatgataggaatgactcagtaaacaaattaatatattaatgatagttggcttagagaaaaaagattcgtttgtcaaagtttttgatattgatctgaatttgatacgtgtgcagggtagtttggaggaagagatcgtgtttaatattgttgtttaatcagagaaag

SEQ ID NO: 2382 - DNA, 1358 bp, Arabidopsis thaliana
ataatttaattagaaatttgcggatgaaaaagaggtaaacaattgcagaaatggttaaaaatattaacgttgtacagcaaatgataataaaaagtgtaacgtacagtgtgtaaggaatggaaaaataataatttgggttaaaataaatatgtagttttctaactatatagtactttttgagaaaagataatattatgtgtatttttattgaaacaaataaatgatttaacaaaaaaaaaaagagaagttaaaatgaaaaggaattattattttttaagttcttccttcttttgttgggcctgtgacccttttagttttagtccacttcgttctcaaagcttcaaaatattaattttgtgacaaaccgaccggagccaaccaaaccggttaacatcctaaaaccaatcatattttattaagttttgtgttgatgctaaaccaaaaatcattggcatgcatatttctaaatttagtaataaacaaaaacacttagaaatcacacgttcactatactaaaaaacgttgacaaaaacacaacaactatactaataattaaagaagagaaaactgaaccaaactttttgtaaactcctgaatttaaattagtaattgaagtaagaagatgaagaagaacatgttaagcaaacaaaaaaattacactaaaatcatataaaaatacataattacaaaagtacccataagatggatttattgatatgggtcatctgtgaaacaagccacagagagacaaagactcgtaagtattgggcaacgaaagcgacctcctttattcaccactgccattaacatgttcttcttctccttcttcttctacattttatgaccgttttacccttcaagagagagaaacaaaatcactccctctcactcactctatctctctcttctgcaaagcttcagaactctggcagagagataaaagatgatggggtttttaactttatcctccccaaataattcttcttcccttcatctctctctcttacacaacaggtccctacatttgtacaatctcctctctttaaagactctctctctttctctctccatctctatcttactctgtatttctgtcgtctgagcactcaatgaaaccactgtaaatttccgccagaatttgatgtgatggaacgataaaaatcattttttctcggttaaagtaaaaaaacaaaaacaaatttctgtagaaatcataataaaagaaagaaaaaaaatctaatgtcggtacataatacggttctcttcttcttctctatcctctgtttcttcttcatggagacttgaaagcttttaaagtatatctaaaaacgcagtcgttttaagactgtgtgtgagaa

SEQ ID NO: 2383 - DNA, 2000 bp, Arabidopsis thaliana
tccatgagagtttcttcttcatgtctcaggtgaggaggttggcgaaaggaaggttaggaaaagtgaagataaatttgattttgttacaaaagtcaaaaacatttgcctatataacttaaatatggagcccattatcattattcgtagttagtagagcttgttcacgtttatgttacgatcttgtattgatagaagaatgttttcacttgtcttcgactgaatcagtgttgccttctctcaggttatatctttcgtctatgctttcgtcaaagcaaaaaatccctaaattagatgaattttatgccttgactcaaggcataaattcatcaaatgtggtatatagagcgtatttagcttcatatatactattgagtttccagagtcgtacgagcgctatcaagtatcagaagcgaataaaaataaaatatccttacgaaaaaaaaaatcgtctacaaaaaataaacatcattgtcatgtaagaaaaagaaaattgacaaactaaatattagttcttaaacagttgttgacccttcctctccactaaatcgttaaccaagctttcaaaatcaatgtctctaaccaattctctttcgattgataatatagccaactcactcaatctttcttgtgacatagtcgaccgaagatacgatttgatcaacttcagctttgaaaaacttctttaagcagatgcaaccgaaactggaatcgtcaacattgttcctataaagcaatggtaccttcaatatgagacaaaaattatatattaaatctgctttgaaagcaaagtgaaatttttgtctccaattataaagtaacataactattctaatgagcttttgctatttggatctaatgttatcatattattacctctacaacgttcatccttttctagcgcttgttgttgttcatcttttgcatgcggatcatatatgcgtgtaatctggtcgttgtcaaatttttattaattagcatttcaagccattgccattgtcaacgaatattcagtatttattagaaaaatcaacagaaatttaatatctatttagttttgttgaaatttaaagatataaatcaatatttactataaatttaattttagtaatatttttccgatttagattttgttattcccgtttttttatattgatcagttttagcgttttttagcggtgaacagtagactcaactcggattggactagacgggcgatcccggtagaacaggtccgaacgcccggtctggttcccaaacactgcaattaccgcatcttgtgttgtggaccggaccgactatgactgaatattgcattcattttgatcctaaaaatgtcaatcaatgctcatttatttattatatattttggaaaaaagtgagaaaaaactgaaacggtgcgacgttattaaatcttttaaatccccccaccaaagcatctgcttcttcctcttgtctctctctctctctctctctctttcatcttcaaactctacaaacccagaaaccaccacacagtaattaatgtctctttctttcttcccatgtgatctttaacagacttttcttcttattctccatctctgaagttgtggggattcatcaagacttccttatctgtttcttttataaaacaagagagagataccacttttggtgttctttatttgcaactctttcaggcaaacactctttgtctcttttcttatcttattattgtttctattttttgttgataatactttcgattttttttggctctctgttctttctagatcgtttggttttattgtctataatattcattttgacaatctatgtattgatatgagaacattacttcttagtctctttagtttttttttttgtttttgacccttaagcttgatttgttgtttttagcttctggtgatttgtttgatcaaagaaagcttataagtttttttttctttttcaggttaaagaaatcgataggctctgttcttgattgtggtggaagagac

SEQ ID NO: 2384 - DNA, 2000 bp, Arabidopsis thaliana
agtttctctgaatccgagacgaagaacgtgctttatattttctttttgggaaattaaatgagatagctagcttgtctggccagacacaatcatatgatttttttttttttttccaagaaaggatcgcaagtggatattccaaatttttattttatttttaatcaacctttgaaaatgaaggcttctaagaccatctctatctaaaaacaagaaaagtttctaaaaaaaatatatattaatattttaactaaaacaaatatattaattattatttaataattgaactaatagtatgatgacatttgtccaaattggatgagaatagtttctcaaagtttctcggaagagaaactcaactctccttctctcctattttttctccttcctctcatattttttttttgttgggtatctcattgagatacttccaatgaaaatgctctaactatcttttttttttttttaatatcgattaaaaagtgttgtaggaaacaattgatagtgttgctttcatttttttcttacagattttaaaacaagattttgaatgtaaaataagctttttttaaaaatatattttcattacctttttgtttaggaagggttattggtttatagatttataatgaattgaaaatccgaacaaaaatcatttgtaatttaattattgattttaaaattttaattaatatcatgtgttattgattcaatgatttataaatactagttaaaatcctttgttattcgtttagtcatttgtttttggatttgagaatccaaattatgttttaaataaaattaaatggatttgaaagagaaaatagaaggattcaaatccatggataaacacatattattttaaaattcatatattttaattttataattaataaagattttcaaattctatataaatttataaatcaatagcactcctttaagctcgatatcattgcttccagtctctagttaggctattataaaatttaacataattcggttagatatttaacataattcggttagatataatccggttataaaccctttttttcttttacatattttataaactttcccaaatatatgtaaggtatatcaataatatataatttcaatgatgtttatatttagtatatttaaattttcgttaacgttttcaattgtactcttacacaatttttggtgttgtttttgaactaaataatcattttagacacgtataagtatttttataggcattatgtgttccaaatatactatatcatcgtttttaacatcataatctagagttattcatactttttttaatctttgaactatatattatttttgatatggatagtcataatatccatttttaaaggttaagattactaatctttttttttctttggaacaccggttaagataactaatcattctctcgatttgaaagatatttttttcacaggtgaatacatttaaacttttaacatatatcaaaacaaaacaaattttgtagtgccgaattcattttgctatcatctcttcatacatattttttgtccaaaacaaaattacaagatgataaaaatttaaaacattactattacgtgattttagattgtcttttttttttttttttttggacaaaagattttagattgtctaaagtcatatatttctaataaaaattttgaaatattttatataacaagtttttaatattttataaatctaaggaaatgtatctaaaaacacttgaaatatcttaactatctacatctatgcgattggaagcagtagagatagtaaatttcgcttgaaagatctaataggctaatactacttttctaattttatttgtttcgcacgagagtctctctgcatttccgagttttgctgaaatcaaaatcaaaatcaaaatcacgacaagaagaacacaaaagtgctcaatcgtctcctcacgatatatatctgctgaatcggaaaactcaaaggtttcaccggagaagaaa

SEQ ID NO: 2385 - DNA, 2000 bp, Arabidopsis thaliana
cttggtcgaacataagaaaaagttaaaactattataaaaaaaaaatagattttgttacattgtgataagagggagtaaaaagaaaataaaaatcacttatatttttaaatgcgattataccaatactaatacatatcagattataccaatactaatatataccagatctaatcaaaagtttgcaaataaatatgtttgggggagaatagtattaggatgcagctcggtgtttaaagatatggaaatcgtaagtgatttaaacaaatatgtcttcaattcatgttaaaaaaaataatagtcatcatcttccaaacattaataatagaaaaatattaattcaaatgagtgaaactcagtactactcatgagtcatgacctacatgagtgaaacactctagaaacaatcatgcccgggaaggaaataaattattcaaaacactgattttatcttaacttatattttaaaaatgaattagtatgtaagaaaaaataatttgagtaaaatttttattctttaatcaaatttttattctttaatcttccttagatgataaatttgttggaatgtagtagaacatatatatgctgaacgttttttttttgttttttggctaaaggtttttttttcgtcaagctaaagggtttaatgacgtaaacttgaacagtataacaatatacatactaaatatttaactatatttaaaataataaaaacaattttgtttttttcaagttaaatcaccagttgaattcacaactgttgattcaatttcaacacactgaaattaatacatatgatcagtataaattaggctgattagcccaaattctgtgtcacttactctactataaactacatcctttattaactacattacgtaccaaaagagaaagaaatgtaagagagccaataattagaacaccggctctgactagaccaaaaaagtatttcgtctaaaagctttttaaccgaccatgaaaactaaattgttttgtcccagtcttttggttttgatatccggacaacttcctcatataccaaaatactaaaagcttgaaaagtcaaccaataataaagtaacgtggaaaatatgaaattcgttgcaaagataacgtgatctctctacgaagataagtttattctctttttttttgtcggcaccctatattttattcaaacggaattgaaaaaacaggcactggtagttattttaaattaataaatttgataaactaaaatatggagtatataatatataaattataaacaagatacatcactgaaagaaagaaaaaaagaggttcgtactttccttgattttttggaatgtcaggttcatcatcccgatcaagaaacaattatacagatttaggccataccaaaatttgatacatgcacggagaattggagatattcaatccaagtccagatacatgaatactagctaaaaatgtaacaatagaaaactacaaaaacagtattaaatcgcagttaaatatgacattttcatcaaggacataactaaaaatatagaaaatttcttctatatacaatataatggatatctaaatattatatatttattttaaaactttatataaaacactgatgtaacatttctcgtcggatctttgttctctgatattttatccattcacaagaaaaaaaatactatattttatttttctttatcgacaaaaagaacctttttaatcttatgataaaaatgaaagacttcataaagagacgtgataaaaaaaagaagaaaatggagcgtgtgtgtacgcgtgtgtatctactatgtatagaaactttagaaaattaggaagaatcattcaacttgaagtagaatagtctcaaagagccatggttgactgatcaaccatcgccttcttcatccttttctttattttctacattagtcatttaattcattcattatatatacttctctctaatttcttaatcatctcttcttatagtttttaccctaaagaaa

SEQ ID NO: 2386 - DNA, 2000 bp, Arabidopsis thaliana
ttgatttagagctggtacgtcgacatacaaatatatgattttgaaaagtaactttttaaaattatgtttttaccaaataaagatagtttcatagttaattttgaaactggaaaaagtaatctgataaccctaataaagatattaaatgttacaagtcactataacactatcgtttaattagttcattttctttccaatcacctcaaaactctaaaaaatgtattttgaactaaactttagaaagttaaaagacagtatactgatgttttttttttttctcttttggtgagaagtatatactgatgttttaagtaacctcgattgtgttttctttggtagatgtttatttactcctcgcaactgatcttcaaggatgtatataaataagaaaaagcaaaaacagagaattatggatgcttaaaattttttgacgaagaacaaagtagagttaaataaagaattaaaaaaaaaaaaagagaattataatccttgattagagaaaagattgatccaacatgcaaaacaccatacacgtaaaaatctggtggagagggtccacacgtttgacaactcaagttctaaagagacgtacgtgtgctatttcattacttgtaaactttagaaacattgacgatcaaagtaaagaatcctaacaatcatacatactacatgatacaagaaaacaaatattgcataacttgtctctttctgtcttcgatctaatatgcaaattgcaacttgataaacttataaaactagaatatgatttgtgcgtgtgaatcgtgaaatttgcttttgtttgaagccgccagtggtcatggagtgtttgaattgaagaccagttggggaagagtttaaaagttgaccattctcactcccaatatttaaccatcgttgttcatattttaataatgtttcgtcacacgtccacatgtgaaccaaaagggaacgttactttccatgtcggtaaatctcctgatattttttagaaaataaaatatctaaatgtcacgtaggaattgaaatcatattatataacccacttgtatattaatgactgcaataactgaaatgacgaaaaatcaacttcccgtatcagttttttatttctccaaaagagaggtcaaaaattgtaacgtaaattgacgtaaggaaaacaatcattacaagtgacgtttcgttgtaggtgaaatttaatagtatataaactatttgacattagaatattcaaggtatggaaggtagagaagtagaacagcttggatttacattatttgtatccataaatctaactaaacctactacttattcctcctctttgattaacatacatgtaatttaaagaaaccagccaaattcgttatatatagttgagctgtaaagggcataaagtaaaatcaaaatcatacatatttaactacacttttaggcaattgataaagcacattattttatatctataataagtttataaccaaaaataatagtaaaactcgatgtcgatagtttaacgacttacgggtgtactaagtaaacatccaaaaaaaaaaaaagtttttatttcattaaatgatcgattgaaaaaaaaaaaataaatagattctagattaaaaacttttttgttagaaaaaaaattcctaatgaattaccaattactattgggttatcttcttattggattctctttatttatttttcttgtaccaaaaaagaaatatgtcaaacttgataccaaaaaaggaagaaaaaaacaaataaaatatgtaatgtatgtaatataggaatataagtttaggcataggtatatgcattaatgagagacacctggttagagctatttgacgaacgcggaaagcaagaaacgaagaaagaacagttgaaactttccaaattccaccgtctcttatatattcttaataccaaaaactaaaactcaaaaggaaaaaagaaaaagaagaagaggagctaaaaaaacgacgtcgtagaaggagattcttgcc

SEQ ID NO: 2387 - DNA, 2000 bp, Arabidopsis thaliana
tttacatatcagtatgatatatatgtcataaattattacttattatttaacgccatatgtcaaaatatattaatatatgtatcaagatttcacattataaataatgtctatataactaattgtgttttaaaaaaataaaaattaaaaaattaattttataatttacataatataatttttaccaaattatagttatcatggtcactatttttgcagttttgttttttaattatttgaaaagtaaaagacactatacaacattgaacaacaaaacatcattcatcttttatttgtacatttgttttttgtacaactattgttctctctcaatagagctatatgtacaattgctcgaatcacaaaagttcttccacctaacaatagcatgaaaactcgtttgtaatctttcaaacgacattgcattggtaatttataccaaacttaggtaaatattgaacataggaaatggaaaagactctctattgttgataccgttaattctgtcagactcaccaacgcttttgtttctctctacacttatcaaaaattcctaaaataaaagaaaaagaattctgttttgcacatctacgatcaagtaccgaatattaatactaaatgaggtttattacaatcatttttatttttccattaaaaaattaaccgtgtagacttatagaaaaagaaataatttctaaattctacatgacattcatcaaatcataggcctcaaaataagttgaaaattttgcttttactttaaaagctagtcataaaattgaataaggacatgacatatattttattatgatataaaatcagaaaacatggtaaaagtaaaaaagtttaaaactttaccgcaataataaaccctatattattttatcaatcataaaaacaatgacaatgagcatcactaaaaaaattattttcaatttttttatcattaccaattacaattatttacttctttttttcattgataatcactatatgttaccaaaactatatttatatccgatttcattttcgcgaaacgagaaaatccaatgaaaaattaactcaagaaaaaaaaaagttacgaaaacattttatttgtaattaaatgaatcatatataaaatcaaaaacagcagaataatggaaacaaataatctggtaggaaaaataatcaaataattaagacgtctcaggtgacacaagttgggccgtcacggccttccaaaagccacactgctctctccttttatatattttgcttccacctctcaagactcctccaccaaccccctctcgcactctccgccaccttcttccctaattctctctctctcgctacctctctacgtaagtttcagatttgactttattagcttcgattctctctgatatttgtttctagaatttgatctgatcagcgatgtttacttgttccttgttttttgttttttcattgacttcttgtggggacaaaaaaaaacaatcaaatatctttcgatttcgttgttcttctctttttcgttatctgatagtgaccgatttgatcctgtatcgttgctattcagatgctaatcatctccttaattgtgaatttttttgttgttatttagtgaatcttgttacaagtctgttgtaggtttatttttgccattaagctactttgatcgactttagaatctatttgatgataagtaattaaacatgttttagtgattgttaagtaagtcatttagtcatgtttttggagcatcgagtgaagatctaatatagctttaagcttgcatcttctcattacgctccatacactaattttcacatcatatttgctattggaaacagataagtttttggttcttgtttccattgctacttgtgatgcacatcctcacaattttctctcagttttggttcttatttctctggaacagtttgatttgttagattgtatcactatgaagaaaccctgaagctaaacttgtttataaacgcaggtgataaacaaga

SEQ ID NO: 2388 - DNA, 636 bp, Arabidopsis thaliana
ttatgctttctatcttttgatcaaaagacactagccctttaactcagatcctttgtcgattttacatctagtatttatttctgacacgcactggtttagtttcatgatttcaatattatttttttgtcgtctcatgatttcaattatcaagcacaaaattgttaaaatgaatagtgtaggtgcttctggaatcttcaacgctagcccaaaagccaaataacaccattttccacaaattgtccaatttccatcttacggccaacaaaaaaaagagtaaaataacaatttaattttgtatcgattgcgtcgtcgttagttttcccatttcctcataattcttcatctctttcctttctcatctctcgattcctttctttctttccatattccattgatttctctcttcttataaaaatacagattctctcttcttagaaccatcaccgattcgaacagatctaataaatcgtttttttcaccaggtaatgacttgttgttttcgccgatccattagttttttctttctgttctatagttttgatgagatttaagcaacagatctattgatttttgattccatcgatcggttaattttgtagatttttttcgccggagtttgttttgatccattctgtt

SEQ ID NO: 2389 - DNA, 2000 bp, Arabidopsis thaliana
attttgcaattacaagtaaaaacaaaaaaaggttttgatgcatggttcaaactaaattgttcgattctttaggttttgaaggtttattatgttttaggttaaggttcgaatctactttacactaaaagtatgattgaacattataaatattataaatgtaattaatatcgataaaaaatattggccattagtttggtgtagtttggcattttgtttgaatagtaactagattaaaaaattggcatgaatagcttggttggtgaacgtaaccgttcggaaatgagttagcaaaatacacgaataactttgggaaacgtgttaacgaacacaactccaactgtctatgtagacgttacaattttaaaacattaatatatttttttcaatttatggaaattttaattcgagttatagcatagaaatgtcagtaatacaaacaattttcttataatttgttatttatttaaaatattacttaaaaataaaatatttctctcgtgtaaaaaaaacaaacaaagatttcttactatcttataattttattcagttcatattttcttataattctttgccgatccctcaaaagtatattttaattttatgtttatatttgataaaatttcattacagatccctcaaaataaatttttgttacgccgcgtccacaaaagaatgtttttggggtatttttatcatgttacttagtaggttatttctaataacataaataaagtcaatactttttatgtcactcatatcagatgttttgcaaaacatttatgtatttaatttttttgatcatttgtatatgcagtattctatgatttgttgagttgattaaattaaaatattaaattatcattttgaaacaaaaattcttaaatatgcgtttttagcaaaacataacttagaaaatggaagataggaagtatattaatggcatttgaagtaaaatcttacaaattaaatgttactactatttttctattttgttggtcacttaaatgttataatatttacagcatattcaaccagcaatttaccaaaacaacaaaattgattctaattcaaatacaaaatctggtaatagtagtttaaaggtatactgtatttgatatgttattttaaaaaaatatattcataatcttgataatcgactaaatagtaaaacgttttggcatgtcccaataaaaaaataaggatacatttcaaaaatgaatgtgtattaaattaccacaaatatttagtagtactattagattaggtaaatgattttagacttctagtacaataacaatgagtactagtactattttctaaaataatatgtctttttggaaagtagcaccttattttactcatcataacatgttttagaaaacataacatgttatttaaaaatcatcacctcaatttaatgttgtttttaaaaatcatcacctcattttaatgttgattttttcttttaaaatttatacatttacttaatcaactatcacaatattatagtcatgtatctgaattacccaacaaaataatgcaagacatctataatcataattgacaaagtcttatttcgtatgtacgaaaatcaaataaagaatctttttgtcgatataattaaggtacttcatgtcgacaacataaatatataaacaaagttgaaattgttggctgaaaatgaggaatctaaagatcaaaataatgcaaaactgttttttaactttatcaaaaaaccttcaaatttttttgtcacatgaattgttttcaaaacatttcttgttaatttctgcgctcttcactttctggtcttgaaaatatgttttaactaaatattagagaacacatgtctctgtccagaataaatgagattaagaaaaaaaaaaaaaaaaagaatctctatttaattgactcaaaagttttctcataacacaaactcatctctttcctctcaccttcctcatacatcatctctctttctctttgtctcctcatcaaca

SEQ ID NO: 2390 - DNA, 2000 bp, Arabidopsis thaliana
gacttctgtttcatcttgggggtagaaaagtattcatgtcttcctgtattattagttgaatttgattcaggactcctaaaaaatagatttctgttgcttttaaaaaaaatatatatatgccgtaactcttagtttggttttatattaggcttcatttccgaacctttgcatgtatataggctcgatcttctggcccattattgaatttttaaaccccaagactctagcagccgtaagactcttctagaatacataacaatcaaacttaaattatttcataactatatcgaccgtgtacaagtcatatataaagttaatttttattttgaagtcataaaaagtcacctcttgtgtttcaaatattggaccagcttatgtatttctattgaatgatttttggacactagctatgataagataattcaagcatcatttcatcattcattagcttatcatacatgaaattttgaaccactcttttgactttgcttacgaaacttccatttgctttgttaaatattgtgtttcaaccaataaaccaacaaccataattaaattattaaattatatggattactcttttgtatagatcaaacagtttcctttcatggttcaatttggtcgtgtacacaggagtgtaacatatctatgttatttgcttcaggtttcctttcccattctccaaagaattttcctcctctttacattattttagacgtcaaattaagtttgttgatacatcagttttcacattgaacacatttgatattctaatactttttttttttttttgttaaagaaaaaaatttagactatttttcgattttttcttgccatctttactaatcttatatgtatcgttccagttttaatactagttttcttataaaataatgtactgtcctaggaaaaacttgagaattagtttagaatattaaatatatacttacataaaaaaattatacaattactgaactatgcgtgattattacattgatattttaacgttagttttagaatttgcttactcacatgaatgcttatttccatggatacgtaagcttgagtaaaatggagtcattgagaaattggatgcattgcgatgctactttatacgttttattagctttcgatatttttgtgtttcttgtctagagaaatcgagctttaattctgcaatataaataaagtgtcaagagtcaatatttaattctaactttcatttaataatatgatgtacatttctctgatttttcttggcgcattaatggtggtgataaccaaactaatcgatatgaaacgtacgtacacgtagcttagttctatgtaactgtaagtattatgtagtagtcatgtacatacatatatgtaaaacttgtccgcgaaatgctttgccatatttcgaacttagtcggcatacatacaaaattatcttgacaaattgaataaacaatgaatgtgaattaatcttgagaatccaagaagaaatctataagaaagagatttgggaacaaaataacgcgaaagagaaacgaaaacatgttttttcaacaagagtcaaacatgtcgtctccatcggcattaaaattactttaaataatattagaggaaaaacgtgacgactaagctgacgtataacatatctaatcctaatgcacttataattcatcttctactatatatatttcaattgcatccaagttgcattcaccaaaacatttatctccaatcatcacctctctctttctctctctctcgctctccttctctcgctctccttctctatatctctctcaaacacatggataaaatatcaatccgatgctttatcttcttagttctcaccagcttcgtcaccactgtttcgtgtttgagtgcagcgacagattatagagaagttggtaagctacacaagtgatcttggttcattttgttcttacaaattacatatggcttaacaaaatttttttttgcattttgaaaactaaattatatgatgg

SEQ ID NO: 2391 - DNA, 2000 bp, Arabidopsis thaliana
taggattttattaatttttatttgtctttaaacaataaagcttaaagcaaaagtgaaaccaattacaaatttacaacagttgcgatgtgtctagaaaagcgaaaaccgattttaaccctataaggccagaccaggccaaggcctatcatatcaaaaagggcaaaaacgagtgaatttggacaaaatcgaaaccaccaatcagaaaatatatgtggttaaaactttgaacacatcaataaacacgaaaagggtaataacgtcatttccataaattcgtaatcattcgtcctcaaatctttattgtcacttttacaaaaaatactcccaatttcagagaaacctgttgaaaaaaaattcagggaaaattggaaaaagtgatgatgatgacgagagatcaattcaaatcttaagtcctccaaattttaaaaatttcgatctccactaccttcgtcatcttcctctacttctgattctcttttctgggtttgtcgtttaatgggttgattttgtatcgtcaaaacggagaaaacaagaagacttcttttggttttcttattgcgaagaagatatttctagggtttcgagattttctgggttttctgggtttttgtgtgttctttgattggatttgattattgggcaatttccttggaattcaagaaacttctaaggttcttaaagtgtaaagctttgtgattttctcttattcatacattctaggactttggttttggagttgtaatggcttttgggtctgaaaatgagagcgagacgaagatggaaggttggttgtatataatacgatctaatcgatttggattgcatttctctagaaaacgttactttgtccttggagatcatcttctcaagagtttcaagtctatctccgattctaaaaccaaggtcaccaccatttgattaatcgcaagttcgtttggttgttcataatctcccattttggattaggattttaacttttagtagaatctgaatttggtttttacagaatgctggacgaagtgcggtgatagattcgtgtatccgtgttactgacaatgggagagaaaatgttcatagaaaagtatgaaagttctcatttttaaatctttagttgtggagtttagttatgcttttgttttaatggtttgtctggaatacttgtaggcattcttcatatttacactatacaatacatcaaatcacaatgatcagctcaaggtaaggtaatttctgttgttttgtttttatgttggtacactatatacatctctttttttcatttgttaagctttcttgttttaattgttatatagttaggagcaagcagtcctgaggatgcagcaaggtggattaatttgattaaagaggcggctttaaaggttatataaatggcaattagtaacaagttaagagctcttcttggaggttggagacttatagttatatgttttatgcagggtgccccttttcctggagatgtttttaattgttccaggagtcgatgggactctttgaggtacctctttttttccacgtaatcaattggatacatctctaagctaactgttaaataaattgctgagccagtagttcctgccaatttttgttagttacgtagtacagataatggtttgtggttacttaagaaagaaaatttctgaaatcagattgagtagctcagtgcgggaccatcactcaaactctattgactggacacttcggtcgtctgcacgagttgatcctgttacaactgatgttgttgcgccttctccctggacaatattcggttgtcagaatggtatagttcatactcaaatttcattgatttttgtttggctggaatgcatagtgttaacatgtgttgcacgcaggtcttcggctttttaaagaggcaaaagagagagattctctcggaagggtcggtatttttttcactcttaatctgttgaaaaggtattttgggtttattgaagggaatcatgttttgatgattttgttgc

SEQ ID NO: 2392 - DNA, 2000 bp, Arabidopsis thaliana
aaaatcaacaagcacccttcaatcttcttagtaacaataaatatgcatatcacaattctataattatgcttaaaagaatttaattagaacatagtgacatcgttctctataaaaaattatgtgatattgtaatgtattaaaatgtacttcttaaggttaattttgcataacttaaattttaaattcattgttttttcctaattgaaagagaaattttagctaaatttattggactagtgttagacatggatactattattttttgaacaatgagatgaagattcttacatgtaataaggttcccaaccacaatttcgaaaaaagtccaaatctttattgggatcaagtgttgcaacataattcaccaatttcaaagaaaaagctttaatcatgtgatctaataagggttacaaatgttgtagacttacatttttggagaagtattcgtgatctattagtagtaggtgactgatatgtttggctttctttttctgaaagatcagatatctgccacaataattttgtatattttcatccactgatactccagcatagtagcatgactatattcctcaacgttactctttgactctacaagttcaaccaaaactcttaccttcatttaatttgatttctcattttgaatggcacaaatacagatggtggtaatttagaaaaaatataaacttgttgagactgtgatctataatcatcttatggatgatccaagctgtagacaatagtctcattcctagctaattgttcatcattatcacaaatatttttaattaaacactcattttgtatttctatcaaatgcctgaaaaatgtgcttgtaatttttgagttgaaagcaattcttctccaacattcgcttgatctaaccaattaatcatcttttgtaaatgagtctaatggaagcttagagagcttagaaaatattttttcaatcagtgattttgaaaataaaaataataggttagagcaaatgtatttatattcaataacaatttaacaaataccaagataatatataaagttaattaaagttttcagttctgcttatttttgagcaaatatagtgataataagacattttactttttaaaactcggaaaggatgcgttgtttttattaaaccttaaagtggtatttaaaatttcaaatattttttaaaatttataaacgaaattcaagttttgagcaaatttgtttttaatatacgatagaatgataaataagtataaactgaagtatacgtaacttaattctgctttgtatcctttaaagtgttgctaattgttaacagctcattatttgttcaaacaatattaatttatgtatctatattttaagaaaatttatctataatatataaaagaaatatattcattctaatattatataggaattgacaacaaaaagaaatcacttattagtaatatatcaaaaattgtactaaatttattttttatgaaatcggatccggtatgcttgcttagattatactaatactttataactaataccattgtcaaaggaggaaaacggtgtctgagaaaaaaaaaatctggtttgttaataaattccatccatgtaagagttattattgttttccaattcatcttcctacgaaatttcgaagaaatataataaattgcgttctcttctttaacacatgattcaaatattcacagcgtagttaataattgaataaaccacaagttaaaataaaataaccttttaatcggttgccgtgtagagcccttgacagtcatcgtttcgtttggataaaatcgcaaacttctacgaaatttccaagggcatttccgtaatttcgtagaaaacggtgaccaaaagaaattaacacgaggaggttgaagtctatgtctatccattgaccttcaccaatatataaagaagcaaaacccaaagcctaaaagaatcttaaaactttgcttaaaaccaaaaacaaagtttcatttcttcttcttcttgaa

SEQ ID NO: 2393 - DNA, 2000 bp, Arabidopsis thaliana
atttcatataataaaaagtaaaaaagggaaagaaaaaaagagtatgtatttcatacgcgtataaaggagaaatggtttggaatttgaattgagagaatggggttggggttggttgatggtgatggtggctactggtatggcagggtccacatgtatatatagttgaacgcacgccagattcagtcatcttgacttgtgtgtacataatatacgtataagtgtacgaccaactattttttatgaatcatcaccattcatttgttatcgtgcttttgtttattttattaaattcatttgtcgttgttttagagattaattttgtgagcagatatagactttgcaaagtgtagcacaaataatctattccacatgaaaataatgggaaaagattttgagtaatatttaaaagatattaatcaatctatctattatcagttaatttaatttgaacgtttataaactttaacatggtatagcaagagttcaaacatacattgttttgttaattcggtcgaaaaaatagcccgatcactctattaataggtctaaaaacatatataacaacgtcgaaatagaaatgatagagtgaatcaaaattaatacttagaaaagctattattttaaaaaagcgtgagaaaaaagctcacatcgtaacaatagaaaaagacttgacatatatgacaattctttcattataagtttgttttaagttaacatctataaatttaagatattttgttttttatctaatatacatttgttttaagcacacgaatgtttgttttctaaaaagatcgtgtatctataaccttcggtttaaactgatatttaattttcaattgtcttttggctcttattgatccatatgatatgttctcttgttatttagtattgggacttccatccatttaacacgatttgatttatattctttttagatttatttttttgacagccattttagattttttttatcatcactattgtctatttttattattattttaatgtattttagatatttataatatttaaataggtaatttttgtaattaacaaatgagaaataaatgagaaaaaatgactacttacgtttgtagttttcgttttatatcgcaatgttcaaattctaaagtaaccaccatacaaagagagagttatcaacaaaagtattactagtttatattgctgaagacttttgcaaaaaaatctcgacttaaatgtgaatagtatcgttttttttctgtcgtgaatagtatcatattaatatatgtaaaacaacaactagctacaaaacaaatagaaaatcaatttgaattataaataaaaatcatattaaaaaggacacactttatctatatttgctttatatattaagaaccgtgctcttctcctctattcatatttgctcacctcaaactctctctttctctctctctctctggttccctagaatttgagcaaaatttctaccataattgctaattattaaaaggaaacataagtaatcgttgcttcgatcctttgttacatggatggatcctgaacaggtaatttcttcttctacttcttattttagttctttataacacttttcttttgttaataattctgagctctcttaattcaatcaaaaacacaaacaagaatcatgtcaaatttaaatcatgaataattttcaacttcttctcatagtaacaaaaatgtcttcaagaactatatcatttatcaatttagtgataaatatcaacttgattaattaccctaagcttatctcaaaaaccctttcaaaaaaatcattttcttgtagacaaagaattattgtcggtaaaagatcggcgccacgtacaactaatccgttatataaagtaaaaacatcattatttcactcgtcagcacaatttaatttagtttgtttgaatgtgcaggaaatctcaaacgagactttggaaactatattggtaagttcaacaaaaggaagcaataataacaataagaaa

SEQ ID NO: 2394 - DNA, 2000 bp, Arabidopsis thaliana
catcaaaataaaaacgcgtgaactttaaaaaccaactcagaatatgacaatgaaagagttaacacaatcaatctaatgggagcctgaccattggattgggagaagctatagtgattgatgagctttgtaagagctacgattcgtcacatggtttctttttggccattgtgaacgttttaaaattgtatttcactaatcgtacttctaggtacataaaagtgtatacaactagggaaactcattaagctatacaatccaaaagtctgagctagtgataaatggaaggacggtctaattaatgtgattcatgtttggatgatttgaagtcatgaaagctcataaaaagctttagaatggggtcataccaattcaataaggacggtggatgaagtctttttgacatttttgttggtccacttaattatattatattgatgaattcgttatatgagagtgatactttacaactacaatgaatttcctagaatattcattcggtaaagttattaaaaattcgaatatataggccaaaaaacaaatttgagaggttaaaaatactaagaaaatgttaatggttgtggacatgacgaaaatgtggctcttgatctgaaattcaaaatctttgtagtaaaaattgaatatgtcgcttgtttggttaataaacttcaaatgcttatttttgtttttctaaaaaatctacaaaaattggatgctgttaaaatgataaatctaaatgcaatctcaatgtagaaaacatattgtctaatactacacaaacttgcggtccaaatggtaaaaccatatactatacttttaaactaccagattaaaagcaattacatatttaaacgtgtttaaatcactttacgaaatacatttttctctatggtaagagaaaacaaaagaaatgttttctttcaccaaagtcaacgaccgaacttgctcgagactttcctttcttcatctagaaactaactaaactaaattgtgaaacaacccaaaaagctaaactaaaataaattcacattatctgtaaaaaactaaaaacacttcatattgtcactaaatcttactacacatctttagtgatgcaattttcataacattgaagtttggatcatcttaaatcttaaatatatgaaacgttatcatcccttagactaaggttcatgagtttctaattggactagtctatatatgcaccaactctatagtttattaatgaaaatataatgaacattatattttgttttaatatgaagactctcttttgtttccattagagtttggcaatggattttaaataagatgattcctttttgttttatttcatttatcacttaccttgatctacttcaacttgtttcgtgacttttaggtgcatgaccccaagtattcacacacacacacacgtattcataagcttcttagaacacctccagtggtgtttcttaaagcattcttgaatattcatgacaaaagtacaaggtattataaaatattaataaaatataatatgtgcccctagaaaccattgacccaccatgcattctgaataaacaccgaaccttaccacatttctgagcaatttttccacagaagaccaattcctaatcatgtttaataattaattaatttggattttggagctatctttactctttctttgcctataaattaaactccatctctcttcttatccttctacttttctttcctcttctcagcaaaaaaacatttttagtaacatttgttctaataagaaatttgtctcttgctttaacaagaagcaagactagccttatctgtacctttctttctgaattaaagaaccctttaagattcatatgattttcttaattcttttttatatatgtagatttgtttcttaaacactatatttatgttttacaataattgttttatatgttttcaacttctttgtagatttgcttcttacacacactaatgttttatctttgcagagaaacttgacattt

SEQ ID NO: 2395 - DNA, 2000 bp, Arabidopsis thaliana
gctgatgatttcatgcatgatcaactaacgttaaagattatttgtttttagggtaataatacaacatatacgccattttaggcaatctctttctgaaaaagatgttcgcatttatatacgaaacgactgattattaaagatatatactacatacaacaaaatcgttagggaaaagtaaaagagaagataaaatgtagagacaatttgaaagatctcttctttgttcttcttttgaaaataaaaataaaagtagacataaaatagaagttgtaaatgacaggtttcatctttttcatgcttttttttccctttctttacgtcgtttgataccgagtaaagttattttcatactaagattcagtcattattcttgttagagttattgttcttatatattgaaatattaatatcaataggaaacgagattagtatcatagttttttaatgatgacgtagaacatttatatttcattgaatagttaatagtagacaatcaatggttgttttattgtgaatttggttcacccctttcatttgttttattgcaagattacaagcttatatatgtttgcaatcaacaagataattaatatattcaaaaaagattcatataagagataaaaccatcgccatgaagatatctaatgaacgaagacgaaaacgacagatcagggacaagcctactcttgagtcttgacccacaaagataccctaattaagctttcatgattacggatctatatgataatgaaccctattaagcaaagttaatttatacttagccatcaacgtacatatatatttccaataataaatgcaaataaaaatgataattatgacaaattaaccaaaagttaagttagcaatggaccttggcgttttaaatattggcatggttagcaaatagcatacaaatatatgaaatgatagcctgaaaatctagtaatattatttttattttagtttataaggctcatccattactttttataaaaatgcctttattctgtttactgaaaaaaaaatcttttaacatagttttgtcaatttaaaattctgactgacacaaaaatgtaagtgtaaccaaaacagaaaagtgcgatataatattaaaaatatatagttactgataaaaagtcatactatttagttcagcattttacaatttcaaaataacaagattcccaacataaaaattgctgaaccagaaagcacgactatagctagatctaatgactagaatgaccaaagatatgattttcatttgtgagaaaaaaagaaagaaagaaagagttaaatttgtttgattgcacaactttttcgaaagtccctcttatcactaaaccaattctgaaatgttcacaaacttgttttacttaatggtaaagataaagctaaaatagtattttattaataaacacattgcttaaagcaaatcaaggtctttgactcttttggttgtcacttagaattaatgtcttcaattatctattcatctaggtccctcttatttcttcatacttagaccttgtaaatcatatgtatacatatgtggtattttctaacaaaaatcatatattatagatattattcgacagagggaaccttataggcgaagaaacgtccctccactcaaaccctaaaaagagaatcacaaaaataataatattaatacataagcatatacaaataatgcatgagagtggaaaatatatataagaaaagaaataaagcataagaacatgacccatgtttagaaaagcattatgttctcactttatctttgtgctccttcactatcatcatcttctctctaaacctctatcttctctctttctcttttggttctgtgctcgatctcctcacatctctctttaacctttggttcccttctttcgtttttatatgattctcccaccatttttgttcttttgagttttaaagatccatcaaactttattaaagaaagaagaacaaagagataaaagggaagaagaaca

SEQ ID NO: 2396 - DNA, 2000 bp, Arabidopsis thaliana
tggtgcagtcgagccaaattgggcagcagatgaacttgacatgtatcacgaatgggaaaacagagatgtacaagctctctaacgatataccgtctcggattcagcagttgtgttcccaattgtgcagatgaataccactaaacgtctaatttttatactcttgtagaaagttaggaatgtgtcttgaggaagagaagattgttcatttaacatgatcatgcacttgtggattcttctttctgatcattgtttgtttccacttcttgttttattgttgcatatgtattgaccatgatctatgtaatgagaacataggtgaagagaaagttgaacaaagtttttgttcttaaacattttaattataaattcagatgtttaatctaatcttaaatttcttttgcatttaagttgcataaaaatgaaaataatattttgttgtatatcaaatcattttatatatttaaatgaaaatttattagtgtaatagttatgtcaaatgataaatgtaatttactatcattcgcaactttcgaatttccaagaagaaaattatataattaatttaaaaattgaaatttgcttacttaaaagttaaaggagtctaatcatattttattatttcatacgtatatggttagtgcgaatacgaaaactccactaatatcttcttcatttttatatttttacgtacatgtgcgttgaatttacatgataatctataaggctataaccttatcacaagacacaaatcattattaactatatgcacaaaatagaataaataactatatggtaacttttttaaaacaaaattttgtattatataaaaaaatccagttaaacgaacatggaatatattagtttttgaaaagtattgttatgtagtgtagtataagtttggacgttcgagtattcgtttctgttttagtttaataccattgtatttcgattatttcaattttgaagtttaaaatctatataaacaccaaaaaatttggttatgttttgatttagatttggttttttttttatttagaaatctatgatccattcggattttttttttttggtgcaatagttttagatttgttatttgtatttagtcattactttcgtcaaaacatatttaatgtttaaatgatcgctgatatgagataaataaaaatcaagttaaaaaaatcataaatatatctgttaccagttaccaccaattcgagaaaaatcttcacttttctgtcaccgatccaatcctattctttttttagagcattaaactcttatgtattctaacgtagttttaactttaatgccaattccacccatcgtaatgttaggtcgctcggtggattatattgttgtttatccattggttgttactttgaaaatttcacaaatatcagaatcattatttgaatctttatttcataatcgttgatcttacaattacatactcaaagtttgacactagctagacttaccaaaaccagttggcgccaaatcgcaaaatagaataatcatatgattatagtaatttttttattctgattataaattcaaagaacgtcggaaatgcctaacaaatttcctgaccaagtggatttatgattcatataaagaggacaaaggagtgtgattaaacaaatgtaaaaacttgtatctatcttctatttattattctctatagttttatacataaaaaatacttagtctccaccacttacacagatcattttcttctccaacacaaagctttcttcttccatagcatccgaatcgtcgcatcttaaacctcctaaacaggtatgcttgtaacttttgtttcttaccagaactaaattcactttgttaatttgtgattagattctctgtttctttccggttactaatcttgatcagggacaagaatttgtttttgtgtcggagactaggaatataacaaggatttttgcgttttcttgtgtaacaatttttagggtttattagggttcttgatttcatca

SEQ ID NO: 2397 - DNA, 2000 bp, Arabidopsis thaliana
acatacacaaatgtgattgtaaaagtcacatcttactcaaaaagtaataaaaaataaaataaaataaaaatatatggagaaaaaggacacgaatctatataaatagatgcaacttttttaaagggggattgacaaaaaggcactaaaaaaactctccttttgacgggcgatgtctcaagggaaatcttgaatgtgactcaaagcgaagagatgaaacagctcgaaaagatttggtttgagaatcaaaattgtcctcatacagacaacattgtcgtcccaccgtctcaaccttaatagcttctggggtctgtttttaatagcaggccttgcttcagtcatggcacatctcgtcttcatagccaacttcttgtacgaacataggcacacgctaaatgaggaatcgaaaatttccttttccagaaagctaacatttttgcttagaaactttgatgaaaacgacagaaaatcgcacatgttcaaggagagtgcaattcataatgtgagttcaccttttagtcaaaccactccaagaccttcaacagtgcagatcacaccatgaccacgaagtccgtcgcaaaatatgcagtttgagccaagatgtgtatcttttgaaagcaaagaatttttcactccccaattagaatgtatagctaaatgataaatagaatttcaaaagttgttgaagcattttgattacttagctaattttactgacttattttcatatttttgtgtgttagtctcttctcaaatctatatataacccatgatatactctatatttagcactttatcatggttattaagatccattttatggtgtttcattagtattttcattgtggtttgttgcatttagtgtccaagtgagtcttcttgcattttagaagtcctatagttactgtgtgtattttgtgtctcttttgagatatttcatgttaaaataatggaggacacacatttaaatgcaaagaagagaattgatgattcataacctatctgaagtctctcaaagatcgactcggatgaagttctttcattgagatttagctttggacctctttataatggttataggaaattgaaatagatttccaatggaggtgatgtttcatgggtatgtgagctattggtagagatttatggctgattttcgtatacatatgtcaatctatcgcagaaaagaaactcatctagaaacctctcttaaaaacggacagaagcttcttcgacctccaccttcggccccaacaccaccaaagcccctctccgatcaccatcgtcgtccatgacacaaccgaagccatctctttttagctttgatccaaattgcaaccgggttgtaacccggtttatctcgtcgatccggtcagaacctattaagcaaattttagacatttgttaataataaaattttcactacaaaaaaaataatatagtaattttccaaaaaggtttttggttcgtgttacattttctgagatgatccatcaacttacaattggcattttctttctctctctctcttagtaggatattcactagcgtaaaatcactcgattatgaccttttatgtgtatgaaacggtcttgctagctggaagaaaaatattaatcttccgtcaaacaagtaagaagactgaagttggagatttttcaaagtaaacgtatgtagcctaaaaaaaaggagtgacaatggtagagaataatgacaaaaagcgagctcatattatcgtccatacaatttttttctgtcactttcaaaccttaacttcgtttgttttcttttacattcttgttttcatattttattttatctctatatatgtatatatatatatgtatgtgtgtgtgtgtatatatgcaatagaacaataaaaaagaagaggaagttaaagaatgacataaagttcctcaatctggatgaaagtgatgaaccctagaaaaactaataatacctttatgtattactttgtcctgttcgtttgtggttttgtgttg

SEQ ID NO: 2398 - DNA, 550 bp, Arabidopsis thaliana
tttacattcgatttttgttatatcggtttcttaaaatttagtttgatacattcgatatttcaatgttttgtttccaacattttgaatgagtttgatgaataattcaatgcaatttatctttgttttacgtttgttataataatgactcttattagacccaatcaaagaaatgtaatgaaaataaacgatctggtctcttttacctgtagtctgtagatggtagaaataatttaggaaactgacaatgaaatatgggttgactaattaggccaactagctaaaagaatgttcatgtagtaatatttaaggttctttacattgaacacaaaaagccactatcatatcgtgcaacgttttacaacataaaaaatcatcataatgtggaatttgagatgagacaaagttcaaaacaatcacgttcatttttttatttcttttttggtgttaaacattctcgtaacattctcatggtcaaacctgacacctagacttggtcatatgatattctctataagactatactcttcactgcagaaactgatatccagaa

SEQ ID NO: 2399 - DNA, 800 bp, Arabidopsis thaliana
ttctggatactattttcttcaatgaaggtcacatatttaaggccaagaggtggaagactagtcgtgagggtggccaaagatacttttacgtgaattgtttaactttgtcctttgaaacccctgtctgaatgtcttagccacctctgattatgagccacagacccaaagatattttcttggagatctgaatttatggttgagaaaaattcataatgaatgaatgaatgataataatgagtaatgacgttcgtacacagtaaggccttttgatgtttttcttaggttactcaaaataatgggcctcgattaagggttaagccccaactacatgggatcgactcatgtttcattgtttgagaaaaactaaagaccccatgtaacatgggttgagctctgttctgctctagccattgttgtgtaatgatgtattttgatgagaaatgataatgaaaaatggctatttatgatgaattaatgatacgaggctatgagattgtttgaagaaattgaggaaagctaacgtatctcttgacgttgtgactgttgtggtgggtagaaaaattagagatcaaagtaaacaatcttaagactgtagtttagtgatgatggcgtaactaatgatgcataatcaaaaactaatagaaatataaggcccacgaaaataatatattgggcttttcttggcccatcaataatctgttctcaatctcaagaaaacatgaaccgttggatgtaaccaaacagaagtgggttatgtccagaatctgaagagatcagagagtgtgggagtggacggaaag

SEQ ID NO: 2400 - DNA, 2000 bp, Arabidopsis thaliana
caggcttgagaatggtcatgtcgcgttctgtttgtttgtcatgaattctcagtgttctcttaaatcaaatctctcacactatgagtatatgaacaaaatcatatacaatatcacaattccattatggatattctcccaatctatctctcatacatgaaaatgttctatttcgatcttgtatttaaataatgttaatactctgttttaatttgtgtatcctgatttttttttctttttgaagttcaacaaatatatcaaaataactcagaaccattactattttttcttagttcatcaattctttactacacatagaaacgtatttatcttgtttgatctactttgactctatatatgtcatgtggcatctctggtcattgctagtcacaggtaaaagtaaaaattgatcaaagataaagagtctttcatggtaaaaattctcttgtaactggtggagatagtagatgtcaattcgtttgcaataacttacatttgcaataacatgtcagccatatttatttaaatttccatgcatttgatattattttctctctaatacatatatgatgtgttacggtcattctaaaaatccagttgacagcataatgaagctggtacaccatacatgcacttgattatatatggatgttactgccatgattgatgttttgatggaattagtgttaaaggatggaccctcactaacgcggttggaaattatgatcaaactcttcaatgtcacttatcaagagagctaatgactagcacgtttagttgttctgttgtttcttatggctgcttaatgtctccatcaaatatttagacattgtggctagtaaaatgccatctaccttaatcctatatataagtataactagataataatccatatttttgctgggtttagtagctgatacgacgtttatggttgttattgagtttgaatacaaaatatagagtattgttggagttatattgatttttgttcatattagttaacaaataataaaaaaattaagaaaggtttttgaaaatgcatcttctagaatatatgtatattcgaaaaagtcacatctttaattgacatatgttttgtttgtttgttttttttactggccacacaaattgacaacaatggtcatgcatgaaatgaaatgtttgttgtcaattttttttactaacttgtaatatcattatgaaatgaaatagaaggtatatattacaaaatattacctaaaagtagagcaatcttagaaaaaaaaaaaaaaaaaaaaaaaaaagaaaaagaaaaagaaacaagattacaatgcatttaaaaagagatggaaagaatccgagctatcgaatccaaagaagcatcagcttcctccatctgttcttgtatcgtctaccagagatggtgttccggatctctcgatcaatattcttaaagatggttgttggagggatcctttggctattatggagaacattattcgtttatctccagatgtgatagacaaagggctgtgtggcctgtgagaccgatggccacttaattattggttttttgtcaatggttgtgtatgcatagaaattcccacaaccgtttgtggcttaacacaatttaccaggggtttaagtggttaaattgatacatgtagatctaaagttttatgctaatataaattagttttaattatataaattttaactacgctcatgacacgtaaatggtagaccaatatgtggtgctctattaactaaggggtcttcattattaattcataaagactttctttactatacaagacttgtcaaaaggaaaagtagtattttcgtactacgtctacccctctcacggatatgtgtggtcgagcagtcattatcataatgtggaattttgaattgagcgaggtttcaaagttcaaaactatcacaactagtcttgatcaattctatataagatctgtgatcttggttgaagaaaagaatcgtcgtaggttgatatttaacaagga

SEQ ID NO: 2401 - DNA, 828 bp, Arabidopsis thaliana
agcttcagaacacaagaacacgcgagaaaaaagatatttgatctgtctttccctaagacctatatttataagaaacaatctcttcgtgatttcctttttttttggtccaataaattagggttttttctttttatattagttttgcatttataatttttatgaaaaaataagggaaaggtggaagaaaatattaaaactaatataaaagaaaaggaaaaagtctaatttgactacattcacgcttttggatataatttgactacacaaatcctaaacttaaaatatatatttatcagaatgattataaaatatcaatatttgttgatgtaaaaaccatcattacttaaaataaaaaatagaaaacaaaatatttgggggtgggagggtaaggcgaggaaacggttaaccgcagacactaatctagtttcaacagaaccacctacgaaccaaacccaacctcctggtctactttttggagacgagcctcttatgtagccatcgacgttttttcattatttttcgggggaaacgccggcctaagacccccagtaattaattcccatagttaacatgagagggttcagggtttagcaatcaataagcagactcatctcctaggttcccacaccccttaacttatttgaccaaacctttcttcatttaaacaactcaacttcaatctctatcttccgatgtgggacaaagtgctttcttactgaagcatttattgtaacttgttcgtcactggtgacgtcaccattctttcttataaataaatcataacctattaaccttagtccataaagaagaagaagctaacgaaaaata

SEQ ID NO: 2402 - DNA, 2000 bp, Arabidopsis thaliana
attttttattgcgatgaactgataatcagcaatatcaatgaatcaagaaccggatcaaaatatttgtctccaatagtttttgttatgtggttgcaatggcaaggttgatcatcctttttcaagtcaacgttgatcatcctttttcaagtcaaggttgatcatcctttttcaaatcatctttggttctctctcgagattgttattttatcttgttccaattaaagttttgatagtgaatgttagtggcaaaattttattcaaatattttataattatttttttgtagcaaatcaattttaagttaaattcgatttaaaatgattttttcaacaaatttcattaaaaaaatttatagatacaatcgcaaagttgtataaaattttatttaaaaaagaaatttttgtagaattattcaaatatgaatgtttttcattaagatgtccattcaaaataatataagaatataataattttaagtacactcttaaaacgataaaaaaaaaaaaaacaattaaaacaggattttttttatttttcttgaaaattgatgtcacgcatgctaaagatgcatgcatatgggacatgactttacttttgagagccgaaaaaaatggtgaagagctggtattgttgggttccacatcgcggtttcacattacacaattggaaacagttgaatatcccttagaacttaaaacaacccaagttaaaaacaacaacccactaagtttatataaaagtaaatattcgtaagaaaaaaccacggaactacactaaaaagaaacattaatacaaaatttagttttttttttctgtcaagtactgtttatttatttctttttctatttcagtaccacattgacatacctacaaagtatgatactcgtttttttttgtcaaaacaaattacaatattcgattattaaattaaactaatttgtgggctggtcgtagagacatcttctatcttcttgcgaatatcatgataatcaaatcttgaaaacttaatttttgtatgtatgaggaataataaaacacgttgttttatggtttaaaaaaaaaaaagctaaaaaaaaaataaagaaaataaaacacgttgttttatggtcaaaaataccaccttgtcaccacaataaacaatgtgaacaaatttatgtcggtgcgcatcatttcttctgatttcttatgatttctttccattttttatgtgttacaaaattattgttttgaacaaattttcacacctgtggtctgtagatatgatttaaatatactaaattatccaatttaattataattgtttatgcaaaaaatttgatcatccgctttctgcattagctcttcaacacattattgtgatttctgaagtagggagcatatggatatgtaattatgtaccaccaaaaaaaaaatgcgcgattgaaaaatgaatgacacatgtgacatgtgttggatcttctgataaaactccaacgctaaaatcaacaccaatgtgatttttttgacgtaaaaaggacaatgatcaaaagcgttaagatgtgattgtttatgtattttaggtcagtttttttttatattatattttactccgaattccttattgtgaagcatagaatgcttatagtttatcataacgagattcgaatacgagatcacaaatcttgttttaaaacatttgaaaattggagaaattagtggctcacacatgacggagaaagatgaaccgcatgcctcccattaccaacgtgtatggtatcaatgtcctaaagtgaaattattatattcaaatgtcataattgaacgtgattcatggcattggcatctatatttatttaaatatttaaaacctcattgcccagtggccggcaaaaaagttgataaatcgtcgtcgtttgcaaaaacgacatttaacccttgggctataaatagaaagtgagccaattcagaattctaaacaaccatctatctaagaagaagcagaaagaaagaagatctaacta

SEQ ID NO: 2403 - DNA, 1065 bp, Arabidopsis thaliana
gagacaacatgatactctttgatccagtgatgttaagttgttaactaaatttgtattgtcttgttatttaaaagttttatgaacaatctactaaataaagatgagtgtgatacatgtatccacagtggtagtataatttagtttgtacgagtatctagttctatctaattattgatatatgatcatattttctcataacatatttttgttctgtaatttagatgataaattgataaccaatttgtattattacgaagaaaaagaaaacagtttgaactattcattaaaaaaagttattgtttaaaaggtattttattagattaaaatattaaattaattgtaattcacttttggaccacgcatttagcatcacacgtataactttaacaaatcaggtaaaaccaaatttctttaattaggtaaagaaacagaagactgaaagaaaaactagtttggaaacaaaaaatggtatttgcaggaattgtaaggaatttgggatactagaaatgtatggatctaagttagaaaaaatcaacaaaaatttgttgaatattatttataaagttggtatgtttgaggaaattgaaaaagataaaatatatttgaatatatggagagatgatataatgtgttcacggttcattggatatttagcagtgaatgaatcaagagaaagcaaaatagttattttcttctttcccgtcgttttagtatacttttcaagcacgagaacggaatcacaaaaactagtcaaaaaaggcgttaaatcctatagaacaaaaacatataagctatggtttcgaacgggaaccaaaccataatatgcgatgcacttctaatagcaatcaaaaatttgttaatatgtacatatatatttttgttttattaaaaccgtatcatactttatctgcagttaaaccgcacatctttattcggagcctatatatctacactgcctatatatcaaccgaccaaacattcacgaaaacaaaccacataaactagtcaaagaagaatagatgagttacattataaaaaagttcaagtgagagaaagagaggtcca

SEQ ID NO: 2404 - DNA, 890 bp, Arabidopsis thaliana
attaatgataacttcataactctgtgttctaaaataatgactatgtgcagcttgtatcgttttgttattgaaaaatttgaaacaaagaatgaatgtagctgcattggtagtggaaatcaattaatgggtgcaaagtgaaatgttgaaagctacctattataactataataacaaatattgatttatggtttagggaaaataaattgcaaagatggtaaatctaagttcgataggatgatgagttaatttgtttcatgatgtgtggtattgattacatgatgtttgataagaagttaagaacattaacgtatggttggttagtattggtttattgtgtattgttggttagtatttcagtttagtgatattctggttctattagtctatccaattttgtattagcattggtaactcaatttcttcaagaaatgaaataacaaatatttaacatatctctccaaaactaatacatcggaagtgaaagatgaaagacatgttcaaagaatatttatcaaaaaaaaaaaaaagagagatggtcaaagttagacataaatattgacttttgaggattcttaatattttgaacacatgctgaaatgtttaggcgtgaggataaatgatgaacacatttgaaagtgacggcaatgatgaacaactaccttctagatgttcttggatgatacacatgaatgatgtacatacattgaacttgtaattaagtgttcctcacaactctaattagaaaagtatgcttaattattggagtaaatggcctaaaaaagacttttccttttcctttatgcctttataatcatgcacaatttacatgagagtatatataaagattagttaaataaaaaataaaaaagagggaaagagattgattattc

SEQ ID NO: 2405 - DNA, 360 bp, Arabidopsis thaliana
attaaagatacttcttgcctacgaaaatatttgatttatatgcttgcatcgttttttatttatatttttattttttaaagtttttcgaaaaatagaatgacctaatatttaagtaaaaagatcaaaaacctatttgaaagttacagcaatcaaataacgtggtgtgtctggagattgtaaaagccaagactagaaggaaataagaataaaataaccaaagtgacctcagcagtgacttggttaccttactgatgtctttttttttttttttatcttcaagataagcttgagagttgagactacaaaaaaaagcacaatattgtttttaaagtgacagagagagtcagagagagagatcta

SEQ ID NO: 2406 - DNA, 918 bp, Arabidopsis thaliana
gtaatgggttcgagttttatcatcggagttgcttgtgtttttgtcatggttatggttcatgttttacttgagtgtgtgagtactctatctaaattataataatctccgattgagctatgaattatgatgtatcggatacatttgatcctaatgaagtatggaataaataataattattaacctttgtctaaattcaaaagaagtttaaccgacgagatgatttcgcttagagttcgatttcggtttaactaaaccaaatcaaccgataccgtgaatcaagacggaatcaaacccaaaaactgaaaaggttcacattatataaatgttatattttgatttagattattacatcatttctttcaaaatgattaacattttgtttgataactgaatatttcttctgttttacaatgtcattcatttcaaatgtttggcagacaatgaattggccaaaaaatagactcttcaaaacaaaaaaagttgtgtgttttacaaatacagtcgatacattaatctctcagttttaaacttttcaacatatgaatcttaaaatataaattgtagaacgtaatcatttggagatttgttatttcttggtcggctaattgactggagattagaaacactaagtgttggtcaaatatcttaaaacactaagacgaatgacgttggcaatgacgtgcataccttaaaatataaatcagtccttttctggtgtgatcttcaagatatccttggatacaaagacaaagagaaagcaaaatggtccttttatttatttgtttatttcaccacccataacttcatttgtgtatagaatatagtaaactcaagtaatcaagcaagtaaacgaaacataaaaaagaaaagtagtgcaagaaacagaggagttagataccaaaaagtgagagatatcga

SEQ ID NO: 2407 - DNA, 1490 bp, Arabidopsis thaliana
ctgtttccaaagttccaaacgtttcactcaaatgactcctcagtctcccattaaactgcagaagcttgaaacgctcaacattttttttcactgtagaaacaaaaaaaatggtaagtcataacaaataccaaaaaaaaaaaaaagtacatctttcttatccacacacaatgtaatagaattacaaaacgaatcttcatagaccttatagatccttaagaatccgtaagatctgattagaagaatctctacaagattaaagctgaggaaaaaaagtaaaactaaagtatcaaaagaaccaaaacaaaatcacattcttctcaaactttcttaatttaccaaagaagtactaaaaaacaagattagtaacaggaaaggcctaaagcgtacacacacaaagcaggaatcgatgaattcacataacactaacaccaggactaacacgagagtgttattggcagtgtcagagagtgaaaaagcttggaaaaaaatcgaaccgtacctgaacggaatcagttcgtaacacagagactgaagcagattagagttgaatcagatcaggagaggaaaaaagaagaaggaagaacagatctcaaatcgtccgtgaaatccggcagaaatagcgccgacgaagctgaccctatcagctacagaggtagagagtaagagaagagagagattgagctttgttaattgtgtgtagattagagagtgacaagtagagagagatagagagttgttgaagcgagtgtgttttgttcgccgagtctttcgtcgaagttgttttttttttttcccaaaaaaaaaaaacatatctttttgtggccgacggatttagtaaaaaaaacagtataatttttataaagatgggcccaatagtagaatcgtacgctcaagattccgtaatgaacgcgggaagttacgtcattgtgaccctacttacttagtggagctcaatgtccaatatacaccgttggatttgtttaatcctcctttagatgggcccagtttttagtaatattctattcaattcagcacgttatacaattgcttttaaagcccatggcccataatactcagacagccttaaatgcttcagattaacaaagaaaatgttttagattttatggatagtgtgattagagtccaattattttggaatttaattcggttaaccagtcgaaccggataatctgtagaaatccagttttttttttggaagactacatatttgtctaaagcccatgaaggcccattaaacccaacgaacacaaacaatcttcaaaatgctcctagaattttctggattcacctgatttttctcatagacgtcctctagatgtttctgtattccccataacaactcgagaagctcgagaaatttcggttagtacctttaaatagcttcaaaaatccttcgtgtgttctatcagaaatcgaaaaatcaaagttctcaagaagatatcaacaaaaaaaaaagtaaattctttaaa

SEQ ID NO: 2408 - DNA, 2000 bp, Arabidopsis thaliana
atcttatatcttattaaaacaatatgttcatattttattacgctaataaaagcctttttttttttctgatgccgacgaatccgatgagaaagtagtgtacgtcacataaaagttataaactatgaaatctggagataaaaacaatattagtattaaggcttttattagcgtaatataatatgttcacacttcaaaagcgttgacattacgacaaaagaacaaggacagatcatactacgactaattaatccaatctaatatatctttttaaactacataaattatcaaattgaaatggaacgtagtccctcgtatttgtaagaaatccaagcaaagatttcgattttaaaaacctccaaacagaagaaaaaggtcgattttgttttacccgagttcgtgtgttttacataaactttgatggacaaaacataattttttgttttgtttaatatacaaacataaattttgaatgagtgtcgacattgttcaaaaacaaattggaaacgagggtattgagagttgaggtttatcttaaatactctagttgttaataatacgatagttcttatatacaaaagttgttagtattgtttaccaattttatctagtatagtactatgtttaaatgtatataaacaaccaaatatggacatgacagaaaatgaaatgacggtggtgccagaacggtcattgatggtgagcaccaacgactacagtgaccctacagctaacggtagacatgatccaccccgtggaggcagaggacgcagacgttaagagagaggataattttcttaattttccgactcctcttgcaagcttgcaaataatctatatatatagaaaacagtaaaagtagttttaaaaacgagttatatatgtgatatcagagtgtgtgtgtgtgtaatatataatacttcatttgcatttgtgttctctacatcgacttcaacttgttattcttacctagattaatatatgtgcagtgtgctacatgtaattttatgaatatttgtttttgttaatgccggcatattccaatcgattttatatatagaaattgttgtgtattgaaaaattgttaaacatctacttttgaacctacaaaaacaaaaaaacatttgaataagaattgatattgatgtgtgtgaaagcataggtctgcaaacaaaagaaagtgacatagagcgacaaaaatacgaagaaaatggatttcgatacgttaagtgatgctgcattggccagaagaaacaaacacgagatcgaaagctcaaacaataacctaagcccatcaaacaagatgatagtactatctaacaaaatttgattttttgcattcattatgttagcgtgtaatcagtaattcagacataacctttgatctcctaatcatgtaatagttttatctaaccaatgaaccataataaattgggttttgatgtggaacactttctacaatgtttttagaacatttatcttagacctaattttctgaaaacaaatcatataagtttgttgtaaagtaacactcaattcatgtatatttcacatgcttaattatttcattttctaaaacatgatcctagcacatattttttgtttgaatatataattgattaatcaaactgaagagttatgtacaaatagcctaaaggtaagactttttataatgggacaaaaaagtagggttaataataataaataacatttttatgtgattggaagaaataaacaaaataaataggtcaatttgattattttttcatgaattaatttgtgtatgggccgtatttattcattaaacccaacaatcattaaacagataggcccaaatacttattaagaatcttcttcatcgagaaatattcaaatgctcccaaaagctcaggaggccaattcctaaacggaatccatcactttgactgaagaagattcttcaattcaaacacacacacaacgaagaagacgaagacgaagaagacgaagacgaagaagaagcg

SEQ ID NO: 2409 - DNA, 1458 bp, Arabidopsis thaliana
ggcttactggaacagtgtttgatctgcaaaccaaaacaaaagcaaaaagaggtcatttgtctatatactcattcacaaaggaaaaggtgagcaagagatagcttagtaaaagaaaactaataagctccttccaactaaatggagactaggaattaataaaactactgaaaaactaaactctaatcaacagttagagaatcagaaaagaaagtaaaacttcaaaaaagaagcttgtcactaatagtttctcagaggaatttcgtcgaacaccttacatgcatcagttccagccaaaattttctaatttccagttccagaggcctactctactaacccaacaaaatcgtggaagagaaactatcgataagaaatttgaaatttgatcaaactaccgaaagctccatcaataagcatagacattacaaaatacaaaccctaagatttcagagcaacgaaatcagtacacaaaataaacaaaccccagaaaaaggtgaaataaaactcacacaagtaaagggagatctaacttgagccaatagagaagaacgttgcgacgagaaatttccagagcgccaagatcgacgacgaagcaaaaagagcaataaaacgaatcgggtcggattctacacaaataacgaagcatccagattccagtttagtaaagtgggtccaatcagaatctttaaagcccaaagtaaaagcccattattattggaccagattagtttaagttgctccaaaccaaaccggcagtcaaatcaattaaaccatgtcctaatcaatagtacccaatttagacccggtccaaacgttaccgtttatgagtgtgcgcaactagcagctgccactgtcagtgccaaattggtaatttcattgacctagctttgactgagtatcaccacagtgacgtggctttttcacaattataaaaaaaatgatcatattctagacatggaggtaaagtaaagcaaagaatctgcatttttgtattttctctaaggaacaattacaaaatcttgataccttgtgagatcataaagaaggtcgttaactcgttatctattatatttatataccttgaattcttgatacgtttgttttacctttttttctattgataatacgtttgaagtttgttttactgttacacattgattttatatgtgtttcccaaaaccgtttaagtttcagagtccggagcagtaactcgtaattcactaatactggtattaaatgttgttatttatgggtaaagcataaatacttaaattcaattattataagaaaataaattaaaacccgaccccatatttttcgtccttttaaaagatggagtcctcgaaaacattacgtattagtaagttccatgcaaaggacaaacatataataacaacaacttctcttctttactcgtttctctctctctcttttcttttcttttcttcaagcgcttcttta

SEQ ID NO: 2410 - DNA, 2000 bp, Arabidopsis thaliana
aaaaaagtagattgtatttctacatgcgataaactgaaattaaatcgaatagaaaaataaacctcaagttgcaaactacattttattcaaaaagaaaatctacatgattcaacctttacaatttgactcacaatagatttattcgaccgacctgatttgattaatcataagctacacgttagaacacaaagtcgcctctactgttgcttttgtactaatccttaaaaaaatcatatagatttaattcaccaaaattaagttaggaaagaagaggtggtggtgttgaatttgattatgttatctattgatagtattcatgtgatcagtagacgaaaaattttcaaaatattgcctgtcgacatgggaagaatcgaatgactaaaaaaataatcgatcatgttctttaatttcaaatttaattatatatctatataaatacccttaacttgtttttgacgatcctaccaagccagagaacttataactgtcatattcataccatatgctatataattagtgggatataatactctatctttaactttacgcgtaacaactttttaattaggatttaggaataagaacctttcttttgtttgttaaaaaattctttctctttctctctcaattttttcactatataaattattaagttagacgcatgtatatgtctttttactaacacgtagaccggtagacgtccatgtgctccatgcacgtgtgtaaatacatctttttttgccatgtgtgaactaatttttttaatttgccaagccaaagttataattaattaaatagcagaaagagtcttaagagaaataatatgattataatggcagaagaaaagttaagatttacagatacatccaatagtgtatagccgcttaattaatttatccacacctcaacgaaaatttccgttggtgcgctaacgaattcaggctgtgaagttaaaagaaaataaacaaaattatagcttcacataagcgatcgatcttcaaactctacacatgacagaagcaaataactaaattaaatagcgtaaattttgtaataatactagaaaacctaaaaaccaaatgtaaaaaaccttatgggaaaaaatgtgataaagcacctaaaccatagaataacttaaaatttcaatttcccaatcaaggtatgatataaaaaccatggaaaacaaattctcagccatatttctatctgaccgagtctttttcaaaataatatatagacggtagagtcttatatagtaaaaacatttttttaaaactaatttatcttctcatatgaaaatgaatgcaaataaaaatgaccatatatgctgtaatgatattcaaggaagagatatcacaacaaggtcgaagaaatatacaatatctgaaagtcgactatatggtccactttccaaattagagatggaaagaagaaacgattatgcagcaaacccattgatcggacgaagaaagaataaatatggaggcccattactatagtatttggccttgaaatattttggtccgagaaataataaataaacagttatggcttttcggatttggttgctttcaattttctcaaatgtttggacaagtgttattacactcacctaaaacaggatcattccaatttcttgggctcagagtctgtactttcttcttctttaaaccaaggtcttataagtattctctaaaccaagtcactaaacaataattggtcttgggtctggttcaaacttggatcaatgttgccacatagccattagccacacaaaacaaaaattgtcttgcctttatatggaatgaagaaaaatcgaattttgtaaccatttttgactttaaagtcacactcgccgtatacggcacaccaaatgaccaaaaacatttgaccaccaactttgctttaatgttaaaactttttttttgcatcccactactctcttcttcacctcctcaagtcacagtgaccaaaatcacacacttcacaagaaacaacct

SEQ ID NO: 2411 - DNA, 467 bp, Arabidopsis thaliana
taagagtcttgtttttgtttgtttgttgtcctttaagacgatagtactggaccaaccaaacctggtgtgtataaccaaccaacggttctattggttaacggattaatccggttttggtttaatcattgaaagagacccttgaaacgcggtttcacacttgacgatttatcacaaattaggagacgactcatcaaaaaagaatatcttactggtcaaccattttatagaaatattaaaatcaaaaatgatatttaggccaaagtagaaaaagacaagaagagagagaaacaaaaaaaaccttgctcaatacgccaccgtcgtcgtctttaacccaatctaaaagcctctgttcttttttagttttatcctctttttcatttcaagatcaatttcataaaaaagtttccttttttagcgaatcctctgttttagaaatcttaaagttgtctcctttattaaagaccatc

SEQ ID NO: 2412 - DNA, 2000 bp, Arabidopsis thaliana
ttataatatatatactcacatatatacattatatatatgaattatatgcatgttcgtagttatatcttgcctctactccaaatatttattatacattgacatgttgctaggacaacctcaacgtgaaacttttgctgataaattgattgatgatgctcgtatagacgatatgacgttcttagcatatgatttcgtatatggtgacataattcatgaataatatcaacatttggtgtcaaaaggaaacatatttcttgtcttcttcttcaacgtacttgcttataatgaacaaaaaataaaaaaacgtactcgctttctaataagtatcacataggtttaggctcataaacatatggactaacataaataaaccaaaagcccaataacattactcttagcatatacatataagtaaactattaacatctgtctgcgggactcgttgatttcatttaaattctgtagtctcagctcgttcaatttaatctattcgtacacactgataatattcaagaaaacatatgctaacgtataacgtattacgtatccaaatacaccttacaccactcacacatagcccatatataaaagtttgaaggatttaaagtcgcagactcgcggtcattttttttctttaaagtcgcagtcattgactgactgattcttctttcttattgaaaggttttttatgtaaagacgaaagtttaatcaggatgtgaatatggtacggcccatgttctttattcctttttttttttttggtgcaaagttctttcttattctatgttagaaaaataatcaaattaccgacgcgagcaaaggttattatttcctggctattagtctataactgataaataattagtcaatcagatcaaacaatagagaaataattagtctgcaatcagcgattattaaaaaataaaataaaatagaaacatatctcagcaccgatttttcaacagccggcccacgatccagaaccgtccagcttgaagccggcgccgcgtcgacttgttccaccgttcggatattgccacgtgtgtgagagacacctgccattacctcgtggaacatgttttgttagtataagttactaaccaagtcgctatcttcaattcttcattacctaagagttgaataaaaaaacaaccatatacgatgagacacgcaaataactgatatacgaaacaattatttattgatgtacattcttctaactataatactacaagattctgaatagttttagatgtaaaaagtacgagaagagttatgatcagagtaagttaagtgataagatcatgacacgtaggcagaggaaataaagtagaaactatcgacaacataataattgagtgagtacaaaaaccacgtaataattaggtgtacactgtagtctgtagatcgattgtacaaaatgaaaaaactatatgatttaaggaactagatatacatatgcatcgactcaagaacagttgctttatgtgaagactatcaattacattatcggctaaatttggcttcatgtgttgaatagatggattgtgtgctcaggtagttgtgtcagttaattataacagtaaaccttcactgcttcacatatataaaatttgggttaaaaaaactttaacattttatttttttaattgacaacaaacaaattctgtaacggttacatataatagtgcttcagttaaactccttttttaggcaactctaattcctttatacccttaatccattattattctatcgaacttatctttttaaaagcttccgcgttacgccatcacttctccaccatttaaatacctaaaccactttctttcaaatttcttattccataaaaagtaaattcacaacaaaaccaaaaaaaaaaaaagagaagaagaattagcttacgtgttcatcacatctgcattacgcgcaaacgaaacagattcaaattctccggcgaagttttcttattcatcaatcaatctctggattcatcaatc

SEQ ID NO: 2413 - DNA, 2000 bp, Arabidopsis thaliana
ttaaggttaattccacccacatgctatcaccataattaacaaaccactctcaatcaatactatcaaatcacataatctcatgcttaagagttaagacacctaaatcgttcatacaatcatgctcacattcacatatcatatacattcaatttcatgcacatgttcgtatgcactattgttcgtaaccacttagctatctcaaccatccatcatttcactatcttaaccatcgagccctcagatataatgcttggcatctctccatctcttagtcatcttgaccctcaaacttatctgattctcaagatagtgagagctcaggactcataatataggagttttagattttgctcaccatattgggccattaagccctgtttccttttttagtccaatcagatcctataattccagtgtataccaagcttcctgatctttaaacacttttaggcaaatataatttcttgtcctttcttacttagaaccattcttcacatgagaaccatcatttgtgtatatatattaataactttcaaaaccttaataatgatcacgacataaaatctttataatgagagcgggtcattacaggtgaactcctttgtccgtcatatcagccgtcttagaagctcgtatgtgcccaatactctcaggaccagccctgagctcgtatgcattaattactgatctggttttaaaatttgtatatatacgtacatagccatatgggatacttcaaatgtatgattttgtctcgacagcttttacaagtttagtcgaagtgaccagacaacagctgcaatccgaaagcatgtttcaatgaagtcgttctagtccatgactgaaaatttgttatactgaatgttgtcgataactttccttttgttaacgaatgcttgtcgataaatttatatatatccagtattatgatcacataatgataaattagaggaatttcatatttttgaattggtcttagctaatacgtaccacgtaggatcaattttctcctaacctacttctttaatatatagtgggtaaaatcataaatggttcattctgatttcacgctgagaaaatgatatgctcattatataagtaccgatttctctaagacaactttcaatctgtcaggaaaagaaattgatacgtccgtttcttacagttactgcatttattatcactgagacgataattgagttctgtagatgcataaataggaattatctgtagggcatgcatatgtaaaattagacacacacaaaaaaatctaaagagaaaaaagcacaagaaaacaaaagttttgttggattttgctagtattatttacgacccacaaatctatatcacaacacgaaattaacggtttatggactttttttgtccaattttcacgaagtcgaaaatttcggggaaaaaatttcacctaatgttattggagaactgtaaaataaaattatagattatgtacatccacattccacagccatctccgtccgtaaaaatttctaaaatataaaaagaaaaactgtgattttaaattagaacttgtaggattacgtgttcataatatttattgagaagtgtatttgcatgtgatgtttttcactcgattttaatacgttactaggcaaaaaaataaaactagcacgccattttagtgactgttaaaatgttctgttataggtcagaaacaaaatctgatcaaaatttattgtgagcattatgaactttttggaatagtaaaaaacaaatcgaacgtatcacgaaattatgttttgacgtattcgatcgggatatataaaaacaaaaatgtgaattataaatttaggaatatatacgtagaaattccaataaaaaataaatcacctatctctctctctctctttttatataactatttttttccctcacatcttttctatatcttgcattctccaaactctacattttcagtttctctgtaaatttatctaatattcttctattttccagtagtt

SEQ ID NO: 2414 - DNA, 2000 bp, Arabidopsis thaliana
actctttctctccgataaatttatatatttatgtttcaaaagctaataatcttttaagcagttttcagaagtgagttgtttagctttaagaatatacaagaatttgaatatttagagggttcattttcggatatggtctaaagaaatgggccgggtatgcattgtctcgacgactatgaccaaactgagaagaaaattgaacgtgcaacctcctagctaagtgacataccaatgacttatagaaatctcatatatgtttaataagtcataacgcaaaaattatttctaacaaaagcaaatgggttgattttggaactatatttaatggcatagaaaacttcttcgaatcagaaaagaatataaaatacgtgtgagttaggatgtcaccatagaaaatctccacaaaagcgtgaactcgattctatatatataacattcaatcattcttactaaaaacatctatatatatatattttaaacagtatggatccattcattctgatctgtaccagattgcaaaaattagtaagatatcacaattaaataaatgaaatacaaattgagttattttggattttcagatgaaaccaccaaacaaatacaagttgacttgaatgttctccaacgctatttttttctctattatattttataactaattaattcattaaatcacatgtccaaatatttaatgatgaaacataaagtaagtaagctagtgacgagagaaggacacctcattctcattacataatgtgacgagattgagctgtcgttttgttgtaaatatatggtcgggggtcaattattcatatgcagttttaggtcatttataaagaccattaaaaacgtctttaatatttcaacaatcttataattcaattattaagaagcatctagatatggattcacattagagttcgtattctttgacagcaaattcacattagacttttgatatatatattgtacatttgtaatatagtatacgaaaatattacttgaaaactgatgttatgtgttgccatgatgccattggtccatgacttttccacacgaaggccaaagcatactcttatattatatgagttgagtcattcttttttccttttgacggcaagttgagtaattcaattctcttgtcacttaccggtgatataagagttaatcttataaatagttttctgaaacttaatatactataacaatgtaaaagtcgtcgctttgttatttgaagtgaaaattaagcaatgttatgatatttttactaattaactcaatatgaaaaacaaaaatcctcttaactaaaacagaaacataaaagacgacttagtttttgctttagatctagactcataactcaaaaaacaatttcattataaacttttgtagatcttacaattttaaaataaaatgtacattaatgttgaaaagcaaaatcttaaattagtgtatactactactttttttttatcaccgtgatagatcattagatccttaacctcaatccctagagcctgcttattgcctttaagcattgtgcaatcactaccaaacacactcaaaactaaataaatataatttataacttatcaaataaaataaatactatcaagtgtgtatgaaatcgatgacaatttatttattaccttattaccatttgtgtcttgaagtacacgttaagctatttttatgtgttataaaggcttcttcgtcaaccaattacgaaatcaagcttttgaagcttctcaacaatggcggctattccttcccacaacaaccttcttaccatcaaccacaaaaactccataaccggttcttcttccctaaataccaatttctcagaaatcaattttcccgccaaattccgagtagctacgagagctttgtccagaaccgacgagtcgtctttatccgccgtgatttctcgcctcgagcgagaaaggcgggaaagacaaggtttattaatcgaggaagcggaaggagctggagaactatgg

SEQ ID NO: 2415 - DNA, 2000 bp, Arabidopsis thaliana
caccaatatctagtattggaatcgctgtggtgtttgtttgtagatatttttctacatttagcaatgtattacattatgattgcaagaggaagcaatattaaggtattaataaggtttttacttttaccgggttagaattttgggtttgtttattggatgaagaaattatccacttgtcgatctttcataaaaagcacacgtgaattagtttcgacatagttatatagttctcctaatatacgttatttgaacaagaatacttgactagttgatgtaacgatgttttcttaacgtttcaaaagtaacgtacgattcttccataaccaaatgtcttgtatataatggtagaatatatattttgttttgtcgcctaatgattatgatgtgcgttactttaatttagaaagcggactatttaaaaactgctatattgaaaccgcaagagaaagcaatagtaaggtattaatatggttttacttcagccagatttaaaccaccaacaatactttaaaccattggtcgatctttcaccacaaaaaccacacgtgaattagattcggtgtggctagttccctaaacatacgttactagaacaagcgcacttgactagttggcgtgacgatgtctttcttactaatttaaaagtaacgtatgattcgtccattaccaattgtcatatacctaatataaaatataaattcgtttgtcgcttaataatgataacatgcgttactttatgttaaaaagccaattttcgatagattttctattaattgtaacgttataattcattatacataacaaaaaaaatcttcaacaataatatattgaaatttcataactaatggatgctaaaatgttagattaatagatagagaaaacttataatactcaaaacatttaacaccaaaatttccaatatctagtaatggaaatgtaatgtttgttagtatataaatttctgcatttagcaacacttatgcttaaaaacacatcattgatccgtagaataaaaagacacctcaagtgtactaagtaaccgttagaaactgcgtaaaaaagtttggtaccactttttcttttactttttttgttttgtcaagttacttatcaaaaacttggaaattaactttctctctttttttttaaactcgtgaataacaatgaaacattcgtatatttttatatcataaaagaaaacaatacggtattatatgaacaaaaaaaacttaaagataaaagaggtcaacaaaatgtccgaagtatgatgatgctaagtttgattagttatcttttttatgtcagagaacaattaaatttgttttattattatactaaaagaagaaaaacctaaactgcaaaaataataattacgacccgagtcttcgagtaggacccacctctgaatctgtgacagacgccggtttcgttctctctctctcctttttttcctctctttgcttttccaaaaaataaagttgtctttttttatttataataaaatgatttgttgtttcacagtgtgttgtttgttttggggtaaaaaagaaaatcataaggatgctttcaatatttgttttgttttggttgagtgattgctgaagccaacttaaaagagagagaagagaagagtgactctgtgtgtgtgtgcaagaaagtcttctctttcacacctttcgttttctcgaacctctcctttaaagatggtggaggaatcttgggtttgacaactcattaacactgaccctctttttagctctacaagcatccaaggaacccctcttacttttccctcttcttcattccctctctctctatatctcccaattccttctctttttttaaccttgatcttcttcttataagagactcagagctgttcttcaagatgggattgtgtaagcttgaaacttgactatctgggtctctcccattttctgttctcttttgtattctgagtgaaagttttgttttctgggggaaaaaattagggttcttag

SEQ ID NO: 2416 - DNA, 2000 bp, Arabidopsis thaliana
aaatcatacgatgccttcctgttctacacgaggactggacaacacatgtcaatacacatctaaactataaaagaaaattttgacaaaatatatataatatactgtatatgaaaggcaaaacatagttatctatataatattttttcaacccagtaggtcaaaatgtatttagatcaatttgatattcgtttatttaataatttttatctattaaattttttgataggtctattcaaacaaaatttgattttaaatccgttttcaaaaacttttacaccgaatatttttatatttaaaatataaatatttctaaaatttggttaaaatttaaaactatgaatatacttgtttgatttttaaatattttaaatcatattgtaattttaaatattttaaaaacagacatatattactccgattaacaaaaaatatgtgggtttaatatcatatatataaagtaaaaaatttagacaattattcaaaatcatatcataattaatattaacattaataaaagaaataagttttttaacgggacaaatttgacagaatattacttaataacaattgtaaattataaaatataaatagtttagaaaaaaatacaatttgcaaacttttatatatactaacttaaaaaaaaaatcgtttcacggtgtatcgcgggataaaatctagtttatccagtaaaatattgttagaattgcaaaaaaaaagttttttccaaattatttgcttctattatctttatgaaataatataaaaaatagtgaaacatttaagaatctgaaattagctttaattacaaaaactaacccttgttttcaaaaatttgaaaaaatacttttagtaagtaataagacaatacacatttgataaaatttgagaaatgcaattactaaatagacaatttttctgaaacgttatatattttagaataaaacaagcttattttaacggtaatatatgttaagatgtacacaagtcatggatatacatcgattttactttgaatccttctaagttcatcatcactagtcttacgaataaacttctatacatcactagatatacatacgacatggatatatatatcaatattacgtatgcactcaaaacttctatatacccttaatacgtcacggcaatgtatgtaattctttcgaggtttgaaaaaaaaaaaaaaactttattttattctttctcacttcaaacgtttgatgaatcacgtcgttctttttatatatatataagaaaacgtcgatcttaagacttatgtacgaattatataacaaacttttgcaggatttactgagttaaagtagtttacactatatttacaaagattgttgtgacttctctgatatcaaattaaattaaagttataagtaactttttatgaaagagaataaaagcttacaacaagaaagtagctagcaaaactaattaaatttggctaataatagtttattattcatatcaatagttatttttcaactcttctttaacttgtataactattgatatttattagtataattattattcaatatttgaattctagttcttaaaaagaaagattacgtttaattccaaaaaataaatttaggatattacttttcttagtacacaaaatagaatcaaaaatataactactatcataggtcggctaaaatgatgttcgtggtcatagttaatggaagtgtttttttttggatatactatactgtgtatttttatgaagaaaaatcaatatataataacgacttaaaagaaaaaaaaacaagatatatttccaaaactaaccatataggatcggattattacttttcaaagtacacaaacaacgaataaaattgacgtcctgcactattgacagaaaacgatgggttccaaaactgtcgctaataaactcttccaattaaccctataaatagcatgcagaatatgagttaaaaatcaccaatcaaacactttcttacatgagcaatattcaagaa

SEQ ID NO: 2417 - DNA, 1296 bp, Arabidopsis thaliana
taaaataaactttggagtttaccaacataactcaggtcttctacagtttcacttgattgttccgtaccttatgaaagaaagcttctcgcacactcaaacaaatgtactcatgatgctattaatttaggcaatgagttgggatatgttatacatttggtagtcgggcttattgaataatcttatattactcatgatgctatgtttatttttcaaggaaccctagtaagtaatcccttagccggtgcaaaaatcattacagttaacaatgtcgaacacgagttatcgccataagaacctttattgcaagaccaaagaacgatagcgagatctattactaacaaaagcgatttgcatatattgaatcatttccatttttttagtggtgcattcggagttgccaatggcaagatcaaatagagaataaaggtgatgagcgtcatgttcatcctcatcgatctgaagttggacggtggaggacggccacaagataagaaaatggtcagaaaattagagttgaaatatttgagcttatagcaaaacaaaattgagagttgatatatcaagactcttgattgttgataccataacgaccttatgaaaaatatgatatcaatttcttttctttacgatacgaatccatgcattaacaaatagattttcatttttcaagaccggtgaacacaaaaggatgaagcattttatttggctttagcgtgagcactggtgaagtgttagcaattcaagcccctataatcaaggtgccataattttaagaaaatgcaacaaaatatctctcacagctcaaaaaaaaaacagtagtttacaaaatactgtatgcggttctcaaaaattgatatataaaaggacaaaaaataatgtgttacacgaatatattttgttttgctctagagcgaattgtactatactaaaaaaaaacacagaagtatgctagaattattaaaaagggtccaatctagtttttgtttgcttcgtacaaggtcccagaatgttttaggaccgagtgaccgaccaagatggattcaaggacagtattacatggctttatgagatataaacatcattacatcaaccaaaagttgagaaataatatagtattatttcaactttgaaattgtatgattcacatttaacacacacaccaaatacttttgttttgttatatacacggagagctcacgtacctctgattcaacaaaatacattacggagcacacacgtctgtgtagctctttctttcaacattttctaccttcttgtcaaagaaagagagacaca

SEQ ID NO: 2418 - DNA, 2000 bp, Arabidopsis thaliana
ttatcctctttgcatataatttttattttctatattaagaattttaatgttgtatgaaatcaaaatctcaatctgttgaattttatttttttgaatgttgatttttaaaaatgtgaactgaacacttgttagttgttactttgaaaatgaatattgtcaccattttgtagaacacaaattatttgctactcttgtgtggataatatacaattttgttaccaaataataataacttagatatttctatcttgtcggagttgattggccagagcccacaggtcaatatctatccatgtcacccaccctaacccatctttgggttcaaaactcttgtaagaacgtcgtaatatctggtcaaccgatgaaaataaaacatttagatatttctatctcactcaattagaagtatatgtcatttcattgaagtcgaacaatgcaaatctactttgtatattgaggatacttctacatacaatatttagaatcaaagttttccatgaagttatataagtatcattttttgggttcaaaactagattctaaactcaaacagtcaattagtaaaagaactcattgtttttgacgtttaagaaaaagaactaggtttcgttgaatataataaaaagggatcccataataaaaataaaattgattgatgatgctttgttttttttatgagaaaaggaaaatcaaatgaaggaaagacgtagagaatgaaacaaagatggttagtggtttgaagtgggtaggtggagccaaaataaaacgtgagagaatgagcccatccgtttagctaaccactgaaccacatgcctcaattggttcttttggtaggtgcgtatgactggacttattatttgttgtaagatcgagggtaaatgaaaaaaaaaaaaaaaactaaaaatcatatgatattcaatgtactttttgtaaaaacaaatatgatgcatattaattattttataagctgaatacaccaatcataaataataaacaaagtaaagattatctattaggtatttacttcttctaatatgttttttttttttaatatataaatggaagctatacatgaaatgacaaaaattcatgacatgtagagtgtaactattaatgtctattgacgtaacaatagtggattgaaaaacaaattacttttgttttagcttgatgtatactacactaatcagctgaaagaaagaaaaaaaaatccctccaattgagatagtaagagtaaaaacttattttacttaatacaaactgaaaattttaccctagatcctcctaacttttctttattctctttccaacataactattctaaaatttagtcaatcacacacatctctactttactgattagatagtatccgactttagtttctgatttctctattaatatcgttagtcattatctccaattctctcaatcattagtcccttttcaacacacaccgctcgtattttgcatcagttacacgttgaaagtattaaatattgtaatattttaataaatagtcatcgtggggatgtagctcaaatggtagagcgctcgcttagcatgcgagaggtacggggatcgataccccgcatctccacttagttactattttaaaacagttttgttatttagtgaaaaagtcaactattgaaagataggtgaaaactccgtgagtctcaagcaagacccacaagttacctgagcttttttcttttcttttcccggcagctacttggatgaaaagaaacagctgccgtttcaaattcactcattttccgacagtgaacagagccatatagacttgagcgaagaatctttttgccttttctcatctattggctaatcagaaaaatttaattccattgacttttattcgattacctcattttctattataatatacacagaggtaccaaatttcaacagtagtaggcagatacctattgtcttagaaaacgttttctctttgttctgtttcttgacacaaaggaagaagaag

SEQ ID NO: 2419 - DNA, 2000 bp, Arabidopsis thaliana
gggtcctgatccacaacaccattgactgatctttaccgatatatatatactttaccgaagatcgaagcacacatataactgtgactgatccatgcaagtcaatttaaatatcgtcatttacatgcttttcttttctttttcataaatcttccctacacttttgttgtatcaagattttggtattcttgtaccttccttatctttaaacatcaaggttttactctctatgttttcttgtgtctccaatgagttaccttttttgtaacagcgattggctatttcccctgtctttatcgtttaagttttaccttttcatttgtagggaaaccaacaagatagaccctagagggtttttaaaagaatgattgaaatctgcacttcaaaatacatatatgactcaacgattattaaaaaaaaaaaattgcatgcttttcagctgatattatatataaattggttggactatatatgaaattttaaaaacagtttgatgcactctttcaaaaataaagttttgccgacatcaactacatgttggaaattttgagaggttaaaattataaactataaactcgacaaattaacattattctccacaaaaagattattctctacaattcttctctacacgcgcagatatagattcattgatattatagtttctcttgacttcatttgaatcattgaatgttgcactttattatcaagcaataatattctatagccttgacattctcattttggtcttggaacgttctgccaccagttgaaaagattagtgtttggtgacatatgacgacaagattggtaagtatataaaccttttgttgaaaaatgaattaaaaaatctgccaattgacttgtttcaccaaattgattttgggcttagtactcttcttttcatggcaacaggataaacactattttttgtgtttgcaatgttttaagacctttgacccaaaccaaccaattggatcgataaaattgggacctagttactattctgatatggatatattgctaaaacatacaatatcgaatctcgcggtgagttgtcatgaattacatgttatctggtcggataatgataaaaaaaaaatgtttttccaaaatatattaatttaattagagcttttaatgttaaacatttactatatagttttgcttcactttgcagaattaaaaaagaaagaaaaaaaattggaaaactttttaatattatttgtagaattaggaaaatttttttaactgtgtcacatccagaaaatgggcctaacaaccctttgaaataaattagaagacaggggctatataatatgggcctcgttcacttttcttccacgccaacattcatcccacaacaacaaaacaatcgtcacttttataattcattccaaaagaattttaatatatattcacacaaacatataacatctaaataaataaatcgaatctctttcttttttaactcatataaaaatcgatctttattttacgtgaagaaattattctctgattttatatgataaaaatagaaaaattagattcaatatctacattacttattctggaatggtcatagtcttaagtcttaaatgcatgtaaataaatatatgaatagcgattgtctaccaaaaaaaaaagaaaaaaaagtaaaacgatacggcagatgcacctaacaacaacgcgtctctctctttctctcttctacttaagaaaattcagaaaagacaactcacaagtcaaaagtcaccgagtcacatctcctaactgaaaaaaactcgccgccggagccaccatgtgcgacggagattgccgtcctctcggtttcctcttaggtcttcctttcgccttcctttctctccttctctccatcatcggtgtcattatctggatcgtcgggtcagtttatctcatctctgatttttttgattttgaatttggaatcatcaatttagcttctggttgaaatttgttttgtttggcagattgttgttatc

SEQ ID NO: 2420 - DNA, 2000 bp, Arabidopsis thaliana
gtacaaccgttggataattggcaataatgaatcatgtggttactgcgaactttacaatttttctatcttgctattctaaatttattttcaagctttccctatgaaaaaaaaaagatacgaattagtaattctaaaaacaaaacgaagtatatgtcaagggaagattttgtaaacctacaaatcagtaactagctttatagaacttataaattgctattgtataccctaattaattgttgtcaaatttgttgggcattaactaattgctgttgtataccctaatttgttgggcattatacttaactaattaataagttgctgaagccgatgtaaaattaacaatctggtgaaatagtgtgatagacatatcacatatacaccagtcttgtctgtttaaaacatcaattatttaaaacaatgttgcaaaacttttattattgttgttatgtgttactcatctatcattttgagaaagagtgtcattttgaccaatttcacacaaattaagaaaatattaaaactacaagtgtttgtctctatttaataagtgattaataacttaaattcaataaaaatagttgaggtaaaggtaaactagaaaattagttttaatttaaaaaatagcattgaaaatgtaaaacaacactatttgcgagaaaacaatttgtggaacgatactatttgtgaaaaaaagaagtactattaagtttaaacactattctttatttttagtttctgtgtttcgttattaatgtaagacaatcccaacatgaagacaatctcaacgcgatgaaaaaaaaaataaacaaaaaaatatttagccttaacatctaagtaccacatggattttttttcaggttttttggtatgcaagatcagttcaatacccgcctataagactccacactctaccctagttttgagaacacatgacatgcaagcgacctaatagttttgacttaaccttgtatcttctataatttgtaaaatggatcagtacataacatccttgcctacatacatctaaccaaaagtttatcctcttattccacaatttcttgctaaccttagatatgtgactgctactctttagtcatcggatttaatatatatggttaatgtacttatgaaaactgaatcctttggttgggcctttgtggtatgtcatccaagaaatctgacaagaccagacttaaacgaacaaattcaaaataacaacgattgtcatttttttattgtatcggaagacgtggaagatggtatttgatgcccggggaggatggtgtttcttaatatacacactctaaaaacatttgccacaaatgagatcgaaatatactcaatctatgcattattttattttatttttattattatgagtatctattgttaatagtatattcgttaattcacgtattgggaaatgtttctttttccagtcaactcttttaagactttcagtactatcgttactcaatattgcctcgaaggacaataagcgggtcctaaaatcgagtctgtcaaagcttacgtggcacttgtttgccacatcaccggtactaatgatctcatctattttgtcattttctcgccgcctaacgtcactccctctaaacagttttacgccacgtgtaaataaaaatcacccatttatttttctttgaattggaggataggtccgtataaaatcttgtttttttcccaaaatacattgaaaaagaaaataccagttttgtggttggtccccattcggttgtgttaaaattttattagttttttaaggcagccatatttgtctaataggacctatgataaacaatataacaataaaatacttcccactttcatatatcttataaattccgtgtctcttatatatataggattaggttttgaaataaacttattgccacaacaagaagagataacaaaaagaaaagaaaaagagaaatcgtaaaaaaaaaaaaaaaaaaaaacttatggaatattcccaatcttcc

SEQ ID NO: 2421 - DNA, 2000 bp, Arabidopsis thaliana
aatcatgaaataaatattgattattaaaagaaaacacataaatattaaacattgaatattaccacatccctattctaaatcaaagaattcaataaattttcaatgattatgagattcttttcaattgtcattactactattttcttactaacaaaacttcaacttttctttttattaaatgttatactttccgatattattatttctctatatactcttatttaaatttgttgttttatgtcaatatatgaagttttgatgattataataataaataccaatttttatttcttttatcggtttatcgtctagttgacaaaaaaaaatataatgccgttataaaataattataactttcatgagtttttatttttgattaacatttaaaaaattaaaggagctagatgtatcaatttgtattatattatgctctgagactaaatattgatcttgataccaagaatctgatctagatccaaaatttatgtcaactgactcactatcatattttcaaaactcaattttaaagttagtaatataatgtacatcttaactattgtttttttgggtctgtttagaatctgggccggtgcccactcaaaacaatcggcccattatacaagttgttaaaataaaattcaatatatcacattaaagaaaaattacaattttttggcttcaagacttttttttttgtgtgtgcaaagacttttttggattcaagctaataaatgttagattacctttttaaccaaagatcaaagtaaaaccaaaatcatagaagaggaagagaactcgtgatcacgtttctttggttaagtaatgttgtatagaagagaagagaagagaagaggaagaagaaaagcccaaatcgaaaattgaaaactagtactccaaactccaaagcatcaatattttatcactcctcttttcttccacgcaaacccaattctcttcgtcttcttcttttgcttttctcccctaaattcgtcgatcaaattcttgtcttttcaacttcttcatcgaattttccattgcccatagcctctgtatttgattcctccttctctaaagcttcggatattaagacaattatatcttcctagctgcttatagaccttcgctttctaattgctgttcctttcgtgggtctctggtaagttttgattttctcatctgctgttatcgagaaaggttgattttttttgattaatcgcactgtgatttaaggttggaggagattatagtgttagcttaagggtttttgaggtttcaatttagaatcgtattgctcctgatcatttccctgttaaaagtagataaaccccttgttctattgggaaggaattcgccgtttttgcttcgtcttcttgtgaaaaatagagttggttttaggtaattgactttgatcaaggtctattggttgtgcaaaggttgcgtgaatcttgtgtcagcctcttgattgagtatagattacttcgtcttcgctttctctgcaccatcaattgtcatcagagtgctaggcatttagtgcattgtccaaagattctgcttgtgcatgaatgctattgttgaaaaagaaaggaagtgtttgaaatcgaatagtcttttgagtgtcaagcaaaggataggtgggtctggtttatatccatcatggtggaaaacagatatagaaacatttctttagcaggttatgccacgagttccgtatccttggtttgtctttctgcgtttaaggatttgatttgccttagtgtctcattggttagtatattcattgtatgtgcttctagcttgaacattttagtggcacttttttgtttgcatacataaattatctctgtcattaggtgatttgcattgtggatgctttatgttattcatgtttgatgcaggatttgtagttgcattctcattgcgcactacactttcttcaaatttccgcgtggtaagcagggaatggaccggctgttttggccaatcgtctgtgtttacaaatg

SEQ ID NO: 2422 - DNA, 1084 bp, Arabidopsis thaliana
cttagtgtatgatgtaaaagtaaaacaatttgtgttgatcattaaagtgtataggaccaatggtcctaacaatgtttggctctgtgctaatatttgtaacaaagcaactcgattgattatgtgaaaatcgttttgtctttttcttttcttaaagatatgtaagaataaatattttaaagcaaatctcgagatttattagaaacaaaaaaggattatttacattaaacagagaaaatctctattgacattggccgtttcgtgatccgttgctggttttatggaaactaaacagaggaatccacaggttttcgaaagtaaaccagtttgattataaatagttcaacttgtcaacaacaccccagtgacgcttcagttacttatttaacgtgattttttcacccgtcggtaaaaaaataaatatcattcttgactttactttatttctatgttagatgacacatatttatttcattactttcttaccaaaaggcaaaacccacaatcgagttaaacttccactgtaatggacctaatggttgcaattgtctatccacacacatctactacgtttctcactagaacaatcacctacaaatttcatggtaaattcttctatacagttaaaagtaaaacactcgaataaatattttccataacacgtgagagtatcttgttggtgttttgtcattatcctcttaacctgacaccaaatttgtagtaagtttattttttacgcaacatattattgactactatattcatacacgatttttttattttatttttcggatcaaatcaaatactcaggcaaaggtcgaaaaacgttaaaagattttttcattttattaaaaaaaccacagaaactcatggttttttttacgagatatatttgtatcttatataataaaatacgttaataatatatcagtagcaagcctttgtacaccagtcccatcgttctctatataaaccattcttctccttcctctcatttttatgtattcttctccttgtccttccttactctctatatttttctcaattctccgatttgatccaacgatttcacagatctctgatctaa

SEQ ID NO: 2423 - DNA, 1730 bp, Arabidopsis thaliana
tacagtggactggctgagaaactttataagtgccaaactggttctgctcttatcgtatcgtatgaatcaattaagttactcaaacctttggctgttaactcgtaaatggctaaatccatataccaaacctgaaatgtaactacctgccgaggtttcttactgtttctatcaaactcatcaagcagtcgtgaagatcttcttccgttgcagaacttgatatttgtagagctgtctgaatattctttttcaggaagctgagaatggagtagtttcagggaagaaactggaaggagaagtggtcgtggatcattgcaacatcatcgaacgctgtttctgggaagaacacctacacattcttagctactcataaacagctgcattttagtattttacttcacttgtaagactaatttattgcaaattcttaatctccaattagcacagctttacttcttttcaacatgtgttataccttagtttttcacatgtatgtcaaccattgttaagattttagaaaagttattggttttgtatgttaaatacatttgtggaagacgagagaagggagatagatagatatgtaaaacattaaattcacaccatacctgtgcaccgaccaactgctaacttctcttgcgttacgtaaaagtaactttatcctctccatttattttgttaatgtataatcactagagaccagtattattaataattttctatcatgttgttgaatagtactagtaattcaaatgtctattaagtcggtccaactacttgataagacctatagactaaaattttcaggtccggtggttagattctgagatatgtttttgttctcattccattttaaattccgactttatgtacttgtatatatttggtgaaaaatttgtatataacttttaaattattcaaccgagcaaaagtatacttttttgtttgtttgccacacattgattgatttattacttttaagtatatcaatttaacagggaaatataactgaatctagtaaatataataactttcttgatttgggtctcaagtctgagaaccaaaaacccaatgatattttgataaaatactattttttacgtgacaacttgcagtaaatcagtatctataaattctagatgttttcctataattttcttgctttttgaacaagctataattaagaaaaatcaggtcaaacattggaaagcataattggcagcgaatcctattacagattttttccattaatcatatcgttaatatctaaaatgaaagtcaattgtagtggtcgttttggaaaatatgaaaggtggcaatttgatatgtttttttttgtagtgaaatttatttccaattacgttaatatttaaataaattccgtgtaaatattgatactcgacacaacacgcaaaaaaaaaaagaaaaaaaaaaaaagagttatatatttgagatttcttgattttaaataaggaattgagttcatgtaccaactaatcaatgaaagacagaaataagaaaaatataaaaatgagaagggtaagcaatcaatatgaagtcgtggatgcttaccccaccattcgtcacaagagattcgtcatttaaagcattctgatcttataacatttatcaaccatatatatacacacaaaatatttgttaacaaaaagatttatatttcttctcttctttgttcataactaagaactcagaaagagaccaacgacactgca

SEQ ID NO: 2424 - DNA, 855 bp, Arabidopsis thaliana
agttttagtaacttcaatattttctatggtttatgtgtttgctgcgaaggactgtagatttttttatgcctttttttttaaccttagacctcaaagttttatttatttacaattaaggatttgcgactttgctgcttggttgctttatatttcatagtgcaattttggtgaccataatttgtatttattgtctgaaaacttctctagattaagagctaatgtaatatccattcaaacatcggatgaaacctctcctaacatgacaaagattaaaaataaattacatgaattgtgagaactcaagcatctataattctattttcgttgagctcatctatacaactctttctgaagtccaacaaattctaaaataacatgaaaaagtatgatccacaaaaaaagaaagataacataatgaaatcaaaatttttatcggacccacccacctaatctcctcccttcatggcttcatctacccgccacgtttattatatggcatagtaagaatctttttttttttaccatcacaatgtcttaatcgtcatagattgctctctacacatttcatagaaatcaatcctgaaatactctcacgcattgcatacaaacttattcacaaaaaggaagcatcaatttataatgaatcattccttcaaatttaaaaccaaattaacagaagaagagaagaagaagacgaaaaagaagaattgacaagtattctaaaaattataataacttttatccaacatcgtaaataatgagacatgtatataacactatattcacttaacttacataggagacacaatatcaacaacttattgttcctttggttcgaacaattttaccaaaaaa

SEQ ID NO: 2425 - DNA, 624 bp, Arabidopsis thaliana
tgacgagacgaagccgaaggttttttgctactgaagaagactgacgacgacgaaacggcaagtgaaaaagaacgtatatatgttggttagaccggtcaaaccgtccggtccggttcggttgttgacgaccttagaaatcaatggctttaagaaaagcccaaaaggcttcgagtagataagaccaacacgtcagctccacgtataacaaccttttcgagtcaactattttcctaattttgctaaaaagtatcttgggttcgtcggaactaattgtaattatgagaagtttagggtaaaattcataatttaggaaaagaaaatgattttaaatccggtaaagccaccgaaaaaagtggacaatcaagaagagtccatatttacgcgggactcgccaaataatgattgaaaggaaaagtcaaatcaaagtcaatcggaaacagacgtcgccaataatatcttcacccgtcaaattaaaattaattatttctcgataagcaacgcgctagagacggatctcacataatcaccagatcaattttctcgagaaaaagaaaatgtgattatccattcgattttttcgcagaagaagacgaaagagagaagaagagaaagagatttgaaatc

SEQ ID NO: 2426 - DNA, 1163 bp, Arabidopsis thaliana
tttaattagagaaagtttcttcttgtggatgttgtcggagtctacactctgtctatttatggtcagcaactggtactaatctattgagaaatctttacgtgtttcgtggttttttttttcttctaaaactttatttttgaagtgacaaaatatatttgacccaaaaaaaataaagttacaaaatatattcacaagttaatttcttaatattgttatacacttatacatataattggtaaacttaaattaacagtttgaaaaatttatggtttgttcaagggatccatccaagccccggtttcatatcgaaaaaatggggttttctattgctagtattttatttgattagtttgatattaatgatagattactgaattcttacataagatctcctaacaaaattgtattttatattatgatatttagttatcaatggttttggagaaacattgattcagcgtatactttttgaattatttgtatattcttaataagagttctgtttttaattaaagtctaaagaagaaaaaaccattataaaaactgataatcctgacctgtgaaatgggctaaattgtacattttttttttgatttaaattcttccaggaagttttatgggaaaataataaagtagaaaatgtgaatatagaaagttgcaaaactgtattattgatatagcgaattttgttattgacttgactatgtaagcgttgataagtcaaagtctacgctgtgggttccatagtgagccaccgtttcctacacgttagaaaaaaataaatgttatgttacacacaccttctattttccagtcactttcttttagcgttttccgtcaatacgttcgttgtctgtatcaagattccaaactggtgagtgtgaaataactcgaaactggcttttaacttaaaatgagttaaccagatagctaacgaggatgttattgccactaaaccaatacattaccgatatggttcaagttccaacttcccggttctacaaaaccggtttgcctttcgccttcgcactcttgacttttttagattttttactccgggacttgagtatcttctagcggcagcagaatcttgtcgcagaagcgattcgtaaacctgtttcaaaagcaattgagaacagctgtgagattagaaaaatcgaaaa

SEQ ID NO: 2427 - DNA, 1163 bp, Arabidopsis thaliana
ttttcgatttttctaatctcacagctgttctcaattgcttttgaaacaggtttacgaatcgcttctgcgacaagattctgctgccgctagaagatactcaagtcccggagtaaaaaatctaaaaaagtcaagagtgcgaaggcgaaaggcaaaccggttttgtagaaccgggaagttggaacttgaaccatatcggtaatgtattggtttagtggcaataacatcctcgttagctatctggttaactcattttaagttaaaagccagtttcgagttatttcacactcaccagtttggaatcttgatacagacaacgaacgtattgacggaaaacgctaaaagaaagtgactggaaaatagaaggtgtgtgtaacataacatttatttttttctaacgtgtaggaaacggtggctcactatggaacccacagcgtagactttgacttatcaacgcttacatagtcaagtcaataacaaaattcgctatatcaataatacagttttgcaactttctatattcacattttctactttattattttcccataaaacttcctggaagaatttaaatcaaaaaaaaaatgtacaatttagcccatttcacaggtcaggattatcagtttttataatggttttttcttctttagactttaattaaaaacagaactcttattaagaatatacaaataattcaaaaagtatacgctgaatcaatgtttctccaaaaccattgataactaaatatcataatataaaatacaattttgttaggagatcttatgtaagaattcagtaatctatcattaatatcaaactaatcaaataaaatactagcaatagaaaaccccattttttcgatatgaaaccggggcttggatggatcccttgaacaaaccataaatttttcaaactgttaatttaagtttaccaattatatgtataagtgtataacaatattaagaaattaacttgtgaatatattttgtaactttattttttttgggtcaaatatattttgtcacttcaaaaataaagttttagaagaaaaaaaaaaccacgaaacacgtaaagatttctcaatagattagtaccagttgctgaccataaatagacagagtgtagactccgacaacatccacaagaagaaactttctctaattaaa

SEQ ID NO: 2428 - DNA, 2000 bp, Arabidopsis thaliana
cttccggcgtgatagtcggtgagatcgagcggcgatagcaaggcgtcgtctctcgttgttgatggatggcaaaactgtaaattgagaaggtgagattgagatagagaaaagagagcgactcgccattttaatattcgttcttttttttttctttcttttctttaaataaacaacactccgtctcttgcgctacgtagataaattaatttttcttcgtcttttttttcgattgataaattaatttttgatttttctcatgaactatattagcagcttattaaatttttattgacaaaatatgtattgaaccttatattttaaataattttgagttttaatgtctttttatgtgatttattgtaaaaaaaaaaaatcaaattccagtaaaaatatgagatttgaatttttatatatgtaactaaataaatctttttaaattttctcaaatcctttaaaattaataaagaggtgtattagatctaagtgtgtcaaaatgggtaacacaactcaactcaactcataatcaaatgagtttagggttaaatgagttatgggttgatccaactcattttgttaaatgggttaagtcaacccataactcatttaatttaatgggttgagttgttaaatgggttaacccatttaagtaataatttaattaattattattataaaataataataaataattatcattattaattcattatcatcaaaacttaatatatttacggattccactttttacgggtttacgtttttggcgggaaaatctcgggtttacgtttttggcgggaaaatcatggatttacgtttttggcgggaaaatcacggatttacgtttttggcggaaaaattacgggtttactttttctcaatttcatcgcttgtatatttaagaaatttggaaaaatattaattttattaaattggtttagatgtgttggttagacttaaattggcattggtttagagattttagttggtttaattcaattttacaaaatttgatgggttaattggataaaccattgaaaccattaaccattacaacccaactcattttactcatcaaaccaattgactcatcaactcatttgactcatcaactcatttgagtcaaaattttcaactcattagggttcatggattgagttgagttgagttgagttgactcattaatttggaccttacaatttgagttttagctagtttttatatgagtttgatgattttaggaaaattgatgtgatttattataaaatattttaaaattctatataagaccatgaatttcgattttgttatttttaactaaagaactttctcaaatccttcaaaattaataagaatcaaatctaccaattattttcaataacaatagattttaagatagaattttaaatctttagttcaataatactagatttcattaaagtttttcaaatccataatcgaacaacatagaatttataaattttacacaaatcacttaaaatattagattgaatacattcttataaaaatcaaatccataaattatttttaataacagtgaatttaaaggtagatttttaaattattattttaataacactagatttcattagaattttcaaaatccataattaaataacatatacttgtaaaatttacgaaagtcactttaaatactagattgaatatacctcttttaaatcaaaaacgatgaatggatggtaaatatacggttcacccatacccattataaaccgtctttttcacaccttccattcaacaagaactaattgttgcgtatttgaccgatcgaagcaagaaggaacgttctgtttattttcttttttgttaaaaaaaaatcagtatttaaatcgtgatttgtagaagaagtattatcataatgcctctacacaaatctgtaagaattgagagagataatttattttaaagaatcccaaagaagcttcaaagactcaaaaaggaaagtaaccaagaaaaagtca

SEQ ID NO: 2429 - DNA, 2000 bp, Arabidopsis thaliana
atttatatagcaaacaacaataagaggcgtgaagaaagggagatgtttgaaggtatttataggaagacgagtcttttctttttagtgtttgtttttctctattttttaataatggatactgactgctgactcatggttcaaatccctttcgtctattttatctggttatacattttctttgaacatccattacattataaaatatgatttgatatttactcggatcatattctatcctcatttgtgtttcaaacttgcaatggccgctttctatcttaattaaacaatgttaaaccactttttaattaacctaacgtgttaagtctctaaaaatgttctaattaacttgtattaaaacgctatgaaatattacttattcgatgtcttcagcgagcatggaacttcgtccatgttttttttttttttttttttaatgttaaacttaaacttcgtccatggttgatagtaaatgttactataacgttccaatattttaacttaatagaatttagtttttcaatgccatcacaagaaaagttacagaaaaattaggcaacgcgtcgctatagtttgtactaaacatcgatgaagtatcatatgaaatgtccatcattaggttttaacttttagcttttagatgttttcttaacaacatcgcctttatgtgaaattcaaatatgatgtcacgatcgactcactagcctaattaagtttgtgcacacaaaacacgtgtgtttcacacaaaaaataatatcaattcctagtaggctactacgcgttgacagaatatgcttcgttcagttgtacgtgtttcacatgctacaccagattattggagaatgattagcaaaaatctcatgtactactgattagcattacaaattcctaaaaaccacgaaaaaaagaagaaaaaaatgccatgaatctatctaaccagcagaaattaggaatcgtgttcttttcacacataagaaatacgatattgctagtgataatgttctgatttttttaaataaaatagtatacttattaattgatagttgttgagttgtctgtggacctctcccaaacatcagcacttccccatcaaaagatgtcaccaatatgttgcgttattggttggacattttctacaacttcttcatcttctatcgtgaaagattccaacatgatactcttattattttctgctttcattattcatttattaaaatttcaattatcatatacttatttgaataaccattggagccagagaagaatgacaattaatatttctagtccaaatcatcacatttgttctcttcatctggagtctagcaacaacaactttcatcatcgtatgtaactagataagactcacctaaataagttgtaaaaaatatataaaatttttaatagaatattttaagttctaataataatttatattttttttatctaaatattttaaaaccaattctaattttacaaattggattctgcaatacaatctaactatttatttcatgtaactttgagtattagtaacttgtcttaaacatatttgagtagtgtagtacaaaacctgagacaacatatttgaggcaaattttccttgaattgcaaagaaattacgtcgaaatttttctgaaattcaggacgaaattcctttccccctatgcgtggtcagagaagtagtcacttgttttccagagattcttagaaaattcttttctccattcaattattggggcttatgtcgtgttcttcctttgcaacttccgtgtttaggcaccgaagtttccaggaaatataccaaaaagtttcttttgtctgaatattaattattaacgacgataggatgtaggtaatttcaattccaaccaaaaaaaaaaaaaagacatacagattttgctgtcccagaacaagttccttcattgcgtcttccagattcttcttttctttcaaacaagaatcgatcaaactccttttgtttctaagaaagaactcgagatcgg

SEQ ID NO: 2430 - DNA, 2000 bp, Arabidopsis thaliana
gaagaatctggaagacgcaatgaaggaacttgttctgggacagcaaaatctgtatgtcttttttttttttttggttggaattgaaattacctacatcctatcgtcgttaataattaatattcagacaaaagaaactttttggtatatttcctggaaacttcggtgcctaaacacggaagttgcaaaggaagaacacgacataagccccaataattgaatggagaaaagaattttctaagaatctctggaaaacaagtgactacttctctgaccacgcatagggggaaaggaatttcgtcctgaatttcagaaaaatttcgacgtaatttctttgcaattcaaggaaaatttgcctcaaatatgttgtctcaggttttgtactacactactcaaatatgtttaagacaagttactaatactcaaagttacatgaaataaatagttagattgtattgcagaatccaatttgtaaaattagaattggttttaaaatatttagataaaaaaaatataaattattattagaacttaaaatattctattaaaaattttatatattttttacaacttatttaggtgagtcttatctagttacatacgatgatgaaagttgttgttgctagactccagatgaagagaacaaatgtgatgatttggactagaaatattaattgtcattcttctctggctccaatggttattcaaataagtatatgataattgaaattttaataaatgaataatgaaagcagaaaataataagagtatcatgttggaatctttcacgatagaagatgaagaagttgtagaaaatgtccaaccaataacgcaacatattggtgacatcttttgatggggaagtgctgatgtttgggagaggtccacagacaactcaacaactatcaattaataagtatactattttatttaaaaaaatcagaacattatcactagcaatatcgtatttcttatgtgtgaaaagaacacgattcctaatttctgctggttagatagattcatggcatttttttcttctttttttcgtggtttttaggaatttgtaatgctaatcagtagtacatgagatttttgctaatcattctccaataatctggtgtagcatgtgaaacacgtacaactgaacgaagcatattctgtcaacgcgtagtagcctactaggaattgatattattttttgtgtgaaacacacgtgttttgtgtgcacaaacttaattaggctagtgagtcgatcgtgacatcatatttgaatttcacataaaggcgatgttgttaagaaaacatctaaaagctaaaagttaaaacctaatgatggacatttcatatgatacttcatcgatgtttagtacaaactatagcgacgcgttgcctaatttttctgtaacttttcttgtgatggcattgaaaaactaaattctattaagttaaaatattggaacgttatagtaacatttactatcaaccatggacgaagtttaagtttaacattaaaaaaaaaaaaaaaaaaaacatggacgaagttccatgctcgctgaagacatcgaataagtaatatttcatagcgttttaatacaagttaattagaacatttttagagacttaacacgttaggttaattaaaaagtggtttaacattgtttaattaagatagaaagcggccattgcaagtttgaaacacaaatgaggatagaatatgatccgagtaaatatcaaatcatattttataatgtaatggatgttcaaagaaaatgtataaccagataaaatagacgaaagggatttgaaccatgagtcagcagtcagtatccattattaaaaaatagagaaaaacaaacactaaaaagaaaagactcgtcttcctataaataccttcaaacatctccctttcttcacgcctcttattgttgtttgctatataaatcctccaatttctcaatattctaaacaaattatatattttcttacttacttgttctcttgta

SEQ ID NO: 2431 - DNA, 1037 bp, Arabidopsis thaliana
gttcggaggaagcagtcgattgtttattaaatttgacacttcatgcaaatatttttcattgtattttgcaagtagtttttgggattcgattagcttataacatttggacctcctatttgttgatttaattatttattactactttttttattttattacaacttagtttgtaatagtaaaatttattctactttgtgcccaaaactgtcaattgttgttcatttaaatttctggaattagatttagatacgctaaattaaatcacattttgcgtttatattcccacctaatttgaaaccagcaattattcttcttcataagaaaactttcatgtgctctctcgaaaataaagttttactctaataacaacacgcactttggacgagataaagcgattcaagtaaaattattatggttcaaactattatctaagatccgtttgtgtaaaacataacttctaataacatatatattctgatctacttttgttagtttttattagttaatataagcgttaattattgttctctcttttgcttaacatgtaaatattcccatggagaaagaagtacactttttgctttgagaaagaataaaaaaactctttattattactaaatcaagaaaaatataaaaccatgctgcatttatcatcattttacatattctatatataaggttctctaattcgtatacttttgtaaatagagaacaacgaattaaaagaccaaatcgatagcatcttacctttttgttgatatttattaagagaaaaaatcaacacattgttattcttcaagagaataaatttctggagacttagcagttaatgcaatctgacctcacgcgttttttttttttgacctcacgcggttttactaaaccgaccttcgtttacttcccttacctctctatatatatatctctatcttcatttgcatatttcaattcatttcataatcatacacctctctacatttgttactactttcttctaacttgttttcaaagagaaatcacaatctatctgttccaag

SEQ ID NO: 2432 - DNA, 2000 bp, Arabidopsis thaliana
agtgagaagatccaatgtttgttaaattactgtacacatcatatttttaaaaagtttttagttttcttctatactatttcttatatacaattaatctaatgaggttataaaataaaaaataaaaaaaatctttatatttagaaaatttagaataattagttttttgaaaggtgtgtttcacatttgtgataaaacttaatatgtcatatgtaaaccataaaacatatttagtttgcatgttataatgtatacctaaagttacttttaaagaagaaagtgatcaataacacatctaaatagtgatttatgcctaacatgtaattgaaatcatggattaacaagaaataatcatggattaacatgatttcttactaaaaataataattatgcattacctcagtaaaaatagcatattttactcaattaaaaaaaaagtgaaaacatctaatacaaaaatgacattgaattgcattagatacatatgttatatttaatgattcataattttttgtaaggagttgaccaaaaaagtatgtagaatgaataaaagggcagattagtcatttgggaagaacagaagaagaacaaaaagagaggcggtggctgaacggctggctggtcgaaaaaagcgagtaagaaggcccacaccaccaatggagccaccgaccgaccaaaccgtcctcaccatgaaatctaatattatttccttcttttagatttgacccctcagcttttatttcctatttaatttcccctaatatgaatagagacgctttcactttatttatttcatttgttatggtatcaaaatccacatcacgttgattattttttctatttaaagatttgtttcatttccaagttgtgcaattgaaaatgtatcgtcaccgtcctgaaatcgtcactacaactttttcaataagactacaaaatgacaagtttagttatctacacagtcaatatcacaaaatgtttggttcgacttttatgttcggtggctataaatgggttttacaaagttacatgaacaataataattatggtttacatgttaaatgtatgactttgtttatatatgagcttaaggaagtatttaaaattcaaaagtggtcaagttagccaaattggcggctattgaaacgtccacattgggtcaaagttcaaagaaacgcagccaatgctcttccggacttttcatcgtactttttttgttattaagaagaaaaactaagaaagtcacaagagagaaattcaaacaaaatttttatattagaagtcccaaaacataattcaaattaactaaactacgtcgtactatatgaaattcttattaaaatatctttttgaataatacttctgttgaataatatgtagaagaaaaagagaataaaaagaaccggttcaatctttgtcaaaaaaaataaaaagatttaagattaagccaactcaacctcaactatttttcaaagtgggcgtttttcaaattttctcaaacatagatctttttccaaatgaatacaaaaatataagggtcgacttgctattataaaaagttcctaaattctctcccgtgctcattttgaaaacctccctctttcgctgcaagcagagaaaaagacgacggagaaattttaaatctgaggttcttttagtcctcgcgaagccagatgctactctctattgcacgtctgtgacagaagagctcgattagggaactgaagacaaagacacggagaaattttgaactcgagaggtttgattttgaacctttgaatctctgggtttctgatttcttcgagatttaactaggtagttgaattgaatcctgataccaccttgaagcgtttttgttgtgctttctcagattatccatgatcatgtgatgcactaatttcgtagtattcaattgctgggattctgaaattagcaaaccttaaaatggttgatttgtggaaatttgtctaaccggttaatcggttaacagagttggaactagtgtt

SEQ ID NO: 2433 - DNA, 1319 bp, Arabidopsis thaliana
tgagtggtgaggctcatgctcatgcattcgtaacgttgttatattatttaattaaatggaaaatgataaattaattattgcaataaaatgatacattagcaattgtgtatgtcgttatttttattttgagtcgcattgtatgctgattccatatgttcggctttggtcggtttcaagtgtggttaataaaatggttattttacttttgccaacagttattgagtggttgtgtttatgttttatatacatgttcactcatctttccatatgatcttacaacacttgctaaaatgaattcggttaggtgaattttatgagtagatacactatgtaaataattagtaaagtaatatgatatttatttatcttttggaaacttttaaaacaccaaacttaatattacatgcattgatagtgatcactgtaaaattttgtactaatctaagttcaaaaagtattacatgagtatgtcttatcccaaatttagtctcaacaattgcaaacttttgagacatatatacagcaaactcttatctcacataaaaaaactttaaagttatgagtaatctaagttatagacttgtagtgctactctagctaaattaaattcattaattctggagcataaagaaatctgaaaaataaccatcttctcgatcatgtcctttgcttagcataatatttcttgttcggtttagcgatctcctaaaatgcaacgtggtcactttgccacatcactttgaagatgaacaatctacaagctgacaaacgtatctaatgtgtttgtccgtatgttaagtttatttctgtaattttgaacacatgtgagaattttcaaactgatttaattccgattccaagctatacgtaagaaatttcaactaacgtggattacatacttttctttgagtccgaatacaaagacttcacattctattttgttttcttctttcgaaaccactaagggctactaacctctcgaatcgacaaacgtatccaatgtgtctgtcgttatgctacgtttatatctgtaattctgaacatatgtgagaagagaaattatcaacggatgcatgtgattccaatcccaagttatacgttaagggattttaagtaacgtagaaatcacttcatgatttgagtggcccttagctgcttgaccatacttttgttctagcccgaatacaaaagacttcacgtatagctttaacattttctgagtcaaattgtgcaaaaccacatatctgtatttatacccttcttctctctcacatttcttaatccaaaatcattcttctaaaagatatttcaagacaacc

SEQ ID NO: 2434 - DNA, 2000 bp, Arabidopsis thaliana
ataattactttgcttaccattttctattttcatatcaacatcttactcatgtttgtcctccactttcctccactcaactcaagttccctttgagttacgttcgtacatctgttttttttttttcttactttggttaattaacgttacaaacccatatagcagtaaaactttgcggtaaatattaaaattatatacatattattttatattgccatcttttttagacagtaaagttagtaagacgtttaaactcatgaactgaattgatctaatatttatttttatttttatttttttgagcaaaagttggggtaaagttatttggtcttaattcttcattaaaaatcttaccagaatcaagtaatacttctgaactacctgattgctgggaagaaaactacttgacttacgaaatctatttgctgaatgatatgttcaccaaaagattagtcaaggtcctaatacttgtaatcaacttaaaacaacacagtgagttttaaaaccagtgtttataatggagattcgttaactaattagttaaaaaatataaagaagtcaggattccaaacgctactagaatattattcgcaattgatgattttattatcattaatattatcgaattcaaaccagcatataaaacagactccaaaatagtctgaacttttttataaaaaataaaatttttttaataaaaacaagtagtctctagaaaaatacaaaagtatatagtctaatgtctacattcctctgcgtatatatgtgaaaatataatctaatctaaagtcatctcaatcaagatcggtcttgaagactcaatggcaaaataaggcaccggcgaatcttcaaaacatccgaaaactaaaactaatgaagcgatctcaagaactatatcactatatgaatataacagttggacccgccacaaatgacaaatatcatcaaagtttaaattcagtttatatttgagaaagcctatttatactagttaaatgatgttgtgacatgttttagttctcggacctaaaaagtatctgaatttagtactccactaacaaaaagctccaggaatatgatatcattgccttgttggttacttgattcatacaattaaaaacgcaacgaagaatgtcgacatgtcgttattgtttgttgccatttttttgggttaaatggttgatcattcatgttattagtttctcaattgctcaaattttatattctcgtgaaaggcatggaccaaaactttttgcccttacttcttactgataggttaataaagcacattcaaactatgaatataaccgataagatgaaagaaaaatacaacctataaaacatttaaactagcgcgtaattattttcaaatgcattacacgtccttgatcaaaaagtaaaaagttattcaaatttagaatttaatttaggaagaaaaaaaagaagaaaaatagaagatgacaaagtttcgaccgcgtcaatgttcttcccgacgacacgcttcgaaagtcttcttcgttctcattttttccatacgtaaataaatacatttatttcaatttacatatatagtttctaagtaaaatcattttcgcgaaatcaatggtttttttttaaaaaatttatcgttgaaaaatcaattagaactaagaataaaacaaaaggaaaataactttataccaaaaaatgaagaatcatgggccatgacacatcaccataaatgaccaaacccgattaaggggtttgctatattcaaacaaagcgaacctaatcttgttgaaattaatgcctccaatcttcaaattatacaaacacttttaaagatgataaaatcacatatatttctagaaagaagacacactataaataaaaacatccttgctggcaaaaatccatcattcaattttggtcggtcaaatagatcgtcacaaaatgttataaagcattatcacatctttaaattcattcacatttcgatatctttacacattcacatggcgcca

SEQ ID NO: 2435 - DNA, 892 bp, Arabidopsis thaliana
gtctggaacatttcttcccggcgttatcgactgcgctctgtgcttcccaagatctctgagaatatcttcattcagttcgttgtgctacctttttgttttgtttttgtttttgtgatttctatattctcatactatatgtttcttcttagattgtacttcttgaaatttgttttgtataggctatatatattatacatatatgtatgcatgttcgacaatctgcaatgttgctattgctggtactgacactaattcttgcaaaccaatatttggacgatacttgttcttggcaatttactaatttctttggtctgttgatgagactctagttgcggattgcagtgaggtataagcatagtccacagccggttaatattaaatggagatgaatatgtaattaacacggtttcgtctgaccgattcaccagagtctccggttagttcattaagggtttgctcaaacgctttctcctctgcttccctaatttcggaaacattcgcctgattttctgagattttggaatttcttcgaattgattgccatgctgagctcaagatttcgactgctgaaatcgaggcgacttgcggagccacctccggctgatgtcgcggttatgtgtatttgcaggaaatgaaagtgatctccttattgcggcaaatcagccacttcctgtcgactaaaactgtggtgcagcatgtaagaacaaatgcaagttcggacaaacgtgttgtcttggtcagtggttttacttggcttagtcttcgattctctacgcgtttcagcgtcaagttttctagatctctaaagctttcgtgctcgccgatataaatctctaatatcggtcccgtaagatcgaattagattcgcgtcgttttttaaggaaccaaaata

SEQ ID NO: 2436 - DNA, 1183 bp, Arabidopsis thaliana
acataaaccacctctctcttcttcttcttcttcctttcgttggtgtgttttattttatttttaattagtatttccaatcacatttcttattattatattttattgcaatttgtaagcctttgaggcattatctcctagagagttagaataaacttcgtttagaaattgtcatccttttctcaccaaatgattgacgagtgaaaattgatctcatcgtaaagtatttttgcggtcaagttcaaacaaattgatcccttctctcgcaccatattcttgttttattttatttaaacgatcgatatatttccaaaccattcctccaaaactatcacacattcacacctaccaatttcaactttaaatacaaaatatagtcttgttgtaaatataagatacactttagaagtgtacacgtgaaattcaggtatatatattacaatagtaagcaacctctaagtacaattaaatcaagaaaaaaatagatttgaattaataggagcggacatgggatgcatgtagaattgtagattatcatttattatggtgactagaccattgaactttcctataactttgaaaatattcttatttagtcatttaatttagattacaccaaaaccccaaatatgccaaattttctacaaataccccaaaaaagacaatttataaaattattatccaaccacatgtaataatctttgatgacttttaagttttaaattttaatagtagatttagataatataggaaccaattattcaaaggtcaaagttcaaactagcttatccaaattcattttcgctgataaaaatacgttgaaactatcaaataacaaaataccattacaccaacatcaccaactttttaaaaccccacaagttgattatttgaatttgcttttaggtcctcaagttcaagattgtttcaatttgcacaatctgcataaatctttctgaaatataacttttttgccctctaaaactcaagggtttgatttttcttcttcaactacgttaagatttctcctacacttttctttttcaccgtattctcttttagtcctcgattctctacgcgtttcagcgtcaagtcttctagatctctaaagccttcgtgctcgccaatataaatctctgagatcggtcccgtaaaatcggattcgcgtcgtttttgagtaaaaaaa

SEQ ID NO: 2437 - DNA, 655 bp, Arabidopsis thaliana
taacgtctggcgaagcgagaacagtgaagaaaatgctctgctccatgtatagacacactcaacttgcgccacgttgtcatcatctcctccattagaatcgaatactataaaccggcttggtccaggagaaatgttagaactgaaatccggtataattgcaggggtaatttcgagatcatcaaatgtctgacctgacacgcctacgtggattctcttttctcttcctttttccagaaacgagggagagagagacgaagcatcaaacaaggcaaaaacaaaaaaaaaccaggagagaatattccgagggaaaacgcgagaaaatttcttacgttctgcgagaatctccagctttcctggggaaatattggaaggcaaaagccgaagggtttaaggtctctgtaatcgtcggagaaatttgaaatatcgtccgtaaaacgtgaatgtagtcttaatcttccgcatttataacgtcgatcagagattttgaagctagtagagagagagaagcgttttgtgtttgatttatggtgtttggatccatggtgtggaaacaccagctgattgggttctcagggattttttctaatgtttctcccgttggaaatctttattcgggatcatttctaggaaaatcagaccagatttggccgtgata

SEQ ID NO: 2438 - DNA, 2000 bp, Arabidopsis thaliana
ctgtttataaaacttaatccaacatctttaattagtattcttaaatgtcaaagttcaaacaattctcattgcagatattacttcacggcacattgaaggaaagagactggacaaaacggtttggaacttgctaaatttctacgcatgcgctaagtaccatattaaggtacattagttctagtttttcaaataaaatataatagattttgtgttcttgtaattgaaaattttcaacctcgtattgtttaaatagtgctcgagagggtacatacagagacggatgagaaaaagaatggaaactttagttaaggtatttttatcatatattacgtacacacacgaatctacaacaatagttgacatttcataaacaaaataacgtatgtttgtaaatttacattatatacgtagctgctaaataacacaagcctagaagaagaagctgctcaaaatggtatcctttttttttgttacctttaaccttacttaggtttgtatatataaaaaagttatattatcattttttcttttccattctctaatttctatatagaaaacggaagatgcaaatacgtaaaggagtttgtgaaggtaccaaaaggtaaattgatgatgaaacaaagatgcaaggagatgacaaggagagtgaagataagcaagttccggatcaaaatcaacggttgtgctcggtttcgattcaatcagcggtggatatctctccccaaattctcttcgaaaccatcagataaatcatacacaaaattggactaagtaatcacttaacttggaaagtctcaagaaagaggctcggtgttgttgttttttttctttgtcaacatgctttaaaattgaattcggggagcaatattatacgttaatgaatatcttgacaacaaaaaaaaacgttatcagataaacttatggatataatttggtaaaccaaaaataaacctaatcaaaagttggcattgaatgcagcatgttacgtaagagctttgtacaagtaccattcactctttttacttttcaatgtatacaatcatcatgtgataaaaaaaaaaatgtaaccaatcaacacactgagatacggccaaaaaatggtaatacataaatgtttgtaggttttgtaatttaaatactttagttaagttatgattttattatttttgcttatcacttatacgaaatcatcaatctattggtatctcttaatcccgctttttaatttccaccgcacacgcaaatcagcaaatggttccagccacgtgcatgtgaccacatattgtggtcacagtactcgtcctttttttttcttttgtaatcaataaatttcaatcctaaaacttcacacattgagcacgtcggcaacgttagctcctaaatcataacgagcaaaaaagttcaaattagggtatatgatcaattgatcatcactacatgtctacataattaatatgtattcaaccggtcggtttgttgatactcatagttaagtatatatgtgctaattagaattaggatgaatcagttcttgcaaacaactacggtttcatataatatgggagtgttatgtacaaaatgaaagaggatggatcattctgagatgttatgggctcccagtcaatcatgttttgctcgcatatgctatcttttgagtctcttcctaaactcatagaataagcacgttggttttttccaccgtcctcctcgtgaacaaaagtacaattacattttagcaaattgaaaataaccacgtggatggaccatattatatgtgatcatattgcttgtcgtcttcgttttcttttaaatgtttacaccactacttcctgacacgtgtccctattcacatcatccttgttatatcgttttacttataaaggatcacgaacaccaaaacatcaatgtgtacgtcttttgcataagaagaaacagagagcattatcaattattaacaattacacaagacagcgagattgtaaaagagtaagagagagaga

SEQ ID NO: 2439 - DNA, 2000 bp, Arabidopsis thaliana
tgagatctttcatcggtaattccatgggaggtcttagaggtggtcagagtgccgcttcttgggtcgtcgccggaactattgcttactttctctggattaagccagaacaagatcttaaaaaggaacaagaggtaccaattttgatttttttgcacatccaaaaaagtttgtgtttttattgaatcctctagtctcatttccacagttatctctggtttgatttaggctagggcagctcttgcaatggctgatactaatcaatacgttgagaagaggaaaccaatcgctgaccctcaggtaaatttccaacatttattagtagtttagtattcatttgtggattcttcgtttagagtatcaatggttttttcttatgctatttgtaggttactggtttgatatatggaaacaagaacggaactgataagtcagaagattgaattttctgttaagtttgaacatttggttgtaagttagcttctacagttttgttccttatagctaatgatcatgtatagacactatagttgtaacttacaacgaataaaagatggaaactttttttgttaccaaaccatctctgaaggattttatgtgcattgtgagattgagtatggatctgaaacttcgttttgactccaaactttctatcatttccttttactctgttcaatttggcaccaattggtttcatggttagtaactttttttttgaagtttgccagtttggaacaccgatgctgtaaacttatatacgtcggattcgaaatttttttaccctttaaattggtgagatgcatcgacttgcatcatttcaggtccttgcaattattctgtggttggtttatgtttgtgctctgccacaaggatgggtgattttctcgtgtcatattagaaaagcatgtctgtcttgttctttagttcgatcgtgaatggaaagcttacttccccgggatataacttagttttatatcatgtgatggcgattgacaatggacctctgttttttgttgtggattatagtattgaagttattgcctcgactcattattggagctatatgctttagtgtccttatcttggatgttctatgagttggtcagatggatttggtttgttctgctttgcgtccttagattcatcagtttggtgtgcttgttgatgacttgatgtagtcttctaaccgaatttgtatccgtcggaaccatatgtaatgcgttgcaagttctttggtaaacctttcatgactttgctatccaaaagccatgttcatggatcgctttaatagttggcccattattttatctaactgtagtttggttatgatataggttaatctagttatacagttttcatatcgaaacgatgaaactaaatcttccgtatagtaggatgatgagaaaatcgtggtgccggtaagagtttccaacagcatcataccgcaaaccaaatgaatctctttccttctaggaacaacgccaacttagaagtttgaaaattgtagagaagattatttagattgacgagaaatagtccatgaccatctttaagttgtttatcacgtcgagaatgggtatgggttgagtacccggaaggaaaaacggtagcaacacgtattggctgagacaatgtgtctctttcacatgagatccaagagaccaagaccatctttatgtccatgagagagctaacgtagcttaagggcatttagcatgattagtattacttagttcacttttgtattcagcttaagactattactgaacaaatttactgacctggtcaactttctagaagacgtaccaaaatctcctctaatcccacatattatcattttgacggtaggaccaatgagaaacgtcacaaaaagtcaacacatacgacgcgtttccattgactaaataagtcttcgccgtctcctttggttcatcatcgtcctctctgtttaaatcaggagaaagctcacgagaatccctcttcagatcagaacaccacaaaac

SEQ ID NO: 2440 - DNA, 1785 bp, Arabidopsis thaliana
accactcacaaaatgtttctcttgattctgttttagttactctccaatgtgattcatttgacgcattgtgataattgacatgtttttgttttttctccttttctccattgatatgatccaatctaagatcaataaatagatgtcaagtcgaagggattttggccatcttgcaacattaacaacccacgttatgtatattctcaccttgaaaaacagaattttgcgaagaattatacgccaaatttgtaaaaatatttggtcaagaaaactctcgtacgtgtcatttcatgacatatattgtagcacaagttgtggtgacctactgattgtctgatcgatagcatattagaaaagaaataaaatgaaccttaaaagtcaaatccttaacaactactagcaattaacaaacatgtttgaatagaagtttcaagaattcacattgaaaactttactctctcttttcaaacatgtttcatcaaacggaaatgtaatatttagtccactaaatctctaattaaagtcagtaattgatagttacaaaattaatatgcttcttccatcggtatgaattaattatgatgcccaacaggcaacaactagctaccaatttgatttctaccggctttgatcaacctaaaccggaaataaatttctcggtaatgtgaacacagccgcaacattagctgaaaccaatataattacgacacgtgtatggcgggaatcagacgccgcaactttaattttttaatcggaggtaacccctcgccattgggaaagacaaaaggagatttgcatggtagcgatcttgaccgtcgatgttctatcttagagatctaatggttaggaatttatggcggtaccacccggtcaaagtaatgcgtaccgtcgatatttgacacgtgtcggtaatttagctccggtttgacagatagacgatacgagagattacctggaaacgccggtggccaaccaaataccgaacgagacaagcttctctctctctttctctatctatctttctctctcaaagaaagcttttggaaattgtctttcgtcaaattctgttcttcttcttcattaaactcataactttttctgggtttttcgagaatttcttcgaaaggatcttacggtaagagaaaaggaaaattaagagggaataagaagattcatcatcattgtcatctgtggggaatctcagagcttttttttctgtagttttgttatctttctgaattctctacctgcttcaagatttcatttttattcatcgatctttggggtttagtttcaaagctgaattctttgaggtttctgaaatttgcgagctgggtttttgttgaaataggcttctgagttttggttatatttgtggataatcgattacttgatctgacctgagaaaaagtagaaacctttgagtagagctggttctattacaaagttgtgtttgggagcttgctacaagaccattggatttcttcactttcttcatttgttgagtctgctacaagatcaaggatctgttgattttgggtatttgatcaaaatctgaaattgatcttgtggaagtaaggttgctgtagttgtcaaggtctttggtgaagtttgtttctcacaaagtttgatccttgaagttggtctctattgatcttagatctagtgtgaataaaggaagtccttggaaagcagcagacttgaaaacgctatcacaagaggaattgcttcctgaagagactgtctggattgctgatagatttatatgattcagagaagaactcaccg

SEQ ID NO: 2441 - DNA, 2000 bp, Arabidopsis thaliana
aatatgttacataaatagtcttatttatgaaaagattaaatttattatcaagagatttaatgtacacaaaccatagttatatacaataaaaaacatttccgaactttattagtatgtgggaaaaaaataaacttatgagttgcgaaatatctaacacaactcaaggataaacattgtaatttctttcatatagcatcatcactagttcaagtgtaaatcgatctaattttgcatagaactgaaaggagtgaacaatgtactaggtaaagaagaacaatgtttttgtttgcatgtgtattaagctctaatttaattcaaagtgtgatatactgatatgattaggctagttcctcatctgggtagacataattataagaattttcgaaacctcatcttaccaaaaacatatataatctctaccatttgtttctctcaatatgccctaccattaatggaccctactttgtacttatgcaataattcttcctgtttttacaatagccattaggtaggtttctttagaaattcggatgacttgtgtatccatcaatttattcgccgttgataacaggttcatgcacaaatttcttaagattgtttcttcttgccttaactttatttttttatcaaaaaaaattagatctagctcacaaatcaaatttgtcacaagatacgaagttatttgtttcaaatttagtcctcgttagtcatttaatgtggttttgttattttgaatcgtttggttagaggaaaataaaatgttatttcaaatcaaatccaaatttggacacattggcaacaaaatgtgttaactttcacttgatgatggtatcaagtcattccaaccattggtttaaaaatgatgacaaatttagtaagcaaatgtgtttcttcttcataaaaaaatacaacaagaagtgaggaagaaacaatgtggtcgactatgattaatgtgatctattgggaacaatgtgattaggcgatgatgaataggtcgtattaaatcgtttactaaaatgatagatcaataacattagcacaaaccaatatatatatatatactaatgcatgatcttctaaaatatttttaaaatccatctaactagttccgaattcgaataacagcaataaacactgattatttatcacaaaggtgtaattttaatcagaaaaatatacaacccttttcaccatatactaaactactgaaaatcaaaggcatgaaagaaaactatcccccaatgtactttagaatataacggtagtccaaatcttcgccacaaaacacaaaaccacatgaactagtcatataataatggataaatgatttaaactatttcactaataatgtgcatcaatccctaaaagtatgccaccagtattcttttatttctcccacaataatatcaataaaaatgattcaaagacaaagagacaacagagacgaaattattcttttgtagatcttattatatataaatgattaactaaaaaccatatacttgtaacaataattattatatcagtactaaaatccaatagtatcaacattgcaaagaaactgttgtgtaaaagataataataatataaagagaaagcaaagaaatcaatctatttcaaaaatctaatcccatctaatgtctctctctccacgcacaaaaggtctaaaagccacaccacacacatcagtcaccagacgtagcagagagcctcactgttgcagagagcactcagtactgttctgtttctctgatacctctctctctcctctctcttttaacattgtccaaattaaaaatctaaactttttttctagttttttttttttctttaatagaaaagttttttttctccacggcttaaagactcactcatcactgtgctactactctctcttcttttggctgagagggtaaaagtcatgaagaaactcctctgagttttttttctttctttcttataataaagctcttatctttatctctgtttctctctcttta

SEQ ID NO: 2442 - DNA, 715 bp, Arabidopsis thaliana
ttttatggtatgaatacggtgaaattcaaagaaactatgaagatatgcacagttctctggaaatctcagatttagaaccctaaccggaaacgaagccggctcgagatttcgtgggtaacttggttcgacggtccaaaccggattttagtaatttcgctttttctgaaccaataataatgggctggtccagagtctaaaatttccggattactcgacctgacttctaaactaaaccaatgttcaatggacttcacctagtactgtttagtatttacatatatatatttttgttctaccacagttatgtttaacatggcaaattacatgaacacattattattgatccttttagaaaatgtgtaatagtcacaggaacacattattacgcattctactcgaaagattctataaagattttttttttattgtcggcagtagatctataaagttaatataagccatgattgcttccacattttagactaaaatacacagaaaaaaatgagatcttaacccatgtttcacaaatttcctgtcactctttgttttttgtctcacaaaagtattttgtgttataacaaaatcaacttgtttgtcactgatatgagatttgacttaggttgttttgttgtcattattttgaaccgtacaaaaaactgtaaactatttataagttggtccagactcacagtatctcacaagtcacaaccccacc

SEQ ID NO: 2443 - DNA, 2000 bp, Arabidopsis thaliana
ggatataatcattatatttattttcggtcagatcagaatcaaattatttataatgtaataaaaataaaaataattgtgaaataacatccttcttacatgtgaatactcctgtgaaaatattcctaaatatatccctcactattctaaaaacactaatcaacaaaacacaatcaattgatgactacaagtctaaaatagcatcaattacctgtcaatagtgctgtccatatgttataaaaatatttttgttcttcaaaattatatacacacttgatttgaaatatataatttaaatgaacaaatggcgtagaagcatgtgaaaattgattggaaatgatttaagatgtccctcgtgacaagtatagcaatagaatgtcccactaacaccattgattcatccacgggagccccacgaaaacacacctaaaatgataatgtggatgacttgagagatacttttttgcttgcaatagttattaccagaattaatatgacatcaaattgtggcaataatcagcactatataaagtatatatcaaaataagttcttattttccttcttatcatgatctctatcatttggtaggtggttaacagctcgattgtaaacgttacatgtcaaataagctgcatattcccaagaagggccatttttttttccagtcttttaaatatgagaaataatgcatttttgaatattttctctaaattgtttctagattactatttttgttatattatatgttgttttctgattggttacaacttataaatatttgccatttttcatttcacaaaaccatcacaaacagaagagacacaagtacacgtgctttgtgggaatttttttattccttactcttcaagcaaaatcacatttgactcttacatcttcttgagttttcgtacgttatacactcatttggttcatgatcaacaccagtcatgtcttagtcattctgttgaaaaatgtttcgaacacatacccgctcaaaaaaattctatacacagtatgtagaatatcagtcataaattcattacgaaacacttcaggaaaaaaaatgaatttgatcaaaaccaattaaaaagccaaaaaaaagaatactccaatttccaaatgttttaccaaatgaactacttcttgtagtactatgaactagtacaacgactgcttcaacagttttattttcattcttcgccttctaggaatatcgctttttgtttctcttcatctttttataaaatttattaagaatacatcaacaatttctttgtaatctttgccttagagactacaattaattgttactttgtcgttaatttatgattatttagcaacaattttgtcaaaaaataacaacgaagttaccaagggtgtgcaatatatcacaaattgttcggtttgttatagcaataaattttctgtcactaattccctcgttaccggatgcattttagtgatgcagttgtgaacttttgatccatttttagttaaaaaatctctgaaatttggtatgtttgagtgaaggaataaatcctttcattttggtcaaaaccattttgtggaaagtgaaaaggcacgattgcatcaaaaaatagaatttcaacttcggaaatgtattacgagaaccagaaatctaccaaaatagatggtcaagatgattgtccaaaagtatagaaatcatgcagatttagaagatcatcatacagtattttactttagaaatttttacattaaatttatctataaagattaatttattttttatttctatttaggacatttaatttacatgtcctaaacaattgttatttaggaaccgtaaatggacagcctaaatattcttggatttcctaatgaatgatatttttaacaaaaattgaacccatataaggccaagaagctcttcacactactttacctatgtatatataaactcgaatccatcacaaagcctattcaagttaagagaaaagaaaaaaaaaaccgttcttggaag

SEQ ID NO: 2444 - DNA, 2000 bp, Arabidopsis thaliana
agactgaacatagaattctattccacggagctaattaatgacgtttcattgacttctataaatattataatatcaaaattaggggaagaagttatccaatggtgtaattatcatttgctgatttttcttcacctttccaaaatgattcttcaaagttcaaattgtatgttggaagaggcggaagaaaatagaaaaatcaacattcaaaaaagtctgaatcacaagagaaaatgtattatgattctcttttctttttttctttttcttttggtaatggattagatttttttttcttaattttttcaaaagtgtaatgttttttagatacttaccctaattaaggccaactaatcagaagaaatattttaaaacgtcgtcctatagttaattattttaatagaaatggtttacatgaatggtttaagagatctctttagaataatataaacgaacaaagtaaagaatcttctaagtccaaaacgtgaagacaataatctccaatatgttttcactccaagaactttctaaacgtggtataagactgatagaagttctaactggtattggacatatataaatgatagataactctttaattgcatataaaatctataattttctcatcgtttttatatttgctactaaactaaattgataatttagtcgttctagttctcactatttaatctgtcacattcaaatatctcggccagtcaaaatccaatacatattagtttgtgttttatacgacattactcgtgtttatctttctttcttttttgttaacacgtatttgtgtttatctcaatgtttagatgttgaaaagtatatatgctgattaataaataacaatttcttagtcaacaactcaatgatagaatgttatataactctcttacatcatttacatttttaaattgaatgaattctcatactatgcaatctacctggttagggtgaagtcacaacaacaacaacattaactaataacaacaatttaagctgcatgtcctaatcagaatctcggttattggtcgctcataagaacagttagaggtctttcagtcacaattgagagacgacatacataattggatgggaatcaaaatcagtttaattgcgctatacgcaacttgaaacgtcattatacaccgataagctttaaaaataaaatgttgtgatggacacgcgcactatatatgtatgtgtttggacatgattgaagctaaacaagataatatttattaagaagaaaatacataattattactaaataatgtgtattattatacgattccaacttttatttgataatgatttttgagcaaatcaggttgataggtatgattgagaccatcgcccaaactacaccttaaggtcttactattagaaacaaacaattcatttgggaattgaaaccaaagtcatctatggaagtaacctcaaaatttatctaagaaacagtgatgtattagaatggtcaagtcaacttattcacaaaattacaaaactatcgtttataaatatataatctatttttcacttgtgttacacgattcctcttttgatatgcaggaagaagagaagatcttacaacggctagaaatagaaaacttaatgtgctattaattacaacttaccaactaattagaactttctatatgaaccggatcttctacagcaaatcacggtcaattcaaaatattcatctctctctctctctccacatggacaagacatgattaagaaagtatataaaagaaacagagcagagaaagacattttgttccggtataccattgcaatttgcaaactgcttcaatccaatttccctaaacctcttagaaaattctgcaaaacccaccaaacaaagaacaccaagaaagacaaaaggcaggcaagactacaaagcaaaaccttcttcttcttcttcttctcgttactcaaatcatttccatatatacgcaaaaaccattaagacaagctagaaacaaagaaac

SEQ ID NO: 2445 - DNA, 1522 bp, Arabidopsis thaliana
catttattgtatagtggtgaatgttattgattgtgttcatagctttgttgtgtacttgtgtaaaaaataaaaaatcaatttggtgaaatattcgtttgtttcaactttcaaacgtgggctaaggtgtgtattattgggcttaaagtgggcctcttgctaggaattttatgatttcgcggttttacgaaattaatataaaattaaaaatagcattaaacctcaggactcaggagaagccctaaaaaggcgttgggtaaattgactaccttagcaagtaaaacagtaaaaactgtgaatatttacttacattttcatggctgaggttcgtcttcgtcatttaataaatttcgtaaattcctgagtcggctgcgttctcgacttgggttcgtcttcttcttctttctattcagattcacaataattgccaagcgaacaagtctttgcctctttggtttactttcctctgttttcgatccatttagaaaatgttattcacgaggagtgttgctcggatttcttctaagtttctgagaaaccgtagcttctatggctcctctcaatctctcgcctctcatcggttcgcaatcattcccgatcagggtcactcttgttctgactctccacacaaggtaattttaacattttctcttgtgcctatgtagcgagaaaatattcgattagggtttttctgataattgagtgttgtggggaaattgtttttttttaaattactctctagcagatgtaagatttatgatctgtgctaattatctcggtttttgtctaatcattaccatggagattgtgtttattcaataaaggtgtcgtttttattttgcccatctattatttagggagttggttggaattgaaaattttccctttttgtttgtgatgtaattttgtaagacattgtggaaaataatggagtaatcagccaaaactagtgtttctctttctacattttgccatggattatcatgggtcctatttggatgcatcaaactgttttatctgtgtgtcagagagagaagaagaaaagagttgtgagagatcagtttattttaaaatcttatgtgttataaagaattggtgacctaaccaatgtgttattctttgtgatgttttagtagggttacgtttgcagaacaacttattcattgaaatctccggtttttggtggatttagtcatcaactctatcaccagagtagctccttggttgaggttcgtacttagctcactatcatcctctattgttaaactttcacatatacttcaattttgttggacattgcttcagttgtagaagaaaaaactgtcaaaccccaactttaaattttctcactttttgtcactgaacttgttgagttggtcattgtttttttaactttgatttattgctgtaacttcttttcttttccgactgctgaaagagtaagattgtcctttcctaggaggagcttgacccattttcgcttgttgccgatgagctgtcacttcttagtaataagttgagagag

SEQ ID NO: 2446 - DNA, 2000 bp, Arabidopsis thaliana
aaaaaggcggcgattcgctgatcactaattgtctttgtttggcgttcagatcattcctatccttcatctggatagtattatcctcaccgtgtgaatgaataaccgaatccaaccgaaataacctgtaggaataccgaaataatagaattgaatccgaaccaaattcggttttgtgcaattgaaccgaagaaacataaatacgtatgcttaaactatagatagtagttgggcaatagacttgtgttgaagctacttgaagaaaagatgatgatgatgatgaattatgaataatgttcaagaattaagatatgaagctttcattgggatactttagttaaaaagattatcatcatcaacaaatgtgatttttttcaaactttcatttatgttccactctggctatacatatttttgtttttcgattcttttcattgattaaaacaaggtaccaaaattataggtaggggataataatatttagtgggttatactaataattattgggtagaaggaatggcggatgcaattattttgattacttataaaagatagtgacattaattgattcttaggtggagcttattttaaaattaattgaagatttttatgagtaataatttaggataagtagaacacaaaaaatttaaatttttttaaaaaggaatctgttttcttgactttttgagcacatcattttatcgttggttaaataaataaaaacaatttcatcagttttcgaaaaacgtccacttgccatttaactctgcctttacggtttccgccaatttaaaattctctaaattttcaaacttttctctctcaccatcaaattctctaatttattctctttttataatgttcctctcttttcttctggataattacttttcattatagtccctatactactataattatccacaactgtctcatacttttataaccgttttatcattttcaccgggtaaacttagaaacaaaattgagtttccgacatcgcatgataattttaaatgtaaggtacttgcatggaactttaaaaaataagagggtgaaaaacataaattaaagtataatataggggtgtatattttgggttaaacatattacacaacacactcttccgctacacactgtttacactgttccttacttttttttctttttctttcgccaacatctctctctccagctattttccctcaatttttaatcgtcgttttcacttttgttcgattccattcaaaaaagcttcaatcagtgagctgcgttttttattctctgcttcatccagatctacatttctctgtttcagcctctattgctctgtttaacaagttctcaacggccggaatcgtcgccgggattctcgccaccggagttattgtgaaacggtgaaaatgggtttttgattttactggttacttcattgttcagtgcagtaagtatttattttccttgtcctgtcttactattggtttatttccttaaatgaagaaactttattttccccgaatttcttcattgctaaaaactctcactttctgcaatttcgtctgcttgtttcactcacaagaatttcacatttttttcaaaaataaacactgcttaatgcggattggttgttcacaaaaggaccaaaaaatcgtagaaggtaaccgacagtgttagctgaaagaagccagaaactctgtttgtctgtgttcttgaatttagacaatctactaaagtccgtactttttttattagtaaatcctgttatgaccggacccaataaagtagagtaattgttacatgcgcgttccattccaaacaatgtgcgtgggccacttggtcatttgattctgtatttttacttcggagaaatttggatacaacaaataaagtagagagattgtgtataatgaataaagtttccttttttttgttaatgatttgatcatgcgtctcttctgatttgagtttcttttgtatctgcataagtttggattgatttcact

SEQ ID NO: 2447 - DNA, 2000 bp, Arabidopsis thaliana
ttaaaacccttgtaaatctatttgccgccaaaaaatatttacaaagatttttaaaatcatttttttagctgaggaaaattgttacgaaaaagtttttggcaggaattgttttttttggcgggaaaaaagtttggcggaaattttttttttggcggaaaataaaaattttggcgccaaaaaattggcgggaaaagttcagtttccaattacatgtttctattagatgagggtaatttggtcattttgttcaagggaaagggtacttttaaaaatggaaaacataaaagggtattgttgcaaaaaaatagtaaaaaatgggtagttttgcaaatctccaatcatatatatactaagcttcaaactagtttagttttgatttgttttccgatcctaaacttgaattaagctcatgatgttgggagcctatataaattattagaacgtgatattcatgcatggtgtattcaaagaattacacatatataagagagactaggataaaactaattacgtttagataatactaaatactgaggtatgtcaaggatgctctaacatatttgttaggtggatccaaatccactatggtcgaagcggtgggtaaccgacgccaaatattatatactgtgcagttgtacaaaatggatgaacgctatattcagacaaataagtactataacaaaacaagaaagaactctttaagtacttcaattttgagcaaaggaaaatttcgagaataatggtttgtagtagcccggaggggaaacattaccattttggtctaaacacttcacaataaacttgaaaacaaaatagctagactagctagagatatatatgtttagtttcataatatgcatgtgacctcataattaaaccttattttgaaactataacttataaacagatgaactggtctttcgatctttaacaaaaataaaaatgaactggtctttcttttaacaaatttctgaatcttgtgggaactctattggataattggattcgtaagcacaaattgatccacgaccactacattatacatatgcagatatgttaatgctataagaccatctcttttattgtatgacttttggagataacagaaaagggaatcttttacagataagagtttagagtaaagagaaaagaagcctatttggttgattttgattcactgattaaaacaacacttgtcttttttatctttgccttcacgagaatcataactacactcaccgtcctcgccgatcaaaagtcctcgtgtgataagaaattcatgtggacaattttattgcaggtacgtatttttcatcaacttatccataacgacacgtgttgaccttcttacgtagctcttctgtatttgatcgccttggatttgctctaagacctaatttaatcacgccacatgcaacaattaactaccaagggtcccaaaaaaagaaagaaacacatactactctatttaatttgataataaacaaataaagtccgtttagtagattatgttttacatataaaaacaattaaagtccgttttgttaattatgttttacctataaaaaaaaaattcaccaaaaaacattaatcaaatcatatcctagttgatcattggtgaggtgactgacaggtcgtggaattctggcatcctatcgtcgacaaatcttaaactaaagtaactcttactgttactttttaaatatgtcaaagtaaccaatatcttctacggaacttatatccaatttgcatacttttactcatactatacaaaatacaagcggatataaacaacaaaataagaaaactacactaatatctatagaaacttcaaattgaattgaatattatcgtgatatatatatatatatatatatcgccgaatattccctggaaaattaaatacaaagactatactactctattggctataaatacacacacaaacccaacaaagctatttcattattcaaaaaccaatcacaaataacaaaacgaaa

SEQ ID NO: 2448 - DNA, 914 bp, Arabidopsis thaliana
agacctaatccgttctagtaaagaacgtgttgaatagctgctagttaagactgtccaatcaaatcaaggttaaaaaattcttgcttcctttttcaacaataaggctttatgtagttttctccaaataatgatgagatgtttcatatgatttaaccgatgaattgaagttgggtatgcaaaagacattcctctgaattacaatatacgctaatgatatcattatcattagactcacaatttgagatcaatctagaaataatgaatgcgctgaatcagtttcgtctttgttcccccttgttgttcaggattgtaattgcccttttgttttgtttgttttctccatttcctttgggcttagtttccggaaatttgtttgtgtccgtcggtgacaacttcaaaaaatatcgacaagtcataactttttatcaaaattttgactaagttgtcaagcccttagtcgacactcgacgcccctgacattaaaagtattgactccagtgccctgtgccggcctaaaagagggcctattttgggactcttttgctggcaaattgcgccatatgtagtggagtaaatgtgtaaaaaaacagttgaatcaacataaccattatttgatcagaaaagaaaacaaaaatgtggtgtaatgagaggaggatacggtatgtggaaacttgatttacttaatttcaaaggagacctacggagtcaaagagagagttagaccaactaattgtccagagggattgagattggaggaagggtattatggtactttacgaatactattacgttgattaatttggatactttgtcttcttcttcgtctctctcccctcgcgcatcttcggtgctataaaacaaactcacgactagatcatttttggagtgagatttacgtttgatagactactaca

SEQ ID NO: 2449 - DNA, 2000 bp, Arabidopsis thaliana
aacctttcgatacttaataaaaagaaataatgtcaacatggtctttaaacaataaaacaaaaatgtacataagtagaagtcaacagaaaaaggagacacttggttggatccgtaagcatctaaaagacaatttcagacaatttggaccgacgcggtttcaacacaagataagaggagtcgtgtcttgtttaatcagtcaacgtttactcgaccctttccttcctctttcccttttctctactttcttcccccaaatttctgttctaatatacgataaagatgttttttgttccatttattagttttgttcctagtttttatttataatttagtagtttataactatttaaaatgtgcagtattttaatttgttatattggttgattttttataaatgagaaaatacttgttgtttcttaatctttgtgattttagccaaaacgtttttaagaaaatgggatagaggaaatataatacagcctattgcatgatgaaatgatacaacacgtaatcttgatatgttgtacaatataaatatccatattgccatatacttaataaaaaaatacaagatgggttgttatgtattactccataaatgtgcatatttgggtacgtacagtcaacgttggatatctgcctaaaacatacaatgaattttattttcctgttaacctcaaaataagtggtacaaaaccaacgtgacaaggacgactattagaaaacgataacagttaatgtagttaggtataattctagtgtctgaaacgatctttccaataaaattatactattatgcatattgtactttgtattttgctaagtaattgtgaatcaaacgtaagaacattactttcctcctctctcctctgactaatatagggcttcttaccgtacagtcttgtggatgtgactcaaaacatctgtacaagaaatttgtgtattttctcactattcttggtccaatctgagtatttctatacagtatagtataattttttccttattttcggattttccattcacttttgttggaatttttttccagtttaagagatacaggaaaaaagttctcctcttaattactctaattattaaatttactaatcctatttcaattcctctcatttccagtatttcaatccactgatcgtccaatatgcaatatattttacctttttaacacacaatgttagtttcttgacagatttgactttgaattttggtggagattagtaaaagaattaaagaaatatgtagtggaaatataaaaaataatgaactgggatgagattacacaccagacaccacttgccaagagaacaacgggctcagtcacatggtcctaaattgaccatttccataatattagctgccaacaaaatacataaaataaaaatacggttactttcataactccccttttaatttattaatattttaaaaattaagcagaccttaattcatcatcttttagtgcgttacaaactaacagcgttacaaatctctcttagtccaaaaaatgtgactaaaagatttctcttttaaacccttaaaaatctggaatcaaaatcttttatattttcaaatttttttggaaacaaataagaatgtagaattcgatcaatatgaaagaaaaatgaacggtgttagatttgctttggaaatatgtaaactaacagtaattaacttgttttagtcattagcaactaatacagtaattaacttgtttaaagtaaaattagagcaacctaggaatatatgctcaactttttcgttttcttctaattgttaaaataatgttgtcattggccagtcgccattatacctttttaacccttcacagtctcccagaaacctccctttctctttgatacattctctgtatatatatatatacgcgtatgcgtttacacattctttaaaagtttcagattctagataaattcttttcatttgatttgttttagcaattcggacattgtacagagaaatcaaga

SEQ ID NO: 2450 - DNA, 1969 bp, Arabidopsis thaliana
ctctgtccgtaaacttgatttcttattaaaagatgaaaactttgtgagattttcagagagactgttgatagaaacaaaaacactgatttgttgtttgttagttggatcctttgttgcttttagagtgtgttgctacagctctccgtgttaaagcaacaagtggcttaaatagaaaagagactattaatgtaattaattgcaaaatttgcagagactattgattttaaaggtgtagagtttgaaatcatgtacccgtgactatccctatccctaagactagtttgttaatcatttgcatagtttagttttgttggtgttgaataaactacacaaatcttaagtacatatacaaatgtataatttgactatggattggggagatacatagatcaaacagaggtgacatgtgtcgtggacgagagatgttcgtagaagtaatcacacggaaccatgatcattgcccatatctacgcggtattttaatgatataaaagtaagatttgtgggatatgaatatggtcggtttgagaacatttaaggacttacaattattagtggaaaagatggagacagacaagtgaaagtgaaatactatgaaagtgaagttatgaagtttcctccacacactttttagtgaaacacagtttgcatttttgttgagattttagaatcaaattttggaattagcaactctgctattaacttatgcaatggatgtgcgtctaggaaaaatagatttcggattttaacccacaaaaagacaaaatgatgatcactaagttaccattatttagtactgctttaaacaattttcatgtttgataatgaggaaatttagtaatttagaacattgtacaaaagttataaagaaactcttagaaagatttagaaaaatgggctttgcaatgactattgagacggtacgtgtatccaatagtggggttggtggtctatggaagtggtgtggtgcatcattgcatggggttggttaaatttaaaagtcattcatttgtgtaatcatggttctctgtttccaccgtaacccaaactaaattgttgacaactaagagtttttaaacaagtaaatcattattaacttgagatcatcaaaggtaaaacaatttctatgcgtccaaacatttacattagtatggttctaaccattgttctcagaggatcttacataaaacttgatattgtgtaaccggttcgcgaggcttctagtgctaaattacatttgtatgttttttttgttgacgtaaattgaaaactccttcattgaaaaatcgttggccgaatgttaagctaggaaaaataataataatgaactaggagccactaacaatgtgttgaaatttaagtcgaagtcgacactgaacacacacacattttataagcatgggtgaactgcatgagacccacactttacattacacaagtccgagaccgagatgggattagtaacctcatgtgcagtgtcaccttcctaacttgtaaaagtgtacaaccttaggagggttgtttattcagtctgatggcccaacaacatattacaatttacaacaatttgaatgggtcttataaagctacaaataaaaataaacctaatgggcttaattgggctctctcgtagaattaacaaaaggcccgtgatgttaaaggcggtgtgattctttagggcttcctcaaaaccctaatctcttaggtataaattgacacaacgcaccaccttccttctcatcttcacttcttcaaccttttccactcttacgattccttaagaatctccttctagcttatcttgtattaattttgagttttgtagggtttaggttgtttgattaagttagcaagttagggattagttacgtgacgagatttctctccaaggaatctattactaaaaagatggagcaatctgaaattgtgattgcataatccactagtaaacgtcacaaagcaattgggc

SEQ ID NO: 2451 - DNA, 2000 bp, Arabidopsis thaliana
aaaatgattaagaaaaacttaatagtgaagaattccgtttctgttacgagtgaggaggagctctatggccaaatttaatatcaagaaattgaaaatattaaaatgaataccaataaatgtttttcttctctatataatgttggtgggactgactgggaacggagcttcgaatcaaagaagaaagccaactaccaaagacagtgtcggttcgacggcgatggcaaatctaacggcaggagaaacgtcgccgtttcagatcatttattaacgtcgaaaacgagttttattaaaaaaattattttatttgatccaaaacgagatttatttttatattatcaaatcatacgttacgactttttacgcgctttttcaccacacgtaccattagcaaatcatacgttatgacttttgcgtaaaaggtaaaaacttgttttacatctgtctcacaaaacttgtaacttgtatattcattttattgatcaagtagatgtagatccccatcacaagatgtgtgttttattcattatgacgacatatttatgtgtgatatataggataaaaagataaaattagatttatgttggatgtatttgtcttaagtcttttaaacaaagattcttgaaaaatgacacaatgttagatcaaaagttttaatcgatacatttagactaaagacatcttaccttccttcactggttttcttacaatgatttcaatatgtagtaaaataaaatgtgttgtttattgctatatgagactcatgggtctagaaagtataaactataagtcatttggataggggtttctctataatttcacccacgaaaatggattacaatgtaacttcatttcataaacacttttaacaatgctataacattcgactatgtttatcaccgaagattcacttattaggctttcttctagtacatccagagaaaacttcgcatgtgttcgactggagcaatttaaaaatgaatgattttaagctaagtaaatgatttttagtatcttgagaatatggacaaacaaacaaaaagtttgtaaagaatgacaaagaggaaacccatgaaaaaaagatacaatatatggaagctcacagacgatgacggcatgagagttattatgacatacaaaccaatcgataaatctttaacaatttactgaaatatttgactaataatcttttggttttggaataatgaaccgatcgaccgtcatataaaatataaatgattggatccacgtacgttggtggccgagcctctgaaaacgaatttgatttatctattttgctaactaatcacctaacgtagtttttgtgtctcaatggttgtacaaaagataaagtctcaagaatttattaacaaaagaagtggccacgaagaatggaattttgttgtatcaatgaagcataagtagtaccatagtattttaaaattcgaaatgcaaatcaaatttcaacgtgacaacatatgttgtataatagttaatcatagtaaatagcacacattgcagctaataattggatttacaattgtttgagtcgtacgttttgatctgttgtttacaagaaaaaatacaaagatggaaagttctaacttcaagtgaagttcagatatcgaccgagtcagaacacgacacgaggctcgaagacagaggcatagtgctgagttgttcaacagaagcaagtaaaaaccttttgtctgagagagaggctccgagttaggcataagccaaacaacttgacacgacacataacctttgcttctcgtgtagacccaactttttacccttaccaaaaatataaaataaaatatgcaaaaaacacacccactcaaaaattaaaattttaatgaaagaaagaagaaacttcacatcagcatcagaatctctctttctctctctctccttcttcacaagcaaaaaaacaccaaaccatttttctttcttcattgtgccgacacttctttcccctctctctctctctctccaccgcc

SEQ ID NO: 2452 - DNA, 992 bp, Arabidopsis thaliana
gaggtaaaaggacacaactttgacgccgtcaatgtttgcttttactctttcttcttcttttcatttttcttctactcggataatgtttttgcttctatatcgtttaattttctacctttttctgctgatcatataacatacataaaatcaaaaaatttaatatgataaattcatgttaaaagaacttgccaaataaaaaccgatacagaattttcttgtaaaacattcttcaatcttttttatttatttttttaactttaaatttccacttaaattaaaataaagaggattacaaggttaaaaaccccaacatggccgcaggcctaaaaaagaaagataaattcttcaaatttatatttacgtaaaccttcaaatttaataaattttaaaaaaccagacataattatgttgagagcatcagcaacggtaatttctcaacttccgtttctcaatatatgtgtaaacataaataaaagtgtgaacacaaatattattaatatttaattgaaaagtattttaattaaaccaatgattgaatgacaactgtgagaaacgttgtcgataagtttctcttggtttctctaaagagaaactttcccttacctctctcctcctttggacatttcttttcttattttattggtgagagattttatgagaaactcccgttggagttggtctgacacaggcggccctaggttctagaacggtataacgagaaaccaacgtacgacgagagaccaaaaagtaatattaacatatacgatcttacaaaaagtactcattattggaagtttggggcaacatcacaagcctacaattgcataatattctttggtcaattattcaatcaaatcaccgcgtaacgtgaccttaccttaatctaataagttgaccaacgcataaatgaaagtgtatataaagatgacttacataaacctcttagccatatatccattcattccaatataattctccacaaaattactatc

SEQ ID NO: 2453 - DNA, 2000 bp, Arabidopsis thaliana
ccgcatcgtaacagtgctgtaatagtatcaaaatctctatatatacatatatatatttatatattttcagtactatttgaaccgcatcacacttctcccgcaccgcaaaacgcaatcaccattcgaagctttagattacgaaagaaaaacacgaatcctcaaagtttgaccaatacttcggtaaatatggaagaaaaaactaatagacagataccacgaggatggaaatgctacttaaacaatattgcaatctatgctttggacaacttttataaagcatattaaattagtctgcgtttttggcttttttacttgatttttatattcgatcaaatgatgctatataaaagattgcaagtaataacacgttactaaagatacatatatcaactttaaaatgatagcagtacaaaactaacagtaattttcttaccaccttatttataccgcttcattttatcgcaacaatcatttgcgttatagctagcgatacaacgtcaccactcaccaatcgagactaatatttcaacgtcaaattgttatatcttcataggctaatatattaatagaggagaggaaatgtcatagtaagtcgaagtgtataggaccccacgaaatgtgatttgtcggactgcacaggacaggccaaatgttctagtcggttgcatcaatcagttttgggtaagtaatagtattatttgattttcggttccctgaattttttggaaaacgataatacacaattctactagagacacatatgggtatgtggtctactcgttttgcatcttattattccgatccaaatggctcaaaattatgcgttaaaaatatgtttgtggtaaaaattttggaagaaagcagaggacattaaacagaaactcatactagtcttttgatttttttttataaaatataatcttgttatttaagttattcctggttgttaaacacgcttaaattcacaatggtccaaagttattttttaatctaagatgaatcattcaactaataaaacaagatgaattgatttgcataatataatgtttgagccggaaaatgtaatttagcatgggtctaccttatgtctttcttggttttctattgtaaaatcgttgtctaaccatcttataatatcttaaaaactgttgttttacaaattacaacaaatctttttttccgtattatcaatctctagacaatgcgggtcaattatcttactatttatgcgtttatattacaaaaattgcacctgaaaataaggaattgatttagaagcctccaaatgatttggtgccattccaaattaattaagaaggcatcataccatgagtcagttaactggatccaaccccttgaaaaggaagaatcggccgccaaaaaaatgagaccgaatcttttatcatgctggattatgaatgtatacacacgtaattgagccaaaactaatcataaatagttctatacttcagaaaataaaaatcaaaatacaaacagttagttagcatcgtttagctgggttttttttttttcaattccaacttgaatcaattaaactgatagctttggataatactgaataaaaaaaccttgtcactaatttgacgaaacatgaagaaagattataaaaaaatattaaaatctatcgaaaataattatatttatctacaaaacaatttttcccgatttagtcatttcttaacagttacaaatatccaaatcatattttataatattaaaaaaatcatattatataattcctgattttcaattttgcatattacgtcgacacttcgtcctccgggttttccgagcacaagtcctaatcaaacaataagaagacaaaaagaaaaataaaatctgaaaaagaacctttgctctttgttaatataaaaagccctactctcgcatccaacgtttcttcacctctaattcttctcactaaaaatatcaaaagctttcacattacaatatctccctctctctacacaaagctctct

SEQ ID NO: 2454 - DNA, 1413 bp, Arabidopsis thaliana
ttcaatgaagaaaaatctctgcttttggaatgatctcatttttttttggttgtgtcatattgataagaaaaaacatgatgtatccacgatccgttcttgttctagagccaggtaactgaggtaagtaacagttagagctaaccatagcagattctcctttttttagtgttgtgtttgtttcgactcttccttttgggttgggcttcgataacgattgttcaggcccactaacattcttttcttattgtgcgtctgtctctttcgagaaaaagacacaagcacttaaagccaagattcgcattttgccacatgccactaatttcaccttgtgttagatattatttttgtactacacactcaacgaagaccatagatcaactcaaaatatttattacacaacaattatcggagaagagattgatgtgaaatgtaatgaagacgaaaagaaaataaaaaaagaaacgacgaatttggacgtaattttcagccaaaacatatgctttgggtcccacactttcacatttcaactttatcatcacaccgaaacactaaacaccaaaatccccgacaaatttaaagaaaatttttccattttttttttttactctatctctgtgagagattctcttcaagctcaggcctttaggctttaggtttcttttgggagtcttcttgagctctgtaatcactctctagaagcttattttgcctcctaatgttattaggtacgtctttgtatctgtacttgcttctgcatttttcgatatttgtttcttttgatgagatttggggactcttccttcagaaggatttgaagattttgacatcttccattaaaagttgaatctttacttaagctagtgttcttagcattctgtttatgttagcttcatgagatctgggatctcgaggctgctttttttttttgctttgatttcacatttaatgggttttgattacattttcattaggtgaagtgagttgaacttggcttgtggttttgatgaatttctttctattaaaagttttggtttccctaccaaaaaaatgtcttctttttgttaattaaagtctaaaagtagctaatctctatctgtacttgtgtagggttcatcatttgagtctataactataatgactttcactgttcatttcctttttaaatctcttgttgtttccctttccttactttgttcatcatttctccttccctttactcaatagacactgctcttcctttggattattgctctgtgagttatttaaaataagccataaggtctcttcttatgattgttgcagggtgttgtactggaattattaggatgaaccaaggaagatgagtctctcggtctttcaaaaaccaagtcttgtaatgaggagctgtccactgttgtaaagtaagtcattaag

SEQ ID NO: 2455 - DNA, 1866 bp, Arabidopsis thaliana
gtttggtttctgtctgtcgatgttgtagaatacgtatcgtttggaccttgtcgatttttaaggttcttgcttagaatccctgatttgcgaacttgtcggagtttttttagccatgttttgtgttttcactgtttgtgatcgtaacggggttgtgtggttttgtggatttatgaagccgtttcaataataaaaccccatttgttactctttaaagcccattaggcccatatgttttagatgaattattttgcaattgctgctatttaattatagaacctaaaactcgaacgcccattgattagtgcttctagaacggtggatgcttctgtgtccactggtaattgtctttttggttgaagagtcagcccttcggatttgacctttcgtgtaccttttaagcccattgattatgattggcagattaagtaaattaacgaatggtcaagcacatgattagccaaatcatgacaaataaatggattcctttttcatttctggaagcggaatcttgtctaacaatttttttaattgatagtaatattttatgttatgggtttctgatagttgaagacttgaaatgttgaacttaaaagtgaaattacgctttcataatttcattaagccatgatggcaagttttttttttgggttgaggtcaacaagagcaagtttaatggtatcgaatagtgcgtaactgaaataaaacttgttgaaaaatcattcattcactattcctcggcgcgtgaggccaatttgaccccttcccccacgaaattaaacttggggagtactaaaagtctaaaccagcaacgtcgcttttcatgtgccttaatcacacccttttctgccacgtgtacgatctgggaccgtcgttgtgctcattgacatttgtagatccctttctagatgttcattaaaattacttaatttatatccagtccttctacttttagttttttgatactttaatccctgttgttttaatgatacttcattcagtatccatccaaaatcaaattaaatccatagattaagatgtacatttttgaaaataataaatggtttattataatatgttactaaatttatggtatttttcgctcttgtattgacttttacatggatacattaattttaatcttctttgatttctgttaattttctttgaattcattttatacatttattagtgaactattctaaaaattaacaaaatcatttaaaccgacaaaaaaaactttaaaagatcagcgtattataaaccaacgggggatagtttgcattaggtattggacatctggggggtaaatagagcgaaacaaaagttgaggcttgtttttcaacattttcattttattgtgtgctatttaaactgcgtcgtatttggaggcatattcgccggtcaagcgtatcaaatacccaatcacgcgaacttttctccgcctcttctccactccaaaattcttctccgtctttctcccgtcaccgtcgaataaagcctgagatctccgaattctgatcagcaactatgcattcaagtcatctccttctcgaggaaccgatcaggatgacttcaatcctcgaaccttctaaatcagtgagctatttatttctccttctctcgctctgtgtgttttctgtggttgttttgatttccttagctcgttgttgattatcgattacgtttggatctgttgcgatatttcatccattttgaagcagtgagagatttgtttcgtttgtcgtggtttttgatccgcttgatgttatttcgcagagtttcttcccggctttgactaagattgttgggactctaggtccgaaatctcgatccgtcgaggtgattgctggttgtctcaaagctgga

SEQ ID NO: 2456 - DNA, 1968 bp, Arabidopsis thaliana
gaatactagaaaaatgacaatgttttttgggccttttgttctggatgaatatctctgttgttttttgggccttttgttttggatacgtctgttatagcagataacgttttctgatagtttctatgtttgtattcttgttttggaataggaaagctttcttcagttaagaggattggttactatgctaaatcactcgagtaaactcagttaccaatggttcccataagtttgaactgaccataaaacaaacatatattaacttttttttttttttgataatttggagtgtttatttttggtatccaaaattccaaatattatacaagcttgttttggtatagcagtgtgctaggaaaaatatttgatgtgtatttttttgttgtccacaggaatagttgtcggtgcgttgtatttctggaagtccaaaaatgctaacgtaaattttgtgatttgatatcgtcgatgtgagatattcttttggctccaacgaattacaatcacggatttgttgggggacatattattattggcgttacatatataagaagacgcattggaaacaataataaaggacgtcttgttcatggacgagaccaaccaccacatgcgttcgattagcctctccttttgcatattcttgtggatcaaatccttccaatcactgacatcgggcttgtttgcttcttgtctatatgccatcattagttttgcaacttactaagttctagttcaattttacacgtttgacattaaataacgtacgttatgaaatcccaaaacatatgagtttacttttgttcttgcatatacgccggccatcttaatttttgcaactttcaaatgtctaattcagttataaacatttggcattatataatgttaggaaatcacaaaacaacatgagtttatatcaagccagggaagttaatagattttttttttatatcaattagtatttgggatattttactagatttaaacattgattatattttcacaaacacaagtgatttggaacaaagatttggcaattgtactactttgattaaaatttcatagaaaagctaaggggttgtgaaatttgtgtggtggggcttagtaaaatttgtatggtacgtccctagtgacggtgatatttcttttataaaattgacatatacttacaaggttttattggaactataagatcattttgttgttgtctggtccacttgtgacccttattttagctctgcaagggacgcgacaagaactctacaaaggatacgtcgaatccagagacaaagtgactggatgatagccgagaggtagaaccactctactaataaaggctttcgtcaaactataccaaatgtaaagactaaagaacatgatatacaaattgtctttctccaaccatttgtattttcaacgtatatgatacgacaattatatggcttacacagtctatacgcttctatttacataacagtttttgtaatcgctagtcatgattagttccaactttgattataaaagaattttattctatcttaattgattgtttgtcctccttattcataatacacaaaaataaaaaaaaataataaaaaaaaaactttgattttgaaacgtatttccttttatttgcatttaacttatggaatgggttatagaacaagaccagattacagcctcagaattttaaataagaatcaaaaacgaattctccaaacccaaacaatcatgccacgtgtaaacttatgacaaatgaaagtatatcgtaataatatacaccagagaacagttgattaaatccctccctcctctatctatctcccgtcgtcacctctccgactctgcttttataagacgtttctctctgcttcaccaccagagagatacatccaaaaattcatatctttccttcatttttattggcgttttaagaaaacaaagcttccccaattagggttttgtattagaaga

SEQ ID NO: 2457 - DNA, 758 bp, Arabidopsis thaliana
catgtgcattacggtctgtgtgaataccaaccagttactgccgaaaactttgggggggtttgcgatatatatccataggtacagtgtgcaatgagaaaccatccaggtttttgtgcttgttgtaaagtgtattatgttttcatcttgtaaaggatattgtcactcgtgtgtcatctctattaccaaactcaggaaagaaacattcacacgaaattgttgtaggctgtggtcctctttttattgattataatttttgaggctagtgttggatatacttgtcttgacagagtccaacgtttgatttatcttcagttagtgtttcatatgagagtttaaacggtctttgaagtttcaaacacacattagattttggtaacattggtaatttatttatgtggcctctatgtttattttgatttttgagacttgacgatagatgtagctatcactatcagtgagccctccaagttgttgttttgtgtatgtgaattatcttcgttttctttatgaagatatgtttctaaacttttcctgagaaggaaggtcactacgatggtcacatacggacaaactaagtagcaagcacaatctgtggacttaaaaagaggtgtttggcaagtaaaaaactgtttacgtcatctgttacgtcttctgttcactttatgttttactctccacgcatcttatcctttataagctcgcacaaatcttaaccaaaaccaaagcaaaacttgagagtttcttactaaggttgaatc

SEQ ID NO: 2458 - DNA, 2000 bp, Arabidopsis thaliana
aataatatgtgtccacctcatgtattacgtcactcataggaccatatgaccaaaaaaaatcaacaaaacacaatgaaacatgatgttgacaaaatggaccggtgaaaggaggaacgaaacgcaattacgcaacccttgggacattttttttttttaacttttcttatccttttactgtttatgcagttgaaagattttcagataaaattcaattttcacacagcgaacccaatatgttagcattcaaagaaaagtaaaaactcagtgagttaatattgcaattcctcttgtctctatctctataccgcagcccatgttttttgtagataggcggttcttggctgtttccatgaagctgaaactaacaaaaccaaagtaatcatttaattaaaatcactaattgtgctctttaggagagcaaaattcttttgatttatgcaagaatttaaaaaataattatataagctattggtgctgaacgaattatgtaaagtagtgtatgccagtaggtgatagtgatacgaatagtgtattacaacgaaacgtgaaattacattcttgatactcgaaaacatatacaattttttaaaaaattgttcagatatatgatacacatttttgttgatgttaatttagtaatatatgtacattacacacacatgtctcgaattcttctatgtactagtatcaaatatattaatcggtcaaactacttgacagattaaaaccatgtgcgacttctcgtatagcttgtattttaaagttttgatctgatcttaatatgcgtttattggatcatataatataacatgtggtattttaatatcataaattttggtttcttttcctaaaaatacaacaaaatatctaaaactttttgggaaatctgttagaagatttttttttgaatcaattgtagtaaatcacttcttaaaatgaattttttaaataatataaaacataaaagagaagagaagaggaggttccatcaacttcacttacaatgagaaaagactatgcaatttgcacaatcatgactttaaccaatacacatttatcagaagaaaaagaatctatctttatctttaatctctttacaaattcttttttattgataaaatttcaaaaatgatgtgattcaaaaatacaaaaatgatttgattaaaacatcacttttcttcctatatgaacttgtaataataaacgaattaccggacttcataaaatgatttgatttcgtatttaaggccatgaaatcttctaactaaagtttgtttctgataaggtataggatgtatattctttgaattgtgacaattggtcgaatgtatttttaccttaaactgatataagattctgctaatctagactcaagtcatcaagtagtcaaagctgagaaatgatgctctttttgttttcaaaagcaatgttacctttaagaaatcattaaacttgatcaactatttgcgtcacaaacaatttttgtttttaatattatccacggatgattaaagtaatgttgttcagaaacttggtgccttcgtgtctcgtaccatcacttgtgtcaaaccggcgtcaaacgcccactctcgctgacctcagcccccaacaaatacacacatacggaaatgaacatgtaatatcaaaccatataatattcagtaaaaaatcagtatcgataatatagtaaaataataaccttcacgcattccttcttcttctataaatacacacatttgcctccacttactctcgttcaaacaattcttcgtcctattaaatacaaaaaataaaaatccttaaaaatatatccttatcttcaaccaagaatgggagaggtccaagaaggtcccaaagttgaacaagagaagaagccggctgccaccgtagtcccagttgagactactgacggcaagccaaagagcggcggaggagattccgcggcagcagcagcaccaccggtcgccgcggttgtctctgcctttgtttacaaagtggat

SEQ ID NO: 2459 - DNA, 2000 bp, Arabidopsis thaliana
aaaaaaatgagaatacaattaacacgaaaaatgcaaaagactgttaaaccgaaatcgaattctagtgtaatcaatccttttcccaatgatacaactataaatcaaaaagaaaaaatgtactgataaacgaaactaaacgtataaattaatatatttcttgacataaataggaggcttttgcctgctagtctgctacgatggaaggaaaaatgcatgcacacatgacacatgcaaaatgtttcaatgaagacgcattgcccaattaaccaacacaccacttcttccattccacccatattatttatttctaccattttctttaatttattgttttttctttgattcatacactgtttatgactattacattttccctttcgactaatattaacgcgtttaaaccaaagaatggatttgataatgaaattttattttattagcatatagataatggatggcttcatgcttggtttccatgacaaggaatgacacaagataattattttgaataaaatcataaatatgataatactagttgtaaaaaaacttgagtgtttcgtgtgttatttttcggtttcttgactttttatatttctcgtttttgtaattttaggatggattatttagcttgcttttctcttttattactttctaaaattttatttataaactcatttttaatatattgacaatcaataaatgagttatcttttaattaataaaaaatttgtaaactcttgtaaacagatcatagtcactaaaagctattataagttatttgtagctatatttttttatttcatgaacttaggataagatacgaaaatggaggttatatttacataaatgtcaccacattgcctttgtcatgcaaacggcgtgttgcgtcactcgcctcctattgggaatcttataatcgcgtgaatattattagagtttgcgatatttccacgtaatagttatctttcacaaattttatactcaattacaaaatcaacgaaaatgtacatttgtatctttaactatttacgttttttttacgtatcaactttcagttatatgttttggataatatatttttttacttttgacttttcagttttcacctaatgattgggatatacatatgcatgcatagttcccattatttaaatgtaagctaagtgcatatgaactgttagtcaaaattacgaagtttatttgtacatatatatagttataacaaaatggtacagtaaattaaacagaacatcaagaaagtacaaaagactgaacacaataatttacatgaaaacaaaacacttaaaaaatcatccgataaaatcgaaatgatatcccaaatgacaaaaataacaatatagaaaatacaaaaacaaaaacaaaatatgaaagagtgttatggtggggacgttaattgactcaattacgttcatacattatacacacctactcccatcacaatgaaacgctttactccaaaaaaaaaaaaaaaaccactcttcaaaaaatctcgtagtctcaccaaccgcgaaatgcaactatcgtcagccaccagccacgaccacttttaccaccgtgacgttgacgaaaaccaaagaaattcaccaccgtgttaaaatcaaattaaaaataactctctttttgcgacttaaaccaaatccacgaattataatctccaccactaaaatccatcactcactctccatctaacggtcatcattaattctcaaccaactccttctttctcactaattttcattttttctataatctttatatggaagaaaaaaagaaactagctatctctatacgcttacctaccaacaaacactaccaccttatttaaaccacccttcattcatctaattttcctcaggaacaaatacaattccttaaccaacaatattacaaataagctcctatcttctttctttcttttagagatcttgtaatctcctcttagttaatcttctattgtaaaactaagatcaaaagtctaa

SEQ ID NO: 2460 - DNA, 648 bp, Arabidopsis thaliana
tgcgtttacattttttttctctttcttttgtattttttcgagaaatttacattgaaacgattactatattctttgctggatttacttggggaagtttcgctgaaatttagagctttaaaagctttctttatcgtagagaatcttgtggttccctgaccatgtaatatttttcaattgtcctatctatgacaatgtaactaaacaaacaatttcgttcgtacacttatacactaaacaaaaaaaagtctttgatatagttttatttttctgttatgccaactatgtttgtgttcttaaaattctacatctctaaaaacagatatattttccttatattacataaaaatggtttacccataaattgatgagttttatcaagagacttgcaaaatattgtggagatcacgaaaatgccttgaggcccagatattaatgggcttttaggcccatatgttaatgagatccaaatatttccaagttaagtaattggtaatgacggtgaaggtgcctttgactatcttaacgcgtacgggacggtcgataaatttagttaaagtctctttcttcttctttactttttcttcttcttttagatcaaagaaatcgttttgtgcagatttgatcttgcgttaattttctaagcaaaat

SEQ ID NO: 2461 - DNA, 2000 bp, Arabidopsis thaliana
gctatgcatctaaatctgtagtcacgtcgtagctaatgactacaaaacttccgtagccatttcttctccagtgtgcctactgatattcatattagccaatcgtgtcttttaacaacgtttaagttatgataccatcaatcaccctttggctatgttattgatataatacatgtgacaaatcgaccaattaagtcgtctctctgatcaaaacaacttatacgaattcaaaatcaatctgacatattattatcacataattagttttacaaatcgaactaaccacacattaacctgaatatctatatagtaaaaattgttattggtgaaagtggatcatatactcgtatatataagcaactagataaaccacattaacttctagatgtagacttaaagaaaataagaatcattacatcaagaatattgaggataagtgaattggcaacaaagcattatgtctgcaagtgaatggattggacggtagttaatgcaattgtacatgtatttacagccgccataattaagaaagtgggattggttttattagtagtggtttgcgaatgcgcatgcgattactgaaatgtctaaaaggtcaaacttaatggctttcaattattcattatatacaccaaggaatctttttcttaattcttctttggattttcttcttaaaatattatattgttacatatctttattgctgacatataaaaatgtaacctttttgctttccaaactaactaaaactttacggtaactttaaaattcataaccaaattgctcatattcgtacgaaagaatgatagatgaacagctacttaaggatcttttcaaatttgatcagacttctatagtaacattctatcgaagatcggattcttatccccaattcccaacaatatatttgaatgattgctagatatatactgtattaataagtaaactttattaacggttgtacataatcttaaaaatttaaggtttttattcagtatttttgccaaatattttgatgagcagtctaattctttcgttctttttttgttaaaaattaacaactctaacagtactgaatatttctgaagtgagctaatgattccaaattggtaacaatatcttaaacggaaggtaaaatgcgggtaagtctggtagaatctgttaaattgaggtagcataaattttaccacaaaaaaaaaagcagaaaaggattataagattcaaaaaaaaaaaaagtaaattcacttaaccttcttttttttattgtcaactgattttgttattgataaacttgttggaaccaagataataggccaaaacttttttataatcatatatattaaataataattgtatttaagataataggccaatataagctataggttagcatagcgctgaaattaagagagttgggtatgtagacgttgacgtgtaatattcatgataatcattgcaagcaattttatttattttctatactaagaactatttcaaattgtatacatattactttttggtggaacatgaaaatgtttatagattgctgattaatatttgaaggaaaaaataacagaaaaatggatatatacttgaatcggtttgataatatattggaacaaaagtgaaaagctaaattaattaatgctactgtgctagtatattactatttttatcgaattaaattggacatcgagtctcactgaattcacaatttcacatgttcaacaactattgagttcagatagctagatagctagtggttttaaatttgagtattaatatgagtttagaacgattaagaaacccccgattattgaaaaataataattaattaatagtgacagcaaccactatgactaagaaataaagatgcttaattttatcatacacgattagagaggttctcaaactctatataaccctacattggaacacatatagagccacacaccaataattaattagacaaaagataagagagaatagagagagagagagca

SEQ ID NO: 2462 - DNA, 270 bp, Arabidopsis thaliana
tgttgcttccagagaaagctgaaaataataataatcccaatttaaaatcgaaatcgattttctcataccgttggttaatctcgtggagttgggttattacacgtgtcagatgatgtaaccatgatctcagagaaaaagtcacatgccacgtcagttaactttagggcaaaatgggaaaagaatctaaagagcatatgttcgtgcacgttcttgtttagggtaagctcaaagctcaagccgcttctatctctctacatttctctttctgca

SEQ ID NO: 2463 - DNA, 1288 bp, Arabidopsis thaliana
gtaaaaaagaaagcttatgttcatcagctggatgagtgtagaagattaagactgtgtaaaggttgttatgtagtagtacgcaagcttatgttgtcatggataaatctggttatattttgacattaaaccggtatgcagattgctgaaattttagattttatggatgacgtttccggttaaattggcttattttctcatttgagtcaaccaaatatgaaaaaaaagaaaagtaaagagagaacaaaaagaacacaagactttgcattgcttccacaagaaaacataataaagtcaagaataagcacatacctctaatagtctaatttaccacttttttttttactttgacttgctcttccataaaattcaattgctgtcgtcaagaatccgtcactggtgacgatttcagtattgagctcttattactatctagatgaacaatgtatcaaaaaggcttttgtttggtctctagtgcatgtgtttgaccaaattgaattttctcttcgaacaaggtaatgattgtattcgaacttggatctgaagattacttttgtattttagctttgcgcaagtttgaagatttatttttttataaaaaaaaagtcttgaagaatgtagttttttttttactatacaataaaatatgaaaaaacagtttaccaaaggggaagaattacttatttagagctctttaaggctgtattttccaatgattagtctaaagtacattgaaatccttaattttatattttttgattaggatacagttggttaggtgttgatataaattattaagttatgcctgtggcaagcaagtccatgagaaaccaagttgcttgatttattctgtgttgtgtacacatgtgttgactatgctacttttgttagattcacatttttagcagtagaagtttctaagaaatgagaactatgtgatgtattacgggaaagacgatattacccttgttattcaacacccgtggtatgcattgtgccggcggtcgaagggtgatattgaaaatgtcaacttgtctcaagtcagagaatcagtgctctggtagttgtgttagatagaatattagtttagacgacttcttttggtcaaactactagaaagtccaaccttttaggtaattgctcttatataaatatacattacttctaagttctcaaccttcattacaaatcctctcaattcaggtttcttttctaacaagcaaaaactccaacctttactttatttttgttttgttttgtaaccctctcagatcttaattctcaaagaagt

SEQ ID NO: 2464 - DNA, 1814 bp, Arabidopsis thaliana
cttaacggtatcggcacaaatgtttttcatggaggagtaattaacgtatagcagtttcatttgttgtccattatgtttcagagcacaatgtcatagaattgctaactaccatgggagaataataattgtctaattaagaggactaaagatgcaaaaaaaaagatgaaattattggattcattcaaatacagaatgaatatattgcagttgtattggctacacctaaacagagaatatatcgactgtttgggacaatgatttcggtaaaccggtttagttttcggttgactttgagtcaaatgacaatgaacagaaaatagtgattgaaccggtatgtggtctgtctgaggtctgacttctgaggatctcgtctattccctcacgtaccacatttgtttcctcctatcacctttccacaagatttaatttctcacctattagcacttctctgttttgctgctaatttaagtattacgacgccgtttctatatcaagcacttgactttatccaaaaaaaagtctcacaaatacgattgaagagcaaaacagcgaaacacttttcaacaccggttggttgttgacgtacttcattcttgcgctgaatctcctccgattatatttgataaatctctcattggacttcgtctacctttttcttacatgatttcctatttgaatttgtttacacagctcagttttggggtttaattgatcaattaagagtttatcggtctagttttatgggtgtttctgatccatttctagcacttgaaagatctgttatccattcaagtggtaacaaactgaattatctatatttatataataatcatttaaaagatttgttatcaattttttttaatttaattatttggatttactgatttctcaattaatattagatatgcataccctaccacgtacatgtgggcatcagctagagatttaagcaaatcttctgtctaatccttgacgtggcaacataatattattttacgtaactgagagtttctaccgatccgtattaatttaattaatttactgtaattcacaaccacataacaaacgattaagaattgaaaacttcatatgtttaaaaactgttactcaaacatttttcataatttcttactcattgtccattattgtttcgggtcgatcgagaatctttagaaaaacgtgaaaatcttgtcctcttaaatatttctgtcacatctgttttttttttttgtgggtacaaagtcacatctaagtttcttctgacatcgtcgccttttgttctacagacggacaaacgaagtacttgtgctattaagaaccaactgtttacttccataacgttactactagttagatagagaaaatgagagaatattgatacaacgtgcgttcgacttaggtcaagttaaataggtgagtccacagcactagcatttcaggtaggatttggcatcttgcctcaaagtatataacaaacaaataatacaaaattacacacatattgacatattatgtgataataatatatttgggaaattttcaaaatagactgttttcttaaaacttaattaggaatttgggcagtttcaatatttaaattagaaaataggcatgttttactgtgcaacactatgtagaagattttctaactctcaaaatctttgtttatttactatttgtgccattgaattttttttttctaatgtttccacttacttttttttctttctctctcccccttatctcttccatcgattattttcagcctctttcctctatttttttgttgaaatcctctaaatgatcttgcagag

SEQ ID NO: 2465 - DNA, 1794 bp, Arabidopsis thaliana
tattattatgtgaatatgaaatgtggtgggggaacagagataataataatggaaagtgcttcttactaagtaagtttggtttgttttttctccggcgaaaggtcaaaattatatatttgttaaactgagtggaatattcaaaaataaaaccggccaataggtcttccaaatgttatttgtaacgataattaagtagtattcagtgtataatttgataatctcaaatgcaacaatcactttcggtattacataactctttttaaagtcttttttctttctttttgtaaaacaatatagtatatttctttcattcagcatgtcttcgtaatcaaaatatcatgtataattaattttggtattaataaatgaatgagtgagatatgaagtaggatcttctttggtgttttgttatgatgggtacatggaagtagtggttggaaatttggtgctttgtcggtgtcaccaaaaatgatttttattctttattccaccttggttatttatttacctgggactcttggtttgggtcgtaaactcaatgggccagtgattttttcagctttgaggtatattggagactaacgatggattttagcggtacacgattctcatatctaaattttggttttacatgagagttttgaaactaaagagggtgaagatctttattgacaaaaaaaagagagtgaagatctttgccctaatttgatcataaatgaagatttaaattttaaaatgatggatataatcactagataattttatttttttgctacttctcataattggtttatgatcggtatcagaatcatataaaaagattatacaatgtttatatctaaaactctagctatctctatccaaggtaacatgatgtagtcatgtacagctaagacctaagggatactccaaaatatagtagagactctaaccacataaatagtcacatgaattacatgttctaaaaaagaaatccagaataatcaaatttcatgaagtgttgtttgatggaagaaaatgtgataagaaacatacaattcaccacaaagataaagacactttagagtaatgatgtagacacaaatatgttgttgttctttatttaccacaaatccaaacaacgttggctgaaaaatcaatcttttatatgctttcttatcaccaaaaatttaacatatttcataattaatagaaaaaactgttatacgaagcaagagaagcgaccaatatacaatcatcgtttcttattaaaaaaaaaaaaaaacatcgtcaccgttaagtaacggaggaagtctccacggttccatccagggcaggcgttttctccgtcgggtccgtatcttcttctctctctctctacagaaaaaaaaagaggaagaagaagaaaaatcaagatttgttgtgttggcgaagccacagagactgagtaatcgattcgattttgtttgctaatgatgatgacgataccatctgcatcgtgctcatcttagctttctcctctttctgggtttatctgtgcttaaggcaaaaaaagagtgctccttttttcatatcttcttcaaagtttcgtttttttttggtgtttattagaatctagaagttaacaattggagaatttggaattgggaaaataggggttagatatatctgtaagtggtttggttcttcttagcaagtgtttaactttgggagaggaagatgagaattacaagtgttgttatggttattggctatgagacttgtctctggtgtgagctgagatggtggtagatactttgttttaacgtcttggct

SEQ ID NO: 2466 - DNA, 2000 bp, Arabidopsis thaliana
gttgcgtcttagtaatacgatggttatatgctcacgtgaaaaaaccgtaaaaaaaaaaacagatagctagaccacaactagtgttagatcaagcatgtaaaagtccttaacattttagcaagaccgcaaacgaactctcgcataatctttgcgtatgattcgtctatgatctattctctggatgcaagtattcatatatttgctgacttttctccctaatataaattcaatagttcattgtcattttatgcatccttctttctttatctagtttagtttattttagttacgtttgtaatgcttagttctttataaaaacacaaacaaaaaacttactcatttcgttttagctgtttctaacaaattaagcggccaacatctccatcttttgtagatttgaatcgtactgagatattacaaccctccatttgtagattacaaagatattgcatttgcgcacatgcgaccaccaactaacattaacgcatggattgcaaatggaattctagagtttatggtttccattgacgcaaacagggcagcaccgacatccacccatatgccggtggatagtcagggttaaagacttgattcatcacaggcttgttacatagtagagagcatgatctcaaaacttattagaccgtttatatagtagatctatctagtaattttttgtggagaaaattgtgatattctaatttgactaaatgctacatagagaaagattcaaagattttcatttttttagtccaaccgttcttttgcttctctatccatgtctttctattcccatatttctgcaaatgatttgctatacattatgtgtgaatagttatataaattcaagtaaatttctttgaacaattacaatgatcgaaacaaattgattggttcaacaaatttcttttaactgttgaaattatatatgtctttttactttttagtttctacatatgaagttggaagtgtttggaataatgtatttcaattattgtaaacagtaaaacaaagctgctctaaaatcagccattcggagccttggaacttataataattcacatggaacataaaccttgtgtaacaattatatcacagacactccacatgctcatataatatacgataactctcgagaagcttgtcattcaacttttgcggccctatgagaatgtgacaatgtcatccatttaatacaacttttattattgttcagaaaaatcataaataaacaatattcatatgctgatgctgcaaaactaatttatttatttgtatgtcgaccttagtctaaccacatgctcttaatgtgatgctcgattcgtttggttcatttataagatatgttcacaagaaaatatagaggaaaacttcatacatgtttttacgtttgtttaatacatttatatatgttaacaacttaacatgctctgtgactaaaaaaacttatacatgcgtgcatgcgtagataatggcaaataaaataactataacctttttacttcgtgaaaaggaaagacaaacatacgtgactgtgtttggcatataattttggtttgttttaccaaaaaaaatattatatttataattttggtttgattcggttatacgaaattcgagcttttggttttttcggttttcaactatgaataccgaaattaaattttgggttgagagctgtttggtttcggatataacataactaaaacaacatctatttttcagttttggtttactaatttatctgcactaatttaattttggcacataaccacaattgccaccttcggtttagtctcagaaagtgaaagccaatcaaaccaatgagatgggcagcaattaatttacctaccaaaacctataaatctgaaaaattacagaaaactttaactggaaggttaaaaacacccaaccagcatcagtccccataaatactcgtagtccttcccgctttctctcgtccctatccaatacacatctctctctctcttattaactca

SEQ ID NO: 2467 - DNA, 2000 bp, Arabidopsis thaliana
gtaattaatgtagtacatatatctgttttaatttttttttgaaaccaattataaatatcctcacggtaaaatggattatatatatatatatatatatatatttgctaaatgaaatatcatttcaagaatttagtttattagaaatattttattaaatgaaatataatagtttattattaaactaaattgtttcatttaaccaaaatattttctatgatgctatttcatccctgatttttgtgattatggatatattgttaactttataacaaaacaagagaattcaagggactgaaacgttttatgacttttaaatggatgactatatacaatggctgatccaaaaaaacaattttgggtaaggcatattcagtgagctctaggcttagcgccatatatgttacatcaaaatttattttgtagagtaaaaagctttttagaacaaaaaaacaacaccttaatttatgtctattttcgttgtaaatgtgtaatatataatacatttaatgaattacaacaaatggtaaaactcatgctgataaaatactgcaaactagttcataatcgaactcaatagaaaatagaaaaaagaatttatacttttgtaaaaaaaaaatgctactttgtttttctgttgtatcggtaaagatgagaacaacactgaccaagcgaggttttgggctttaaccatacaaggcccacatgaatacaaagtatagagtttagttgtccactaaaaacctagttctataaggagattattgccttgagaacaaaatgattttattcccaatgaacaagcaaacaagaagttcaatattttcttgtcgaactttttgtcttcatacctttacaataaagtgattaactcattacaaataaattgtgaggaatactagaaacttggatttattgacatatgtttattgttttagacattttatcttcatttgtaacatcgtgataatgacacatgttctagtttttttttttttttttttttggacaaacagatgttctagttttatctatcaaatttgaggagaaaatattttagtgttacaaaaatatatagaaaggtcttttgtttttcaatgttactgttaaccttaaagtcaagtttcaatcagataaagaactatatgatataatcacagtcatcatacaggcagatgaagataaccattaaatcaagacgatagtcaatcatactcaattggcttcttcaataccaacggattaattaattcctcaatagctaatatatatctttttaatattttgactatacccaaatagtttagtgggcacaatttcgtaaccttctcttatttttttacacctcaaacagtcaaacgtcatcatatatataacaaatcttttgacatcatacgttattttctataataatccaaacacatcccccacctttataaatatattatgatacacttcccattattcaaagattttatagcacaattttgttttttaaaagcaattaattaactactatagtatactttactaacaacatttgaaaaaatatacaaaaattaaaattttatcattatcaaagcagtccagctgcataccattatcaaaattggatgtggataaacttaatttgataaatttctgtataacttaacaaatattaaatatgtgttaatagttatgtcaacttatgttgaagataaatccattggaccggccgtggtttttatattagtttgaatgtagctttcagattcttcctatacccaaatttcacattcaaaggttgcttatctttttaacattcaaactcatttaatatttaaatacactaactaatgacgtgagaaaacttatggatgcagcaacaaatcataagacgccacgtgacaatcttgatcgctctataaaaaaccaaacctgctcttctttggtcgctacagcaaaaataacaataaacaagataaatggagggtctaattccgttagtatacaaagccgtc

SEQ ID NO: 2468 - DNA, 729 bp, Arabidopsis thaliana
ttcacacgcgctttttgaaggaacctgaagttgcgtgtgagggaagggttcgtgacttttgttttgtgcgttttttttttgtaagttaggcttggaccggtttaataaacctgatgtaataattcggtttggaaaattgatttctctaagcgtagactttaacccaaaagggtggtctcgtggcttttgatttgtcaattgtgtgttttcttttaattgtataaagtttctatgaatatatttagtttattcgagaacaattgtatgaaatgtttagttaatgttttcatggtatataggttgtaaaacaggttaattacgttacaatttcctagttttggtattaatatgcaaaaatgacataatatcaaacttttaagtaaattgatatttttcactaatgttaataatgaaaccaactaacaaaaaaaaaaaagaacaaaccaatttctatttgtttaagactttgacagtacatcacttttagaaataaatgccataattatgttatgtgcacactgcaaaagaaaatgaatacgcacaattgactataaagaaaacgcctttagtggccatacgatttttagcattttatgcggaagaaacaaagtgctatttctccgagttacgtatgtttcttttcttctgcatctagttttttttttgcatattcatcaccttctctcagttttcttctttcaatagaattatccagaaaacttttaagag

SEQ ID NO: 2469 - DNA, 1369 bp, Arabidopsis thaliana
atcaaacgacaatttcggtttggtttcttgtcattattgatcttccctcctcttcaccatcttgttttcctcgaccccatcatgttgattatagatcgtcaaataatggattttaccaatccctataaatcttgcaggagaagttttgccgagctactgagtttgcgcatgagacacacggcttctataagaccattgaggaattgtgggacggtgaaatttgagataatgtccctcctttctacttgtttaaccataaaccattaaggacattgaaataaatatgttatctttttatatttaatctttctatgagaaaacactaaacacatgcttgggatttcatgatgtttggcaaatgttgttattctgcattcttcaaacaataaaatgttttcaactagttacaacttcaacatgacatagtcgatagaacctaagactatttccttagttcgcgtcgggaattttctacataccgcaaaaaaatacgtgtatgataaaaagtaaaattcaaaccttatttcaagactagggaattgccttcttctttttgattctataacctacttactgaatccaaggatcttgatcaaattagttatttctcatgaaaacttacattaacatttccttaaataaataaaaacttacattaacaatttaaaacatccattgtgaagggccggaatgaagcattatagtaagtgttcccaattattctccaattttttctcttcaaaatgaattactacaagctctcaaccgtcgattctgcatttcgctcggcgcaatatatatgcgttcacccaaaaacgtgttacttggacgttcacactcgagataatctaaatgaactcatatacactcgagatgttatataaactcatctacaattttgttgttgttgtaaaaccacataatttttcttatcacaaagatttttgaaaaaccaatcacaatgtataatattctactattgctacattatttatgaaatatataaaacttttttcataatatgaaatgaattataaatcatgtacgaattgtcttggttgtttgagagttctgtcttctgtgatacgtgtgaattgtggacacaaaaaagtgtcagtcacactcgagattagcaaagaggaaatctaaatgaacgaatttaactcagatacgtccaccgtccattggtccatgtaatgatcaatatctgacgtgacaatatactaactaagaaagtactagtattacagaaagaagaaatcaatttggccacgaatctcccgcctctgtcgctctctcacttcttctcaccctttaatagctagtgccgagtgcagtgtgcgttgaacaaccaccaccacatctgata

SEQ ID NO: 2470 - DNA, 2000 bp, Arabidopsis thaliana
ttagatatagttaaaccttaattaagttttgttaagatttgcaaattggccacttacttaactctggttaccccgacattaccttcgaaattttaaattaaagcgtcaataacggttggtgggtttcatctcgtgaccactgactactttttagttttacttactgaacaaaaaagctctttatcagaattttgaatataccacttgtttcctatttcggataaattgatcatataaaattataaagtaaaggtttttctcttagaagataaattttttttctccaaatttgcataccatttaaaaaatgaaaaagactcttttaaaacaaaacacaggctgggactgataatatgatattctagaatctttcctgaaaaagaaaacttacatagaaacttcttcttactatgaactttttgtaaaagaaaaaaaaaggttcgaaatgagtgaaaatgattttaacgtgcattaaacttgtttgatatgaatcaattcatgtaataggattgaatgctgatagtaacatcatacttattttctgacaataatttaataaatgagtacacttgttctaaagttctctttgagaattctagaatacaagtctgcttaatcaaaaggctattttaagataaatgaatttttaaaaaggttaagaaaacgtatgaaagacttactgtgatggacatatcaatcgacagttattgggagtttttttttggagtagcaaagaaatgtaagaaaaaataatgagaagaagataaaagccaaagttgtgaggcttgtcggaccaaaaatggccaaaatgctagcaatccttgaaaacaagtgatggtaactggaacaccaaaatttaatgggttgattgaatcattgaaagatttgactttcaatatttttgatattttcctaaggagacttttatgacttttctttcattagtctctctagccaaatttgttttgcacggctcacattttgccttcaacaattttcattacttgatctaacatagttacttcttaaaaaggcaaaacaaaatttactttaatagctgagtttcttttttgtttctttaccatttaaatcatatagaatggctaaccatatttgaaatagtattgaatcgaatgtatctaccattagaccaccatgaatgatttcatttatactcatgtattttacagtttgttaagttgattcatatactaatttaacaactgataattgttacacatccattaagctttcatcaatacttaaattaatagcaaaaatgaataattaacagctaaatacacccaaattttacagaaatattctactcctacaatttctaccagtcactactctctaattttggtataaaaatcatatagctcactatataacagctatcaacctgtaatatataaattctgataattaatattggagaatttagtctaattagctaaacattttattcgtataaagaaactttttttttcctcgtataaattctaattttcgtttcgtggtttgaattatactttttttgtttttatatataataattttcaattcaaccgtttctccgtgttgaactctaggcctttttaatctatgccttcatttctcagattcttctaaagaaaaatttcgcttttctctctacttcaaaacttttgataatcttctttaaactttcttcttcgatctctctttgttaactttctttcgttacgtctctctcgttctcgttatttcttattctcagatcttggattcacgaccatctcgatcgttgaccgtcgaatttgggttcggctaaaaatccaatctttttttttccggtgagaagctcgagagagtatataatttaataaagggtacgtacgattttggttgagtgttttgatgatgttgacccaatttgttggggtgtgaagtatacttatggaactgattgtcacaatacaagaagaacaacatcatcaacaaacaagaataataag

SEQ ID NO: 2471 - DNA, 1876 bp, Arabidopsis thaliana
ttctccgaaaacactaatgatcggaatgtgaagaagcggaggagagggagagagaagttgattagaagaagaagaagaagaaggtaaaggactagcgggagattttagaagctttggaattggaacggtttatttcgattttcccgggagatttcttgtggcgggtgatgccaaattttttgtaagggacaaaattggaaaaccatatattgttatggaaccgttcgattttaagatttttgcgattagctattttggaccgtctggtttcggctggttcgttggtttctttatctggataactttagtcaaaatttcggttcaatttaaactatggtttttttttatcttgataactttggtagaaatttatgtaatttgggtttaactactttgtactgtctggtttgataaatcattcttacactacagtttctgaaactgcagttagttctactggttaaggtgctgagagtaagaaaaccagttcatgggttcgatcattccttgcaaaatttttgatttttgttttcttcaacaaggctttcttttgttttttttggcttgcgcttttgtgccttgtgtgcttgtggcaatcaaaagcctaactaaagggcttaatttgagtcaggtttggttcaatcatatacaagttcacaatttgcatcagccgagctctgttgcagttttttttcttctttcgaacacgccaatcatattaatgcattactcttatgaatatgttcagtataacactactcgttaattttttttatttttttttattttttttcggacactactcgttaattaagaatccaaaaactaacattaagaacaaaacaacaagccattgtcataaacactatcaattgaaattaggctaatatcagatctcagcgttttctgtttagtgtctgcaactcctatttcggagattttaagatagataacgcagtttaatatgacatcatcgatctgattctatccatcaaccaatccagatttaaaacaactgattgaaaaacattggataattgattgaaaaacattggatctcaggtttttcatgatttgtcttcaaatccttataggagatttgcagaaagataacgcagtattttaactaatcaatcatcgatccaatcctaacagtctaacacgaagcaaaatcgagcaaagaagacaaaaaaagtaatgagcatctcagacatcgaaaaccccatttgtttcttcactagcaatcaaagtgcaaggataacaattttttcatggattcatcaccgatgctctcttatcaaaacataaaccaaaagaaaacaagatcgaataagaaaatctatcaaaaccctagcttaatcagacaaatcgacgaacagattctaagattcaatggctcgagaaaattatttatataagccgccgaagacaaaaccctactcttctgtttggtaacagatatatcctttgagacgcaaactacctgccgttttctaaaaacaactacgcaccgttttgtctaaaacaaagtcgttttttagaccaccgagaatagtctctcatctttgtcgtgtaacctgaacctccacgtaacgaaagaatgctctgaaccacaaaaaccagaaacgtgtcaaactgcttctgtaaatttagtcataaagcaaataattaaccatgacgcgtctctgatttttcaaacaaaaaaagccaaaaattcgatttgagtttatcatatcttcttctataaataaattgaaatatttttatacacatacgttgtcaaatgctaaccacacgtttgcgtttagtaaccgaaagaaccaaactgataaatactacttctcctatgagaatagtttttggtaaaacttacata

SEQ ID NO: 2472 - DNA, 1585 bp, Arabidopsis thaliana
ggttgattgaagtgagcttgagaagggagagtaagagagatacggatcttagagaggagaatcagaatcacacgagaaggagaagtgagagagagagagataatccgccatgaaagattgagaaagagctaaaaagcgtgagtgggggaattgaggaaaattcaaatgtggacgcgagtggttgtcggtagttagtgctcttggcttgttgctaccattaccaaaccaaactcttgttgtgtctactcatcaattcacattaaaccgccccattgcattcacatccaatttctctaacattattatataacgagataaacagagcactgagcaccgatgcaattatctatcgtgcgatttttttcccgtttactttcgtgacaggtgtttttcataattgagaatttcattccttattatttcgttaattgactcttcttaatttagaataagtgtctttgttatttttttattaattaaaaagacaccaaaatatatatatttggtatttaatattacaatataaatttattatcttactccatttaagaatattaaataccaaatgtatatatattttctaaatgaatatagatttaggaattgggttttagagctggaaatatatttcttcaatcagtttttttatgacctgtaaattattattattttcttaaaacgtctaaatttttattaatttgaaaactaattaaatttttcttctttctcttgtaatgtttttatggtaatataacatagaggtcgtaaattgtgttagcagagattgagagaacaagagacatgcatattcatgggatttgtatgaaagacatctcaacactagaaaaaagaaacatacaccaatattgtgcttaatcatacgtgaggtgagatcagtagagtcgacgacgtcttataataaattgttcattatgaagttgtaacttgtaaccaattattccataatgaatcaaaatgatacacaaaactagatatatgttgaatccggacagagcaccaaaaaagtaaaaaaaatccattttgtgtccactcctaaatacatgtactagaccaacagagatgatgttcgttagtatctatagtatcttttccaggtcaactataatcaaatcaacgacaaaattttggaatcgttcatattgaataacttggaaatgaacgaacatgaaaaagattttgttgccgatatgccgcatgtgataggacttaaaagcatccatgtgtaagtgttattttcatatacctgctctctctccttaaacactggaccaaaacgcgcaattatttccctcgtgaatctctttttagcttacgtacttataacaaccaattatatagtgggtgaaaatatcctcaaccgtttcacacgtggcaatacgaagacccggttctatctggatctgacccgacccgataagaaaaactcgaattcttgtcttgtttcttcttgtaatgaaaatttctctcgcacggagaagaagatcgaattgacctgggtttttccttactctctaagaaaaaccactactttggttaattgggaagacagagagattcgtaatcc

SEQ ID NO: 2473 - DNA, 2000 bp, Arabidopsis thaliana
tttttagaggctacatttcctatggtttgtgaccagactatagctagctacaatttttttattgtatttttattgcgaaaaacttagttgcatatattattcactaaaacagagattttttgtatagtaaacagtgaaggtaaaattgttagcaaacaaaaattttgtagagtcaagaaaagaatttttatatatatatatatatatattttttagaaacaacatatttttaataataaaaataggaagcttcaaatacagcattgaaaagagtttaacgaagaatttttgttttcgattgtatttaaatttatataatatatacaaacaaaaaaaaaaaaaaaaaaaaaattgtcacgtgtgcgtttggtagctgtaaatgaatgcatcttacacagtagcccacatgtcgattttggtttttcttcattttttcttcaccacatagctgttgtcttcaaaacaatcaacgagttttttagatttgttgattttgttgttttggattattgttgattttgccattttagatttttcactttatctataaaaaaaaaaaaaactattttctgccacttaaaagctaaaattttgagaaactttttaaataaaaatatgtatttgagaattttgtttcattatgtttccattttttttttataaaatacataataacaaatattataccctaaaaaaatagaaccaagtaaacctaaatgtgtaaattgtaactttagatataattttttcggcaaatctatgaatgccactaaaaatccttatctggtaattgattcatttatttatttatttatcacactatatcacatcatttacgttcacaatattcaacatattaggcggacaatttcttttgtcaacatcacggatctagtatttccttttgacatatctcgatctagaagatgaaagaaatagatatataggatgaaatgaatttaataccatctaaaagaacgttcctattatatatgctaatgtatagcatcaaaataccatttgtacaaagaaaaacaatagataatcgaatttaacagagttagattgataaatggtatttctttagttgtcacgttttgaaagcgtgattctattctcatgtttaaacatttgtcttaaacgttttgttatatatcatagacatgttagagatataactgaaaaaaaatcatttaaattagtttttgagtattttataattattcttttgggaatttcagtcatccaaaatcattcaacaatgttgcgccaaacagaagatggttcaaccactataatcaaaccatttttcaaatgatttcgttttttttgtttattttttggcttttgtggattacaaaccaaaacaataatttaaattatgatgatctctactttagtctatataaatacaatgaccatgaaaaaaatacactatgggtttggctgttttcgttccaaatgttggcatgacctccaccgataatctgttgttgattaggtatttttaagtctgtcaatcgtgaatcgacatctgattgtcatcaaactcttattctataagatgcaaaagtagtaaagcataatcatttattttacataaacacattgtttattacttttgtacatgttgcaaaccgtcgcacggcgccgaaattcgttccctatctccttcacttcaaaagtcactgaagacatcaaaaagcaatattgtcgacatttatccacaactcttttaaaaacgtgtcttattaaatttatcatccaactagcttagcatgcaaggttttattatgtcgagtgtcgacctcaatattcaatagaaaaaaaaggctggaataaaagaatatcatcgtttcattttggttttacaattttccctatttatatccccactcgtccttgtttcttccaccatctacaactttcattcttccactacatttctctccttgagtatcttcttatcctattttccaaattccaaaacaattcacaaa

SEQ ID NO: 2474 - DNA, 159 bp, Arabidopsis thaliana
gtgttcccaccttaatttctgaaggctctggtgaattctaggacaatctatgcagacaaaaatttatagtttattgtttggttttatgttcgaaatttaatagtgattgtactgcgctccgtaatattttctacagtttgtacgtgttgtgtttttcca

SEQ ID NO: 2475 - DNA, 1680 bp, Arabidopsis thaliana
tattttgaatctgttgatgacttctttctgttttgtacgtgaaccagtagtttaagaaaacaaagtgtatcatcaagtgctttattataatgctaatctaggctaattaatcccaatacgaccatattagcattgacagagaaacgaaacagagaagatgatgaagtatggaatttttcagtaacttaattctattacaaagcttcttttatactctgagagttaatatgtatacatagaacaatcagttaagagactaactaaatcatcatatgactcaagggactaacaaacttatcattttaaactgaggtagtatctaatatccaatgagacttggaacatgattaggaaacaatggttttgtaaacacatctcctagttaattctctcttcgtaagtgtagagccatgatcaaagtagcttggattcttcttctcacaatatgactttggtgcgttaatgaaacaatggattgttgttggcaatgtgtatagctgcagtagtagccacatatgatatagcattgacaaattgccaaaacacttgactctgcattcgcctctgttttggccaactctctgacacctctttaagccacaaaaccattgtagtagacaagagatttaaatgacttacatctcaagaaatcaacaagactgcctaatcaataacgcattgatcaaaactactgagactttccatcagcttttcattgaaagaaaacaaactgaaagatttgaataaaagagttaaaagagttcactcccaagtcccaatcaccaacctccatgtcccagaagacgccaatctcagccgcggcgaaatctcttgtggagccgggagcgagacatggttattggtgttctctgtgttgaagatgactcacccacctttgtgtaatcctctgtctcataaccatcatcgtttctgttattggttaactgaagtctccccttgaactgaagtacttgtccacttcttggtgaccagttgtgagatcccacgattgaagataggctttcctccatatgataggcttgtccaaagccacactgcagttacttgactaagaagcgattgtgataaatcatcatcatgagccaagttctcaggctgagctaagagaatattcccagtcctgcttttcatcataaacgaaagacacttgacgtacgagcagtcatctgtgattttgcttgagattaccatgagattagttggtatacgtgtccggtcaactgtccataacataagctcctccaaaaatcatagaatgtatccattaccttaataaatcttgattaaatagtaatataccgttatcggaaaaataaaattcaatataatagtttcattcacttttaaaattttggaaaaaatagatataaatataaaactctttaacatttatctccctaaaacacgagatttaacctaatatagatcataattaaatcaaataataataggaaaaccaaaaaggaaaagagtcacgtttattgtcggtgacccgtagcaacgaaagaaataggaaggtcaacaattttctcatacccgtatataaaacaaatctatctctccttccctctttaatttattaatcagatcttgcccaattcttcaatttcttcaaccctaattcttctctctttctcagatctaccaaacttgatctcc

SEQ ID NO: 2476 - DNA, 1690 bp, Arabidopsis thaliana
cgagaagagggtgacaacgatacatgagcgatggatagcacataagaataaaatgatgaagggttcaagcaaaaaaaaacttggtaagagtttgaacccaaaacatcagatttgtcatcttttaggtgagacaaaaaagtcttgataacaatgtgtgccggacacagtttttttatctagaagattaaactttgatttttctcacctaaaaggtgacaataaagtgagctatgtagagtgtcgtcaattatttgtccatcttcttgtttgtttttttaatttcttctttttgtccaaccattagactaatattttcattttgtttctttctcttttgtcttcgctttcatcttgttttcaggaatgactaatgcattcgaatgttttttcttttccttttatgtgcattcctactttatgaaacaattagttttcaattcaatttcggtgatagttttagccatttctgtccactttggttgtcttagttagtttattgatgagaagaaaagacaaggagcaaaagtattagattaggttaaccaaaaagtctagcatatggactcgtatgaaattgatatttgtatgtattaggtaactttgttttctcagagattattgagcaaaatgtttataatttatcgattagtgaaggtggcttcggaggctacatttgcgttatttacgggaaatggaaggacaaaacacaagtgctttctagtttgaaaataaaatcaaagaaatattggttaaaatagaacacactttataatcactgatcacataatattacattattatgacttatacgatttacaaaaacaattcaggtcaaaggcactcgtcgatataacataaagttggacattgaaactgagaatacgttggcgttcgcggatttaacatatatttttttgtccatatttttataccgtatcgtctcaacaattctatcatcaacaagaacatgtcactgataaaaacatgtttatcgcagcatgatgatattatacatagacatatcttacgtttaacatgaatcaacaaccatatctttagcgaccctacacgaattcaaatttgatatcaatttcgtacaatttctatcttactactttgaaatttgtgtcgtttataattatttatcaaactcaatgatgcgtattctattctcagaaggagtcatgtatgtcttgaaataaatctagaaagaagtataggcgaaattgagaaccatctcttcatagaactatacgtcgattcatagtaagtaaaaagtctacatctgcaataaaaatgtatggagttagctagttttgaaaaatactatatacaattgaagtgaacatgaaaatcttaattgtttaattaaagcgcgcgaaaaaacacaataataagttaaattatgtgcacataatagatagcattgtcaaaaggatcggttaatttatgatttcactaatttttattatccttcaaccactctagtaaaatacatattgccttaaaacaaaacctactagtcttaaaacgaaaaaagaaaaaaaaaaaaaaaaaaactcaatacctaataatcaaaaatagtactcaagcttccctatataatgttccttcttggctttagctaattcaccatatacccacactcacaagtcacaactcaaataatctttgtcttcctcctacaaat

SEQ ID NO: 2477 - DNA, 2000 bp, Arabidopsis thaliana
agaaatagaaaatatataaaagttatactcttgtaagcaaagaaaagcccaaacgaagcaaaacaagacaaaaagcccagtttaaagtagatgtaagcagatttacttgctacatcatcaactccccattttacatcgtcccaatgagatatatccactcttttcatagaatttgatgttttcacacgaatacgaaatcccaaatatataatctatcccttataattcataattatatacaaaaaatatgcaatcacacaactagccattaaatactatatagaaatatcaccacttgtcatttcaaaacaatacactaattaatgtctataattcaatccttgtcagatggagataagagagacacaatccataattttgttgctcattcatatagttcaagtgcgttggctcacggcaaacattttaaatttagacccacgccggagaaaatctaattagacgcatagtttattatagtggatttcattgggacaaacaatattagccgcattttatgtaatatctttcacttggaacacgtgccccatacacatatggtccctccatgctttgtacttatgtagttttttgtatgctacgatttggtattattgtatcgcaacgcgtaaaaaaggagagccaagtgtgtctccaatctttgggattgatttaagaataaaagataggaaagacaattatatgtccaatctttaagattgatgatttaaaattttgtagttatcatgaaaaacaaatttttatagtgttgtagggacgtaggtgatcattctcatgactcatgacacccattccatttaccaaatgcattacttatttacttgttttggtacaataccaaacacactaacaatgatttaacatttacttaattataatataaatttgcttacgaaacaacttgcattaaacaatttgcttctactatacttatattgatctatcgtgggcggtgagtaaaatgagttgggacatggatttgtcatttaggtcatttttagtaaatgtgaaacttgtaaccaaaatatgcataaaaactttagcctttctaaaagctaaaaatggtttgaggaacaccaagacgtaagctcttttaagctatttgatgtttgatgtgataaaataactaaaaactatttgttatgttttttcctccccttaaagatataagagaagagaaggtaaagaagttgtgtaagttagtcacaatcaattgttggaaataaatttgaaaactctgttaaaagtcacccaaatgagtttcaaacaagagttaaaagattaaaaaaaaaaagtaactgatataaagaatggtagtttactttttttttaaagaatggtagttttttaaaaactatttaggttgatggtatttttgtaaagaaatccaaaaattgtagttgatacaagaaaattttgatttgtgttgatttatttctcttttggcatgtgaatgtaagtaatctttttccacatgatttctaattctggacttgcatgtcttgttacgccagtcaacattcgttggataagttacaatgtcatttacaacttgcagattaattcggaaatcaagaaggaaaaaatctgaattagaaatagtaggttggatttttcacaaaaaaaaaaaaagtacaatattttgagatatgaccattagattcttaaattttacgattctaacttgtaagatttcaaattaaaccatgtataattcaatttaggggtaatttaatactttagggtagtaacgataaaatagataattaaattgaagtttaaggaccatcctgtaaattcaagttcggtaccggaaacacgtcagcattgatctaatagatacgagtcctcctttctctataaataacgtaatctctctcccgtcttcattaccatcgaaacagtgtcgtcgtagtctctctctctctccgcaaaatatcatcggagaaaagaaacagagacacgaaacagagaaaacc

SEQ ID NO: 2478 - DNA, 1045 bp, Arabidopsis thaliana
ttcttcaattcgataaaactggaagacatgtcatatacgatcttgtcggtatataacatctgtaaaagcccaactagattcaaaagcccactactggcccagcttcatttagggtttttatgtatcttctattgttacgtgtgtatacactcccttcaccgcagaaatacagaattaaaaaaaaaaagttttgaacgatgatgatctcaatcttccaaagatttgatagaggagattctttctaggcttccctcgaaatctatgaaaccagtgagattaacttacaagagttggaacaatatatcaaaaagtaagagctttacaaagatgcacattttaaaatgttaactaaaatacacaaatttaagtctttataaaattggttatatgatatcaaatagagtacacatatctaaagttataagagaaattattttaaactatccttttcatctttttctaatagtatagcaccaatcaaaaacaacgtgtcaatcaattgtagataaaatgtatcccaccttttattatataccctttttatcatacatcttcttagataattctcatccaacacgtaatcgtataaatatagtattaaaatccaatctcttaagaacaagataaacaacattagaaagagaattattatccacgtaaaaaaatcattagtctttaatagttttaacgttgactacataatacaaacgcgtggtttcacgcactaaagaaagagcgtgcagcgggaaaatttgccgtcattaaaaactcagaacaaaaaaaaaaaacaaacagatcgatcagaaataaatagaaaaaaaaaagattttcccttttttaaattaaaatttctttgtttcatcctctggagatagaaaaggaaagaaacaatttacaaaaggccttaaaaaagcaaagattcttcgctgacttcgttctctctttcgctggcgaagaagattttctagggttttttgtttgattttcgtgaagtcggaaaaattattattattaatcgtgttgagctgtttgatcggtgaagact

SEQ ID NO: 2479 - DNA, 919 bp, Arabidopsis thaliana
catgtcctgatcgagagagcttgtgtttgttctgttttgtttcaatcttggatgatccaagttccaacaatgaacaatatcttctctctgcgcatatcttttgatgcttgctaatcattttgtagctctattactcaaatatgtcttctttttttattttgtttaaattttggtgaatgcctttgctcacagtgtatgattattctagcaatgaaaaggagttaaaaaaggtactcgtattgttttgttactttttctatgttccaaactccaaagtaaacaatatcagcggggtaaaaaaaagttcagaagaagaacatccatttatactacttagatccatttcgttcgataagtgatttgtataacaacgaacttataatttctccgatgacttagaataggcattggaaagactggcttgttttcttaaaccaatcttaaaatctaaaaaccataaaataatgtaattgtatcatagtcattttgcacacaaaaccataaatattcccagtgcctagtgggaatctgttttttgctccactaacaaattttcatccctttggaaatagaatcaccaatattaataggaccactctagaacaaagtaatactgagtttcgtcgattctttttccatcattcgatcaacaaagctatttctgcggcgctaaaataaggtttttgtttctcatttattcctagaatcatcgttttttgttttcaggataaactattgttaatatggcagttcatatttatcgcaattctcgaggacggctttgttgtcacacactaaaacgctcatgcaaatgatgactgtagaaatatctacagatgtcatgtttcatttggaattcaatacgtaatcaacacctaatcgcttgatcgatgttaaattcgagactttccagcagaaa

SEQ ID NO: 2480 - DNA, 2000 bp, Arabidopsis thaliana
tctttgccgtcaatctctttgtcttccaaaccaaaataaaaataaaagattataacaaaatgaaactaatcaataaggaaattaacgagacaccaaatacgtcaagtgatcattgattcaagaagacccatgagtctctgatccgcttgtttcagtggctcgaaacaagactcttgtatacgcacctggccaacaaaaaaggctttgacatagctaaacccttcctggcatgttactgccatggataaacagttagtcttcactcgatcggacaaagacttcgccggctgtcgtgatgtctcggcgtcttgcatcgctgctttttcgagatagatagattgcttgaaacttgaaagcaagactaggaaatatctcactttcttgtgccaatgatgattttttttaactattaatgattctggaagcaactcttgccacgtctgttttacgtgttagctgtagagataccgacgtgtattaaagcaagaggctattttactttgggccttttgggcttttgggctgaagaaagaaactgtcatcggatcaacaaacactgcatagtttgcaacttgcacggtaaagcgacacaaaatccatgacgtttaatttaggttccacgtgaagaaccataccacatatcgtgcaataagaaactgatcacttttatatacctaaacgatttacaatttacactactatgcttgacacgatatgtaatttttttttttttgccaaagggtgttgttattgatattaaacattgtacaatacaacgtacatagactgtttatataaaacaaggacgtctagataaaaaaagcaaataacaaatattacaagactagttaaggaaacaacaaactgagtaaggttttatgtacaaaacagagacgactaccaaagaagagggccagacgtggtagcagtgatggaagacaaacatcctgacatctcaataagaacatttatggctacttcaaatacatatatacacaatatgtaattctcttattacatttatggctacttcaaatacatatatacaaaaaaaaaaggcctaccttcgacagaagttataccaatttattgatcggaagctacaaaatgttatctagggtcaatttgtagcctatctctatatcaaaaccgatacggatacaaaatagtttgataatcatagaatttaacattctaataaatatttgtttctagtattctttaaatgaataatcttgtgttcaattagtctattcatagtagaattaagtctcctaaaaaatagattgaaaccaaaaacagccgcacatggatttaatatcgactttagttaggaggttttgctaaaaatagtaaaatactcacaaactcacttctaaatactaatcttttacactcatgtcatgtgctttaaagatatgagagaacctttcctagtacacctacagtcaaaattttcaagattccgaaattttctaggttttttgagcaagagccaagaatcccaaatgtttgaatttgtatttttgatccaaaaatactacaacatcgtataaagaataaatcatacgtgtcagaacgagacatatgaagatgatgaaagcattgagccgcccctcaaaaaatccgttcaacgtttgagagtcaaggccacaaggtctgaccaatctatctcttctccttcttcttctaatcatattttcaacggtcaaactttttatcaccttctcagaaactactcttcttcatatgtgaccctaaaaataaaaacgaacaattaaacaaaattttaaaataatataatattcaccaatcagacgtgcaatatgttttatatattcagacataaccaacaaatatacagaaacaagaagaagaacaagaaccatcacttctctcattttcttcttctccaagcccccctcctttctatatatatctgaaattggtcttttataaaacaaacttccatttttcgtatggctgcttcttttcttaca

SEQ ID NO: 2481 - DNA, 1176 bp, Arabidopsis thaliana
tttcgtgttgagaaacctattaccaatacttttggttattgaagatttatgatttccctttttatggttttatgtttctaattcctaaatttgcgttttctctaccgtttggtaataaagacatgaaaatttgatgaactcggtgaatcgagagtaagagttttgcgattgtgacaatgagtgattaatacaaggattaagctccaataaaaaaatgttgcataaatcagaaatgaaacttgtaactcttcttttctttatgtgaaacttgtaactctatttgaaagattctatgtgaccactaaaccgaattacggattccaaccgaatttcacctctaactaaaccggttgaatgttgatgaattccggtttgaaatttcggcagtatgtgggtgacacgtggcgaagaatagtccccgaatcttcctctgacgaccatttgatacttttttttcttcagtttgttggttttgtcctcttaacaaaatattcttcaaactctctctgttgtttgtttgttgacaaatctctcaaaaccatttgttttgcaatcgcagatccgtttttcttcgggtctcatcacaatgaatggcttctctgatcttaatccttctgagaggtacgctttgtctgatcatcaatgatgcttataataatctcatttatacatgatcttgcctctatatatttgttcatcttagtaatcttcggtctcagcttccattttcgtctcccactatgtttctaggattttgtgttacttttgttagaaaactgcgatttttgtgctagtgtttgtttctccaagatcaatggaactcgttgcctaaaattcctgattatagttacataaacatcaaatggttctaattggtctttgatcttaaacccatttgattatggtatctaaagtttgatccttttgatgcactctcatcgcagtttctcgtgattttaatattattgaactcttttgatttgtggtgaagcaaaccttctctgtcacaactagctccattagaagccattctgtttgatgttgatggaacactctgtgactcagatcccatccaccttattgccttccaagaactgcttcaagaggttccttgctttttttaatgtcattataacttccaaatttacaacaagactttagaaaactgtgaataat

SEQ ID NO: 2482 - DNA, 2000 bp, Arabidopsis thaliana
ttgaagtatagcttttccaaagttcttgggaggaaattttattttttcttccatgtggaacattatgaaatcattgtctgatctgactcagacgtggaatctttgttgctgccttgatagggtggtcttcgttttgataactttgttcttgtttttgttatatagcctcatctcatgcgtacgaagctgtgtgatctgaaggatgaggacctggattctacatatgttgcaaggcgtgaccaattgaaaaagctcgttgctagtattatccgcccaaagatagtgcaggggaaaacactaaacgggaaggaatttatttctttcctggaacaggtgagtgtcaatttctttttctgtatggttgtatgctttaaatatctcaaaccatttatatgactgagtggaagtgtgtcgttgaaagatcaaaaggaataagtggctgctttctctggtgctcttacatactttatcaagtaaatagacatgttttctcttctcatggatggctgtgtttccttgctactttaagttatccagttagcttgttcttaaaatttgtataaacaatggtagagaactttttttaatgtggtcattttgattcatgttgtccttgatacttatagtttcataccctttggtgctatggtggtatcccattacgtatcaatttatgagtgcgtgtttttataagtgatgtatttgttactagaaatctgatgagcataagtacacgttgttgatatgtaacactattggcttatatgatttctataatatgccttatatgcttacgaaatggtatgttgatatattccaattctgattgctagatattggatgcgttaaataaaggagagatcccatcaacaggatcactagttgaggttttcaataaagatattgttgagagatgtgtgaagctgtacaatgagaagatggtaagagtgcgactacctatgtccgaagaatctctccaaagtgcccatgaaatggcgcataatgaagctatcaaagcatttgatgcacaacattttggcagacaacatgcaaagaaatctgtcgatcagttggatgaacaaatgcaggaggtatgaattcctatgctaatatagaatttctattaagtgtggcttagtggatgaaacaaagggatgattctgaatttcgtgttggcaaatttggtagtctacggaaaaataagatttccaaaattactttcttattcattcttgtgcacttgaaatattgtccaggtatataagaattttgttcttgcaaatgaataccaatcgtcgaagctctgtgaggcgctatatacaagttgtgaagatgacatggaccacttacaggctctccgactcccttccatggctaaatttaatgcaggttttgtgtactgcaacaaaacgtttgagcagcaatgtgttggtccttcaaaacaaaattatgagcaaagattaactaaggtaatatatacatgtctatgttatgtgataagtattgaactgtaatttgatatgagaacttgtgtgcagatgatgggaaagtcacggtctttgttcatcaaagaatacaataaccgactgttcaactggctggttgggttctctcttgtaatggtggttgtgggccggtttatcataaaattcattttattagaaatggcggcgtggatacttttcatattcttggagacatacacaaggatgttctggacagcagaagctctttattacaacccagtctggcatttcatcgttgggacatgggaaaatgtcgtgtatagtcctgttctcgacttggacaggtaacagaaacaagtcttgagcaaacttctctcaatctctttgctcacctaaatttgtttgtgtttttggtaaatagatgggcgattcctatagtctgcataattgcactttgtgtgctatattggcggtgttatggaaagaggaaacacggggctcgctggcttcttccgctgtacaacaaccagaaga

SEQ ID NO: 2483 - DNA, 1338 bp, Arabidopsis thaliana
acttgtataatttctatattcataatgaaaaagctatagacgagtcgtggttggttagtaatcaatcatgtaaaataataatcgtttgccttcataatttctgtgttactgatgcctaaagttatgaatgaaaatagtatcctatatttcaatttgtaatgtttcaatttttttttgtcagccaaattttttgatttaaagttcaaaagaacagattgtgataacgatttctaagagaaaaacacgtgtggcaagtggcaacgtgtagacaacaaatggttgaggggagaaggagcaccccgacctagtcctccgccttgaagctcttccaagcaagaatcaggaaaaccaaaaattagcaaataatggataatggaccatttcaaataaataaaataataagtgaagtacaaattaataaattaaagcaggcctgttttgctgccaaaataaataaattaaagcacttatgatatatacaaattttagaaaaagtcatatgattaacaaaattttacaagagtattttaagctaatagaccgtttagtgactagtgtgatcatcttgtagaggtctattacacgtgttagtgactagtgtgatcatcatacacatgaatttttctacaaaatacacatggatttttctacaaaatacacatggatttttctacacatacacatcccagaagctctcctaaatccaagctttccacaacccaagggtcccatgcatagtctaggtttatcgaggcccaagcttagcttatgcatacatgctccttgtagccaatatgctctagaatcctgactccacaaacatgagattcatgtagctcaagttctccatagtccaggctttggtaaacatggctacatatcattctttagattttctagattctagcttccgagagaccgtactctgaacgttaactcacgagtcatgtgcattaaatgaaatacatacacgacgttttgtatacatcacattcaatctaccaaaagtattattttacaccaaccaaatggatgtaaaataatacaaaatggaactattcaacataagtataccaattcaatgtccatttcataagtataccaattcagccacatataatagttagcagaaactacataccattcaaagttatagctagtttatatatttgtaataaggacttttcaccagttggactttgaagccaccaaaaaaagtaggtgaaagtgagttggtggggggattcaaaagttccacatgacaaatagataatcagtataaataagattagttcttcttatattgtcttattcaatgcacacaaacatttacccaaa

SEQ ID NO: 2484 - DNA, 1180 bp, Arabidopsis thaliana
ttatactctacagaaacagaacaaacactcaatttgaaacctaaacatggtcgatgaagctaaagtaaacaacaaaaaaggaaatcgaaaatggcgtacagattggggaagatggaaaccctagaacttggaattggggatagtcgttttagttttagggctttagagaaatcgaatttttctacgaaacgctgcgactggtgtttatatgatatgattacacgtttttttgtatttgttctgtattagcttttgtaaaagttttcagacaaggattaatttggtaattaattagacaatttaagaaaactatatgaacaatttgactaagggtgactttttcaatctattgtataataattagatgagaatttaaacataaattcatttaatttttcaatgaattatctacgtaaataaatcatagaaaattaagatactctaataacaataccaacgacaatgtggattcaaagtgcctaaagaacaaattcttttacttatgtaaaaaatcctaaactttaaagaacaaaaattaaaatacaaagataagtaattaacattttattgggcttctaactggatttggttctatttatttgggcctacgtttgaaaacctcggtcttaaagaatttgtgtccagctccagcacaaggagaggcttatagaccatatgtcttttggtgtctgtttcaatgggcttacatgttttgttttcaggcggcctcgtcttcttgacacacacaagtttgtaacattgggcagtgtgaaacatacacaaaactaaacactaattaattctcaaccacaaatatttaagtgtgatggtgacttggtctcatataatatgtgattttgtaattttgttcgaaacccgcatatagagttgttaccaattaatacctaaatctttattccggatacgtgcttttaccaatcttaaacagaccaaaagaaaaactatgactaagttgaactgtatatacgtgttttaaactgtatatacatatcaaattgaatattaactatatgacaagattatcaaacgggaacaaaaaaaaaactatatgactaagttgtgatgttgtttgtcaaattttatgtacgtcaacaattcaacataattgacattatcgttgtttgtgtgtgtgacaacaattgattatagtatttttata

SEQ ID NO: 2485 - DNA, 2000 bp, Arabidopsis thaliana
atgatttgcctaaattacatgaagttatacatggagtaagtgattcgcctaaactactttacatatgatgttaaaattaaatgattcaagttggatgacaatatttagtcgaaacagtagttatcactggtattttctctgttccaagttatttgatgttttgagttttgttatttgtttgatgttttggaaaactatcattatttttttgtaaccaatagtgaaaggagagaagtaaaattaatattattaaattaagccaaatattaatcatcataaattcaaaggtgactaattaggtagactcctttctgtttttaccctcttgattttattttttatttttttgttaagagaggatgagctcaactttctaaagcatatattgtaaaaaaaaaaaatcatgatggaaagactcgaattcttattcttcaattcttatcttcaacttaaccactagctaatagatcacggtaaattaataaattgattgtttttttttttgggtcaaatgtaatttgattgttcatttttaacactttatgcattaaaaataaattactgataagagaaaccaaaacattactagtgcgcaatataaaacctgaatactactcaacatattcataaatttccaataaccacattatgatagtagtcaacatttctcaaattgctcgcctaagtgcgtttacccatactttcattgaaaaaatggtttgttcagtcatcagtgtatgtataaagtacagatatcaaacacgagtttgtgaataatgttggtgcgttccgaatttaccgtgaaacgaacgcaccaaacgtggtcatatatattgttgatagtcgaattaaaaacttatttaacgtcaagtctccgattatgtgcttaattaaggttacgatctgtacattaaacgccaacgagaaactacgtaatagcatgtgagcattgaattaagaattaaacaaaatcaagtgtttaaagataataatataagaaaatcacacacaggatcacacaagatttagggcaagcttaaagagagaacaatgtttggaagggagagaacatcggcttgtgttaagtgggtcaagtagatactgtcttctctgtcttttactccaactcatattcatacatgatacatgcataaaattatttataatacatttatacaaaccacttgtcttttttttttttgatatgtaattgagttacaggttgttcttacatatttttgatttaatatatatatatcaataagacaaataaaattctcgattattaggaaataatataatgaacatttgatttaatttcacacataggtgggttgtgtccggtcgtcacgggacgagttagaagaatcgtaggttttgtaggctaaacatgccgcagattgcagactgtagaagtcattgtttcatacaaaattgcagaccagaccagaccgtgaaccttttgtatttgataataattgaagtacagatgttaaataatatattgtctatgctatatttaacttctataaagcgataaacaatgtaagacatatatatgtttatcaatataaaggtgataaaatatattattcggtttgatatgtttgtgaatgtccaacatatatcataatcatactattaatcaaagcgtatacgttttatgatttggtttagttggaatggttagggtttactatggtttggttacatattactcttttaattgttttgtttggtttagaaattgggccgataggcccgatactgccatattcttactgctttgacccatttatatatgagtgtcaaaattttcaaccttatcgcgacgactctttgaagcttccgttgctgacgtggatcactcctctccgccacaaaaacaaaacagaaaaacaaactcagacatgagcaagagctagccgtcactctcactctctgatgtctcacgaattccgatttcaattctaacttaaaccatatttctccgatcaaac

SEQ ID NO: 2486 - DNA, 2000 bp, Arabidopsis thaliana
gttgaaatattattttatcaatttgagtgaaaatgtggaaatccactattctatcgaagttccaactctaacttggtggaaataagttgtataggataaaaccataatataatgggcattgtattaataccaaaactgatcccattccaaaagaaaaaatggaattttacggtggtattggctatattgatactttacttggagaaaaaaaaaaattgattgaaaatatgactaatattattagtcggacagtcatatcaaaatggagttgaaaaacaaaaatggctaatttggtaaatgctccatcgagattggaagtaagaaagaacatcttttcatgatttttaaattgtaaataccgttagtgagtgttttctttgtttagtcaccttgtgttacaagtcctttctataagccactgatcgttttgtataaataatcaagaaatgcaaggcagacccataattattttaataaacaattatcatagtcaacccaaagtacttccaattccagctatggttaagtttgacttcacgataagtttcacctcacgcttaaatatatatttccatctatcttttctttttgttaaaggataccttcattatgggttaaaaaagtgtaactgtcaatctgtaaattttttattggatacaaagaaaatttatattaacgacaacaggtatgtttaacacatgagacgataatcaattccaaatttccggtaacggcaactatgtcctaagccacaccttgattgagtccatttaccacaatttgattttttttttttttttttggtttgatatttagtaatatcaattcacaataatatttatgaaaatatcttaacatacttgttatcaatgctgatccaacgtcttaaccaacatacctaactgataactagttccagatgaatagtcgtccaacccatagcacacgatattacatgtacaacacatgattcaaaataaatcatactggattttgcgaaatgtttaccacgtatagctagaattttccaaaagtttttaaaaaatttgtactttggagatttaaatcctgatatggcatagaaacatgaattctttttaggccaccaccaaaccaaaatcgttttaagtttttatgtaccgttttcgtcagaaattaactcactgagtaacatgttggctctataattgtttagttaaaacaagaactgatgagaatggaatatcaatcattaaatgaccgcttcaattttacctcggtttatcgcttggccactattttatttccgaaacccaaaagtagataaactagtttcttttgcatggaaattttttccaccttactttggttagagattcttttacttcgtttttctttaaagaagattttacataatctcattcaataaatttatgatatattaaaaagtatctttttcagttcaacatcgcagacattcataataactgccaaaacccatttctttgatcgtaccgtaaaatgtgaatgcgaggcatgaataaatttcggtcttttaaaaataaaaataaaataaaaaatttcagtcttcatcagaacgaccgaacactacatttagtttttaaaattgaaaaaatcgttttaaggtatgcatgacccataagaagtggtagctaagttcacacggcattaccagtctcctcatgccacttcatctcaagtcgttatctttgaattagtcaaagtcttcgtttcccttattttttaataaataattgcggctttcacttgtttgactttctttttattctctttacaaagaaataacaacaactcatgtataggcatcttgtttttaattgaattatgtatatatagagacataacaggaacaaagtccatatcactttctttctccttttccccttatcgataaacttgcgaaaccctaaaagctaagaaacttaagagtttaaagtttaacaaaaacaacttaaaaagagttttgagcagtgaaatta

SEQ ID NO: 2487 - DNA, 2000 bp, Arabidopsis thaliana
tcatctttattaacatcaactattcagatttgtgtaagacaaaagaaagaagcgaagattacggggaccaacagtgacgtggacctctccccgtcggtgcccataccaccaactttactactccagtactggtcacttgcttgttcgaattaaccaaatccaattattcgtaactatgtttcagattgttggctaactgatgatcaatcctacaataatacttaaaacgtttattagtatattgtttggaagatggtataacaattcattggttactgatgcttgttgccaaaaaaaaaaaaaggaaaaagaaatgattaaacgcttgcatctgtttgatttggactccatagattcctttatatagtcaactataatcaatacacgtgaatcatttcgtcatttgattactgttgagacaagagtcaattaccaccaaacatattattttaaaacattaaagttccgataacttcgggtgatggccgcaaatttgagttttggtttgatattgtatatggtattatggtttgagttaacattattattattgtatcatcaattcatcatccgaatttagacctacataataaatgcaagatgttatatacaagaaattccaactgccacaatatagaaaaagagcagcaaattttatttttttctcattggctttcataaatgttacttaataagacacaagacgttgggaaggactgaatgactttactgatatgttttcatgctaccaaatttcgtttttcatcattctaccatatcaatttcgaagtagaggaataatgtcgtgcacaaccaagtctcggtcccagctaccattttcttcaatgaacaccgcaacacgtaaacgcaagtgataccgcaacctagctaatgaagttttggttaacatgaactcgcactatatgacttccaaatcttttgtcttcaactcttttttaccaaagattcaaaaccgtaggctcttactctataaagctagaccttgtcatttttaatgatattacacagaacaaaaaaaaaaatataaatccaaacctaaaatcacaacccaactccgaagataataaacggcattgaaaatcacacaacaaccttaaaggctataatcgtcactgaatgttacataccgactctgaatataacataacttataggatactaaaattatgtcaattcagatgtaaagttgtatcaatttattgaaaatactagctactatatgaaaaagtttagaaatgtattggggaattaagttttccgaaagagagtgtttaactaatattgcctcaactcgttttatgaattttcaaattttagtcatgtggatatggaaatggaatagaactgaaatacattcttctaatcaatcataatccatacaaatctgtatttttactcatttgtatttaaatgtaacaaccacatacataatcccaccttaagtacatgattaaggaatgacttttcagcaaaacacacctcaaaattctcaaattcttgtcagttcaataaaacaatttccttgaattattgtcagacacttaaaagatttgtatgcatgtaactgctggtcccgtattaatatttattgcttcattccttattactaagcaacaaaagtcacgcgtgagatataaaagaagatcctttgcagtttctctgttcttgctccttcttcttcatctccctttattgatactgtctgagtaataataaaaattcactctttttgtcttctcaagacagatttcaaaatagaaatcattctccttttttctttttgaaaatttcgagtgatttaaggagggaaaataaagacagaaacaagaacaaaagcatcgtttgcgaataagacttctcgtactctgttttcttttctcgtgttcttatgacagatttataaaaaagattaggtttttgtcttgtcttggcgataatgcctagagagtgttttaaagatttgatttaaatactctttt

SEQ ID NO: 2488 - DNA, 1460 bp, Arabidopsis thaliana
ggcctttgagtttttatcagcttctaaatcttcggcagattttccaggaaagaagactttcaagagcccttgtgttagactggcagaaaattctttatacctctgatgaagtagcgagcaaatctgtcaaaatacatggatatcagcatagaaacaaattctgaacagagagtattgtcgtatgctactttctatgccccataagaaatacaaacagaaaagagacccaaatatcatctaaactaagaggaaaagatatcgttcaacagaaacctaaactgtggtagaggatttgccataccaagtggtggaaagcattaagaaactatctaaatataaagataacaactactgaaaatctcaatgtgacaagttgatgacgagagtcgcatgaaaaaacataagaaacaaggtgtaaatacagatacaaaagaacaaaacagggaaacataacctgaacagctgcttgtatatctgagcttttgagcttagcctcacaaatggcagtaacagcttcactaacgaatttgctaaggttaacacctcgcagatcatccatcaacccttctcgctgctcttcattgatctgctttaacttcttaataactgctgtattccgcttgatactagaatctagagtcctaagatatgctgaatctgtaacgtggaaggactcactatcagtaacaactcaaaactacacattctaaactagaaaagaattattgtaaaatcgtgtgctctcaagtcctgaatggctattataggtactcgattactaacagaagcattgtggaaatcctacatactcaattccatgaaaacaaaaactaaccaggtcgttcaggattgagattgttttgacgaagagtcagtttagcttcaattgacttcttaatctcttcaagacgagcaagagcttcctgcgataaccagagaaaacaattttcgaattgaagaatgagatcatagtttcaatttcatcgagtaagacaaatccgtaatctcgaaatcaaacctcgtcgtcttgtttctcgctgtgggattcatcttctggatgatccattagggttcagggagataaagtcgtgtgatttcgagtcaagtgatcgctttttcgatcggacttaggtttagtgtgttcccggagaaagagatgatagaacccggccaaggaatttttcaattaacacaaaaagagaattgagggaaaaagcccaaacgggtcaaaaagacccaataccaacgggttttacccggcaggactaagcagttaccaaaataattaccaaaccggaaccgaaaaaaaaacccatcgtgttggtaaaggaacctatgtctgaataggtaaagccatggaagcaaagagagggacagtgacataaaagacatgacacgtgttcctcacgagcctactaaaacaatcattatttcttcttcttcaccgtgttcttctctcc

SEQ ID NO: 2489 - DNA, 2000 bp, Arabidopsis thaliana
aaacggaaaaccacaaagattcttagcaaagaattcatcaatgtaaagaacattgtctaaaatattttggtatagaggtgaaaactcataatcttgggaagcttgtatcgagctagggttttgtttatcgtatcagccttcagtcccctatacaaagttcctggtccatcaaagtatatgtaaggtgtgtcagaccatacatgcctccatcgtgtggacaagactgaagttctgatagctaaattggtcggaagagaggagaggatttgttggaggatcacatcaggaagcgagctgattgagtctatattttcacttgcatctcttgctagtttgacatctctgtagtgatgatgagcgtagcagtcaccggcggtggcaccgtctccgtttccgccgtcgtctgcctctgccattacgttatcaaccaccgattgtaaacctagatatttgtttgcaatgacatagctttttgagtttttgggtttatcacaaagcccagctatatatatccaaaatattttaaaaagcccattactaaacacgcacaacttttttcttgtccggaactcaaaatatgtatgtacttaacaacttaatctgtgaaaaaaaaaaaaaaaaaatgtactaccaacttagtcatgttgatgtgatcatcttcttcttggattgatattactagttgcagaaagtgacaatttgatctattagaaaataattgcttatactacacatttgttttctttcgtaacagattggtgggatctttaagaatgtatcgtcatgattctgattttatagaagaacaactttatttaagatgtgcttacatattctgcgaaaaaaccggcatgttgaatggttttagtctctctgaaccgacaacaagttttgtaatttttaattttatcttacagtcgtcacttgaatcttgatcgccaatttttacatacttgagaagaaaaatatttaaaaagccaaccgatttattcgtcaaagcctcaaaggctacagatttttttagccaacgagcaaatgatatgcacacgcggatatgggggatccaaaaattaaaatatttgttggtgtaactttgaagcattgacttaaaaaatagtggttttatcatatgaaattaaacacttaaaaatttttgtggaagttgatacgggatcacaattttacaaaaacaaatagttagtcaacggagtataacttagttttacgtctaatattgttagagttgacattttataacatgttaagtagtagaaattgtagatttgactttctagattcttcatttgatggttcttatgatcgttcgtttataaatttgtactacagaaacgattaatctaacattattttacgatgaagaactaaaatttgaacatatagtgtcactaggaaaaaagattgattttcaccttaacatctccaaacgtagtaagtagatgtgagtttgatttgctaaatcctaaatgaaaaaaaactaacaaaacacagtcaaacgtgaaagaatttttgagggggtgtttctgataaatttacgacttaaggtactagtttaatgttattttgaaagtttagggggtggttttgaaacgtcgccaaacttgaattgccacttgtcagggaatattttatcattttaaaaagaagtaacaaaaaaaacgtgttgccgtgtagaggggtgcgaggagaatctgttaaatcgtcgctatcaaacaagaaacggtgtcgcattatcgtatagtcctcttcctcaaaatcctacccaatataaacagagccgtacaacaaaaaactcgatatcttatcaaaaactcgctctccatccaacaaaacccgaagaaagagagattcagactcaaatctctcagtaggaatggttagttacgttaagatcaaatactctctggtttatatctctgtcagaccatatctgaaaatgttttaaatttgttcttcttatgtaacgaattggggtatttggt

SEQ ID NO: 2490 - DNA, 2000 bp, Arabidopsis thaliana
cctaatcactagagtactagacaccaatgaaaattgagatgtcacatttacgttcaactgtatcttgtcgtagggaactcgttattctagatatataaaaattttacttacagaaaaatgacttaaataattatacatatgaatacaaatgatttcaagaagtcataatcaagaattcactaaatggaatataggtttgacttgggtggtaggtttgtgattatgagtcttgtattgttttacacgtcgctgtctttgtttggtattacttggactttttttttttatagatgaaaatccaatttttctcaagaagattttcgacacggccggttggacaatattgacgtacgaaggtactacttggacttgccgtgtcttccacacagctaaaaattaaaattcaccttttcttccggttataatggttctaaaagtcacctgaattttcttccggttataatggctctaaaagccaccttcattccatacactattttcagaaagtattcagccttttttgtttgagatgtcaattcagattagaaacctaaatcgatatttgtttgtttaacggttacaaaaataaatttgacaacttgattgttgcaacaattgaaaaatagatttctaataaaattttagtattcatacatgattttttttgtatccatatacagacatacagtagtactagtatgtgtctgtaatctgtattcataaatgcatatatcttccaagtatctaaaaactcaaaacgtatcaatgtctatagtagtctagactccagttgaatcggatgttacagataacttttccacaatttatggaaaagtaataatttgtaaagtaaattatgagcacaggtttaaataatttcggccgtatggcccaaaattggattgtgtgagacatgtcggttatttggcattttgggttggatagtggtaagtaatatgcccataggcccaaaaagcccactagcaatgaattaaagcctattacactttgttttccataattctcctcattgtttatttgttttagtagtatttctcaaacaatttaatgagttgtttttcatcttaagaaaaaaacaatttgcaaagcaatacacatactgaaaagaaaatcaaagcaagtaataaccatatcgaaaaaacattagaagaaattttaaaaagataaatcccaatcaaaatgaatgtagagaccaaaacagtggacttgggatacaaaaacaatatcattgacaatgcgataaaaatatattgaaagaccagtaataaaccataatgtctttaggtaatctattaatcaatcaacaaggtgttatagtttatgcccacttgaaaacacaatgtgttgattttcgaatcaatacgtaactttcaatctacaaatgaattataaagtcattcatttttggtattaaatacaagaaatatcgtccgagtcagccaatttaaaacgttaaagcccacctttaacttcgtccccaagccaaacttttaatttctcgattgtccgctacgctccacctcatcccaaacaaattacccgttttacccctttgttagataaagttaaaactatttgttagtttctttggtaaaacgaataatatcatattctccgtctatgttcgttattctgtttttaattttcggttcgttacagcttccacagcaagctcaaatggtaatatcattaatcatataagggcatttttgtcatttaacatgagtattatattaacctcatcttcgcttcatcttccttttcgcctatcttcctggatttttctctttcgctaaaaagaaccttcaagctctgtctctctcatcgctatataatataataaaatcaatcacacacaagactcgtgaaaggggacgatacgcgttttttattttgtacagactcaaattcaattcaattcaattttattcataagttctgggtttgaaatttgaacaattgaccgagatttgggaacg

SEQ ID NO: 2491 - DNA, 2000 bp, Arabidopsis thaliana
caccttgttgattgattaatagattacctaaagacattatggtttattactggtctttcaatatatttttatcgcattgtcaatgatattgtttttgtatcccaagtccactgttttggtctctacattcattttgattgggatttatctttttaaaatttcttctaatgttttttcgatatggttattacttgctttgattttcttttcagtatgtgtattgctttgcaaattgtttttttcttaagatgaaaaacaactcattaaattgtttgagaaatactactaaaacaaataaacaatgaggagaattatggaaaacaaagtgtaataggctttaattcattgctagtgggctttttgggcctatgggcatattacttaccactatccaacccaaaatgccaaataaccgacatgtctcacacaatccaattttgggccatacggccgaaattatttaaacctgtgctcataatttactttacaaattattacttttccataaattgtggaaaagttatctgtaacatccgattcaactggagtctagactactatagacattgatacgttttgagtttttagatacttggaagatatatgcatttatgaatacagattacagacacatactagtactactgtatgtctgtatatggatacaaaaaaaatcatgtatgaatactaaaattttattagaaatctatttttcaattgttgcaacaatcaagttgtcaaatttatttttgtaaccgttaaacaaacaaatatcgatttaggtttctaatctgaattgacatctcaaacaaaaaaggctgaatactttctgaaaatagtgtatggaatgaaggtggcttttagagccattataaccggaagaaaattcaggtgacttttagaaccattataaccggaagaaaaggtgaattttaatttttagctgtgtggaagacacggcaagtccaagtagtaccttcgtacgtcaatattgtccaaccggccgtgtcgaaaatcttcttgagaaaaattggattttcatctataaaaaaaaaaagtccaagtaataccaaacaaagacagcgacgtgtaaaacaatacaagactcataatcacaaacctaccacccaagtcaaacctatattccatttagtgaattcttgattatgacttcttgaaatcatttgtattcatatgtataattatttaagtcatttttctgtaagtaaaatttttatatatctagaataacgagttccctacgacaagatacagttgaacgtaaatgtgacatctcaattttcattggtgtctagtactctagtgattaggttttcgacatttattgtactgattaagtaaaaattcatggtacaaacatcgaatatatatttttctgcttacacacaccaattaacgtggatagaccaattgaaatattttgttacgacaaagcaaaacaaaacaaacgtcatgtttcgctgtttgtttgtcgtcccgttaatggtaatctttcagacacatacagtacccaaacaagtaatttgactaaaattttctctctgtctaaatttcagaagaaaaaaaaactttaggatatattgccaaaagatcttaaaaatgggtcatatcattttgatcatatagaatccaacgacctttatcttttcgccgaactatacttttttgtgtccatttgtttgactttctttcacacacacatccacaaagaaaaaaggaccattcttctccttcttctagtcacccctcgtgcctctctttaacaccaaacccaaaactcccttctctttcttccttcctctccgatctccgttcacatctctctctcatctttatcttcttctttttttgccttgtgggttgaaagtttctatattttctctttctcttctgtttacataatccattttcagctcaagcagctgaagaataacgatcaagaaccaaaaaagaagaaaacgaatctgttcttagctttg

SEQ ID NO: 2492 - DNA, 1772 bp, Arabidopsis thaliana
tttcaccttcttgtctaatcaaacacttacgatgatcataaaaacatcatctatagttttagaagacaaaagagtgactactaagaaagaaaaaaaaaagttccaaaatattgaagatattatggatattgttttgatattttccataccttgtagaagcttcaaaaccaaaacgaatctttattttgatcaagatccgaaaaaaaatccaaaggttcaaaatctgcctctttggtcacaagaaaacagagaacatataatacatttacacgtgactttttttttttgtgtgtcatcagatccaaagttgatatgcctcagcttatcttctttactcgatcaaataaacttctcttctcttcaatttttttttaaaaaatcttacactagtttattttattttccaaatttggcggagacataagaaaaaggaatcagaccaaacttttctttatttagctgctgatagatcgtttcatcattcctttactcgattatacaattatcaaatatatattgattagtcaacacaaaagtgaattattgaattttatgttgttggacaaagtaattttaacattctagttacaagtaaacttgcaagatggatctatatatagatggaaagatttgtgatgtgaaaaacatctactcgtatcgtatgttataacaactcatacggttgaaaatcgtgtacagtaaaacctctataaattaaaaatgttgggactgctaaattttattagtttagaaagatattaatttatgtattatacttttagtatattgaaccataatttgtacgtatttgactcttatgcatttacgacaacaattttttaaaccctatatatgttaacaagtaaataagtcattatcattaggggtttaaatatctgaacttgaagaatttgtaaaacggttctccgcgtcatcagtatgtataatatggctggccactccttagaccgaagagctcgttgtataatatgttttattttagattttctcaaatctcgcggagacatggaaaatgaaatttattaaatggatggagcaatttggtaatttaatcagtatgtctgtatgtgttttgtaatgttatagtttaagatatgtatcacaatcatctatatgtgacgtatacgacaagaatttaactgtacgtacgatacccttataattattattcacttagatttttgtttgtactttagaagaatctgaagaagggtcccggcgtcaccatgcatgtatggtcactccttaaaccagagattcgtaaataattatattgtagtttccattgttattgtcgatttatttatggtccccaatgttctcttggagtcgagggaccatacatttagcttcaaaaatcttacgattaggaaacgtgtgacaataacatttgttttgttagctacaattcctaatttcctatgatttgtacaataatttaaagattaacacagcttgtgggatgcacatggaatttgtctaatagaatttagttccatcatatttgcatacaaacaattgtcacctattaatactttcattattactttcgatgaaacattgttattgggtatataaattaaggcccggccctaaagcccatttattagccacgtgcagtaacttattatttttttcacttatcaatagtaaaaaaaaaagatcaaaatgatcactcttttgagtgtgagtgaacacacttcgtcgtctctctttcactacttttgagaagctctcttcttcgagcttcc

SEQ ID NO: 2493 - DNA, 2000 bp, Arabidopsis thaliana
ttttcttgttaattaagaacttaacgatgtaagattattgtaatgtgactttgtaagttgacccttgaaaagaatgttatacatttgctatattagattgcgactagaatccaaaagtaacattagatagatcatcaatttgccttaaccagtctcgaggccaagataaacttcaagataaccaacagttacgatatttccactggtgtccaagttctgaagtttgatcttacggtacacattagcgtttgttttcatgggcaatgctgtatttgccctcccaatgaaaaatgcgtcagtgtcagctgaatttacactgaacaactccaaattgagaaaagatgaagccatgttttgaggaagatgcaaaacctcacggaactcaggatctgcgtttgttgtcacaatctttgtttggcgtggatcatcttcgttagtccaagctctcaacttgtagttgtatttttgttcaccaccgtcgccaattcctgatgctcctactaccattacgaataagtccattttttgttgttgtttctttgattttctctacacgtaagacatatataagggtgttagaatttatagtgggagagctaaaaaaagctaaattactttcataatagtattgaaaatataagctctacttagttttttttaaaacctccaattattgatgatgtgattagtttgctactgtattttgagtattacttaaccaaaacttatcataacatctatttataataagatttaacaatattttataatttgtgaaaataatttattgacaattatgattaatattaattattgttaattttcacacctgtatcaaaataaatgatggggaagtatgcacttaaatctttttaaaatggaaatatgtgtaagcacgctattagattaaaaactataaaatgccacacgcccaacctctatattaaagatacatctactcatattaatcgtgagattaaatttttcatgtacatttggtattatatccatcctgcactccaacttcattcaaatcattaacaatttatttacttctgaagttgtttattaacaattgatacctcaactgccaaagaaatgtttctctcttgttggattcttctgtccaaaagttagagatgggctttgggcctgtacaaagagctttaggcctaacctgaaaagtttaaaagaagctcaattaaagctagtaagcccatacgatggtgagagatagatagctttcgatccccaacagtcttactataaaatcaaagaagataattcgaagcaaatgaattgtaatttagttttacaaaacgagttatttaagaaaatgaggaaaatatttcagtcttaaaacatattttagtttgtctaacaatatgcataatgtagataaaactaaatcatgatttatctatgatactagtataaagcaaatatgtaaaccgagtcataccatattcagccaaacgtttaaaagttaaacaaaccacggaggcaaactaattatggaatgatatccatctttatatgctaagctgaatcaaataagaccgaacacgcagttcaagaaaaagagtcttatccagctaaaccaaactagtagtacatggaaggttaggcttccgtaatatcactcaattataagggcatatcagtcaattacatacctcctacactcctcattcctcaacgtcaacttgcgtgtctttctttcttcgaatgaacttctgaagcgaaaaaaagagagaattaaagtcattcattatttggggaatggagaagaagctcctttcctacagacgccatcattaacaacatcctcttaagcttctgcgattctctccgtttgtcggaagatttcacgacgattcttcaatccttatccgaaccggaggtaattctggatctcttcctccttggcattagaatcagcgattttcgatttctcttgtttttgctcataattttgttggtgttggaatatagaaatc

SEQ ID NO: 2494 - DNA, 2000 bp, Arabidopsis thaliana
tatagctaaagaaagtgtatttattaacatatataaaaagttggttttagggtaagactaatgcctcgaatttactagttgtaacattttattctttttaaagagaatatgtgtctcgaatttactaggcgggtgtaattggttgtagaaaaacgttattgttaaagatggctttgatcagtgcaaagtgcaaacaagtgacgtacgtaaaatagatgtaaacaataccaattaaaacataagtagttatttgaaaagaaaactcttaacataaagaagattatagaccactaatttgtatttcaaactatataatcatttgtcctttgttataatctacttgtctaatgtctaatatgtaatggaagaaatggtctgtcttcactcgaaccgtttccaactgatagtattaattaaattcaatatccaatgtaccgataaattaacagaaacatccatgaaagtcttggtcacaaaaaatatatttcatgcacttaaaagagatttggtgaagaaatctcaaaacagtcttattacaatcaaaatttatctatcgtatataataaataaacaaaaaaatcggtgagattagaatattgaactggaaaagaaaaaagaaaaaccaaagtcaaaggaaacgacagcttccaagtaaaacactattagaagattaagtgagaccaaactccaaccttcctcacatattttggataagcttcgcatctatattcctcctacttccatgtgccattcctttttcaattcataacacggcaccgtctaaatgcttatccacactacaataaaaaatagtcatttttattatatacgcgtttcaaatactgataacacgatacagtactaatttaggggacactatatttgtgaaaactgcggactatacacttttctagtatccaaatttaattttgagcaataattttatcgtaacgtatatttgtcttataatgctcctacttgcaagtattatcctaattgtttgaccttatagatagagcttttataacttttgtagggaaacatcaaacatgtattaaaatctctagtgttgcgaatttaagtttatgctttcttgagtttctttaattgcccgtcattacgctactaaaatttcacaattttgtccgttttatacataaatatacataaacaaatacgtgatttttctctctttttctattcaattcattatagaaaataaatgacgtttttcatatttgcaactaaaacattgttttctttcagttttatgtggtacatgacacctgttatgttttacgattgttgatatatattcaaaacaccatgtgcatgattagttgaacttgtagctgtagatcgacaactatcaaaattattatatatttgcttcgatcaaaaactatctacagcttgtaaatattgctcataagtgacaacccataacgcatgactgactttcaaaaatgtatttgcagaaaattttatattcttatcgatcaacccctaaatgttatactacatcgcatatatcatcaaataaaacatttctatatatgtattaacatgttatgaacatgactgtgtgttttaactttaacttttattaaaagataatatcttaccaaaaacgagaaaatattcgatatttccttagaaatcagattactgaacattcgactaatcatcaggcatttacctttcatagaaaacagttcaaaaagcaatataaagccaaaaaacgaaaaaaagattatcctgaaattaatccacagtactggttttttttttttttaaaaaggagaccgcgtttctacgctgactttcaaatcagtcgcgtcggtattattccacacgccttttttctcgtccccatcctctatccacatttctctctatatatactctcctcgtatcctaaactcatcctcaaattcaaaatttaacacacaaacacaaacacacacaccaaaaaaaacacagaccttaaaaaaataaaa

SEQ ID NO: 2495 - DNA, 968 bp, Arabidopsis thaliana
ttaatgaacctttctatctttattttatcaaaataaaattatacttcaaaaactgtataatgcatgttacgctatacttataaagaagtcttttattgtttcgtgtcgtactatcgttggaaatttggttgtcacatcaatcgttcaaaaccggcctctaaatgttggtctagtggcttacggaaataaatatcgaagtatttattgtttatgttctaaactaatataccgtgaatattcaacatttttataaaaaagattatcatatcgaaattcgatatacttgaccatccaataatggcttgtattgcttttttttgaataatcaaatccttctgtcgtattcttaagaccatactagtattatcttatttttgataaaagataagatacgatattggagccaaaaagtagagttaagatatgatattttcttgattactaaataacagaagggagaaactattgttagtttgagcttaagtaagaaaatatatggttattatggtttaattttgcatgattactactaataactaaatattctgtttatctgatctcattatacatgtagatactatttgttgcttttacaacaattgtagcaatgaaagaaaattagaaattgaagaaaatcttgaaatgaatagacaaaggaataaagaaagtgtaagaaagcaataaaataaacatgaatatagaaaatgcaattggcgaagagtacacgttgttccacttttctggagaaaaaagtgaataattgaagaaaagacgttataccttccccatccacattttcttgcttaactgcagaacaacaccaaattcgaccctatcaagttttgattcgtgtctacatagaaagagtctcaattgttctgtccctggacttttttttgtttcgtttttcttgttaagatcgaaaactctgttttggtagatttttgtgttcttgattttgattcaag

SEQ ID NO: 2496 - DNA, 2000 bp, Arabidopsis thaliana
acttctccttgcccgtgtttctcactcgctttaccctaatcactccattacaactatacctacaagaccattaagataagcttatcaataagaacactgagataaagttgatctctatttacgaattgtttactaccaatagattttgattcgtaccaatcttttaaagtatgtatgtattgtttgaatagtagttctaccgaaccaaaaatattttaattgatcatgtaaaatatatttaagattgttgtgtgttaattatagtgatctttagaaaaaagagtagccaacgtgataatgaaagcgcgtgttaagagtattgaaacactcacacgcttgtggaggttacctgctaagtcggtcgatttgatcgatggtgggtcttttacacatccccaacgtcatttaccatttattcaacctcatatattatgttcttgatgatgaaaaagaacataatatttttttttttttttttttttaatttttttttgatgatgatgaaaaaaaaaaatattatgttcttttttaatttctttttaatatttttgacagtaattttattttaatcttattttgttacaaatagtttttaataccttaggacctgttggaacttggaaaaaaacaatattttttaatatctcaggatctttgcccatacatgttttgggcacccatgcgtttatatgaaaaacagcatgcagatgtaaaatataaacaactgtagatttggtcagatgttaaaatttaaattatgtcttttgaaatgtgacctataattgtccagatagatatacataactatttagtaattgtaagtctatttcctgtaatgtattcagctaaatgcatgtagataatctgatatcacatacatctatagccatatagagaatgcatagtaacatcaacaacatataaattttgggctattttctaatgagggtttttgagtataaatggatctcctaaaacgagtttaccggatgggtaaggtagtagttccctttgagttttctttctgctttgtataattaaaacaaagtaattgattaggaacttagtaggtcctaaagagaaccaacaatggtttcggttataaataaaccaaatgggtacattatccttatatctagaaactttaaccaaaaacaagatgttatctagaaacaataaatacatccggaatgagactttttcttatgtaagtcgatacaatgggggcattgttttatttcccttcaaatgaactttgctttttgatcattttaaaaagccatattgaaaaaatcaatgagataggaagatagatattataatattctttttataaaaaagacaaaaaaaatacactaaaacaattgaataagagtcagcaaaacaacgacgtccttaccttttttaaaagtttcccagttttgacttttgacctaaaccatttccatgtagaaagagagcaaaaaacaaaacaaaacaaagataagtaaaaaataaaaatgatataaagaaggaagaagaagaccgagaaaggtagacgaaagaaagagcgtaccttcctctttccttcttcgtaaaaaccaagttccttttaaaaggagcctctcctttctcatttgatccttcttcaaaaaccccaaccacttcttctccccaaaaacctccaaagtttcaatctttacttctctctttttctccaagttatcttcttttctaggtatgtcttgattctttctctctctgttttttcctatttcattcaggattctgggtttggttaaatctttaatctttatggttttaatggcttgattttgacgaaacggtcgtgtaattattcattactttgcttaaattggggattgattttgtgtataaagaagaatcttgaaaatgaaaaattgaaactttgaatcgaaagaactcaatttgcgttgctctttctcattctttgttgctttctcctaaaagtttttcacttttgaatcacaggaagagat

SEQ ID NO: 2497 - DNA, 850 bp, Arabidopsis thaliana
cttattattgagtttaaggtgtatggaaaaaaaaaattgttgtttatcaatacttgttctaagagatgatgagaagtgttagcctacattatcagcttatatagagttagcatctctcaatgaacaggtagaagaactggattatggttactaattaacaactaaaattgtgttttttttttagtggtaatgattttgattggttaataatatcttgttatgaagatttttgagtgtatatgttttttttttgttctctcctctaaaacagaatcttcaatttgaggaatgtgccaatcatatttaccaattacttgttgtttttgtttgttttaatttaaattgcataaaaccaaattgttttccttatgcactctttcttatttgttccaattttaagggatatttaattttagtattttagttgttctgttaacttttttattcactaatcacaaattacaagagattttctattaaataaatgattatttacttaattaagtaattagtgaaagagattttgaagctgcaatttcaattttcatcacataaaacaaaattatacagcttcaaaacaaataagtcacggataaacaaaattccagcaacgacaaaaagaaaaagaaaaaaaattccagcaacgcagttgaaccacaagcttgccacgcgccatgacccatcccacgatctcgtacgtacacgtgtctctcatccgcagcctcatcatcaacacatcacaatctcacttttacatatatctccctcgcctcacgaaaaatccattcgtcttctccaattttctcgcgaagaaaactttcctactttgtttcaatccaaacgagtcaaa

SEQ ID NO: 2498 - DNA, 2000 bp, Arabidopsis thaliana
agtttttgactagcaaaaaacaaatatcgttcacatttgactgatacatcatacaccaaactgaaaagacagcattccccaaatcacgtatagaatcttaaatcatataaaatacattttgttctttgctttgaaatatcaaatgttagtgtgatttgtcgtcatgcaacgcatgcatataatattaatttattatttgatttggtaataagtctctttatacatgcattgaatccaccgaccaagtctactatatgctttgaaagtttgaattatataataatagaaaagattgttgtgaagagcaagctgaatcgatttggagaattggattccgatctggttttataattgttcgactacaataatgtcaaatgggatagcaagaaaataatgtataaaggttgaaattgcgcaacacctaacaaaagggagagaaagaaaacaccccaaaaacaaaaaggtagaggaagaaacacataaaagaggagtgaaagagaaagaagcataaaaagaaaggaatagaaatagagcaccaatcaatgacttcaaattcaattatttcgaaacaaatttttaaatttatagattactaaaaatcaacaaacttttatagaataaatttgtaaatctatgattcattagctaaacaactaatttttacacactaaaacaattcagagatgtgtacaaataaagacatgtgttaaataataataattatttgtaaaaaaatgagatataaaaaagtagatgcaaccaaattttttaaaaaaaacctttaaaatgccataaaaccattctaaaagtttataactgtatatatagatttgttattaattattttatatgttgctattcatttattaaatatcatctagttgttcaccataatccataatagggacaaaatcttaaatacatttcatatcaatttttttctttcttacaatctgccaagttaaagaaattcacaaattataaaagagaaataataaggtagtattaaaaatttaatactagtgactatcaatagatagtaacaaatactaatataagtatatattaattacgcgttatatataccttttaacaaaatatattattgttgttgactgatacagagagaaataaaaaaaaaaacagtttcgatttttgttattgcaacaaaaagtttcggaaaatagagagaaaagagagtgagtgaggttggtgatgaccagattttgaggcttatcaatagtacaaagcttgcaaaatcaatggcgcaaattctgttggtaagtataagaaaaaaaagaaaagctttttcctttagatgtcatgtaactgtcgggagagcactcacgtgtttctgtctcttcacctgtaaatattctcgccacgtttgctctctttctttttttccccgagaaaacgcaaagacaaagacgtttttttaatttggctatagcatgtggaggctatgggttcttatcttgtatcgtcgttctttgtcttcaatatctttaattcaatgataagcagatcatctctttcttcactcctacacatcgattcacgtcatccacccagaaaaattcatacttcaattaaaaattctgtaagtggaaaaaacacagttggcaaaatgggcaaaagctaataattgatttatctccatttatggctaaaagcctaacactaggctctacacttttcaagtcttttcattttctgggtaattgttgttcaattttagagatttagggtttttgattgttcttctttttctgggttttatctaaattcgtggatatgagaatggcatgtgcgtgaatgtggcctactttgttttcttccttctaatttgggaacagagtttggttgtcctatttattgttactttgtaggtttcactcttttcgacattacttttcaattgcttcagattcataaatctatcttcttctttctttggttgttcagctttagcgtgttaggctgaacatttaagaacc

SEQ ID NO: 2499 - DNA, 2000 bp, Arabidopsis thaliana
aaagaaatgcatgagagcgttaaaacgtcgaagcggcctttgcatgtgcttgtaacatggtagggctatctactgacccacttactaatattttttaatgtattagtggcctgtctagtcaatccaggtaatttaaataactaagcatatacataattcgtatttaaaccctaacaattttggaaaattttgtcttaaaacttgattacatgaaaatcgcaaatttctgaaattcagagctaatcaaccactaaactgatatgttgccataaaaatttaagtgatcataatatatcattcaataaatataaaatgtactgacgacttacaaaaaaaataaaagctagttccacatgaagtatatctatatatgcctacacgaaatatacaataagaaatgagcacgatgtatgaaagaactagttgttgtcatatgcatagtatcaattcatcattggcatgctaacaagatcaattaaaatattctaaagaaccatgactattaagctcattttcaacaaaggaacaaaaaaacaaaatctgtagtagttgtttatcgaatatctatatactataaagtcgaaagcatcatatgaattaacacaccaattgttgatttggtgaatatctttatatagtcaacacccgctagttcgtaagattaaatctttgatatggttccaatttccaaaattttaaggtgatccgaacaaaaatagaagtgatacgaaagtctaaattctagactgtgcgttattcccgcttattattttagaaagtaaaatccggaaactatactaacaaggattgcagctgataaaaattacttccaaattccaatgtgctcatatttcaaaacaatgtgtacgcccttattttaaattctaatgtgctcataattaagctcatgtttgaatatgttcacttaaaccgttattttgtcatctgtaattcgactcctccacccacaaaatatttggataggctcccgacatggaggccatcactacgtaaatgcaacagtgacaaaataaagtataagaaaaacttgattatcatcctatgtaaatatttatatatctaagaggaaccgtgataagattcttaaactgatctaagtttttcaaagtaaattgcccgttgaacatgatgatgcattgattacaagtcttttgttgtataacttttaacacacaaaaatagtattttatcaacaacaaaaaaaaaaccttcaacaaaaatgtgaggtatgatcttatgagttatgaccaacgtaaaatgaagtaaaagacaaattaataaatacttaagtgtattgaagcatgtgcaagtatgggccacttgattaggaatcgaagttggtctaaccgcaacatttgcatgtggccacaaccttcaaagtcccttgatcttattatatcattaatgatccattcacatttttttcttttctaactgtttaattttgttgtccacaaacatattttacaatacatatataaatctggccgcaacaaaaaataaaataaatatatcttactctgctcaaggttaacggtggcatacattgttgactttgcttctagttatccacacaagtcacccatttggccatttctaaatttgatgttccatttcgttggagaaaaaaacccctatgtgtgtattaatgtatgaaagaataccaaaagataataaggatattcattgggatttaacgagaaataaaaggcacaattctctcgcaaattggtcaaaaatacgaataaataaatcaactaaatacccaaaaaggtgaaagaattagagacaccccaatgtacttcatatagtaaacatttaaatatgattatcgcttggcacaattattcactcgagtacccctatatatacccattccttccatttgtagattccatattattcacgattctcatcaaatcatctccgatactcacaaccgaaataactaacccctcctcaacaaaaaacaacaaaac

SEQ ID NO: 2500 - DNA, 1390 bp, Arabidopsis thaliana
taaactcagttgatacttctctcctctactctagcgtttttctttgatattcgcaaactcagttggaaaaagaaaagatgttctttttgtcacaattcgaattaatctaaaaactttcttcttattagctttttgacaaacatcattgtttcaatttcccttttgagaactctctgctactagatacttagttccattttctttgttcactcctttcgttcaagctgtgcaagtccaccattggattgcaacgtattacctacaaatatccacttagctacttatggggttttttcaatcagataaaccaagccattcactctggattgaactatcaaaccaattgtgttcaaataaacttgcaaattacttcaattagaagaaacaacctccttttgttttgattcgacgtagatgatcttacaaggaaggatgataaagaatcttagacctggcccatggggatctctaaaagagattggtggtccatttgtgacaaaaagtcattacctgtttccatttattccaaggatttgaacccgaaaaataataatgaaaaagttgatatctaaagaattatcttatcagcttacaagatcctgaaacagatccgtacgactgtcaccggacacatatgtttctttatttagtttcacaaagaatcagtcctccaaaacacacaacttctttcttatattaaacacacacaaaatctttattcttgtcccaaaaaacaattatgatcttttttgaggttctttggcttttattatacgatttttcttcaaatcatatcagattgttaccgaataaatctttttcatatcatattttcagttctatgaatctactacaattttttaattttaaagtggtccaaaagaaaagaaaaaaagaaaccccacacgattcgaagaacatgtcctaacaagtaacacaatacaaaaagacaagtatatgcaactttaaatctataacgactggtactgaaactaaaacccctaaaaataagagatcacgaaatatccgtgatattctttgatgcaatctcttccccattgctctctgtttttatttacttttaaaaattattctgcagaattatatatagttgggaaatcataatggaaaattcttcacccacctaaaaaatcaaagaaaccatcataaataccatcaccagagattcacatgattcatgcatacacacttctgagtctgtcactttcttcttcattgtttgtgttttgtctttttgatttatttttgttgaagatggagaactaaaagcaatgtctgcaaggtctttatattaatgctagagtcagtctcgcttattatcaagttgttttctttatcagttacttgacatttaaggaacaaaggagat

SEQ ID NO: 2501 - DNA, 2000 bp, Arabidopsis thaliana
gaagaagaagagatgccctcaaaacattcaatcgtcattagaagatccaaataaataaatcaagacaacttgcttgaattccattattcatattatcattagtacatatgcaaacatgcatgatttaatttatgataacttattatcagtatgcattattcattattcataacaatatcaaattaagaattcacaaccacatacagatgataaatcatgaaggaacataaccaagtatctcaaattccatgagagtaagtgacaattgaagaaatccggtttcctcaggaccagagaggttaacttcacggtaaaaatcaacccctttaaccgttggcaacaatgtgactcttctcccaacgaaataggtaccagttgaattcgttttgaaaacatctacatataaagattctacgggaaaattctgatcttgaaaaagttgtaattcttcatcaaactcaggatctccttcggttgctacaacctttgtttcatgtttctcgttttcatttgtccaagcttcaaccttgtattgatatgggcgaccattggtgactccgattgtaccaaagatattcacaagtagcttcacatcttcacctgtgattattatctttttccctcgcatttttcttcttttcaaataataaatctgagtagaataatatgtgtgattgatatgtcaacttaactacacctcaacaattgtttttgtggttttttctctcactaattcacgaaattcgacattttctaaatatatttatgttaaaatgcacgtgtttcatgttgtaattctttgtttataaacaagaaaaaatagatgctaaacaatgagaaataaatgttgtttgaataataaaaaaaattgaatgtttcttaataccatttcaaatactaaaaacaatgaaatatcatatttagagatttatttctatataatatctattttggtcatattcttagttatgatatttgactactattcaaaaacctaaccccaatatagtcaaaactatataaaaatgcagtaagatattaaatgctgttgaacaaaattcaatatcttatggcttgaaagtaaactagtaagatagctacaaaatgcatggtaagaagttaggataatcatattttaagaaacgaaaataaaatacctaatataagcttcgacacatacagctctttcttactggaaatcttgcatattccgaacatacatttttattttaggacggatatacctatagattcatttgcaagattgatttcctattgaaaaaaaacatgttgtggattcaaatatttgtcgctttttgttcattctcttttgtaatttcctaaacgagaggtcactaatccaaaaatcgttagcaattaactagaacatcttccatggttaacaccacctatcaattatttattttcttcaatgaaactttatgaaactctttccattttattaatttatatattaaagtttttgttcacactaaatttattgactcaatatatatctactttataactaaatactaattatttcatttactttttattttattaataatctacatatatatatatattgtttgtcttgtttattgtttttgcggtttgtatatttatatctcatattcatacaattttttagtatatatgcttaattaattaagatcgaattgtggcttgtttattatttttgcggtttatttatatgcatctcatattattacttttttaaattaatcgattaaaatttattaacttacgtaacatatttgatattgcataaattaaaaatcatatgtatataattctctttagtttaaattttaaaatgaataaagaaaaaaacaataaaatttgaaaactgaaaaccttttaaaacgaaaaagaatggctaagatgatgaatcggtctcgtacgggaaacacctacgttttggtttagtccggtttggttgaattcccagagactttgcttgaattgggtcccca

SEQ ID NO: 2502 - DNA, 2000 bp, Arabidopsis thaliana
atttaaggaatcaattattggatttctcaaggtgaaagtggacttctttgcacgcaaggtctagttgccgacttgccgttgcatgtaacatgattgttgaaataaagtgaattgagagaagtttggccagacattttaaatttaacccaaaaaaagtagggcctaacacaaaatataacctctctttgttcaaaggaaataacacctacgtcttataattgaaccaaacattgaatcattgaactcacctataataattataataacacgaattcacaagacacctaaaagaaaaagttcacaaaaacaaataaaaatttacctctcaccaaacacactcacctacccgtctggtcccactgaccccaacatacaacaccgactctctcccacaccaatttttttttttggcgttttaaaacaaataaactatctatttttttttcttaccaactgattaattcgtgaataatctattatcttcttcttttttttgtgacggatgattagtgcgtggggaaatcaaaatttacaaaatttgggatgattccgatttttgccattcgattaattttggttaaaagatatactattcattcaccaagttttcagatgagtctaaaagataatatcatttcactagtcacttaaaaaaagggttaaaagaacatcaataatatcactggtttccttaggtgacccaaaaaaagaagaaaaagtcactagtttctttttggaaattttactgggcatatagacgaagttgtaatgagtgagtttaaatttatctatggcacgcagctacgtctggtcggactataccaagttaccaactctctctacttcatgtgattgccaataaaaggtgacgtctctctctctctcaccaaccccaaaccactttccccactcgctctcaaaacgcttgccacccaaatctatggcttacggggacatgtattaacatatatcactgagtgaaaagaagggtttattaccgttggaccagtgatcaaacgtgttttataaaaatttggaattgaaaacatgatttgacatttttaatgatggcagcagacgaaaccaacaacactaagtttaacgttcgtggagtatacttttctattttcgaagaagacatataactaagctgattgttattcttcatagatttcttttcactgcgaataaaagtttgtgaacatgtcaccgtttgaacactcaacaatcataagcgttttacctttgtggggtggagaagatgacaatgagaaagtcgtcgtacatataatttaagaaaatactattctgactctggaacgtgtaaataattatctaaacagattgcgaatgttctctactttttttttgtttacattaaaaatgcaaattttataacattttacatcgcgtaaatattcctgttttatctataattaatgaaagctactgaaaaaaaacatccaggtcaggtacatgtatttcacctcaacttagtaaataaccagtaaaatccaaagtaattaccttttctctggaaattttcctcagtagtttataccagtcaaattaaaacctcaaatctgaatgttgaaaatttgatatccaagaaattttctcattggaataaaagttcaatctgaaaatagatatttctctacctctgtttttttttttctccaccaactttcccctacttatcactatcaataatcgacattatccatcttttttattgtcttgaactttgcaatttaattgcatactagtttcttgttttacataaaagaagtttggtggtagcaaatatatatgtctgaaattgattatttaaaaacaaaaaaagataaatcggttcaccaaccccctccctaatataaatcaaagtctccaccacatatatctagaagaattctacaagtgaattcgatttacacttttttttgtccttttttattaataaatcactgacccgaaaataaaaatagaagcaaaacttc

SEQ ID NO: 2503 - DNA, 2000 bp, Arabidopsis thaliana
gattcaaatcatggatgttcaaattcaaacttgctaagaaaacaataaggaaacgagacaataagggttggttccacacttggagcagaaaagtgggttggaggaagaacaagcctatgaaattgcagtttgtttcacatcaggtgaaagaatcatcacatagggataaagactcttttgcgggaaaaaagtcaattaagcaagagatgtgtgttgaagtggagagcttgttgcagcaacaggatttaagacgcattaaagagacacaagcggatcagggagattcttatgttgttgtccggaaactgttgccgcatcttgaatcggtttgtgctacaaaatcgtttttggacaatgattcaatgtccaaacttgaagcggagttaactgactcaaagatgaggacggctggtgttacacaacatcaggtctcaatttttgtcatggaaactagccatcatcatcaagtgttagaggattttgatatgcatatggtcattgaggatcaacaacctatcgtgacagaagctttgcgtctaatctctaatgatttccactcggacgtggctgagttgtgtgagcagttaacatgtgacgagtctcataaaccgaagcaaagactagctccaaagtcttggatgtttaagtatagaagggaccataagatactacacagccctactatgtctaggaatgtgagaatggttgttttcagaaaaatggaagcagcagaaaggagtcaacatttggttacacacaggtttcatgtgggtccactagaaatggatactcaagactctgaaattggtatcatagaggttttaagaagagtgatgatgctgttccaaaacagtattgtacaagccaagatgatggtgacaaagagaaagaaaacgttttacaagtctaggagattcaagttcaaacatagagttgtaccaagagctttacaatatggttttgaagtcaaaatgaagcaaaaggtttctacagagtatccatgtttgttcttgatcggcaaggaggcagaacttgttcatattttgcttgggtatagggacgtgatgtttaacttgaagaaaaaggggagatttagactctttcagtcattttctaaacaacttctcttatggctgcgacatgatgcattgctaataaaaccgtttctgcttagtgatgagaggttccaaataaagcatacatggagaactaagttcatacactccgtttcatcaattggtgttgggcattatgaatattctatttggacacagagtgacaaagggacgcagctcttttacagcaggagattggttgtttacaagcttggaagtgaggccaagaatgttgtagaggtgtctcaacgtgtgtatcagcttgttaaactgaaatttgccaaagacgaacgaaagcttgaagtcatacagagccaaacctttgaccctgggattggaattgaatcacaagagctacttgagaatacctattcgaactgaaccttgtggtcaaggttcttccaacaggggagttttgatataggaaactaggcattgatatatggttagatacgtggcaatacatgagtggagacagtagctgtgagacgtggcaagagaagattggtcgatgggagtgttagaggaagaatcgagatgcagagatatatagctaatgaagatcatttgcagaagataagaagattttggatttgttgtttatagtttccttttggattctctctgagaatcgttcctcatcgttcgccggagtttcatgttgaactcttgtagatgagaagttgatatcgcgtttcatgaacgttgtatcaatctgtcattttcattaatcgaagcattctatttcgttactctgttttccgttatcacaatcatcctcttcctctaaattctcttcttctctttgctgctacagaaaaagaatcaagctttagaggcaagcaaggactcactcacccacaagtatcctcaccccatctactc

SEQ ID NO: 2504 - DNA, 2000 bp, Arabidopsis thaliana
gcttttgactttgttcttcttctataagaataaagacattttctttatttattttttctgactaatctgagtctttaagaccacaaattatagaaatttccaacaaattcttatatacgtaccagatatgtctttttaaagaatgaacaagtgaagctcatgagagtcgtctcgtcaatgtataatgttaatgtgctaaagttgatatcacgaaaatactaaaatgcaaaagaaacgtcgcggaaaccaatctgattaattatttcacctgtcttttatatttttgaatcttttatatatatataagaattggtattgtttttttgcattttgtaaacgacgacgactcgtacaaatcagtaatcgtaataaacggtgtgaccgtgtgagtcaacagttgacatcttagatcttgtgtgctgagtgcgagtggtacatgtatgcgttgtgaactttttaaaatgttatatgacaggtgaaattcaagaatcatttttttggtatgctggtacatttattcagttggatgttttgcaacttgaagaaagtatatatgggcttgtaaaaactatgtttttgatgtgctacttaagcgtcgttcgaccatagcagacttattttgctattatcgtggcattataaagacgtaaactgttaaaatatcatcttcataagaaaaataattaaatcattgtaatatatagaaaactattgtgtgcactacatttatctagttttacttgtcgattaaactagaaatccattttattgaaaacatttttcttgtatgcagttgagagtggtgaaacaacttgtaaaaaaaactatttcaacagtctttatgattactttgaatggcgttcatcttcactctataactgtataatcatattaacgcgttgaaaaaaactcatttaacacagttagttcttttgggcttacctggaattttgaatatatatatatatattcgtgttatttaaacaagcaaacaaaaataaacaatattcaaaattttcttttacttttctccataaaaaggatgaaaatatcattgtcataaaaggataaaatatacatataaacgcatttttgttgtctttaaaataaagttataatcaattttgacatttgttttgtttgacccttcacataagccaattcattgcatataatttgaagttttgaactcctaaacatagttattaattttggtttgtattaaaaattatagctcaaacttgtacttacttaacaccatgtaaaacttagagtaagcgtcttatctaaatgaaaaaaaaaatagaatacgcaaatcaccttcatatattgtttaaaatatttgttaaagccactatgagtatgatatacagaaagatataggagggtacaaaagaaagaccgaagctgaaaacgaccgattctatttctctaactcttttggtcccactgagagcaacaagcgtttaagtaagtaaacatcagccgttggatattgaccttcctcatttttctttttctttttggggctaatttgcatgtctcaccgcgtagaaaggatgtatctaaaagttgaagatattcttattggatcaatcaatattgcaaaggagattgtctgaatattggatatacgcaataaaaaaaaatttctttcgcttgttacagagtacatacatactatccacatgttatccattcgattttgtataagtctgacataattcatctttaacaaaaaaaaaaaaaatctgtgacataattcaataatctaatttgttttatgataatctctcactcgttagctgaataaaagttccgtacgagtaagctgtgacacgtgtccctttcaatctccgctcaacgcggtttccatcgcttctcgccgtccttatataaacttcctcggccccatttttcatttctcacctctctctttctttctctaacttcttcttcttctcctttcagaaacccagcgaccatcttcttcaccggtt

SEQ ID NO: 2505 - DNA, 1512 bp, Arabidopsis thaliana
aatggtacatcagtaactttatgccattagggtctggctggtatgttagatctctctaaaaaggcgtttgatctttgaaaataatttctatgtaataaatttattgtgttaccatcttttcttgcatgcaatttattaaaatgagtttgtaatatggtttcagtatcgaatataattggggtatcaatgtatcttttgagaaaaacatttaaaacgtagcagaactaattattgaaaactggtagcattactaaaaattgatctaaatcggttaatgatttggcacatacagtgatcaaatcagctaagcctcatatctcaccgtcccagagttcttcaagactcttataaggactcatctaatgaataatgacatgcctcgcaccaacctgccctgcaacattgaaaacacacgtctacaatttcgataacccaagtgttttgagcaaaacaaaggacgccctttgacccatttggactacaatgtgtggaaaattactgcatgttcaatatcagaaaacttggataacatgtcttcgatatgggcttttcttattttgtacccgtgtaatttcgctggcccaaaatccaaagcaacaagggtaaatttgtatgcagtacatgtggcatgttgggtcatatggaaacaggtcacaagactcagattctttacattgcggcgggtagtagtagctttctagtctaccttgagattgcccctgcccgtgattcttgagtcgggcacaggaagtggttttctgtcaactttacttgctcaagccatccccgcaaggtagaaacttctgtggtctttctcgttatttcttatgtaccatgtttttggtcgtttgtgtagtttcttctaaccttccacacacttgtcttgcgaattccttccacagcagagatgttaaatcaggaatattcaggatgtagaaacttctctgctctttctcaagtagaatgcacttgtggaatccctcagatcagatttcattggtaacgttcgttaacttcaacaacaacactttactaaacatgtgctaatcaattgtcatacgcttgtatttcttcgattcatttttatcttatgcaagtgttttctctattatgatttatttagttttgcataaataaggacactccttcggagtcagtataagaaaactataacctaaaatataaattaggcaaatgtccactcacccatccaaaattccattgtaaataaatgtttctttcaaataaatgaaaaaaaaaaaaaaaaacaagttggaagaaggaaccaaccaagtaattgccagtcaaaggaggcgactcacacttgaaaggataagctgacatggcagacaacgatcctgcgtagaaattgcgtgaacgtggaaaagtttgaggatatagccgtcatttcaaataattcgggtactattatataaggcttcaagtcctggttcgtagtacaaattgtctcacaaactcttctttcagtcatcacagaaaacaaaaaaaaca

SEQ ID NO: 2506 - DNA, 972 bp, Arabidopsis thaliana
aatgacacgtcagtaactttatgccaatagggtctgacaattatgttagatctctctcaaaaggcgtttcatctaatgacaataatttctatgtaataaatttattgcatgtgttagtgtgttaccatcttcagttgtgtgcaatttattaaaatgagtttgtaatatggtttcagtatcgaatataattggggtattaatgtatcttttgagaaaaacattgaaacgtagcagaactaatcattgaaaactggtagctcactactaaaaattgatctaatatgataaatcggttaatgatctggcacatacagtgatcaaatcagctaagcctcatatcttaccatgttaatcaattgtcataagcatgtatttcttcgatttgtttttatccgatgcaaatttttgctttgtgattgttattgcagaaacaaggacgttcgatgcacttccaaaaaacatataatgttacagacaatgtagtattaaaaagtagtagttaaaagcaaaatctttaataatttagacaaatgtagcgacagctccacttaccatccaaacgaatacttcacaattgataattctaataaatgtttttttttaaaaaagacagcatttaacaataacgagaaaacaaatactaacgaattggaaccagaaaccaacgaaccaaggaaaatcaaaggaggcgactcactggaaaggaaaaggtgagatggcaaagtcaacgatccgcgtagaaaccgcgtgaacgtgtgatccatctcttctcatgtcaacctggcgcttaaatttaaaactcaaatttatggcattctcgtaatttcatccccaaaccgaggtccttcccgacattaacaataatccaggtaaataaaacgcctcaagtccgcattcgtagcacacgaatcgtctcacaaactctttcgtttttccctttttctccaatcacagaaaagaaaagaaaaaaca

SEQ ID NO: 2507 - DNA, 1482 bp, Arabidopsis thaliana
atttggctcagatttgttctctattcgatattcttggtaccaattgtttagctgcgttcttattaccaacattggcactataaaagattacgggttatgcttaggtttccactgcagtgtgcaaggttttgactttattaacaggaagcagctaaaccgataaagctttagtcttggcatcatactgtatagtgctatactttgatggagtttttactaggattagtcatcagacagtggtgtgagctgaataatagatgggtttcttaagcaaatttaggctccaaatatttaatagttcgataatttgcgtctactcgtctgattgtgtatgtcagtagccttgcatttggaaagatgttttgattgtttcagagatctttgtttgtgtggtacaagttcagatttgtttcttttgagaaacggctggtagctgctatgaaaaggtatctctttttaaacttctgccaatctcattgcaggatatttttgagaagtttcggatttggaagttaattatatcggcttttgccttctcgtccacaactcaattgctttctggcttatatttgctatacttcttccgagtctttgagagacagattggttcaaataagtattcggtaagggatagtctagctcagttttttcttcatgacctttttttgtctattattttggtaaatagcaagatacctgctgatatttcctttgagattgaaattctatgagttaatatgtgctcattctgcaggttttcatcttcttctctggatttgtatcactaatactagagaccattttgttatcattgactaaaggtaaaccttcctattttcagatagtctcttcaaaaactagaccggtttgatatgatttacctttatgatatgatttgggggcgctaatgcagacaactatatgggattgtagttattagttagccttgttactagtctttccccactcatcgaaggaaaactgtgaagggaggattgggatattgtgacgatctttgttggtttcaaattctgacctgcaatttccttcactcatactattgaaaatatcttataaagaattcccttggtccatcatttaaattatcaagaaatgctttttgtgcattcttaataagcatttttgatatgaccttttatacactccgtatcacaaacactttacagttattgatagtgggtatataacaaactgctgtcttttttgtagatcctactgcaaacctactgacatctggaccatacgccctcgtattcgcttcttttgtacccttcttcttggatattccagttacaaagaggtttggtgtattgggcgtccacttctctgataaatcattcatataccttgcaggtgtccaggtaaacaataccatatgtttatttgtaggacttcttattcttcttcttattttcattgataattgtctcggtttcaatatttgtagcttttactatcatc

SEQ ID NO: 2508 - DNA, 2000 bp, Arabidopsis thaliana
gcatataaaaccactgctgttaggtgcaatgcatcctccatattcaaaatctacgaataatgaaaatttctcgattttttattttgctggcaccacccaacttgctttactatttcattaaattcggcaaatgctctatttattttcattaatattacatcttgtatttaatattgtgttactgaaatacgtttgccgtttttaaagagttcgtataaaccattaggctatcaactttgtgtttttagtgtgataaataatgtttttgcaggaagtgaaatttgctagttaaaatattattcaaaattatcaaattaaacataatttacctatactgtttattgactttattcccttttttttttccttttttctgttggtttagtttatcaattgttcctgctatctaatatgagaatttcttctattttactacataattcaattattttggttgaagaaaatgatagataatagccaattcttttctgttagttaaaaaagaagtcttttaaaattttattttgtttaatgtaagtttgtgattttctcaaggaggagaaatgtagacaaaggacctcattgggactccaacaaaacaatgtacaacaggaaagtacatcagcctccggtccccgtcaacttacctataacatctaaaaagcattgggatgttcatgcatctaccttttctctttgcttgcagtaaaaaacatttcttaagcctctattcttctagaagtttcagtactactaataataatcatgtacctagattatttttatttttttgttaagaaactagattaaattcctattacagtttactttttacaatggaatctaacaacaacaccaacaccaacagagtctcattagctactgaaactaacataatggattacattgtcgattctaaaaagtaaggttaaaatatattacgtaaactaaattttcttttgctattagtacgtagtgtggtatatcattgatgataaattgcaaaattagtttgtatttcgttttagacagaagtaatagtaacaattatggttgaagccaacaaacacgaaagagagtaaaaaactaaaaacaaggctggagagtgaaattagttgattacttgaatcaagacatatagacataaatcacagctgtgacctgaaaccggcactttggaattaccctttttgcacatttcttgactatgcatttatatccttctaatgcaaaatctaactccctacttgattagtcttaagttttctcaagtggggttctattatttatttattattgtaacttggcccttttgttactttggacagggtctatcatcgacaaaagaaaaaaaaagtaatattaccactaatcaaaacataaagaaatattacattttttgtcaacataatcataaatacctaaaccactaaatacaattcaactaaataatttggtaaataatctggatgagaaagaaaaaaatgttacaaagatatattttttggattttccttaaaaatttttttttttttttttctagctaagaaaaattaaaattttgttgggttgtcaaaaatatacaagctatacatacacgtatacacaaatatagagatagacatttcaactttcccaattgccagtatatataacaaaagccagagacaaagggagaaggatctaagacatttatcaaaaacaaaaagagttgataaactacagtaatggaaaatgagggttcatgatcaacggctgagatttgatgtcacacccaagccgatgggtttgaacggaagttctttgatcacggcaagatccgtcgcacttcttctctttctctctctgcttcttctgattctgccaccgttcctgccgccgcttccaccgcctccggcgacactcctcctccttcctctactcctcatgattctcctcattttcttggctttttctccttctaatgagcccagcctcgccgttgaacctctcgacccctg

SEQ ID NO: 2509 - DNA, 2000 bp, Arabidopsis thaliana
tatgttcacaggttagctactcaattataactaaagttagctaacgtaatagtatatgaatgatttagttggaatgcgaataataatttttgttgtaggagcactgacttccacatgccatgagtaggcctagagcttaagtctcagtctcattttcatgcgtctctctcactcaatgttccactagttccagtagtattaaatgaataatagagcctttgcatataaccagagagagtgagagacctttgggccaaaagctctaacaaaaattccttttgtttcagagaatagagagaaagagagagagctagagagagaaaatgacaattgaaaaaacttgggagttggagttaagagatacctgaaactttctgtttctgtgatgactgtgaccactggactttgcttttctctatcatctctgctctcaggggctttcttgtctattcatcatcttatatatatcattttcagttaactctacttatcaaaatttacactgtattattgcataaaataagatctggattagactaaaatcttgtattgacactaatcaaacatctcagtgttttctctttgtattttcctcggtcaaacatctcaagatttttttttttaattattttttttcattttacaaatttcgtatctttacattatttgtttgacaagacatatacttctctgatttgaaagcataacaagaaaacgtacttgtgtgattgatacctcagtaacagtttttttttccgctcttcatattatctaccatatggaaaagacattcttatagatcaatatgttttttaaatgaaactatggtctaagacaaaatagctagacacaatggccatgatattttctgtatatataaaaacgaaaaaaaaaaatattgatcaaccagtatatgaaatttaagatcatgtaaataacaaataaagacatttagtagcaaaaaaagaaggatagatcgcgtaataagatacatttatcatcgaacaaatcacatattcatatgccgacccacaaaaaatcacatattcatattacagtcataattcataacaacattcgtcttatttatttgagttgcagacccccaatttatatagtacgtatgtatagtagacgggtttaaggtctacaacaattattcgattttgataactttgaaccatatggttcacgtggacaagagtggtgttttttattccacatatcatatatggtgttgagtgtcgatcaaattagaatccaaggaaaaaagaaactccataattaaatttattattctttaattatacagactatatatagtaatgttgcatttgtggacaagactaattaatatgttttcgataggtaaaatcgaataaaagagtcaatggtgaaacaagttggcgataattaacctttttctaatcgaggggccaaagaaaggtaaaataataatggcccgacaaatgaaattcgatatgatttaatgaggatttaccattaaatttggttgtcactttcatagacttttttcaccaatttccagatctcccactttaccattccatcatttttgggaatttcattattctaaattcaagtatcagtctaattaattaactaatactcctatctttccgtagctattattttataacagttacaaaaatacgtggcaagaaaaagagtgtatttccattttccagcgttcaagattaatgggccatttgattttctaaatattgggccaaagagagaatccatagaagcccattttaaactatcatatcttcccgcgaaaaagatagtgtaaccactttctttaacagcgaatatgaccttcccgtgatagtcactcttttggattccattcaccacctttgatcaattcaagtttgacacgcttctctcgaatccttctaacatataatagatccatcggatcctccaaaaccacaagttaaaaaaattattcaagaaacacgagaacaaaaaca

SEQ ID NO: 2510 - DNA, 2000 bp, Arabidopsis thaliana
tacaattctgcaccacctattgtcaatctcaaacttaaaaccttaaataaactgatctggagctatagttgttccattttaaacctacacctattgtcatttatgtttgcatctgtttgtcaacgagaatactcctaaacgtcttgaggtttaacgagagtactcctaaacctcttgaggtttaaagatcttttgaaagcatgttgaggtggaatcgtagccattatgtatttccttagtttacaagtaatataccataatatttgttttgatgtttttctgttgtagaatcggggaatctcataaattcagacttattgagacttgttataagacgggtactcttgtcattaaaaacgtccagatgcctacaatgattgaagtcataatagaaagattcgaaacgatctattctccaatcgcatgatgaatctttcatccactagacaatatagtctcttcgaagatatccgatataattaaaacgatacaaagaaaattagcatgatcgctaggtaagcaaatattcacgcatgaagcaaaacacggtttgatgttgttacaagtacaactcttctagtgcttgatgaatctgaatcaccaaatatgcataatgttttgtttttctttaaaatctcacacaattgtcggacatggaagaggatccaaaactgcaacatcgatgaagcaatcacttagattttccaggagacaagagagttatttagtcagaagcttaaagtaaacgtttcgatttggacaaaggcctagcttgcaaaaaagttacactagagaataaagggtctagggggtttcatagacgcactacttgtgccgttaattacaaatactgagaaggcaacaaaacaaagactttatagatttgcctcgtatcattctagaatgataactgcaattttataatatcttcgaatgtcaaggataaagttataaactattcggctgtatcaaattttgttatcagttctacacacaaatcattttttaaaaccaatgacggcccaagtagtgcgtcttacgttctctagatatttcctaatttttcatagccgaaactgttgaatatttttttgccaatgctttcgaaacttttggttcataaatcctttaacgaaaaaaagaacatacaacgtgtttggccacgccgaggtttagcactaaaaaaggctcatgcaaatgttgagaaattacacaataggctttttgaaaatattgattttttaaaaaccacaattttcttaccgataggctttcgcgtgtcacgaaaaagagagtgaaccaaactttacgctaagtacaaattaaaccatataataaaatgaaaacctcatcgaaattccacaccaaaataaaataaaaagaaaattaggttcttgagtcatgactagacgaccactgcacctgcaattctgtgacgatgtcagaaccatatttacgaatctaatccaaaataacacaaaacataatcctatgtagtaatcagacaattacatttttgtttctttactcaactattcatccccccgttttataaaaaaatcaacacaaaaaccactagatcattttgatatatttgtttcctacccgagatacgttgaaacttttgcacattaaaaaaaaaaaaaaccgttgaaattattttaaaaatggcaaatgtataacaaaaaaaacggaaataaatattttaacaaaggaaatgaattagtcatattagtaataaaattccatataaaataagatagccctaaaataaaagaagaatgaaaatgaatgaatgatagtgttggaggtgtataagtatcaaataaaacaccaaaccacttctctcctaggaagcttcgtggaagctgccatggcttctctctttctctccccatttaataccctccttcctcgttctttcctctcaaaccaaaaaacaagaagaagaatcaatactcaaatctcaatcatctctctttcttatcttcttctccgat

SEQ ID NO: 2511 - DNA, 2000 bp, Arabidopsis thaliana
gactgtgtccttccacgttaaggaggcaaatccgtgctaccattcgcaatttttttgagtagcatgtgagaaaataatttagaaacaagcagtaaatctgaaaatatgatattactcttgatataacaaaatatgatattaattactcttgggtaaaggaaaacaaatatgatagttagtactctctgtgtttggacaaaaatatttttgcctgcttgcatcggattaccgtaatacgactgtttgtcttcactccgaacaaccggagatgagtacaatacgactacattaaatataagattgtaatatgaattgagagtcaaattaacaagggggaattcagttatttctttgtatgtttaaggaataggtgatgggttagcctggtgtaagactatatatgtttgaatataggaattatttggacttttcttaacagtaatgcattgtgtgggggtaaataatgattgggtaatacaagggtattgctacttattacagtacaagagttctgaatatcaatagtttggactttacaacgttcaatttctggaatggatcaatgagattcgatgatacatatttctatcatgctcataatttaaaatgttgttgaaaaggtatgcagatcgtgttgtgtggattaaaatagcgttggatatcgtttaaaacaagtgctgccgcgatataactatcttgtccaaaaaacgataatagctaggtgtccaaaaaaacgtttcatactttcatctcttttcttttcttgcaagagtgccataaaatgaaagtatgaaacaaattaccacctttgcttgtatacgttgttgttatcagttacaattaaattcaatttttaagtttagtcaatttcacggacgcggttaagatgttaggcggtagccgaccatcaaaatagagttaaacattggattattctctatatatagctacataacaaattcattatccgaaaattttcaggcaataaagaacatattggagcaaacaataatttatcgtaagagtttttttaaaattcgttggaacttggaagggattttaaatattattttgttttccttcatttttataggttaataattgtcaaagatacaactcgatggaccaaaataaaataataaaattcgtcgaatttggtaaagcaaaacggtcgaggatagctaatatttatgcgaaacccgttgtcaaagcagatgttcagcgtcacgcacatgccgcaaaaagaatatacatcaacctcttttgaacttcacgccgttttttaggcccacaataatgctacgtcgtcttctgggttcaccctcgttttttttttaaacttctaaccgataaaataaatggtccactatttcttttcttctctgtgtattgtcgtcagagatggtttaaaagttgaaccgaactataacgattctcttaaaatctgaaaaccaaactgaccgattttcttaactgaaaaaaaaaaaaaaaaaaactgaatttaggccaacttgttgtaatatcacaaagaaaattctacaatttaattcatttaaaaataaagaaaaatttaggtaacaatttaactaagtggtctatctaaatcttgcaaattctttgactttgaccaaacacaacttaagttgacagccgtctcctctctgttgtttccgtgttattaccgaaatatcagaggaaagtccactaaaccccaaatattaaaaatagaaacattactttctttacaaaaggaatctaaattgatccctttcattcgtttcactcgtttcatatagttgtatgtatatatgcgtatgcatcaaaaagtctctttatatcctcagagtcacccaatcttatctctctctccttcgtcctcaagaaaagtaattctctgtttgtgtagttttctttaccggtgaattttctcttcgttttgtgcttcaaacgtcacccaaatcaccaagatcgatcaaaatcgaaacttaacgtttcagaag

SEQ ID NO: 2512 - DNA, 2000 bp, Arabidopsis thaliana
ctagcgggttgtgtgccggttacagataatttacggaaaagaggtattaattgtgattcagggtgtgtctgatgtggtaacgtagaggaaacaattaatcatgtacttttccaatgtcaccctgcgcgacagatatgggccctttcacagattccttcggcggcaggaatatttccatatgcctctatttatgcgaatttggattatttattttggaggattatttcggattttgattctttttcatacccatggataatttggtatatttggaaggcaacgaatgaaaagatttttgacaatgtcgataaagatcccttaaaggtattatgtttcgcaaaaagtgaggcacagtcatggaagtcagctcaaattgagttgcatgttgaaaatcatgaaactcctaatttcggatctaggagtagagcgagggatatctatcctgatatcaatttcttgggatatcgttgttacgtggatgggtcatggaaaaaagacgattttttctctgggacaggatggtactgtacatcagcaattggagagacgccaacaatgggagcagcaaaccttagacgaagtctatccccactacatgccgaagtggaagctcttctatgggcgatgaagtgcatgattggcgccgacaatcaagatgttgtgtttctcacagactgttcggatctggtgaagatgatgtcttccccaaccgaatgaccggctttctcagtgtatttggaggaattgcagagtgacaagaaaaaattttcaagtttttttttatctttaatttctcgtagtgcaaatgtcaaagcggataatttggcgcgtaaagttcgtgtccaaccgcatcatatcacttatgtaaacaaaattcttcaggaatggctcttttgagctctaattaattttggatgacaaaaaaaaaaaaaaaatatttttacagttattaccataatttcgaaaaaacaatatgtattaaatttgggattaatgtggatttttggaattaaaagtgtggtaaagaaagaaaaagaaaaaggcaaaacaagattggtcgggaggaaattgaatcacgaccggatctaatttacttggccttaaaaattgacagactcttctttaaacgtcttttctcaaaactttgtctccctcctctatattcttcgtcttcgacctcgtcgtctggcagtaattcaatctctctctctctctctctactgtaataaatctaaggaaacaaaaaacgttacgaaagaaaaagcattaaaaagaaaagctttagagagaaaaaaaacacagctcacaacctcttttcaattattcaatttagctttttttctcttcttcttcttcatcttccctcgtcttctttgccagttcttcttcatctttcgtcgttttcttagtgccacccaaagatcttcgtgcaggttcgtacttctttctacctcgatcgattttgactaaatgtatggatcatctgatttccgatttgatcgtggttgttccttgctctgtttcatgatctgtgaatctgagtttctcgatctggctgcgtctttttcggaaaagtcgagaattttttcctgctgggtcttctgaatcacatttgatcaattcctggaaatcgcaaagttttgagtttttctaatttctaaaggttgatcgagccaaaatcctttacgtgtctgtgtctgactctctgtagacctttcctgtttcttgatcactagctagctttcgagattggatttaaaattttctagatgaatctcaaattataattacagaattgaccaatgctttgcttgagaaacagtccaagaagaaatgcttgagatccttcatctccaagtaaatgggaggatttggttgattatctgctcattttcttaactttgttccgtatttttttttttgactcaacaggttcattggcgtttgtagtacataaattttccctgacacacagaaaaagaggatttgactgttataca

SEQ ID NO: 2513 - DNA, 2000 bp, Arabidopsis thaliana
tacacgcagaagaataataaattcaaccatcacaaattctaattatgaacaagaacctacaattaaggagagctataacaacgactaggaaattttccagaagtcatgctttcgtccatacctttgggtctctcaagcaagcttcgcacatgtgtattcatatatatccgtttgatgtattcatacgtttttgttatacgtataataaaaagagttcaaaattatatatattttatatattcaatgtatatataccatttttttgtttttggggtgtaaagtcaatatatacctttcgtacgttgacctagtttttattaattcagaaacatatgcatgggtaatagtatttctcgttgaattcggaagttcgtattgtagttgtttaggatctttttgaatcactaagtcaattttctatgtttaaccgggtttcattattattataataaaacagttttgttggaaaatcaaaatccgattagaacttgttactaattttaagggttcacgcatgattcttatttttctagaagaaacacgaaatggggttttactgctcaatcatgtgttaaaacttaaaagtaaacacattgaaattttgaccgcgtgttaattcaaatgtcgcccatgtcataaatcaaatttccacaagtaaaacaatgttcatattttttgaacgggagacacatgtgcttaactctctaattaagcttcacgtgcatcgcctaactttgcttcccatacgccatgcgtgtgtcgcgcgcaatagtagttgaacctacgacgtcgtttacttggaacatttaatttgttaaacaagtaactattatggggttctgtctttttaaaaatgcgattttcccaaatataatgtagttcagtcttcttctttttgtgtgtgaggtcagattcttatatttctatccagcattgatagataaatcgacttacgtgggtgatgggatgaacaaaaaaatatacatttaagtattcaattacggtccaacttgacaaacaaacaaaaagtctaatatgacgtggatatatttgaccatataaaccccaaatttcgttctttacaataagcaatgtgacgaataaggaagagcttgcggcggtcacgtgaaaggtagttatcgccatttcaactgaaccttcacgaacatacatttcggtttttctttactgaaattacgcatatctctataatacacgaaattacgactattcttaacgaaaacgtgcttctttcgtagtatgttgttatatagctcacgtatgttaattatttctcacgtaaatttgcatttatgggggattagcgacataattgtattatcatcatacggcataaaatacatgtttgaagatttaaaaatcacaattatatcataacgtataataatatatattattatataaccattatcatacataatttcttggaggaaaaatccacatacagtatatagtgcatttagtcaatctaaccaataaataatcgagctgacactagataaaataaaaaaggggaaagtaaacttcaataccttaaatccttaagcgatgtttcttgcagaaaatacgataagcatggtctcgctaagagacaactaaatttttaactaaatgaattaaacaatgagatagagagaggattaatatagatatatattttattaaaggagaggattacaatatgaaactctaaaggaagaaaataagataaaataaaattatagatgcctaaagtagtgtttacgtgacaatctcaatttcactccatacctcgaactcattcaagctcaagaaacctaaattttaaacgtcccttttgatttgcctataaatacacgtgcctccacacttctccaattaaaaaaaaacaaagcaacacaaggacaaaaaattcacaaacatcaaacattctccacctactgcccaaaaacgacagcattccttttccagcaacaaagaaaaaacacatttccttgcca

SEQ ID NO: 2514 - DNA, 1008 bp, Arabidopsis thaliana
attcagtatatagtatatacacacatacgccggttaaaaaaaaaaaagtataaacacacatgcatccataattaatccttaattcatgaaccataatacttcttcttccttttaactttttattcttgtactgaaatcttttgtatgtgtaaatatgaatggcacactttttgtatgttacagtaattacaaaaacattgttgcttattgcttaacgtgtgaaaaggggaaaagaaaaaaagaaagttgaacttgtaacatacaatcgagacaattttgttattaaggtatatctaatgcgtgtgtgccctacatagacgactcttcttcaagtcaaactttgtggttcccacacgtatcctcacaggctcacacgttttaacctttaattttcgtattttcttgactatatatattatcattttttgttgacaaaataaattgtattatcatattttaaaattttgatagcagtatcatatgtaactctaacattctatgtttagagatgaatttatctatatatatctacttggataaaccaatttgcaccatactatttgcagcatatgagactaactaactcttgatacactgaaatgatggtagacaattcagtctatatatgcgagttaactcctaataccgtgaaatcataataggcaaattcagtccacaaattttttacgtaggattttgatattttccactctttatatatacagtctataatcttcaaacctatcacctataaataatctacaatctaccatttagtcaacaatggtgaaatttctaaaccctcgtgaaagtctacctatctcccaaagtttctaattctatctacttcacatttttctccacccaccaactaaagtataagccttggaaaaacaatcaaaataagaaattctataagtcctttattccttatataataaatcataagttagtaaactcttttgttcacttttcttttgcatccaccgaagaaaaaccagcttcaca

SEQ ID NO: 2515 - DNA, 1449 bp, Arabidopsis thaliana
ttacatttatatttgtattcttcagcctcgctgagtgataatatatcattctgaaaggtttcaaatacaaaattactgtttaccaagagactatggaaggctcttctcatcctcactccttcctttctttgagtatcgcacaactaatgtgttactctgatcaaactcatggaaaactatctcctctaaaaactttagtttgagtgtttttcttgagttcaactacttgtgggtgttgggattattagtttcgagaagttactgtataatttttgaatttttatcattttaactctcagtaacaaattactttaaacttttgaatcttatgacttaaccttttaattttattctcagtgattggcctgatttttccaccatttattttatgaattcaaatgcctttatttaccgtattccgtattttagatattattgttttaattttaggcttaataatgtttaaattgtatatttgttgtactgagaaacaacttgatttttatgttttgagatatatagtacggctactttaatttaaaaataaccattaaaccactagattgattttttaccctataaaaaatgatgaatcccgaccccgataatctggtttgctacaattattattttcttacaaccaaagaactaattccaaaagaaaactaatctccagatatactttatattgtggacgccttgattgactgtatatgtgtttcactattacatgttgatagattacatatatgaaagagaagtagagaatcgtatatgtacgtaagactaaccaacaactcttttattttgtaagttggtttcgtggttgagagatatcaaattaaggtgcagagaggttggtcacttttaggtataggatggaaatgtcttaccacatgttaaatatgaaaagaattgctaaataattataacgagttgcttctaaatattagtatttgtttatttatgatggctccactcttttcctacgctccctttgagtccacacgcatctaaagatattcgaaccttggaagagccaaaatgaaccttggagtaatatgtatttttatctacgttgtaaatatataaatgaataataagaataaattttgaatacatcatatactttacagtgtacgcatcatataaaaatttcttatttatgaacaatttgaattgtataacggaaagaacaagtaattaatcaacaattctaatggtgtattatgacttttatgagtctgacatttgaatttgattgcacttgttacttgtgtgttaatgtgtgttgtgcagcaaaagggtccacacgtaattagtccaaagataagggtattaaagtaatttatatatgtagctaattacaaggtttaaatacctaacccaattccttgttcatcatcttctaacaaacaccaaaaaaacagagaaaacaaactttaaaca

SEQ ID NO: 2516 - DNA, 2000 bp, Arabidopsis thaliana
tacataaactgttaaacatatatctatcattgtacttctctctttggtaatacgtatttctctctttggtaaaaatgaatgtacttctcgatttttagttttgaagaaattaaatgcattattaattggtaagtgtttttttcccaaccgttttgtcaatatattattttcctaatatttgtgatgatagagtgattattttttacatatatagagattatattgagatttgttttttttttaaacacatctctagatttgttttaggtccataatagacttcgataaaaaaaaatcacaatttaattttatgaaaatacaaaattctgcacgagttgtaatactagtatgatataaatcacataccaataaaacctcaacattgttttgttttgtaactgatcactttgacaaaatgcaaatccgttaatgaaaaatttatgtgacttttgacttaaactatttttcaattaaatttatcggataataaatgtgagaatgtcagaaatagttagaataagtaaatgtgatgaattttatttattcagtttacatgttaaaaagtcattcagaaaacagcaaaagtatttaaaataaagtaacaactccaagttttacatttctgatttgcatcataagtgtatttgtgactttttaagtccgtcctagaatttgttcttacaagttgatcataataatgcgagagatgaatctatgagaaataaagttgagtatcagactaaattttctcatcgaatgttcaatgttgcatccttgttgaccttgtccccaactatcatatactactactatatttcaaaataagttccgacatattaagaccaaaataatagtggtttttctaacatgtaattaaagcccatattttaaatgttgattagggcccataatgttatagtatatactaataattaattatttgattatttaaattattataaattttttgatatacattacatatgaccataggacatatagataaattcctgtaaatattaacatattagatgtcaaaatatttttccttgtagagtttaaaacaaattatcagtgtccatcaaaagctggtttaggttcgtgtcaacggttgggccgaaaaaataaacgaatttcaaaaattatagactctaattaagtaggattacttattttgattgtaatcactacataaataaaataattaaatatccattttttctctctctctttctcagtttttttttttttgggtaagcgtttgctcgttgtgtaatttcccggcaacggaagagaggaggaggaagagtgtaagcaataaattcctcttcttctacgaaacatttgctcttctcctctttctcttctcttctcttctcctttgcttctccgattctcttccttttttttagtttgatccgactactcaagctttttttctgttcatggtttcctccatcatcgcaggtactacttcacttcttcttcgatgaaatttctgctaatcggtttgatttttggttattattcatatgaaattttgtattccttatttgtttgactgctctatgattatcatgtagtttgattgtgactgttctggtttttttttactcaaaactgatcatggtttttaacgagaaaacaagttgatactctctttggttccgtggaattcactgatcatcgaatcggtttttgacctgtttcaaaggtttaagctttgatttgagtttattgctctgtctctgatgatgttttgtcgccacaagcagcaaaattttctattcatcgagttgaccaactcatggtcttgcttcgattttcttcttctcagttatgtttgttgatgtatggactactaggaaacacatgagtagcttgtgatcgagaactaatgatcttagcaagttactgttctgctttatgatgcaaaatcagaaatcaactagcaggtctttgatatttgattcatatctgcagttgcagaaggcaaaaag

SEQ ID NO: 2517 - DNA, 2000 bp, Arabidopsis thaliana
gaaaacctttcttaatttgattttgtttctcttcccgagaagattggatgcgtactgatattgttgtggcaacttttattactttggtttttttataatgagtttttatgataatattcaacagtcaaaatcaggactttgaatgttatatagatcaaatgggtcactttcccatttggcacaggagctaaatcctggctaagttatcgcctgtaccttctttgatagtttatttctccttgccgtcgttttatacatcttctaaggatttctgtcctttatattttgtttgatatataaataaccaatagccaaaatgattctagaactttttaaaaatgaatttgttaaggcggtgagaaattgtcatggcaaataaactcgaaaaacaacattgtatttgctaagttaattattaaaagttttcagaaaatgtatattagtcacgagatcaaataactttgtcgagtcgaccaaactttttttcttggactattttactaatcattccatctattttactttctcgtgagaaaaatgttaagtggagtgggtactgactaattatgagatcatttaggtgtcatccttagatgagcatgatttaacttatacatagtttctaccaatttcttatctaccaagtctgatcggcaactgtaagagttgttgtaaataataagtagaaagttgtgtcgtttagtcaagataaaaatattcgtgtggcaaaaatatgaaataactatgttatacgttgatttcaactttttagatgctaatatagtgtgtgtgtttttatatagttaatctgatcagtaaactccaaagttcatttgccaattctctatcacttactgtactgttactttttatatttattgttttagttggaaacaattccacaaaaaaaaatatatgttgattgatccaaaagagttattaaatatttcggatcataacaggaaaagtagtaatcagagtgctctaactaagtacactttggaatgcagttgaaggaattgttttattgatttggtctaccatctaagtttgtgtttggctcccgggtatatatcaaaatagtttaattagtccacaaaggagggcatatataaaagttatcctttggttcctatgtgaatcttattttaatagtatcttttactacatcttttcaatattttggaaaattattatatggtccaaccacgtgacttcacctatacgttttttttttttggacaaaaacttcacctatacgtatgtattgaatttgcagtttattgataatctgatgtaattacagtataatacgtaacaactactgataacgacatgtttgaatttcaattatatattacatcatactataaaattagttgcaataaatgatttaattattttccgatgtcctggacttttctgcataacatagcccaccaatatcaaaattattaaactataaacaaatttaattctttttttatgtgcttgtaaaaaaaaaactttcaaacacagccaaaacaagtcttaagacaaaataacacaaacttaaagtttgaaagcagaacattcggatcattaaaacaatagacctaaattaaattattttaggttttggaggtttcagattctctagttacaacacagaaacacactaattataggaaaactatcgcattcaaaatataaaattaatattttgttattaatcacaaagaccataagaaagatggatgaattcattcttatagaataaaccaatattaaataaaaaatttctttaaaaataatacccgtaaaagattttaatacttgggaaagtctataagatcttgtgtgcataataatagtcaaagtcattcgtaattgaccaagcaccaattaaacaggcaaaaaaaataatcaataaatagataaatatttactatatatatgtatagagaactttttataaagaatgacttgattggtgttctaaagagatcgatgtagtgaag

SEQ ID NO: 2518 - DNA, 972 bp, Arabidopsis thaliana
ttttgacttcaggtatgattctgtaacttgatgatgatgatgatgaggattggtaataggttaggattgagatcgaatttgtggaatagtctaggaagcttgacattgaattgaacgatgcaaaacatagttttcaatggttctagttagagaaagagaacacagtagttgggattctagttttgtgttgtttaaaatgtgttggtttagtttttgtgtgagattgataatgacttgttattctttctcttcgcttaagacttactttatctttccattggttcaatttctagattgtacatctcttgattgtagttgttgggagggtaaaagttatgatgttggctgatcttttccatgctcatatccattaagacttgagtgtccgatagtagaacaatacttcactcttattttgtctctaagactcctttttttttttcctttttttgttctatttgttttgcaggtgtcaatggaagtgcatgagagtcacttcaaggatcttgatccaataataagaatatgtaatgtttccaaaagcttatgaacctaatctatgttttatgaatatatatgactatcggctttagtcttcagtatcagtttcttgtttacatttggatgtatcagctgctaaaaaaatgcatagtttcccatcccatttgaaacgacgttttctctcatgtcttccactaatataatcttctggtcatgagaacagaacaggagctctgtttttctcacacaatgatcgaacacacttttgtcatatagtatagagaaatattaacacttctttttaggcatccgtatctagagtctttgtttcactgtgacctacctaagtatatcaaaacgcacgtttggaattctgaatggcactttcgtaaataggagggtacaaacatttctccttttaaattgttttcatcgtgaactctctcactcactcaacaaagtaaagaaaca

SEQ ID NO: 2519 - DNA, 2000 bp, Arabidopsis thaliana
cccttttgttgttaagtgaaaaaatgggttttggtaatttaattgttgtgcatacattttctattttgttattcttccgttaatgtaatgaaagagttgttagcatataaaacaaagttcagtttcttctttctttggattatgcgatatacagtcataacattttctatcttaaaacatagttccaacgacaaaagtagttccaatgacaaagttaaaagacatattcttttaggttgggcacgacattgtttcgatctgttcgtccagagaaagttatcattgcttcaaaaggtgggaaagtggaagtaacacatcactttgatctcattggatcattaataattgtgtttatgtaatacgtcagagactcactttcattcaactaatttccacctactctttttgtttcaaccttaaaaaaaaaaaatattgagcaatactatatgcttaatacaaaaccattgactaaaattaaagaatgttgaaatgaattaatatcaaagttatagtttatattcttctatttaatcgaaacatggaaccaaacaaaagcaaatgaaaagcagcaagtgctgaagaattggttcgaaataagtggagtggttgtactttgggctttgggatagcattagctgattttgaggcccattggctaaacgtatttggtaatttgcctccaatttttttgtcaccgtcattttgtttgttgtttggcaacgacaccttccaaactttatcgttatgcttaagttgattttgataaattaatttgataatgatgaagtgaaattcaatgaagctaataaacacaattttgataaattaatttgatttcaacagtactgaaatatatagtattaggtctagtagcttccaactccactagacataaagcaattttgtcccaacaaaagttttggaataaagcatattgtatcttctcatttccaaactgtatatgagaatagaaactttataaaactggttagaccaaagtaataattatgttgttctcaattaaacagctgtgatttttcaaatccaaacattatattgatttggagcgccttaataatattctccgtgtttagttgcgctgtcttatttgtattattctttttttttttcactatttcatttttatttatttattttatctgttgaattttctcttctggctgctgttttcctctctctctctctctaaactcgagaatttttgtagagagaggaggcaaagtgcgaaagctaaacgcagatccacgatcaatctcctccaccttcaaaagccttcaaaagtgtttcttcttcgtcttcttccttttattatctgtgccttgacagatccacgatccgattctggtcaaattttacatttctgcaggtacgatcttagctctttttgttctttcatgttcattattctttttctggatctattgtttccatttttaaatttccggttgatttttttatcttgttcgatgtgattctattttgtggagggatgttattagctttaagatctgtgtgagctgcgtttttgaatgtgaatcttcctttttattcgattttgattgttaccgtttgaatttttagtctgcttaggagtcggattttgttgattttgacttcttctttatatcctttaattgttgcaaaattcggaaattttgttacgagctggggattttttccacttccttgagattgttttagggtgaatctgaacaaagacaaattcgatcattgctgattgctttgttgccgttcctcaattccatgtatctggctcttacgattgtgtaattgaaatgagattatgatgaagaatgattcgtttgtttctttttgttctatctatacatttgtggtgatatatatatatatctttgtttgaaacgttaatagataagctgctcatactagttatacaacagactccatagaaggtgacatttgtttaagatactcttgttcctggaacacatacgaag

SEQ ID NO: 2520 - DNA, 2000 bp, Arabidopsis thaliana
gaacccagtaatggattcttcaattcttctctgtgtcctttttggtcgatgaaacacagacgacgaattcgcacacaacacacagtctatattgagattccggttagtagttattcggtttggttcaagttggttatcttcattttctttatttagtcggttttgtattagaatctgaaagttattaattttggttcaactttgaataaaattagcaaagtttatatggatataataatcactgtacagtaattaatcttaataatgtaaacaatgtatcaatatattaaatttgaagttataatttggtgtcacaagtaaattttgttttggttcgaaatcagttttagtttatacagaatttcattctaaatacggttttgctttggtaataaatccggggataattcacaagtaaatgatgttgtgattgaacaaaaaattttttatgaccgaactgaaaactgattgtaacactggtgaatcttcttttaaagtaacgaaaatgaaacttcattacaactttataagaatcatttataaagtgtgaagtgtgaaaacattcgttgtgtttatgtgttcgataatgttttgtgtgcaactacaagtctacacgaaagtgcatgcatattgtgtgtgtatcttgttttaaggaatgaattatagatcatatgccgtagatgtcacatatttctaggatcatgtgaattcgtttattgttacggtattcaaattcagacaaaccctaaaatacttcaagaccaattcaaaatttagtttaaagtggagtaccaaaaaaaaagatagaataaaattcatgataagtgactccaagacttcttatatcaaaaatttcattttaaatttgcttgtttagtactccatattcttattcaagttttaacatcacaatgatgaagctctcagttcataaaacgaatgcattaacattatattatagtccttaattagataagtcctacaacaacaaaatcagttaatattcgtgtttacgttacactaaattaacaaaaaaatagtattaaacgaagttacgaaccaccattgagtcattaactaaaaacataaacaaacaaaaatcaaagtttgttttttccttttataaatgtaagtccaagcgaaagaaacattggaccaaaaagccaaaacttggatacaaatacaatcctttccatcacccgcatgacacgtcagcgtcactaaagcttcaacaccactcatactcaactcttattggtctgtcacaatcagcaatcaccacgtgtcaacgccagaaacagacagaaatccaatttttttttttgttaaaatttgatttttgtgggatgttttttgtttaattaaattatttccaaaggtaacgcaataaaacggtgttgtgaaatcaaagcaaaaaaaacacaaagggtcgtgcgagagcataagagcgcactctaatcgaccgacggattcataccctcttcttcctcatctctctctgcttagtttctgaatgtgaagcttgaggagagttctatatccttttgaattgctgtaatttggatcttacatagacgagagcagtccttctggatctacgcggtttaggcgggaggaggttttggtattgggaatgcgtttttgagctgatcttatacgtctattcaggttggtttgatcgatctggttccttatttattttcccagagttttatttctgttcataaaaatgtgatttttacaatgacgctactagttatgcttgattctgctcttaccttacattcttgttctttatttggttttgagatctgctttagctcattttctctgtgaattgtcggttttgtagctattgagatctgattgcgttttgtttgagttcctctttaaagttgatatcttttgttcagaaggtgtttccttttgcttgattgctgtttttcaggtttagctcagtctagaattggttggcttgggaaaggtcgatgaagaacggg

SEQ ID NO: 2521 - DNA, 2000 bp, Arabidopsis thaliana
cgacaaccttatagatccaacggtcataatccaacgggcgtcattcttggcgcgttttttggtccccaataacttcctttaattctttcttagacccgttacgttatcattaacaacactttttgtttactgattctagaaagattacggcaattctattagtcgaaataaaacactgcaattagattaaaaaaaatctcggataaaaaaacaagtatgttgctttgtttggagccctgaactctggctcaaatgtttaacgtggtgtgtttgtaacactttgatccattgactatgagttatcggaaaagaagatctgttgaacaaaaggcaattgataggttttttaggacttgtgttttaccttttacggataagataaaatgaattgattataagaagtttgaaatacgaagaagaccggcaaagtaaagaactaaagataaccaaacaaatggggacaggaacaaaacatcaacaattataacaacgcgtttttgacattacttcatttttaatttatcagaaaagcgatgtatatgtttaactacacacacctctaccttcttcacgcgttttctgcaatttctttacttttttgttatttaaagactacgattgtctttttttccacactaattcaatctctttttcattttaaattaaatctatatatacatttttgcagttattttgtgaaataaatcctatagttgagacttatttacaatagatatatacattttttcagttattttgtgaaataaatcttatagttgagacttatttacaatggctgccattagcttttaattattgatttttttctatcaataaattaattaacaaactaaaaatattccaaatatattcagcaactatttaaaacaaaaaatgtttgacaaacaaaaatataattgcaatcccttaaaatgaacaaaacacacctaaatacattctttatctatccaataaatcttttttctccaaaatttgaactagattttgacaactatttaaaacaaatatttgtttgacaaaccaaaatacaattgcaatcccgtaaaatatttattttcattatatatttaaattagcggtgtaccgcggttttttttacgggacggatttggcgagacgggtttgataggacgtcacttaataacaattgtaaactataaaataaaaataaatagatttaatttgtaaacttttatatatactaatttaaaaaataagttgtccccgcagtataccgcgggttaaaatctagttgtacatatttatccttcatttatcatggttcatacacttaaatggattctgtaaatcacggctttttctacgtttaacttgtattaggtgagatcctttggatcttaattcgtcatataaagattattcatttagagatgtacatttataagatttaagaacataatatgtaaataagtatagtgttcaaatgtaaatatgtgtatatatttttgctcagtgtaaaatctaatttttaaatgtgattattgttgaatagaagaagactacaaatatttttagaaaagtcatgtttctctataaaatcgttgttttcttctttgtaacgttccattttaatttactttctccaaaaagtaaaggattaaaaattagattcaacggttgtataggcgtgaaaaagaaaaaataatttccggaaaaatatactatttaataattataataaattctctctctctcctctataaagacaaacaatctccaagtttctctgtatcaacaaagctctgtttcaagctctctgtttctcagatcttctctctgtttttttcttctcataaaataagagttgtgattcaacagttatggtgagaatattccttctctacaatatactaaattcgtttcttctctctttagtaccaaagaagctacgaactcttttccctctttcttggttcgacaaaactctccacaagaactcaccaccgtctccgtcaacg

SEQ ID NO: 2522 - DNA, 760 bp, Arabidopsis thaliana
cgtcgtaagacatagacacacacagttatgtattcccagtgaaagaatgttgtttatttctctagatattagtatgcttataaataggcatgaaggagaaagacaattttggtatagtggagttcagcagaaaatgtatatgttttttcgttttatatgaatcagagaataaaagttggatgttatatctacgttgctaatgttgtacctgctcacccatctttcatataagaaaagagaacacttttagttatccctgtgatgcagaatcgtattctttgttatctctccattcctgtggaaaccaacaaagtcaactaaatttcggtttaattggttggtttttaagtcaacgaggacttgattttagttgggcttgggcctataattgtgttcatcattgggttttttcccccttatcagtttaacgtccatatccatatctttttctttttttaacggcaaagttcatatccatatcttatgatgtgcctaaaagagggagaagatgcgaagacagaattttcatatttgaaagggttcgatatcgatattgggaaacgaatcaaggtcaaaaaactcagtctaatagttgaaatttaaaaattttattaattcaatccgattggtttcgttttgttatggttcggttctatatcatcaaaccaatcggtttggtcctaaagataattataaatattcaccaacaccagtgttaaacacatatcaacaaacctaaagttagataaacaaagagaaa

SEQ ID NO: 2523 - DNA, 1860 bp, Arabidopsis thaliana
tcagtttctgatgagaaatgtttgaatcttggcatgtataatggtttgtgtaatgattaaaggtaaacgaacaagtaatagtcaataagtaaaataaaaattaaaaacgctagactttgattgtgttatcactaaaataaatgaagataagtgggacttcggttgtggatcactcacgagtgaacaagagatcttgtatttggaaaaactagataattgatgggaagcttcataaaaataattatctaaataaataaaatttataatatatctcgtgaagaacgagagagagatggagatatcttcgaaacgagtgaagacaaattttattattttgatttttttgtttgtttaaagagaagatatgatatgagagcatattccttaggcaaactatgctagttcccaaattcacccactacacaaacacaatgaggtctactagaaatataatagttatgacagctaatgactcgtggttctcgtggttgttgtcctaacgatgaagatatatagcttagcaccacaacaagtgttgagcataagtccatatttgttaactccaactccaaagtgatcaaagagagaaagagatagagaatcgccatggcaaagatgtcagcactttctatcttcgccatctttatcatcctcgttctggttatctttggtaaatttatttctcacatatttattcaactttatgattcacaggatccaaagagtatttctttcggtgatagcaataagtttcattatatgtgattttttatatgcttaaatctgtatgtacatatatttgtgcagaaatacctgagatagaagcacatgatagcgagtgtctgaaagaatatgggggtgatgttgggtttggcttctgtgcgcctaagatatttccgacgatttgttatagaaattgccaaaaggacaagggggctaatggtggaaaatgcctctggggagagggcggtaaagtgaaatgcttatgcgacttctgcagcaatgaatcttttaatcagtttataagtcttacttgaaacttgcatgtgtcgtcgtttgtgtaataagcaaggctaatgatccaagaaataatgtaacaatgaataagtaaaataaagaaccgctaggctttgctagtcttactactattattaaataaggatacttcaatctcgttaagatcgatctcgtagaagatcaatccctttctctcttttagccatctgaaaacaaatcaagtactgcagatttgatttgacggatagaagtatataacgttgtattgataaatgataaacccaaaacaactaggtataatgcgataatttaaataaacgtataaacgacatatgagtttgtgataagtgttggatgagcaaccaaaaataaatcaagatccattaagagatttcatcgtaaagataagtgtttttttttttttttgatgcaattttatctcttactatacattacctaattatggcgtcggcttcaactttgtgttgaaactgtaaacccaaacaaaaaaaaacaaaaaaatatgaggttagatgcgacttcgctttccgtaattatgatctttattgttacagatgaacaagacatttttattataaaatacagaaatgacgaagaaattaatggtatttatcatatagtagatagtaaattagtgtgttctgtcgtaaaaaaatattaaataatgtgttccaaatgatcataaatcatgtacgacaaaaagaaagtcataaagcgtccgattaatttatggctaaatccaacggttagaaattaacttcaatttggtgacgtgtgaacaacaagatcaatagattctcggtgagaagaaaataaaagaaa

SEQ ID NO: 2524 - DNA, 1380 bp, Arabidopsis thaliana
aacgctcttgggacatacatggcacgaaagtattaaaggtgaaataagaagtgttgttgtaattgtagtactttttttttttttttttttgataaaaagctagagtaatcttgtgaagtgaaatcacattattaaaagattaataaatcgacttatacaaataaaatgcttgattcttgatatttataccgcacccaaagaacaacagaacataactttgttgcataagtttttgactcctatatgtaaaacttcattcctttcttatctagtattgttggtttcttatctcaattgagcgatcggattagaattggtctgacaactagtttattatgtgaaacttttaaaatgaagagttttgttgtgaatcagagggtttgaaagaatttgatttcagtttaaaagtaaaccgaatttgttcaagtcgttgtaggcctatgttttgtctgtttctatacatgattgatcagtctcttgaaagtatgatatatagatgatagagcttgttttctctatgatatacatgttcctgcaatatatcttgttagattactaactggactaagtctggcacgtaagacaacgatcttccacaagtaattctagtttacaagtcattctaataattttaattaatttcaaaatggttggaataaaattacctagttttactatttaagagaagaccaacatcaaagattattcttatctaatattcaaattatggatattaatgcattcatatacgactcgggattagtatttcttacaagacttgttcaataaaatttcttgccaacaattatgacttttcctgttgtttacaatttttcacaagtctattgtcgattttaaatttgtgttatcacacacaacatgagactagtaaaaccaattgacattgactacaggcttctaccgattaaacttatcttgtataacaaactcaaaccatattttaatttttgttttccaattggcgactactttcagtaaaagtcacttagtttcttgctttttagaaccacaaaaaccaaatatacttttttcacctatctcattttatctctgataatttttctttacactaaatgtttgcatcacaggaacaaaaaaatatttggtttaaccaatttcgtagattgaaacgaaaatgttggtgtttgtttgaaaatttcccaacgtgttacgtgtaacgtttcgaatggtctaagaactaataagcatgcgtggcattggcgttgacgttgactcagaaaactacaagtatattttatttacaacaaaacgtatgcttcacggatccatcatcatctataaaacacgaagctaatgttcatcatctctctctgcagtctgcatcacagacacaaaaac

SEQ ID NO: 2525 - DNA, 1713 bp, Arabidopsis thaliana
agctttctctattgctttccatggcgatatctgataacaaaattcattacaacaatcactaagaacaaaattgaaaaaataagaagaacacacttatcatcagcaaacagaacagcaaagttcttagaaacaaacacaaaagaaatcactctccagttgcaaagtaaattcatttacaggcagaagaacttaacatgaggaaaaagcatctgacctcatcactaccatcaggtttatctttcccaccaaataagcacacagcagaactttgtttcgatttcccagtaggtaaacgacggcgatgatcaagaagaggcgaaaactgagtagacactgcagcagtagctcgaagagtaaacgaggtacgcgggaagtgatcaaagcgtactgaagacctaataggtacactggagatgcaatttggtcgtgttatccttgcaggatagtaggatggtcgaaaacaattagcctgagtaaagctcatcttttatcccaatgtttctcttaatgcaatcactttctgaaaagaaaacaaatcaacagcaaacaacgaacacaaccaattagaacccaacattgaccaaaacaaggattcttctgggcatgttcagaatttgagtatatccatttctaatccaaattcggagaaaagaacaaatctttgggataattatatcgtagtcatagaacaataagcaatataagtaaccagaaaccaataacttcgaatgtgatagaatataaaggcactggttcggtaaatataaggtaagaacactgagcaagctcgcaagaaattggaatatcatagagaaaggagagtaagaaaccataaatctaccttttcgaagctttgatgagacagagactttcgaaaccctagtttcgcttggagagaaagaattcaattttttttcccctttgcgtcgtcctgaaacacaacggaggagccgaaactctgtgagagatgaagcgatcgacaaaagtttttatctatcttgaaagatgcagcttaacggcgtcgtttttcacttgagctccgatggttctagagtctctagaccagggttggtaagactaaaccgctttttattgatatgctggtttaattttgacgcatgactatttggaaattgcaataattgagttggatttttctaattttggttgattttgatttataaatagaaacattttggcttcactagtcatttttctcacaattccatacaatttttgttaaaaatcaaagtaagactttaaaagaacgttctaaatgctatattagttgaccaaaaaaaatgctatattagctaacaatatcgtttgagctaattaacaaaaacttggaactattcaatagaaaaatctcaaacgtttgaactaatctaaacttgattatctcaatcaagtttttatgagaatgattttcatccaagtaacttggctctttaaaattttgattacatattcgtttttgatctgatctatgaccgacatggaatttctcataacgacaagagaaaaaactgtgtcattgacttttgttaagtggtacaaagtggcattgactttgactcagaaaaagccaatcaataatcgtgaaagatgtctaacactgatcaatatttcaatttgaatagaccaaatttacactataaatacatcaacacaccttcttcatttcttcacacaacaccctccatacacaaa

SEQ ID NO: 2526 - DNA, 1399 bp, Arabidopsis thaliana
ctctctttcatcaccatgaatgttcatcttcttctctacctctggcatatgacaaatgtaggatttgtagcaaccagagtttatcaccactgcatgaattcgacatgtctttttcttccgcaactcagtttgtgtctaaatcatctccaaaattctgagatatagctagatttttatttgttatgaaattttttttaatcactgttggtctttggagcctaattatcgtgttttgatgacgcaatcactgcgtcacaatctgatgtcatcttaacaatcattaatgtattttttttttcttttctcgtaatattcttaattattcttcgacagcaaaggtttaaaaactccttatttcaatcattaatgtatttatgatttgatcgaataacaataatatagcttattttgttctattctatcgtatttgattcttctttcgttttttttttgtttgacttaagaaaccgattgtttatagtagtaaacatttgtttttaatgttgctcgattccagtgcacatgtccaggctagacacttgtcgttataaaggttgctttggttcaatattgatccactagagatgttacaactattgttgacatctgagattgtgtgataagaaaatatgaaactggatttagtgaaagttacaatatataatcatacatcatagataggaaataaggaaatgtcagatatacttgaagaatacatcaaatagacaaggtcctttttcttattgtcgactattatagagccgtacagaaccttttcacgtctttagtaattagtacattctccatttcggctctctcttattttttttccatctcttttacttctccaaataataacaataaaagcttcgattttgtgtgtgtttgtatttacatcttgacatcgatattcttttcatcaattttttaccaaaaatgtaataaaaacaaaaaaaaaccaacgctgaacacagacatggtttctccatccgtttatattcatcgtttgtatgtttacttaacaacttatttcaaaatagtacatatcatggttgtgtttttaaaaaaagtatacagaacagaaaagcacatggtagacaaaataatgaagccaaaattaatacaaagaagaagttcaacttgtatttattaacacattttctttccttgtcaaagacatgcaaattggttttgttttcttattcccattttttttttataataaaaagaagaagagtaaaacaaaaaaactatcatttcttcttatcgcaaaactcttatctaagcaagaaaccgacaaaacctatatctacatatattctcatcaacatctcttgagacatattcattttggttaaagcaaaagattttaagagagaaagggggagaagtgagagag

SEQ ID NO: 2527 - DNA, 2000 bp, Arabidopsis thaliana
ccatgttgctccaatcatccaaatattattttccatttatacttgttccataatcttctttgtcatcttttgaatatttaaataacatacttcagaatgatttgataaaaattctgatttgacaatgaaactttggtcgtaaaatcttacatatgtggatggctcatccaaacatgcatgcatgatcgtaattttttttaggcctgaacaaaattggattaaataataaatatatactacaaactttgaaaatacattcagcgtaacctaactagagttgcataaaacaaaaattatcagatcttgtaacgtttaccaaatgtatttattggcaagtaaagctaatcgttcaataaaataattgtccgcatgcattgatcgtgtgtccccacaaaccatcttgcataggcagcaaatccaacgtgagtcgtgaccattattaagttaccaatattgaatccacactattgccaaggacctatagccaagtagctcaagacgtttggctgctatcttaggtattaccgaattcaaatctatatttcctccatgggtcacatacgaaactacttttacgatgaagatatatgcaataataatataatttacattgttcatcagacaaaaacttttttttttacattggtcagacaaaaattaagctagctgagataggcaaacactaatcataaactacttcacggaaaaaatatcattttaggtctaaaatggattaaaagtctaaaacatctttttcttcttcttctttttttgaaagtacgatttttaaaaaaataaatttttgaagtaaattgtttttgcggcttgatcacgttgaaggtgctgtcaaaagtgtaaagactttgcgtgttcttctcatagattaacgaactcttcgcttttcaacgtacgtttgtttcgtctattcctccaataaaaatgtattgaccatggtaatgtcacttttctaccttttattctacttctcctactttctctttcacaccgtaccgatttcattttttcgtacttgtttaatttccaaagattttttattattataaagatttcaattttccttgcggtgtatatgaaattggaaggcgtgtttatcttatttgaaagagtgattaaaaaaaaaaaactaaattgatgatctttgaaaacgatagactatctttgtatggttaaataggaaaggaacagaacaaataacgggctatcagtcccaacaacaatggaatttcaaatagtggcgaatggtttatgtttttctaggaattgccaaattttccatctatccacaggtgacaagtgatatattaacaaacttttttggaccaagtctaatcttctcaggccacgaacttcttatttggtttcacttattaataaaacagagattaacaaactctttgttccaagttttctcttctcattccacggaaatttcattagttttcttgctctgcttgttcttaattctcagtgccacaccagcttctttgactacatcatgataataacaacaagtttggcgaaactcaactggacctaacatttatttttcacaattagctgagttttgttctaattccactcatacgacaattaatagtacaaaagatctattggaaaatataatatgaacgaaatcttccattttaacataacaacatatcttatatacatatatgatgcgttttgaatgaatgaaaataatcatgcaaaacaattttacacctaatttcttattcattcaaaatgttgctttaggttcatgccaaacccaataatcatttgtttattcagagaattaataaactaattaaacaaaaaaatcaaacaaaacaaaacaaacaacaaatgcccttcgcatacaacacaaacactataaatacaatccataaccgttaaaactcccacaccaccaccactactccactcctcttctctctctatctttatcactaaacaatcgtacgttagcgaaaaacaca

SEQ ID NO: 2528 - DNA, 1939 bp, Arabidopsis thaliana
gagctccgacgacggcgaacctcactgagtttgtgtgtgattcgaaaacgtaacgtttcatgtttagcatagtttaattagatatagtgcccatttaatcaggcccattaatattattcggcccattggtttccttttacataacatatgggcaaaccgtatgcaagagcttttataacattaatgtttcctgtaagaagcatctctctcattacaacacatatatcgtgattctgaaatgtttctttattgattatgttatgcagttagctgatcgcgttggtgggtctccttaccaagaatcagtctcagcgtttaaattttcatcttctccttggaccctaacctttttcataactctaacaactctcttaattaatatctcactttggttaaaatgttttgtagctatgaagagcttttgattcccttgggatttgaggtaatctctattgtggataacgaacttgctcctgatacacgcaaagtaaacaagaaacagtctctagtttctttgtgaacaagaaagattttaaaagaaaaagtttaatatttgaaatcaatatttagggaatggaaaaagttggcagatggaagaagaagaattcattgtaatgatcctcaataccatcacaatcacactataccatggctctctatatacatcaataaagattacagttttggatctcctatagtaagaaccgagtgtactatttacacgtctagatgaataaatgggtccaatgtttcagttttttaataattatatgtgtagttgcatataccttataaacaaacatttatgggtgactttgttgtgaaattacaagtccctttctctttatggtatatgccaaattttcatccataatataccttactgaatttggcatataccttaaggagaaagaggtgtgtaagacaacgcagtcacacttcaaatatatttttgtcgttatccgttttataaaccaatgtcggcagtttcacttttaattttaaatcgagagagattggaagttatgccatactctgttttggagataagaatgttcaccactagcaaatggaaatagtgttgtaattgaccgctaaatgctcactttggtatcaaacttagtgatgttttagccaaaaacatcttgtgaacattttagcaaatcaaattagtgtgtaaaaatcgtggatagatattgtgacagaaaaatatagatattggatatattccttacaccattccccaatatattttcatactaaaaatggagttctctaatgataagagcaggtggaggttttcaccaaccctttactttatttcggaagatcatcttttccataaacttccgattccgacaaactcatacactgatcggtgttaagaaaccgttaatttttgctgacatggatgcgaagtagataaaaagaaaaaaaaacgatgtttctttgttcaaatcacagaattagaaacaaaatcaaaagtctaaatagtcgtcgttaacgttagtataaatggcatagacagaaattccttcagaattcaaaggctgctatcagtaggtgaacagttgacaaaaagttgaaagaaaatataataggcccaagaaagcccactggtcatatttctttgaatttgtttagcttaccctaatgcgttgtccaacttatcctgtcgttaaatttgtgatagacgttgccgttttatattaaagaatgactttcttttttggtgcaaaatattaaagaatatgactatgcaaatatctctctatacaaaagtatgtatatagttgggtgaaagagcacaataataatcaatacaaaattaattttattcagtcattgtttaatatgtttttgttaaattcattaattaatctgttaatctctctataaatagatatcttgtgcttgaagcttcccacaactactcaaa

SEQ ID NO: 2529 - DNA, 2000 bp, Arabidopsis thaliana
catgtccctcttaattaaacacccaacgaaaagtacttatgaatatatccattagatattttaattattacatttttaggctgttaaacaaataaattatatcggtttacctgaaagataatgaatgaaaaaaaaaaaatcttaatatattattttatgtgtttttaaaaataataagctgtcttgtatttttaacaaatagcatttttaatatagtacgatatttaatactatatcacttttttgtttaaatcatactaaacaacacctagccctttttaaaataaataataataataataataagaccacttatgtatcctttatgtatcatgtaaaatacaaaattccctaattatataaatttaagttggcatttcttctgactattaaaagcataaaacgaaagagaaataaatattggaccaactgtcccactaaaaacgataatatgatatagccaccacatgaaatgccgagaggaataacaatatgggtcatcatcggtcgataacacatagacaacattattattaggttggaaaatttaattaattcacacacatatacatatacatattatacagttctatgacaaaaaaaaagtgataaatgttgaatatatttgtcaaactaatttggtaattcaccgaattcaatctattgattattgctatcacttctcatattcaattttttgtgcgcgaggaattcgaatctttaattagtacgtttccccgtccatagtttcaatagattacaactctaaatgattatataaaacaaacaaaacattatcatatagaacaaagattatttgtgataacctaaaatatttatcttatctttaattatttgtttctagtattattaatgactgatactgctttatttatttcaaccaaacaactttgactatagtctacaataatacacgatcaacgttataaaagtttggattcgttttaattaaaaaccaccattgaatattccaaaagaaactgaaacctccatctcaaacagaggcttaccccaaataaattccatcccacgtcatcatcagagaaagtgtctaggggagaagaaccactgtgattgtggaaagagagagagaagtgtaaagtaatcaaatagagagatttcaattttgttcagaccttccagaataagcagcaacttgcctctcacacttgtcacccccaaaagagaaaaaaaacattaaaattaaaatcttatcattttagaaaaatctgtaaattcagtgaaccttcctctgtttcctgtttcttctctgattccacagtcttaaccccaaaaacattatatttatttctctcattatcttttaccatctatttttataccaattccttttatcaaaaccactcccactttatttcttcttctctggttttcttaccaaaagaaactttcttcgtcttcctctgtatttaagctttaacaccctgtttttggtttccaacgttcaatcttcatcttcttctcgctgaaggtgtgtttggctctaacggtttaaaggtacttactttcgattcttttgattcattctctgctcatgtttttgattgaatcacaacgatttactgatcaaaacttggacaaattttctcttgcagctttcttgaaacaccaattgaatcttttctctctaccggcaaaaaaaaaagattagtccttttaggtctggaaacgccaagatcactcgttctaaaccttagattttgtctgcatttcgggataatcatttcatcgtcagggttcttcaaccaaactacatttacagaagaagaagaagaagaaaagttcgttactttttatgcgtttggataaacaaactcaagtttcttcttcatacatcgatctgattttccagatcaaacttcgaaaagagaaaaagccttctttaaatgattcgtgagttctccagtctacaaaacgacatcataaacattcaagaacattattctctcaacaacaac

SEQ ID NO: 2530 - DNA, 2000 bp, Arabidopsis thaliana
cgcgacctattgatagccaatattaccatttaggaatgaaaatgaatcgaaagtactcgtttatatgcgaaactactactactattcaaagaaactctacgttactttttcttgacacacgacaataattggtgatgaataaagctagaaaagctgatagagagaaaatacataagtagagagtaatcaaagaaaggacaattgacgaaacaagaacagacaatgtggggaaaatgggatagagtgtaatggaccagccccctattaatgttcgaccccattcttattattttccttcttatccccgactttcatttttcttcttgtctatctatgttcatatcgtgcgctaacacccaaattaatcttcttcccttgaaacatgttttaaataacggcacaaatagtaagcgtagattcataaataaccccaaagtaaaacaacagaaagcatcattaattatccggtggagacgagatgacttgtgtgaggctggaagtccgcgagacatacctttacgtcggtgcatcgcagaatagacgtgtcaacgttttaatataatatgttgaataatcgaagagtaagacccaaggatagttaatgccaatgtatatccatgagaacttcttctagaagactataataaagtagaaacctttataaagttataatcaatcataatattattgatgaatcttatattcaaacgaaactgccctcgcaattttctacgtaaaataatacgtattacaaaattaaaaacacatgatgatatcttacaacttataacaactaagcacaaattttttggcaaaacataaagaatctatacatatggactattcgtgaaagaatttgtttgatagtgcgtgcacatgccaatatgaaatgaaaatgtccatcatacatattaatatacctgttttaaattgtagtaaattagggagaaacagttcacgagatgtttacttatcggttgacggttgcgtcagtgaatacgactcattccttattactccatattatttgtctttgcatagcttctagaagctttttgttatttcaaataaaaagtgatggtaaagactaaaaagctcactactggtcttcgtgaactttattatcaagatgtcatagattcggtttcaattgacactgaaatggaatagtaatctagatatctagttgataaactagtttaaaaagttattagttcaaactgtttttaaactatagacgctatacagtggtaaaagcgttaaacaaaaagtgcggcgcagtatactgtcaatttaatttgtgattataatatacaatattgttacctaacttcacttaaccaagtaaccactgacctaacttcaactatttgcctttacaatttacatcatgaaacaacatggacatttcttgaatttttggttgatattcaaataatcaaattcttatggagtatatgatttactccactgttagttgttcattttgtccttatgaaagtcttctagaagctttctacttttcctgttttatgaaaagattgttttaacaaaagcaccgtcttcatgaactaaaccagttgttatagattccatttcaaagttttattccttattaaggaaatcgcatcaaagtaacccatgtgttgactcttgcctgtttggtgagattgaaagggaatgattaagaaataaatttttagatacgtttgcgttttgcaacatacacgaatcttgatttttttcatacgctgctaaatcaagtttataggggtttttaaaaatttaaacgaaccgtcgcgttatttcaaccgcaagcaaactcatcctcctctttccctatttaaaggctctgccacctctttgtagcttcacactcactcaaatttaaatcgcaactttcgtcagtttttgtgtgttttcttctacacatagacactttgctcaatcaaacacactctctgttctgtttttctcaaacttgtttaagttcgatgact

SEQ ID NO: 2531 - DNA, 1265 bp, Arabidopsis thaliana
ataaataatgataacgaaaactgaaaagcatgtgatgttgattagtgaaattgcggtgacgctgatttttgcagttactgttttgattggtgtatttaattctagttcgagaactcttcttgatattttgtgtgacgcaatacgagctacagtttttctatgtctcgtatgtttttatcagttttatctgaaatactataatcacttacaaaaaacaaacactaaattttattatgtggttgtgctagccttagttgtatacatacatattttcacttacgtacgtacggtacgtcaggtatcaatttttctttctttcatcgagtatgtggacgccaagttacatttttttcgtttggttttagcgtcggtttagggattgaagttcaaaaaagagatgcttctagtaaaatatcttgtagaattgtagtgccttttagaagaattaccctttggtctcaactcatcaccgaaagcaagaatatttttctctaaattctatacaccataacatcaccattcactataactaaaacaaatggaatgaaatagtagcaagaattaatgtttttcttttcatttaaatttattataattgcaaaaagaaaagttttaccaaaaaacagtcgagtccaataatcaatatgagtaaatggttcgcatttttattttaaaaattgaattttttaagagcttgaaaattgaatttaacaaaaaaaacaaaaaaaggatcggtcaaacaaaacaaaaagggttgaaaattgacttaccaaagtctttataaagttgataaacttttgccttgttataaaaaaaatctactataaacagattgcgcgtctggagataactgatttttttttttttgatatttgagatttattatctcacattttctttaaaaaatcaaatcagaaaaaagaagaatggaatcaacaatcatggaggattgttctagctagttaaaaaatgacttacgtaccgaaatttttttaaaaaaaattaatagtctcgataaaatatactcttattaattattaattaaccgattgggcgaatggagataatgatgttgacattcgagaatcacctgttctcacaatttttcattaccaaataaaaaataaatccatgaacttgtctacacggcaatgcatgcaatttcacagaaacttacatatacaataatattttagaaaaagataaataatgctagatgagttaggaaacaaatggtagtgaaaacttaaatcagaacaaacaaa

SEQ ID NO: 2532 - DNA, 2000 bp, Arabidopsis thaliana
ttttttcttgtagagtcggtacatacgcaataaccacatttagtcattagattcaattatctatgttttatttcgctttcaaaagtttagtagtgtagaaatttgtccattgtaccataatgtaattgaggtagaacaatagaacatgaaatcatttaacaaaaacaaaatcgaatattatagtcacgaataaaaaataactcgcatcaatctctatgtttggttaataagaatattggacagtgaaaagtcgtactttaatttttcccataattcgacgtgagacatgtgagtggccgcagggagacacgtggcggttaataagacgttagactgacctgacgtggacgagaataccgatgtgtcaagtggattccagctggcagccacttggataaagagagttggatataacttgtaatgtaattcaacacaaaaaaaaaaaaaaacaaattctaagaaattaccttaataacatatgaccaagcttactttttttgtaagatgtcataataagtcttcttttaatgccccatttaatttccctcttaagatgaagaaaaaattatatcttactctatagttaaaatatagaactcactctctggtctctaccaaaaaaaaataatatatatatatatatgtatatatatatatatatatatatatatataaaactcacttgtagataataacttgttgaccaaacttacataattctataatattatagcaatcatttctttagggtatattcgaggagccaaaggaaatgtttgatattttataatataattgaaattaattactaattgtttttaggtatagggcttattaggagaagtgtattcacaggctgtcgtgtgagctttatttagcttttgttcttcgaatgatgcaaataaacagctggccgtatcacaacaagacactgtcatcgttgttggtgtacgcaaaggatggatatacacatttttgtgtttctattcgtaattatggtttgtgtaatttttgaactttcacaaattgacatcaataaattggtctctttcggacatattttatattatttgaaatgaaaagtgattggggttctccttttttcttattctactatatcataacatagcattaatttttgttgttgttaaaactcatattaaaattatgcgacaagtaatctaattaattttaaaactttgattctatttagaaatttatcataaaacccaaaatttaatcatctaaaaaactaaaacatagaacaaacaaatacatagccagtctttggctataagccatggcaaccaattcgtttggtaatttgtcatcttctaagtttgaagaaactgcaaattattcaaaaaatattgtttgacaaaaagacgagtgtatcatcattcccattcattacctcataaatatttgaagcacatttttctacatattattttgtttctacttaaagcatgtttaattgaatagactttgatatccagtatggctcattattcatatgccgaaatgaattcaaaacttattgatggacctaccaaaaactcccaatgactttatcataaggttcataacacacacaaaaaaacgcatttttgtggtctcttctcttaatcacagatttttttttcttaaaaaaactttctctaatcaaagttaaagaaaagaaattacagtcaaaacaattaaattagtattttaattaacaaaacagttaaacaaattcaaaataaaaactgccatgtggtctctttcttctctgtttctctctcccttcctttaagaacgcgtttgcagactttgatcagacttcgcgttcccgccgcccatctccctctctctctctttttctctctcacacgtttcttttttgtctctctccctgattcatcgccgtagctgtgtgaccgaacattgctgcgagttcctcaaaacccaaatctttcttcctcaaagactctgttttttctttcttcctttcttca

SEQ ID NO: 2533 - DNA, 2000 bp, Arabidopsis thaliana
acactcgaggctttttttgaaagaggcgagtgtgtttcaaaacaagccatttggtgggttagaacccacagaaaacgtatacacgcgctcaacacgcgtttggtgagagtggttgtgaaatcgcccgagaggtgagagtggggtatgacatggaatgctctgattagcttataaaataaaaatagtagagatgtagctccttccttcctatgttaatatttatttacttctcttttccaaagtatcatttcatttcatgtacagtagtgaacagtactaggaagccgtttaagggtcaatttgaatattttgtcatttgacgtgcatagcttaacaataacactaatgtcatggatctggacaaaataattactttagaaaagtaattatttgcaaacgtggttaaacagaacaatatgttcaatttatatgtagttgtaattacaataacaaatttgatcatgacagtgaaaataagcttttatttttataaaaatacctaatctcttagtttttttttcctttcttagccaatggatgaggatgacacgataatgataatcaaagatcaacatggcacgctcaagaccgcctttagaagtcctctctaaattctttcttccgatctcctaaatatgttttgttttggtcaaataaattgataggtaatacttagtgattatactatttggtttttgttttatcattgactatttcacttttataaatcaaatacttatcaaaattgttctttccgtatgtattcatattttctaatattgtaaagatttgtttcacctaacatctgtacccatctttgatcattgacaaaatatatattagaatggccttagaacgtgttaggcatcttcctactattatcatattacctaatccccaattttattacattttttaatttctaaaagagcttgaatataatgtcatttcgaatatctctgttcatctttttttttttctgtgcgacttctgacccaaagccttcgacgattttttccaatctgaaaacttttgaataaggaacttagtcaatggtcaacaccttgctaattaaacaaagttccattgatacaataatgagatttttgtacattaacgctttcatatagtttttgcgattcaacagataatcttaaaattaaggagtcctattgataaagtcttgttcaaacgtacaaactcaatccacacaaaaccttcataaaatacgatataggaaataaagattgtttttgcgtgagaaaatactatatgaactcaaaagattttaaaacaatttgtattaatacataaacaattgttgtgatacacccgtgtaaaattttaagattgtttttttctgaaattcttcaaggaaacttatagcttaaaatctacacttcaaatactctgttttaaaggcattaaaaataactgcgtttcagaaaaatattgaaattttagctgatcttttgctacaaatttaaggaatcttggcacctgcagaatctataacatgttcattaagtaatgcaatagttatacaattatacattatttgcatcatacttatattatagtgatattaacaaacccatgttctcagcacacttttacgtagaaaaacataaaaacccaaataggaagaagccactcataaggataatgggtttatataattcacagcaaagaaagccatcgaactattcgattaattatccattctttttttttttagtttgaatgtataagaacaaagagttgttacgcatcatgacaatgtcttagaaaacaaaagaaatgaataaaaaagtaaaacgaaaaataaaaagtgaggatgaagttgttgaatgagttggcgaggcggcgactttttcatacattccatttacttaattcctaaagtccttctcacatctctttgttatataatgacaccataaccatttcttctcttcacaatctttacaagaatatctctcttctacagtaaacaaaaa

SEQ ID NO: 2534 - DNA, 945 bp, Arabidopsis thaliana
gtttatatgtgtcgcccgtcttctttcttttgaataatccaaagcaaactcatttttgttgctttcttgtaggtactattatcgtcgatctccctgaatcacacaatgggatagtctttttgacgctgtaatataatttgcttttggttgtacatgtaacggtgtcgtttgtatgtagaaggaagacttgtaattgggcccagtagtggcccatattaatgtataattaaataatagcctaatcttataattcaatcttgatcactgagccaatttacacgtgttgcgtctctagtgcctctggttccacgttggtcgtcaaaattgaaatcgcgtttctattttcttcacgaggtttcttttccccgcggcttaggacaatatgatccgaatcgttgaagaaactgtctccttgtgtctatgtttcgttttgatcccacattcctaaagctccaggtaccttttctacgtttcccgaattctgattagttgattcttcttcctcaatccgttcttcccaaacttgttgccgatttttggatccggtcatcaactttgttgtttatttgtcatcaatgcaaaaattgagagcgtctgtgttttcacttgcatgttatcaattcctaatgttgtttgccgtttcattaaccggattcgagactcttcccgctggatttctttttttcacgtcttcttttctattttttatggatttggtattttgacatgttaagcaaccttcgttaatcagtttaaaatcggtgctttccgaaatttttagaagaaacatggaagcttaaaattttgaaattgctatttggaaaagctatcatttcataggcttagtctttgtaattcttctttacttgttgttcattggcatgaatatatgaaggattttatatttgattgtgtgtttgtttatgttgttagaaattgatcaaa

SEQ ID NO: 2535 - DNA, 2000 bp, Arabidopsis thaliana
ggacaccactaacgtgccacttgtgtagagatattcaattgtatattatatagtatgcaatatgaattttgttttgttttttatataatttatattttttccgccaatattattttatttatatgaagtcttaacttattaaacgtttgcacaaaaaagaaaaaataaacttcttattacgtctcatacacagggttcggaccttattagtggcatttgcgcagagttactattatcgatcacttaaaaacatatataggaaaagtatatcggtaatggagctctagatgtagaaatttcgtaatgaaattatgaaatctcaattaagatgaacatggcatggcatacctagcctagttgtatcgatgttatgtttggatttatatgcttatggcagaaagtaacaaatacagaaatacaataatgctactacatggttataatatatggtctcttttgttaagacaacgaccaacacaactacaccacaagataatcatcgattagtacattattaaatcttaactattattgctaaaatctagggatagttgaaatataaaactatacgatgcactattacatacattctccattaatcatttggtaatgatgaagtgctccaattatatactacctttctttattttgttatgttccttaacatctctattactaaagattttcggagattatgaaatattgtgaggcatatatgatatattcatacaaattactctacacgtttttgaaaattgataggtttaaacatgattgtaccagggaagacatggtcaaacagaaagctattagctttgatgagggacctcttaacaaaaaatttgttggtagagccaaaatgattgaactgacaaattttcatagagtttggtgaattgaataactccatatgaccaattctgttttgtaagacaacgaaaattatgtttttcgaatatctttgtgttatcgtacagaggagcgagtcaccagaaagcacaaacacaacgattttgtatcaattacatcgatacgcaatacaaatatttggaatatgtcatacatatgtattgggcctttatctcatgtctcatcaaacctcgtatctatcataaacttacgattcacagacccacttactacttattctggcccattaaagttcttctttttttgtcggttctagcccattaaagttcagcaacccttattattcattttttagtctttctatttctaattattcaattttatccaaataatgaatgaataaagttaaacaccgacactgttatatatatatatatatataacaatacaccgccacgtgagaactacgaatgggaatttcgcattacatgtttcgttaacaatataaactggaggaaaaaaacacatcgaaaggaaaaaaattcaatgtaagaaaaagtgagggaaaggcaaatcaaagacgtgttctacactaaaaggaaaagtatgaggaaaaactaacaataaattaaacaaaatttggtattttattacgtaatagtagtattaattaattaaaagaattgacattgacctaacaaaaattcttaaaacaaaaagaaagaaaaatttgtttgaacaataatggaatgactttgtttgtttggagaacaagctaagctgacgtgtctaataactcaacacgtcagctaacagacatatataaacaagtgtatatagagttaacgttatccaatcatagacgaaaagaaaaaggttcctttttttgactttgtatccgtagatcatcttcttcttcttcttccagagttttatccttatccgttccatcaaattctctctctgtaagttttctgttgatttctctgttacatactctgttttgatttctctagatttagaattcatttttttcccgaaaagacgcggaatttcgatttgggtgttgaaaacaaaattagggttttgtgtctcaatttctttgattgtgtatattctcagaagcaaag

SEQ ID NO: 2536 - DNA, 2000 bp, Arabidopsis thaliana
tattgggctcaccatagtcatggacttttaatattgggctcacaataatcagggacttttaatattgggcttattaaggcttatagtaagcctgaattgggctctcgattaagttgacgttaaaagccgagtgacacgttcgtatatgtacgcactgtacggaaacacgaagctgatgagttgggatttatataagagaagtgtttggaacaaacttctttctgattcctattatcgaaaggtccaaatcaatttgttttttttttgtgattcggaaattgtgcttaacttcaactcatagtttttgctcatatatagctaatttaacttgggttaatagaaacagggatgggcaaaaagaaacatatatatatgatcacgaaaaacgaatatcttcaccagctgggtgggtcatatccattatgaacgtttaaacgtcttttagctaggatacggactacaacaaaatatgattaaccatatatacaaagaacttgtcggttggaaacacaaattgattttaaggaatattggttttttggtttacgtattattgtcggtttaatatttttgttttgctttgattaagtgtgtaagtacaatttacactgcataaaaccttttttatatatacataattttgttagctaatttatcagagtataatcactcatctctcatgtgctttttattttattttttagtggtcattttgtttagttatatttcattactttaaaattccaagaattttttggatgcagcacaaacacgatcttaatttacaaatgaacgtgtaattgtgtaaagtaactcaaaatatagaaagcttctcttctcagatttgattcgtgggaaattcaccattttagctccaaaaagcttagtgaatcctccaattactcaaaactagatctatctttattggtctttttaaaagcttttttgtcctgatatgaatatgtatatatatcaaccatcatcaacgtacacaagtaacgcaactagaggacacaccgtacacattttgttctcgtaatataattttaattctatatatattttttacaaaatcacagacaagtagatgatcactagggcactaaccttattaaaaaacagtagatgatcactaacaaataaataaacgacattataaaatgagatggtggggatttgatctcgtgtgagtgttaccgaataggttcaaaactttgtcccacttggccagcacacgtgtggtggcatagttgtcttcatcttcgaagttcaaacatgctaagcatgtaagctccgacaaaacatattcagataataaaataatttcaggcctttcttcgatagatcatattttcagattcaaaatcaaccatagataataatatctgcgtaacgaattacacgctaaaataccataatagtttgacactactgttttttttcgtattgtgaatttgtgattgataacccatcaaaacgtttcagtgataatgataaatgtaggctaaaggttaatgggacgtgtcatatttaatgtagattcttcgggtttggactatctgccaagcaagagaaatatggcagttttaatctaatccaacggtcatagaccttagtcttcatctaaccgttcatttatttagactccatataaactcctttaaagacctcttgtctttcactcattcttctcttgatctcttcttctttaacgtttatactttatatacatcgaaagcatttcttctttgtccgttcacatcattttcgaatttgtgttttccctagaaattgtctttttttttttctttcttatagagaaaatcaagaaaatgtaaaaaagattgatatatttatttattctcgttcaaatgaatcactctttatttgactcgttagtccatgtctcgtctcactctcttaatctctatttcctctcagatctctcaaaaagtgtagttttgtgacaaaaactgttttttaaagttagctataagaag

SEQ ID NO: 2537 - DNA, 2000 bp, Arabidopsis thaliana
ttcaaaattaacacgttcttaaattggtccgaccgatccaatcccaagttcgatcttatgataaggttttgttgagataaatgagtaggaaagtctatcatctcaaaacgtctttaaaatattacaatatataaaaatgtaacaaaacatataataataaatcatggaatcaaaccaattatctactcattactaattttgttcacaaactccaaattctctaagtgtcacggtattaggtaggttcgtattggattattataagtaactagattagaaaaatataagaaaaataaaatcaatatgatctgactatgacgatgatgccgcctttctcattactggtttttaattcgtactcgtgacagtgtgtgttttttctcttacttgatagtattacgttaattagttatgagttctcaattcaaacgttggcggggtacatttctagtattagaaacatatatagctttgcattgcatgtaaccaattcttcaacctcttaataatcagattctggacgggataagatcatttgtatcttttgcgtttaaatattagatgatctacctaccatcgtcttacgtattctcgatttttttattttaaaagagaccaaacatatatataataataaaatggtttggatctattatctatatatgtttccttaacaacttaattagtttaaggcttaagcacagttgacaaacatctaaaattttgtccaccagcccggagatttcatagttccattctacccaccaaaacaagagccctttcaatatatatagggctattcaaacatgaactttaaccccacaaatttttttatctattattattgaaagaaataactatgattcgttagatatcatgattctataattagttggacgatactaatgatattttttcgtaattagataaataggtaattttgtgtggatagttcatttggtgaacaaagttctcttgcatacaaacttttcactgggaaaaacagtgtatattttatcaaagtattatcaactataattggttccagatctctaaagattattataagatcaaaaaccttttctgtagtttttgtgtatgaaaaaaagattaatagtttagctagaaaacctttaggaaatcatcttttatgtagtcaatctgattatgtacacaagaagtcaataaactacccaaaaaaaaaagttcaccaatttcaaaatacttctatagttatatttcacctagaaatagcatcatgaaccaattatcaaaataagaataaacagaatctttattaaaaaaaagtaccccggccctttatactgtcttttgtgcaaattgatgatggtcgtatacagtgtgcgctacggcaaggagacgattatattgattaaaaaaacttctgcatacagtattgcgaagttaacgtcgacgtttgatatgtctttgtggatagcgattacatgtttaagtcaattgagtttaagtcccatagacgcgtttatgccagtaagattattaaatttgagaaagaaaaaatataaagggtagactagttacgatttatgcgtattcgtaaacctattattttcttgctatcacatttaatctgtgtccaatactttgtaccaagattagattgtagactgatttttttctggttattactgaatatcacactaaaatttgtttcgtggtcaaatcaaagcgtattagtatacacgtcaaaaagatagcacaaacaagaaaattaaaattcaaaattgagaatatatgacggcatgatcgttaccaatccattggttggtataaacatatatacttttcttttttgcttcaactacaatgaaattacatattaatatatttgattattaatttaaattaaaaaacataagtccccacatctatataaacacatcgattcaagactcaaatctcatcaatcaaaatcttcaaacacaaacttctcgtttctcaaaacatttggtcttatg

SEQ ID NO: 2538 - DNA, 465 bp, Arabidopsis thaliana
taatcgtatcaatataaagttcgtgtacggatcaatattaataattgaagagaatgaaattataaaagatactgctttttatgtttcaagtaaaaatgttaatattagaaagtcaagaaagaggaaacacaatgcaatttgataaggtgttttatcgtctccgggattgaattgcgtaggtcaaaaaaagacatttgccatttgatatcgacatataatcactcattcacggatacgtatctcttgtgaatggtcgtcggtcaattacaactttactgctcggctttaactgacaagtggcgcctcctggtttcattcagaccctaccggtaggatgtaatttggaccataagtaagaaatatttgtgaaatatttactacacgaatatctttacgtatttaagttggcttttgaagctttgataattcactcatttgaaagaaaatatcacttgagaaaaaatt

SEQ ID NO: 2539 - DNA, 1493 bp, Arabidopsis thaliana
ttatgtttgtatatatattaacgttctaagagcatctccaatggaagtatctcaatgagatacctaacaaaagaaaaaaaattaaaaaaaaaatatgagagaagggagaaaaagtaggagagaaggagagttaaatttctcggatgattggacaggtgtaatcacactattagttcaactattaaataataattaatgtatctgttttgattaaaatattaattaatatgtttttgagaaactttctttatttttactggtggagatggtctaatgttccatggttcatataacggagcaaattaaagcattgtaatcatatatgtttgcatgttcatagttgcaatctcgttttgattataaatcagttttaagcatataaccaaaataaaaaaacaaatcaattgtaatattccggtaaaacgattaccacgtgatgattatagagaggcatagagcaatatcgtctggtaaactgaataaaaccggatttggtttccatagatttttctcaagccaaatcagtttcctttcgtttgaataaacctattggcttatcgtgagtgattattgttttgtttatttacacgatgaacaatgtcaatgagacatgtcacatgtacgaagtcagttccgatatattacatgaattgctttcaagttttgatcagcatccttaaatagtcaccgaaaataagaagcgaacaagtcttggcgaagttgaagccacaaagtgtactaataaatatggattgccgaattaaaagaagaaacaaaaaaactacattttcatattttttttcttcttccatatataaatccacttttcaacttaagcaaatgcaatcaatgggaaggtaagtatgtatacctctaaatctcaaataatctttaaaattataaaatatatatgttttgactaattttaggaagataaaataatctcttatattttcatcttcttgggattatttaccaaaaattaatgtttagaaagtagtactactcaacatgtagttgttaaatatctttaaagtttaagttttgataatgttaaaatctattaaaaataattggtcataatagtaaaacaactaataattaattttttaggatattgcttaaaagttaaaacatattgctaatttaaaagtcataatatacaaaatataattgtagtatattctataataaacatgtttcatctttttttcggacgagcaaagaagtaagaacgcacgttatgaccatgatgctctaaaaaaaggatcttattccttttctaatgatggaaaaattattatattattccttttccaacaaccaaagaaaaatcaaaaatgtcacgctccggcaattaaggtatttatcatccttaaaagaggtaccaaaatatatagaaccgacagcgccataaactttagaaaagagagagagagacaaagagagatctgatcctttgaagaaacaacaccaaaaaaaaaaaaaaaaga

SEQ ID NO: 2540 - DNA, 2000 bp, Arabidopsis thaliana
tctctattcttttgacgtaagaacaaatagtaacttttatttgtagaatattcattctaagaaattaatacgtaaatacatatatttctcacccgtgaaacaccaccagtcgagtaacgtgattgaagatatgtttaaaaaaaaaaaaaacatgattgaagatatgagagagcaagagtcagtgaactattttggccgcacacatgtgacacatatatatatgtgtattattccttttggatttactacattcattctgatttctgaaccattagtaacccttgaaaagtaaaagctgataacgttttaggatttgcaaatttgaaaaaagatgaccctacattatttccaactgcaacatgcacgttcctgttatgttaaaagatattattatagtatatatattttgaaacataaaatgattgatgtaactgatccaacggctaattcctcttactagttagtgaattagccacctaataaagattacatgaatcattaaataacaaatataataactatacaacaaataattcatattgtcgtacattcaacaaccgaggtactccaaattaaaaaagaagtcaagcacactcatatatattttaatttttaactgataaccttgaaagaaaaagaaaaaggatatggaatagaatggtaaaatcaatcaatctgccatggttatgaatcaaaaaccatagaaaaatcgttatttactgtttagtattataaatagtgtcaagttaaaaagtttttaatattgtaaaatacactctacctaaacaaaacagcatatgtaagataacatcatcacgataaattgttttattctgacaccacatgtgagatagataggaaaatctttagtatttaaaaaatcaaaatgttggcagattaaccgataatcacgcagattaacacctactgagatagccgttaaataaattaatcgacatagcagaaacaaataattgagtatcaataaaaaaaaggaataatagagagagagagagactgactaatgagtcacatatgacgaatgagtccagtttggctgccagtctgtcagcccctaccattacaccacctctaaagatttgtattttatcataatccaaccaaacaatgcttacaaaaaaaagataatcacatcacatcacatggccttcttcgtcgctgtaacgtttaattaaactagccgccaatttcttttaaagatttttttgttttgtttttgggcttatgtttaaaccatataatccataacttcatttctattgctatttttgaatttaccctataaagctaccaatattgaatttttgtaattcatttaagtttattacataaataatttatttacttatatgattataattttttttatcggctatatgattgtaatttagatcagtacctaatcaagtttctatctttttctatccgttgacagaaaaaagaaaacaattttctatcaacaattcacaaatcaaattggattagagatacaacaactttagtcaaaattctaacacaacaattcatacttttgatcattcaaacatgattttattttttatttatctagaaacatagtaatgtcaattttgacaattattcattcaaaaaaaaatgtcaattttgacaagaaaactaggaaaaaaaagaacaatagaggaatggtcaaaaaagaataaaagaaaattcgaggaaaatcatgcttcttagaagttttttgtttaattagcttgactagtaaatagatttgaccggataaataaccggttgaaaccggtaacctttaaccggtcttcatactataagaacaccttaaacaagtcgtctccttccacttcttgctttattcctctcataccgttttctctctctcctccgtcgtctctgcagaatcactctctcgccggagtttttcacctgcagagctctcgattttttctctcgagcatcatcattttcgtcggatcaatcaccaagag

SEQ ID NO: 2541 - DNA, 1698 bp, Arabidopsis thaliana
actcaacaaggcagccaaattctcgcgtcaatcgtcttctcgaggttacactaatggctctttcttacgcaaaatccctgtagtctttcacatacatgaaggaatggaagagattttggcggattatgttcaccaagaaatgacaaggaatttgattgtgatgtctttgggattgttccagattatcgttcttaaagatattatcttgtttcttctctgaaaccaagtaaacatcttttgggatctaaggaacactctcgatcatcatcacctgttaatgaatgaatagtgtgggctaaaaaaaaggtctttccttttatcttctttgttttatgaataagaacttgatgcaatgttgcatttttaccttcaagcttttgttgtgtgttgtttcagtttctggtttcgtgtatttgattctgtaaggcttaaaatggaattctaagcctgttaatcttttgattgaataatgacaacttttctcagctttgaggatcatttaatcactacgtttgcatttcgaatttagctttactgtaatcagaagcacgagagacttacgtgagttttgcagtagaaaagttgtggtttttaccaagtagatggtttgattatatacaacttttgaagagattttctggttttggatttggtgtgatcattataaaggtgatggagactctcaagaagtcacaaacagagaattgtcgatgttatgtttacttagatcaaacatgagattttgaagatataaagctatcaaattgaatcttagttagatgttcatgaacctggttaagatgcaactggaccaacaatattcatgttccatagcagaaagcctgaaaggttgaatagaacaaagggatatgaaacgagttaaagaagcgaattaaaaggcccatctttttatctgtaggcccatacgaattacgattgtactggttcattgattcaaatactaactctctccttatccgaagttttaaaagcatcctaatccaaaacggtgaaataatgacgattaaaaccccaaagtctctggcttggtttccactccaagggtaaaatacaaaacaaaatcaacgaaactgccgtacaccgttgacaataaacaaaggaaaagtgtacattaaagaagaagaagaagaagcttcattgtacgcgtcacctacgcgaacgaggtggagacacgtgtccttcctaccactttccttttgaaaaacctctctctctttcctctaaactcttttgacccttgtttcgcgagctgttttgtacgccattagattgaaccctaaaaactctattattggattggatcatcatcgttaaagctccacgccttgtcccaatttcctctttggttctttccttctggtaagaatccgctctctttctctctttcttttttcttcatatggtacgtcatcggcgacatcaattggctcgatttgattcacctgtagctatcaatcaatccctgatctgtttaggtttgatctcctctgttttttcctagggcttgttattgttgtttctcgaaaaagaagaagaagcgatggtattgggattttagggattattgcggtttgttgtatatatatatatagaagctgagggattttgtgttgtgaagaacatcgaatcctgtttttttccgtaagaaagttcttagatttctccaagtgaaagaag

SEQ ID NO: 2542 - DNA, 810 bp, Arabidopsis thaliana
aatcgtggattgtcgtgaatctgtgatagtattccatcatgtctgctatagcttggtcagttttgaagaaatttcaaacctaaagtcataaactgataaaggactaaattatcctactcaaaacagaaagcccttttgtgcgttattgggcctaatcagaaaagtgattttgaaaaagggcctaatcagaaaagtgattttgaggctttttaaaagtttaaagtaaacaaaagaaaattgaggcttgacttttctttctttttttgacttgttttcttttttcctttttcttataagagaaaactaaaacgtgaaagagcttcaccaacctgaggtcgctgaccacttggaggcattctcagctaccaatccattaacttacaaactccatattcttcacgttttactatggtaggtacctttttttaaccttgttcgtaataacaattttatacgaaaagaatagtattaaacttcaacaaaaacaactatgtatattaactggtcagatatacattgctttgttcccttacatcttcaaagagctaagattaaactatttaccccaaataagactgtaatttcatcaaaatctagtaataataatattcaacagcttacaatataaacataacgcgtgtggtctccataagctacgcactgtcttttcatcggttcgtagaaactagaaactcttcccctcacgatcttgctttctttattttgcttcaaccctagtttatttgaagtctctatataaagttctctgtttcaagttactttctcagcacgagcaaccaaaagtaatca

SEQ ID NO: 2543 - DNA, 2000 bp, Arabidopsis thaliana
tcgatggctgattttgatactttttgattgccactttctgataagttcaataagactttagaaattgatctcttacgttaaattttagttggtacttctttttggtttaattttagttgatacttgatagatataatttcgaattatgtttttttttacaaatatcagatttaattattaaaaaaagaatattagggtttgaaaatatcttatctagatggcccaatttaatatttttgcttgtattaattagtcaaaagaaatttccgacaagcaaggtgaacgtaaaccttaaactaatcaggaaagcaagaattaaagttgcttttcacattaatactaatattgttaaattgttatcgctatcgtgaagaaaataaagtctagggaatctgcctcaaatatggtttccctgttggcaaaaatttaacttgcttccattcaaatgatgaaatgttacgaaaaattagccttttgtctttggagtaatgtttgttaaataatcacgaggcattcattcttaaaataccataacatttatagaggtttgaagtaccataatttgtaaaactaaactagagaaattttgcgaaatcagttgtatgaagactttcttaaaaataacgttatatagactctagaaaaaaactattatatgccatttctatttagtttttttttctaaaaatatatataaatatggtgttgttaacataaaaacagaaaaaaagaaaaatttagaaaattttctcaagaatcattatatctgtgatttatcatataagttcaaatatgatattagaaacaaatagtttacgagtataatagtattgtcaatttttcaatctgaagtaaatatctttttgtaaggaaggggtcaacaaatgatcacaacagagttggcaaaaagttatcaaatcgcatgcacggaagttttacgtgtggtgaaggtaaacttgtattacacttatctataaaaattagtttaggctttgattctaaatcaaatctccgattagaaaaaattgcgtaagcaaatagctggaaaaaattgtatcccatcatacttaagtcacaatgttttgtttttgagatttgtgatgtaatcaatatatgttttacaatgcaagtataataatattaaagtcacattctaagaaaattatgatttgtgtcatacgtatacaaaaacacccgtcacacatcctgacttctgaacgttaaatctgtcgcacacaatcataaaaatttaaaaattcaccagagatgtactgaaaagaatataattaatcacatgatgatatatgcataggagatgaggattattcattttctgaaattccctatatgaaccattataattgtttagtaatcagttcagaaatgctaatcattatatgaaccattataattcccttcatttttatttaagatccacttaacaggatttgttaatatgcacccacatcactaaatacattggtacgcaaccgttgttccatttccattttcacatcgaccagaatgtttactatgcggtaaattgtgtagtatgcagatttttttgtatcatttaattttctaacacttgttaagtcgaaactaattttgtcacaagtaaaagaaataaaaaaggtggaaattattaatcagtagttagatgattagtttcgagttgaaatgaaactcgacttaacaagtgatagcgacgactctagaaacagccaaaatccgccctattgctacctgtcgacccacaaatcgtttactcaaaaatgaataaaaaatttacgataaagcaaacccaaagttatatcttattatatgctaaggagccctcccaaaaaagaacaacaaatcacatttttatataactgttaacataataatctcagcctcatcaacacacatatatagatagccaacatcacacaaacatagagattccaaaaaataaaaataaagaaaacataaatcctctgaggaaaaattccgatgag

SEQ ID NO: 2544 - DNA, 2000 bp, Arabidopsis thaliana
tattttaaattaatagaaattaaatatttatgtgcaccaaaacaaaaacttacaataaaaatgacaaaacaaatccacacttcatcgaaaaatgaaaaatctgaatagcgcctcacacgatttattaatggtgtagtcactctcacatcaatgtttggaataaaattgcaactagtagtttttcttttcttagaaaagtagtatttgataacttgttccccaagtagtaaattcttgctatagacaaaagatatacgtgggtaggtgataaatataggaatatcattatatgtcaggaatgacgtcagaatcgttattggttcgataagattcattgattctgaaaaggcgcagaagaagtaatgcgagaccattccttccctggctccctggaagaaagaaaggtccctttctctgtagttttgacttttctttgttttattttgaatcgataatttaaaattcggacgtgtttcttgctcgtaaagtaaaataagcttcacgtggttccaacctagaatggtagtgcaaagatataatctgaccagaaaatataattttataatatttttagcttaacttacaaaataactaatgaaatatacatttatgggaattcgatttttcgtttgttttaacacatcaataattcccatcgatccgttggcaaaacgcaattatgataacaaagattactagtgaggaatgggttcttgcagcacttgtcaatttgtccatccatagtcacaagtcacaactaatgccaacgagaaagtcaactaaagcgatgcaagaaaatcatcataactcagcttcttcctttttttttgagatattgatgtgtatatgtacacacaaagacgtacatacaaaattcgagtttttatataaaacgaatcgttttaaacgatgataaggagtaaggacatatggaagctgctaataacatggctaattaactagctataataagagatcaaatatatcttatcactgataccaaaaaaaataaaaaaaataactatattgtacatatgagtgattcgcgggattatacagacatacggtcctcccgtattaaaactttatgttaaaataatagagttgtagttgaacaaaacagctagactaatcgtcgatcgctgtgatcaattcgttctttatatttttttaatgctataattaatcatcttggtcagcattagacaataatgggcagataaaatattgaaaatgttatcttacgtattatattgtattacaaacataaaggcataattcattttatatacacaagattccctattttataactacgccaattgtgctatggttacaatttaactttactaacaacaacaacaaaaagactatttttcacaaattttacgaagtagtagttattaatttcatggcatccattttctctttctctcaaacaagtcacagcttgttcgtcaagaaataaacagagcatatataaactcacatgagtccttccaaacttcacttacaattatataaaaatatataagcagagagagagagagagagctctctgcacatttttcaactgctgtttatacggcaagacaccaagaagccgctaaaccctaatcactttcttcttgttgcttttcgaggtatatatatatatttttatattctctgctttaatcatttttatactggaaactctgtactttatgttcttatctgggccgtagcttcggttattcctcattgtaaacgacagatcttgcttcaggtttcgttattttttcacatgttcttgaaaaaacaatatacagatctttagggtgttttcatggttggtgaaaagtctttgtttcttttccttcttggcctgacctttatgttccctatttagatatatactctctcttgaagatctcatcagctcatagatttagaaacttattacatatctcctctgttcttttaaatgcttaggatcgtgaggtatctgtgaaactcta

SEQ ID NO: 2545 - DNA, 2000 bp, Arabidopsis thaliana
gttaggggagagacaaagagtgagagagagagagagatacaaaacagagaaagaaaaagagttaggacagagagagaaaaaaaaaaaccaattttatttagtccagcaaaaataataattaattttaaggaaaaacaaaatagtggtggggaccacttctacactgattttaatattattttaaaaaaattgtctaagataaaaattatattttgtgaattatgtgtatctcatttttctttttcccatgtgaagcagtgtacttgttaacttaccccacatttccccactcatggtagtcaataatcacctgtttcgcggaacattccaagagtttttattgtctatgttgtgatgtaccatacatagtaagtgttggttgcgacttcttgggaagaaatcgagtgttccgtgcctagtgaacaaccgcggtaaccgctagttgacaaagaaagtgtcggtgtttgtaaacgcgctttgactttgactcctaaagatataacaagttttctaattgggtcaacctttcggtctccatgtggtcattatggtctgggctttcttggcccactctttttatttggcccacttacataaacccgcttttaattttttattataaaatagtatattagatttggtttcttgtttttatcctttgatggcctctaatcatttaatttaacgtgggatattaacattttgttttgttagtgtgagtacaaagaaagagagaccagtcacatgatatgatgataaactcgaacgaagaatccaatgcgccacgtcttccatgttcctcgtcttggtagctttagaatctcaatggatctaattcctttcaattatataatctcattatcgtccttaaaagtatatattattccacattttaaaaaccatgcatgatgctgattattattggtggtatgacattgatataccttccgttcaaactcaagccccaatatgtatactgaattaggaaccgaataaagagacaaatcataagtgtattaaaaggtattaccaaccgcagcggcaaagttccggctaataattcccatatataatctatttaaaagagaaaatatagaaacggctaatcatgatcatatggttcgagaaagatattgattagtgttaaaataatgtagtcaccaaattaaaagacaccatgattcgtctcgaacatggccatattttgttcacatgcacgataacgactcccacatatacgacccattactcaccaaaccaccctttctaatttatttctattttcttgtctttttcgtacgaaagcaacgagatttcaaaaggtaacgcggaaacataaactgaatttaaaaggtaacatttgaagtcttttttcattacgaaattctactcgtttccttttaagctagtattggttcttacacttttatataaaaaaatgcatagaaacgtaacgtaggatgcctagtatttgactatacgtattaattaccaagtcatagttaatagttttatatctaaaagatatggcactaattaacaaacaaaggaaaatactccatatagaaagcgtcatttaagaaaattattatgattgtaattattatatcatgtaagacaaaaacaaaatgaaataaaacgatgtggcaatctggtcgttggattttgggtcattgtcaaataatccaacggtgttaatgtcgacacgctggcgttgaaaatccagtcaaacttgggagagctaatcactcgtacctataatttctctctaattaagctcaagacattgattgtcatttgttcttcttcactctctctaataattctccagaacattttgcacattccgtttcactccgtgttgttggatcccccaaaggtaaaacctttttccccagattatttctatttcgttcctctcttctcgatttcgactgattttccgtttttatgctcttctcttttccattttgaactccaattttgattctttaaagaaa

SEQ ID NO: 2546 - DNA, 2000 bp, Arabidopsis thaliana
agaagtcttacagttgacaatatgaaaactttagtaaaagtctaccataaaccgtaaaaaaaatgaaattttaattctggaagtaaatgtaatgcatgttgcctaaactcggacactatgtggtagattttgattggtcggaatatatgatctccgaaaagcaacaatgtcaaagctgcgtgaagaaaaaataagctagaaagtaaattatatacatgtacaataatggaaacatatgaataatattaaggagccaaaatcaaaaatgaccggcgatgattaaggtaataaaagtcaaagctcaacacaaccgacgcttttggcaggaaattcgaagacatatggtaagagtcccactttctcattattaatctcttttctttgtcaaaatttgcaacacaaaacacgtttagagtcaatgtcaacatcaggattcagcagtatggtatacggtttgaagagaagcgagaggtaagtgtctgtgtagcaaatgcttgaatctgcttcttggcatctacaaactacaaagtatcaaaaacatatgaataatcatataataaaatattaattgcaccatgccatcattggcttgagactcaagccttgagtgttagaatcataaatagttttgttacctttttggcatttggtgaaatccaacggtgtttgcaaacactaagagtcaagcaaactccaataacaaaaacataatgatccaagcagtgctgtagaaatagttacataaaagttcatacaaaagtttcatactatggtgacaaatgaaacctatagagacttaggctttattgggcccaatgtttgtgagctacgagcccaaatcaagtgaaagataatgaaactacaaaaaatgtaattaaataaagctctttgtagatttagctggacaaattttttaaaaaatcaatgaaagttaaaaaggacttgtggaaaatgtgacgcgagacatttctaccgacatctgagaagaagtgactgtatatccaataaggaaagagaaaggaattggatcttcgatggagcccacgagtgttcactacgcaccatggaattggttcatatggcccattaagagattaatgggcccaaatcagatggcgcgtgtatctcacggtgattcttcacccaggtaaattgctaatgcggtgtctatgttgtcaaatctgtcgttctcaatgagaaatctccatttttcacgtggttaattttcctgtttataattttttttttttttttaaagtagtatcacaataattaattggaaatgaagggcatggaattgaagttatctaacttccttttaaattttcagaaactgcaattttatttagattcaataatcttttaaaattaggttgtaattattagtgcctcatcagtagttagaaaagtaacaagaattgaaattttcgacttttaaaagtgtttctctttagtggttatggaaaatgagatctttgtagatagagattactccttctgataattcttcaatacagtgttatctacactgtttctttcccgtatggtttcagtatcttgttaaaatacattagcaaatgactttaataaattagcaaaaataagtatgacttagaaaaaaaaaggtgtgtattaaactaaaatgcaagaaagaggactagggaagtgtacaatgcacctcgtagcagggaataacatgttctgatttcccacaaaacaccgtagctagctagctgcttctagcgttttctccgtataaccgtttggtttaaatttctccggtacggtcccactttccagaactttcacggtttcaccaaacgccaatcaccaccgtctgttctcctacttacacgtgtacgtatcagatttcacgatcgtaacccatccaagcgcctatattaaccctgtttatcccgctaccgtaagtcctcatcagcaaacacaaacacacgactagataaactctaaatcctcacagcagatcacgtgctaatcac

SEQ ID NO: 2547 - DNA, 2000 bp, Arabidopsis thaliana
gctatgttgtacgaaaacgcattccaaaactgtatttcacccatgtattatataatgaaaatctttcagttaaaaaaaaaaaaaaaaaaaaaaaaaactagcttatttgggttgtcgtctatatcacatatctaatcgatgtaacaattcactgaatcgggtgttacaaataacatttgttttcttcactaaaagtataagatactggtacaacgcgaaatctaacctatattcgaatcaaatgacacgtcatcacttgggtgtctatttgtccacagttgaaagttataagaagcagacaagtgtctcataaagacatcgagatctgattcggttctcaggtacatacagttaatcgggagtgttgctttcccctagaactatggaggctactatttaagtgtcgttgtgtaacaaaaatcctgtgtttacttgcattacttaaactcctttactttaatagttttatatatgttttcgacctccctttttcgacggagtggatcgctatgacatgtaggcatctgattgtatttgctaatctgtttttgttagtatgttaaatttttaacccaatatatgtttatagtgcttatatattcttactttagttacatatgaatatatgatcattgatgaattaaacaatataatgtaataattaaatttgatttccctgatcgaattataatttatatgttttgtaatacgaatcaattaaaatattttcttgttacacattttgataaaatgtcgtagaacgttacttaaaagtaatgatgcattaacaaaatgtacaacatatattataaaagttatcatcaatattataggcattcgactttcagaatgtgtatcaataatcgaagtagtaatggaacgattattgaaagtatactacggtctctctttacttcatcgtggattctcattaaaaacaaaagtactttctctaccggcaactattgaaagtatattattgtttttaataactttgatagtgtttcttaattattattcccaacgtacgataaaattttgtttgataaaactcacaaaagtttagtatatttctgtaaatatatgcatagaagtcatagtgattgacagaggaaagacgtctctttgactactcttcaatcgaaaacaaaatgtgctaaaatttcaaaagcaaagtccctaaactcgcctaactccatttctcatttgactttgccttaaatgtcaatagtcctatgttatttagctacattcaaaattgggaattaagaattattttagactccatatacttagaaacgaatccgtattggaaactaatttccatttagtaatagtatttaagtattattatgcttaccgagtagcatgtagtagtttcttaatgttagctaatttcaaagcaaacgacgaatattaaatcgtgattgcacacaacaagaagtgattaataaatcattaatttcgcccatagtaatcactaaccagagtaattttgaacaagactaaggatgtacaataacttacgtctgcgatactgtgtggtaataaatatagaaactttatgaaatagaactctcttaccaaagaaagaaaaagcaagagtgcgtgttactatacatctgaacaagtcaaagggtcaaaccttagtattttaaaattacacaaacaattgaccaaatggagagctaattatgtttagcataatttactatatagttgcaaaattccactttagaaacagaataaaaaaataaaaattgaacataacacttatgccgtgttccagtcactcttcaacattctactcattttcaaatatcctttttataaaatactacttttaaaattatttgattcttatgttccttcactatatatatataaatatcgcacattgcttaatcacttcaaatctaatccacaaaaccattcacaccatctcatcttctttctctctatctcttttcctttcctcatttaaagtttctttataagaa

SEQ ID NO: 2548 - DNA, 2000 bp, Arabidopsis thaliana
tgaaattagtgtttttctttggcaaggtccttggatctcttaaaagtgattagatcaacggtaatgttttagatatcctacatgtgcattgattcgataaaagcatttaaatagtgaatattacaaacaaaaatagatacttacatcatgaaatagaaacaaaatcaaactgggttgctacttaccagtaatcacgtgacggtaactggctaactgcaatagtatatccaaaacaactttaagaaatggatacgaaatgttttagttttgggaaaatgtcaaataaagatttcgtcacaaatccatcaatccagtatagaacacttttatcaaaatgattttgcaaattgattcttagagtacgatacaagttgcaaactggaaaaataattttgcagttgcaacaaataataataaatgattgtgcaaattgattctcaaattaagtaggaaacaagttgtagtagatatagactgtttttacatgatgttaattccaaaaggattcattgccatacaaatggttttctcatagaggacgtaatatcaattaatggaaaatagtagttgaagatttatagaagaaaaaaaaaactttccgcaaacaacactatatatatatatattggatcaaaaataaaaagagttaaatgaaagaaatacacagacctggcctgtatcaaccaactcatatattattatataaaccaacatccatttctcagctcctcatcaaattatcttctttctctttctctctgatcatttccaaattatttctaagctaagaaaatctttaaaaataacaaagcttctaaaataataatccgacctaccggattcaaaccattgatctgaagatcatctataaaccagtccttgatctataaactaaaataaggtcggttgcttaatctttgttacccttttatttttgtggttataattatattatcttcattttgtttccttttatgattaatcgatcatatcaggatagatatttcgttaagtttatagtttaaatccagaattttatgtttagaaaagagaatgggaagagttgaagtgtttaacgtctatgaatattcctcacgtcaagaaaaaagaaaaaaaactatgaatggtcctctctcgatgtccttacattggttagagagcgttgcaactacaatacatacatcactttcatcatatttattgtctttttcagaggttttcatatttcgactgaattcttcaatttgcaatattatgaataatagagaagatgatgaaaaaaggataaagagagtgaagccagggttatgcatgctctcacgtttagggcgtgactctaaactagcgatttagtttacggtattattaaaaataatattagtcacataatatttgtaattttagtcgaaattaatgacagaaaaatactagacgctaggatttgtacttccttgaatccttggaaaatatacgtatgtaattaatattattcattatcaaaccacaaatacggaaaccaagtttgtgtcaaatccaaatggagtagtttggtatcttaggttgttgtttatcataaatgagaaactttggggttgcactcgatcggtatggttaggtggaccggactggtgacaattaatgccattgatctataactgttagattataatctaaaggttccattgcagaacaattcatcaaactttaatatctatgtatttatgtatgttcccaactcacagaatttcacggaattgcaaaactatgataaattctgctaccttaatgaatacactatgaacttgactaaaaaaacaagaataaagtatgataaattccctcattttatatttctcttatctatttcacatttttgcttgaaaatttgtaccattaatctctctattcggcagtgttaaattttattatttaactccgtcggttggattcattttaaatttctcttcagggaagaaaaaaacaagagagagaaatagaga

SEQ ID NO: 2549 - DNA, 2000 bp, Arabidopsis thaliana
acgaaatgtaggtgtacatttgtttgggctgtatatatttctattgacattaaatacgccaaattagaaaagaaaatctttagttggaagcatctattatatgtacctctttcggaatgtaaaatcacgtttaatatttctgaactggtaatcaatctcatctcctaaaatttaatacatatcatcattgtcaaacaatcggagtagcgacgagaactatcattgtttttctcttgtgatattgccggccaaatattattacctcaatcattttgaagcgagtaaacatagtttttttcccccttttttttgttcttgtacaccaacagaaagctgcatcacatctgcgaatcatcacgtgccattcaagtgattactggaacgtgacatgaacgaatcttcacattgagtgttccaactctcctttgtacgaaactccaaacaagtagatatatattcaattattatggatgttggaacaatcaaattaactcttgtccttcttatcgtagagacatgaaattaacccaattctgtaaatgagtagtaagtaatctatatatatatagttgacaacagataacactataatatatgcgtccttataatgttaatgtaattatcatggtttgagttaacgtatagaagcattgaaacttagttgcagaccgaaaatgatatacgatcttaagagttaagaatcttgaactcggcaaattttatgaaaaaaaaacaatttcaaccatttctaactagtgattagatgaccaatagcaagcatgcaccaacgacttcatttttataaacatcatagggacctagacatatgcattttgtgggcaacggcctacgcattaaatttgtgtttcgaagattaaatttatgaacagaaggcaacttgcaaatttgctatgtacaaaaaacacaaaggaaaagtttgtaaatagagacaataagggagaaataaaaagatcgctttctcataagtccgacttggttccacggtatctagaatgcccacgtgatgtcatgtacttttccttcttctctattctaatatgttgtttaacaaaaagaaaattgattgataaaaaaaattgaaaaatttcatagtgatatctaaagtttaaacaaattatctctaagaaaattgttagtatgccttggaatataatttctcaacacacaaactgaagaaattgcttttaaaactgaaatttatatggtaatggcatactaataaacagctaaacttttgtagttttatgtgtgtgtattaagagatttttcaaagtgaatgcaccttaaggtcatgttttgtgaggtttgatgttggagagagtctttgatccgctgaagaattggccaggtatcaaaatcatttcttaatttatatataaaatttcaactttaaaaaagaaacgttcaatctgagtctcttaaaataacaatgtgaatgttaacactttgtagatatcagactatcatagataagattgctacttaaaacattgaaatgttttgatgattcgttaagcctagcaatatatcatgtcgttattgggcttgtttacttacccagttacccgtattccagttataagcccattaatcagcctcgtacagttctattgttggtcagattattaatttttaaaataagggcgtattttccgaaactaaagaaagtatagggtcttcttcttttctctaattaggaaaaagactttttcaattgtcttgtccgtgaaattatgtggagagctaaaccattcatagcccgacatgtaacccagccacgtaattagaccactcgatcaccgttcgtattaatgtgattaaatcaacgattgatatcacgccacgtcattgtttttcttttttcctttgtatcttctgttctaagggaagaaataataacgagagaagaacgttttaataaacagagagcagagcacttgttctaaagatcaaagcttaagtgagaagcagaaaaaaaa

SEQ ID NO: 2550 - DNA, 2000 bp, Arabidopsis thaliana
gcttgacttttacaaaagtggtttaaattttcttgagttacgcaaacgggccaattcctttggcattgcatgaattttcttcacgcgttatactttcatatcaaataaaacgtcgccgttcagagatacactttttattcagtccttggacttggatatggaacacggtttttagttgatcagaagtcaaactcattgtcctatcttgccgaatttagaggatttatttaaaaaatattaaataaataacgcatgataatgataatttataaaaagtataaccaaaaaaatatctcttaaagaaaagaaagaaaacaaaatgtagttttgagtttattggttatctggatttcggaagatatatatgattcataattttttaggagttaaatttattttttaagactttaaaagaaaagaaaaaagttagtagacattgtttcccataaaaaaacaccaggtctcttaagtctcaagtctaaaccatttttccttttctggtcagataattctatcacacatgcttgaatttgaatagaaagacaacaaaagatggtttaaaaaaaaaaaaaaaaaaaaaaaaagacaacaaaagacaacactgggaacatatttacccaaaattcgataatggacaagctacattcaatctatgcttatgttttcgttgcatgcgaatgcatgttgtattacgtttatgagggttgtgctctacgatgtatactcttcacatgacaatatgtacactaatctacattgataatacatatatttgttaagttcaaatagcattatcacaaatgattaagctatatgtatgttgtggtgaattttccataaataatttgtcatctgtcaataaaattttaatgtatattctataacggaattacggtcagatacatgtgtaggtaatgaattaagtaagatattaatatctgtcgacaaataaaagcatcaatatgtatgtacattctcttaaaactgattcgatttcattgtgtcactgtgtatattgtatagaaacatatccaaatacgtatctcatgcctgtcctctaacttaaaaacaaaagaaaaaattatcataccagccaatttaatgcacaagattaactaattgatcaataattggatacgttacaactctataaaatcatatccattacgctttgggcaatggcaaattggcaatggaagtaaaatcaaaagttaaacaaatgaattaccatttgaaacactccaaattggtattcgtgtccaaaataatttttccaaatgtcccatcattctaaagtttttcaccttatgcatggaaccttcctagtatatatacagttctaaaacgaattttatttgcaatggtctatcagagattataatgtcaagatcttgactttttgctgatgtgtagtgtaatgtgctgttttaccaacatgttatatatataatcgaattttttcttgaaatgcctaacgttggttgacaattttatattacgaaaacctttccctgattatgcatattcaaattgcggtaacagaagtttggtcaaaatttgactttcatgtaaaaaaaaaaaaactcaattgaccttaaacttaaattaaacacccatttatatataattatcacggatggaatttactccttaattacagtgattatttatctaatttttggtgagagacagatctatgcgtgtgaatattatcacaatatggtatatatgttgaattttttgacaccgccacaattatatatgtagtatgtacacacacattatcattgacttgaatttgtatgtatattcaaattcaacgttctcaaaaccctatatatataatccaaaacatttagcaaaatatctccaaaccaaaacacaattaagctaaaaaaaaaaccaaaggatgtctcagaaactcatgttcttgttcacccttgcctgcctctcctcgttaccatctccttttatctccgcccaaataccggccattggaa

SEQ ID NO: 2551 - DNA, 2000 bp, Arabidopsis thaliana
taggcgggtgtacccgaaattttcaaatactcgaacggatataaactttaaaacccgaaaaactcaaacccaaacccgaataggtatgcaaacatatctcaaatataagtatatattagttatatttatacttatatatagaaaatattagaatttttttggatattttagttatttttgtgtatttttagatatattcaagcaaaactactcatgttgttttgggaatttttgaaaatttcaagtaatttaatagatttgcacacaaaatttgatatttcaatatataaataactcgaacccgaacccgaacccaaaccgaacccgacccgataatatttttttgtttaaaaatacatacaaccaaaatcttatttctacccaatttctttaagtaataattatattaataaaacctacagtctaatttctacagcaataaaacttacagctacagtcatcacacctacaacaaaaattctacagcagtaaatctacagttacagacaaaccaatcacccacgtaatctcgtaagttaattttacatcatgcaaattaatattaaatgagttaaaattaataaatgaaaataattgaaaagttaaatcctataagctaagctatttttctcaaagtgttctattttcacttatgattacatgagttaaagacaaatttgttaattttgcttttgttgaataaatgttaattgtttataaatatatagacatataaattagtatatgtaaatttgtttactttttaagattttctatttttttaaagaataaaaaagttaaattttgaatgacacatgtaaacatctaatcgtttgacttgacactgtgccaagtcaattttgaaaaccatactttatataataagatatatatatatatatatattttttgtcctcatagttcaattgtatatatctcaataatttttttaatcagaaaaaaacaaaatacatatatatccactaattctgatttgataatgcgttcacacttcatatttatcatgtttatcttttataaagaaaataaattagtcaggtcaggtttttagtaagatatatgtttatgataatatctaaactcgaggagatgataaaactaatattactcaggttgaaattaaaatctaatgcttataaggatgaaatgaaacaaaattcagggagtaaaaagatataaaaaaaacttgcaattgaggtctcatattcttaaaccttaccaaagaaaggcgagattaattaatcctagttagtcaagtaaatcatccaattagataagatcacgtgtcggtcgatgtacgcttgaatcctcgtttcgatacaataattgaagtgtgtcatgcagagattagagagatgtgtataaatggctcccaagtctccaccgcaatatccaacgcttgaccgattccaatcagctcctctcgatttccgtttgtcggaaaatctctcccgtgatcggcgtattgtgaatgccgctcaccgagatattctccggtacgtccgcattgatcaatttcgtcgcgtggctcactctgtttcatctgttcttttcttattttttagctatttttgttgagatttgttcgttgaaaattatggttttgtgaaaagaacccaacttgttttactgaacccatgatgaaagttataatcttttgatctggttacctctggattttgattacgcatacagtggaacatgcaattgttattagcattggttatagattggatttcggttacatgccattggatcctttgcaatgtttagtttgtgttacagattctctggaaagaaatctttttgcatgttccgtttgtttcgcatcctcttgatactgttcgatcgatcaggctacaggtttcatcagtttcttctaaaagttgtaagcttctttttggtgtgccagattcttttccccagtgaggacaagtgttcagttgacttattaggaggtggggtttgaataagttaca

SEQ ID NO: 2552 - DNA, 1997 bp, Arabidopsis thaliana
ttgccgtttcagcgaaattgataagggttttaacggtctagggtttgttcgttgatcaaaacgaaacgaggattagcacttacctctctaagtcatagagaaggttataactctataggtcaaaatttaggcctgttttaaccttttcggcccatttaacgcacggtccaatacgattattagcccaaggaaacaacaaccaactcgctcgctcaccgtgcgcttcttctaaacatgtccatagaaacataaacatactaaaatgtgaaaagattaaattaaaaaacggatagaaacatatagaaagccacgtgatggtagcaaacagatttagtggttacaaccagatatcatttgatattgagatttatgaaaatgtcctttttcaatggctccgatcggtcagtgatcggatctaatattataaaggtgtgttgacccataacataatattattactaatacaagtaacatgcggtaattaactctatgtcgatcttttttctctgcatatatatcttttagtcggttttttcgttcttgctaatcgttatattcctctacacatggcaatggaaaagaaacgagtaacaacaacaagtagcctgcaaataattaagtgcgataagacaactctgctctgattggaaactgatattccggcccgtcccccttttattacgtaggagtaataaaattgggaacgtcaacttatattaatcatgacgacgttttctcaagggagcaaattgtacgttacgtctcatattatcaccacttttttgcagcaacacagttttatttcacacaatacaacaacactttatattatatatgagagtgatagaattttatcattccatatttccatgatataaagggttccaataattggtccaatttttctaataagacttttcttattctcatagactcttcttattcatctttcttaatcaattcgaccaactcagtggaagacaaatctcacacgaccctttccactttttggtaactttattattaatttattagtatggtgtagttcctttctttcttctgctgatcttgtcaacaaaatactaaatttttcctaagcggctgtttatatattattaacaaaggtttccgcgtgtctcttgtttaactagtagactaaaaacaaatcgtaaactcgattttctcaaccaaatttagaagatactacggcatgtaattagctaatgataaaagattcgaattttcgttccaatggatttgtcttttcttttgcccaaaaccaagaatttgtcttctcttggcagtatttagctagacaacgcatatagctatatattttgtgtacactggtcaaggtcgtggatacgtcattaataatattatttccaataagtcctattaaaacattaaacaactttgagttttaaaacaaacttagtgtaaagaaaataaaaatagcagacagtttacgggtaagactagatgaccatatatgattgagtgcataaaacatcttttttctttctttttttgaaaaagcgaaactaaaagattattagttgttggaaatcagcttagcgtaatcttcgagaaaatgactctaatgctaaaatactgatttaatcaattttctaatggtttgacccaacagacttttttttttttctatcctctaataatatataatcatatagtagtaattatttagtagataatatgattaacacgtgaatagcaaagtttctatcatttttattcaaaaaaagattcataagtaataaaatgatagtcaacttttctttttctttttgtgtttggccttttgttgcagcgtcattgttgtacaccaccagtcacactattgtgggatgtgataatcggtaccttttaatgtcaggagcttctttcttacattttccacttcaaacaaaccgataattcagaggaattttctcttcctctctctctctcttttttatattttttcactgggaaaa

SEQ ID NO: 2553 - DNA, 1974 bp, Arabidopsis thaliana
ggctctgaattctaactaataacgaactagaagcagtctctatatatttcttggtaatgcacctaattcaaagttgcagactttttcaagaaccctaataaacccacattcggaacgaacgagatctcaacgaactaaaacacaagctcctccaaattattaaaaaaaaaaaacacgcttcttattacattcagatcaagagtactaacccaataggtacaagatccgattatagatagagatccggatacagagaataaatacctaagaaatcccaagcgaaattaaaaaggccgcatcgattcacaagttatacgagcttcacatcaataagaatccaggtggagcttgggaacagtacccaggtcccagattggggcatcgaaatcgacaaccaacactcgaaagcgaatgccttttacaacccacagaagaagaagcggtcagaggaaatagattttagggtttgacgggggagtgaatatgtatgtctgtctctgtgttatccaatcgcttccttccttgtctcatttttaattgttgtcagtcagtcattttattattttatcattattttcttcaaactaaatttggtaacaaagttttacatttcattctaattgaccgtattcttaccgatttatcttctgcctttttaattaagggatatatataaagaaagcttttcaattatagaaataaattaagctgccacatgataacgaaattaaagtgtgctttctatgtatttctctttctcgttgttatcttttgttttggtaatgtttctagaaatgttggaacttcaccgaaataaacatggtaactgactagattctaaaaaatcttgttcaaaattcatcatataaaatagacatctgaagataagaagacttacaaatagaatactttggtttaatggaaactttctttccgtttttcctctttttacgcaattgtatttgacaaaacaaaactaagcagagtaagctttttgttgccgtgatcacagcactttcgccgctttaatgggccaaaaggtgttttaacgttttactttatataattaagatgaaatcttccttctttggatataaataatgatttggacaactactgatttggtcaaaacgtaaacaaaaacaaacaaacaaaggaaaacgtcaaaaaaaaaaaaaggtgttatgagttataaaaaataacattattgggccgtaagaatcctttttttcgtctatatgggccgaattgaagtctaaatgggtctcgatcttaactatgcctacacagcataaagaagttaatcactacaacaaaatcatcatttggccttataatagatattcattctcaggcactctaagacactgtgaagtggatcttttgacgcttatgttcatcttactagattgcataggtgagctttttctctcaaatcatattatctttgccactgctatggtagagaccttggggacttatctttgccaaggaatgttccattgcatagctatttaaactttaaagtgagcagaattctcagtctttgagctacttacttacaaagcctctattgtgcaactcctttgacccggtacgaccttggaagacaaagaaggcctcactgcttgcaaggggcaatggcgaagaagaagatcagagacggtcaagcttgcagatgctcctgaaacacctcaccaacagtgaaggagattcgacaatgcctacatctacatgagaccgaggaggctgacttgagttgaaaacattccacattaaagaagagagctcttcatttttctgaacgattgaagaaatgcattctgcttaacatttgaaacctttacgacagacagcaaaatatatgtatttgtgcggtgaaggaaaaaaggataaaatggaaagaaatgaagaaaaggccaaaagaagaggataaaaagaagactaagacacaaagagagatagcgtctgtga

SEQ ID NO: 2554 - DNA, 448 bp, Arabidopsis thaliana
tcatggatcattcatgttagtttgaacatactgccaagggcttaagttttgttcgtttgcagttggaagatgtaaatgcgagtttgtaccttgtcaaatgcgatacagttttaaatcgagcaacacataaacatggggagaaacaaacgaaaatgactaaatgctgcaatgggatatgtctgttcttcatcttgttatgtgttatctgggctcctatgctggtaataattttcttacaacacaacttttataatgcttttgtaaagtttttcatttggaatctgaattatcaatacgttcttgggatgaatagtactcatgatgcttgtatttataggagaaagaaaaattatgtgctagcttaatccaacaattctctgtgatgtcttacagtttgagtatttggtgagtcatttgtttgttggcaatggctgctttatccttgcag

SEQ ID NO: 2555 - DNA, 2000 bp, Arabidopsis thaliana
ggaatgaaaggagacaatatcataattaagcatattttcacatctgtatatcttatatataaaacatcattcttattaatatatttaccgttgaatcgaaaaataggaatacgaggattttgaataattaactgcagcggaagaaatacggtggaatgaggaagtgttatgcacaaaaatgttatattatgatggttaagtaatttaggaaattcttataactaaagtgtaattattaatatttagaggccaatcatatttagttatatgtacgtatatcatggatgacagtttgttaccgatctcatattgcattaatctagctatcaaattaaagtggaatgctttttcttgatcaacaatatatacatatccatagtatgtgtgtaagcatatattgataaagtcgtataaagatgcatacccatgtatgtattgtgtactaatatataaagagtatttgcagtttgggtagctgaagagtcatgaagaaatgaaaaacgaacaaggaatatttttataaaataaatttatgaatgccgtatatcactgaaaacatgatcatgaaaatggtaactgagaaaatagctgaatgtgtaagaaaaacaaaaaaaaaagacaggacgaagctacgtggggacttgtgtaaacaacatgataagttaatataactaaattagtgcggcgataagcaattccatgcacctggtctgttttctttttctccgtaaggtgacatgaaatcgatattcaccaaattttggttgtatactagtatatttttttttcataaatagcaatagtaaaacaaagttactaaccatataaatgtgatttttaaagagtaattttgctgtaacagtcacgcaatacgtataatttgaaattaatattgtgtgcaaagacgtcaaggtgcattaaaataagaaacaaatactaaaagataggaatgacgtgaatttgattttaatgaattttttaatgacatggtgatacagtgacagggctgtgcaaaataggaagtaacaggatgaggaggaccgttagatgaatgaggatcaagcgtagatccgacactgacccgaccgtcgagtatgcaaccctatttaacacactctggccgaaccaccacagctgaataaaactattttttttaataataataaataactttagagaaaaggtataattcaaatccaacggatgagatctgtttccaagtccactcgctaaagaaagtggaccccagagagctcagaaaagtccacttccgatttgtaaacaagccaatcactttcgatttaccacaattgccccttttcaagatttcgttgaaaaacttttgttagtttttaagtagtacttattatataagaaaataagtaaattcaaccatcatgtcatttttaaaatttttaagcaaagtacgatttcttacatatttgatagaaatttgtagcctagttattctcgatagtatttgctcttctgtgacacactacacaaatatttaatccagttgattgcaaagtgtgagatgtaggaaaaaaaagagagggtataagagtcatttaacgaggattgctggttggtataaaagacggcgcttgttgaaggaaatgagtttagctgagacgctcacattgcaaaaacaaaaccaacaaggaacttgtctctctctctggctctctttctcttaacgtgatcataacgtgattcgaaaattggatatagataggtttcttgttggatcttgatccctctggaaaaggaggggagaatagcagttcatgatgggattttgtatctgcccgttggagtcacctgcgagattactatggagtacaagcttcttccgccataagatcatgatcttctaatccttcctacttcttcccatctttttaatcatcttctcgctatctctgcttcctctttctctctgtttcctctttctcagaactcagaagtagttgttgttttatttctgttgatcaaaa

SEQ ID NO: 2556 - DNA, 804 bp, Arabidopsis thaliana
attttgtatatagaagctcttagtttattatttatgcgaaaaatgttgatatttttgttcatccatgtcgtttttacatgacactattaacttttgttaaattcaactaatctcattaaataattctattctttacatggaaattatataatgggcctaggaataaaattggagtggcccaaaagggcccaaaagaaggaggcggctcattaaggtgcagatatttttgttgcgacgatggatggttttataaacctaactaacagagacggtctaaagttggacatccttgcttttggtctaactttctctctcttgcttctacgcttcttcttgtggcgtagattgttatagagagggaaaccaaaaaagggaatctcaaaagctcgagttcacagatttgacccgagtctttaatccaatctgctggttcgttttccacattcaaactcgactcttgaatatcaaatcaggtacgcgtttatctgttgacaaaattcctcaatcctgacttagattcctagaatttggtatttaagctctctgtttcaatttctagtttctctctaagattgcgtcggtttggtcgtgtttaattctgatttctgatcgaatccttttattacgtgttagtttttttttttattgttcgatttgaatccagatctgtgactcgattgcagttggatgcttttctcatttatggttgaattaattgaaacctaagtcgagtttggtgatgatttctgtggattaccgatttggtttactgaatcgctttgacatgttgcagaagtctttgct

SEQ ID NO: 2557 - DNA, 890 bp, Arabidopsis thaliana
aacaagactatcttttgttttcaattttttcttactttccctttcgtgttttgagtattagcatatgaatactatttattttttactcgttatcctttgttgtcttagataattttgaatgtatcttttttttctatcttttgtatcaaacaaacatgatgaatgttttgattgtggtttctagcgaaaacagaacaagataaagatttcagaattttaagaaaatggaaccagatttatgtgtaaacaaacgcaattaaaagtcaaatcaacaacaatgcacggcatactttaattgatttttatttttctagtaacggagtcaaggcccaattaaattatttattttccacgatcattaaagtctttaacgggtcaacaccgttagacacttgtcatactattactgggccttatttttctctttactttctctgaaaatcaaagcccatctcttcttccttttttttcccctaatttctcacttccccctcatttcgcgtctcgaccttcgaattcgacaaatccctaattccaaaatcctctcggtaagctacggatctagtctctcttttgctcatagttcgacgaaatcgtctctctgttgctcgttcatgttttcgtttcgttttgtggacttaatcttctctgtgttcgttgttatctggagatctggcaaaatctcgaatgattttgatagattctaggtttctaggtgtatctatcggtatagtgttcgttttgtcttgatttgttggtctcgacgatttatctgttgtttcttttgttttgttgggaataatgttgatatagccaagctactgtgatgttgatgaagtttgaaatgaatttttgaaaacaggatctaaaagagtgtgtgataacataag

SEQ ID NO: 2558 - DNA, 2000 bp, Arabidopsis thaliana
tcttttccgggtcggacagacccgagtcgggtttggacttgagactattggactggactccttattctgaatatgggccggaattctttttttttagaacaagtgcataacacggaaggaaaaagatgttctaatttattctgaatatggggccggaatgatattggtgcatacttgtctttctctggctggttcacttacattgatgagaaaaatgcgaagaacactttgaaatcggtttgtgatcaagagacaaaggaacaatcgtctactgcttctgccgttgtgtggacaagaaaaactcattcaacaccaaaattatgttgttttatttttccgatattttacattttgtcttataaatctcatgatataacagtagcccctttctgagaagagatttgttttgcatacttgtgtaatttacatttaaaaaaaacacagatcaacagaagaacagaactaaacactaacactctaaacgagaccacctctccaacacgagacatcaaacgccacacatacacaatctctgcaacctaagaacagaactaaacactaacactctacaatctacttgttcattcttgagaaatcaaaagtctctattcaccttcttcttctttcttcttcttcgagagaaacgaaaatcaacaatctttttcatctatttctctttggagaagagaagcaaagcatagaaatgtccatcactttatattatttgttgtattctccattcataggcaaagagagagagaaagatgtcttcatcatagctaagcttttggttgccttagagatagtctcgacctttctctcgttccaagacagcgatgacgctctctgctgctctcggcggaagatacagccagtcccaacgtacatggactttgaagtaggtactaacatgaacgtagacagtgttgtggttagtatacttttgaggatcggatcatcaaccttatcagttgattcttcaacttaattaaactcattatataaaaaacaaaatatttatgtgaccgttaagaacttaattgtgaaagaagaggaaataacagagaaaaaagggaattgtaatgtgaccgttaattgtgattagcaatatccctttttctctcaaataataattggggcatttgcaaatcttacacttgacttccttgaaaagaaagcctctgttgcgtaattacaatttgcattttggttgtatgtttgtgattgtttcataggtctattccacaactttttaccttttttatttttttactctccacaactttgtacctataactaaataatataaagtcacaattttgtacggatattctgatgtttcattagtcatttacatttttattgattatgttcgcatgtacagctactttcgtaaacagcttcttttgtacgaattgttctagagaattttcgatcataatcaaaatataaacaaaatgtttaacaatgcgcttcaaataggtgggcctttgttataagtaatttaaaagtcgaagaacccaatggcctatatgtcaatcaaatacatgggcctatgttataaggaattaaaaatttaagaaccttaaaggcctacatgtgattctcacaactctaattcatgccatgttttattttaaaagtgttaattttcattaacataaatggtaaaatcgtgtattaaacgtactaattcatttcaagtaaatattccttttataccgtaaatatactacattgtatcattttcatattttatctttggtatttcattattttcttcacattacaaccataaattatgaatttcacattagaggcgtatacgtatttaaaaacgattaaaagagtttccaaaaacgtgtgtaaattacgtactatataaatattaaaaatggatcggtgatccaactccttctccttcatcatcatcgtattcaccgttgtcctttctttcattgacacttgccagtttacatcgacaaacaaaagaaatcaga

SEQ ID NO: 2559 - DNA, 1422 bp, Arabidopsis thaliana
ggaaaataaaacaattgggagaataccggtcagattcttcaccggtttgggctgtagaaagattcacaaagctgttccattctaaaataaggagaccaacaacaacaaaaagtcaaaagtctccttgtcattgtttagatccacacgcttattttacagatttgtgcgacgtaacttttctcttttatgttcataaatcattcagactctcttccggtttagaaacatttatgattacatggctggtttagtttggtttattatcggttcactctctattctggttctgatttctgacaacaaatcaaaggcaaaagttgtggatttccatccacaaaatttgggaattgggcctcaaaatttctttccaagggtggaagaaatctcaagcgagatctttcgacatttggtagtgttactgcgaaaaggaattgggcctggctaaggcccaactgtatactcttgctgaggcctgaccataaaagaagaagttatttacaaattaaatcagccaaacatgttggaccaggactcaccaactgtatataaagcctaacaacattttctccaaactgtaaatagatcaagactctgctgtgttgcaattttgttcccagtttcggtctacagttaaaaactactgattccctttgccataagagtgatcctaattaaactgattgagtaactcttaaaatggtggtggtgtgttttcagggatgtgaagacaactgatagtggaaatgcttcaagctgcgaagtctgttgtttccaactaagattaagaaaatggttccattctcaaataaggagaacaaaaaaggaataaaaaataatgtctgttacctctatcacactcttctctgctagtttcggtttagtaacgtctagattatcaatgtctggtttagtttggttctttccggtatgttcctaattttggtaggatttgtttggcttggttttatagcaagtatttaattaacattagctcaaattgcccttaatttattgaattttgttaaaaagttttgtctaaactttacactaaaatcagcttttcgtggatgttacccatttctcttccgtaatcgttaaattatgacataacgtctttgttttggtcgtatcgttcacgcaaaacttcacgattcagatctgtgtgtggcagaatttgaatcgaagcataggatcaatccggtaagcagccgtaacttgcaatcgatcgccgatctggatccgttaaaggatccctcgcagtccttgaagatatcggcgtcctccgccaccgggaacaggatccgttaccgttcaccttccgcttctgagctattggagtctggactagccaccggattatccggtaaccattctcctacttccgactctcatcagggacttgtgtctatcgacggaggaaaa

SEQ ID NO: 2560 - DNA, 475 bp, Arabidopsis thaliana
tgttgaattttggagggaggctccgataaatttgctcgagtgtgagcggattatctgttatcttttaaactttcggaacacaaaattactgttttaccctctctttttttttttaaattctatttccttaatctactaaagattttcataacaaaactatatgataatcaaaagtatgaaatcatgcatgattgataacatttcgtttctttaacgaaacctgtagcattgtttatggaaaattggtatatacgtatacaaatccatctttgatatttctcagaagccgacaggaaaatgggtctcagatagtaatagttatctaaacatgatatattttgtaattagtcggatatattaaaatacgcgttcagatattcaaattagaatagtcatatagtcacgcggttataaacaattcggtgtataaattgtaagtcacacagaaaaagaaagaaacgaaacgaaacgaatt

SEQ ID NO: 2561 - DNA, 2000 bp, Arabidopsis thaliana
taaatgacatgagatggttaacaatcgtaaaaccaacaaacggaagattagtagtgcggatctttttgtatcaatgtaactcgaagaccaattattgtcgtgcgtatatataaggttggcctcaacaggatccaattggtgtttagtgtctatttctttcttttttaataaggttggcctggcctcaattattgtttttttttatttctaatattacatttatcaatttttggtgttttttcggtgaaacacaaatgaaaaaactttaaatagatcaaggtaatgtgggtggtggaaagggcaagagcatgtggataatgtagagttgttgggggacaatattttaatgaattccgagtaaattaataatgtctttaatatgtatgctccattattgatgctttacgctgtcatcgacatccattgcctcaacaaacaatggttgataatgatgatatttgttttatttattatttatctgattttttagtaaatttgatctagtttgtatccttggttgtcaaattcaccacatgtatttacttgtttgtagaatacttagttcaatataaattggctgattttgctctcgttgtgaattacaacttgtaacttaacaagtacaaaatgcacaaaagatggttctcaaaaaacagattcacaaaagatgattacaagaagatgaaagatacacaaaaataaacaagaagcacagcttcgtcccaacaataattaagtaatttggggggaaaaacattttgggccatggttaacactagggaaaaaaaattggggccttacattttctcataataatgggcttttcatcaattttcttaaatattaatgggcctttggcccgataacagctaccctatccatttggtccgggcactctagaatactctcttcgctcttctctttctctcgtgtactctgttttatccaacttataacaatttgaagcggacttgatatgggctcagtttcggtaaaccaaacccgtattgcccgttaagcccatagacaaacaattcaagttgactttgactgaagtcaacacttaaagatctgtaggctcgccagcccagtctctatactattttagatcaaagctgaaaattcatctcgtgtcaataaagaaaaattacgaggaagcggatagatttgcttttttacttacgcatcatagaagaaatttgttaaactgctaagtgagttttgagaaacaaaattttaaataatccaaaatggctaattcaatggaccgattatgttaactttgattagtcaatgatcgaaattcaatatttatccaaatgagagcgactcttatctactaggctgctattttctacaaacaaacaaaaacaatcacaattagccgcctctcctcattagtcattatctgtatcgcgatggggaagatacgcaatgcttagttataaaccgtccgatcagatgactttgaccagtgaccttccgttcaaagaatatcgacggttcttagacacatttttcaccggagtctcaccctcacaggtcatcttaatttctcgtaaaagagcatattacattgatattccaaattataccacttcataatttatttttattttccaaataaaattaatttattaaaacttcagcactccaattctgtagagaaattttaagaggagaaacccaattttcttttattttgtaacgaatctcttttaaaaaaatctaacaacagaattatatattttcattattctatcgaatccaacgaaatttcaatatacagatatctatatacaaatatttaacctacatgtgtgtatcatatggtttaagcacgttacctgtaacgtatgtaattaaatcaattgcgtagaatcacaagaaaaacattattatataattaactattgatcctataattttattattttcatatatatatagatatatagatagatgcattagaccaccaagaaaacaaagacttatcgatc

SEQ ID NO: 2562 - DNA, 2000 bp, Arabidopsis thaliana
gtaggctttgtagccttcttgtagtcgtttcttcttatcttggcacaaaacggcgaggagttttatgcatggtgatggaaaactgtgtgtagttaagcttgtcgagtagacttaaatcaaagtcagcatttgcttattggaccagacgttagaagtaagaccataaataaagccaccactcgagctttgattcttttccttttctcaaaagttcagtttgttagtattatttttgtttttttaaatagagagatcaattatctaattgcaatttgcaaccttaacatgaatattagaaagacgaaaaagaaaaagtagaggtcgagggaagtgaacaagaaaaagaagaccattaaggaacgttgttgaatttttaatggatttttaactagctttcatcattcacgtgaaagattcaagagattaaaaaatgaaggctatattttcgtatcttaaaagtctcaattaaacaatgttttataaggctgtaatcttttttatattttgaagtttgatacaaaccagtaatcactaatcaattacatatcatgaaagaataataatgaaaacgatggtgtatatcaactttgacttattcaatttttctttgagttaaaagttggaatgaatcaaattaaaatatactcaatattatagatcctttattaaaaaaatcgcattaaacatacttttcaaatttagtgaataatatatgttccattcatctttgacaaaatgccagaaagatgagaactatagaatttccaatgtattttgaagattacttatatttattgatgtgataatatatgcgatagggtttcggttgccaacggtggcagttatcttccttgattatttttaactcgcacgattcagggccagaggggtccaacgttcgcttaaagtgtttgcttaatgggaaccgaatcatatatttataaaaacattccaattacttctttttttggttttaatgttaagattcaaaggcataacttgcttatggtctaaaaaatttcgttttatttctattaatttgggaacctgattctgttggagatttgtcgtctctttgagtttcttttacttgagtggcaagtacatttctgatatttctttatgacttctcacttttctttatcacaagatattttgttgatgaaagagtttttttttttgggtaaggaaacatgtaaatattttagtgagtcctcatgttggccgatagccatatatataagagattctgataaaccgttgaaaactttaacccaaaaacaaaaagtcctttctgtgacatcgaagtgaaaacgataataaagaaatctagcatagttttggacccaagaaaacgttttactctctattttgacaccacacaaataaaaaaatatgtcccaaatgttagctaaacataattaactctcgttaaaacaaaaatgtgatggttacgcgtgaaaatggatgatttatgtatttgtgattatatttccaatattttgctagcctactgaaaagtttaacgaaagcaatggataatggaaagattacaaacttttatattcgacataattttaccaattaggcaacgactttcattacacaaaattgcggaaactatacaaaattagccatggataaaaatggaaaataacaaaccgaaacttggctgtaacaaaatctgttagggatgtttcataaaaatatacaccaaactaataaaattcgaaaccaaccaaatgataaaattttgcctatgaccaaaaaaacataaatgacacaatgtgaaaagaaaaacatatttgttgattggaggaaccttcctgttgccacgtggaacttgaagtttgacacaattgctgacaccactgtactacctatctcttctttatgaatcttcaaatgtctttttttacgctataaactcactttcttctcctccaagagccaaataaacacacaaaaaaaaactcaaaatcatgagaagctccgatcat

SEQ ID NO: 2563 - DNA, 536 bp, Arabidopsis thaliana
cttgcaagttaaactcccgttaggaatattagtttagtaatgaggtttaagtcccacaggccacaacaaatggacatgtttttacttgtctaatatagatttagctagattttttttttcgatcacacatgaactcttatctatctcgttgttgttgttgtaaattagcttttaataaaatcccagtttctcgaacctttttaatcacagcaaatactacattaaagattagatttggtgtgttttgctaaagataatgcctttcatgcgcttaaattaatttgaatgggtttcgattgaaattgggatatttgctgcaaaaacgatgcggttcgagtaagaatggccacgtggcacaatctatcacatcaaaacgacaccgtcagaattcatcatggtaaacgaacggtcatgatttaatcgcgatccaacacaggaaagtttatgagtgtgcaatgacgaatgtatccctacagagttcagaatatcgacggcgacaatttctctctccggctaacttttttctagagaaagct

SEQ ID NO: 2564 - DNA, 1173 bp, Arabidopsis thaliana
atttactatatttttatgtagttcctacttctttggttgttgtttccttctgacacatgaacattaaagaaaactttggttaccaagacgcttaatttataattgattttatgagattgttattgattgagattaagtagagcagctaacactttgaccttttgacccacgatgtaatataaaagaacgttgaaaacgtgtaaatataaaagatgataacggtgatgcctttggaccgaactagtgtccgtctgaacgtcttgtaatgtaatgggcttaaagaattccggcccactaaaacaaagaagaagttcggtttcccaatagaacacgaacacgtgtcctcaccccatgatccacgatgcttcggaagacataaaaaatgtagccacgcgccttcttaaaaccttttccttttttggtttggcacattaccctctttcctgttaaagttgtctcgtctccttctcgtctccttcctcaagcatattctctggtaattcctctctctctgtctctctttgacttttctctcgcagagtttagattctttttttttctggatataaattatttacacgacacgaaaccttctaggtccaggtcatagttttactctatatctggatttgtttgaaaattgcttgtgttatgcgccagctttttccctaatatatagactaggtcttaattacagatattagagttcgtttcctcgagggtttctttcgacctcgtgtcctggtgaaattttggaattctaaggctttggggttttatttgggaggggatgatcatctaaaggatattcggtcggtgtcgtgttttcttaatctcaattctgttgactttagctttggtaattgaaaaagaatcttttcgcttgcttattttaattccatatccgtctcttattatatttggtcaattatgtgatctgatctttgtgaaattttatgaactgcagcgcttaaagtactttgatggcattgggacacttgtgcagcatccactgtttccttaaaatagggaaacaagaagagcttcttgtcctagatattggtttgcctattcccagtttcttcctcattaactttattggtagcagagcctcatccatctggtgaacttgtgaagcttcctctgtgattcttttggcgattggttagaaat

SEQ ID NO: 2565 - DNA, 1424 bp, Arabidopsis thaliana
tccgggtctactacacctagttaattgggtcgttaacaacaaggcaatgatacatcttttttgtatatgagaatgttcgaatccggggacacatgtttgtttttctgaacatcgagagacaatttttcgattaaataaatttatatatatttaagtttgattaaaatcagcaaattcatacaagaactaacataatttggtcaatcctaatgcttttcgtaactgtttaaaagcatgaaattttttatgatagaaaggttaagaatgaatgaggaacatcgagctagagagattcaatggaataagagattaatggcttctaaaatctctggatacgcaaaatactctctcagtctctcacaaattgatgtattttgtgaatctaatggctggtaaaatttcctcattgtggatttcaaatccacataatccggaaaaaaaagatatgatctaaaaaacaacaaaaagtcaggaagaatgggcttggtgaaaggcggcccactaaaataaataaagaattagtggacaaaaaaacctccgccgcatatttaacaactggtcaacgttctcccaataagatacggccacgtgtatgaacccctggatctgcgatgctgctcttaaattctcctctcgtcctcatttccatcttcgtctcctccctcagccatcccctctggtaatcaattctccctctctatctatgtttgtttgaattctctctcgcatagttaagattccttttttcgtattctagatccatagaatttatccaaaattcatgaattgtttctaagacacgaaacggtttaagttcaggtcatagtttttctgtagatctcgatttacgtgaaattttacttaccaatagatctgaattatcgaaattgcagttccttttcctcgagtgtctcgttcggcttcatgtcctgtggaatttttaatctttgtccgattctgaatccggaaattgttagggatttgggttttattcaagatttgtcatcgctgtgaaagttttccctttttttatgtgggttcgaagttttctgaaaatctcaattagtaaaaggatcactggacttgcttatattaattctacaccgtctcttcatagatttggtcaatcctgtatctcagatcttatttgttcatgtgatagcctttaaatgtgtgaacttttcatgtacttgcagagcttataaaaccttcatggcatttgcgcacttctgcagcatccactgtttccttaaaatcgggaaacaacaagagcttcttctccttgttattggattgccttttgccagcctttgttttagtcagttttctcctcattaacttctgtcggtacagaatctctctccaggctggtgaactcttgcagctttctcagtgattctgtatcgatttttcccgtgtaaatt

SEQ ID NO: 2566 - DNA, 2000 bp, Arabidopsis thaliana
aatttttaacttattttaaaaatcttccaaagaacgatgtcagggggtcccacattagcgaagacgtgaccggatatgaaccgttgattagagggcaatgcgatctaaataagcggctaagatatcgagtcaacaaccaatctaattagtcattttgacccaagaaaagaaaacaaaacaaaaaacccaattagattaggattagtagatagatagatacggcctatttttattgaacaacaaaacaactaattataaataaaaaggacaaaactagttttccaagtttgactgagatgtcgcttttctcgaggccctctttactggaaatctaggctttctcctgaattttacaatttttcctaccttatcgtttttataaaaaaatattaattttaaattgaaaatttcgtatgaagtaatatattttctcaattcataaatgatccaagttgttgttattttcttagtatttgtaattatagcttatatgtatattttaaaattaaatataaaatttacgattatcaatcgttcgataaaaaatttgatcgttcataatattttgaaaaatagtttagaattaaattaaataaataaaataaaattattatagattttaaaaatatacactgataacattaatataaatcactaatcgacaaatacaatcgtataatttaaatcgttattaatatattggttagattaaaaatggtaatatgtatttttacatgataattgtgaaatttttatttacaaacaaagaaaaatctccaataataaaatgatattggaacatgttacacattaatacattttgagattttctcttgagccgtcgtcccctttattttatgagtttgtgacgaggttgtagagagaagaaaacaaaagtagagggggcgaaagaagaataaaaagcaaagtagagaaaattccaaactaaaagttagctgaaagaattgaattaagattgagagactgggagagagagtttaagtaatactaataattaatacatctttggatatctgttttgctttgaactttgaccactgcctcttttgggtcccacccttctctctcttctctctctaaaatctctcactttcctaaacagagagaccccttatgagttttctcctcctcctcctcctcttccttcctcatcccagaaatttccgatttcactttcacatctccctctctcttacaactctctatccgtagtttcagtttcgtcctagaatttcttttcttgtctgttccaggtttgaactaattacttctctcttatgtctgcttttgattttttctagatcgaattcgtgtttttgttttttcttaccttttttttttttgtgaattttcgcaggaatagattttgatctatcctaagattttgtttaaatgacaactctgatttcaccaattagctcagttcaaaagtgaaatttgaatattttgaaattgaaaatatctatctctaatgataatgcgatttacaaaaaaaaaaaaaaaaaaaaaaaatcatggatgtattttcctggatttattattgtcgttgtctcttgtctttaccgaatttaatctaaatggatgtcttcattaaacaaatcgaaagcgtttctaactttacagtttttcgttgtttcactgttatagaattagggtttatgtaactgtcctttacttgcttcaacttctcaaattaaacttcttttttgaaccacgagatctgtcaaaatgagattttatccacttctactgaaaattaagtttgaattgaacaatttctttagccattgatctaaacacatgcaaataaacggatctgggttttctaaaaatcacttttttctgtatgtagttgtttctgttgctaaaaaaattgtgttttgaatcatttttcagatgaaattgtgagttctccgagttatatgcatccgttagaatcaaagcggtaatcaaaagcagaatttagaggattgaaaaag

SEQ ID NO: 2567 - DNA, 1988 bp, Arabidopsis thaliana
cccatattattatgtaatctgtgttcttgttttttgttctcacgcttcgaagcaacttgtttctaagtgatcaaccgtataatctataaacctcaggcatcaaatgtcttttttccttcataaatgttctcccaaagcaattgctaaatgctgtgtctgatattttaaaccaagatatagaacaaagtgagaatcgagaaacagaacaaaacatggaaatagtaaagaagacaaaacagagcatagaagaagaatttaacgagtttggtacctaaatctcgcgggacaaccctctttgtaaatccactaaattacttgaaaatttacagcttttggcatgtaccaaaatggttcattccaatatgaccgatacaaaaaaaaaagttgtacgataagaatctccagatatatatttgaatcttttatactatatgaagggacgaaacagagacatgtaaatgggtttcggttttcttacaagtgtaaacaaaggaacatattcataaacttgtctcgttaggtttataagagagtcaaatatacttgaagaacatgtcgttgtgaggatttggattcggtgaatcgtcttcacgtttagagacaacaagaaatcagacctttaagtgacgagtaaagtaagtagttacatgccacaactccaccaaaatcgtgtttatactttttttttttataaatacttttattactacaattttataacgattactatttcttattgaaaattggtcaaaaacattttagaactttattttactttttttgtcaacaaggtggacttttcaagttttgattttgtggcgcaaataagaaataatggaggattttcgtggaacgatgatgtcatgtgccaactgtaaattcaatttcagaccgcaatcgatagaaattaacaaacgattcgttttaagaaagaaagaaagacgcaaggcaatgtgaaaacaaaaattcctttttggatcattgagttgggatttgagaattcgaactttctctttggatgattgaatgtcagcgtagtgatgacgtcaagtaaaagctcgtttgatgacgttataaaatgttggcaaaaatttcttttttaagagaaaaatataaatgcatggttgtctgaacggcgagaagaacttggtcaaattaaatgtgccgtgtagtttggtcaggtaaacaaaactttattagtaactatcgctcttaattcatacgtatgtacgtatgagtctatgagaacctttcttagttaaacggtacgaggacaattattgtaaaatgtaaaaaaaaggtaggtaagtgatagaatttgtttggcgtatttgtgtgacttaaattgtaataaacaggtctataaaatccattgaagttgaattcttctaaccttgccttagttacaggcagaagaaaataattaaagaagaaatctaatcagtgcgacttttataatagtctcgtcgtgtgaaaaaagtaaaataaaatatagtaataaaagtctcgtcgtcgtgtagctgtcactttcgtttgtcactttcgagcatcagcagccgaacataaacaacaaaataaaattgaataccttttagcgtattcactgttcatgagttctgggtttggtttgctttgtatgctcaacaatttattgacatcttcacgaaaaagtttaaattttaaatcagacaaaagcagtctcatgatttctctttgattaactcaatatagatttcttcttcgcactagcaaataaacacattatcttcttcttcttcttctctcatcgttactttatagatttagtatcgaggagacaggtcgaaattgaggttcttttaaagaaaagttccatttcatatctctatcaaacccttttctgaatattattttgcttgtgaatttgaatttgagcttttttcctctgttcttgggaggaatttttgtctgtgtttgtgatgcgttataattgcttcggacttctagat

SEQ ID NO: 2568 - DNA, 913 bp, Arabidopsis thaliana
gaactatctgttagagtttagttgaggccaataaaacttagcttacgctttattgatgttcaactagtattgttttggttattgatactctttggaccatatatgtaaaacagagcaacaatccactgtttgatgtgatcattgcatcgtgctattttgtatttgactatttggggatcagtcgtctattagcgttgcacatgcaatatcattatattgcttcttcttctttttttcaatcactaaaggatctagaaccagaaacaaaaagtccaaaattcaggttaatcattatagttttgctaattggaaacgtatgcaatgactaaacataaaatttatagtagaaacactagaaccctaattcttcaatttcaacataaatctttcaatttgagtggaatcattcaaaacttgattcccctaacttgaaagtaattatttgaatgtaagaattaaaaaaagcgtattttgtaaagtatcacgactaaaacatgctagttgagttaaaccttcataaaaaatgaaacatattatttgagtttcgagaaagaaaaaaaaaaaacattttatttgagttgtcgcagacacgatcacgatgtaccctatatatagttccaattagcattatttatcccatcaacaacaactattatgtcagaaatattgaattagtaaaagaaacaaatcttatctgggccatccatttgcacacagaccaatggacgtagagcgtggtaggcacgagccagatgtgaggtaccttgaggtgccacgtcacattgaggaatctttggcggggtttcattgtttacctataaaaatggcggccgcaaagtttcgtacgtctccgatgtttcaatcgtgaaatcgaaacaaacaaaataattaaaaaaagaaataagaggaggcg

SEQ ID NO: 2569 - DNA, 2000 bp, Arabidopsis thaliana
ttaaagttttaatcctattaaaacaacatattaataatattttaaaattttataaatattgattcaaatacatccaccatataactcaattccaaaataaaactcgttctataatttctttacccgtcccgtaattttttaattaaagtagtaattttaaaaatttaagaattatttattatatataaaagttttgtaaattgtatcattttctaatacatttatattttatagtttaattttatatatagtaacattatacataccacgtaacattttttgttttatataatcttttctaaattaggatgatttgatatatttaatattagtagtcttaaaaaataataaattaaaaatttaatccgtattaaaacggtggattaattagattttacttttttattaatgttgattcaaaaacccatccctccaaatccgtcttgccaaaaagccatttattttattaatattaatttatttatgatatgactctgaattataatctaaacattttagctaataacataggagtgcaccatatttatttaataggagaatgtactatatgacctgaatgcacttttactcaaatccaccaaaaaagtcttgcaaaaatactatagacccgaatgtaccatatttttttatgctaatttttctgtaattaagattttaattgatttcgtatataaaatattaaattgttttacgaacttatttgtttataatttggtaacagatagatatttgaatattcggtatattttgcttcagtttaggaaatctttgatgacccgtctttaaatccaataagccctataattaagagatgaatattgtcgttaaatgattttggtaatcttaatgatgtcattaaaagattctatttttgattaaaattttctaatggtattgtcatgtaattaattacaaaaattaagattacatttaaaatgtattttgtaggatttgccaatatattcacattacaatattatttttttccatggtcgattatttctacccgaaagagacggcaacgcagcccacagtgagattggagattagagattcagtcaacgatgattaacgttacttttcatagttagtacataagaatagcacgcaggtttcgtcgaggttttggattttatatagtttgtaaacatgacacgtactttggataaaacattatgaaatagggaaagtcatcatgagtagttggaataatgaatatattaaatattggtatgatttggtcttgagtcattatatcattacctggctaatgctatacgttaccttataatgaattctaaatgtctcaattgctttttgaaaaagttgatcacgaacccgccgcctcatattcataattaaagttaaattttgtttttgtcaacattgatcatagttaaatatttagacacgtctatttttattttctccacgttatacattttcttgactattcatgcaactcttgtgatcttgtcttagatatagtcaagtattgtgtatacatcatagggaatatccgaatatgtgtgtgtttgattaattagtgcacactagctcagatcatcgattagtccgcaactcgagtaaacgtgttttcagaccacccaaaattttacgacctttgtgtcccactatctacgtcgatagtaactttagaacaaaaaactcaaaaagagtgtaatttgttatgcttttggtcttctaaaatttgtattcttctaccaacatttagcacagtttcatacatagaaagttctcattacttggaattaacatgataatcccccaaaaaaacaaatcaatatctaacctagcaacaatgacggaaggaaaataaatataatcaaaaacaaacctaccaaatactgtttgttccccatagccacactccatagacataacaaacaataaactatggaaaaagatagaatttgatgtgataaaacattcattaattggatctatatatatctttc

SEQ ID NO: 2570 - DNA, 896 bp, Arabidopsis thaliana
gtgatgatattttagaatgatgtaaggctttttagtttatactagtattatctgtgtttcaaactgagaagagataataacagtctttgttgagatgataatgttttcaagatgttcctaatccatttcacatcttctcaattttatatgcatgtgcatatatatgttccctccaattatgttgttcgaatgtttgatgaaactttgaatttttttctttaagcaaaaaaaaatctcaaacaccaaagcgaggagtcattctagttcagttttgagtcattctagttatttttacaaagttttgagtcaaattgggtaaattttttggttattttggtcataaaaataactagattatctcttatatcttatgagttaatttggtaaataaaccatttatttgggtcaaactatttttttccccatatatatatccaatcaataataaattcataatatatttcattaacgcgattgaaatactagtaattaattgaggactaaagaaaaagtaatttcctttttatctttaaaatgtgcaaaaaaaacaaaaatgttaattgggtgatgaaataacttgttttcaaaacgggagttactatttgacaatttaaaaaagacccatctcgaaggagctagaagcgataacaaaataaaaaggaaacaatagtaattagatggcgcaaaaataagatccaacggctgagatctttactcgtgaacgttctcgaaagctctttgccgacccactcttcattcatatataaacaaacacctctctgccttctcttcctcacacaatcataaacacaacaacactcacaaattctcttaaagctcacagacgaattctttctatttttaatctttccggcgaacaattctgatctctaata

SEQ ID NO: 2571 - DNA, 2000 bp, Arabidopsis thaliana
ttgaaaacacttgtatttcctttttgtcaggataacacttacgtttcatgcaattatttgatataaaatgtgtagagagatatattaatcaaaatttggtgtgtgtttttttttctaaacacattcaaaacttggttaattaagttggtcacttggtagaaatttaaacaaaaaaactatggatccgatttatttatttgtccaaccaatacaatatttgacagttgttttacgtgaggtttaaactaattgtaagggtaaagcgataaatacaaacaatacgtggggattagttgctgaaaaaaataagtcacgagagggcatagataaaaaaccaataaaccatatttgtttttgtttaacgaagcactagagcttcatgcgtgtagggttataaagttacatacacgcgtggaaaaatacgagaacggtggtggggaattaggtctctatcgtagttaccgttaattaatacaatatattagaattttgtagttttagatttctctttttatgatgatattttgtcgtgcagatatttatggaagcgtgagacgttcgtgcggagtgagtaatatagataatacagatattgatgtaacaaaaaaaaaagaggatatgatttgctttgggacgttaaacacgaaaatagtcgactttaaagggttgagtaaaataattagagaaaagcttatttcagtgaaataatgcggtaactggtaggatttgaagctcggatatgtgttgatgctttggtatttttcgtcattgcattgaatatatatggtgcattgaatatttgaatatttagagattaagttacaacagatcctaaaaaaaaaaaaaagaaaaaaaaaaaaaaaaaaaaaaagttacaacagatccgaatatttaaattatacggaaaccgaactatacatacatcgaacaaatactaatttactgtaaattatttacatgttgcacaaattttactgaattcgtagatttctttgacatcaacatgagaacacttagaaaaagcaacaaatctagtcctccacaaaacagaacttttgttagatttataaaagattctcccctaacctgtaaaactcaaattttaaaacagttgacgtagagtttgatctattgcaatataaattatttgcacgaatactattaggtgggaatgtgagattaataattaggaaaaaattagtctttaatataatgattatgcatcctcttttcacgtaaagattagtctcatagttttgtcttctttagctttttctcctctttttttcttctctttgccaaatttcttctctttcgcttttacattttctccagcaaaataagacaagatctcaatcacttcttcttcttcaattctatctaaagctgtcacgagaaagccagagaatttctcagcttctcattttgtcaagcaaatacaaaaagaacacacttcttttttatttccgggaaaattcgtttttatgtagtggtcgtactaaacacgcttcctttatgtggaatcttaaagcagtccctttttttagttgaattcaacagtttttttctttttttttttggttccggatccgaccatctctgcaacatcgtactttgagagacaacactgtcgaagaccatctacgttgtcttctttacttggagaactctctctgtctcttctctgtactttctcccttctctttttccgtatctgtcagcctttgattccgcttttttgttccttcaccacatatacatgtatgtatcttcttcttctaccttgaacaagacttgattttgccactagttatttcagaaaaattaatcttaatttcactttgaatttttcagcgttccaagctcatatccggtgaagtttttggaggatttggttgttatggagcatagggttttctcaaaaagaagattcttgagcttgaaattgaagtctttgaattcttaagggaattttatcgaacactttgtgggctaataac

SEQ ID NO: 2572 - DNA, 2000 bp, Arabidopsis thaliana
aatgatgtggaaaattcaagagttttcattcgaagacctaaattttttctcacaatcttatctcgtgagggttgtcgctgaaaatggaatgtctcctttgttattatccatttacgaaaaaataaaattctcccacatctaataaagttattttactaattactatttgaaacaccttttacactttatagcttacttgtgtagaattttattgaaacgaacggaaatgtagtcaactttgatgccctgatacttgggtaatctatatgtaacaagtacaagtatacgagcttgttagttgttaagtgtgaaagagcttgataacaaaatgtcattcttctttgtgtgaattgattttcctgtatgcgaatttttatataataaagaccataaacatggtgtgggtcttcttcactatccagttcgattctttccttctttctgtttcaaatatttgaccccaagtcccaacaaatattttaaatatgtatcacaaaagacgcaaaatagcttgcgatttttccgtcaatattaaacaattatctagacttccacatggtgatacctgtatattaatacaacacgccaattttaaaatcgttatattgttctcgttatggtgagatttatagttaagcttaaaaaattaggatatgaattggatacgatcgagagttgccaactattttctttaaaaatcatttatcatcggattaattaacacatggtggtctgaaattcaataattccgatataatttttctgttgataaaacaaaataaaaaaattgtaataggtcttaaacttgtcgcatattatgtcatttcaattgtatagcttcgatatcaaccatgtgtttagaacatgcacatgactaaataaagtattcttggttataaaaaaagaaaagaaaggagaagcggattggtgaagaaagtatatcatacaaggtcaatgatactggtttggagcttacaacgctgtaacgggtaaggtctgtttttgttatgtcaaaagataagacagtcgtataaaaaagtaaagcaggatactactacaaaagggacaaaggtagagtccaaattttgacttttccactataatattcaaatatatattcaattgctctttttcatttcgcaatgcattgtttaatctccacgcctcgtgtatgtccggatggtggagagtccagacacgttctttattaactctggttgaaatcttgacgtgtaaaaatatcaaattcgtagttttattagttttatagtatatagtattatcaaaaaaacaagttatactcgagatttagactcgcataagcatatattgaacctgacttttttgccaatgaaagcataaaatacttgacttaatgggataaaaacacattcagactcgagcaagtaaaacatattcttacaaataacttacaagttacatgtataacaacactcttatctttatcatgtaaacaaaaaaaaacgctattaattgtaaatatttcatctgtactttgtaaatttgacatgacaaaaaatttagatacttctaaaaatgtacaactttttagccgttagaaagaaaaggtgtacaacttttcaatacgaattcttatattaacttttgttccttcagttttatacatatagtcatatgacattgaaaaaccagcacaaactccttcagttgatcaccaatagaaacaacaaaatacagtataatatttctaatttttagtgaaaatttacgaatattgtggaaacaacttttatagatgtctgagtctgacttatgtcagtattattttttcttcacttatagcagtataacattcattatttcacattaatgccaaaaaaaaattaaaaactttattatcaaatataatattcaaatctcgatattgacaggtttgccctcgtcctttgcctataaatttgacatgatctacgttcattcaaacaaaaaccaagccacaaagaaattaaatacacaca

SEQ ID NO: 2573 - DNA, 695 bp, Arabidopsis thaliana
aatctctatgcaatgatgggaaaaaaagaagttaagagagagttaggtttttcaagctatgagagtgtataaaaaatatttgtgtgaaaggaaaattgtaaccaggaatgagtaattgttgggattgaatacgagattttaggaaatagttacaataggaattcttcattaaattagattgatcataactacaaaagttaacattcatacatatcgttaaggttcgatgaaccataaatagatattccgatatttaaaatatcttatatgattgtattaataaaatatctcatatattcaaaatcatatttcacttaactatttcgctgtcaaaaaatatcctaccacttttccaacatgacaaaaaaaaaacatactacttttctatcgtggcacgtttaaaaaatcatatcattccaaaaagatttactcgtcagattaaatatctaatcatcattggattcacaatttgtttatttacctaccagacactttaaaaaaaaagattaactacagaataattttgtctaaaaagaaacggataagaacacgtaagacatgtcagtcttatcttaaaatccaagtcagcatctcgtgtaataataatctcgtacctttataaaacccctcattgtcttcaacaaaaacataacacatttcaagcattggattaatcaaagacaaagaaaacgaaa

SEQ ID NO: 2574 - DNA, 2000 bp, Arabidopsis thaliana
tttggaccttttttctaaaattcaattaaattcattagaaaatcatacggattacatttactaatatgaacttctacaatgttaaatttacatacgtcaactatatctgataatatcactaaaaattaagttatattagctaaacctcgataattaacgtttttgaattcaaaagtaatggtaacttttttgaccaaattattctcacgcttgtataagtaaaagttgttttttagagtgatcatgatagcattaaaatttggattgtctgaattcagtggctttgttttactattttatagtattctattatagagcaggactatatattattaattttctagctttcaagtttgaattttgcaaaagcaaatgtgtcgcgccctttgtcgtttgtgagtgttattcgttgtggtctccctggatagcaaaataacaaatcaacatgagatatgaatatatgatatgactaagacgaataagagagaaagtgtcaccatatttattaattatctctctcaatgagcaatcgaacaactccaaatcaaaacatagagaagatcatatcatcaagtttatttcgaagcttgaacataaatggtcttttccatacatatgatatggtcagatcagacgtcgtcattctccattcattttgggatcgcatgggtcaatatgagctgatatttgtttatataaaattcgcatgtcgttttcatacatcgcttcatatgtgtgtttaatcgatttcccaccatttatttactcgtgtctaaaactcaacaacaaatcgttggtattttcaaatctacacccacatgcaaaacatcaccacattttaaaaaaaatgaatgtaaaattttaccaatccaaaaaaaacgtttttacaactacgtgttactttgagtttgaagtttcgtaattaaatctcttagacaatgcttcgatcctttgccgtagttgcttgacgttgtgtgtattcaccactttcgtagcccttcttcatagaccttgcttcctgatttgatagaagacaaatcagtaaacgatcaccacattttttgatgttaaacaaattttctttaccatatgtcataaaaccaactgcaccgtataaatctctggatcatgcccgcgtactcacattacgtaagagatgaaagtaaactacatcctcctacaatctttttgtttcccaagctgccaaacaatccaaaaccgttgtagtcatttttaccatcatccatatatggtgaatcggtgatgacggtttaaaaaagaacttttttcttccatctttttattttgccgactgattttgtctcatctaatataatatcaaatcatacaagattcagaactttatatgattaaacatcctcagtggtagtgacagttgggaagagtaagatttacgtactcaattatttaattgcttcaaaactgtaaaaatgtatagaaccaacaacctgaaacacgtgaggagcactacaaacgacgtcgtctagtgtcgtgacaatttataacatggtgggccactaagtaagacagttgttagatgtaccactccctttatttcgtaaatatttcatgctttgttttcttctttgactcgtgtccatcaaaacaatcatttcaaaatactttggacgagaattacacacgattacgccacgtgttctattcacatccaacggctcttacaaaaataaagaaaaagtccgtctacttgggtcatcaatcatcatcatggaagcccacttagtttcctttttctgcatacgacgccgttttgcgattccaccctaaccatttctcagtgacgaacagtctcagaagtttctagaccaaaccacactcttcttcgtcttctccgttctctctatatttctcctcaccttcaacgcagctttctcgttctcgtctcagatcgtgttactaacaaacaccgtttctccggcgaaaagctctctgttactaaaaactcacagaacctaaaa

SEQ ID NO: 2575 - DNA, 797 bp, Arabidopsis thaliana
atttattgtgcaggtaatacaccagattatgtttctcatataacccaaagtcatctgtaatttttctcatctttagatcagtcttgtggactaaccctaaaacaaaactgattatataaacttagagggtaatattacagaaaattgtatagagttgggttgaattttcatttcttttccaagttggaacttttgttcctttctctttgcataaaatttgtggcactcattgcaccaatggtaactatctggtgaaagatttaaacttttaaggcaaactaaaaagcaaagtttaaagaaaaaaggtttagccacagtggcaataatatagtgttttgattcattccttttcgaaaaaagaaaaacttttgaaataaaaagatatagttgtaaagcgtatataccaataccatcatactagaaggccaagtcatcttacaaaacctccactagttaaatttttgtatgtatgtcatctagaaaagcaagacctaatatccatatatagatggctataatacatagtgcaatctaaagtacaactaaagttgataatacaattcaaattttctttttcttttccattttttgggttattgaaatcctaaagctatttcacaacatattaatatgtttgtgtaatgttccacgtttaagtacttcttttcgtagaaaagtttttctctttctctcctctttataaatcccacacacattgatccttagtccataagcaaatatcaaagccaagaaaaacaaaacaaaacaagagtctcattatctctctaattctaaag

SEQ ID NO: 2576 - DNA, 2000 bp, Arabidopsis thaliana
caaattataacatatagaaaagatgaatttaaagcccatgtattgtagtggtgtgatcctattatattttctctcaattatattttttttcttttctttttcacgtaccattgtgtaaaaattcaagtaaggtaacgacatttacatgcagtcacaaatgaaacaagaatttttttgaggtgtgtgtaaagtgaaacgaaaaaagtactaagaaagtttatcttctctaagttaatagaattattttgaaacgtagtatccacatatatagaagactcgtgtgtggtgcatatatatactgcataacttcaattgaactgtattatataactatgactatccatccatgggaagataagaatgagagccgaatgctaaaaagcaagggacccgaattaaacaaaaatgaataaaggagaaaggtttgtgtgattttgtcaattgtcgtcgtttagtggatgtgtaaaaatactaaatactataacaggtggtgtgggtctatctttttttttttttggtctaatgttaaatgtgggtctatcttaataatgcagaaatagtgcaatacgattcatgagtggaaaaaatcatatttgggtactctcatatatagtctcattaatcattatcaccgagtggggcgtacgatacactttttcttctttatctgttttcatctaatcatcatactgtatgtctatattatcgtagcattcatcatcgagttatgaaacttatgccaaaagaaaagaaaaaaaaatcatttgagattggttaaatttctattttaagatttaaaccaaaatgtttaaagttctataagctctaattaaagtctctgcagtccattaaaatggataattaggatttgccgaacttgaaaggagtaatgcacattttgatgctcacgtgaacaacgagttgtaacggtttcgctataattggaggcagatgagaaatggtcgtgtgtgagttttaataccacgtgattaacggagccacaatcatattcatgggccattctcatgagctataatttgaggtgtagctgagagatggtcaaatgccacgaactttgagtatttctttcttaactttgcatttttttagacgtaagttttttttttcatagcctacatttctttgacaactcataacctacattttgagaatttataaatgtcaatttatcatttaaccttctcacgataatgcaattcctatggtaaatgtcaactcataacagactctacgaagaatctacgacactgtgaaaatctctaatccaatattcaaaagagagttaaaaaaaaaaaaaaaaaacagaagagaacatctttacgatgctgctttcacgattttaaaattttaggtgattttttttggaattttggaattctctttacaaattttatgttgtaaggtagattcaattttaaaaaaaaaaagatatttagattaatacaagttcctaagtcctaactaatcaaagcttccatccctcgtgaagcacgagttggttgaatataaagtctctcaaaaagaaaagaaaaagtggttagtattggcagaaaaaaaaagtggttagtattggatgaaaagagaatttaatgttcgtattcaaaaatgttttatatatactatatagtatatatacaaaatcccaagattaactcattcatattccatcttcatctccatttctcacactcaaaggtgtttcttccttccctttaatgtactccttttttctttctttcacaaaatcgttatattgatttttactagttttatttgaattattgaatttctttatatgataatgaatctatgagaatatgataccattgtttaaagtaatgtcctagtggaagtattatagtcctcagattagattagtttcatcatcatgaaagtgcttgagtagtgtctgttcatggctcttgtgcgtttacagtttctaagaaatgggtactataactttaggttaagaagaaaag

SEQ ID NO: 2577 - DNA, 873 bp, Arabidopsis thaliana
taaacaaggattgatttcaaaaggagttacatgactagctatcacatggagaatataatgaaagaatgaagaccattcatacgtagaagaagacatcttccaagttaaactaaataaacatatgtgtgttcttatttttctcaacggatatgtgttttaattgaggtttgtaattggtttaagagaaagtgttttcttatcaatggtttttttttttttttatgtttgttgaatcaaagagatttcacgtaaaagttaaaacgtgttatcttaattattagcatgattacttttatctttcttttttatcaaaaaactttttaatgagattgccaaacgtttttttgcatccacgtaaactcctctgaacgtaaacttttccagagtgtatttatgtggacgtcagaaaaacgtattttgcatccacgtaacgaaaatagttcatataaactaaaagtggctatgtcttacagatatgtacacgacgcatgaaattcgtaatgtttcgtagagaaaggggacaagaaaatataattaatcaattattattcaaaacaatttataatcgattttttttttttcttataattaattattactcgaatcaattatattttatcaaaagaataaaattaatttgttcatgacatctgatgggtccattttcactgctaggccctttgtggtggcgtccgatctgaatcgaatccacttggcttaatttatttgaccatttttcgaagtataaatttgaatattcaaactcgatggcttacgttatcccttatataaacacattatcaacctccaaatattttcatcatcaatctttcaatcacaaaaaacaacaacaccaaaaaaaaaacgcacaca

SEQ ID NO: 2578 - DNA, 1336 bp, Arabidopsis thaliana
gtgccagcgtaagcagaactcatgaggagttaaggttacttcgatgcttttgatctcaaacatatgacgacagtacagctgcagtttggggagaggaaacacaggttataatacatgttgcatattaggaaacttatatattgcattggataactgaaattttaacctccactctcttgttgtaaatggtaaatttgcaggtgcaacaaagagtgttgccatacctcgtcagctacataggttccgtaatgattcatttacaaggagatgtcattttgacaggtatttgtttgttgttgaagattctttccatcgttgagattccgcattgaaccagagttgtagattagattactgaagtcgaacatagtattcttaagaaagctgttgaatgtatagatagaagacctgtaatgattggttaggcggtattgcccttgttcagttcgatctatgtaggcgtctaaagccattgtgcgaaatagtgttgaactatcgttctggactatactgatacaaaagagttatactacaaaacagtgcaactggaacgagatatatgtaacatagaataatcattttataccagttgaggaaacattgtacttaattataactgggaatgtctaaaggtaacttatgaacttctatcgacggcacagtggtcagattaacttccaccgaacaagttttggattcggaaaaaacaatttgaactgtggacgacaagcacgagccaagtgatatttatttatttattttaccgactaaaaaaatctttgtagtaatttaaaattttcaatgcagaaaatattatgctaaattaaagtgaatatttgatactaactagttgacccgcaaatataatcttaactttatcatattgttgtgatactatttacatatcaaagtattaaatcccattttccctgtaatgagtatctatttatccctttatcataaaataataatccaaaatacgtgctctcttaatttatagaaaaataaaagttaataactatttagaaccttatggtaaaaaaaaatacaagtaaaagtatatctctaagcattttccctttgaaattttcaaactaattaaatagttaccaaaacaaaaagaagaagggcagaatagtcaaaagagaaaactcgcgcgtcaacgttggcgtcgtcttgccaaactttgccaataataataattagacttctgcactttctcacgaacctctctgtctcgtccattacttaaaaaccaaatctttcatcatcttccttcaccagttgactctctttcaatctatctctgaatctctcactctcctacccgaaaacc

SEQ ID NO: 2579 - DNA, 1647 bp, Arabidopsis thaliana
gtgtttctctgtattaggtcataatcaagtgagagcgattttgattaacttaattagatagagataatatgtaatgaatgtgtaagttcctagttttttggttccactaatgttttgtgttcattttcttgatgaattcaaatatcaacacttttttttggttcttagtcattcaatgccataataatgagaattggtcttaatttttagtgcctcaaatgtcattctctgtgtatgggcccatatggcccaagatattgggctttatcgggggaatcgtgaggcgcgtgattctagttgtcttgtctccgtcaactccaccatttttttgttttttggtccattgatgtcgtttttcatttgatttgaatttttatatgcttttgaattcacaactggtttcaaattcagattttgtatggtttagagttttttttatatatatatcatgctgaggttgtatacttcgatttgttttttcattttattgaaggatggcaatttttcgatttgcacttggcagagtatctgtttgtgtgattaaaagttgttatggtaactttgtaacagggacagtgtaaattttcgatttgcaattggttttgtttttcatgtaagcgtatgattcaaccttaataagccatcattaataattaataatggtggaccaacaaaattttaagtaatgttaaatatggcaaagtcatgaatcatacttataatttttttttaaaaatctaaagtggtgacgaaaatataattcatttaaatggatcactggtggacgaatggtgtgagtgtgacatggctaggtagagccgtgaacctcgagaatgattcaaattaacggggcaacttcgttcaacgggggactttcttttgaccaaagcttctatttatgtgtttcacccttatattatgcagtttcttcgatttaggaccattacttccattgattcctttattttcctaagcaaagagtacaatttaggaataacttgtcgatattttccataaacaccatttcttaattttggagatacgttttccttattatttttcacaaattcaaacaaaatcttcataatatattttagctatcaaatcacactctcaatacattcaaaacttccataaacactcttagaaatcactaaaatttagtagacagaaatatcagtaaatatttgaatataagtcatttaagcgaacattctataaactgtgtttggtatcaatgttttatagctaacgattaggtgtaaattacacattcacataattactaagatataggttggggttgcatttttttattaacagaaatatatggttcatcttgtaatttgaaaacttaaacccactattttataattttgtcagaagaacaaaaccttgtctttggcttttgttcgtaacctttgtttacttgatcaagaaaaaacattaaaatccgaccaaacaaggaaatatacacattttcaacgcggacataaattttcattacagcgtcttactaagctgttctgttctttaacgcggtctcttcctctcttcaaaattaaacttccgatttttcaccttttcatttccagaatttgttttttaaaaaagagatttttgtgagtgaagagatttagagtaatc

SEQ ID NO: 2580 - DNA, 708 bp, Arabidopsis thaliana
ctgatgaaggttttttagcggtcttgaggagggcacaatgtatatattatagcaacaaagatggggttttgagataacaaccctcccaaggccaaattatttgatgacattattacatctctctgatattggatgaaataaaaggaaggcaaaaagagaagatgaaggacttcttctttatgttgttaaaatgttcataagtgttatagccattttttatctatttattctgtaggattattgagcacttatgtacaaaaactgattaagattaaggaattcaggtgattaagttaatcaactaattctctacccatttctttgaaaattgtgatcagagttttgtgtctaatatctctttcattacatcttcactttgtatatgttttaaaaatcactaacatatttgtcccattttgatatatgtttgtgtagtggttgatcatatgatgatgatgtatatgatcactcagcttggattattagggttatattatatcatcataataatatgcttattgcttctggatcctcttagttatgattaacgaaaattaaaaaaaaatcagggaaaaagcgaagaggtcctttttgttttcgtctttattcgacttttcaaagagccaaagtctctcttctccatctctctctctctctcagaaacttcgacggaagaagaacaaaacaacaacaacaacaacaataacg

SEQ ID NO: 2581 - DNA, 2000 bp, Arabidopsis thaliana
aacgtgataacacaaaattgatagagaatatggacttgtgttttaaaatctacgtttacatgcatttgtattttacatgatctaaaagtgtgtttatcgtatgtgaaaccattacgtcaacatggattgtttttacggtattgtgttacaaatgtaaatacaccattttaatatctaaactcacttttttcttctttttgtttgcggttgaaccaaccaagcccatacacgagataaaattgacaactaatttattttacttgtgtaaattgaacttaacctgaaattggcagtgaaccaacaaatcgactaactcgttctgcatgtttaccttttatttgtttttagtaaataatatcgtatttggctgcgtctacagcgacttgtattctagctttaaacctttttaaaaacttgatatggctattggctataaggattttcttataataaattgcttggagatatgggtgagtgcaaactctttcttgactttttacgtataaatttgttaaaaactaaggaagcacagtttaacttttatacggagataatataatgtaagatatcaaaattcataataagatttgaaaggtccataattagtgatggaaccttcttacgatggacccattatcaagtaagaaccactaataatctttggttagttagtatatataatacgttttatgccattcgttaaacgcatcctacgttcttgcatgtcccatgtccattcatcatgtgagacgtgtcaaagcgttgatgtttacccaaatttgcagaaattaatacagtgaaactaatttactatttttattttggcttgacgtgttgaaattgttattgaaaatacgaattgtctaaggaaaaaattgtcattttactgtgcatgaggaaatagataagaatggtgtgtatgagtatgattgggaaagtatttggagtgacgaaaataccagggatatgcaaatgaagaaatagtgtggttgaaaaagatgagactggtgtgctgatcgttgtagttgaaaatgttacgtaaaaatatattgtatgtagtactctatgaaagattgaaaggatatgagctattgcatatatattgttaggttgttttgaaatattgttagttgaaagaaatttatagagcaagtgacaaacgagtaaatagaaaagctttgagaaatcacgaaaaaacatttgaattgtgataagtggttgattataatgaaaaatattggtataacacaaaatatgataaatcctagtttaataagaattccaccaaatgattggacgagatatatgactaaagaaattataagctgcatttagttttggttttgaacaacattacaaagtgttaggcggcatttgagttctcaaagtcacaatttccttgataaacccattacgttacgatatttgtgatacatcaatataaaataaactaaccaatcaatgtattattataataaaagaattgctagttggacaaaaacaatgaggatcaaatcaaaattatattacaaataaagtttccctagagatgctatttgaaagatacattgaatgcgagctgtgcatattagtatatgcttttcatcagtagtacagtaatttaaatattcgaaccaataaaatgttttaaaatcttaagaaaaaaaaagacaaatcaagaagtatcaaatgctcttcttatgtctttatcacatttgcaaaaaaaacgaggaaaaaaaggcgcgaatggttagacagttgacagcacgaccaacttccattctttaagagtttctttctttttggattcttttctcacatccaaaccaaaattgtaataataaaatacaaactatttaaatttaaaaaatagggttttttgatacggaggattttgttctcatcttttaagtactgaggattttgttggacattttcttacctccattattggcagagagaaacaaagaaataaagaacaaaagcaaataacagagaat

SEQ ID NO: 2582 - DNA, 1505 bp, Arabidopsis thaliana
atctgaagagcttctagctttgttttgtcgttttgatacggtccagttttgttttccttgttcctaaatgggctttaatgggtatttgttaaaatttagtgggccttagagtaagcttatttgtgcttgctttctttttgcttcataaaagagtgttttgtttgttttcattctcctaataaatcagtgcttacatgatatgtttacatatacacttaggctagaaataaaactttacaaacccaaggctttgaagtttgaatataaccatagatatgtccattaaaccccactaaaatgaagtaggcttgaatccatcatatataaatgttaaattaataggggtgggaaaaaaaacgaaaaccgaaaaaccgaaccgtaccaaaccaaaacaaatggtttggtttggttatggttttgtataaaaacccatttgattgtaatttttatttaagttttggtttaggtttggtttgattaaaaaccgtaaaaccgaacgttttttttgtttttgatttaaattaaaaataattgtatatatatatatataatgttcatttgataacatgatatctatcaaactatcgaaaaacaaaaccctaactgtaacctaaactaaaattctatataaattacatgccgtcatttaggatttgagtttacaaattagattttgattttatttatgcatcacacttataattttttttggtaaaaacatgaaaaaaccggaaccaaaccggaaccgatccgaaccaaaatacatatggtttttaaatggttttaattttttaaaaccaaaaactgtaaaactgttaaaaccgaaccgtaaccaaaccgaattttatatggtttttatatggttttacttttcttaaaatcgaaaaaccgtaaaacctaaaaccgaaacgaaaccaaaccgaaaaactgaacacccagcccttaaatataatgaaaatcgaataaatttgtttgaaagaatcgaacaaaattgacaataaaatctaattaggactattttcgtctaattttgacttagttgaaacagaatattagcaaaaatactaaaacaccacaacgcgtaataatacccacacacgatatcattaaatttgaccaataagaatctagctcttggcgaccacgcaagtatcttccatcttgctctccaagaaaaatctacaccggctttaaatttacataaacaccctcagtcaaagaaaagtcgtaaacatagtctctctcatgaccacaagggtaacacagtcatcctaaatataaaccacacaagaaaactgttatactttatacacgtgtcatagtctcattacatctacgtgaagagtttcgatcatcaaccgttcgttttcttactatataaaccttgctcgagacctgcgtgtgaagcgtataaagacgacaaagtaaaccaaaaaaaaaaagagttctcctacaattttcctaaattcttggatttgagatttcactttttccgatttgaaaca

SEQ ID NO: 2583 - DNA, 476 bp, Arabidopsis thaliana
aggactgaaattttctagtttgtaatatgggcccagaagatatgtttctgtgtggggcccaaaaaatgttatccgtttcatttctacgtttcttgtcgggtcaaagtgttgactttctaacaatgatatcatcgttttcttatacgtaacttctctgctcttccatagccgatcgacctttgttcacaattcccaccgatttttatttgctagatcgatatattttcaggtatgatgatatatatatcatggtttgtttattcatctggaaagtttttgatgcatcatgatcaggacaaagttggcgtgaaatgaaaagttttaaataagttttttttttttgttgttgttgtaaacctataatcagatgatgagatgatcctatattaatcgaatattttgattaattatacatgatatttaacaattgcattcatcttttttcttttgtgaaatctaagcagtgagcttgaaac

SEQ ID NO: 2584 - DNA, 2000 bp, Arabidopsis thaliana
atgaagtttaaagtaaagccaaaagagatacaatgtccaggtttgaagtttaaaatagagccaaaaactttgaacacgtgcgggatatcaaataatcagttatgcatagttttggatgggcttaagaaagaataaataattttgtgtcctactggactcaggatgcatgtgatgatgtgtagtgttctaatagaatttagttgcgtatccgttcgaataattattttcaacacctcctacttttgttacattgttttaaatgactattgacaaaataaaagtaaatgtaaataactaaaacagaaaagatgtgagaaaaactaggaaattcttttttttgaagaattattaaatttgctagatttggataatcgattcaacatttggaaaagaaaaaaaatatctaaggatggttgaaagatagtttatgatcaaactagccaggattttagaggggtcatcagttttctgaacatttatatgttgttttccgataatactataaatttgatcaactaattagatgacttaaaataatgtaattgggataatgtttaagaaaatattaggtaactcatataatttaagagttataatttggttataatttgcaccaaatttgaaatatatttctactataagataactagaaatagtgaagaaaaaaacaaaggaaactagaaaaaatgaaaaaatggcacatgaagtatcttttttgtttgagaaagaagttgaaagcagataaagccaaattatcttctaaacatgagatggctcgaaattatttgttgtttgggattcaagggggcatgtatcttgaatccttccaaccaacaattttctttaaccatgcttttggccaaaagattttctttaataataattaataatagcttcctaagattataggataatgatttgatattttatgtaatcatatttgcaatacctaagcatgaaaatgttttgttgagttgatccagcagttattttggaatatggcttaatcattttcacatcgatcttgttatttctgttcgtgaaatgtgaactttcgcagttatttgttttattcataagttgttttagatcaaataagtggagtccacttagaaattataagatgggaattttatttgcatatcaaaattatctataaaaattttagtcaactgatttttagttttctactaaaatcgccatcttattttcttctagattcaatttgatctgaatgtggcatgtaggttgataaaacttatcaaatagcatcaaatcagtattttctaaaactttttacatcatcataaatctttcacttataaaatataatatcttgggtacaccaaagtaatcctgatatatactacaaaatataacattttagttgttttcatatgtggttaatcttttttaggtcgtacatgattcataaaccttaccgtcataaaaagaaaaataaattatatttaaactaagaaatgtgatatgatgcaaaagtgacaaaatttcgatgaatcatgtgatgataatacgaaatgatatacctaacctacactgctcattctacatttgaagaatatatacctaaatatacataccaattctgggataattacataatatacagtttcatattagtctcacgtaattacgattcacgacagtaagaagattagtttaaacggtacaaaacaattcatatattacgaaaacattaaatatcacacgaagagaagaaatatgcaaaacgtctttgctcgaatcttcgacgaagcaacatagtttttcatttgagtgtaacattatttttcgtaaattcccatttcacccttttattacatgacatttgtctttcactgagacagtaaaaactcaagtctaatttggacatttgcatatacatactcatttttttctctatatatatagaccatgtcaatccactaacgatccctaaccgaaaacagagtagtcaagaaacagagtattttttctac

SEQ ID NO: 2585 - DNA, 2000 bp, Arabidopsis thaliana
ataccatatcaaatctgagaaagaaacaaaaagatagagatgaaagtgattttcacattaagctgtggattatgtttacaacgaaatacatataaatattatatttattaggctagcaaaaccttaactaaacccaaacatgatgcaattgataatttgtctttctgacccaataaactgggtacataaattttatatgtcagtatgcttcatgttacagtactttaattatttaacactagtaacgcaaaaaagattttttaataaatgatcatttaatcattatcattcttcattaaacattatttattgttttctaataaaatataatgatggtttaattgttagtgtaaatttatatggtaaaactaaaacctgtaggtaagcctcttttcagtcttttgttgaccagaaactttgaacaatagagttctattttaacaaatactaacaaaatacagaagaagggtaaagttttaggttgaaacttaaaagggtgcgatacgtgtgaacgcgttggtcaacaaatactatcacgagctgttctctttcccgcggacagatattgattttttcgtgttctatttttggattttgtggctggtgtaataataatattaaagcatatatactagtataaaactggtaatttttcgtagaggattgttttctcaaagcccaaacagtagttgcaaatttgtaataaccagattttgaagtaaaataaaatggtgaggaaattttagaataatttatttatcaaaaaaaaactttagaatatgttacatatttggtagttatagtattgtatcaaatacacatattaatcgaattgtttgataaaatggaagtaaattatttttgactgaactatgtagcacatatttattttatatgaatctcaaaatcatttatataatttatgaaaaagttagttttttttctattcgatacgttaacaattaattatgaccaataaattgttttaaggcattcagcagtctaaaaataaagactgaaaatggcgtcataataaacgtaaatgcagtaaatattattccctctatttttgaatatttgtagtttaaaatttttgcacacaaattaagaaaacatacaaatctcatttaatttatctctttcttataaaaatattattaattacaattaatccaaccaataaaaaaatatgatataaaatataattggttaaaaactattaaacacatttaattttgcatagaaaagtgaaaacaacacttatagtaaaaaaaataaaaaatctttaaattacacttaattagaaatagaaagaatacaaaacgtacggatgttgttaacctaaacacgattactaccgagactaaagatgtctaagtttaatactaagaaaagtaaaacaatttttcgagcagatatatgaatagtgattttttgggtcaacacataatccacccaacgttgatttttgtttgtcgtttacaatctctaaaacgtttattttctaagaaatatacgtgtgggctcattttaatgcccttcgtgcgtctacccgacgactttgtttactcgaaactatatcacacactacaccacatatttcaacatcacactgtatacacacatttatatatacatgcagaccgattattataataatattttctccggtccctaaaacatatatatcattcattcccacatgagatataatattatgtaaaacatacttttgactatgttgccaataatcaaaaagacatctctctctctctctctcacatcctattttccaagaagctcaccaatgcttttgaattctcccacatgtcttttgacaattttagtataaatactcaaaccccttagtcagtcattctcatgttcatcaacagcatttgatctcaagctcataggaatttgatctccacattatatcttgatcatcaccacaagaaaaacatttcaacttcttttatcagcaatcacaaatcaaagag

SEQ ID NO: 2586 - DNA, 895 bp, Arabidopsis thaliana
atcattcggtcttgttatatataagatacaagtaaattcacatctctgatatgattatcggagtaacatatataaaaaagaggaaatgttatttaaggagaggaactagccgacatagttcctgagttgtaataatattaatagagaggagtatgtgggaaaagtttccataaaaagatgatggaaacgtaaatgttgttcaacattttggtgtggaggtgacttgactcttgttttgtttagataataaataataatctgagaagaacaatttgtgttcttcttttcttctgttggttttgaattattggctaaaagaaaagccacgtaagagcatataatgacaacgcctacgtacgctttttagcgttcaatttagaccttaagttttgaaagattccatgtcttcgttttaaaagtcgctttcaattgtttgagcatatgtttcgtagggagcactaagttggtatacataaaggtattgatcaatctaaaaaactcaatggtttaattatattaatgactttagcctaaaaaaacttaagtcagtgtaaaacaatatcgatgtgtgattaagaagagatccaatttaacattacccacacaatcatttgattatttcctcctctccgtatctgtgtctctcttctcttgatcttttagtgttcttgctttgtcgcttcaacgcttaaggtaacactgcttcttctttgatattcgcgattcatcgaacgatttcatcattatagacaaacatcctatcgatcgggtttgtttttgctgattcgagattcactgtttgttagtttcatttcgttattttgcttcatgtggtgttgattgattattcgattttcttttttggcagtttggatttgtgtgagtctgcataatc

SEQ ID NO: 2587 - DNA, 1707 bp, Arabidopsis thaliana
atcccttttcttatcaaaggtttgttcgtttgtatcctcttgttagttgtaatacttgcaattcatcgttttgatgatcaaaatcaatgttgatcgttagattgatgaacatgcaatatctagaatactacattgatgttttatatgttacctagtgagagtgttggaatgaccaaagtctttttgagtttgttctttaacttttgaaaaccttctgtctcataccatgtcttctcgattcctccttaagtctgaaacctagacaagtcaacaatcgaacaacactttccctaatttttttaatttattagtaattgatagtggagtacatgaaatgttttatttaaaggacgaatcacgttacctaaactctcatagaataaagtcattaatggttgcattagatctcttaaacttgggaaaacaattatataggacacgtgatcattttactcaacttggttaaacaacaatactattaaactaataccccaacaacaaattttaattaatatttcttatcgatgcaagctacttctactactactactaaattattcgacaagaatccaaattaatgatggcgaaacttcttggtttcatcgatatttaacatatatcccgatttcgatcaaattgcaataatgtcacaaatccatacgaattccacatactaataataaaactaaaatacaagtcatggatgggtcatggtcatgtatacaatactagaaaaagtataacttgtggacatcataaaagatagcaactttgattttgtctacaaatataaaatgtagatgccatattccttgaataaaaaatgaggccaaaaacataaaataaacagaagaaaaagaagaatatgattcttttagaaaagttaaactatagtagaacagtctgtctctctttgtttgttgtatttatatatagtaataaaaagatttgaataggcaatattagttttatattataataatcactttcaaagtaaattactaattatttcgttttttttaactatttgttttgtaaattactaattaatttgtttttttttaactatttgttttgtaaaacacaaaatttgattttttttgtattttacactgaaaaatgggaaacaataaaatagaagatcgttacagatacgcaaagcactccattccactctcgtcccgcttcgcctcttttagggcgcaaccaagagacagagaagaagagagagactcgtaagcaacaataaccaatagctctctctctctctctctctctctcctctgctgattcttcgctgactcttgcctcctcgacgtcgtcttcggctttgtagcatctcgccgaagcgtcgtaagttctcttcttctctaacctctttgcccttgagaatcttagatcgaatctgctcctcctttactggaatctaacatctttaaaaagtcgagtttcgttatactcctccaatcgcttctccaagttcgtgtatgttgttgaatttgaaggaattttttttttttgtaaaaaataaaagtcttgtctttttcagatgggtcatgtcgatttcgtgtttattgctttagggtatttgaaaagtcgtcgtctttgaacaaaagattgaacctttaatgacattcttggtctgtttgttgtttttgatctttgaacaggttgatttgagagagacccaatttggattgttagaaa

SEQ ID NO: 2588 - DNA, 370 bp, Arabidopsis thaliana
aaagaaaagagaaatgctcaacattagacgaagtcctatataagaataaaaaacttatgaagaaaaattacattttctacagtcaagagaaaataatggtttgtatcatagtgtatatcttctatctgtttttcctctatatatttttgtatacttctgtttaatctttctcttatctaagttgttattgtgagcaatgtttgacctctcgaagcttatcctcacacggacaataaatgacatgtgaatttatatctattgaccctgacttattttgccgtggtaaagacgtctttaactctgtttttttatagtctgaatgttactcttatcaccaaaaacagaacacaaaacagaggaaaacaaaaac

SEQ ID NO: 2589 - DNA, 336 bp, Arabidopsis thaliana
ggattaacgataaatcaccaaattctcacattcactctttcctcgattgatcgtgtgtggatgatgatgaagctgcatataaaccgaactaaaccgaagtttggctgatttggttcggattcggtttattgtgtagcaagaggaagcataaccagattgattcgactaggaaccactaaaccaaacgaaatacagaaatttcgaaccaaaccggatcgattctacgtgtattaaacgtcgtcgtttttgttagctaaaaagaagaaatagtaaatatccattagaagaagaagacgaagcagaggaatctagggtttatgctacattgaagcaaag

SEQ ID NO: 2590 - DNA, 2000 bp, Arabidopsis thaliana
ttacatccaaaaaatgtatttatttgtgctctactcttttaaatacaacaggaggtgtgcaatatggactttctcaattatgttgtatcctacctatataatgaaataaaatccaacggaagaaggccattaattctcctccacgtgcgttatgtcttttatttgttttctatggggctctattatgtttggtcagcgcaacctaattattatttttttgtatcatcaaacagttgtgtttttattcttccacgatagttcaatcttgttttgtgtttttattcatcaaagattcaattatcttttaaacacctaattttcatacaaaatataacttttttttttataagatgataagacttttggtattccttctattataattgtgattccactcttgtgtattgtaatttaaaaacttaaaattttatattttagactaatatatcgtcaatattaaccacttcaaatatttattataaaatctacttcggcattttcaaacgtacccacttccgattctatgcagtttaacttattacactaatttttattttgatgtgtttttatttattatgaaattattacaataatctagtaaagttaaattataattcaccaaaagtttgcggttgccaaatattcttcattattattatttttcatatctcaaacaaagtagttatgcaaccttgcttaaaatatatgatcccataaattttcaaaaccggttttatatgcaaagtacatgtcaaaacgttatcttatttacatccatttactaatcaaatatctattttaccacaaaaggtgtgttttataccctatcatgttttactcttgagatatgttctttgacaccacccacaaaatatctctacgaaatacgaagccactatatgtctctttaatttcactttttatagtttttttcaccgctaaaattgttgactaaaaaatatattgcataaaaataattgataatatatttataagaaaaactatgataagaaaaaatataatcggttgaaatgagtcatgactaacaataattaaaggttaggaaattaaaagaaaataaattctgaaataactaaaaaaaaaaaaatagaagatgatgatatatggatccctatactaatattttggaagtacattgaaaaactaactttcaaagacccaattaattaagctcattaaggataaacatgttaaatactaacttatggacattaattaaattaaaaattataaaacgaaaataaattgatgacaaaaaaaaaactatgaattttcttattaggatttgtaatctactttcttgaaaaaaattgaagtttactgacggcttcctttttttggaaactccaaaataacaaaacatatgaagaagttttggaatagcctttgactcaacaactttaacaatagaaagaaaacatgtttaattaatgttcatgcacttcgtctcggctgccccttgtggcctgtggggttgccgggttggcttagcttgagacgacccaatactgaatttgttagctcggtcagtgaagtctacatgcatgatacaaaaagattgactagtgtttaagttttttttttttttttttttttttttcataaatggtagtgtctcatattagaaatggtagtttgaaaagtattcagtttgtttgttcactttggattatttgattttggttttgttaattgaatcagttttgtttgaaaagtattcacttttgaaaagtgttcactttaaaaagttttgtttgaaaagtgttcactttgaaaagtattctttgagaagtgctcagttttggtttgtccacttacgattattattcacaagctacagcggatagtagtgactagtgacttatgactttgaataaagaatttccctctaaaggaatgaatacattataaatagattattaacctaagcttgatagagaagacagaacaaaaaaaaacacaagaacagggcaaggaaa

SEQ ID NO: 2591 - DNA, 1552 bp, Arabidopsis thaliana
gtttatgtttttaatttatttaatttttgggttatattggattgtgaatcttctgagttattacactcatatgtttttgtgtaatgtaaaagatatatggttgattgttctaattaagagattggttttggtacaaagattgttaacctttgtgcagagattgaatttgatgattatgtaaaggaaatgttctgcatttcagctctaaaatttgagtccggttcagtgagagtaaaccaaactgaagtagttgtagtttgagtttggtaatcattcattagtggctgattgataattaatatgttggttgagataagagatgtgatttaatggatacggagttggtagctcaacgagtgaacttttggaatctggagcatctagggggtttagagtttgagcaccaccaacaataaagagagatttacattacaatggaaaccttctttcttcgatctaattaactatatttgtggtttcttgttggaaaagattatagtttttggcccatatacaaaaattaggccttggtttctggtaaagttgtaaatttctagtgttttatttatatcttgtgacagaatgtggtatgctatttgtgtgcatttgaaaaatggatcagttacaagtagtcacacaatcaagcccaaacctagttattagtcctccttcatctcggctcagacacaagtccagttttgtcggttcttagaaagagtcttaagagcaccctcaatggtagttgtttaatagaaagaaactctagaagctcttagagcaccattattgataattgcttaggttaattcttagaaaactttggttatgaatttaatgtttttaatcatatatttgttaagagagtctcttatataagagacaaattgaagttttcttagtttttgtttcagaaattttaaaattaattcataaaaagttctaagaactaagttaagagtaatctaagacactagcaataatgatgctcttagcacaatatcacaaaagctcttagcacatggcctagcacgatatcgaatagagcctgttgcgtagaaatctatggatacaataacttcttcattgttactattgcgggcgagctagtgaacattttcgtgcaagctaatgggatagcggaacattttcagacacctcgatgatcttataaaagaacgagtcggttctcgggtcaagatgggttaattgttttttatattggactaaagtaataatatagcccacgagtttctgaaacagaagaaacataaagataaaagtctgaatttattcataacaaataggcctaaatgggcctagaaacatctaaaaccgcgttacgtgtaaaaaggaaaaaatccaaataaagaaaacttaaaaatgacaaccaaaagaaaaatccaacttggacgctggcttcgtctctaagtcagccccaacctctatatatatatagaatcaagaacacaagaaatatagaacaacaacaacaacaacaagaagaacacacgaataagaagaaaaagaagaagaagaagaagaagagaagctt

SEQ ID NO: 2592 - DNA, 2000 bp, Arabidopsis thaliana
ctgtgcttattctacttgttttattgcttctttcattttttgtttactcacatcattgtttatttatttgtttgcttatatttaaatctatacttctttcattgtgtataaaagattaattttgaatttatacaaaatttactcagataattttgacaacaatatgaaaaatcaaaacactaataaatgtctgaataaccaaactgaacccgaaatataattactatagactggatgtagccaaaaattattattataaatccaaatatatcaaatattatatataaatcaaaattactaaaatacttaaaataaccaaaaaaaatccaaaaattaaccaaagttttttcaaatctaaccaacttttttgatatttcgggtacccgaaccaaagtaaccaaaaccaaacctgacccgcatatataaaatacatgtatggaccctccaagccaaaactctaaaaccataatctaacctgaacttataggcctaaaaatgtatatgcaaacttataaaactttatataacatttccaaatttttattaactgtataataataacactttagctagagatatcccaaaaaaaaggtcactcggatggtataataagatcgtatctatctataagtggacctttgtggcttcattctcagatatagtagttgacacattatacatcagtttaaattatatattaactagataaggatccgctcgatgggcgggtatgcgattggtgcattatttatgtattattgttcgaatagaactgtgagattataataacatctgtttgacacaattaattaattaattaaataatatttactttaaataatcaataatttaatctattgtaatattatatttaacaaaaaaacatttatacaatcaatacttcggtgtgtttaaaactagaaaaaaatcagaaacaaagtttgaaagaaacagagtagtcggattaaagatgtcatgcgggtggagattcaaaaccgtagaccatcatcataatgatagtcgttagaggcttggattgagctgagacggttctagacggttttgtcgattagtttgatttattgagctaattgagagggtaactcaccgtgtcttcttgcattcctctcacaccagatatggtagagagtagtttggaagacataacgaagcagaaagaggttgagccaaggaatgcttgtgttatgaagtattgcggccagctggtccagtttgacgagtagttggatggaaggaggcgatgtgcaaaatctttccaaaccgttgaggagtaggggcatgagaagaacaaatggtctctaaaaatacacttttcttattctttacaattaaatcagtcctcattcccccacacggccacaccacaattaatctgttaacactttattaacgacgaaaaaactaaataaaaaaaatctctttatacatttgacaaaagttgaaaaaaaaaaaaaaaaaaaaaaagaagaagaaaaaggagggaggaccaaattatctcaagaaaaactatggccttgaatgttttgtagattttgtaagagtttttggtttttgtttttcaaaaacttatttttataccattcaagattttaaaattttggtttccctacaatttagaaaaacaattttgttggagtttgccattcatgattttagttttttagttttcctaaaatttagaaaatttaatttttacttaattaacgttatttttctcaaaaaccaaaaactaacttttttttgggttttgaaacaaaaatataatatcaaaaatctaaaacgaaaatctaaaatctataaactaaaatctaaatccaaaaactgaatcgaaatacagcatccattcagggcctttataacaaaaagccaatgagaaaagtctgaaggaagagaatcgtcaacaaacgatggctatacaacaagaataaatacatcacatttttcagacaaactccaatttcacagtgaaaataaaaaca

SEQ ID NO: 2593 - DNA, 2000 bp, Arabidopsis thaliana
tcgtcgataggaagaaataattttactgatacttcctttgtttaatataagtgtattttttataattttcacaaaatttaaatttaaattataaattacgtataaagttatcacacaattaagaaacatgcatgtaactcttaaaacatgcctcatttcctacactaaaacatttttccatttttacgaaccaatagtaattcattatattttttaaagtctacaaaatattaacataaattcatttaaattatatagaaaatctaaggaatcaatttttatggaaacaattataagaaacctaaattttttatttcaaagacggatggatgtattatttatgtatttgtattttcaatctcaaattaatacataacgctacagcttaattttatgacttagaattgattatataacgcagacgtaattcaatcattttacaaactttcagaattaatatatatccaacaaaagcatcagcaaactatatacatattgtgcaagttgtgactattactcattgtgttatataatgctttttacatttttcaactgaataaacaatatattaaatatatatatatatatatatatatatttaaattgttgcacacctaaatagaaatcttaaacataagtttattctttcagctatatgtatcaaatcttaagcataattctatctcatacttttattaattttgattttggataagatagatattctctagctacgatgtaaaataatatatatcataagaattgtgtatgaaattttttctaatgtagatttattacataaaaattgtaattaaaatcctcttatggaatgaaatgcaattatattatattttttagcagatgaagtttttgtgtgctttcttttttgggtttctatgtttttatatagacacttttttatacttgatgttttaagtgaaaaattatgttctaaattatatgatgttttcaactttcaatacaaaattaattaatttttattggttttgaagatttatattttacatattattttattactggttggatcgtatttaaatagataataaataaagttttagtataataataataataataataaaaatttgtgttcaaaaaccttcaacatcatgtattaaaaatggatggagtatactttttaaatgtatgtctggttatatatatatattggttttctctctaaacagctgtacccatttttgtccaatgacacatctacagttttatgaaaagtcccaaccgttcttcaccacttcttctgctccgaatacaatgttgctccaatttctaacaaattaagaaaacaaaagtaaaagtaaccagacatacaataaatatgtcttcttaaataaattgtgtgcagtaaaacttggaccaaaaaatattgcatttagattctaactttattatccggataatattatttattaagctctatattgtctgtctcaaacactcaaaccctcataatttatgaatgtaaatgctattgcaaatcatgtctccataggagtatatgataaatactttctatataaaaagaaagggggaaaaaaatctataatgttacagtatcactatcacatccactaatatctgatacgcatttatttcaatttcttgagtgacctttacgatagattccaactcattttgacaatttttctttggtccaactcttacatattaacattcaccttcctttttgattttcgtcggttctacatgttaaacccttcaaaaattaaattataataagtatagtgaagaccaataagcagttgcatggaccctgattgattcattaccgctaaaactttgtctgaatccttcttcctatttataccactctcttcttcttctccagtttcatcacaccaaacttctcacatctcctcattctgtattttgacaaaaaaaaaacaccctttgttttttctctcctttgcatgttgtgattgtttttgcttcacaac

SEQ ID NO: 2594 - DNA, 2000 bp, Arabidopsis thaliana
ctaataagaattactctatcatagcaccgtcgacgtgatcagagttagtgaatctggtcacaaactaacgccaaaaaccaaaacatagagctttttttactaaatatgtcagatttagaaaactacgacattatttcaactccctgacctaacttcagactcgatgaagaaaatgtcaaatcaagatagtggaaacaaccgtttgcgcaacccaactatccaaaactagttttagaaccgacatgaaccattgttaatctattcacttacattgaggttcaccctcaactggtatcatcgatcaccttcaattagtgtcctcgaccattgtattagtgaaggaacttctcaaaacaactgtaaaatttaccgctaagctgcatcaagattcagatcctctagctttcattactattgtagaaaaaaataatattgactaccgatttgtcgacgattcaacttgcactaaagactaaacagtgataaagaaaaaaaatataaaaaacatacttagatctggttttgtgtctttaaaaaaaaattaaaattttattaaaagaaaaaataattcgttcaatttttgacttctcaaatcaatttttacttatttatgattttacaaataccaaatctagccatttaccacatctatttttaatttagttgtgataagtataatatcaagaagattataattataattctcatagttataaaatatacacacatcatttacaaataatgacatatagaacataattttttttttacttatttgtagttttactattgcgttatgtttacaaataaatgtcaaacataaacaatctaatagaaatacactcttaatttaattagagtaagagatcaacaaaaatatagaattttctttatatcgaagtgctacgaccttatatatatagaaaaaaagcataggtgaatctctaaattgagattgtgctgtagtaaacatattaagtttttagtttttttaagaaatgaatctttttgttgattaattcaaactagtagtcattaagattccggagattccaatttagaaaagtcaaagattcaaagaacaagtccaggtccacatgttgaatccgattcatcatccactcatccttcatatcttcctccaccgtctccgcccaaaaaaacaataacaataaaaaatcctaaaaaacatatttgattttgaaaaaactttatcatatattatattaattaaatagttatccgatgactcatcctatggtcagggccttgctgtctctgacgtccttaattatcattatttttaaatttgtctctctcagaaaattacgccacaatcttcctctttcccttttccgaaaacagctaatatttgtggacctaaactaaataacgtagcctctagattttatataattacgaatactatatgctacaacttgttattatttactccaatcatatatgataccaatcaagaatcactacataagtagaaaactttgcaatgagtccattaattaaaattaagaataaacttaaaattttatggtattttaagattccctttggattgaaatgacaagaaatcagcaaattagtcgtaactcgtaagaataaacaagatcaatttttactttctttacaaagattccgttgtaattttagaatttgttttttgtcactgtttttttatagattaatttatctgcatcaaaccgattaagaagtgtacacatgggcatctatatatatctaacaggtaaaacgtgtatgtacatgcataaggttttacgtgcttctataaatatatgtggcagtaaccataggagaaaaatcacacaaccaaagcgtttagaaaaaaacagcgataaaaccgaaacatcaagcaaacaaaaaaaaaagagaagagaaattatttttttttgttttcgttttcaaaaacaaaatctttgaattttatggcaacccgtcttctccgaacaaactttatccggcga

SEQ ID NO: 2595 - DNA, 396 bp, Arabidopsis thaliana
aagtcattatatgatatactcttatgtgtgtgttgtatatttttgtgttatatgtttcacttccatatattattgcggtacagttttcacacaaataattgagctgtctttattgatccttttcctctatcactctcttattaaaatagtcttctttttgcaactagacatgttattatattatatttttgtgggcagatcttttttaccatttagaggcagagaagtgtacacaaaatgtattagttaacaagtcaaaagtcccgatttagtggtgaaagcgatattcactctggcttcaagatctcatcgaggtctttctatgtggacaaggaatatttcggatacgttacactcttacagacacagatagagagaaagagaaaaagagagata

SEQ ID NO: 2596 - DNA, 252 bp, Arabidopsis thaliana
tctctttcgtttatgtatatcacaaatacatatcacaacgttcatatttgcaatgtgccaaaatcctccacgtgttaaatccatttgttcatagtttctcgttacaagacaacaaatggtatcaatgtccacggaaaaattgcatacttgcacgcaatctcttcttcttcttcttcgttcttctcgtagcttgaaataagattcatcagaagagtaaataaacatcaaaatccaacaaaccaaactagaaaa

SEQ ID NO: 2597 - DNA, 2000 bp, Arabidopsis thaliana
tcaaacttttgatgattaatttttctctttcatgttatagttaatattatttccgtacggtaagtagcttttctcggcatgattcatgcacctacgccacctgattttattacctacaagtccaattccaattccaataccataaccaacttcaatttttttttattttttttttgaatatttgttgaaccaacttcaaatgttagataataaaatatattaagccacaaaactttactttttagggacagttaccgattctatagttagttatgttaacctcgcttctgttattttgacgtgatcatgtgtcatgaccatgttattctcttagaaaacatcaccccaaccattgtatcgagcaaggttgagataacagaagttgcaataatctattaattgtaactaactatagaatcggtaacagaagttgccctaaatctccaacaaagatatgttcattaattgcaataatttataatccttacaaatttaaaaaacactatacattatataataggattaattagttattgggcaaactagtggatatgtgacttccgcaaatcaatcatctaatttatctaaaatttttttgtttactctatattttcataaactgctacgttaggaaatatgtgtctatatcacctatcaagtcaaattaactataacgtcaaaaagaaaaaggtcgaactaaccataatttcaactctcgacttatcctgaatacatattataattatataaagaaatacaaatccctttttccaataaattacaagatccgttagcaagaaaataaaaaaaattgtggattgatttacatgcaaatttttataaactttttgagttgagatttattaataaactattagatttttaaaagctatgaagctacattggattgatctagtttcttatccatgcatgtgacctccgctatgaaattgaccaaacatgttacatcttcgactttatcctaatttaaaaaaaaaaaaaaaacagaaaccaaaatgaaatgggttaaaatttataataacaaagataatgtcatttttttatttggccgcaaaaagtgtcattttcttatgtgaaagcatatatatatataatttttttttctagatcattaaaatgggcatgttcattgcactctatttattttcgatacgtcctcattcttttcatttaaaaaataaatatattaatgcttttgaaccgacagttttttacatgacattactaaaactgcaaaagtaagttacagtcaaatatttgtttagtccatactatactattagaaccatgtttatttgatttaaaaccattgagaatttttggatgacaacgttattcttagaaaattaaagttactaaatactcccacttaatatttagtagtagaaaaacttattccacttttagtttcttcaacgaatttgtttatggtcttagcctcgtaggtagatccggaataaatgggtaaaagctggtttccttccgttgtttcacttaataggtagaggtagaggaacaaaatctctttgaatgacgtgataggagcacaatagaactagttgtacttgtacggttatactttcaaaaaagaaaaaaccatagttcaaatatcatctctatataggaatttggtttttataatatattcctcaatttccttttcttgaatttttcattttcgtacttagttttctttgttaaataatattttatgtaagttttttttttgataaaaaaatatatgaagtaagttgacattaaatgtttcatattttgacatgggatcaatccaagaggcccatccaattgacggataacagtcactcactcctataactgtcggacccgcatcactctctatttatacacacctgccttctctcacttttcttcattcatttcatacatatttgtctctcttaaatgtgtttatttccccttttgtagtaaccactcaaaaggttttacttcactcaaaa

SEQ ID NO: 2598 - DNA, 1633 bp, Arabidopsis thaliana
tatcttaaggctttattaacatgatgaaccattgtttcattctccttacggcttactatagtaaaagaaccaatcattcaaatctcttattcgtcaaaagtattgaattattgattcgggaatacaattatggatcgaatataattaagtaaacatgtttaaaaagctaaatttgatcttattatattatcagggtaagaataagatgcttgtagaactcttaattaggtgtagtaaacttcaacaatcaaagtgtttatactaatgatcttgtatagatattatgctatatacatgtttctctactggaggatgaatatgcgagagaaatttagtggaaaacaacttgtgaagaggtgttgtgtgttctaagaagaaaccgtgtggaaatgtatcaaaagtctcgcatcatatcactttctcctttccttgttttcttctgatttttgcttccaaacatttctctctagttaccgtacaaccgcgtcctcaattctcatctttccgagaaacacacacacacacctcttcttgtctctcatatgtacgttactgcgaggatgatatgatatatgacagaagttacaaagattatacagaaaatctattaaaaagagagcaagaacgtacaacaaattgacattgattaatttacaaggtatatcgtaaggtacatgccactatttatgtgttgtttagaagttgacatgaattaagatatatatatatatatatatatatatatatatatatggtatccaaacagtcgtatttcaatcggtgatcatatggagataataaacataacaacacatataaagttgtaggtagtttcgttagtcttaatttgtccagataatattgcgttctataccctagtttggtcttttgttggagagtgtatgatgtatttatcacaagatggtcccagccaaaacattccaaaaatgcctccgaaaaaaacagcaacacataaaacaccaagtggggatttgatctagtgggggaatctcttatccttccaaaaaaatgaggttatagagacacctagttcgatttttgatgagttattaaattattcgttgataaacttaacgaataatatcgactatccaaccaagaatattctagatgcatcaagactgtgtatggataagtcagcaaatacattcatttgctctatccatatagaagatttaagttcacaaaaaaaaaatctagaagacggcttaaaaatgcatgaaccgacgtcaaaaaaaaaatatgcacgaaccagattttaataacttcgacgaccaatgagaaagataataagttgttctagtagtcttcaaatattgtattttgtggaggaaagcaccaagaacattccttttcgtaacacttgactttttcatttttctgagtctcctaagtgttacgcgtgacgcggtgacgctaataatcatatttccttacactttagcttacttacgcagcaagcacaatgggtattttcgtcaattaatattaactaaactagattctagtatataaataggagtactcatcacacaacacacacaaactaaaaaaccgatcatagaaaggaaaaaaaaaatcaaaaccctagaagtcactaagtcgattcaaa

SEQ ID NO: 2599 - DNA, 1109 bp, Arabidopsis thaliana
accagtcatacgtagcgcaatgatattgaacatcatgtaaaagaaatgttttaatcttgagttttagtatatgttttcaatgattttttttctctctctttgtacgtaatagtttgattcttctgatcatgaatgtcatgtatccgcattaatgtatatagttataaatttctattatcatttatttattttaggttgcgctttatttattctcaattttcccatacgaattttttgtctttatatttatcacaaaaaaagagtttgctctttaaaaaactatactaatgtaatttttttattttattttctctatcttaatcggatattaatccgactcttcttcttcccaaaaattaatattagtttcaaatccaaagcaacccacctcattcaactttccttcgattttcttcaaatttccagtttccacttgctttcattgcttctttcccgccgtttctagatcttcaatcgagaaagggatttgcaacttttcacacaaaaatcttagattaattgttattaataacttgttcatcaaaccactaaaaatcccgtgtcatcttcgacttcttggttaaaattcaataaagagtgtaacttttcattgctataacttaataatttgtttgtgagaagagaactctagtcttacagggaccaacaccaacaatcaaaatttagataatgaagaatagttgctgatgcatgattaagattgaatttatcaacaaaagataagtgttcattatacaacacgtgattaattgcatggtgtattaaggcccattaacgaagtccatggtaaaatgaaacggcatggcgttcactaccccacctaatgaactgcatgtcgtctcaaccatcaacatagaagcttcttgaagccacctgagaaatctggtagcgacactcttgaaagacacgttataaagaaacggaaagaagaaacctgaaatttcaagaaacttgcagagctttctatctcttatcctcttctctaccatcatttctccctataaatacgccaacgcacataagtgtttgcattcgaagagagttctagcaaaacaaaacaaaacagagcaaacagagtaagcgaaacg

SEQ ID NO: 2600 - DNA, 1232 bp, Arabidopsis thaliana
agaattagaatgcaatgatttttttgttaaatggtttttttaaagagttaatgatgcatatttttcaaagtagatgattttctatgcgcaaataaaaaagttattggaaccagaggaaagatccaagcttttcaaattcaaggaacgtcattgttctaattcgtatttaacattcccaattatgtatagatcatcacaaaaattctatattgaccaaaatatgcgtttactctttcgaaaatgttagcttcttccttcgttgaaagttattgctttcaaaagatatatgaagaatacttaaaatggtatagcaaccctttgatgcaataattgaaaccaagattggagaaccatgcatttagccacttttgagaaaattttattatatttggagactagaaagtaaaacctcttagcatttttgttattattatctaaatctcaagacaaaacctacccaatggtgctcaaaaccaccaactcctatatctatctatatgagacaaaacaaaataaaacaagtttttcttggaattaatgtcatactctcagtaaatataaatgggattttaaccaaaaaaatactttttagtcaacagatttttaataataatttagatcacttatttagagttgttcagcaatgatgttatactaaccaataatcatggatgatgaagatgcaggtatgacttatgagtgataggtaaattttgtcaaagagaaattgaaagcctccgtaagaagtggagtctgagtgaaaacacggtgctaaactttgctaaagacagaataaatcaaatgaacttcatgtaacatataaaaacataagtaatagaccagctttgatttttatagatcaagcttgttcttgcaaaaattacaaaagtagatgctttgctatgcaaataaaaagctttcactttaattctcatacaaagagaaaatacgtaatggtttgagagttgttgatgtagcttgtgactttatcttcattaccacgtaattgatgtgtcaacctttatcttaacagctaaagtagttgacttgttggcatttaaaatctcttttagaagattatgttgaatagtcattggcgtgcgattattcttgctttgaaaaatgaacagttgactatagaaaatggtctcatttggaagattgtgggattttagttattacttggatcacgtataggattcagagacaagagaagagaaaagaggagagaa

SEQ ID NO: 2601 - DNA, 1302 bp, Arabidopsis thaliana
tgtttggagcagggagagggatagggtttatgattactcacctggtcagtatcgtggtcgtcgtattcgaggaagaaacgaagaatcctattttgtagagagaagaagaaaggagaggcaaagcgagtcgttggaactgatacaacgacgacgtttcattgggagtatcaaaacctcaatttggattttctctgtagtctttttagaatttttctaaaagggaaacacgtgagagatgggaagaggcacgtggtcgagcctcatgcaaaagaatggttgcgtttgttttccaaactgcgagagaatcgtgtgtgtaaatgctcccagttccaacactcgacatgttttttttgttttaggttattactgattattcttgaacttttagcaaaataatgaaacaattttgacttttataacacacaaaaaaagcaatacaatttcaaataataaatcgattaagagataaaaattgtgataatttggatattttaattagtttgtgcaatattcttttctcgttgatctctataaattagagaggcaaatgcgactgctaggagtagaaccttaccattggactacaaacgcttttgtgtttaagttgactattaaatttagatatctgattgtttaggatagtttaaaacgctaccgttttggaatctttatacgctaccgtgttattcttctttgaccaaaattctggagaatttgtcttcccttcgtatttctggcaacttttttaatactaaaattctctctaaagccgtcaaagaccaaaaaaaaaaaaaaaatacgaactcgaaatctctctcgtcttgttgttgcttaccattgaagctatcaatttctccgtttgatttctctcttctcaaaacctatttcgacggattattccgattcctgtttccccgaccttcacgcttcgtacttttgttttttgaaaaattcgtgtttcaggtacgttctcgatttctatttcgtttttttctgattcatcaatgaaacaaaatcgtttcttaatatacttgttgttctttgattcgattgatttttgttaggaagagcgcatgtgtagagttggtggtgtaattcagaaaactttccggagattttttggtgatgtgttgttcgtaggtaaattttgaaattttggatttaatggttgaggaagatagatggtgtttcttcaatggatctgtgaagacgagattgttggagattgatacttatcttattcgtctttatggctttgcttgattaagaaattgtgtgattgttttggggaggggtttaaac

SEQ ID NO: 2602 - DNA, 2000 bp, Arabidopsis thaliana
aattcattaattgaccaactatataagtatgttatgaccagccggaagtaattaaattacgaatgatgtcgctttgtgaggactatgaggcgtttgaaagtcctttacttttacaaaatgacgtttggttaacattgtagggtacttgtaactaattgtgtgttttgtatattaaacacaatttttgcgttggcatacatttgaatattaggctgtttttatctgcttccttcaccgaacaaactgttatacgtcatctgtttttctattttcctttcacaaagtataagaatcttcttcgttatctgtttatttgataacgaaactggcttatacaaacatgacacggcatggatcttaacaattattagcgtctcaagtattgataaaataataataacagctacactcacgactcacgtcgcctaaatcaccacattatcatttttggtactagtatccaaactgttcggatatgtatttacagtctttgtaagagaatttcaatcatttatagctgaaggtgtaccatatagatagatagggacaccagcaatttttacatataaaaaagaaaaaaatatcaaacgatttacaatgtatcatgtcgcgattgggtcttgctgcctcaagaatagggctgatatctcgttttgtccaatcaaagaaaaaacacgtcatattcttattttgatgatttatatattagcattatccaaagtccaaagattataaactgagattcatcttctcgcccttgcacattgtagcaacgtgtgaggcatgtgcgatgcctatacctacaattcacatgtgatccggtatattaaaatatacatgatttatggatacactcgaatacttctccgatattcatttcgcggaaagttgcatatgatccactatctcctatatatttgttatataacacatggcaaatctctctatatatattttttaaatacacatatatccaaaataggcttaactataacacaaagacttttgtttactgtatattagtaagaagtaaatgtattttttaatattatgataaagtttgtgaaatcaccatttgcaatagccatatagggtcgtgttttaattttacagtttgtattgttataattcgattccaaggttgagaatatgtgtgtactattagactatacaaataataattcgttgacgatattgaatatttactaattataggaagagaaaattatttactaactatagtacgatatatttcttctatatgtgtttttaacgtttttttttttttaaatttaagtcttaactttacttctcatttttaatcaaaaggaaaaaaataccaatcaatttttcctaacacagtttacttatcattttcatttgaaatgtgttcactttctgataaaatgctaatcctacaatcaaatacaccattgtcgtgataacacgtgtacggctctaaagcaatcagaacaatcattggacagtttttacaccgtcagataagtacctatccacttgctgactcagccggataaaccctaaaccggaagtttgccccaccgtcaaaattggaagaaaccggacaaaagagaatgtaaagactaagaagtaagaacccatcggacgtcgtaagaaggttaattaacacgtggaaacagctggtcagagttatccggtaacttatccggttacaagtaaaaaaataatttgttcccatacacgactccttcagaaccaaacgcgacatcacggcgccgtttagtgtctataaatagagcaatcggtcgtagaaaaccaagacatcaaaaacacgaatatcgatagtacacttctacgtgcaattttctcctttctcttcctggacatctgtctgtttattacattttcttgtaatctctttttggggttttacaatatctatcccctaaagtttcggaaaattctgtttttctgttctcattcttcgtgatctttttcactttcttcaaaaaaaaaac

SEQ ID NO: 2603 - DNA, 2000 bp, Arabidopsis thaliana
gatgtggccgaggttgaggtgaggaccacgtatccaaaatatttacagtccttttttttgtttttgttaaagatatttttgcattcgtacaaaagtatttgcataaaaggcacctaaccatttgttttaccgtatataaaatttttttaactgtctttgcatgccggtttttatcatgaagttcgaaattttttatatacggtaaaacaaatggttaggtgcatttgttacctctttcttttattatttatcatccactaaaaatcatcgtgtaacgtagaccacgcataaattctaaattattcttgaccctgaattattagtacaccaattaaaatatttgaatatcaaactgaaccaattctcaacagttttagtgtacagttctcaaaaaaacaagttttttggttcaaaaatagtatttacaaaatattaaaaaaagaaataaaagaaatggaaaatttaaattttgaaaaacatatagtagaatgctatatttatttccagcttcaagtttataaaatataaaagaaaaagaaaaatatatttgtcagtttagtaattctagaaaatgtaaagatttagtttttaatgagcataagaaagatctagtatgcataatgttaaaagtcatacatgaattgtatatctagaacatttcaacaagtatttagtaaattaagaaaaaaagaatctagcaaactaatatttaaaaatgcatattatataattaggtatattacgtaggaaataaccatcgttcgacttcgttcattggcgtggtttgacaactagagacgcaactagcaaggttaaaactgtaattccatatctgacgaatatgatttgttgatagaagggtgagatcgtaatttcagatttataatataaaaaaaaacaattttctaattgggtcgactattgagcacaaatgctataaactcgtcgccgttgcttcaagctcctaaaacgtgtccaagtatcttttgcatcttcaaagcaaaagaaaaacatcaattttttccaaatttttatcattttctcaatcgtcagtactcagtatttagagtcaaaaatctcgtcgaagaatttcttttggaggaagcgttatttttgctaaaggtactaattcaacttatttttcgttttaaagtttttgttgtgttgttactgtttatctttgaagtgaacttggaatgtttctggttttgagtcaaatctttggtatcaagttatcttctattttctcagagatttttgttctgtccaatggaatattctagtaattattacagattttacgaaggaattcttcaaatcgtgatatgcgtcttcatcgttctatatctttcttcatcgtcccccgatggttcttttatattcttagcattcttcgagattcgaatcttaagttgatcctgttctgttttataatctgtatttaatataattttgaatatttcaaaggatgagttttattttcttgcatgatttcaacaaatattatcaagatgaacttggatcaggtcatgagtaaactgtttaaggatttgatgaattttcaagctctgttattttttttgtttaaagaatattccttaaatataccaatttagtggtcataactcataactcatataaaggtaaagaatatctagagtaaaaataaataaattaaggtaataaaatctgagttatttaactaatcaaaacacttcaaatagtttctcttgagagttcataaaagagacacaagtacaaaatcacgatctgtcactcattccgacacgtttctagagattcctcactagatgtaacctttatgtaacgccaagagttaaaaaagtaaaattctatatgaaatattcgaatatactcttttttgatactttttttttatctaatatttatttctccaatctttaggtcaaacaaaacattggatttcgagaactgaagaacaagttttgatgggttctctaatgcaatctgaaccagag

SEQ ID NO: 2604 - DNA, 2000 bp, Arabidopsis thaliana
ctagagttcccaatactacagagaatttacatgtaacaaaaatcgtacatggtcgcatatttacatgtaatagtggaattactaagggaaaatgaaaatgtcgaacctgataggttaagttttttctaagtatagcattggcacgcgtccagaaactggctgggccagaatctgccattgatatgaaagctttggtagctttcccttctttgttcttctcttttaatttttaaccatcgccaaaatacttttctttaacaataataatttagtttgatgttcaaatattttcttaggttttttatttcatttgaaaaaataaataaacattggaacttcattatatatttacaagaaactgcgaatgagtgatcctcacgaccctttcgatttgccaacatgcggatttaaaatatatattttgagagttactaataaaagatattattactattatattatagctaggtgttacgtgagcgcactatcgatataattcaaaaaatctaccaaatccttcctaagttcctatgtctatgtgatggttacttgaatgacaagtaatgtacggtccaacaaaaataatagaaaatatatgatatagttggaattgcctttttagtagacgaattgcgcgaggctttgcggtttactaatttttatgatatacttttagcttaatatcatcaacttgttgaagactcaaaagtgttttttgagtaaattttcttatttaaaggacaaacaacagaagcaaatttattctcttaagaaaatagtgaaaaaaagcctggaaaaatggttcaatgctctcttttctcaagtatttgattttcatttaaaaatcttttatttatgtttggccagttttgatggtatcatgcatgatgtcacaaccatactaactctggaattatctcttcaattttagccatggttatctgttattgataacaagaaaatcagatgatccaatagttcaatttttttattttagaattacagatcaaattttaaattttcacactgcaattttaactatgaacatagtagatcataaaccttacaaaggttcatttttttattttactttttttttttgattatacgcctccatattatgtgttttatagcaatttattgtttatacaaatcttatagaaaaacagaaacaaaataaattatagaaaaagaaaaacacaagaaattaatcatttatatgtagatgaacgtgtttattttgtccacaaaaatgtcttcaattttatattttgtcttttttgataaagattattatttttgatgaatgattttttataacatatttttgtcggccatatatatataacatttttttttttcttactaagaccataaatacaacatttgtttgctaattttagtacacagaaaagtacacattaagaattggatctcttgtttgacaaaatatactgaacaacattctttgacattcaaattaaaaatgattattaagtttgaacatggctagcttgttggactgttccaattatatcaatcaaatgtcacacttcatcattttcctatgtgaaatctacgaagccaaattttaaactaatgttgaatatcaaacgattacttcgtctaacttagaaaatagctcaaaagatctacaatataataattttaattatgtttttcaactctaataataacataatagtaatgattgcttacagtcaaagcctcaaagtaataccttttcctggtacagaagtaaatacatttattactacacggtttttgtccagaagttacgtttttccaggtagtttcgcaggcaaaatacgagaggcaaattcgtaattactcacaactccagagtcataaatataaaaaaaaaatcttacgcctctcttaaatcgtcccctccaatcaaaatcagatcacagtaagattcccaaaattcgaaaaaaaagcttcccagagagaagagaaaaaacttctctgaggcggcc

SEQ ID NO: 2605 - DNA, 2000 bp, Arabidopsis thaliana
gttggctcttcgcctgcaagtttgcgaattagtctgaggtcttgtattagtttgtttgtggatgatgcatgtaaccacaatttttttatttaaacgtggctatatttaattgtggataaaccactgaatatgaaattttatttcatctaccattcagatcctaaatgtatatcttaccatttaattcatatagggtttacgatttaaaatttagaatttcgaaaatagtatctatattaaaagatagtaattaggtctttttttcattgaattttacttaaacattggtaaaatttcatatgccatcgaaaaaagaaaatatcactgaaaactatgttagctgccggagacaacatttctaaaaagaaagacaatttttaaaaaagactacaaaatactctgttgttcctttttgtttgattgtttagaaaaaaaatttgtttttaagaaattaattttttaagttttccatgcaatatttattggttaatattggtgaattgtaattttcaagaaaaatagttagttatcattggtttagagttataaaaaattgtaaaacactaaaaataatacatttataatcaaaatttaatatgttttcttaatatatgtgtttttctaaacaatataaaaaaaggaacagagggagtataaatcaaaactgttaaaccaaattttttaccaattaaatcttaattatatcaattggttcttctccgaaataagaaattgtcttgatgtctatgaaaatcacaaatttcactaaaaatttatggaggattcctaattaactttagaccaggaatttttcaaaaaataaatttaaagatgacattatcatgaacacattcaaactgaaatcaaaccaaagtaaatttattttccctgtaatggaccatagagtataaagtatttaaaactgctacttattaaatcaaagacttttgtgttttttattgtgtgcaaagactttttatgtttgaaaactgaaataagactgctagtaaaaatataaactgaaataagaatttttcttaggacatcataacatttttgcttcttgtccaagtaactgccacattggaaaaaaatgtttagatttgaacaaatctttttaaaatggtcaaaaaattatcatagtcaaccaaattacccgacacttttacgtgagacattaaaatagactagtttaatcgattatgttcacacgtgattacgtctgagatgacgtatgaatcatctttatacaaatacaaatatacagtaaacaaataattgaaactcacctcttccactagtcgaagaatctattggtcgtggcatcactctccttcgcagcttcctaccaaatttacattgaaaatattctccattgtcactttctcgatttcgtaaaattacctttttgttatttgaccaaaagaataaccccaaaaaaacaatactaatatattcgagaaaaataactaattaaaggtatacttaacgagaaattaaagcgtgtgcacaagggtattactgtaatttcacattccgtatctgatctctgttcttctttcctccgcctgctataaaccaaaaggcggtgactcgatttgttccttctaagttcaaaaattgggtttccattaggattcaatttttactaaccctaaaaaacagaatctaatacacagagaaaagcgaaggttgttaccttcatcaatggcggatcctggtcctgccagtttctcaacgagagccaatgccttgcttaggaaaaacttaacctatcaggtactttttccgttttcttttcctctacgcaatccaattatacacatacaaattttcgtttaatgtgagtaagattctgttctgggattttcgtttaatagatcagtttccacaacaaaattagtggctgatttattgagtagattctgttctaattatgtctttgtgtaaattgtgtgttggtgtagaaacggaatctatggagcaatatacggctaatc

SEQ ID NO: 2606 - DNA, 2000 bp, Arabidopsis thaliana
ggttcttagactggcgagaaactgagagagatcggtggaggaaaaagggatgaaatatatagaagttggattttgcttcaattagggttttgatttgatgatttttttttactgaaacagaaactgaacggtgtttctaactgtgaattaggatggtgttaagatggcaaatattatatgtaaaaactctagcgtaaatatccaatgagatagctagttagatattgttttggcaaatgctaggtgtttttttggtatcatttcccctaagcatgtgtgtgtttaggtttttgattaaaactagcaaattctgtggactgcaatactcatcatatatgccaaacttcgaaatcacatcaataataacctcaataaatgtgaagtaactaaagtggaccctttgcctcttgtctttacatatgtaatcatccatttatgaacggaatcttatgaaatttatgaaccgataagtaattaattatttattttaatttatagtcttttttctaccccattggtaattttggaaaccaaatatccaaagcaacctctatcgctttacccccacccccatgcaggtatacgtacaaatgtgcaatttggtcggtcaactgggtcttagtcagtagccaaatgtctccaacattaaattgtaagagaagatggcaatatgcattcatattgtaacaaacgtatatgtcctctagacgggcgtgatctacctttaagattagttcaaaagcataaagtcgactgatagcacaaaatgatgtcttgccaaatgtgtatttcgggtagttcgatgtttttgggatcggcaaaagttatttgagaagacattcatatatatatatatttttgatttacgggagtagggtaaacatagaacaatacactttatagatatttatatatacaagagaaatgtgtttttaattaggattagctgggaaaaagagaggctggctctagatcttttatacagacacctaccgacttataattattatcactgcacatgcatgtggatcatatatattaaaagtaaattacatgcataacttacattaaaactaattattcattattcttgtttagtttttgatacttataaaattttaaattctttatccataaaactagaatttttttagaaatataccatttttactatgtgtatatatatatatatatatatatatattttaaaattgaccatatgtgttgtccattttcaattatacatatttcaaaaataatatatttaatgtctgtgacggcttatagtggttgaataatcattcatatttataaaatcttataattcatttagaaaatcttgtatttaaattttttttttataaaaaatcttatatatcgttatacataattgaaaatatacaatatatgcggttatttaaaaaacatattacttggatatttttgaaattcccccataaaagaagggattttttttgaaatagctacaaagaacataaattagaaagtatgttgactttattcgtaaattataaatgctagtagattttagagagaaaaaaaaaacgaaacctagtttttcttttacgcaaccgaaacctaaaattattaaattgataggtttgacatatataatataataattcgatcgaaaaatttgactacagaaatctgaaatcataaacttggtgtaatgtaaacatacatatctcattaaacaaaaaactaatatataaaataattgacttttgaaacaatatattgacttactagtgtaaaaatgggcctacctaaatccagctaactcagcccacacattaaaaagaaacgttaaagggaaagtaataaatgaaaatgagtcactcagagacagatgtctctatctttcacagccaaattcacaccattctttattttcatttttccccctttgcccagattccgacaaaatccactcgtttgattccaccactatatataattgagcggagaagcttgac

SEQ ID NO: 2607 - DNA, 660 bp, Arabidopsis thaliana
tgtttctgctgtgatcattctctgtgaaggacttaacttgttattgttctcatctttgactgttgaattgtttatttctttgtgttgtttgttttgatttgaatcgtattatgtgtatatatctgtaggctatgccaatgaatgtctgtagtgatcaacttttgatcaccaccaaccttgcacaccaaataggaaaataaaacaatattgttacaattatttgtcttgatattagcattattagtcacatttgttttgcaaatcatctaccttttttttttggtctatatcttattcttcttagttcttacctaccagtcttctccggcggcattaacgacaccgttttatcgagctcagccaccactagttaggtaacgatatatattcttaaaaacgtttagaaaatttctatgtatgtttcacacgaacaaaaagaaaatatttttcagacatcaacggtcattatggacgacgactgttaaacaaaatcgtttaaaattcttgttgcgtaatttgaccattttattttattttataccaaaaattgaagatattatatatatgttttaattcgatcgcaaataaatctgaaaattaaaacacaaaacgttactcttctctctcattctctttcgcttctcgatagcttctcaaatc

SEQ ID NO: 2608 - DNA, 2000 bp, Arabidopsis thaliana
tgctaaagtctacttttggttggatctgtggtcggaagatcttgacgtgatcacttctataattgaggattgtgtgttgctgctactctcctctcacgataactcacgtggcctttttcttgtttttctttcttcatattttcacaaaacaaaatagtcagagatcttgagagattttttcagaagcatattgggcccaaatgtggacaatttcatgtggttgaattgttaaatttcagatagattagacaactaatcttgttgacgtgcatgcggtgaggatattaagtcgctatacgtcatatacgtgtatacttaaaatctcgtttgatatttctttcttttgtttttatcttcaacgacaattattgcctcaggcatgtcagcagaaaacgacaccgttcatattcgatctcgttattaatatgtttttgaagcaaaatatcattattagctatggagtttctgcagtagcctaaccggaagtctcaaaaagataacgtttatgccggttataattaaatccgataaggcgataaataagtgaacccgtaaagtctaaaattttcacatatatatgaacaaagaaatagtctatagatctccatgcattcttgtacaaacatatttaattttttattttattttctttatataagagttggtgtatgaaactttacattttgtaaatactaacattacatcataatgtcagaaccaataattctagtggaatgatataatctccactttaaattcttatgtctttatccaaagagatcatgaggaacttgagcaaaggaagagggcaccgtttagtagtataggtgaataacgtggcggacacgaggctggtctcattttcaaataaagagagatagagagaaaatggaaggaaaaaaaagctattggcgatgttgatatttgttcgtcttttagtggagacgaccaagagattttgaaaggtcgtcgaggagttagtttattatcttacaattattatggatttcttctgactaaagttttagtgcaatagttttctgagttattatatatttttcgaaattcatccaaaggctaaaactttgtaaggtattctgagtctattacgctagaaatagacacgcttacgtttttaagtcattttaatctgatatatatatatatatatatatactacaattttataaccaattatctttgtttcagacaatttatataaattcatataaactatcagaaataaagagacaattggctgtaaaattgtattattttgcatctatgaaatttttatttctctttatcaaaattgaagacgagttgaaattctatttcttttttaaaaaaatttatatatgggagtgtcaaaaaataattttcctttgtaagagaatattcgtatttggacgagtcttgatttgtgttttccgttagcgttccacattagttgtaaagagcgagaaagatttaagtgataattaaaaagacaagatatgcattttgaatatactctagatattaatcttaagcatttttcatattggttatattttatggtcgaattttgacatccgaaaaatacatcccttattcttcaatttatattgaatacttaagtttttgatagtaaatatgtataaataaattttaaacaattgtcaaaaagacattataacttatacggttatagttgttaaaaaaaaaacttatacggttataccaatagataaactgacattttagatttgagttttttttttttttactttccatgtagatagcgtggaataatacctcatttatatgtatcgttagttgaaataattgacaaaaggaaactattcgtttgctgttctagataaaagcctttaattgagaaaaagaaaatgcctccagctttgacccgttttgcctataaaaggattctctaagatatggactttcctcatcttctcgggtaaacagaatcaactagttttgtttttcctctttcaaaa

SEQ ID NO: 2609 - DNA, 2000 bp, Arabidopsis thaliana
cggtaatccgtttataatttgactaattagtatgtaactaattcgacataaaatacggaaaaagataaattaaaaaataagttgtgaaaccgttcgatgaaggttgggaagaaggtgcaaatgacgtttagtgcgttactaacgtaagagacagttacacacaatttcaaaaacagttccaaaaatttgacacgtggcagtttgcttaatggacgacagttagttgtttgttgaggattacagcctggattttcgtcaatcaaaaactatatattataaataaatatgatttcattcacattccaattggcctaacactcttttgtcgtgttgtccatgtcagcaaattttatttttatttttccgaccacttacttttatcttgtgtggccgtttctttgtaacaagtttatgaaacagaatattaatcgtatctaatcatataaatgtagtttcccgtattgtgtaaatactatatgactttgatttggggcattcaaaaacgtaccattaacaaatagtcacagacaaaaaaaccatacaaaactgaaccacatttctataaacgatacaaatatttttatcccaaatttgtagcactaggcagtttgaacctttttcagttagaaagataaaccaaaaggaagtaaaaaatattaatttcatcgctcaaaactgttacaattactgtttaaccagtcataaattagttaatgtttttttttaaaaatgtgtaatcaaaattttactttcaagagtgccagctctatacttgcaattactttaaaatttaaaaatatacaaattttaaattatgtgtattgtattctcgagaaaaaaaaaaaaagaaatctatgaataattaaaacgtagcataaccgttacaagtatagtttcaaattcaacgaatcaaaatacttttttaaaagtagctaatacttttctcgtttcaaattaaatgtcgttttgcatattaatttttgtgtcatattaaacgtcgttttatattctatgcagattttatgtataaactttattggtcaaaagcgttacgaatatcgtttcaagttcaacgaatcaaaacatattttataaaaacatctaatacgttttccgtttcaaattagatgtcgttttgcattttaatttttgtgtcagtctaatgtcgttttatattttctacacatttatattttcaaaaatttcagttttatttttattgtttaaatatatcatccaatttgaaaataatacaatacaataacaaaaataacatttaaattaaacaaaaatatttttagaacactgtgatcaaattttatcctccaatatttcccgacccataaactttaaaccttatgtaacttcaaaaaaaaattcaaattagtcgttttgtattctacaaaataaaataaaaggaaaaaagtttcagagaaaagggtaaatttgcataacaaggaatacaggctggcgtgtccagtcaaaaaagtcagaaatctgcataaaaaactgtctttacccaaactgccaaacctaaccgttatcgtctcagatattattattatttttcaaataaacattcaaaacagctttctaatttttcacctcagattgtgcgaataatatcagagctctttccttgtaggtttccgtgattttgtcgctttaacttcccttcttttcccactctcttctcacgcgcgcgtgcttcccctttctctctttcgactgtatcacacgctccataaactaataaacagacgcaccgagatcacgacacgtgtacacctacagctgtatcccaaaactttcaaaaccgcttgcgtggaagaagcggtgcatgactttctccaccgtctctaccggttaccggttattatccatcctcctctctatctctctctctgttataaataccttttttctcctctcttcagtttcctccaccttcttcttcttcttcttcttctctacaacaaacaaacaaaagatctgtttca

SEQ ID NO: 2610 - DNA, 2000 bp, Arabidopsis thaliana
atcatacgaattataaaaatacaacataatcattagtttcattcagtctcacgttgtattgcttttagtttacattaaattaattacactaaacctcaaattaaacatttgaatgaatcttttgcgcctgtaacgtaggctaagattgttttaaattgtcaaaaccgtgcaagtagcagttatttgttgtgtttaatctcacgtgagagaagttaacgtcgtttgaccaataaccattaacgaattgaattactgacgtgtcgtagtggaacttgaaaaaaaaaaaaaaatagtgatataatgacgtttttacccttgaagtgaacatagagaaggcacagctttatttgtcgaggaagcatcgaaagagagtccccaccacaaatccaaatggcaatagcgttaattaaggaaggaacaaacctacttctttactatttacactatttatttctccattatttaatttattagtaagtattaattatttatctagctggaccaccagactcttttatgggtcccacctttacccaccacgaacatcttacgtcgacctccgattattattacatcacattttctctatacttctctcttgaaacctaaaaccaatagtagagaacaaaatagtttgaatttctgtgacatgttccaagttttattgcttctgttctgtgtatatacaagttaatacgaatatcaaagttatagtcttcagagatcgcaattgataaatttgttgttatctattgttaatagtggggtaatcatgtatattattatatggaccataatgttataaggcaatattaataccgtcggacctgagagtgtccataccatttaagtttgcttttttaaacgatatcagcagaataacttgaaacttataatttagggtcccgatcatttattggttttaattagtgtcatcgtttacatttccatataaatttttttgcattggttatagatttgtaattgataagaaaccggtatcaaactatcaactaaataaaatttgaactcgttagaaactgctgaaaataacaacttctattatgttgcgatgttttatgtcctagaacaatgtaaaatacagaattaaaaattgaaaaccctacttcgcttgaataaaaatcacaaaaaaaaattataaagaaaagtaaatagtctaacaaatggaaaaaaaaaacaaaacgctagattccaattaaaatccataatatgaaattatgattggttaacttaatattagtggccttaccaaacaaaaaaaaagatgacctgaaatgaaatctaatgcacattcaagagttggcaggattataaatgcatctgtatatgtataataatacaataccctgtcaatgtctattaaattgttccaattaatttctcctcccaaaaataacttatccaaataaacaactataatcaatgaagttagttagcctttattttcatgatgattgtgataataccaaaattcttatcttcataccaaagtacacaaaataattcacactctatagtctatagtataaatttggcaaaatttcaccgaattctcctattttctagcttcggctttgtctttttatatacacgtattaactatagtcaccaataaaaaattaattaagttaaactgattaggaaaaaacactagttaattgtgtaattagtagttttgttcaatgttgttaattaaaaagcgaacgtatcgtcgtttctctttttaactcattctctttggatccaaatctttcgctttggaattcgccattgacaaagtactcaattccaaaacaaagaataagcaaacaacaacaattttcacttccttcaaaaattataaaaatccagtttttatctttgcaagattcaaaagtttgaatttttacttgttttgatttctgggttttgtttgttttttgatttcggtaatgatacaattgagattttgatttcgtgtgatgttgagagattcttaa

SEQ ID NO: 2611 - DNA, 2000 bp, Arabidopsis thaliana
taacgcgcaaggaaacgcacgttttctgagtgcaagcttcggcatacgagagaggccatacattgacatgaatatacaaagcccacaacttatccatcccatcattaaagaaattttattttattttagtggtttaggtttttcaccttagacattccaaaattgatgataacttaaaattttcaaataagttaactgaactttgtgataccttgtaaagtgaaataacaaatctaaaagttttcgttttttttgtcaatgtgataacgatgttaaagcaaactactacactaacgcattcatattaaaatgtatgtaaaactccaactaatttgtcacaaatttacaagatatcgaggcttgataaggggtgaagcttgagaaaaacgaggcttgtaacagctttacataggcccgcttatggctccgtaatattgggcctaatgaacattttgggcttgtatttaggttaatttggatttcaatatacgtagtttgtatttgtttttggtgagtacattatattttgtatttgatataaaatataattagggtagtccaatgcgtttttcttaacaagtctaaacacatttgtttttttgtttttcctggcttacaagttaggtatactctcttttcattacctataataacaaagacatcatataaagcaaatggttaaatttgtttgtggtgtaacttatgagggggaaaaaaccaatagtgattaggaagacagcttgtttcgtgtggctctgcgaggatgatctagttgtatattaagatatcagaagttataaacaaaacaaagataatgaaagacatgaatgcatcaaattaacggtatatatagtgttggaatcaaattagtggtgaattatcgggtttgcatcaaactaatttggttattcttgagattaggaatgtgtgttcacctaaaagctagtaattgattactaaaatgtaatgcatgcaacaagaagagtcaatcgaattttatagagataagtcatataaaatgattaattatcgctagaggaagctgcgatgaaatttcttacagcttttgtcttttacccatctaatcatttaatctctgagcctacgccatcacacatatctaaaagcaccttcttcgaaattcccttggaggacaaaacatggacctcttttttgttcacttggattttctcggaaaatgacttgcatgtcttcttactatattttatgtatcccttcattctatactttttcgaaattctaatttaactctacatataatcccactcccaccagctaaagtttagacatgacaagtattttatcaaatgctccttcaattcaaactactgaatattgtttggataagtactttttggagacgtaagctatattttccaatccgaaatgaatgaaccaaatgtccatagttctgtttttttttcctcctaaagtgaatatattaagagacactaaattctagaaaatatgtttaaaatataataatcagtaattgtccaaaaaaatgtgaatacttaaatcaaaatcaggatacgattgtcacaagaaacaaactttcctagataatgtatattttatattattatcatattatgtatgcacttaagacatctccatccatgagaaacctacaaagtttttcaaacaaaaaaaatattaatattatattataatttgattatttttattaaaaaagtatttttgttaaaaaattaaaccaatagtaagatgagaattgtcatgatgggttgtacaaagtatctcagagtatctcagagtttctcacttgagaaactttctacactctctctccttcatttttattatttttatttttttaattgtgagaaattcttatgagatacccacaatagagatggtcttataaatttatcaacatggtgaatctctcatgttatatatagaggtgatttaaaggctaaatagaataacacactacagcatataaactcaatgat

SEQ ID NO: 2612 - DNA, 2000 bp, Arabidopsis thaliana
tttacaactacataagttttggagtcacgtgttatatgatttatagacatttgaattattggctaatattggcccagtcttggtctctccgtgataatggatattctcttttgattccatgtcccttgtcaaatctctaacaactacactctgatgatttggaacaagctggaaacaaaaaaaaagttcttacataacaaccctaaatgattgatcagtaaatgttatattctaacttcagatttagttgtatcatgtataaaggaaaaaaaaactaatcatataggattgttaattaaccaaagacatcaatatatgactattaatccaatgcaataagattaattatatagtttttaaatatttaaattaatttaattaacttgaaaagctttcaaattattattagtgtacttgaatgagcgaaattggccaaaatgcaaacagccgcttatcgcctttatgtcttggtgctaaaactgctgccgcttcgaaaagccaaagccaaagcgttaattataaattttttggtacaacaaaagtgataacgagtgatgattctactgctaccacactttgagcccatcacacaagtttacattggaacactcctcttcaagtacacgtgtagtgtacaacacaattaaccttctgtttttcttgtcctatctttcaataaatagccatatcatacctacctaaaacgtaacccactaattttcatcaattaatgtcgagcaaatactatatcttaagtttgaaattatcaaaccaagcagaacaacacatgtagttataatcatataattatctttaaaacatttacaagttcattagaatcttcgtacagatacagccatatgcaactaatgaaagtctcaaactcataaatcaaagaaagcattaaactcaatgttcttaagttaaatatgtcaaatcatcacatataattccgattaataattagtcagttaagctgtttaagcatactctaagcattaataattagtcagttaagatatatcattgatccattctttcaagttaatgtcctttacatacatccaaattcatttgcacgaaaagaattaacatagagatatatagttacataaacacatacactgaccaccatagatttatttgaaccttatatataacaaaagatcgaaatgttaccggcacatatcggtgagaaatgaaatgcaatttattgttatagaatggcaagttaaagcacaaaagagtatatattaaagatttttttatacacgtgtcagtgaggattgcacatcacatgttaaatcacatatgtttaagcaaaatggaattctatatttgcctatagattagacgtcaaaaatagacgacaactttctaataaaccaaaaaatgtcgctcaaaatgatatattatatttattatgtattgtactagctagagtacgaaatcaactaagatcacaaacggatagtcggataccaatcaaaagtgttcaattctgactcttgaaaaactttatttatcttcattttgaattgaatacaattatctaactgtaactttttttcttactcgtcaatctatagaatcaagttaccctttctagagaatcaactaactagtagtctagtaccttcctcaatacaatagtcgtacgaacgcccatttatctaggtaccctcaaattttgtgtcgtctcacttattagttatctattactagttgattactcaatacaaatttccctaaatagagaggatatgagagttgcgtatttaaacaaacctaccaaaatatgattttcgtcaaaccaaagcaaaaacctaccaaaagaaattatttcttaaatacagaaaaaaacaaaaaggaaacttccgggaagctgcgtacatagatggacccaacataaaccaaaacaataacacgtagtcgccacctatatataaaaaacctgacgcaacacaaacagatgtagtagaatcaaaacgtcttaaaac

SEQ ID NO: 2613 - DNA, 2000 bp, Arabidopsis thaliana
gacctgtttctgcggctgcgattcggagccgcgtcaaatatcgcctgtttatattccgggtcaacaaccgtctctccttatttgaccagagtccttctgtttttttttgttttttttttgtggataaataaacagaataaattagggctcgaaatacttatgatatgtattccaaaagacatagctttgatcacttaaacaagccacgcctagctgagaaagaaaaggctttggctggtttataagaaattaataataactttctggcctttaatttagataaatagaacatttaatttgtaattatatattttaatcatgcaaataataaattatctcaaccaacattataattttatatatctttgaggtcattatttttgtaaagaaaaacgctagaattgaaatatttattaatttagacgaatataagttggacaatttaatccatgtaagattaagattttgtatgccatcaatctaacaacttgtctagacaactaatgtttaacaataatttttgatactgcaaaatttgtttatgtgaagttacagaacttgtaggagttagattgttaacgttacaatactatatatagttgattcacgtgtttataggcaacatatcaaattaacatgtttgctttgcagttaaaaattgttcaagaaataagccaaaattcatcgacaaatttggagctaggggagattcggtaggtacaaattaaacaaaacttattcaagtaattaacaagtaaaataaataatcgtttaccacgtgcccatccagctgtgattccacttcaacttctgactaaggaacggaaaggcattccaagtttcctcaattaggctcaacttttcagagatgaaaagaattagtatgtgcaaaataacgtatagattcacaggatgatacaaaatctttcaatgacatggttagtcaacgtaaacaaatttgttttggaagggtccatagagatttttactaaagcaacgtggagttttcatgtgtttgcaaccgttaccaaaacccaacagttagttaacaactttattataatgaataaaaataacacacgagaattaatgacatagtgtcaaaaagaagaagaacaagcatgatattttatgccgactaaagtattgtgaccatttgttgttgctgaatcgtcatctccaactcctaacgttaggcacgttcttgaaaaatatcccataacgcaaattctagattaagcccggtaaagtaaacttgaaaaaattataatatacaggttctttatttaaaggaaaatgtgacatggcagtgaggagaaactaacccatcttcctaatggacaaatgtcagcagagccatacatttataaagtattttaatgattaaggggacgatgatgatgtcatcagtagttgagttgggggtagaataggtaattcaagaaatatgtgattgaaagtggaaacgtaagctttctggcttttgtgtcctctctgagtctcagtgtcgggacaagacatgcatcagcatcacacatccgtgaatcggtgctttatcctcttctatcttttttaacttcacgactagaaaattgatttttaaattttgttttacacaaactgatattaactacaaattaagaataacatagaaattaagaataagtttctagaaatgtacatcaagtattggccgttaagtttcaacatatttataccatctggcctcaattacaatcataattcataaataatcttctgacacttaataagataacttttcaccgagtgatatattcctgaaagtaaattcaacgctttagaataatgttcttatatatttaattatttaccaaatacacactatgcttcaaactccctataaaaagaagaaaccaccttatagcacttctcctcattcctcacttccaaccgccaaagaaaaaaatcaaaaactccaacaaaaaaaacctcccaaaccctacccgagcagtcgccag

SEQ ID NO: 2614 - DNA, 2000 bp, Arabidopsis thaliana
tatagatatatgtatttttcaagtatacgatataccaaattagttacgacaaaatgcgaatgagttggtagtaatgagtaaacctcaaaatactgttttttttttgtcaacaaacttatgttattatacttggatgacttaaataagctaaaccgaaaaacattgtttaacctcaaaatacttatttaattagttggtagcatcgttacatattataattacgactacgagttagattctcaaataatattcccaaatggatatatttacatcgattgatgcatgcttatttgtagtgatcgtcccttatgtatattatgtttttattttattttttgaacatagtataatattggtgggagaagacaaaaataagggagctctgccatctaatacgggaatcaagatatctgttttacatcaaacaaagactagtgtgatgaaatgaaagttaagttaacaacaataaaaaacaaaattagctgaaaatgtaatcaaatgagagatccgaatccgatctccgctaagtaaagcgtagtgggagcgtaaattcgcgtgagtctgattctgaatcgtatcatacataccaaatcaaacattaacgtttatgatcttacttacccatatcttatttcttaatttgtttggttgtttgtaaatgagaaatacactatgataagagaagaagatctaaatgaggcatagatctctagataccaaaacagataacgccaccaactaacatccaattaaggatatataacacggcatctccctctttagtaagcttacgaccaaagtagtgtgactagtgcggaacatttttgcagttaatactacttagcctcaattcttaattatgaccgtatgggacagggtaggtaggcacaaagcggatattgtttttaatatatttgcatcgaatttggtttgttggatcgataatcttttaatatgtatccgcttttgaactagtctattctccgattgtagaatgaaacatctatccgaaattctaatttgtagtattagtgatttgttttgtttttaacagtattttaatatttgtttaaatttgtaaacttatggttatccagactttttgaatcattcaaaagtggaaaacagatcgaatggaagtatagaacactacaatatattttcatatttttcttagccgtaagccactaatattggatggacataaacataagagaccccacaatatttatcagattaagcctttattcacattacaatgtttcgttctcaacttctcatcataacgtgaataaaagtaggagttagaattagaacacaacatctctaacaaatctcttatctgcattgctttggagagacatgtttgtacaagaagaaaaatgtttatggtcagtccgtttttttcatattgattaccttttaaatcccatttggtattaaaaaaaacccacttctaagatatgtttcgctttttatggtaacaagacatataacttttcaaagttactgaatggaattcttgacagaagttgttaggacactaaataatggaaaatcaaaatcaagggttacattagagacacgcgtacatcaattatttcttaaaatgcaacttggtgtacgacttttaattcttgagtcctcaaacccgagcattactccaccctttcttttcgcaataatcaagatcctaatttaattccctataagtattttttctaataactatgaaaataaagaaaaataagcgttgaagtcataagtttgaacaaagacgcgtgacctggaatcgtgctcaagaaaaaatatcacaactaatgaaaacgcaaggtcatgagtattgaccttgaccgggcaagagcctagagccaagaggtgatgtgtacttaaatgtgatagatgctcccttcttcttctctcatcactaacaaattaagagaagctgatcatcagattgaatcaaagacagactttgacttttctttgtgatcgaagat

SEQ ID NO: 2615 - DNA, 725 bp, Arabidopsis thaliana
ctctctgtatacaacaacacagaatttctctgaggaagaagaagaagaagaagaagaagattgattgaaatgaatgagttagaaaaaattctgatgtgacaataaaaaggaaaaaggggaataatgacgtcagcaaaatggggacacgtgaaattatttttaaaattatttgggacaatcgacacagttgctctatcgctatttgtttacgtggggctgttctctctctatttatataataatgagatacggttttttcagcaaccagattttaaagttatctgattaaatctaataataggatagagatagagtcacagagacatgttgttgactttatgacattattttattctttgcttatccactcagtcatcatttatctcaccagtcagacataatgtgttgttgttgtgaatttgtagatgcttccgactatacctgattacctggccattcagaatcggtttggatcaaaaaatttgggttttcggtttagaaatcgaaacaaaccgaattagttgaaacgaaccgaatagaaattcggccaatttggttttgcattggcgtgtaccttgtgactacatgtgtgtgtgttagatgagatctatccacccatttttcaaatcatttttgtcgttaagctatcaagattctgatattttcctgctcacttttgattcccaaaacaaaaaactttcttcaattattctattcatcttctc

SEQ ID NO: 2616 - DNA, 1596 bp, Arabidopsis thaliana
aattagggttttatcagattaaagagatttactgatttcaatccatttcatgtaactgatgaatccatgtgttcttaatcataacagtttgagcaatttcttttgagtcatgatcgtttatttgtcatcaatttttggaaaagtctgctatattgaatctgttattgtagttcaatcgcataacagaatcattaatctaatcaatattcatacatgatttgttacaccgtttttcgtattttgtataaagtttcgagctgtattattaaggtggaagaagagattaggaatccgataagtacttaaattgttttaagttatgattcgattatacgtatctcttgaaaagaagcatgttagagcaaaatatcaaacttgacaattacaagattgctttatagataaagcagattagctaaataagtatagggagacgataacatgtggtgatacaaagatgtgtcagattgattgtttaacatcatttagttgagaaaactttggacgacgactgacttcatcatatgagaaaacaccaagaaaatgtactactagtctctaatggagagacttggttatagaagttcattgtttaatttgaatatttactccaattcaggaaaatatcaaaaccagaaaattacatgaaaattactatagatggtagctttgcaatgattattgtccggttggatagtttcattgacatttaggattcagattatctcttttatcattatcagtttgttaaggcaagagttttctaatacatgcttaagtcctaatcatcagatatttcttcttcaaaccttttttgttttgttttgataatttgccccattttgtactctaggtttttccacaaagatcccaaacagagattaaaagatgacaatggcatggacctttcaatgctttgtttttttgttaaattagatataaacctttccaaacagtaaattatcaaattcattaacaagtatctatatctctctagtagaggtagaccacaacttaaaaatctcctcaagtcatggtgggtctaacttgtaggacttatatgggccaaattgtataactatatcatgttaagctgaaactgaaagtaattggttccttttaaaagcttagccaaaaaaacttcaaaatgtctgagtcaaatgtaggttgatttctctgcaatttccatgaaagatagatagataaactcttaccaaagtttctgcatatcaaaagttgtcaatttatgctcaagtctaaaccattccgattacataggatcacatgctttgattcgcattttcttctactatatatttacatatttttttgtcctctacacacaatgattaaaaaatgagaatggacctacctttcacagcatttctttattattattttataaaaccagtacaattttactaaattatgatgttaaagtaagagactttgaagaagacgacttagcaaagaccaaaaccaagaaattacataggaacaagccaagaagatacatagataatttctttttgcttgtaatatatttacaacttcataaacatcatcgttctgcaactctctactcgatatccaatc

SEQ ID NO: 2617 - DNA, 2000 bp, Arabidopsis thaliana
catttaatctttagcaaaaaaacacatttaagtaatttaaccaaaacatgatctaatatgaaaccgacggaacatagactagacaaaccatagttaactcttaatctgtctaaagactttttttttttttttggtaaggcttaatctgtctaaagataaagcatacaaaactggtcattgtttcctttagaatccaagacagcttgattgatattaaagatctacacaaactttattgcctctctgtttcatttcatcttttcttttcttttctcccgagagaaagggagaagccaccaccttagaatcttaaacgcttttctctaattctcttttgcctttccaagtttagttttcatttaaatctcacagttttaggtattattgatgtatatacattccctggatccgggcatatgtatggatcacttttgtgaatgattctcctttcacaatgtgatgctttgctttggtttcaaataagatgaagctttttccgcttggatatctttttctcgtatggaaaaagagcggttactttgaaaaatattcatatatgacttgtaccaaaacgagttgtttatgataatattaatacatgtagttgatcttaaaaaagcttttctatatatatgtatatgcatgcagcaaagtttttctatatacttagctcactacatctataatcgattcttaagaacaaatatttgttggtcaatttctaaatgacaacaatttatgattatatgaatcataccacttgaaagaaaacacccatgtgtaaacacaacgatatccacattaatatatttgcaaaataagatgaatgcatataatatgaatgcgtatagatgtccatcaattcatgcatggaatctaaagtttatcctcaaaagcaggaaggaagataaagttaagcatgattttagaaaagtaaataattaatttatttacaagaattgcagaaagtgggtgacccttttaaagcagaagagaaaaagagagggtaaaaaagctaaattctatctctctgcttttgggggggttttaagcttttaagagtcttgtgatgggcatttagtcattatagacctaaactttgatctcaacataatgcactttttatctttaaaaaagcgataaaaacacactaactttttctcctcttgtaaactttttaggttattaatttttttttttaaaacaagatagtactagttatttattagaaactaatgtaagcaacacatgaatccactataggttcaaatttaaatatactgagagcttactggcccaaatctatatctcaagaaggggtcatttcaagggcttaaatatcttatttcttctatgagctcactttcaagaatcttcaagatgaattagtatacttcaaaggcgtgttatgactgacgagtatatatatgcatgtctattttacaattcctagaaatttatttcaaaaacagtttgtaattagtacctcatatatgattaaaatctagatgatggagatgcatcaggcaaaaaaactagaatcctaatcataaaccctgaacagtggcgtgttagactaaaatgggccgttaaaatgttaataattatttgggcttttttgataatcgataaactcaaatctctgattgttataaaagtcaccaatttcgcattcgcatatagcacattcaacgtagatgctcgttttttttggtcagctaaaactaaagaaattttagacactccatgactccaaatagtaagtcgtgtcgtgtaccttcgctttcaatcccgatttgactattaatgatctttctaaccggaacctactcagcaactcttttccgattatgacacttcaactacccaataattagtaataatttacgagactaccccacttcagtttctgttcttatcttaaaacatcatatccataattacgacaaacgaaacgacgcagtattaaggttactctctctcaaactctcgtctcctaa

SEQ ID NO: 2618 - DNA, 2000 bp, Arabidopsis thaliana
aacgtaatacaaatctggctttacaaagcaataattcatgtttgtttgtctaatttaaatttccctgttttttttcccctctttctgtttcccatttgaaagtaaaagatcatttaagcacctaactcaattttattttattttaaacacctaatgtcatgctccttggctccttgtaattagttgatcgtttcaatttagaccagcaaaacattttagtatgttcgtaaatattgcgtacatgccatttcgtttgtcatgcaaacggtgtgtgtttctttacttagcttctagttggtgtatattgcgtcgcattaatatcggtttaccttcctcctgtctacgtaatgatatattctccaccacaaatttaaattcttattgaaatttcctaattttttaggtagctcaaggtctcaagtatactacgtaccctatttttttgaatatctatctatattataacaagagtttttctgagctagttaatgagatgacaatattctacataaataaatgaccctcgaaagtttcaagtactttaggatctgaccaaatcggggtaaaacattttgaaactaattacgttcacatctaccatcgatgattgacaagcttattgtcaccttttatgttaaagtgacatggtcttgacgttaatttgcatgttattctacatctatagtccaaagatagcaaaccaaagaaaaaaattgtcacagagggttcaatgttacttagatagaaatggttctttacaataataaatttatgttccattcttcatggaccgatggtatatatatgactatatatatgttacaagaaaaacaaaaacttatattttctaaatatgtcttcatccatgtcactagctcattgtgtatacatttacttgcttctttttgttctatttcatttcctctaacaaattattccttatattttgtgatgtactgaattattatgaaaaaaaacctttacacttgatagagaagcatatttggaaacgtatataatttgtttaattggagtcaccaaaattatacaaatcttgtaatatcattaacataatagcaaactaattaaatatatgttttgaggtcaaatgttcggtttagtgttgaaactgaaaaaaattattggttaataaaatttcaaataaaaggacaggtctttctcaccaaaacaaatttcaagtatagataagaaaaatataataagataaacaattcatgctggtttggttcgacttcaactagttagttgtataagaatatatttttttaatacatttttttagcaacttttgtttttgatacatataaacaaatattcacaataaaaccaaactacaaatagcaactaaaataattttttgaaaacgaaattagtggggacgaccttgaattgactgaactacattcctacgttccacaactactcccatttcattcccaaaccataatcaatcactcgtataaacatttttgtctccaaaaagtctcaccaaccgcaaaacgcttattagttattaccttctcaattcctcagccaccagccacgactaccttttcgatgcttgaggttgatatttgacggaacacacaaatttaaccaaaccaaaccaaaaccaaacgcgttttaaatctaaaaactaattgacaaactctttttgcgactcaaaccaaattcacgttttccattatccaccattagatcaccaatcttcatccaacggtcatcattaaactctcacccacccctcatacttcactttttttctccaaaaaatcaaaacttgtgttctctcttctctcttctcttgtccttacctaacaacaacactaacattgtccttcttatttaaacgtctcttctctcttcttcctcctcagaaaaccaaaaaccaccaacaattcaaactctctctttctcctttcaccaaacaatacaagagatctgatctcattcacctaaacacaacttcttgaaaacca

SEQ ID NO: 2619 - DNA, 2000 bp, Arabidopsis thaliana
ttaatagcatgtggagtctacaatttcataatcaaattttcctatgtaatagaatgcttgtgtcttgtggagtgaattcgtctcataacgaggtgcatcagtatgcaaatatatcaaattattcatcaaagtccaaagggaaaaaaatggcctccttcctcgccaatttacatgtactaacgatgaaaaaaataaatcatgaaaccctaaatttgcttattcttttccttttatatattgaacatgacttgtgtacttgttttcacgtgctcatggaaaacgatgtcaatatggcttcatgtttctatctcatcatttgaacgaacttgctactagctaaagataattcaaattcattgcttccaagccaagcaaaatcaaccttttacatacattgactacattgaagtaccctcatttgttgtcacattggatccttatagtctatcattgtgttggattattcgtaatagatgtaatcatattcttttacgttaacaacaactatgtatgaataaatttttactaaaacaaacggccatgagtaagatatccattatccaaatgcacagggatatgggtaaagcgagagcttttaatatctctacaaaaacattattataaaagcaccaaacaaaaagtaaagtaagtggagtaaatattcaaaataaatgattttggtatatgcttagaacaagataggaggagggttgtcttcatagggagtgtaaatgatactagtacattgataataaaagccataactactcatcttgtgttccttatttcaatcatcaatggcacattgctccataacccagacatcatcatttataagtataaatttttatatgaatatggtacatgtctgtgtatctcatcactaatttgatcacactttcatttaaatattacagaatagagagaggtaaaagtaaattatgtttggacccatcttatatgttcagatatatgttgacaatgaaatgtttttatttgcattgtcgaaaatgaaatttttgttctgttcttcaaaaagggaatcaaaaagcgaggtagctttatatctaaatcaatttctttaatctaaagatgttttctttgtcacttcccattatctttcgcacgacatatattaaaatcattatgaaacattttttagggatatttcattttcaatatgtaatcttctttaaaatattatgattattaatgtatatggttatatccaataaatttagtaaaaagaaaaggagtttgattcaatatcatcaatctctaattttcgtcaagttggagttgtaaaaatcttgaaattcataatatagaaatttcgtcaatattatgattatttaggttatttatctatgtcaagaaagcttgaatctttcttgttctgagattgcttacactaatttcccataaactctcaattaaacatccataccattttgaattttatttttaggttccaaagtctttggagttagtaagtagaaaatagaaagttatagaaatacattcataagtgtatagttcaatatagaaaaataaacgaaaatgtggaagcacaaagaagacaaatagaggaaaacacaaagaagtggtccacgcgtgccaacatgaagtgtatgtgcgggtggctgcgacgcgcatgcttcaatctctcacgtgtgaaaaatcccaaaaatgaaatttttttccaagagcatgacgagaaaacgcactctctaactatatattaatacaacaatccccaactctcgaaagcattttagtaggcaaagaaaagtttcgagctttttcttttggtttaacttcttcttcttctttgacacttgtacgttttgtacctgtcgtttatgttctttaaggaagcaaaacccaattgagagatttcattaccaaaaatacaaaggaccaaagcttcttgttttgttttgttttttttcgggtaaaaagtttagattttttcatagcttgagctctcatcgtaacca

SEQ ID NO: 2620 - DNA, 2000 bp, Arabidopsis thaliana
ggattacgtgtatattgatataaacgtataaataaatagtaggaaatagcgttaagtagtcacacaagaattttaatttgtaggatccagagcagcctatatagcgtgccgttgtgaaaagcccactagctttttctgcttgattgtgactttagccgcttttgctaactctttccagccgtttatttctttccataatccttacgtttcagtttcaaatttgggagataatatactcaaactaaatacctaaaggtcctggttcgaatctttagcatggtatttggcaaactctctcatgattggtcatttgttgcaatgttgcatgtttatgtctatgattctcacatgtgtttcctttgaaaatcagattttttttgttcttaactcggatagtacaacattcataatcttcaaatggtctttcaaatgatctggaactctttggatataagaaaatgctgacaatttgatcaaaattgttaaccataccggaccaaatttgtgctttttcatatattagcggaaccatgtatgaacttgtcttcttgtccagtgggccataaaactttttttataatctccatggacttctctttatttttggcccagtagggattcatatgcatccacttagacttagaaccatatgtgagtcaagagacagaaaaacttagatgatacactaaatcaaaataaaaatgattcaaggaattcttacacttgtggcaatatataaatgaagaactttggcaatgtataatatattacacttgtgacagttttcttaaataaataacaaaaacatagcattattttcataattcaaccaaaccatctatgtacagtaattcacttttaatctccagcataaaaacaaacagaaaacttaccttccttttaaaaaacttgaatgctttgtcttttttttcttcttctttattcctcgtgtttggttcatggctgaataattcagttatgtatcatttattccattaaaggtaattaaaatgaggttgtaatagtcatatacgcatacataatgataaataacataaaaaaagaatcaaccaacaaaattattcgatctggcaaaaaaggtcattaaaacatataataaatcccacacatgcccacagatcattcaacatcatatcccatcatggtttaatatataaaggagtcacaggtcattttatactctcgaacatgttggtcttgattcctctttctctataaattaaaacacttgttcacatctttctcgatatgcatatctacaatgttccattcttttatttctgccgatattaaaatgaaattttcaaggcttttgggtggtttattagagatgtgatcatgacaagaagaggaattgtatgaacacaaaaatggagaaattcttgaagctggcacaatcatttgcatttgtttggggattcatcttgctggcggctctcgtgtgttgctgcatcagcactaaacctaatcgcgaaaatgatgatgatgatactggttgtgccgcctgcgacggagggcatgccggattttagtcgatgatcctctgtttctttcacttttcttttttggtcctctggtagatttgtacaacatagaatcctcatggcttatctttttcataattacacaaagcattattttgtcttctcttttaatatagaccaagtttatatttctttacgtttgcatttcatgttctagtgattaggatattgctataaacatatacattgaatgaaaacgtcggtttattcagttatggttgcataaaatttggatttgggtttagatattttgtgtataaaaatttacaactgagtaaaaaaaaaaaaaaaaaaaaaaaaaagagtggcaacgaaacggagagagggaattaggcaaattagaagagagaagtcgtagaccatacaatttgcacacaaactatatctctccactgactccaatcatctccttcctccgctcccatctgcgtctca

SEQ ID NO: 2621 - DNA, 1015 bp, Arabidopsis thaliana
atcgtcgccggtgaaatagggaattgaagattagacaaaaggaaagagatagagaaagaagagagagggttgatttttaggttttggaggaagtagttgaccatgtatgtatcttctggtatagtcaccgtcaccgtgaaattcgccgaagctgagtttttgttttcagaattttttatattcgccagtgtgtctaattatatatttatgtgactgttctaatcattttttttgtttaggttttacattttttatgtatgatgtgaatggataattttcaagagtttgtcacgtttgtagcacatctttttatatgaatagttttttggatgttagtgtataaatataatttgtcatatcgtttagattaaacaaatataggcaaaagagtgattaacgtgttcttttgaaatagctaagagatactaacctatgatgattaagtttatgatacttaaactttttatcatcgagggcactctgcattgtgacgaagatgtgaagtagacctagaagatgacgcactgactttattgccactgctacaaagctaatcaactttgtaccaaatatacaaaacttcgacctctcacgatgttaaactaatggaattattagaacttaaaaaaatcggattagagattaaaaagaaatgaaattatttagagaggtagttagtaaaagtaaattcgatccagcgtggtgctgtgtcatttatttgactgggaattttcttcagacagtgaaagcaacataatcgatggatgatactatttaacaaaacaggtcgtcacacacgtgtgtataaataagtaaagcgcccactcctttctcatttcgtagcgcgcagagagagagagagagggacgatcttttctataactgaaacactactcgaggccaagttgctttagccgtaatcgtcgtcgtccctcttcccgatattatctcttctctgttcttcgatttcgaaaccctaacctcctctctttaattcgcgttttctggatcgaag

SEQ ID NO: 2622 - DNA, 699 bp, Arabidopsis thaliana
ccaagtccacgtcaacaccagtataatgttagagtttgcaaagatttgacattacttaagggctttattgaattagagatttagtttatttgtaaatgactttagatttggttcgactttatttagggtctaaagtttattgtataactgtttaatatttgtcaggacttaatgaagatgtaatgtttagactttggtgtattttgtacgacatgcatgatataataaaggaattatcataattaaattgaacttataaaaatatgacttgccttacttctcttttgaaatagaaattctaatgtaggtaaaatgtttgtgtttacataattacattacatcaacaaacgtaaaaaaatgtttgtgtcattaaatgtttatccacgtactcttcacaacgatcataagtcataattcagaaaattcctttaataaatgtgaactgaataagcttttgtatagtcatcaaataaaaagtcaactgtacaattaaaagtccgcaaacatctcgatcgtctaagagacgacttttctcgtaactttatgaagaatatacaatagtagtggcttgatcgcgtccacacatttacattgcgacttttcttgcatgccgtctcacgcactatatttaggcaaaacacaattgtcttcatttcaagactagttcttgttttctccatattcctcaacaacatcaaa

SEQ ID NO: 2623 - DNA, 1050 bp, Arabidopsis thaliana
acatctgtgatgtcttagacatgtgattagtaaaaaacaatctgtttgagtcacacccaacccaaactcttaagaagcgtctccttatttgtgataggtttctgaaaacttctcggctggtgagaaccatatgccacggaaacgcttggctgatgcatctaaaaggattcaagctttaccttcattataccaagaagtgagttttagttttagttttttgagagagaattaagaaagcaagaaagatatgtatctgaaagttttttcatattttgcagacaagggaagatggtatttatgcagggaagagaaggaagttggagaaagaaatgtgtaccattatacattaataatccttttattggactcgtcacaattttcgtctaccatatttatatttactgtactgtgtacatcagattatgttggatcacgttctcttctgttgtttcacttatcaactttacatgtttatcattgttctccaattgcttcgaataaattgtatgataacattctgtatttgtttaaattatatactactagagtactaggggtattttctttgatttcagacttttgtttatgatttgttacttgtttcacataagaataattggtcaaatttatttggtctctctttctcgcaaatcatatacaatatacaactctaatcttctccaccaaactctaatcttgttcatctttttttattcaaatagtttagaaagttcaaatatactaatctttatcaaagaataatctttagtcaaattttaataatgaaatcaaatatcttacaaaatggaaaaacaaaaatatgggtgtttgatttttacaaaacaaagatggaagagcaagtcagaagtcaaaatagctcgaagatgtaagtgacggcgcctgaatactcttggctggtagatttcacctacctcatttttttcatatatctcaaacgtggaatcgctgttactcagtttttatatataaaaataaacactcgctcttcttcaaccaaactcatttccaaaattccacaaagtttttcaa

SEQ ID NO: 2624 - DNA, 2000 bp, Arabidopsis thaliana
cccttgtttttcctaatatgacaaaattgatcaataaaaaagtagttacaattgttacaactttttattgcaacttttagttaaaatagttataatttttattgcaattaaaatagttacaatttttttattttggttatgtttttttatcgcatattttcgttaaactaccgcatagtttggtaaattttttgtaatgattcaaatatttaaatatataattataataatttagtacataaatactaggccagagcattcatttatattcggtttgcttctttcggttctaaactctgaagatccataagaaaccgaaaaagttatggttcaactcgattcggttctaattattttatccaaaatattttctaaaaggactgtatctaaatatcggaaactttttttgacaaaattataataaaccaaaatatcagaaaaattaacaaaaattaattagattagaggtaaaaaaaaaatgtattggacttagttttgtaaagggttgaccaaacatttttttgttctattcgggtatctaaaacagaaccagaatccttttttggtttggtttagtttggtttttcaatttcggtttttgttcctagctcaatatgcaaaatcaatattattttgtagtttaatatataaatacaaaaatttgtcgaaaatgagtttcagggtggagttcatatcctagttccacataatagtagagaacacgaaagaactttgacttatcaaactttacatcaacatataaatctaatatcatataatatactattaaaaattctataatttatttctagagtccatccacacacgtttctgatatttgttttttgtttgtaaaagaaaaaaggaaaaaagaaaagtactagacatctcttttccgtaaaatatatactaaaaatataaatattttattagcatttcattatcttacctgcatttcaactatggcaaaagaaaaaataacagatttgaaaagaaaaaaaaaaggaaaagcattcaacgttgatagtatgtaaactaattgatgctctaaattagcgttacatttgttatgtaaaataagaaagtcaaagaagcagagtaaagattaggtgatacttgcaaagttacctttcttttccaaatgtaagtaacgtctcaagtttatcaaactaatagtttatgctttacatattttcccaatctataaattttatttgtaaacagaaacaaatgccttcgaaactcttgtatggaaaaattaaatccaaaaagttagtatattattagagtaaacactcataacagaaagatctttttcatactccaatatggaaaattttagcatcaaaaataacatttttttgttgttgttgccaatatatcagcatttaaaaaaaaaataaccattcgcaagtatagaaataataaagtctcagtaaaagtgaatgcaactacaagtctctgggatggcaaaattgttagcaataattctgtgtttgtagtacataaaataaaattgattaattgctcgttcttcttttattaataatccgtgttttgttttgtcctttctcttcaatctgggtttggtggggaggttttaagtcaagcgtgcgatatatatatcatcaaaacagacatcctctgttcttgcctcttcttcttcttcttcttcttcatcttcttctatatattggtgtttcatttgttctgctttaaaagtacacaaagattcatcttttttcggtcctctgattgggcaaaagactagctcggtcgtgttttgaacaagagatacatgttttgaaaaattcctcgcaaaagaagagaaagaaagactcaaacttttgtttgaatttgataccattttttatatatataccaaaagtccaagactggtttcatttttgggtttggtctgaaacctctcttcgtgttgtttgttcatggtatgtcttaattagggtaaaaaaatacttgattgttttctctcaatcatc

SEQ ID NO: 2625 - DNA, 1620 bp, Arabidopsis thaliana
gtcaaatcaaagatagaaatcactttaaagtttttgtttgtcactgttatgttggagtagaaagcgataatggagagaggtattaaagaagggttcccgttgaaggccttttagtgctcttcatgattttgccaaatagctgaaatgttgattcgtctatggtttgtaattgtattgacgccaatatcttcccaaatcatcactcattataattttaacgatctgatgtttaaaaggttctcagttatatatatctgtataattgatcagtagaacatattatttaacggattttatggagatactccggtaacttattaaacagatctcatgaaagtaatcagtgtcaagaaatgtcaagactgtatacatatgttaatatgctaaaccacaacgactatcacttcccaaaacatggttatgatgttgatatgaccctccaaatccacaagtgtgtatgtgtatcaacgtcaaagtattgaatataaagagttgtgagtactaaaaataaaagcaaactaaaaatatagtccgtatggaatgcctttaaaactgcttgtagtggaggaaaatagaaatttggaggacaccaaattttccccctttttttttcttttttttttctagtaaatcaaattaattaatatcataaaaaagattagatgatatataagcatcttttttttttccgtaaatcaaattaattgatattataaaaaagataatggggtgattgacatcgcattgtcaagactttaaaactatttaacaaatgataaatcacattaattgacaccatgtatgttttggatatgtttgataaaaatagtttactagtgaaaaaaaaaatatgatccacacccgagggagtagatttaatttttttttttcttcagaaaatcagctatacattaattatgtattctgacttaataattggtcgggtttgcaaatcttttatttttttggtaaacatgtgaagaaaaaaatagaaggtttgtaaatctttcaatattgtttgtacattttccataaatctttcaatattgtttgtgcttcatcaacatatagtcaacacaaacaatgctacgctcttatgaggttctgcaatatgagtagcttggacgaggtttctgatcaatagatctgttataatattataaaacatatcgattctaacagattttcaatggatatataatccgataactttttagacacatctgatgagtgatcactgtaaaaaaaaatacaaaaaaatcaaaaccatgtgtatatatgctaaactacaaatataaaattaccacacttgtacaatatataataaaaataaacatcataatactaataattacgacactattggtcttggtttggtttatatgcacgactccggctttaaacaataaatccaggagcatgacacttccacgtccttggctagatctaagtttaagtcaacgatgactcatagtggacacgtgtcactcgttcattcgagttatccacgtgacttcttattacagtcttcttgactctttttttttttttttttttttgctgaaaattataaaaacccaaaatccaacaaactttgattacacacacttacatacaaca

SEQ ID NO: 2626 - DNA, 2000 bp, Arabidopsis thaliana
actgtactttatccatttaattagtcttttttatttacccaagtggaaataagaaataacctaaaaaattcgattagtgcatggggatacagcaactttgaaaggtccaacaaaactgacctttgttgatcatattgatattccggtcataatattatttggtctttctaaggacatctcaatcatattaattgtgttttttttttggcagtccaaaatttgacttaatgaaaaaactcttgtggaaaaatcatagaggaaaaccccaataattcgaagatttgcattagataaattagaataatgcttttgaccccaagatgcagtatttattgctccaagttttgactcttcaaccaacttatatacgtatgacaatatgaccccaactcccaagttgcccaaagtccatagattctcccccacaaagtaataaagatcgcattaacaaatgaaaagaacaaaagaaaaataacaatcatgttttgtgtgatcgattactattaaaaattaaaaaaagatgaagaaagatttgggttgtataataatggcaaataaagtgaagccaaagagaagacattttttttttttttgtcgcacacccaaagggaacgaagattagagaacgcgtcattcactctctcgtcacgcacctctcacacaacatgactctcctccttggtttagcctaatttgctttgttttatttttcctgattctatttgtattttatttattaaatttgtattttgtaatgtcaaatttttattatgcttctcttttccctttttcacagaagttgatcgtttactgttttatgattttctaaaatttctcacaacatcaatacttttttttaatctcctaatggtatggtatttgcttgataatctttctgcctccattaattttgagtttggctaggatttttgatggaaatagacagcttaattaaaatcatgtaaacaaaataaaaacaggcgaagcaagcaagtggtaaagttgactggtaaaagtctctttcacgtgctcttgaaaagcgcgtgctagttgtgtgtgggtggatcacgcacacgcgtattgaagtgttaccgtcttaatcggtcagaattttgagtcgagaaattaaaagtggtgaattcttcttttaactccccccaactacaaaatttaccatttccacccccaactatttccataatcgaattattagacttcaaacctaataatttaaaacgaacaaacatattttcttaaatgaaaggagaatttaatagcataatcaattgtttgaccaaaaaaagagaagcataatcagctgttttccttgtatacgagtagaagagtcagcacaagagcgacaatggctcacctttgaaagtttggtttcaaccttttgacttttgacctaaaacatatccatattcgtcaagaagaacaaagaaagtattccaaaaaaaatataataaaaaaaaaaagaccaagaaaaataaaatggaaagaggaaacaaagaaggcagcttcctctctccttcttcattgcaaagaaagcaccaccttttaaagaatcctcctcacactccattcttcttaaaaaacccaccacaacacaattcccacttgtttcttcatcatcacctacttcaatcaaaaaacattccaactttcttctcaatttcattccaggtttgtgccctttcttcttgaatcttcttctatggaacttccaatttcgtctacttatgggcttaatttggtttacaagtcttgctatttctagaaaactcgtcttatcttgagtttcttggacagaaattcttgagtttcttgatttatctttgacttgtttcttgaaaaaaaaaaggaaaaaattttggttggaatatttcaacggagaagagtagaaacggtcgttggcttgtcttagtagaaagtagtttactttttttatatccgcaaaaattgcggcttcaaattctgcttcagaagactcttagaaa

SEQ ID NO: 2627 - DNA, 2000 bp, Arabidopsis thaliana
aagagaaaatatatgggggataagatttgttttggtaatactctgaaaaaataattattcgacaaagagacaaaagtgaaaattgatgaattggtcaggagaagtggaaagagcgagggtctacgtctacgtatacacgtgacttgacttttgaagatcttcttcgatcaaaagatgcttttaatcgttgattatcatatcttcttgtaagccgactaattagctttttgataacactttttttctcatgtcgtaaaaataaaattggtattttgactttttaaaacattaaatcatatgatcaacgctttgttttctcttatcatttataaatccgccgtaaatcagacgttaattaagcattaatcactaatatttggagatcaaagaccctacattttaatgaagacttgttttttgcattttttttttattaggagagtgatagtgagaccacactgctgctttcttcccacttgcacacgtggacccctcacctcccattcgtttcttaatccttaccataattaatattcgctttattttatttttaattattgtactcgacactaatgtatgttgataaatatatttatgggttctactgtgtttttttgccatagttaaacgtcaaaaagtttaaaacgtctaataataataataatcaatacctcttattagtgttgtatagcattattatcagtaaatagaaaaaaaacatagacattttttttgtgtcttttagaaaacatagacatgaattccatttcagttagtaattttcaagtaatagttttactttggtcacgtgaaagtgaaatcaattcataaacacaagttacacaacctttttttttttcatctaacatcaattatattagttatcggaaagacactctccgctagagagagccattcaagaaccgatgtgtttgcatgggagaaaaagctattacgagtccgaactttcttagctaaacaatctgctcgagtattagaactacgaagaagaaatctaatacgaaaagaaggaaaaaacaaactaaggagcgataggatgccaattccgctgcgaatgtcggccaatcttcttgattgtcaatgataaaaatcagatctgaacagtcggaagcaaaagcgccagaagtatcgtcaatatagatcatgtattccattgtctatagcaaggaatcaaattccgcatgaaacaataataaacttcgtcgagtactcttgagggaacaaggacctaaccatgtcctataaacacataaaaatatcgtactacataacttgtatctgtaaaactaatgtaaggaaaatgtcttttatgtcacctattctctaatgtaaggaaaatgtcttttatgtcacctattctcgaatctgtttgaatagtaaagaccaaactaactaacatgcaggaaatagaaacacaacgtcggtaactttacaatttgaagtgaatgtatcttaaaatcacttaccagttcaaattttgatgttaaaaaaaaaaacgaattgacatgttatacttcagtgaccggttgagtgacgtcacctcgtaagggttatggtgatgtcatgtaagacgtcgtaatttggatgagagttgcattcacgtggaggagcttcaacgatagctccatgagatgagagagcagccgccggctcgccttgatcaccacttaacctatctctattcttccctttccccaccacgcgactgttcccgcgagtgagatttacgctctaatcttcaaaagttagatatttcgaatcatcccacctatcggaagacatgtgagctacacgcgccgtcattcaatacgtttgttcccttttatccgcaacctctccttcccattaatttcctctcaccttccaaacatatgaaaaagtaaaacattatatatataatcgtcgaagctagagatttggttaagaaaataaatcaaaacacacatataaacatctgaattctcttacaggaaccgaac

SEQ ID NO: 2628 - DNA, 1513 bp, Arabidopsis thaliana
gccgaaccaatattctatcaagggaatggtatatttatatttgaaaactaatatagatattggtactatcattcattatacaataaataaagtttgagggactgtaatgacttatcatttacaagtaatgacttcattaaaacaagactttactgttaacgtgttggtaattgtaatgcctttatcaataacaagtaaaattatacttcctgtctttaaaactgaagtcgtgtgtaatcagactcttaaaatttatacaaaattagttatctcaacttacctaggtttaaatagtttcttacagcatagcaggttagaaaatgagtaagaacaaaaagaattagtacaaatttcagaccacaagggttaaattatgaagggccgtgttttgcgtagttgtgtagtgatatatattcaaaaccgaggaattttcttataaacgtctatttcggtttttgcccaaacaagaaggtataattcggttggacgacaaaaatagacgctgtattgttgatggagtagatatttattattttcgataaatagtatctctttttaacgttacaacaatttctttcacatcctaatatttgtattttgatattttcttctctataagaaaataaacaagagaaatttcacattcatcgtggattttctatgcaccttgtgttttactgaaccaaattaattaattgaaagaaaaattttcacaattcttttctttttggtttaatggttgatacagaaatccaaaaaggtcaaatggttcatcatgaagggggaaaacgacaatataaaatcacaagcttagggtagaaattaaataaattaatacgaacgtgttttacaaggttgagaccatgaaaaacaagatcgtcaactgtaaccattaaatacgtccttagacccacaagccaatttcaattctggttagatgcatgatttgtgttcacagtggttcttggaaccatccatggcaccttaaacattttagtcactaaagtcgtttcaatcttgaaatttactgtgaacaaaagtcatctaaccataattgaacttggcttgtgggtctaacgacgtattaattggttcacgctagcttgacgtacgattaacggccaatattaccatgatccaacctattaccaaaagaaaattataattaacaatcaaacaaccatttcgatttaaatattttaaaaccaaattggtttgggcgattcatcatattaaacacgtgtgtcttgagctagttaaaccctattgatagctacttgtgtagaaaactcatattgttagacttttcaaagcgtatatttagagagttatttgtgaattataatggtgattaaggtgaaacataacaaaacagatgatattgatagatcatttgatttcattcattgactgacttgcacagttgcaccccaggcttggctctataaattaggcggtaaatggaatgattaaaacatatcatttttcacagaatcatagaaaaatcaagaaa

SEQ ID NO: 2629 - DNA, 2000 bp, Arabidopsis thaliana
taactaaggccaagttataacaatgactagataaatttccaaagacatgactctcgaccatacctttaggtctctcaagcaaactacgcacatgcctttaacttctgcctatttttacaccatacgcgcatctacatattaacactagtatatacaaatatttgtattaattaattggtaattacaaaacaattagataaagtataataaggataagtacgtgatcttttgtgcttattaatcgataggaatatatgtatgggcatcaagtcttcaccattgttcatgatgtcccatgcattgtagtatttttgtaggtttctttaagccgcaacccggttggccgctagtttctttgaaattatactaaaagacacctttgaaatcatagaaaacaatgcttgacatggtttcaataacaaaatactaaactttaaataattgacatattagtaaatcataagattcataactaaatttccaaagtaacttggtatttttatttttattttggaagaaaattggtattttcattatgataaattaatgtatggttttaattaactaattaatgaaccatatataccaaatttcacgagacgtgttgtactaactactaaagacttttgagactaatatttttcatcatttgggagttgaatgcaaagttgttcccgataaacttttcagttgattttcaagcaaattagatcttgttggcgttattatttaccataccatttcaatcattacattaggtatttgccgtttacgtatttacacttcttatttgaatttggtactttggcacatttacacttcttacgtatatatcatcctaactttcttcgaaagtaaatgaattttaactatttcaaataagtattgataactgaccatgaccctagttaattaaaagtccacaacatagcaatatgcactttttcgacatgaacttaatgagttcattctaatctcacgagtacgcctaacaatttaatttcggtataccaattcatgttggtttaatgattagtaatttattagaggatggaaatcaggtgtcaaactatttcgttacaattttaatcatgtctggttaaggaattatgattaacattttagatagcaaaaatattcagattttcacatatccaagacaataatccagataagtcctctgtctttttttttcttaaactctcatgttagttacaacttacaagtctatgacgtcgtttgtgggaacttttgaaaaataatgagaaacgcatgtagtttaatactcgatgctcggaactatgtgagttttaaaataaacatgccaattttcaaagaaaaatatgagatttaatatgcgaaatgcgatacaaagaaatatgatgaatacagtatattgttttctgcagattttcctaaacgatgatatcatcagagcctcatagacacagacaaaaacagaagaaccaagaaataacaaaaggaacccaaaactttgagagacacaggacacaacgacgttttcttgtcacttttgctgatttttgttttctattcttttctaacttttgatataatacatcacgcattgcttagctcagtaattacacatgatgaaatgttactgtgaatagtatatgatgatgaaaattaactctttttctaatttacagaaaaaaatacgtaactaattaaactgtgaaactctcaatgtaaaattaaaacaattaaaaaaaaaataggggggagaggaggtaaggcttgaagcttaaagtgatgttttcgtatcaatctcaatttctctccatacctccaagtacgccattaaaactttaataaacctaacttttttcctccttcaattcgtctataaatacttacaccctcccacttcttcaatttcatattacacaatcccaaacaagacaggcaaacattctcatctcactcacaagaaaacagcacacattcttttttctgcaaaaccgatcaaaatcgaa

SEQ ID NO: 2630 - DNA, 666 bp, Arabidopsis thaliana
tttgtttttcttctttttttctgtgaaaaaatctgacctttttttcccagttgattcttcattgatttgtttatcttacatcaattttatgagtgctgatgattttgagtgttgtttgtgttcttgattacgaattttacagatgtaacataataagaaaaagtaaacaacaaaaacagaggatttggattgtacagtatgatgttctgtttttctgcttgtaaatcccttatctgtcttttggcccaagtaacaaactttaaccttttcttttgggccagacttcaactataatacgttttgtaggctatattttttcttttaactagattcgaattggatggcttgggtatgcggtatcagtgattacttagctaaattcaaatcatcaagaaatgttcacatgatttcctgcaacatgtcaaaagtcagatcaacttagtttgataagttatgttccacgaaattatgtgaaaattgatttgttttcttctttagtttggtgctttcacactgttaatccacaaagccttgttgtaaatcttgaccaatggcctaaaagtcaaacctttgacttttcagtgtttcttctcaacactcaagagatggatgataatattcacagatgatcaaaatctttcacacaaacctaaaaaacacccacca

SEQ ID NO: 2631 - DNA, 2000 bp, Arabidopsis thaliana
agatcttttaccaattgagctaataatactcgattaaaaagatattttttgactttctcacgaaggatatttttccttttcatataaatgataagttcttttgtattaatctttttgtttcctgcattatttttttcgttttcgttgttagacattgtttcgttcttgaaaatgatagtaggtaacaaatgaaaaaaataaaaaatacaccttttctcctaatttcttatatgttttattaaattttattattaaatcataaatatagaaatgtataatttactaaaagggagggacaagacaaaaaaaagaagaagaagaatatataagcccatctccttgtgttggaaaattagttgctcctttacaatatacaatttcttaataggaaaacatgtcactgccagttgattgttctcatctctttttttccttagtggaatccgataaggacaattgctcatatctgtttttttttttttaattgaagatgtacattttctcttctctgattatcttccatacaaaatctgcactcagtaaaaagaaattatgtattgctgttttaataccactagatgatcacccgtactacgccgcagtttttttggattattttatattatttaatttaaatttaatttttatttgtctaatcattcactcatacaataagcaattactttagtattaaaaatatttttttctaacaatattctcaacaatgcatcatacatataattcataaacaacatttatcttaaattaatttaacagagggtagtattggattctagaaacctaagaatatgatgataaagctccttacgtattcttcagcgtcagtgatttattctataaatatcataagagaatataaatatcaatttaagagaataacttactcaaatcattaagtaatctacgactattatacattcatactttgaatttggattacaaaaaaaaatcttcgagtatgagaaaactattaaaatagttttattgaaaaatcatataaaataaaaataaatttagtaatagtataattaaatatgtaaaataaaattaaataagaaatatatcattaacctataaattagaagttgaagagcttacattaattatttaatagacacatgtcaaatgctaaagtgatgatgtgtcaatcatatgaagagagttggccaactttcatatatatgattcttagtttcgtaccaattagtttctcaattcagtgcatgtgtagtcaaatgtccaaaagattgtttctaagcaattaaaatcttatcaaaacttcattgcccaaaatattacgaaagcttgtttctgtgtatgatatacccggtaaaattaaaatgatcattatacagaacaaatcagcatgattttcggataaagatgacacacatttgaaatcgtagccgtactacgcgaaatacatgcactcttcgttatgttaacactttaacagtgaacgtagccataatgttgaccacattcaacagtcaacacaaacattactttacacacaaatatatgattatatatacatatgtacatgtaagtgaatgtgagcaataatgacgggaatattcagagaagacgatggtgaatgttagcagtgatcacgggcacattcaaaactgactgtggacaaaaaaagctcctggccttaaatatgattgtgccaaaaatagtacaaaactaagaacccaaaatggaattcgagacctatataataatatatatgtatatagtctttccttggaaagaaatcttatgttattaagaaaaatactataagttatctctctatctagatatgatatatatgtccaaacatttccacgtagatgacgtatattaccgaggataatcctctatataaggaagagaagctcgagtaataaatctcatcactttgaaatctcaaaagacaccaagcaaaaaaacaaagacagacaaaaaaaaaagagagagagagagagagaaaa

SEQ ID NO: 2632 - DNA, 866 bp, Arabidopsis thaliana
ccttttttctcgcttctggtaagaccacacaatttcaacttcttttgcttaaaactgtacagaaaccaaaatccttattttgaagaatcttagcggagaaaaagtaacaaactctcaaaattttgatgggatgatgatgtgttgaaatttctctagtttctttcctctgggggaaaaacaaaggcaaataatatttgtattcaacatattgggtctaatatgtgaatctatccctcatttatccgacactatttgtctgtactttctacctttgcttcacccttcaacaatcttggcaatcgcaataacatgacttgctctgataccacttgtagtacatttagctttgattgttggagctctcgagttaaatcacaagggtatatatatctagtgtggtactttagaccgcaaatagagaatagaccgtaagtcaacgaacttacatgtattgtttatatattgatcagtgttaattacatgattaatctgagtttaagacgactaatcaaattaaaaagctactaaaaatatgaagcggtccgattggatttattaaaaaagaaaagaaaacgaaagactggtataataaaaccggaaaattcaggtgaaatcaacaaaccggtttcttttgtgatttgaatgaacttaaacccttgttgatatcaaaagaagaaaccctagtctctccgactctccgtagacgacgaagttatcttcttcaattcatcgtctcttctctgctctgctttgctctagatcacaaattaaaagacttcattagtcttcctgtctccaccattaccttcttcctttttaactcagccacgacgagcagactattgttctgttttccttgtataaaa

SEQ ID NO: 2633 - DNA, 2000 bp, Arabidopsis thaliana
attgatcaatcattttttcaggatttgctcatcagcttaaaaaagctagtcattcgacgtgccaaagtaagtggtctcgaagatctagtagctgacaaatttgatcttaagatgctccgatctctcggttatcttctaacttccgacactttttgtttttttaaatcctgaaatctgttattgtgaagctattcatctttgatcttgtgacacaatcatatggtatcttgcagggcttgtgctaatggagtatgtaagaaaaagagtagaagatgatacttctcttgccccaagtgttgtccaagaactcagccttttggatagttgtaacttgttgaaaacgcatgtagatgatactgtagacattgaggagattctgactgatatctgcaacaagaagtcaaaaaagaaaacacggaaaaggttgtgcttggtacatagtctaaagagttaggggaaggacctttggataatattccatgccaaatacttatatgcatttctttcgtgtttgaaggagccggtaggaaccagcctgctgcgatggacaagtaacagtgagagagggttgcaaaaccatgagacaacagtttttccatacaaaggctgttggaaaatcaatgtacgttactttccttgcatctggttccgactattcattttcatccactccaaaattattgtctgttttaagcatcttttttttttttttttcggagagggttttaacatctttgcttgttagcgaacatctcttcttctttttgctattcatgagtatgttactcatacactcaaaaatatctaacgagtgtaatattatgtattagcgagtgttttacaattgactgcatgcattttagaattatatcttgattgagtgaacaaaactcaaaaggtctaaaaagaattagttcgaatcggctgaaaacttcgagttccggtttattaccggtttacacttaaccaatctataaattggtaagcaattctatcgactaacataaacccttgataagttaatagattattgtttatacgtattcctactagagacgtgttgcgaaagtgatacgtctcctaattaaagagaaaacgagatttaatcgttattaagaagaaacttcaaagtctttcatggatttttagactctgaagtagacgcttttgtcttctctgtacgtatataatacgttcttattttgacttttatttggcgtttttttccaatttcgttttaaaaattccaaaggtagctaacttttggcactcaactgcgacaagctgttcaaaaatgatacatctgttacatatgatttattaaactaagacatttttataatatatgtattcagatattgattataacgtccaaaagaaaaacagagatgctctgatttttataacccaagaaatacgttacctgacgttaataattgcctaacaaacgattaggcccaacaaaaaaacgtcttataagttaaaactttggtttgggtcaatgcttcatatgattggtcctcagttgggctacaaaagggacacgtgtcaagatcagacggcggttctcaaagcaacccggcaatttccatggaaacagaggtatgaccaacatagtaagtaccgtagagtaaaacagaaaacgaactcacaaagaaaatcttttaacacttgtttttatttgccttgtttttctaagaaactaagatttgtttattcgtttaactggtttggtcacgacaggtgattgatctttaaaggcgagttacgtctttttggttctcgtcttctgtttctgaagaggcaagttctctttcctccctttttggttactagctctttcttgttcttgcaactcttattcacctcttcttatagaagtccatggtttttcgtgtttcagagttttctctaacttagaaatctcttttcctctgcagttgtctcttcttgccttctattgctgataaggtgttttgaaagaagaaaaaaagcctaaa

SEQ ID NO: 2634 - DNA, 2000 bp, Arabidopsis thaliana
tgatacgtattaaaaatgcatttggccgctcaacatgctataaatatatatatatatatatatatatatatatcgtcacatatatttcaaaataacctgatacttttacatatttgttaattcctgaccacacattttaagtttttaacgtcgtaaaaataaacgaagttgatgacgttcatttctaatttagcaatttatagtgcgactgtttaataaaatacaagattcccaaaaatacaaaaggtattttgatcaatagtacttcctaaaataaaatcatgtttcaaagctttataataataataaaaatgatctctcagttacaattgtcttgtctcacttgattattttctgtaaataagtttggatgtgaagttattcagtacaattaacctaaatatttaatgtgattgactaaaactagctaaatagggttcacgggaaattgaagcttttgactatgggaaaatatatcaaaaaagattgaaaagtcttttgtttttgctttgtcaaagtgctttatcttcttcatgtcacaccttttcctagtatttatgaagatgtgacatcttctctcaataattcaatcgcgacttcctaagtaacataaatgcacatgtgcgctaatatcggatgttgctgacttccttgaatcaaaaatttgtgttgctcatgaattttttcttttttaaaactgatttaatcaatatacatgaaatagttcgattcagttgttgctttataagtacggactaggcagagaaaacaaagaaacacatctcttgatttcgatcaacaatggctgcttttacacacttgaatatctatctgcttttgttgataatcagtgcaatgtgatttggttaatttgaagcaaaataattaaaaagaaaacgagtttgccaaacatttaattctgaagagaaaaagtattaggctattagcccacaattaaccaaagtattagcccacaaataacaggcctgcacttgacggcccatttaaccttttttttttcctgacaggctaagaaaatatctttcagaaaattataaaaagtaaaaagcatatggcataatatatttttttttttcaagtgggaatttacctataaaataatattccccacttagatattccaacaatctatgaggtttggcttttttgtacaattaatttgcttgtccccatttaaaaagtgtctctttataattatatatcgccaaagatttacgcatggattcgtttttcgataataatatatcatctatttctttaaaactcgattaatgcactattagcggtaacgcaaattactggcaaaattcaagttattataatgtttctctcaaatatttttgtttggctgaatgagaaagatgtattagacattgtcttctttagacattatatatatttactagtactaattatagtaaatatacacacgtatacaatcggagtagatgcgcatgttaattaccaaaaaaaatacgatttaagtgtgccatcatctccgttaatctagggttagctggataattatcatttacgttttgatgatgacaaaaaaggataaagaacaaaaaggtacatactaatatatacatatatgtaaggttaaagtttgtttgatgagtgcttaaattcgatattctatttaaaattatatctctattcgctaaggattcaaattcaaataagagaaaaaaaataaaaagtaaattatgcccaccccaaactttgctatatatacaagaaatatcaccttctctttaaaaccaattaaagagacgcatttaaaagcaaatgaccaacaagcgacttcaccatccatctcttacaaccctccaagaacactggctgttttccttcactttctagacaaaacaaaaaccatcttctagagaaaataaaccaacatgggagagacagaaaccatggcaacaaactaactaaaccatagtatatattatctatactaatattatcggccc

SEQ ID NO: 2635 - DNA, 2000 bp, Arabidopsis thaliana
aaacaaaagatgagactttttgaagatccgtttcaataaagtcaaaaactttggcatgagggaaaaagacctaataacaaaacagagtttttgacacaataacccaataagaaaccaaatgacggtttgtttcttcatctctgcaacggaaagaggtaacataaaccctaaaatttacacaaagaagatccaaattgaggaaaaactatggatgattcatgccaaaagctcattgatgatgaaatcaaaaggaagaaatcgaaggtaccgtggtgagaataagcgaagacggctcgataagtgtagatgtgatcaccaggtttaagctcgtctctctcgactttgttcgtgagtacacccattgcttcgtcttcctcaaaataaaagctttccctttggcttgtggaaattgcagtgtacaagtagattcttacgtcagcggcagagatatgattgggcgatcaaaccggagactgttgaaccaatgccgttacagaatcttttgacggcgttaactgttagatgacgacaatcgctgtggagggtaatatggtcaatatacgaaaaggcttttgtgaacacgacgccgtttttaaagtgtccctggaatcttattcttcctttcttggtgtattggactcatattgggcttaaagaaaacgctctacggcctaaatatcgaaaagcgtattatttatctatcaaccaattgttattttgctcattgccaactaatgaacaatgcttagaattaatcaaattttctaatctgaacgaaggaagatataagtaggagttttatacaatcgataattgtatacttaattattattataagctatattggttaatgagtttctttggagtgagtatataataagaaaaatatatatagagccgagcgtagtggaggtagatcaggcaataatggaagaaacttcgaggaacttcgctttttgttgtaaccacaaaagcgaatataacaattaatacggtttgagtaggcttgcagattttcagacagcactcctactgacagatgtttgaaaattaaaatatttattgcgattattataacaacactgtagtaaggaacttttgggttatttcattggtttattaaagtctttaatcgttgactttttaatttcattattatctgtaaactcgtattttaagtgattttaataataataatttgaaagtaaaatggaatatcccccgatatcaagcgagccgtacgggaaagggaaagtcaaacatgtaataacagttttaaatgaagggtactacagtcttttcaaggggttaataacgttccgttttctttatggacagccaatcagatgggaccacgtatatcactattaccaaaccttcgcttttctggaaagtggaaagcaaaaccacagagagaagagaagaagaacaaagcaaaatatattcaaaatttaagcaataaaggcaaaaattaaaagacaacgagtttcaaacacgaaaccacgacttgtccaaatcaagatttgtcctttttcctttttagtggtagaacgcgaatcaaatttgggaataaaattttacttcttactttttcaaaaattcttgggtcttcttcagctttgtctccaagcaaacttttagtcaaatcatttttttctttcttgatggactttctttcatgtttgatatttcaatgacgaaagctctaactggtttttcttggaatttaggtaagaatttatactctgtttctctctctgtttaactcagttcttgttttgggtttctgggtttgtattttttttagatctttgattatttattatgttctatgttgtaaaagatatcaaaccgtcaataaaaactgtaactttatttgttgtttaaaaattgatatttcattgtttgattgaaatttttctacaggaatttgataaacggtttctcacatacacaagaagaaaataaccgttttgagttaaagtaaagcttttgaacca

SEQ ID NO: 2636 - DNA, 1843 bp, Arabidopsis thaliana
gatgagatgatgccagttttttttcttgttaagaatgagagagcgaaagagaaagagtcagaagttgaaaagagtcacagaagagtcagagagttatatcaatcaatattaaaaccctattaaaatttatttaacttttcgtctactctttcctttttctttaacctaatttaattttcttctaatcaatattaaaacccattttgttactatcaattctttaattattggttcgacctatagaaacatccagaaatccaaatttgaggataaaagtgttaaagtaacatttcttagtatttcaattttatgtttttaccacattttaaaatttaagttagaaatagtgtatctaccaatgatattgccatatacgtattaaaatgtacatatcatcaaaagtaaatatgaaatcttaaaggtattaaatagttaactcatattcttgtaaagtttaatatttgtataccatttagattttattcaaagcattgaattttattaataattagttagtagtttcaaaaactattttaaaatccctacaaaaaaaaaactattttcaaatccctacaaaaaaaaatactatttcaaaataaaagaaaatagaaaatattgaaagcagaaaatatagaaaggtgttaacaaaattatataaaagaaaaaacaaacagaaagtgttacatgttttatataaaaaacaatttggttaaaaatttcaataacctcatatcattttttctcatctgcttaattaatgatattcaaatgagttattttcaaaaaatattgcttatataagtgatgatatgatgcggttcgctacaaatttttcgtgccaataaaaatttcatatatttttctacattttttgtcaacatcatatattattatttcctaattttattagaactctcgtctttaaaaagttttaaaagcgtcatttatcgttcttttatctacaaaaaaaaacaagatttcatgagtcagacaagacaaaagccataaacaacacaaaagtcctgcaagattgctcacttgggcggttgggcctatatgaaaatttactatctcaaaatttaactaagagcccataaaaactgtaagatctttgctttaaatcacattgtcttcatagattttgtgattcatggtagatttgtgaagatctttggtcatctttttgtttacatttggcttattgagtgtagagtgtgaacaatctgctatgaagttggtaaaattctttggatccaaacctttaaatcgtagcatatttactatttcacactgctaggatctgtttatagctgatgcattactggaatctatgatgtttactgtgttggtctgatatataacaagttctgaattttaaaatcaaattcaatatcgaattgggcttttaattaaggttaggcccatcaaatgtttttgactctttaataattccctctcttttgtcttttattgtaaaatgcacacaatttcgaagaaactgccaatggagtctccattttccagcgccatgccaagcttgactctacgatgatagcttatttgactgcttcaaaaaaaaacttcagagaattaatttcgagaattttcccaatttcagatcatcggaaaattcttactataatctttcttatatcgcttctctcagttacttcaacgttctggtcagtttcggatataaatgttttaatttcttagtttccgtttcttcttcttcttcttttttttttttttctgttactgtaaacttggggataacgaattaaagcgatcaaatcgatgttcttatgattcaggatccgttatagcaaaaaaagcttgactc

SEQ ID NO: 2637 - DNA, 2000 bp, Arabidopsis thaliana
gaagtcttatacttatagtttataaatcaaatataatatgatcgatatagtcaaaccgatctaatctagaaagcaaataaaacttctaagagatggaatataaaccaggtggatcaaaatcttaagtatgtttttggatctcaggatcttagagaggttagcaaaagcttaacaaatgatgtaaaacggattaaaagtataaaccgttaaaacttaaaagagagagattgagagttactataccttcaagggtttgaatttcttgagctctaatggacatttttctcttcgtctttttttttgtcaaagctctcagatgtttttgaagatctcaagactaaatacaatttggtttatatgtatagacaaaatgatgaccacctgtagtttaatgccaactaatcactgtgttatagtttttaattaatccaatatactatattgcctaccatcctgacaattctgagtggcttgaccaattttatattcgaaatggtttaataacaatatttgttcgtaccctaagattggagtaatatcaccgaaagttaaaataaagtcctcttttacgttaagaaaattagttagagaagattaatagtttcaaagatgattttcatatttacttaggggtctcaattttgtttgttcgtattatataatttctttctcgtgttaccttttatgagtggagatgcattgtacttaagcatatttttattttttttggcggccattgtatataaatttaaataatgaacgcttatacatattacaacattggtagtagcagcataaaattcaattattgttggttttctactgttaatgtaaagcagccaattatatagttttttggtttgactttcactttatctgagaaaacaaaactgtatcgttatttttggatttcacatgacggatccgataattttcaacttagacatgaagatttgctagtctcatgaatctcattatttacaaccattagtctctcttatttaagttcggtctctctctaaatgtttgagttagaccagccaaagattggtgatactgtattactaatacatacatatctttaaaatattttttggtgattaacatcataaattgttagtattggaggtgttagtatatgtcttctgaagcttcaatttggttgaggtgttataggattgtttcatagtgttctgaagatgttagtatgacttttggaggataagaagttgctttgtccatgctactgattggggatgttggtagaaaacagcattgcctgccgcctttagctcatgttgcatcgctccttcttaggttggggctcacgttgaagggattttcgcttcgctttataatcattttaaagtttctttttcttttatagctcttgtttcttgccatgttttgcttagaggaatttttttatcgcgttcatttcatagctttgtctaaagcttcacggcttaaagatgtagtgatgatctaattctcgattgtctatgcttccatattttttaccttttcggcatgggacaatgtatctaggatcttactgatgtcgtttcctaaaccttattaacattacattcttatcacacacaaaaaaacacatcataaattgatgaaatatatttggacaattaaaactacatgttacgggagcaatccaacaaaacatcacaaatggttaaggaagctactcgtaaaactcctttatagcccaatgggccttatatggtgacaataaaaaaagaataggctaattgggccggccgaaactagaaaccttggaggagcagtttctggttatcggctccccacgtaaacctcggttcctcgtcgacgtctccgatcttcgtggtctaacgcaaaaacacacacattatatactttctcgagaaaattcttcaaaaccaaattgacaaaaatggaaaacaaaaaaaaagaggaaagtcaaatccacgattaagaagagtaactttgcacgcggcttcgtg

SEQ ID NO: 2638 - DNA, 1993 bp, Arabidopsis thaliana
aagccgatgagtacaagaacactcccgaagccaaataccaaacaaggtaaacaaagggaacaaaatccaaacaaaccaattacactatattcattgaaatttcctcgatcaggttctagaaatccaaaaaagacttacaaatcctaagtcatagaaaattaaaacaaatctgagactaaaaaagacacacaaacgggttacaatacaagaatctccttttctttcttggtataacaattttttttttattataaatctctcttataaatttttaatagtaatatttgttggaccgaattttttatatttatactaatgaacttttctttacgattttgttaccattttggtatcatttttacgattttaatttattaacctccttaattaaaatcgcaacctattctattttattaacacaggtcaaaatatatttttttctgcgctcgaccctaatatgttaacaaaatggttgtttctgcccaaatctcattatatttgtatggatagacgaagagcattttgataatactcttttggaatgtttctttatcattctaattaggatcctacatcgaaagtatactataaatggagtaaacacactcatgactgctaagtgctaacactagtatatatggaacacaaccaatccaatcattacccattggttttaaattagaatctgatgaaacttaacattaactttctctaatcattaatgatattggtagtcttataacaaatatattgccaagattcggtctaagaccacttgatagaactatgtataaaacttcttttttttaactgccaaacctatataaagtggacgtgtaaactaaagcatggtgatcacttcacatcgcaccaatgtagtggatctaaacgtctctttgtgtaatcacgtggtcgaattaatggtcaatcatttagcaattaaccaaatttgaaataacatccgaaaaaagtcggtttagtgggaggagaagtgagaatgatgtttcatgaatgctcgttaggaactcttcgaaagacgataacctcggatggatgtttatggtgtcggcttctagtggttaaacataattagatcgtctactgaaaagttggagatgtggttgagaaactcgtaccctacatatggttactcgtctgctggtttaatcgttgggattgatcgtgtactagtctttcttaaaggccaagaattttgtcgtcgtagttaatatatgttggcgtacgttttactgtttttcttgagaaataattggatcttaagcttattaaaaaagtcgtcacgacttggtccaactcgtacatatcacaagttgctcggcgcttttcatgttagttagccaccgacctcgaactttgaaattttatattttttaacttcaaaaacaattctttgatagttttgttttcattgctaatatttctctcaatttttttttattgtttttatttttgtatagaatagtattcaaaatgaaactataattcagtatggaacactttctgttttatttaatatttacttcataatgaattatgtttcaaattttcaaagaatatatttatatttgaatttggttagtaccttccaaagaagcttaattccccacattaaaattcaacttggtcttcatattaacattattcaattgaattcagactgaaatggttcactttatctggtttgaaatatatgtcatgcattttccaaatcaagaatgaatcttcttgaaagaaaaaaaatgagaaaaaagaagaaggagaggaatgggtctcctaacaatgaaaaagagaataaacccttaaataattgcaactatataaaataaaaagtataaactccactaaaaaaagtcaaaacgtagaccaaaacaaaaacatgtaactaagtcgtccactactacatctctatgactctatataacaacaaagccaaaaccacatcttctcacacaaaacacaaaaaagaacaaat

SEQ ID NO: 2639 - DNA, 2000 bp, Arabidopsis thaliana
gttgagctaccggcacctcccggtttgttacattaattttttctttttgtcagacatacactaattaattcagagattcgctcgattacaaactttaatgataagttagtagtttaatcatggtaggttaattattgtggtaatatatagcgtgatacttattgatttttccctaaatatagtgtgaaaagaaaatatgattgagtgaggtaggttaaatctatcgaaatagtttaatcagagatccaatggtcatcattttttcctcaacaacaaacataattatttataggaatgtttgataatatgttcacagttcacctaccaaaactatgtcatgaaagtttatgttctaccttttaattggcctcaccttattatactagtcttttattttctttccaatgatcttatgattagtctcgtattcattttcctaactaattttattttatttttgaaaatgaaataagttctaatcttagttatatgtccatcattaggcaagaagattctacatatatatatactttaccaactttattgtttcatataaatattttaaggttctacttttctgtatcattttagacaatgttttagagaaaaaaaattgtttcagtttaagtgatgtttgcaacttttaatgcaacatttttttccagcatattttataattggttgaaacaatttaatttaatttaaatttggtgttttcttaacttgtatataaaaaccttaaatgtcaattgaaatgatagagagagacattactatattattgtgaaaaagtatcactatttctaaagaattgttctagtaaaaattggtattagttaattttcagaccatcataaaaaagatgatttagattagtgacaaagaataatccttcaaaaatacatatttcgacacaagtatacttggtatcaaaatctgtaaaaaaaaaatcagagccatgaccaaatacaatatgttaagttcatgtgacgtgagataataaattgatttgattcactttccaattgtgtttataattaacgcattaaaaacactaaaaagcaaataaataaatgtagccgaataagccgatggaagtaagaattgaagtccaaaagcaaaaacctatagatccggtggacagtcaacagtgtcatttaatccctataaatagctcactcccttgtcatccacaaatcgtccccgtctcgtttccttcttcgctcgctgttcagattttgctttgaggctttaggctccccagatctctaatcgccgcaggtttcgctcttcttctccgtcttattgatttcgagtttttaggcgatgcttttacgggttttgttgttaaatctgaaacgaaatgagatttttctatgggtttcgattcagatttgataatattcgaaccttctacgcctgttattataattagatctgcgatagtgtgtgactattgaaatgagattctcaagttcttaggttatatcgtttgtgatttatacagatttaaaacgtatgtggatccgttaattttccagtgctgtgtagcagatctgcttaataggtttatcttttttgcaaatgattttgattttcgcatcgatcgtgtactctatgtagtagtagtagtatatgatttgataaatgtagtagtagtagtatatgatcgtgtactgagccataaatgagccttcctcgttaattattgtccatgaattgttagttaagcttgaaagttccttaaacgtttaattagatccttatcactgactgttccactatgaatatcagaagaatcgaatctctttggatgagatgcgtctgtttttatgctattccacaatgatttggaatctttcttagctttttatgtcacttgagtgtggaatcttttttttttgttctcttcctttcaattgtaaaaagtttgttatatgtgtatgatttttatgtggttgctgattcaatttttctttttgttgttatagctttaagaa

SEQ ID NO: 2640 - DNA, 378 bp, Arabidopsis thaliana
tgttgtattcttgttggttatttaatacttggttggtgaaaactagaagagatattacacatggtgtatacgacagcgattttgcttgttaagtcacaacttcattagctcattctctgtctttggtcaaatccactgtttagtattcaaaaccaattttctcacattctattacacatacatgaatctcttctgcgtcgattttccacgtaattaacgataaaagatcctatgaagactgcaacgtcattacacacgcacgtacggatcagttttgttccgttcacacttcacactcagtcaaatagtcaaacacctccacaaccttctataaatactcgaatcacttaccaccaacaattcatcaaaaactcgaca

SEQ ID NO: 2641 - DNA, 1630 bp, Arabidopsis thaliana
taatttgtttggatttttgtttttcgttttccttttcttgcattttgttatcagaagttgggttgtcaatttctgtttggtgttttacttttcaatttggagacttctcaaacaaattttaatatcaaatggattttctttgtcggttaaatttgagatttagtcaaatatcttttaaattatattaaaaaggtcaacatcattggtcaatttattaaaaattattctaacgaaagtaaactttaataggtttggtccaacatcattggtcagattggttcgagttatgcgtaatttttaccaatagttgtatttgtacaattgagtattactctttagaaagttgctgtttttttttgtgtgtgtgtatgtgtatacaagaatcacttttgccaaaagttaaaaagaactttgtttgtttctgtttggatcatagtgaatgttaatgaaggaatgacccatgatgttgatttctagacaaggcaatgggaccgtaacggctaattttttgtataatacatacatgtatacatgtgtctaacctatatgaatacatgtgtctttaacatgatcatattgcccagtgaaaaaagaacaagatttattcgagttctataaaataaatcatggatagaaaaataaaagaagctttatccatttatagtggttaactttaaaacaaataattaactggtacattggtgttttaatatcctaatttttcttcttttttcctttctctgttttgattagctaattataaacttaattaaaaactccattgaaaaaagaaaaacaataataaaaagaagaccaattttcaatttgttttcggcgacattacaatccaaaagacattcttgtgtgttgtgtttctttatttttagtattaaaaaaaaccagatttaatcgggacacgaacaaaagagaaaagaaaaatcaaaatttttgacctttatgaaccctaattttgggttggtcactctctctctctctctttcctttcccaaaattggattcaaagttctttctttttgtcttcctcgtacatcacagcatcaagggttttcgacattaccagctattatgcttgaattcgtgagttttttaaaggtttcttctggggttgtttgtttgttgtctgaagaatttctctgtttccttctcgactttcgttataaagttgaaatctttgatgtattagaggtcttctttctagattctgggtttcataaataggtatatttatgttgcattcgttctttgaattggagaaaatataaataaagttcgaagctttttctcgtttagcttgttccagaaattagaggatttacgaaatatgattttaaggtatcactggttgtttggtgttttcaaaaggcttaggtgatttggtgatgttagggttttagctatttatgttagcatttgtgggtaacaaaatttgtttatgtttctttgcagttttgttgttatgttaatcgtatttggtattattatcttgtgcatatgttaggaggacgcaaggagttaaaagagcaagtcttttgagttgaggaagcttctgtagaggattattatttcaggggaaatttaagggtttgatcagcttttgtgtgttgtgcgg

SEQ ID NO: 2642 - DNA, 2000 bp, Arabidopsis thaliana
tttaaatgcgacagttacaaagataataacggttggctacgcggaaaacatacttgctcttgttgttttctttgcagaactaatggtctttactcaagatcacatacatttttgcaactttactcaaaactaagtggtaagaaaactgtaagagtataattcaatttgatgtgtcaataattcaatataatattgtcacattttagtagagaatgaatctatgttgagatatatctataaaaaaaaaggacaaaaaagaagctatattactgagccaagaaaagaagaagttaagtctcaatctcttgaaactgtttttgttcccacaaagtaaaagaatcaacagaaatgagtcgggtacgggtccggtttgggacctacgaggcagagacagagtgagaatccgagtcacgaccggagtgatggtcgtggaagccagcctggtctgaattgtaaatgggcctattaggttctgaggcgtagaccgtacggactgttaccatgtgcttttacaccaacaacaacacatttcacaattaatgtattaaaaatattattataataatattaaaatcaaaaccgtaggttatttttttttaggacctatatattattgactttaaaaaaaaattcatttcataacaatagataattggataatttgattttctattatttcatttggaatggacacgtggtggattaatgatggtggttttgtaaagatataaaaaagtaaataaataaaatagcttctctacttaaatgattaaatgaatgtacgttaacgtacgtgttagatttttttcatagcgaaggaaaaatttaagattcgcattggtcgtgtcgattgtgtcaggctaaacgacgacgtattaacgtagatgacaaaggggtccggtcccaatgaaaatatgacatatttttttgaagtgattttgttttgtcaaataagttatgggatataaattgcaatttgataaaattatgtaatagatatgacaatttggaatgtatctgttttcttttttagtttatttagatttttaaatatttccatgcttttattcttattttctttgtgtaagattactttctatagtttcatttatagtgagttaaataatttaatattgcatttatagagaatgcattaatatagaatcgcctaaaaaacactaaaaatactcaaatctcaactaaattaataacactaaatattttatgtactaaaaatttactcgacagatcttggtttctagtacatttttgtttttttgttttgtcttgatattagcatgcaaaaccaaaacataaacatgtgttatctccaaatcaaaaacctaactaccattttgtaaattgtaactgcgattctatttacatcttcaaatgtttttttccctactaatccaattaatatttcttactatactttatatataatatggaaagaaatcaaattattggtatattccctagaagtaaatcgtggcgtttccaaaataatcagattgtgttgttgttataatagcatcaaaattaatatagaagacagacaatgacagcttgtctttatttctccgtaatcgttacacttacacaaaatttaatttgttttcttactatattaaaaatatattccaagttgaccataaaaataatcaataaacaaaacgagtaattacaaataaaaataaataaacactctctctttctctctttcctcgtcttcttcttcttcttctttttttttcgtaaaaattcttcttcttcttcttcttctccgagctccgtccgagcagagaagaagagtaaggtaagttttagagtgcacttgtgtggcactctcatttcttatcctgcgcctcttacgatttcttatggtgcgcttctccgactagtttcggtgtctaatggactcttcctcttcttctctatctctccaagaaaaaatctcttctggttatttctagggtttcgttggttcttttttcgaa

SEQ ID NO: 2643 - DNA, 2000 bp, Arabidopsis thaliana
gttctgaagattgattaaaaaaaatctgactcgtcctagcatgataaccataagaagtgtttcttaaaaatgtaaggaagacaaggataactgattaaaaatctgaattgctctagctagataaccatattaagtccttattaatttgtcaatgatatatagttttacaatacaagtaagcacttaccatcccaccaagttcatcctcttcatccagtctcgacatctttccattcacattaaactctaaatctacttcatcctgaccctatgattagagaagccaaatacaaataagaacatcatattacggtacatgcatgtctcaagaatcaacactttttttgtttatttcttgaaaataaaggaaacatacctctttctgctgctgcagacgttttaagtaagtagactgttttctgcggagctccatggaaaggttctgaagatctgttgcaagagaacgctgtcaaaagcagtatgccaaaaagtaggtcaagtccattggagagccccactatacatgtacacagaactttatcctcatgctacaaactcaaaacatagaataacccaaagtacattatatagagggaaaaaaaaacacttcatacattttgctgactgataatgtcaactagataggtagtcaaaacatatgagagtgatttaacccaaaattcctaactttcttctctaaaagcacaaaagaaaaggtaatgaccatgcattctttattgttaacaagctcgattctgaaaaagtgtccaacaacctacctgcacatttttcctgagatttgattcttcagaaggccctctagtagataacatctgcaatctcttttctgacttcctcaacaaatctgtgatctcatgagtgagcatctcgacttcacgatgaatccctttgttatctccaaatgtaggcataagagcctttgaatgtgcctttgctagttcattcattttgtctcgcaccttttgtatattaaaagttatctcctcagaatcatcaacccaagctggtggcataccaattgtgaaggcatcactactgcaaacattcacaacaacacttaaatcatttgctcattctgttacctaattcgtttagggttctaattctgtatctcaaatcaatcccatgattacaattcgtttctatatataagttcatagaatttcccaggttttgcagaatcaaacaacacattatattattaccttgatggaccaggatcataggaattcaaaggagcataagaggagtgattggaccgggaaaatgaaccgctaaccatttcgatcaccggaccaccgaacgaatcagacgccgataaagataatggagcacgcgcgctcttacacgcatccctgtgtttccggtacaccgtcgttcgattcctcgtcgccatcaataccaaatcaattgattctcaacagaatctcgaaagtaaaatttcccggagaaaataaacaaaatcggagcttttgtcgtcggcaaaagcaaacgaatctgaatcgcaaaatcgtttctcattagcgcgtgttacagacttagcaacgaaggagaagtatttgggcctttttaggcccatttatatattgggcttatagtccacttgcgcgatagggtcaatataagtgtgtggagcacacgttttaagacggtggcgcaaagacgaaaatgcccgtagattcgtggcggctaaaagtcaacagagggacgttggtggttcagggtaaaagaggctatagtgaccggttaggggtagtttggtcattggatttagctcaatagattcgtgtccatggattccctcatgtcgccagagaaaaagaccacatttaaaggtcttgcctttttggtgtgtttcctcgcactttcaggctgaacaaagtactgacagatgctaataaatacacggaggaagaatatgctcctttaattattatctgagatttttcaattcaagttcgtgtggattcagaatcaaa

SEQ ID NO: 2644 - DNA, 607 bp, Arabidopsis thaliana
tgatggatcccagcacaaacccaaaacgtaagtacgatcccgtcctttgtgttaattatatgattgctttgtatttcattgttgatgattcgttggtctctcaaaaagaaaggcaaaaaaaaaaacactaaaactgatttcaccccaatattgtttttttttttttttcttcttccattaatagcattttcgttaatgagttcaatagtttgattttgaattgcaaagttcatgtcactgcagcctttcactatgccgtagctttttaccgcattaagtcatcaatcggatccttagtacggttttagttacgatcatgaaatagtaaaatcagtccagtggaatgcaaacttggctgagtttctttatttcaatcaaggttggtttggttaccacgtgatcgtcgtttttccctattaacacgtgtgctctctctgtcaatcaaatcgtcaccgtacatctaatttgcatggtctcttcatcagacagtccagaacacacaaacacctaacaactgttttcgtcttctgtacttaatgagacacttcaaagcttatgctaaattagacacgaatcataagagcaaaacttaaagaagtaaagaacc

SEQ ID NO: 2645 - DNA, 2000 bp, Arabidopsis thaliana
ggcccatatattgttaatattgtacacttcaaatattatttagttagaaaaaaaaaaaaaaaaactcttgtaaaactggatggttctagtttagttttaaaaaatggttagatgataacgatattaatatacgataaagtttatataaaatatcttttcataaccaaatttacatgacaactaacattcgggtaagccatgtaaaagacgagatagagattttgaccaaagaagaaaagtagagagaacatgcaaaagccaaaaagaaaacatagccaaatggttgagtggtgtagatggaccgaaccaacagacatgttctcagttcatataccaaccgcctaacattacagcctgtccccatcccctatctttatttttctttttggctcatttagcttcaactttttttaataggtgtgattagaacatactaaaaaaaacatatgttttaacttatattatatgaataaagtgttgtttttaatagtttatatttctattacaagtacaatatataggatattttggttaacaattttaaatttaaaagatattgtgagtacaaatcattaagcttaacacaaatgttcattgcttcttaattcttacaatcggaaaatttggacaaaaaatctagactaatctccaaaacattgtgaaaaattgggggttttttttatcatttaaattgtctatagtggtcaatcattattaaaaaaaattgttttttgttgaaattttaaattataaaaaaaaaacacgtttatacataaaatgcaaaaacttttcttaaaccaaattacagagaaaggctatcaccatccttgtcttgatgccaaccacacttgtaatcccaaaatacatacttaaactatactatactaacatgaattggttatacgattatctatctagttagctacataattcatataattagttttttaaaatatacttatgtaatgatagtaactaaaaaatatactatctcgagaaatccaaccaaaatgctatgatagtatataaaataaaatgaaagaaagaggaaccaagttgtgaaaccatttaccaagaagaagaagaaaaaaacaagatggtcgagtctcgtgatagtatgaagctggggccgaaaccacgaatcaaagaaccatttgacgatgcaagtggtcatcgataaccaatcaatagaaactccaccgcctcaaaatatcatagtgctatttaatttttcatactatcatttattgtaggctataacatatttttgtattgtagatggacggctagtacacgcaagttagtcaataaacttttaacaaatggcatcttgacatgcttaaacacattttataattcgaacctcactttgcctactttacacacgtctacttatagtagatgagcatcaatcattgaaccgttcgtataatacaattttttttttgtaatacgttataattagaaagtaatggaaaataagttgaaacacaaattttcaacggttttactaagatttaattttacaattttcaaaatataaccgaattatttaaatcgtattaaatttataattaattttctaaaaaaaaacacagattaaaaaaatatattaaaactaatcataaatatattaatttttgtaatttatatttttttataactttaaactaataatattcaattatttatcttaaagtttacaaattatcaataataactaataaataatgcataaaaactttttaaaaattaactttttgaaacaaatttttttctaaaaaattaaataataaagaacagaaaaaatattattcaactaaaaatattggataataactctgaaagtttgcatttttcaaataaatcattgattttttttgtttgacataaaacattaatttccccttgtaaatcacacatttaaaatctaactatatttaaacaaaaaaaaaaagtccaattttgactttaattatataaaaaaagcaaagctaatt

SEQ ID NO: 2646 - DNA, 803 bp, Arabidopsis thaliana
taggctggctacaaattctttactctttttttgtattttccaacagatttgtcaaagagggtcttttttttctccaaataatcctttgaataatcatcattcactttcttaacttctttggttattatttacctttatacattttgttcatacttactatgcatcaatatcaacaaggttgatttttccatcgaattccaccacaccaaaaggaaccaagaaaccataccaaaacttctttggttatttatctgaaactaattcaaaaagatctgatcagtaaacctttgttctattgaatctcacattaagagaaacccttttaacttgagaaggcatacagatatagagcatcacaaaatccccgaaacaaaaccgaaccagtcataaccaagaagggggaaagctactagatgaagctagtaggtggaagtttgagtcatttggcctattactacgcactagttatgatcttttctctgatacattgaatactttattaaaaaccattacataaccaatgtaaaagcaaatatttaaacgttaaacagtccaattcagctttgaaaaatcctcccagaagaagaagactagtcaatattggttgcgatggccttgtagaggcattattatctgttagataatattaaacattaatgagaaagtagaaatgcttctgtataaataccttcattacttgtgtcttatttcatcaccttcaccttcaacatcaaacatcacatttcttcctcttttctctcttttttctcagtcttcaaagagtttcttagtaacccaaatca

SEQ ID NO: 2647 - DNA, 2000 bp, Arabidopsis thaliana
aagaagctcttagactaattaattaatatcttagaggtacaaaaacaatttgattattattactttatgcgtcatctcttagatcatcttccacgggcctcatggacatggacattgacatcatgactcatgagtttggttggtgtaaagttcaaaaatattaacacataacaccaaacgatcaatgtcttatacatatttctatgtttaaaattcactaaaatatgttgcaaacagaataaaaaatattagctgcttataccaattgtagaagaataatatatagcaacaaaaataatatagaatgagtacaaaatggaaaataatctggtgtgtatataagttgattttcataaaattctgatagtaatatttgacacaaatcattcataaattaaaattttctatttaatagcattttgaaaaaaaattatttaaattataaattaacattttctatttaatagcattttgaaaaaattatattattcataaatgatgcattgaaatgttagatttatggtaaacatcaatctttatacattattaaaactcgttgaaaagtttaagtatcaactaaatttataggcgtttattgttttaaaagtttagaaccataaagttcaaatcattccaccacaattttgatcaaagttaaccacaacaaatgacaaggattagatgttacttggaatcgtttgattatagataaagaaaacgatattagtacttttatagttcagaataaatacataattggaagtcattttatgtgatacggcaagataactcttttgttcagcgccgttcttttgttgtcccaaggaactattgtgcgtaaacatcaaccccaaaaatgcataccatgtcacaactttttgaaagaacttaaattaacttaccaattttacaagaagtgaatacaactaatacagctttttaacctaggcttaattgcacgctaatgcttacaacatattccatcagattctgtcttttctttataaaaagttttagagatttctttctatttcaaattatttggtgttttacatctaaagtgtaagaaaccaattttcttttttttcaaaacgcaactaaaaaaaatcctttacatattatacattttattcttatttcattaataataaaatataatttattttataattttctctatcatgtattcttcaataatataacatcatattttgaccccacaaaaaaacttatataaagagtacaagaaaaacaaaactaatgtttgatagcttttacatttttaaaatctgagaaaattgaagttttaactccatcaaataacattgcaaaatcacataaaaattatgatttgtgatttcacgtttaaattttgttttgttagaaatctatttgataaagtagacgtttatataccaacataatcgtctaggtaattaaattagacatccacataacaaaatagcatgttatatatatttttaaaaatcacatattcgataataattaaataaaagttattaaaaaattaaaaatcaatatactatttaatggcgatcaaaaacatcattatttgtttttaaatttcatcgtcaaatcttgccatctacctaatttaaccacacaaaaacatcatcaaattattcctgtataataccaaattaaactcttttgtccaaaacaatttcaaaaaagaaaactctgtggaataagaaacgggcaaagaggggccagaagtttagccacgtcagctacaagagagtgccacatcatcaccataagcctctcccacctgtacggatccctcccaatataaattggaaccaaactctctcctcagaaaaaaccttctcattacacttgcatgtgcaacgacccgaccctatacccgacccggcccacattttaaacccattttagccttttctgtttccgccgccgactgatcggaataatcgatcaaagagagaacaactgaatcttcgccggatactacgccg

SEQ ID NO: 2648 - DNA, 2000 bp, Arabidopsis thaliana
aatttggttaaaaaccggtttgcacaatctcaaaaccgaagccgaaaacaaaggtcctaccgagatttgaactcgggttactggattcagagtccaatgtcctgaccactagaccataggaccagttgcttcgagtcctaccgttttggtttaagatctagacatgttcaaggactacaccatcgtggtctccgccgatacggcagtctgatcaaaacgattcaagagaatcaggcggaaggttttttctgaaattcataaaatcgggtgatctttgcaatatgcatacgtatatccttggtaaatgtattggctttgtttggttaacgatgttgataggattaggttgtgatcaaattagaaaaaaattgggtcttttctgattttttttggccaattctctgattatgagttttggaatggttggaatggtagaggagggtttaggcgtaaggtaagagaaaatgggattgaacccaatttgcatacttcaaattctctggtgagcttgatgtttcattgatttgacaaagcatgtatttgagattgtgggcagttgcaggatcagactacatgttacttacaacaggcatgatcaaggagtattgtaaggtagggtagagaaatgatatgacaatgatgcaggttttgagtattgcctagctttgtatcaagatttggatgagaagtgactttcaggcttgtagtttagtgattggagattctgcaagaagggaaaattacatgaaggttatgtggtttttctgcaatatgattcgttaaggaggccaagccaaatgtagtcaaatacaccacgttaatgattcatccgtatggggacagcttagatttttctgtgtgttgcatccaaagatgtactgtgtacccaaattccgagttcaccaaccagggatgaatgatactgtgtacctaaattccaaagatgtactgtgtaccctaacagttttcgtctggttaggagataatcacttcttgaaagcagtttgaatgtttctcaaagaatggtcatgtactacccacgttttttgtttggttatcttggaggtaagatgagctggtgacaattctgtttttggcttatactaagattaacgtggagctagtcctttgctttacggagctttgataagatgttttaggatttaattacccatcaagaagataatgagggagaaaaaggctaaagagattcattcgacttgcaaaaccatggttggaattttgtgcacatagtgattgaggagagagatagaaagtgaagggactttaaatgttagacccgttgaaactagtggtgggcctgtgaaggttgaggttgagggaagagccagcctgcccaaaagaaaaaatatcttgtgcaacttgtgatgcttggtagctttggtcctacatgcttatccagatatttgcagagaaagaaacatcaaaaggttagccacattataggaagaactaaaattttctaatgctattttgctcaaataggtgtttgagagctctgttcatttaataatgtccatatttgtggctatgttcactgaattattaacagggaaagcagttgaaagatagctaacatgatgtaggggttttggtttttaggaggcaaagaggctttcatgggaccacactggatgatagttgcaaaatacattgtggttaaggtttgtctcttgagcacatgttgagactgggatactcttctgtgagaacgcattaatagctgtattaagtgttgatagaatttgtggacggtaattcccgtgacatttatggaggtatctgtgatgtttttcctattaaaaagacaaataaggagacccaaaaaaggtgagaacaactatacacacaaagaaatttcttttgtctgaagacaaagggagtggtcaatgaccagtactcccctatatgttgggttaggacttctactcattttgcatcgttgagatactatactgccttgaaagacttggtattgg

SEQ ID NO: 2649 - DNA, 2000 bp, Arabidopsis thaliana
tcacgaaaactaccacatggcgcaaaggccaaaaccacaaaattcagaaaagttggtatgcttccacgtaattgacatttttcacgtgatttgcttgtgactactgatgttacaattagtagacgtaccgttcaataacgtgatatttattagagattattgatttgcataattagttacaaaatcacacgtcacaaccatttttccccaatattacgtccaaaactgttgattcgtttgatttttattgtccgtccaatgactatttcgatttattataacttcttgtgttagtaaatagtaattcaagtctatatatactcttatatcataaattaggaaaagtaagtactgtatacgatcattgtatctaataaaatatgaaatatgcgagcaataacggccaaatagagcgtaacttcagttttttttgtgatacctagttttaaataccctaaacatcaagttacctcaaattggcaaaacctaattttgctgaaattgaaagaaaaataatatatttttatttctatatttgacttcatttaaatattattttcgaaataaatatttacctacgattgattttatcaaccagttgaacgaataatcttcttttttgtatgttaaggtgcacttataatatatatttctatatatatcacatgaaagaaaaataaaataatttaaataataacaactttcagaactaagtttttttcatattaattataaaaaatttgtatagtatactatagactcaataatagtaagtactaagcagtaaccatcaataacaatattttctaggactaacattttatttctcttcctacgaacgtaccacattgtatcatgatagccaatcaaaatacacagtactgaaactagtaatgataataagttaggcagcctaattatatacaacttttcaaatacgtcatatgaacaaataacattttccgtaatatgtactgaaaatttccacgataaaaaacaataaaaatgctcgattaatgttcttatacactggcattaacaattctcacagcaaaactaccacactaatcacaatcttatgctcatgtagtatttttagacaacattgtacatgtagaaagttctttaactcttaagtattatcgactagttttttttctagaatgaatttttctaatcgaatactttaaaaatagagtcgacgaaagagattaaatataacaaaaccaaaccacgtgaggatcataagctatggacgaggaaaatcgtcaaactttgagataaatttttgattgattaggtgtttgttgtactttttcttattaatatccagaattcagaaccttctcttcctcaaatctgtctttatcctttttaattcaattttaatctcaacttttctatattttatcgtctaaatttaaagaaaagaaaaaacccaaaaacagaggattttgatcaagtaaaagaaagaatattttctagagaaagcaaatcgattctctcacctttatatatataacctctccacctctgtttcgtctctcaatatatatccactggtctttcctttttccggcaaaattgtaacagaaccaaaaattactctgtttttttttattttcttgacaagtctgcatttttctcctctgttttggaattttctcgtttctggttttccgatcataaaaaacaaacaaaactaccgtaaaataggctctctccacagaaaaaaaagaagacttttctttcattcttctgcaagtaactgagcagatttcggttttttcttcttcaaattgatatttttaaagttataaaaatttcttgtccataatttccgttttccttaaattcagctgtcctaacgtcaaatctcagacactcgcttgcgtgtctccctctcttaaactctctctttctctttctcttttggtttctgggttatttcaaagaaaagaatcaagaaacccctctttctctcttacaagaatcccatc

SEQ ID NO: 2650 - DNA, 2000 bp, Arabidopsis thaliana
aaatactgggaaattacatctatatcatttcacaaactgtgataaaaccaaatatttacctctactggtggtatgtcttgtaggcttgtagttgtagccacagtaactttttctgtaggttttacaatggcaggaggctttgacaactcttctccaaacttgggaatggcaacattagccaatgcccccaacctcttctattttcttatcttgtatttgacacccttgcaatgcaaatctctgttatgacaatacttaactcggatttatgtgcagttgagggatcctacactcgctcacagatccttttaagtggcgtcaccattactgttttttgctatattctgcatgccctgcgttctatttttgggtggttattacagtaggaaattgtagaggacttgtcatagtcttttccattacatctataatcttcttgggttatattaatttatatacccagaaaacataaaaattaagaatatacctataatttttgtataattagttctctttcctcaacttatataagttggacaaaaatacccttccgctcatcttaaattatttaacaacataagaaaattattacagacgtcttttatctgattcaaatgatattgtttatcaaatatataaataaaagtatattatgaattaactgataactattatgttaacatgataacaaaatatagatcaataagtttataaatatattatgttaaattatattatatcgcgataagattataaatataccgtattaaatcatattatatcgcgataaatttataatttatgtgatatattatgttaacagtgatattttgttaactatactttttatgtatttgaattttagtttttatgttttctaggtatataaattaactattttgttatcttgttaacatagttattagtttattgtaaaaaataaaagaaattgtaaaaggtaaaatcgtctaaaataagttaacagtaacatttgtacagttaacaactagtcaaactaattataaggtcttccatgtgtacagagtgatattacccgatcttcttctctcttgccatgtctttttttttttttgctaagagagtaaatatcaatatatgaaaatgtagttgtcacaaacttacaatagtagaagacctaaagagtttgatccatgccaaaaaaagagagcttaaaaacagggatcaatttacaatatgcatctatccttagtggagccacaagctcatgaggtttctcaatttcttcatcttccttctcctggctgtgatagaaatttataaactgatcacggtcatgttcttttgtaatcgctgcgtcagcaatcagcgacacaaagttataacttacttgcatgtaaagtatgtggagagtattttaccacgacatgatccacgacatactaagttataacttacttgcatgtaaagtatgtggagagtattaaatagcacgaatattctctaaataaagattgaaacttggaagatgtctgtacaagacaaattttattctaaataattctaccgaatatttttctcttaaattttagttttaagtatatttgattttttttgtatttgttttgattttccaggaaatgagtaaatttcgtcgagtccctctaatattgaatctagtgttttttataattattttagtaatgcatttatgatgttttatttttgtggctacgagaagaaaggccttgaaatcttcgatagaattttgtcttgttcagacatcttccaggtttctattttgttttttgtaaggaatcttccaagtcttcatgcgggcggacaaagctactatcggtctaagtctccgcctatgagtctcctgctatcttcctttttaatcttcttggtgatagttacgttgagatatgcggttgcctttttaagcttaaaacttaagcttctttaattttataattccaacgacagctttacacgaaacaaacaaggcacagagatta

SEQ ID NO: 2651 - DNA, 2000 bp, Arabidopsis thaliana
aagatatttggaagaaaatctatgaattcgatagattttgaggaatatactattgttatgcgtttttaattttttatgcggcattattatgtttctttaaatggtttttgtgtagattatgtagaggataaaatatgaaatccgaattggtgagttattacttgattttagtaaaaaacggaattgatttttatggagaagaaacattagttagtttcttaaaatctgttttgtagggatatattgcaatgtatgaatttcaaaaatggatatgatttgtttggaagaaatcgtggagttaatatggagagattttaggaaataattttgatagagacgattaagatggcaagacgttaaggaaatcataaattgtgattagcaaaagaattaattacgtttattaaagattgactaagattgcctattgttgttggaattaattaagaaaaatataggagaatatatgtgataccaaaaacatattaaaacaaatgaatgttaaatctggcagattttgaatcaaatcatattttatcctctacatagtcccaatcgtaatttctttgaaaacagaatgattctgaatggtttagaataggaatatgcttgagtatcataagtgcaaaataataatcaaaatgccgtatttagattttgatttgattctgaatcaaactgtcgagatatggtaaatgtatttacccttatttttacgcttgtacatgtaaaacagaaagatttgggtggtttataagatggaatattgcgggatttagattatatcttgactggcaagcaaatagtaaaagattttgtagttaaggtgatatacgtaaatcaggatacataattgctatgaatgaggagtggagagaatatatgattcgatcggataaattttttggaaggcaataatcaataacaatttgaataatattatagttggcgaaatttaatttgcgaggtgatatattggaattttgaattgatgatgatttgtagaatgtgtaaaaatatattgactataccatatgtaagattatatgataaatagagggttcttttaaggtttatggaattaatgcatgattaataatcgtttaacttatagaaatgtgatatcgaaatacgaatatttggtaagagtgtagtaaatatttagagattttggaatgaagtaagtaaagatatggttagttatttggttgttcggatttttaagaaatattatttcgtgtaatattgaattagtagagatttaagggattaatgtgtgcaatttatgagggtagtgcaaaataatatttttgtttaggtaattaattagtgcaaaacgtgaatagttcatcaaaaatttggtcattgtcctaacgcagacaatcttgtctgattgattttatagggactaaacatacaatatcgaaattgaaaaagaatttttcgacacaaatctttcccaaaattgtatatgtagataatttataaatttgttatcactatcttctaagaaatctgtcaaccaaaaaagtatgatataaaaaatctgtcgtatttaaaaaattctactgaataagaataaatctggtataactaaatgatagacttttgtaaaatcgctagaaatttttttaaagaatattttgtatttattttatttttaacacatgaaaaaaatattttaaacaaaaaaaacaatttaattccaatattttagaaaatattctaataattaatctcattacttaagttaacccctaaatatgttacgttttaaaactatctaagcacgttctaatacacatcatacatcatacagaaacacatatattcctccgtgctgtaacacgggtctgatcttagtaaaatagtggagagaagaatattcttctggataccttttaatattccccaaaacttctgaatcttcttctcaatttttctcgacattttctcatcgaaagctctcttcctttccctttttggcgctcaatacaatc

SEQ ID NO: 2652 - DNA, 2000 bp, Arabidopsis thaliana
taatgaggcgctagatgagcaagacgacgttgaagacggtaaaacagatgaagatgaataggagggggacaacgaaaatggtgatgggtatgatgattatcagggtgactatggatctatgggagaagtaccctcgatcctactatcgatggtagtgaaagtagtggcgaagattatgattacaacaagtggaacgatgtaattgtagaagaatatggaatagggaatgttgaggaggacttcattttcactcaactgactgttcaacgtccaggggaattcagtcggctgttggcagcgtgtacgtacacaagtcagcgtgtacctaacaaagataacatttctcactcgggtgaccgtacaccagctgtgactccaagaagtacgtgtcaacatggtttgtaccaatgtacgtacactatagattgaggagtatttttaagaacagaaaagtcatacaacaaacaatgtcttatctcgcaatcaaacaatgtttttgctataagcaacctaggtcatgtcctacaagattggagatagtatgcgttgatgatacctgtccatgacatttgactgctcaagtcgtcaggaattcagaatgtttcaaaatcacatcgtatgaaagtcttagaatatatctcagtcattgtcaatatcggtttattattgaatcaataaatttttcttaataatttaattcacaaacaaagatgtacgtatattactacacatgtacatacattaatttaccaacaaaaatgtacgtacattattgcacatatacgtacataatttttcaatatgaggaacaaatattatttcaccatatatttttatttaattattatgtatgtatggagattattgagatataagaatatgtaataaaatagcttaagttattagaaatcgtaccatatacgttccactaaataagttcgtgtacgtacattgtaaattgaatatacgtacacaaaagaaattcgatgaaggttataactgtaatttttcagtcatcttcaacctctgtatccttttttgcaaacctaattttgcggccgtctttaccagttttttcaaaatctcattttttttttcattttgaatactttttacaaataaatcttgtaaacctagagtatttttagttttaaaagctaaagtgtttgaatttttggttttttttgtattttgttcatctctgaaaacatgaaatttgtttctcaattttaaagttcaataggatgcctcaaatcaattacccaacaatttgaacggtaatgtcgaaaaatgaaggagtggatgaatgaatttcgaaattatttctacttttctctcggatctctccgtctctttctcgttttcttcgtttcagttttttttttttttttcgcaaaaccaaactgcaaaaaaaactaaaccaaaaccaactgcaactgtgcgattggttgattctattaagggtatttcagtcacaaaatgtttcaaaagggaaaacgtgaaaaccaactctcatttatccaaacgatgagagcaaaaaaaatttcatccacttttgtgaaaatttcttaatttttaataagtcatgaaagttgaaaccatttttggtcacctaatttgactttcacttgtcctttgatccttgacagtatatgaaacccgtactaggccttgactcgtttcatattcattcccttgtagtttccaaactatttggaagcggaaacgacgtcgctctttccagtgttactatcgaagacatttacatgccacttaaggcataatgacaacgaagtgttcgacgtatcgtttacgtaagcgcaatttagggaagaaaagtctttttgccttgctccttacgtcaccctaaaagtcaagtgttcgtgatagaaaagtctcttcgtatttgatccacaattctccaagagaataaatacaaatcaaaatctgtttatttaaagccaaacaataggttttaataaggaaacgttaatagataa

SEQ ID NO: 2653 - DNA, 2000 bp, Arabidopsis thaliana
attccctattccatattcttctacaattacatcgttccacttgttgtaatcataatcttcgccactactttcactaccatcgatagtaggatcgagggtacttctcccatagatccatagtcaccctgataatcatcatacccatcaccattttcgttgtccccctcctattcatcttcatctgttttaccgtcttcaacgtcgtcttgctcatctagcgcctcattattttcatcaacatttgaaacactatcacacacatggtcactttcagcatcgtcaccatgagtcctagagacattatttccgagtgtcttgacggttgtaatgaaagagacaaacaagttaagaaaaagatacccaccacgaatcaaaaagaacgtatctaaccccacttgactgtcaatgtagacaggagggcgtttagtatctatcatcactgacatctctcccggcatccagtaactaattatgggattgatctctgcggacttcaaactgaaagcctcgcttagtgtacgtcatattttccttaacacgtacacatcgaccaaacatgtcttcctctggttcaaatttccattcttcttctttgcatctccactcaccgaccatagtaaatacgggaatatccattacccaactgcatcataaattcaggagaaacccattaaatgcaactgaaaacatgattatatctacaaaaacaaatagaatttcgatatacacacttataaacataaatatctactcatttagcattttcaaccaacaaaataggaaataaaagatttctgggtttttctataaaaaacaaagttgatttcgaatacaatgaagatcatagtgtgttataacaaaaaacttcttaaaaccttcattagttacacgataatgcttgtcttggctccaaacttcgtaaataaacaagatcaacccttcttcagcatcacattccttcgtaaaataaattttgtttctgggttcatctttaattcaacaattattatctcaaatattaatccaaagtaataatgattttgcattaattgtgacaagagtcacgtctaaactttttgggcattaaatattgatggcaaattgtttttcaatgttagtaagccccccttttaactgtacaaccgcacaaatcaatgtttctccaaaatatctttaaccaaaccggaatagtgtacctaactaaatcgtctaacttaaccgtacattcaaacaatatctagttacgctggtaagggtaaaatggtcaaatttcagctgaaaagataaaacatgaaaactacctttgactttgccaatctctgaaaataaaacatagtcaaagggtgtgacctgcaaattaccttacaaattctccttctcctttttttttttttaatatctgaaaattcaagtccaaagactctattttttcccgaggcgggatctacagtaggttaaactcatctcttttagataagagatctctttcaacatgcctcgaaccctacacctccacttgagagatttaccattggactaaccgcacgttagaaaaaattcaaattctcgtttaacaatgcgttgaagacaaaaagtctatacgggataaaaaactatttaaaatgaaaaaataaatcattaaaaaaaaggatatcttagatcaacatcacaatttttttatttagatttgattatcaattttcttttttaaaatcacctcatcagaatttatcaagaaacaattttagctaggtcacctctaataagtgaaatcattaaacaacgatataaacaattatgaaagtgttactccaaaattttattgtaacaagtactagctattacaattaaattttaagaatatgctaccacacctagtcaagtcaactagtacccatttctcacgtcacatattaacatgcaatgacgggttataaattaatctatcctataatgagaggaaaaaaaaaccattttaacaaccttatcaatttgtgtaa

SEQ ID NO: 2654 - DNA, 2000 bp, Arabidopsis thaliana
actgattggatcagctgatagaattttattaaacaaaaaaagactatttgtatattgatttcatttttagttcccgagaagagtagaacaaatgctaaaatgtatcatgcggcccaataaccaacaaaactagttgaaagatggatcaatggtttttacatgaagaaagcccaaaccatacactaataatctaatattctattaaaaggacttgctgttattcggcccaatagccaacaaaactaattgaaagatggatcaggggctatggaatacctcagaataaaaagtgttattcattgcagaggaccccttaagcggacatggttgggtccttgttcgacaagacttagtcctccatcttggcctcaagagtgctcgacgaagtttatcaccgcttcatgcggaattttattccttgctatgggcaatagaatgcatgatctctattagcgatacttctggcgcttttgcttccgactgttcagacctgatttctatcattaacaatcaagaagattggccgacattcgcagcggaattgacatcctatcgctccttagtttatttttctccttcttttcgtattagatttcttcctcgtagttctaatactcgagcagattgtttagctaagaaaactcgggctcgtaatagccttttctcccatgtaagcacatcggttcctgaatgattctttctagcggagagtctctttccgataacttaatataaatggtgtttgatgaaaaaaacaaattatcgtaatgatcctaaaaaggagttagaaaatattaatatcttatctacatctagatgataattgtttttatgatccttattagatagtgtttaaatttaattatccactaatttaagcataaactatatattctatcaccgtttaaccaatccatataaatctcttttaaagcttctagaaatgagtctcacacatcagaaattagctattttcttattttattacaagaagagaaaaaaacaaacaaacaaacatgtgttactctcattttgccacatgcattataacgtataggtaggtgaatcacctaacttgtttcagcttatgtaattaactttaccaatatattaatttattgttgataagtatattttaaattaagatatgggaccagaaaaataacaaaagtttctattaaaaaatgcttgcatttaaaagagaagaatgtataaaatctttatcaaaaaaaagagtatatcatagattcataataataaaaaaaatttgataaatgactttttatttaaaaacttaagatattacaagctattactctctttgtttatttttaattgattttctaacaaaacacacatattaagaaaacatattaaaactgattataaatgtatcgatttttgtgatttatatttttctataattctaaatcaatgatatttaattatttgtgttgaactttaaaatttatcattaataactaataattagtgcatagaaaatctaaaaatcaatctttttgaaacaattttttttctaaaaaatcaattaaaaagaacagagagaatattgttttaataataaatgttttattggtaatccaatattaaaataattatatggattaaatttaattataaattttaaaaaatttgaacaaaaaattatttagtgaattgattccaacatgtggaaaaaaggaaacagataattaaaaaaattgattggttctgccaaaattgactaccttcaaatcagagatgattttaaaaataaattcatccaattaaacttgccacatcatcaacttggaccagaatattcgcagtcaccaaaaacaaaccaatgtgtccaggttcaatgaatctggaatcacctggttcttcgtatttttgttatataatgccacgcttctcacaaatcatcttgaattgaaaataaaaaacgaagaatcaaaacaaatcttagagaaaacaaaaatccaatttttgctgtgaag

SEQ ID NO: 2655 - DNA, 1890 bp, Arabidopsis thaliana
tcttaaattagagcctagagaggggcatctcctttagaacctttaattggagttgagttctttaccatgttttggtgaaagattttgtcgtttgctatcgacaatgttatatataaattagatatctttctttctttgttaatattagctatgtccatctttggctaattatgtatttggcaaatctgctactaaatatcattaatttagccgatttcatgcaaaaataaataagccctaaaatgctgagtttccaattctgaagacattttcaaccatatcaatcgatcaatgtcatatattcacatatcgaaggtgtacatataaaggattgaatccatgattttcctttgaactcttttatgaatagttttgaatgtttttttgtttgattatagttataagatatttaatagcggtgagtgaacgagaccaaaaaaaaggtgattaaatgtaataaactttaaaactatgggatatcgagaagaaaataatgtaacgagaaaacatcacattagacttcaataatgcttttaaatatagaaaaaggattgatagtagaagcaaagatttttatattggtatgattagtagtaaaacaacacggtaaaaaaaaaacagtaggcgaaccaaatagttagattttgattggtaatctcgtatggttgcagtattttaccgttctaaacttctaattattactagtgacgaaaacgttgaaaaacgagatttttaaaaaaaagttgtaactattttttttaacaaaaaaaagttgtaactattttggtattgtttattgttttttttatatacctaaaacctctaaccttgttttttaccagtcttacttttgacataaataaaaatagtggttagaaatagttttcagttctgctgctttcttaccctttttatgtctttatgattggtaatttggtatcaatcggaacaaactaaaattgttaattgtagtccttagtcctaatagttcggttatccattcggtttcagtttgtatctattcggtttcaactttttcggttctaaagtttagtattcatttggttattttgaaagtttgattcgtatcggttttttcagttttaaaatttaatatccattctattattttgctttgaatatttttggatatttcggttattttggatattttcgatcatttttgaatattttcggttattttttcgagtatttttactattttatatatcttttcaattatttttaattatgtagtctaaaaataaataatatttagtatccatttagttttggttctttcggttctttcatttatagaatttagtatccattcgaatattttccaatttttggtttgctttgatttaattagttttgctttgattttgattcggtatattcgagttggtttatttgtccacgcctagtagtcctgatcatgtaaatgacagaaaagcccaaacgagatccaaacctataaaggcccaataaatagttcacaaactcatgaccactacaatccaacgacgtcgtatcatctcgctgacgtaagataagcatcgtaactaattaaaatccaagtaataagtttgggtgccgtgcaggtaacaatcactaaaccctaaatccatcctctctgtttcctttatatatattctctccttttttcatttttttgatcctcttcttcttctacaatcaaaattcatttttttttcctctgatcatcatcgaaccctagtttcgtcttttgggtacgtttgatttcgcctctccactttgtcaatttcgagtttttgtggtttgggtttttttcccgatttagcctaacagataaagtttcgagttttgtttctcttaatcatcgtagatactaaccgaatcatc

SEQ ID NO: 2656 - DNA, 349 bp, Arabidopsis thaliana
gttcggatttcaagtgagattgagaagatgaagaagagcaagtttataaaaccctgaacaaaaaccccgacagggttgttctatccaattttaaaccttaggggtgataatttaatcaatcatataaattaggggtaatcatgtaaattaacaagattagttgaagaagaatcgtcaaattttgattttgtcttgtggattcttcaattcaaagattataaatttattgatgaacatcgtcaattcaaagattctctttttatcattcacgctacttcttcttcttcaatcgtcaatcgttgaatccgattcgatttgcctctcttccggcgtagcttcgacggtggca

SEQ ID NO: 2657 - DNA, 2000 bp, Arabidopsis thaliana
ttgtgaataaaacttaggtagaatttcattaaaaagaatatatattctatgtataaaaagacttaataaattattttatttcaaaaaagcagatctcacatacttttaaattttaaaattggtaactttcttcaaaattcctcttaaaatagtacgtctttccctttataaacggctaagttactacatcactttaactttgagctttttggtcctccgaatacgtcctcacattcttagtgacttaactagaactcatcttcccaactcatcttcccatgctttcgagaaaactttgttttggctttttgagaattgatgatcttaccatttcttcaaagagtcctataagattctcaacaaaaagccatactacttcaaccattggttctttgatttggagagatgcatgttgtagatgtgtttcttaataccatgatatcttggattcacatagaagtcatcccctcccaactctagatggaagagatcttttgcaactttggaaactcttgtcacaaactactttcgagtattcgagcagttaatgctccggtttcaagaatctaaattacaatttgagtagatgcattatcccttaaggtttaggaagaatacacaaatctcaactagtgagactgtgtggatctctttaacgtattagaaactctacttatgatgttctaaatggcataatatttttcatgaagatgattcttgctccttcaagtgagagtctcatagtgaaggtcgcattactagaaagtccctattgtgcaccgcaaggatttgttcacgaagttatagattagctggactattactctttcccgatttacaatgatacccatatacgtacacattcctcgtgttagagaccatatcttgccccatcaccacccgagccaatcatcccttctagagattatcgatcttaaaacgcagatggtaaactgcctctaaatattggggaagcgtagagacgaatgaattttaaacctcatacttttttgtcttcattctcgaacgaaataacattagatccctaatagtgcttgagatggtgttagggattattcggatgaagattaggagagaaaatcatcatgatgaaacatagctctctcattgggagacttctccacaccctcaaaagagtaaaagtttgataccattaaagcttgtgaaacgaacattaacaaccataatgaaaaaagcagataaaatattttaattttcattgaaaattttgaaaaatatgaaaataattcaatcgagtactatgcatatttttaataatcaagagaatcagctaagatataaagcattaatcaaatgtaatctcatctaataaattatcgaatcaatggtttaattaaagattttcgaaaataaatcaaatctaaatgattacaatctctccttaagatcacatttgaatagtgtttcatattaaatcaatcaacaaacgatgtatagaaaactagttattgttcttaaaattaattacattccttaaagtgacgtgcaaaatttccttattctaaaactgaaattaatgatttgcttaatttaacgagaatattattattaaatacttttaatatatttcattacaaaaaaaaaaaaaaaacttagtgcccatattcgattctcgccacgtcagcaaacaacacctcaacaacggcaccgatttttctgtcctcttcgttcaagtcattccaatattaataaaaaaacgaaattagtaaattaaaatttttaaacgaaaaaaaaaaaaactttggcctctccggtgactcttccttcttctgctaccgaacttttcgcttccttctctgaccaatttttttcaacaacctctcttcttcaacaaattctcttctcaaatcctccaaatcctctctgccatgaacgctactttcttcctcctctccaccaccgtctccaccgtcacaatcaccggattcaacggtctcgatttctcatcttagaaccac

SEQ ID NO: 2658 - DNA, 2000 bp, Arabidopsis thaliana
gttgagatcgacaatgtctctaccgtaaatcaaagatgaaacaagtcaaaaacatctttttgggcttataattgataaaaatacatcaagttatgtttgggccaaatagctcattttgtaaacaaagtaaaagttaaaacctaatctatatatacattattggagattttgtggccaaaagatcatttgcttatgcatttattacaattccctttgcattaaataatttgtgtctgcattaaatatacaaaatgggctaattatcaatattattatctacatatacatttttgcagtcattttagcaaataaatcctcaagttggaacttatttacaaagaatgccattagcattaatcattatcaattaattaatattcctaattattagtatttctttatctaatatttctccatcaattctaattacttttaaaaatgagaaatcttaggactttattaatatgatactttattaaagataaatattatggttatttaaagtttataaaatatttagagtatttaatgaaaaacgtttagaatatatataataaatacaatctataaaatcaaataaccatttcaaaagatttattttaaaattgatttgaattataaatcttttaataaaaatattattagaacaaaaaataataatgtttaattttaccgaactagattagatggtgggacgagtttagaatactatagtatatggatttttataacaattaaataaccatttgaaagaaaaaaataaattactttgaattatatatttttaaattaaagtattattaaaacaaaaataacaaaaaaaaaaatgtttaatttcactgaacattatagatatgtttaattgtaggacgggtttggtcgatagtaatacgagacggtataccacaggtgaaatctattagatatgtttaattttactgaacgagattagatggtatgacgggtttggattgatagtaatacgaaacgatatagtacggatgaaatcctaaatataacaattaaaatacaattatattatattaaacactaaacaaaacaaacaatattaataaaataaatataatttaaatttaaattatatagttataatctagattttaacttaataaactgtatgttattgtttccatattttttaaacagcaaaaatcaaacatattaattgtatactaaaaaaatagatataagagttgtacatttagaaaatacaaagcattaaatcatatatatctttaatctactaaacaaattaaatttttagtttcttaaaaaatcaccgaatggattaaaaccatatgtatttatttcataacggctaaatacatatactactcttacgacattccagagttcttgtatttttcacaaactatatagtctaaaatcaagtaaaataaattgaattttacataatatagtttatcgtgcttttattagatgcactatacattttaaccgtaatcccaactaacatactaagaaaacacatattataaatatatttgattcggatccttcattaatcttttgctaaaagccaaaaacaaataacgacattaaataatccaatatattccgagatttgcttcgtcaatatttttaagggaatgtgacacgtttacgcacttttagactatcttattcctttgggaatgttacactattaggcacttttagaaaatctttttacgtttgaggcactttccaaggttcaggcacttttccttgtttctggaagataaaaagacaattatatcctttccaaattaaaccataaattgtttaaccagttcgattggttttgttttctgtgttatctaataaaacacacgtgtaatacatgttccttctatttcgtgtcggttgagatcttgagatgagaaagagagttatctcacaattacagcaaataaatggatatttttaaaaaataaataatatatagtgtcgctcttcatctctaaaaccaaattctt

SEQ ID NO: 2659 - DNA, 2000 bp, Arabidopsis thaliana
tcagcaaacatcataaaaactgaaaaactcaatacaagtttgaaaacccacactaatataagacatggcacgtttgcattatgcttcctatattaccgactaaattagtgattgtcacaagtagccgacaacttttggacttaattagcaacagacttattgcttcagtaagaaaccaacagataagcgatgggcataaatggtatgtggctttttcatcctgttttcacgttttgaacgtcaagaaaaaaaattaataagggatttttgaatccatcccgtacgttttatatttataaatagtttagataaaccttaattcctcaactaaatactagtttcttggcatcttataaagaaactatatgcatttttatccctaataatatagtctgtagcgtatttgcctccatatattatcgccatattatcatagactgcatctcatttagggcaaatgtaatcatagtttttgtaaagaattgaactacctcttcgccttttttttttatataagacaattctttagtttctatctatggtttaatttgtattttgacgtgtatgatactaattaagattatgctatgttttgagttttagttgaataaaatttaatttgtaataattctaaaacaataaaaagtttagtgtaattttttttaactagaacggattaagagttaggactgatgttagaatcgcagttttttttttatggaatgacgtaaaagaattctttaataatcttacttggcaatattaaatggaacaacttaaaaggactagacaatattattggcgtgatatccaaataattacggtttaacaaagaataaaatggggaaaccctttggtatattggttatctaagagttcattaatatttatatacattaagaggttagagtttcgaggtcaagatattatgtttatttaaaaatttgcagattaatagagacaagtgtgtaggagatctccaacgatattcaattataaccgttcgtcagaattctacgcagatagaacgtcgttaggtcatagatcattgaaagtgtctatcaaaagcatggagattaaaaaagaaaaaagatttggagaaagaagtgacttttgtcctggatctattaagagtcgaaagaaatcgtccgttatacaatcgtgtatataacaattctcataatttacaatttataataccgaaaaaatataaaacaaaaaaaaaatattttaaatagaacgaatcagcctcaacaaaaaccttttttgaaaatggaaaagcttaggctgctttaacacgcccaatctcacacatacatattctctgttttcttctttcctttttgtaaaagggtttgctaattctctgctttgttttttttttgtttattaattctttacatttcctacaaagaaaaagacaagcatgaataactaacagcggttatactggaaatccgaagtcttttccacgtgctttctgatgaacatttaacataaaacgttcggactcttcgtgacacttaaaccaaacatacacgtacgtagctaacaatagacgtgtagattttaggtttacgtgtttttcaagttgggcaagaacaaaaaaaaaaagagagcctatgacgtgtgcaacaggataatagtgttagcaaaagaaatcatcagagccattatatgatattgtttgcttttcaattccatgaacgaacccataccaatccaaaacagcaattatcatctttctttattgaacaaacgtatctcattggtcgtgtcctaataaataattatatttcatatacatgtatatactttatagtttttgtttttccttttgctactctacatgactctcgatcgagggaaaaaactagttctcatgtttatccaaaactctatatcacctttttgatgtttttatataagaagacttgttcatccatactctttcaataaccttgacagaaaaaaaaaataaacacaaaatttcaataacc

SEQ ID NO: 2660 - DNA, 2000 bp, Arabidopsis thaliana
aaatatgcaagataatgcattattcattgccaagaggtccacttgaattatccatttctcttcttttatgtactttggtttttgttattcgaaagatttgttttttttttctttctctttactaatatgcatatcatttaaacataatttaatcataccacttgaatctagcagcatattgaggaaagaggattctgattcgaaacatatcattaggtctggtatttcatcactaatggataagggtatctgatcttagttgttcaaataaaaagggttaataaaaagaaaataatatttgtatccaatgataaaagttagatgtaaagttaaaaatagcaatgcaaacataatataatagtggatctatttctaaaaacggttaaataattttcgttatgggactaattattttttgttacgggactaattatttttcgtaattattttttacgatagaggacaaaacttattctttgttacgggactaattctttttccgtaacatatatatttttttatatgggattgtccaaataattaagtggagattcgagtttaaatttttgattaagattttcataacaatttggaattatgaaatattgattttgtcttatttccattttcttaattttttcttcatgattgttgtttacctattttctcaacttttttttaatttacgtgactcaagaaaaaaaaaataactacgttgttatttctctagaatctaaaaaaaataacaaatatataaaaattcaagaaatgaacatgagtgtaggagacacatttcgattacaaatgaaactgaacttgaccaaagagaaaaaagtaaggcatgaagagtaagacataactaatatgattttgagttaacctctaaggtatttctaaacccaaaaggtaattatagacaagttacatggccttgttcatgttcaagggctaggcaaactagatttataagaccagtcatcagcaagtctcttctatatatatcagatttacgttgcaaactaaaggtggcattaaccatcgagtttttttgacctttttattgttcgacccaaataaatatacaatcggtgtaaaggaccttaaaagttaaataaaatgtttagtgtacacaattcacctgaactaagttacaaattgctaagtgattaagatttccctaacctaaaatacacgtggtgttaagatttatataagttttgcgtaggtttcaaattctatgtttgtaacctaaactttttttattatctatgaaatatttacaatttagcaaaaacaatcgaataagatacacgttgcattaagtgattcgcttagttgtgaatgataaatgtttttttctaacattgggctttggaaaattttattaataaatattaggggagagttaacttcactcattgcattttttttttcttttgggaaaagtcttcactcactgcataagatatatgtattggaagaaagagagcgagagttgaattgtacaaaatgtttttcgttttttggccgtaatgtgtaaaataaattgtcatcagttaaataaagaaaacaagaacaataaatgatccaaattttatcattgtttctacaaataaatgacaaacataaagccatttcgtgcacacactcttaaaattattatattccattaagcaaaattttccatacacatatatatgctttttttttttgttttgttactcgtatctttccattataatattcgagaagatacgtagacgtattattgagcgaacaaaataatgctatttttccttttataaatctaacttttgatgactataagaaggaccatttgccatttggttttgtatgctcaaacaagtaactcttagtcgttcacgaaacatctcatatatatctagagagagaaacaaaacaatatatagagaatctatatagaatcatataagtggtacatacctctcaaatcgaggaagaaaatgaaaggaggaaag

SEQ ID NO: 2661 - DNA, 2000 bp, Arabidopsis thaliana
atttcagccatctggtcgtcgtccgttatatggaccttttcttattctatcgttttaacattgtaattaccgattatcttttttgttgaataaattttaaatgcttaggacaaaactaatattacatgttgtggtttcggacctggagagattacaggcttcggcccaaaacttccttgtattaaaaaaaaaaaaagaataaattttaaattctaaataaaaaagatatttactaaggatttttgtgaaagcaatactaattgcattaacattcatacatgatttgtataattgtttggagttgggtaagatgctcgacttccacattagggaacaaacaaagctagattaatgcacgtctagtgaaagatccatccctttgattacttaacttcacattagggaaaaaacaaagctaggttcatgcacttctagtgaatgatccatccctttgattacttaacttcacatttagggaacaaacaaagctagattcatgcacttctaggtgaaggatatcaggatatgccacatttctatcaaagaatacggttaagaaagtctataggaggacaaaaatagatatgttttcccaaaaaagattcaaagctcaagttaaatggaacaatgagttagcaaaaaatggtttaacgggaggagaaatagtggtagtgtcaaccaagtcgccttggtccagtagtaaagagaggtaattcctgtcacatgggttcgagtagctttggccactgggattcgagtaatttaacatgggttttttcgggttccagaattagtctttggacctagaaaccctttaagatcacctgaattatcaaaaaatatatatatagtagtagtgttgtgtcctatgttgaaaagtaatatggatcagctttggaattctccaggaagcaatgggatcatgtgggatcaaaaagaataataaagagaccacgattgggcaattactaggcacttatgtcattgaggtgattagtggatcataagattatgcctactgttatcctcaatttgaccgtatactattttcttctcttttagccatccttgaatacctaaccgaggttcaagaatcagtttatgctttcatgttgggttgacctttgttaaataggttatctagtcatgaagagcgaatcaagccaaactcttttttttttttctctttaattaaaataggattgtctctaaaataaaattttacctaatccccgattttgtaattttacttttcatctcaaagaaatacaaattaatattacaaaataaaaaaaaatatgaaatataacccgtcaccattaccatcaagttttcaaagttttaacgaataatatatcaaatcaaaactttcgtgatgcagaattcaatctttagaattttaaacatctaatacatatgatcgtaataaattttagaatatacatataaaaatgcatattattttttacataataatatcgatttccgttgtttactatacacgtagcaagacctaaacagttttaatctgatatagcggaaactaattttggcaccttagacaattgattggtcaattcaaccctcaataagcccaagtggaaagacaaagaaatttagggtattttgtcgaatgagacataatcaacttgactgctccaataaactgttttcactagatgatggatagtagttctgttctaaacatggttaatagagatccaaaacccaatttctctatggactttattggtgcaactctttaagtgaaattgaaaccttacttcaacacatttcaaatgtatctacctaattaactctttatataaaattaaaaaaaaccttagtgcataagtgggtaggtgaacttgagtctcttggcaatatgtaaagaggcgaaatcaaagttgatcaacaattaaacacaaaaacccttaagttgacgtggctgtatctcttccaactcttaaaaatcaattactattatacccctcagaaaa

SEQ ID NO: 2662 - DNA, 2004 bp, Oryza sativa
atggagcatctgtccccccttttacccttcatcgccctagccctaaaccttgccatcaccatgagcgaggaccagttcgtctattcgggcttctccggcagaaacctcacccttgatggtgcagcaacagttacagatgatggggttcttgagctgaccaatcgcaccgtccacatcaaaggccatgcgttctacccaactccatggcaattcaggaagacgcccaacgggacggtgcaatccttctcaattaactttgtgtttggcatgattcctgtctactctaatgaaaaatgtaccgatggcatgactttcgtgatctctccaaccagtgatatgtcaagtgctcaggactcccaatacttgggtctactcaacaaaacatcagatggaaaagcaagcaaccacatttttgcagtcgagcttgatagtagccaaaataccgagttccacgacatcgacgacaaccacgttggcatcgacatcaacaatctcacctcagttcaatctcggccagctggtttctatagtgataacaagagtatcttcaacaatttgtccctctgtagctacaagccaatgcaagtatgggttgactacaacgaagacaccacacagatcaaggtgaccatggctcccattgaggtaggcaaaccattgaggccactgttgtcagaaattcataacctctcacttgtgctagaagaaccatcctatatcggcttctcagcttcaactggtccaatcaacacattatattgtgtgctcggattgagcttgggtataaaccgtcctgccccagccattgacttatccaaattaccaaaactacctcgtgttagcccaaaaccacggactaaactactagagatcattctaccaattgccacagcaacattcattctcatagtgggaaccaccattgttcttttggtacggaggcgaatgaggtacgctgagctacatgaagattgggaggctgagtttgggccacaccgcttctcatataaggatctgtttcatgctacagacggatttaagaataggaatctacttggtctaggaggatttgggaaggtgtataaaggtgtgcttccaacttctaagttgcatgttgctgtgaaaagggtgtcccatgattcaaagcaaggaatgaaggagtttatcgctgagattgttagtatcggccgccttcgacatcgcaatctcgtgcagttacttggttattgcaggagaaaaggtgaactattattggtatatgaatatatgccgaatggtagtcttgataagtacttgtactgcgaagatagcaaacctacgcttgattgggctcagaggtttcaaatcatcaaaggtgttgcatctggcttgttttaccttcatgataggtgggaaaaaattgtcatccaccgtgatgttaaagcaagtaatgtgctccttgatggtgaaatgaacggtcgcctaggtgattttggccttgcaaagttatatgaccatggagcagacccgcaaacaacgcatgtagtcggtactatgggatacctagctccagagctcgcacgtaccggtaaggcaacacctctaacagatgtgtatgcttttggcatttttatccttgaggtaacatgtgggcaaagacctattgacaattatgcagatgacaattcacaaatgttaattgattgtgttgttgagcattggcacaaaggatcactcacaaacatgctagacaagcggttacttggtgactatgatgcagatgaggtatgtcttgtgttaaagctgggtttactgtgtgcacatccattttgcaaatcaaggcccagtatgcggcaagtcatgcaataccttgatggtgacaaaccactcccagagttgatgccaacaaacttgagttacagcatgttggctgtaatgcagaacaaaggtttcgagcaatatacatcattgccttccatagcaagcagcagtgacataacatctagcatctcaagtggaagatag

SEQ ID NO: 2663 - DNA, 2022 bp, Oryza sativa
atgcctgtccctggcgagaatcgtcggtgctttcttgcggtactccatttcttcaccatcatcctgataattatcacgtttccatcctccactgcagccattggcgatggtcagttcgggtactatggcttctccaacagcagtctcaccgtcgatggagctgccatggtgctgccagggggcttgctacagctgaccaacagtacggccaatatgaaaggccatgccttccatccgactcctttccggcttcgcaagtcgcccaacactacggtgcagtccttctccgcctccttggtgtttggcatcatctccccttacattgatcttgggtcacaaggcatggttttcttggttgccccaagcactaatttttctgatgcgttagccgcacagtacctgggtctgttcaacattagaaacattggcaatcgtagtaaccatgtttttgccgttgagatcaacaccatattgaatagcgagtttatggacatcgatgacaaccatatcggcatcgacatatgtgatcttcgctccgtgacatctcattcagcgggctactacgacaacagcaccggtggcttccataacttgagtctaatcagtggtgaggcgatgcaaatttggatcgactacgatggaggggcaaagcagattgacgtggccttggctccattcaaaatggccaaacccaccaagccactactgtcaatgccctatgacctctcatcagtgatctcagatgttgcatatgtaggtttatcagctgcaacaggcttagcagggtcgagtcattatattctaggctggagctttagcatgaatggacccactcctcctttcttcactgctcaactaccagatctacctcgtagagctcaagaagcttcacggcgcaaggtattgccgataattgttcctatagtaaccgccacatctgtcttactgataaccttggctgtcttcctatttgtgcggaggcgtttgagatatgctgagctgcgagaagattgggaaattcagtttggaccgcacaggttctcatttaaggacctatattttgcaactgaagggttcaagaatagtcacctcttaggcacaggaggatttggaagagtgtacaagggtctcctttccaaatctaacatgcagattgctgtgaagcgtgtgtcccatgaatcaaggcaaggcataagagaatttgttgcagagattgttagcatcggtcgccttcggcatcggaatattgtgcagttacttggctattgccggcgcaaagatgaacttatattggtctatgaatatatgccacatggtagccttgataaatacttgtattgtcatagcaaccatcctactttagattggattcaacgtttccgaataatcaaaggcgttgcatctggtttattgtaccttcatggagactgggagaaagttgtcatccatcgagacgtcaaggctagcaatgtgcttcttgatgcagaaatgaatgcacgcttaggtgattttggccttgcaagattatatgaccatggtactgacatgcaaaccacacacctagttggcactataggatatcttgcccctgagctagtacgaagaggtaaagcttcacccctcaccgatgtcttcgcctttggcatatttgttcttgaggttacttgtggacgaagacccattgaacataagatgaatagtgacaagctcctgttggtagactgggtgatggattgttggaacgagggatcacttcttgagacaatggatccaaagctccaaaatgagtatgatgctgatgaagcatgcctagcgctgaaactaggattgctttgctcacaccaatcccctgctgcaaagccaagcatgtggcatgtcatgcagtatcttaaccatgacttgccatttcccgagttggcgccaatggacatggtgcagaaccgtcaggtggactcacccgttgcatattgccaatcagtggtgagcgatggcaccatctctggcctctccgaagggaggtag

SEQ ID NO: 2664 - DNA, 864 bp, Oryza sativa
atggcgaacctgttcctgaagcaggcgaagcagtacgcggcgacgcggccggcctacccaccggagctcttcgacttcatcgcctctaagacggcccgtcacgaccttgcttgggacgtcggcaccggcagcggccaggccatcccgccggtgagcctcccttgcttgcttgctgttaaatactacatgccgactatattttttaactggcgaagctgtacaaggacgtggtgggcacggacacgagcgcgcagccagctgtccttacgcgccgcgccttccccaacgtgcgctaacgtccacacgccgccggacctccccctcgacggcatccacgccgccgtcgcgccgccgggctccgtcgacctcgtcaccgtggcgcaggccttccactggctcgacctgccgcgcttctacgcgcaggtccgctccgtcctgcgcgcgccgcagccgcagcaggcggcgggggtgctcgcggcctggtgctacaccgagccctgcgtcgacgccgccgtggacgacgccttctggcgcctctacaacgggtcgcagccgtactgggcgcccaaccggcggctggtcgacgaccggtacagcggcgtggacttccccttcgaccccgtcgacggcgaggcgcacacgggcccgttcgagttctcgacggagcggcgcatggacctcgacggctacctcgcctacatcacgtcgtggtcggcgtaccagacggccaaggagaaaggcgtcgagctgctcgacgaggcgacggtgcgcgggttcgccgacgcgtggggcggcgacagggtggaggtgaagacggtgaggtacccaatcttcctcaggatcggcaaggtgaggacagagtaa

SEQ ID NO: 2665 - DNA, 1152 bp, Oryza sativa
atgaggagtagtgacatagagaagcaagatgaagtcatgctacctggcttcaggtttcatccaacggatgaagagctcgtcagattctaccttagaaggaaaatccagcagaagtctcttcccattgagctcatcaggcagctggacatctacaagtatgatccatgggatctcccaaagttagcaagtactggagagaaggaatggtatttctactgcccaagggataggaagtaccggaacagcacaaggccaaacagggtgactggagcaggtttctggaaggccactggaaccgataggccaatctactcctccgatggatcaaagtgcataggcttgaagaagtcccttgtcttctacaagggcagagcagctaaaggcgtcaaaactgactggatgatgcacgagttccggctgccatcgctcactgacccttcattgccacagaagaagccactcgagaagatcattccaccaaatgattcctgggcaatctgcaggattttcaagaaaaccaattccacggcacaaagagcgctctcacactcatgggtatctcctcccttgtccagcacaaatgaagcctacactgcccctgtctcgcagaccacacagagaagtcagcatacctcagataacacatcatcagtaatgaccgatgccatctcctccaccatccagttcaccggaagtagctacttgccttcaacagttccttcatgccacaacccactcagcatgattgacagcaacagcaggccagatgcatctgtacctctaccctcaccggttgcagagcatcagaccatgggtatcctctcagcaatcccacttgatattacagctgggattgacattgcatccatggttttcaatgcatcatccttcacactcccaaacatggatagaatgactgcaaacatagagtttggccaaccacagaagtgcaacagcagcagcagcatgaccaacagatgtgtggtcgacatgcctgatgttgctaacaatatcaacagcggtccacggtccatcaacttcaacctgcaaggaacactttctgatgactggagaatgaccttgccatgggaatcactcccttgcacgacagaagtctcaacaaatttccagtcaaccaagtgctatacttag

SEQ ID NO: 2666 - DNA, 2409 bp, Oryza sativa
atgcctctcgccctcacccttcttggattattactcttgtcactacacatctctgcatcttgtgctgccatggacaccatgacacctgcgcaagcgctctttggaaacggcaagctcatatccagcaacggcaagttcgcgctcggcttcttccagactggcagtaagtcctctcataacaccctaaattggtacctaggcatatggtacaacaaaatccccaagctaactccagtatgggtggcaaacggtgataacccagtcacagaccccaacaattcagagctcacgatctctggcgatggcgggctcgtcatcttagatcgatccaacagatccatcgtttggtctacccgaataaatatcacaactaacgacacagttgccatgctattgaacagcggaaacctcgtcctacagaatttcttgaattcatccgatgcgctgtggcaaagctttgactacccaacacatactttcctccctggtgcaaaacttggttggagcaagatcagtggtctcaatagccgtctggtttctaggaagaattcaattgacctagctcctggcaaatacagtgttgagttagatccaagtggtgcgaatcaatacatctttacactgttgaactcatccacaccatatttgactagcggggtatggaatggccaatactttccctcaattccagagatggcaggaccctttatagtaaattttacatttgtcgacaatgatcaagagaagtacttcacatatagcttactagatgagacagtggttttccatcatttcttggatgtctcaggtcgaacaaagacatttgtttggcttgagggctcacaagattgggtaatgacctatgcacaacccaaagttcaatgtgatgtatttgctgtttgtggacctttcacaatctgtaacgataatgaacttgggttctgcaagtgcatgaaaggtttctccataaaatcaccaaaggattgggaattagatgatcggacagatgggtgcatgagaaatactccattagactgtgctagcaacaaaaccgcatcaagtttgactgacaagttccattctatgccatgtgttagattgcctcaaaatggctacagcattgaagctgctacaaatgcagataaatgcgccctagtttgcctaagtaattgctcttgcactgcatattcttatggcaatggtggctgcttggtctggcatgctgagttgttcgatgtaaaacagcagcagtgtgatggcataactgatactaatggagggaccctttacattcgccttgcttcaagagaggagcaaagccagaaaaagaacagaagaggattgatcattgcaattgcccttggtctaagcttcgctgctctgtttatgctggcaatcgcactagtgatttggtggaacaaaagtaagaggtataattgcacatcaaacaatgttgaaggtgagagtggaattgttgcgtttagatatattgatctgcagcatgcgactaaaaacttctcagaaaagctgggggaaggtgggtttggttctgtattcaagggatttctccatgactcaagaactatagcagtgaaaaagcttgctggtgcacatcaaggagaaaaacaattcagagcagaagtgagctcgattggactaatccaacatataaatttaataaaactaattggcttctgttgtgacaatgatagtaaactgcttgtttatgaacacatgccaaatcgttcccttgatgttcatctattcccaactgatattaaaattttgaattgggatactaggcatcaaatagctattggagttgctagaggactatcttatttgcatgacagctgccgcgactgcattatacactgtgatgttaaacctcaaaacatacttctcagtgaatcattcactcccaaaattgcagactttggaatggcaaagtttctaggaagagattttagtcgagttttgactacaatgagaggaactataggatatcttgcacctgaatggattagtggagtgcctatcacaccaaaagttgatgtttatagctatgggatggttttgttggaaattgtttcaggaaggaggaattcaaatggaggatgtatcactggtggtgacaaagatgtttatttcccagtgaaagtcgcgcataagcttctggagggagatgtagaaagcttgatagatcccaacttacatggcgacgccaacttaacagaggttgagagagtttgcaaggttgcttgttggtgtattcaagataatgagttcgaccgacctactatgggtgaagtggttcaaattctcgagggaatatttgaacttgacacacctccaatgccaagactactgcaagctattgccggaagctcttgttctattgcagaataa

SEQ ID NO: 2667 - DNA, 1893 bp, Oryza sativa
atggacaggcagaggagcagtggctcgtcgtccacctcgcactacggcgtcgtgagccccaagggcctcatcctcctctccttcgcctcctcctccctcctcttctccttcctcttctccctcttcgccctccgcttcggccgcccgctccacctccccttcgtcgcctcctcctccctcgccgggaacgcctccgccattgcgcggggcccggttcttgctgcaggtggtgggggccgctccacgagcggcgcggcggtggatgttcttccgggcaggggcaggagcgggagcttgggggaagcagcccgccgctcggatgccggaggttttccgtccgcgggaggcgtgggttccgcaatggaggtgaaagaggcggcactgggaagcgaaaacggcggagctcctgccaatggtgattccggttcggccatgggggcggaaggagctcctgctggaggtggggatggcaactccgcagaaggcgagaataccaccaaagaagttgccgattcggcgatggagacgaacctacttgttagcaatgcatccgcttcgcaagaagcagccgctccagcagaggaaccgaagaaacccaagtctgtgcaagatgtcgattcctccatgggagattcagacctcgggtcgaacggtgaattcttgcagggagaaagtggaaattcctctgcaggagcacatacttctcaacgagtggatcaaggggaacattcagctcattcgacagtgaggaacagctctggagcagctccactcagttcaagcaagcaaaagactgacctggttcaggaaacggtggatagcaaggtggatgcggcgagaagcgatgcggcactatgcaatgtctatgatggaaggtgggtgttcgatgagagctatccactttacacgagtgattcttgcccgttcatagatgaaggattcagctgcgaagcaaatggaagaatggatggaagctacaggaagtggaggtggcagccaactcattgcagtataccgaggtttgatgctaggaaaatgcttgagatgttgcgaggaaaacggctagtgtttgtcggagactccattaacagaaatcagtgggaatccatgatgtgcttgctgagaggggcagtctcagatcctgcaaggattcatgaagctcgaggccgcaggattactaaggagagaggagattacaacttcaagtttttggattacaattgcagtgtggagtaccatgtgacgcatttcttggtgcatgaaggcaaagcaagaattggctcaaagcgcacgaggacactatggatcgatactgttgatcgcacctcgtcaaaatggagaggtgctgatgttcttgtgttcaacactgctcattggtggtcgcatcacaaaacaaaagctggagtgaactactatcaagaaggtgatcatgtatatccccatctcgatgcttccacagcttaccttaaagcactaaccacatgggcatcatgggtcgaccattacatcaatccaaggaaaactcgagtgttcttccgaagctcatccccgtcgcatttcagcggcggggagtggaattcagggggacactgcagagagagcacactgcctctcagtgacactcgtgtaaggccggtgcctgagataaacatgatcttggagcaagtagcacagcaaatgaagacttctgtgacaattctgaacattaccaatctatctgggctcaggatagatgggcatccatctgtgtatgggaggaaggcagtggtaggtttgacagcatcgagcgttcaggattgcagccactggtgccttcctggagtgccagatacatggaatgagctgctgttctaccatctggtatcctcacaacaaaagggtgtaacaagctag

SEQ ID NO: 2668 - DNA, 3633 bp, Oryza sativa
atggcggcggcattagcatggcggttcaatggaaccaatggaggcgcagatctggaacacaaagttcaagagtcagagccaccaactcctgtctcagtgatgagaatggtcaagaaccgtgccaatgtggaggatgaggagacactttcaagtgttgctcaatgtattgagcagttaaggcaaggttcttcatccacccaagagaaagagaactccctgaagcagttattggatcttcttgaaacaagagacaccacatttggagctgttggatcacatgcacaggctgtccctatacttgtttctctccttagatctggttcatctggtgttaagatgctggctgctactgtcctggggtctctttgcaaggaagaggagctaagggtgaaggttctgcttggtggttgcatccctcccttgcttgctcttctcaggtccaagtcagctgaaagccaaactgcagctgccaaaactatttatgctgtttctcaaggtggtataagagaccatgttggatcaaagattttctcaacagaaaatgttgttcctgtactgtgggagcagctcaaagttagcctcaagaatgagagtttagtggatggcctgctaactggagcattgaagaatttatcaaaaaacactgatgggttttggtcagctactgtgcaatgtggtggagttgatatacttataaagctggttgcttctggacaagcaaataccctagcaaatgcatgcaatcttcttggggctttgatgatggaagactcatctgtttgttctaaagttctatcgggagaaacaacaaaacaactcctaaagttacttggtcctggtaatgaaacttacattagagctgaagctgctggtgctctcaaatccctttctgcacagagtaaagaagcccggcgccagatagctaattctaatggaattcctgctcttataaatgctactattgctccatcaaaagagttcatgcaaggtgaatctgctcaggcattgcaagaaaatgctatgtgtgcattggcaaatatatctggtggtttatcttatgtaatatcaagccttggtgaaagtctagaatcatgctcttcacctgcacagattgctgacactgttggtgcattagcctcagccttgatgatatatgacactaattcagaatctatcagtgcttcagaccccctagtcgttgagaaaacactgatgaaacaatttaagcctaaggcaccattccttgtacaggaacgtgtgattgaagctttggccagcttgtacagtaatccagttctctgcaggacacttgcagattctgatgcaaaacgcttgcttgttggtttgataaccatggcaggtactgaggttcaagatgacctcaccaaatcactttttgctctctgcaagaaggattgtgatctatggcaagctctgcaaggtcgtgaaggtgttcagctcttgatttctttacttggtctttcctcagaacagcagcaggaatgtgctgttgctttgcttgcgcttctgtcaaaggagaatgatgagagcaaatgggctatcacagctgctggtggcattcctcctcttgttcagattttagaaactgggtctcccaaagctaaagaagattcagcaaccatccttggcaatttgtgcaaccacagtgaagacatacgggcatgtgttgaaagtgctgatgctgtgcctgctttactatggcttctgaaaaatggaagtgacaatggaaaggagatagcatctaaaacactgaatcatctcattcacaaatcagatacaggaactattagtcagttgtctgctcttttaactagtgaacaacctgaatcaaaagtttatgttctggatgctttgaaaagcttgctttctgtggcaccccttaatgatattctgcatgaaggaagtgctgcaaatgatgcagttgagactatgatcaaaattctcaactcacctaaagaagaaactcaggctaaatcagcatctgctcttgctggactgtttcattgtcgcaaggacttgcgagaaactcatattgcagtgaagacactttggtcagtcatgaagctgattgatgtgcagacagataaaatactaatggcggcctcatcctgccttgctgccatttttctgtcaatcaagcaaaataaggatgttgctgcaattgggcgggatgcattagctccacttgtctcacttgcaaattctacagttctagaagtagcagaacaagcgaccagagctttggcaaacctttttcttgatcatgaattatctctgcaagtatcttttgaagaaattatcttccccataacacatgtgcttagagagggatctattgatggaagaactcatgcagcagcagcaatagctcgccttttacagtgccggccaattaaccaacctctttcagatactattaaccgatcaggtgctgtccttgctctagctgggcttttggaagctgctaatggtgaagctgctgcaacatcagaagttgttgatgcgctggtgctattatcaaaaccaaaggtgtcaagtgggcataccaaagctccatggacagttcttgcagaaaatccccacaccatacttcctcttgtgtcatgtgtagcggatgcagcaccttcattgcaagacaaggccatagaagttttatcgaggctctgttctgatcaacatgatattgtgggtggtttggtttcagaaatcccaggctgcatatcatcagttgcacggcgagtcattgggtccaacatgcttaaagttaaagttggtggatgttctcttcttgtttgygcagcgaaagagcattgtcagaagcagatagagattctcagtgactcaagcttrtacattcaactaatccattctctagtcagtatgattcatatgacaaacttgccttctgaaaatgggagtggtgaaaacatatcagacattaaaatttctagacactccaaagaaaataacaacagcgatgaaactgtgtgccgcactgctgtaatctcaggtaacatgattccgctatggctgcttgctgtttttgcacgccatgacagcaaaacaagggctgaaattctagaagctggagcagtcgaaatgcttatggagaagatttctcaaaatgcattcctatatgtgattgaagtctcaaggattaatatagtccttgtgcacaatcatcacctgtgcatttacacacgtgaagaagatagcactgcatgggtctgtgccttacttcttgctttgctatttcaagaaagggagataaatcgatctaatgcagcattgcactcaattcctgtgctctcaaacttgttcaggtcagatgaacaagcatacagatacaggtactttgctgcacaagctttggcaagtctggtttgcaacggtagcagaggaactcttcttgctgttgctaattctggggcggccactggacttatttctttgcttggatgtgctgaggttgatatagctgatcttttggaattatcagaggagttcatgttggttcctaatcctgatcaaattacactggagagactttttagagttgatgatatcagggttggcgcaacttccagaaaatctattcctcatattcagtga

SEQ ID NO: 2669 - DNA, 1407 bp, Oryza sativa
atgagcggcggcggcggcgaggtcgaggcggcggcggaggcggcccctctcctcgtcccccacgaccctcagccggcggtgggggcggaggtgcggaggcaggtggggctcgcggcgccgctggtggcgtgtagccttctgcagtacagcttgcaggtggtctccgtcatgttcgccggacatctcggcgagctctccctctccggcgcctccgtcgcctcctccttcgccaacgtcaccggcttcagcgtcctgctgggaatgggaagcgcgctggatacattctgtggacaatcatatggagcaaaacaatatgatatgcttgggacacatgcgcaaagggctatctttgttcttatgcttatgggtgtcccgctggcttttgttttggcattcgctggccaaattcttatcgctcttggtcaaaatcctgagatatcatctgaagctggactatatgccgtgtggttgattcctggtctttttgcatacggtttgcttcagtgccttaccaagtttctgcaaactcaaaacattgtccatccactggtagtttgttctggggccaccttggtaattcacattttgctgtgctgggttatggttcattgttttgaccttggcaacagaggtgcagctttgtcaatatcattatcttactggttcaatgtgatattgctagcaatatatgtaaaagtctccgaagttggcagaaggagttggcctggatggtcaagggaggcacttaagttaaaggatgttaatatgtatctaaggctagccattccatctacttttatgacttgcttggagtattgggcatttgagatggtggttctccttgcaggctttctacctaatccgaaactggaaacttcgattttgtcaataagcctgaatacawtktggatggtttatacaattccaagtggcctcagcagtgcaataagtataagagtttccaacgaactaggtgctaggaatccgcaagcagcacgcctatcagtctttgtttcaggaatcatgtgcctaaccgaaggcatacttgtagctatcatcacagttttggtacgggatatctggggttacttgtacagcaatgaagaagaagttgtgaaatatgtcgcagcaatgatgccaattcttgctttatctgacttcatggatggaatacaatgcacactatcaggtgctgctagagggtgtggctggcaaaaagtctgttctgttatcaacctgtgcgcttactatacaattggtatcccttcagctgttacttttgcatttgttctgaagatcgatggtaagggactttggttgggaataatatgcgccatgacagtgcaaattttagcgctggttgtcatgctgcttcgtacaagctggaatgaagaggtacacccttaa

SEQ ID NO: 2670 - DNA, 3657 bp, Oryza sativa
atggagcagggagggagcagcagcaagaggaggcggctgccatggcggatgacgatgagcctggcgtaccagagcctcggggtggtgtacggcgacctgagcacgtcgccgctgtacgtgtacaaggcggcgttcgcggaggacatccagcactcggagaccaacgaggagatcctcggcgtgctctccttcgtcttctggacgctcaccctcgtcccgctcctcaagtacgtctgcgtcgtcctccgcgccgacgacaacggcgagggcggcaccttcgccctctactccctcctctgccgccacgcccgcgccgcgctcctcccgcctggcggcggcggcggcggcggckagccgggcgacgaggaccagttcttggacgcgggcgccgacaagaaagccgcggcgaacggcaatgcgctggcgctgagcgggcgcggcggcggaggcggcgcagccgccggcgtgaggaggctgctggagcggcacaaggtgctgcagcgcgtgctcctcgtgctggcgctggtgggcacgtgcatggtcatcggcgacggcgtgctcacgccggccatctccgtgttctcggcggtatccgggctggaattgtccatggaaaagcatcagcacaaatttcatattctcttggctttggcagaggatagagttactctctgggcagaaatatggtcagctagtggtaataaggttcggaaattctggaaaatggaagctacacatgctgaaagttctgaagcaatgtttgcagatctggggcattttaatcagctgtcgatacagattgcttttacttgcatggtttacccatccttgatccttgcatacatggggcaagctgcttatctgtgtaagcatcacatcattgaaagtgactacaggatcgggttctatgtgtctgtgcctggcaattttccatcctcagagaaaattaggtggccagttctggcaattgccattcttgcagcagttgtcgggagccaagctgttatcactggcacattctcaatgatcaagcagtgcaccgctctcggctgctttcctcgggtgaagatagttcacacatctgacaaagtacacgggcaaatttacatccctgagatcaattggatcctgatgatactgtgcttagctattaccattggtttcagagacacaaaacacctgggcaatgcgtcaggattggcggttataaccgttatgctggtcacgacatgtctgatgtccctggtgatagttctgtgttggcacaagagcatcttcctcgcattcggcttcatcatcttcttcggcaccattgaggcactctacttctcagcatcactcatcaagttcagagaaggagcctgggtcccaattgtgctggccttcatcttcatggcgataatgtgcatctggcactatggcaccatcaagaagtatgagttcgatctccagaacaaggtctccatcaactggctccttggcctcagccccaacctcggcattgtccgagtccgcggcatcggcctcatccacaccgagctcgactctgggatcccggcaatcttctcgcatttcgtcaccaacctacctgcatttcatcaaaattttggtaacagtgctcatcatcgtcgttttccgggggatgatcaggtgctcatcttcctctgcatcaagaacgtcccgataccgcatgtctcgccggaggagaggttcctcgtcggaagaattggccccaaggagtacagaatctaccggtgcattgtcaggtacggctaccacgacgtgcacaaggacgatcaggagttcgagaaggagctcgtctgcagcgtcgcggagttcatccgctccggcgccgccgccgcggccgacgccgcggcctcttccaagcccaagaacgtctgcggcggcggcgcggaggaktcggagaaagaggaggaggagcggatgtccgtcatcccctccggcagcattcggatgatggaggaggacggcggcgcgggggcgcagtcgtcggaggacaccgtcggcggcagcggcagcggcagcggcagaggcagctcgcgcggcggcggcggcgcaagggagatcatgtcgccgtcgccagtagccgccgccggtggtggtggcgccgaggaagagggtgcggagctgcaggagctgatggacgcgcgcgaggccggcatggcgttcatcctcggccactcctacgtcaaggccaagagcggctccagcttcttccggcggctggtcatcaacttctgctacgacttcctccgccgcaacagccgcggccccaactacgccgtcaccatccctcacgcctccaccctcgagagatgcgacgccattagagcgagctcgaattcggatagaagagagttgggcagctggatcatgggctccgttggcttggcgcgaatgctgaggtcgctgtgcgtcgccggcgatctcgctagggcggtgggtctcctgtggcggagtacggtgtgccccggtgaggggacctacgcgcttctgctgcaggaatgcgtgaaccggcgggacgcgaggatggggaagaggatccacgcgcgcatggtgtcggtggggtttggcggcggcgtctacatcgtcaccaagctgctgatcttttacgtcaagatcggtgagcttggtgttgcgcggaaggtgttcgacggaatgccgcagaggagcgtcgtggcgtggaacgccatgatatccgggtgcgcgcgcggcggcscgaaggcccgggcggtggagatgtttgggtcgatgcgggcggaggggatgaggccggaccagttcacgttcgcgtcggtgctctgcgcgtgcgcgaggctggccgcgctggagcacggccggcgcgtgcacggcgtcatggtcaagtcgcgcgtcggcggcggcaacgtcttcgtcgacagcgcgctcgtcgacatgtacctcaagtgcagcagccccgaggaggcgcgccgggcgttcgcggcggcgccggcgcggaaccacgggcgcgccgcggaggcgctggcgctgttcgaccggatgacgcgggtggacgggctccggccgaacgacgtcacgttcctcgccgtgctctcggcgtkcgcgcacgccgggctcgtcggcragggtctgcgccacctctcgtccatgtcgtcgggctacggcctyamgccgaggggcgagcactacgcggcggcggtcgacatgctcgccagggtcggccggctcggcgacgcctacgagctcgtcaagaacctgccggactgccaggagcactcggtggtctggggcgcgctgctcggcgccggcaggaagcacggcgacgtgaggctggtcgagctcgccgcgcgccgcttcttccggctgcagccggggaacgccggcaagtacgtcgtcctggcgaacgcgtacgccgcgcgcgagatgtggggcagcgtcgccggcgcgcacgaggcgatgcggtcgctgggaatcaagaaggatccggcctggagcgccgtcgaggtccggggcaaaaggcacaccttcctcgccggcgactcgtaccacgacgagcgctcggcgatatacgcggcctgcaacgcgttggccgccgccgtcgccgagcagtccgtgcctccggttatggatggagatgatgccagccattgcagctga

SEQ ID NO: 2671 - DNA, 1236 bp, Oryza sativa
atgggtcccaggaagcttcatctggcctccatttctgccctatcaatctttctctacgtgtttgctcacaccaattcagcacaagccttccccgtcgctgacggcacgtaccctcctgaagctgaaggcccagcagcagaaagttcagacatggacgagcagctggagctcacccctggaccgcagccgagggtcgtcgacgtcgacgactacagagcgagagccgacgccggcgaccacacggaggcgtttcttcaggcctggaaggaggcctgcaactcctccgattacccatccgtgctcctcgtgccggaggggaagacatacctcctgatgcctgtaagcttcaatggcccctgcagagccaccacgatcactgcaacggaatggatcacgttcgacaacatcgatcacctccgtgtcctcggcggcgggacgctcaatggcaatggacaccaatggtggatcaactcttgcaagaccaacagatccatggcgctgtacttcaggaggtgcaaccatctggtcgtggagggcctccagatcagggacagcatgcagatgcacgtcgtgatcgcctactcctggagagtgctggtctcgaggctgctcatcacggcgccaggatggagccccaacaccgacggcatccacgtatccaacagcagggaagtgttgatgagtggctgcatcatcagcacaggtgatgactgcatatcaattgtgaccggctctatgtttatacgggcaactgggatattttgtggaccaggccatggcataagcattggtagtctaggagcaaacaaatcatgggcccatgtttccgacgtgctggtggagaaagctacactggtgggcactaccaacggtgtgcggatcaaaacttggcagggaggagatggccatgcagaaaggattacctttcaagatataacaatgcacaacgtcactaacccggtgattatcgatcagaattactgtgactccatgacaccatgtcatgaacagggatcagctgtcgccataaataacatacgctacaggaacatacgtggaactagttcttcaaaagtcgccatcaacttcgtctgcagcaactctgtccattgtgatggcatagtgatgcaggatgtttctttggttggagaaggatcctacgtttctkgttcgtacatgaatgctagagtggtagagttggggtataacttcccgtattgcagagcggaaatgtag

SEQ ID NO: 2672 - DNA, 1665 bp, Oryza sativa
atggctggtctgaagaagatggaggaggtcacagcagctgctgctgctgttgcagcgagcagtacggccgagaagcgtgcggccgccgtcgtcgtccccgacgcggcgctgacgatgaacggtgccgccggcgcggaggagaagacggcggcggctgcggcggcgccggaggatctgccggcgccagccgcattgtccggctggccgaggaggttggggctctacctcttcgtcatgaacatcaggagcgtgttcaagcttgacgagctcggatcagaggttttgcgcattgccgtgccggcttcgctggctctggcggcggatccgcttgcttccttggtagacacagcgttcatcggccgcttaggttcggtggagatagctgctgttggtgtttcaattgccatatttaaccaagtatccaaagtctgtatttacccccttgttagcgttacaacatcatttgtggctgaagaagacgctatcatcagtaaatgtatagaagaaaacagcagccaagatctggagaaagcttctcctgtggattcagaaaccaacaatctgcctgtatctggagaaaagaacaccgccttaattcaccacaaatctgaactcgctatttgtttattttgtcaaactttgtttccaggtcctgataaggctgtcttcctggtcttttcagcaaaatttgtattgaatatcatgggtgtcaagaatgattcaccaatgctaaggcctgcagttcgctacctaacaatcagatcacttggtgctcccgccgtattactgtctctggccatgcagggtgttttccgtggtttcaaagacacaaagacaccattgtatgccactgtggttggagatgcagcaaacatcatactagacccaattttgatgtttgtttgtcacatgggtgtcactggcgcagcagttgcccatgtcatttctcagtacctgataacgatgatactgctgtgtcggctcatccggcaagttgatgttatcccacctagccttaaatccctcaaatttgggcggtttcttggatgcgggttcctgctgcttgcaagggttgtggcagtgactttctgcgtcacgctggcgtcgtcgttagccgctcgccatggacctaccatcatggcggccttccagatctgctgccagctctggctcgccacatctcttcttgctgatggacttgccgtcgctgggcaggcagttcttgcaagcgcattcgccaagaatgataaaggcaaggttgttgttgcgacatctcgtgtactacagctgagcattgttcttggcatgggtctcactgttgtgcttggggttggcatgaagtttggggctggaattttcacaaaggacatcgacgtgatcgatgtcattcacaaaggcattccttttgtcgctggcacacagacgataaattcactagccttcgtgttcgatggcatcaacttcggagcatcagactacacatactcagcttactccatggttggtgtggctgctatctccataccctgcctagtatacctttctgctcataacggattcatcggtatatggatcgcattaacgatctacatgagcctgaggaccatagctagcacttggagaatgggggcagcaagggggccatgggtgttcctccggaagtga

SEQ ID NO: 2673 - DNA, 1017 bp, Oryza sativa
atggcagcccccagcaagccacaacatggcgccattggccccgtgccgttcaaggacgtcatcggagacgcaatggcacagcgatcctcaccggaggaggagtatgccggcgtcgtgtccagcctcccgagctatcccaagctgcgcctgcggcactaccagggcatgtggctgatggagtacacccttccagggatcatggccatccagcggagcttcgtgccgcgccgccatggcgacgtcgtcctcgcgagccccggtaagtgcggcaccacctggctcaaggcgctcgccttcgccgtcttggcgcgcggcgcctactcccctgccagtgaccggcatccgctcctccgtcttaacccgcacgactgcgtcccgttcatggagggggcgatctctgaaggatggggtggtaagattgatgagctgccgtcgccgaggctcatgtccacccacatgcagcacgctgctctacccaagtccattgcagatgaacctggctgcaaggttgtttatatttgcagggagccgaaggatatcctggtctcagcctggcacttcttcagaattatagagcctgatctttcatttcaagaagtgttcgaggctgcctgcgatggcaagttcttgaccggcgctatctgggatcacattattggctactggaatgcttgcaaggcgaacccagagaaggtcctgtttctggtctatgaggaccttctgcgagatccggcaaacatcgtcaggaagctcgccgactttcttggccagccgttctcatcgaccgaggaagaagctggactggtgacagatattgtgaggctgtgcagcttcgagaacctgaagagcttggaggtgaataagatgggagaggcatcgttcgccttcccgaatgcgtcatacttccggaaagggaaggccggagactggaaaatccacatgacgccggaaatggtggagtgttttgacaccatcgtcaaggagaagatgcatggatctgggcttgtttttgcttga

SEQ ID NO: 2674 - DNA, 1110 bp, Oryza sativa
atggcgagcgcgaggccgccgcgggggacggcatggtgcggcggctgcggcgcgtacctggccgtgccgccgggggcgcgctcggtgcggtgcgcgctctgccgcgccgtgacgcgcgtcgagcgccgcggccaccacggcggccagggcggggccctgggcttcatcaagggcctcatcagcgcgttygcccggccgccgccgctgamgccgtcggcgggtgcggcggcggcggcgagctactacccgcgcgtcagcggcaagaagcgcgcgctcctcgtcggcatcagctacgccgccaccgggtacgagctcaagggcaccgtcaacgacgtcaactgcatgtccttcctcctccgcgagcgcttcgccttccccgccgactgcatcctcgtcctcacgcaggagaacggcgacccgtacagggtgccgacgagggcgaacctgctggcggcgatgcggtggctggtggaagggtgcagcgccggcgactcgctggtgctccacttctccggccacggcgtgcagaagctggacgtcgacggcgacgaggcggacggctacgacgaggcgctgtgccccgtggacttcgagcgggcgggggtcatcctcgacgacgagatcaacgagaccatcgtccggccactcgtcgccggcgtgaagctccatgccatcgtggacacgtgccacagcggcaccatcctggacctccccttcctctgccgcctttcccggacaggctactggcagtgggagaaccactgccgccggccggagctggccaagggcaccagcggcggcctcgccatctccatcagcggctgcggcgacagccagacctcctccgacaccacggcgttctccggcggcgcggcgacgggggccatgacgtacagcttcatcaaggcggtggagacggagccagggacgacgtacgggcggctgctgagcgcgatgcgggcgaccatccgcggcggcggcggcgaggtcggcatcccggggccactgggcgccttcttccggagggtcatcaccttcagctgcgcgcaggagccccagctgtgcgcctcggagccgtttgacatctacaggaagcccttcctcttgtga

SEQ ID NO: 2675 - DNA, 1518 bp, Oryza sativa
atggcctccaaactccccgacctcggcggcggcggcgtggaggacggcggcggcaagaagtggccggggttcgtccagttcttcttcgtcctctccgtcgtcctctgcgtgctcctctacgccccgcggttcatcgtgctcacgcccacctatggcctcgacttcttcccccagccgccgcccaacgtcaccacctcgcccgcccgcgtcgtgggagatcataatgctggcgaagtggtggttcttgacaaccagctgcgctcgccgtgctcgtcgctcgccggcgacaccatctgctgcgaccgctcggatttcaacaccgacgtctgcttcatggccggcgacgtgcggacggacccgtcgtccctgtcgctcctgctgttcccgaagcagccgccggcggcgaacgccaccgtggaggagaggatacgtccgtacacgcgcaagtgggaggcgctcatcatgagcagggtagaggaggtgcggctccggatggccccgccggaggaggagcccggccaccggtgcgacgtccggcacgacgcgccgctcctcgtcatgacggcggggggctacaccggcaacctcttccacgcgttcagcgacgggttcgtgccggcgtggctgacggtgcaacacctccgccgccgcgtcgtgctcggcgtcctctcgtacaacccgtggtgggcgggcacgtacggcgagatcatctccggcctctcggactaccacgtcgtcgacctcctccacgacaagcggacgcactgcttccccggcgccatcgtcggcacacgcttccacggcatcctctccgtcgacccggcgaggctccgcgacaacaagaccatcgtcgacttccacgatctcctcgccggcgtgtacgagaccgcaggagacaccgtcgtcgtcgacgacgttactcagccggcgccacggcggccacggctcgggatcgtgtcgcgcagggggacgcgggtgatcgagaaccaggcggcggtggcgcggctcgcgaggtcggtggggttcgacgtggacatcctggagacggcgaacgggctgccgctcccggcgtcgtacgcgtcggtgagcgcgtgcgacktgctggtgggggtgcacggcgccgacctgaccaagctcctgttcctgcgccccggcgcggcgctggtgcagatcgcgccgctgggcktggcgccgatcgcgcgcgggtgctacgcggaggcgtccgcgcggatggggctgcactacgagcagtacgacgcggaggggcacgagagctcgctgagccgcaagtacggcctccgcgacgtggtggtgtccgacccggaggccgccaagcgcgacaaggggttggggcttcgtcgcccgcgtctacctcggcggccagaacgtcaccctcgacctctccaggttccgacacacgctcaccaggctgcacgcgcgcgccctgcgcgtacgctcgttgcacccagcgccgtagacggattatcggatagcagcggcagaagcagccatggatga

SEQ ID NO: 2676 - DNA, 1509 bp, Oryza sativa
atggcggccagcagccggcatgggccattcatcaattggagtgatgggctcttcctcttcttgtcttcttcttcctcgaggaatcgcttcctgagagtgttcttgccgttcccggatccgtcgacgatgatggctggtctcgaggttgccacgacagcggtgaccggcggcgacgctagcctggttgtcgtcgtcggcgttctgttcttgatggtcgccgttgttgtgatgacgaggttgggtgatggaggtgcggcgccgagcccgccggcgatgccggtgctcggccacctgcacctgatcaagaagccgctgcaccgctcgctggcggaggtcgccgcgcgggtgggggcggcgccggtgtgtcgtcggctgcggctgggcgcgcggcgggcgctgctcgtgtcgacgcacgccgcggcggaggagtgcttcacggcgtgcgacgccgcggtggcggggaggccgcggctgctcgccggggacgtcctcgggctgttcgagctggtgctcaacgtgatgctgcgcgcggtgaccgcgcgccgccacgccggcgacgagacgcgcaggttccaggagatcgtcgaggagacgttcgcggcgagcggctcgccgaccgtcggcgacttcttcccggcgctccggtgggtcgaccgtctccgcggcgtcgtggccaccctacaaagccttcagaaaaggcgcgacgcgttcgtcgccggcctcgtcgacgaccaccgccgaacacgccgcgccgccgccgccgccgccgacaaggatcagaagaagaacggcatcatcgacgccctcctcacgctgcaagaaaccgaccccgaccactacaccgacaatgtcgtcaagggcatcgtcctggtgctgctcaccgccggcaccgacacgtcggcgctgacaacggagtgggcgatggcgcagctggtggcgcacccggaggcgatgacgaaggtcagggccgagatagacgccaacgtcggcgcggcgcggctggtggaggaggccgacatggcgagcctcccctacctccagtgcgtcgtcaaggagaccctccggctccgccccgtcggcccggtgatcccggcgcacgaggccatggaggattgcaaggtgggtggctaccatgtccggcgtggcacgatgatcctcgtgaacgcgtgggcgatccaccgcgacggcgatgtctggggctcgccggaggagttcaggccggagcggttcatggacgacggcgccggcgccggcgcggtgaccgcggtcaccgcgcccatgctgccgttcgggctcggccggcggcggtgccccggcgaggggctcgccgtgcgcctcgtcggcctgacggtggcggcgctcgtgcagtgcttcgattgggagatcggcgaaggcggcgccgtcgacatggccgaaggcggcgggttgacgatgccaatggcgacgccattggcggctgtctgccggcctcgagagtttgtcaagactgtggtgtctgattgcttctga

SEQ ID NO: 2677 - DNA, 615 bp, Oryza sativa
atgtcgtcgccggacaaggtggtggccaggacgggccgcctcaggcagcgctacgacaacgagtaccgcctcgtcgcaggctgcgtgccgtaccgggtgaagaaagacgaggccaaccctcgcatcctcggcgacgttccgggccaggtggaggtgctcatggtctccacccccaaccgcgccgacatggtcttccccaagggtggatgggaggacgacgaggaggtgtacgaggcggcgtcccgcgaggccatggaggaggccggcgtcaagggcatcgtcaataggactaccttgggacactgggtgttcaagagcaagagcagccagaacagcagcagcccaaggggagcttgcaagggctacatcttcgccatggaggtcactgaggagctcgagtcgtggccggagcaggcgacccatggccgtcgatgggtctcccccggtgaagcctaccagctctgccggtacgaatggatgcgcgaggcgctcaccgctctgctggagcggttgtcgatgatcgagccggtgccgtctgcgcaggaactgtctgatcaaactagcatgtacatgatgctgcaggcatcatctgatagcgcggtcgcgctgtgctga

SEQ ID NO: 2678 - DNA, 309 bp, Oryza sativa
atgaacaccgacatcaccgcgtcggtgaagccggagtacccggtggtggaccggaacccgcccttcaccaaggtcgtcggcaatttctccgcgctcgactacctccgcctctccaccatctccgccgtctccgtcaccgtcggctacctctccgggatcaagccggggatccgcgggccatcgatggtgacgggagggctcatcggggtcatgggagggttcatgtacgcctaccagaactccgccggccgcctcatgggcttcttccccaacgactccgaggtcgcccgctacaagtacaagctgtag

SEQ ID NO: 2679 - DNA, 3327 bp, Oryza sativa
atggcttccgggcgcccgctgctcgacgcctcgccgcggccgacgcagcagccgccggcgtcatcgctgctcccgccgccgcagccggagccgcccctccgagccgaccgcctcgcgttctccctcgaggtgcccgaccccttccgccgggagcccgacccgtcgtcggccgcgtcgcarcggggggargaggaagggggccgcgaggaggagtcccgcgcggttgttgtcggggagccctcgtcttcggaggcggcggcggggttcgccgggaacggcgtacggacggcgaagtactcggtgctgacgttcctgccgcggaacctgttcgagcagttccggcggctgtcgtacgtctacttcctcgccatcaccgtgctcaaccagctcccccaggtcgccgtcttcggccgcggcgcctccgtgctcccgctcgccttcgtcctcttcgtcaccgccgtcaaggacgcctacgaggacctccgccgccamcgctccgaccgccaggagaacaaccgcctcgccagggtcctcctggcgccgcccgccgcgggggagttcgcgcccaagaaatggaagcacatccgcgtcggggacgtcgtccgcgtcgcctccagcgagacgctccctgccgacatggtgctcctcgccaccagcgacccctccggcgtcgcgcacgtycagaccgtcaatcttgacggggagaccaacctcaagacgaggtatgctaagcaggagacgcaactgaggttctcgcaggacggtggaatcggcggtgtccttcattgtgagcggccaaacaggaacatctatggatttcaggcgaatttggagattgatggcaagcgtgtctcgctagggccatcgaacattgtgctccgtggatgtgagctcaagaataccacctgggcgataggggttgtkgtgtatgctggaaaggagaccaaggtcatgcttaatagctccggggcgccgtcgaaacggagccggttggagacacagttgaaccgggagactgtcatactgtccattatgctcattgggatgtgcacgaccgcaagtgtgctcgcggggatttggatactgaatcaccgtggggatttggaattcacccagttctttagggagaaggattacacgacagggaagaactacaattactatggcatggggatgcagatattcattacattcctcatggcggtgattgtatatcaggtcatcattccgatctctttgtatatatcaatggagttggtacggcttgggcaggcatatttcatgggtgctgacagagatttgtatgatgagtcatcaaggtcaaagttccaatgcagggccctgaatataaacgaggatctaggacagattaaatatgtattttctgataagacagggacgctgacagagaacaagatggagttccagtgtgcatcaattcggggggttgattactgttctggcaaagattcatgcggatactcagttgtagtcgatgatctcctatggacacccaagatggcagtcaagattgatcatcggcttttgaagttactgaggggtggtggcacagatgaggaaacaaagcttgtcctcgaattcttccttgctcttgctgcatgtaataccattgtgccacttgtcctagatactcgtgattctaagcaaaagttgattgattatcagggtgagtcccctgatgagcaggcactagtgtatgctgcggcatcttatggcattgtgcttgttgagcgaacatctggttatgtggtgattgatgtccttggtgacagacagagatttgatatattaggacttcatgagtttgatagtgatcgtaagaggatgtctgtcatagttggctgccccgataagactgttaagctatatgtgaaaggtgcggacagttcattgtttggaattaccaaaaattcattagatctggacattgttcgtgctacagaggcacacctccacaaatattcatcgtttggtctaagaactctcgttattggcatgcgtgaattgagtcaacctgagtttgaggagtggcaattggcatatgaaaatgctagcacgtcagtacttggaaggggaaatttactccgatcagttgcggccaatatagagaacaatatccgcatattgggggctactgggatagaagataagcttcaagatggggttccagaaacaatagaatctcttcgacaagcagacataaaggtttggattttaacaggagataagcaggagacagcaatttctattggctactcttgtaaactgctgaccaatgacatgacacaaattgtgataaacaacaactcaaaggagtcttgtaagaggagtctcgaggaagcacatgcaacgattaagaagctcagaattgcttcaactggcacacagagtccagaattagcatcagaatctgctggtgtaactcttgcgttaattgtagatggtaacagcctggtttacatacttgagacagagttgcaagaagagcttttcaaagtggcaagagaatgtagtgttgtattgtgttgtcgggtggccccgttacaaaaggcagggatagttgcacttatcaaaaaccgaacagatgacatgaccttagcaattggtgatggtgcaaatgatgtttcaatgattcaaatggctgatgttggtgttggcatcagtggtcaagaaggacggcaggctgtaatggcatcagattttgcgatgggccaattcagattcttggtccctcttctattagttcatggccattggaattatcaaagaatgtcatatatgatcctctacaacttttacaagaatgcgacatttgtcttggttcttttctggtatgtactttatacagcattcactctgacaactgctatcacagaatggagtagccttttgtatactgtgctatatacatcccttccaacaattgttgttggtattcttgacaaggatcttagtaaggaaacactactagcttatccaaagctatatggatctggccaaagggatgagaagtataatgtaaatttgtttgtcctcaatatgctcgaagcgctatggcaaagtctggttgttttctacatgccatattttgcatatagacaaagtacgatagatatgtctagtctgggagatctatgggcacttgcccctgtcattgttgtaaatatgctactagccatggacatctttcggtggaattggatcgtacatgcttttgtgtggggaacaatagcagcaacaaccatttgcctctttgtgatcgactccatttggtttcttcctggatatggttatcctaggaagtaa

SEQ ID NO: 2680 - DNA, 1293 bp, Oryza sativa
atgtcgtggcggtgggctctcgcgcggcgcgtcgccgcgctgggcgcgacgagcggcggtggggacggcgccaccgcccaggcgcagcggctcttctcctcggcggctgccctcctcgggaggcaccctccaccgccgtcgccgccgcactaccagattcggagcaaggtggtgggttgcagaggagctactttcgtgagctcgcgatggttacatgatgctcagtaccaggttcgccaggatgggttatcaaggtctgaggaacagcaggatccatttgagttggttgctgatgagttgtcacttcttgcaaataggctacgatccatggtagctgctgaggtccccaaactggcatcagctgctgagtatttttttaaggtgggagctgagggtaaaagattcagacccacggtattattgttgatggcatcagctctgaaattccccttatcagattcaacagaagtgggagttttaactatactggcaaataagctccgcacgagacagcaaaatattgccgagataactgaaatgattcatgttgcaagccttctacatgatgatgtactggatgatgctgacactaggcgtggcgtcagttcgttgaattgcattatggggaacaagctttctgttctggctggtgacttcctcctgtctagagcatgtgtggcacttgcagcgcttgggaacacagaggtggtatctctaatggctactgctgtagaacatctagttactggtgaaaccatgcaaatctccacaagtagagagcaaaggcgaagtatggattactacttgcagaagacgtactacaaaacagcatcattgatatcaaatagctgcaaggctgtcgctattcttgcagggcacactgctgatgtgtcaatgctcgcatatgaatatggtcgaaacctgggtttagccttccagttgatcgacgatgttcttgatttcacaggcacttctgcatcccttgggaagggttcattaactgatatccgtcatggaatcattaccgcacctatgctttatgcgatggaagaattcccacaactacatgaagttgttgacaggggttttgacaatcctgcaaatgttgagcttgctcttgactacctacagaagagccgcgggattgaaaagacgaaagagcttgcaagagaacatgctaaccgtgcaatcaaagccatagaagctctcccagacagcgatgatgaagatgttctgacatcaaggcgtgctcttattgacatcacagagagagtcatcactagaacaaaatag

SEQ ID NO: 2681 - DNA, 975 bp, Oryza sativa
atgtcatcatcatccacccccaccggagcagcagccgacgatctcgccgccgccaacgccaacgccaaggagtgcgtgttctgcgagatgacgcggcagcaccacccgcaatgcgcgcggcggctcccgaagcggatcatcctggtgcgccacggcgagagccaggggaacctcgacatgtccgcctacaccaccacgcccgactaccgcatcccgctcaccccgctcggcgtcgaccaggcccgcgccgccgggaagggcatcctcgacgtcgtctcctccgccgccaactggaaggtctacttctacgtctccccctacgagcgcacccgcgccacgctccgcgagatcggcgccgccttcccccgccaccgcgtcatcggcgcccgcgaggagtgccgcgtccgcgagcaggacttcggcaacttccaggtcgaggagcgcatgcgcgccgtcaaggagacccgcgaccgcttcggccgcttcttcttccgcttccccgagggcgagtccgccgccgacgtcttcgaccgcgtcgccagtttcttggagtcgctgtggagggacatagacatggggaggctggagcaggacgcgagctgcgagaccaacctggtgatcgtctcccatggcctcacctcgcgggtcttcctcatgaagtggttcaagtggacggtggaccagttcgagcgcctcaacaacttcgacaactgcgagttcagggtcatgcagctcggccccgccggcgagtacagcctcctcatccaccacaccaaggaggagctccagcgctggggcctctccccggagatgatcgccgaccagcagtggcgcgcctccgccaaccgccgcagctgggccgacgagtgctcctccttcctcgccaccttcttcgaccactggaacgaagacgacaatgacgacgacgacgatggcaaggaggaaaatggcaagaccaacaagttgctcgagtaa

SEQ ID NO: 2682 - DNA, 1194 bp, Oryza sativa
atgccggggctcaccgcgccggcgagctactccgacgagccgcctcgccaccccgccctcaagatcaactccaaggaaccatttaatgctgagcctcatcgatcagcattagtttcatcttatattaccccggtggatttcttctacaagagaaaccatggaccgataccaattgtggatgacctctcaagatacagtgtttccattactggtattgtcaacaagaatgtgcagctgtccatggctgacattaggagtctcccaaagtatgatgtaactgcaacgttacagtgtgcaggcaacaggaggactgcaatgagtaaggtacggaaagtgagaggcgttgggtgggacatatctgctcttggaaatgcaacatggggaggagcaaagctatctgatgtccttgaactagttggaatacctaaactcagctcagtcacatctttaggaggcaagcatgttgagtttgtcagtgttgacaggtgcaaagaagaaaaaggtggtccctataaggcatcaattccactaaagcaggcaacagatcctgaagctgatgtgttacttgcatacgaaatgaacggagagaccctaaaccgtgatcatggatacccacttcgtgttgttgtacctggagtaattggcgcacgctctgtaaaatggcttgacagtatcaacataattgaagaagaatgccagggtttttttgtgcaaaaagattacaagatgtttccaccctccgtagactgggacaatattaattggtcaactaggaggccacaaatggatttccctgtgcagtctgctatttgtaccctggaggatgtggatgttatcaaggaagggaaggctaggattgctggatatgcagtctcaggtggtggccgtggcattgagagagttgatatatctgtcgatggggggaaaacatgggtcgaggctcatagatatcagaaaagcaacgtgccatacatatctgatggacctcggagtgataagtgggcatgggttctattcgaggctacattagacgttccagcaaacgctgagatagtagctaaggcggtggactcagcagcaaatgttcaacctgaaaaggtggaagacgtatggaacctgagaggaatcctcaacacatcttggcatcggatcaaaatacagaattcttcgtgcgtgggaagatccaaaatgtga

SEQ ID NO: 2683 - DNA, 2004 bp, Oryza sativa
atgcaaggacagaagaactctgttgagcagcttgctgatgtgtttggatttgaccatgcatccagttcaggaaaccctgtcatggatcaacaaggatattggaacaacattcttggttcagtggagtcacataaccttcaaggttatcaggtgaaccgtagtgatggaactattccctatggaaacggtgtgcatcaaaatggcacttttttaggtttttgggaatcaggcgaagcaagtgcaagtggcagttcactacattttgggggctctaatgagatcaaagctgagcaacgtaatatcggtggtggcctaaggattggtgaaaggcgcttggtagctgagcgcaacctttctttggataatgttgatataggccttaacatcaatggtaatgatctatctggtgaaaattcaaatgtgaatggtgcttcacaaggctctgaactacatggtggctgctctcatactggttcaaatggtcaagcctctgagctgagattacatccatacaggacattcatattaggtgcagatcaacctgagccttttaattctttgaatggcagtgaaaatcctttaggtgatttttccttgatgccagaaggcattgatcagcgaccaggcagttccctggatggccgccggctggcatgcaagaggaaaaatatagaaggagttaatgggcagtgctcggcaggtgctagcactagtttttcccacaggaacgatagtattttccataacattgcttcttcgagtcataatccctctcctagtacaaatttaccctctcctaattgtctgttggttccaagcactcttgatgaacaactcccgcgttatggagctactacagctggattgtcatctagtagctatgatcctagtggaggcaataacaattcaggaggctcacaaagaagttttcggccaagaactagcctggctcaacatattggcccctatggtgtgtggccatcttcaagtactatcagacattccaattcatggaatcatcagccacctccctttcagagttcatttgatgaaccaccggaggtaattccagtggtcagtagcctgaactttcaataccagcatccaatgaatgtcgttcctggcattccacagatgtcacaccggttcactggtccaggggcctcatcatcaagaacaggcaatttggagaacagaattattggtagtgaggaatttagcgcgaggaatgtagtggctaccagcttccctgatgcagttcctccggccgcactagacatgaggcatttgataccagaaccatctagttggaatgtagatggcagagctactaccattccaggaaatgttccttcttcatcgagagctaataccaattcgatggttaatccaccagcaggctctccatttattgcccatcaaaacttgcatagacgtaatcctcgtaatttgtcagaggagataagtcgtttatctggagctcttcgtggccatcagcacccacgcctaaggtccggktttctgttagaacgacaaggtgatggtgtttggggtgttccgttgtcaactaggagcagggaaggaagaagattaattgagatccggaacgcgcttgaaatgattcacagaggggaaaatgtaagatttgagtccattttctatggtggagtcgacattcatgacagacacagggatatgcgccttgacatagacaacatgtcttatgaggagctattggcactggaagaaagaataggcaatgttagcactggcctcagtgaggaagaagtgacaaagctcctaaagcaaaggaaattctcatcatggaggttggaagcatctgtggaagaagagccatgctgtatctgccaggaagagtatgttgatggggatgatctcgggacactggactgtggacatgacttccatgttggatgcgtcaggcaatggctggttgtgaagaacacctgtcccatatgcaaaaatactgctctgaagtcttag

SEQ ID NO: 2684 - DNA, 620 bp, Oryza sativa
atggctcctctcgccgcggctgcggcggcggttgctgccaaggaggagcaggcggcggcggcggcggtgctgccgctgcagcagcagcagccgaggcggcagtaccgtggcgtgcggatgcggaagtggggcaagtgggtggcggagatccgggagccgcacaagcggacgcgcatctggctggggtcgtacgcgacgcccgtggcggcggcgcgcgcctacgacacggcggtgttctacctccgcgggcggtcggcgcggctcaacttccccgaggagatctcctcgctggcgtcgctgtccgagggcggcggcgcgagcgagccccgcgagcccgacggcggcacgctgtccgcggcctcgatccggaagaaggccatcgaggtcggctcccgcgtcgacgcgctccagaccggcatgatggtcgcgccgacgacccaccaccgcgagcggcagaagcaccaccaccaccaccaccaccaccacccgcacctgcagccgcacggcgaggagcaacaccaccaccacgagcagaagcaccagcggacggcgtggagcggccgcgccaagaacccggatctcaaccaggcgccaagcccggagaactccgacgccgagta

SEQ ID NO: 2685 - DNA, 2136 bp, Oryza sativa
atggcgggctccatggtggaccgggcgaccagcgacatgctcatcgggcccgactgggccaagaacatggagatctgcgacatctgcaaccgcgaccccgggcaatcaaaagatgttgttaaggcactcaagaaaaggattgggcacaaaaatccaaaagtccaaattcttgcgctgactctcttggaaactgcaatcaagaactgtggggatatattccacatgcatgttgcagaaagagatgtgttgcatgagatggtgaagatagtgaagaaaaagtctgatcagaatgtcaaagagaaggtattaactatgatagatacatggcaagaagcattcgggggaccacgtgcaagatatccacagtactatgcagcgtaccatgacttggtgcgtgctggagctgcatttccaaagagatctgatcgacctgcaccattgtttaatggccagtctccagcaggcagaaatatgcgtagtcctgatcagcaggatgaagctgaatcgtctgctggaaatgattttcctgctttgagcatgtcagagattcagaatgctcgtggtataatggatgtgctagccgagatgctaaatgctttagaccctggaaacagagagggactaaggcaggaggtaattgtggagcttgttgatcagtgtcgcacttacaagcagagagtggtactactagttaatgctaccgcggatgaggaacttatgtcacaagggcttgcactgaatgatgacttgcaacgtgttctcgcaaaacacgatgcaattgctgcaggcattgcagttcgagtggagaagaaacctaagtctctgcaggcacttgtagacactgaggattctatgaaccaagactctaagaaagagcaggcacttgtagatattgaggatcctacaacccaagagactaataaagaaccaagccaaagtgccagtgtgcagtcaccatttgagcaactagcgcttccagcacctccggtgtcaaatggctcagcaaccccagcaccaaaatccgatcttggcgtcgatcttcttagctgggatgacaacccatctacaacagaaaattcactagcgcttgtcccagttactgatccagtagttgattctactccaagtcaaaatgcactagctatcgttgacatattctctcaaaacaacacaaccaataacattgccaaacctgcggatccctttggtgttaattctagctctactcttcctggatcacagccatacaatgctccaacccagcatcctctgcaagcacagcagcagcctcagcaggtgggcctctatcctaatgggggagctgtgaaccctggaacatcataccccacaagttctgggtggaatggtcaaattgcgaacaatgcgacgcctccagcgcagcaaacagtgaattatgatgagcaaagtggagcccttcccccacctccttgggaagctcagtcagcgccaagcggcgacatgtcaaatggcggtatgcagtctcacccggtgtcaaacggccaatttggaggtatgccatctctcccaacaccatcaaaccagatgggtgggatgcagcccttgcacccgcagatgaaccagatgggaggtccacaagcccaccaaatgtacaacaaccaacaaccgggagccatgcaacccagccaacctgctgtaacccagatgcaatcaggctttgcgaaccaattcggttcgatgccaccacactccatgccaggaatgcaattccccgggatgcaaccttcgccgatgccaggagcgcagccagtcatgatgtatgcgcaaccgatgatgatgccgggtatgcagtttgcagccatgccgcaaccacgaatgtatggcccccagatgtcccagtaccggcttgtgcagcagcaagcggcacaatactacagcaacagccaagggaggccaacatactacgctggtatgaatgacctctcccagaaaatgtatggcctctccatgcaagacagctcttacatggggatgaacagctcgccctactctacaacaccttcatcatcatcttccatggggcaaccatcgaagcctgaggacaagctgtttggagatcttcttagcattgccaaaacaaagcagaacaaggcttaa

SEQ ID NO: 2686 - DNA, 2196 bp, Oryza sativa
atgggtctggacaacaatttcggggagctatctggcatgttctgtggcttgtcctatgatggctacacggatcacggcagccagagcgattacttcaggttcgccgacccgcagccggcgatcgtgccccagatggacgccggacccagctccgccgcttcctccacggcgtcgagggccgccgtcagctcggggaccgacaacccagaggactgggagttcatctcggacgagtcgctcaactatatcagccgcatgctcatggaggaggacattgatgagaaggtcagcatgtaccaggaggagtccgcggcgctccgcgctgctgcgaagccattctatgacattcttgggcacaagttcccgccctcccctgaccgccagctggtagcttggcccctcgacagcccgagtgagagtagcactagcagctatccacactccttggctagttctgttactagcagcaacattagtggtgcggtcgatagcagccaacgccgttatgttggacacagtgagtatcggagcttgtctggtcattcttctcaaccgccggttggcccatcaagtgatgttcgcaacgctatggagacactagaagatcctttgattagtaatggcaggatccctgagtatttgtttgagagctttccaacatgggatttcaggagaggtgttgacgaggcacagaagtttctcccgggtagcgataaggtagtgattgatttagaggctggtggtgttgcaaaacgtcaagaagcagggaaagctatttctctgaatgtcagcaaggcagaggttttgaaggtaaagaaaaacagacagagtgaagaccttgacgtgatggaaggacggaatagtaaacagtctgcattttgttctgatgaacctgattggattgagatgtttgatgttctgcttcgtcaaactgagaagaaggcaactgatcttcgaaaaatgatgcgttttgaggcttccaagaattctcaagttgctcagccaaaaggaccaagtgggacccgatcacggggacggaagccaactaagaaggatgtggtggaccttaggacgctactcatccactgtgctcaggcagtggcagctgatgaccgccggactgctaatgagttgttaaagcaaataaggcagcatgccaagccaaatggagatggctcccagagattggcgtattgctttgcagatggtcttgaggctcgcttggctggaacagggagccaactttaccataaacttgtggcaaaacggacaacagcctctgacatgctcaaggcataccatctttaccttgcagcatgcccattcaagaggctctcacattttctttcaaatcaaacaattttgagtttgacaaaaaatgcatcaaaggtgcatatcattgactttggcatttacttcggcttccaatggccgtgcctgattagacgtctcttcaagagggaaggtgggccaccaaagctgcgtatcacagggattgatgtacctcagccaggtttccgcccaactgagcgcatcgaagagacagggcagaggcttgcagaatatgctgagaagattggtgtcccttttgagtaccaaggcattgcatcaaagtgggaaacaatctgtgttgaggatctcaatattaagaaagatgaagtagtgattgttaattgcttgtatcggttcagaaatcttattgatgaaacagttgccatagacagtcctaggaatagggtgctcaataccataaggcaagtgaacccagcaatttttatccatggcattgtgaatgggtcgtacagcgttcccttcttcatcacacggttccgtgaggcattatttcatttctctgcattatttgacatgctcgagacaactgtgccacgggatgatgcccagcgtgcactaattgagagagatctatttggccgggaagcactcaatgtgattgcatgtgaaggctcagacagggtcgagagaccggagacatacaaacagtggcaagtgaggaatctgagagctggatttgtccagtctccattaaaccaagacattgtgctgaaagccaaggacaaagtgaaagacatctatcacaaagactttgtcattgatgaagacagtgaatggctccttcaagggtggaaaggaaggataatctatgccatatctacatggaagcctaataacaattag

SEQ ID NO: 2687 - DNA, 1010 bp, Oryza sativa
atgccgtccggctacgacgacgaccgcctccgcgagctcaaggccttcgacgacaccaaggccggcgtcaagggcctcgtcgacgccggcgtcaccgccgtcccgcgcatcttccaccaccctcccgaccccacaccggtcgcctccgccgccgacgccgccgacgccgacgccatcccggtcatcgacctcgcgcgcgccgacgccgaccgtgacagggtggtcgcccaggtgaggtcggcggcggagtcggtgggcttcttccaggtggtcaaccacggcgtgccggcgcgcctcacggacgggatgctcgcggcggtgcggcggttcaacgagcggccggcggcggcgaaggcggcgttctacacgcgcgacgcggcgcggcgccgcgtgaggttcaactccaacttcgacctgttcgagtcccccgccgccaactggcgcgacacgctcttctgccaggcggcgccggacccgccggcgccggaggagctccccgccgacktgaggggcgtgctgccggacgtggtgagcaactactacccgccgtgcccggagccggaggccaccgtcggcacggcgaggcactccgacccggcgttcctgaccgtgctcctgcaggacggcatgggcggcctccaggcgctcctcggcgggcggtgggtggacgtcccgcccgtcgccggcgcgctcgtcgtcaacgtcggtgacctgctcgagctcgtcagcaacgggaggatgaggagcgtggagcaccgggtggtggccaaccggagcagggacgcggcgcgggtgtccgtggcggcgttctgcaacgtcgacctgggccgcgagagcagccggagcggcaggctgtacggccccatcgccgagctcaccgccggcggcgacccgccgcggtacaggagcaccaccgtcgccgagttcctcgcgcactacgacggcaagggcctcgacggccgccccgccctccaccacttccgtctacctgccgccgctagtctagatta

SEQ ID NO: 2688 - DNA, 1593 bp, Oryza sativa
atgacaagattacccctcgccccttccaccttctcgcagccacacctcctcctctttcccctctcctccctctccactccacacgccgtactcgcctccgtcttcccccccgatctgcgggcgcgcgagctcggagcgtccttccccgcgcgcgccgcggccaccgccgagagagtggcctcctcctcctcctcccttccttcccgcgtggcctgggcctgcggttaccccgcgcgcacggccgacgacgactgcgacggcgacgaaggcgagctggtttcggagcgcgacgcggccgacctgctcccccatctggttcgaatcgaaaggtctagtggctctaaggagtctcaaaattatgatagcaacaaccagaaggttcatcctcaaccaattgacgaaaacatgaatcagaacatgggctcaatggacaccatgattggaaggatattcaacaatatatcctctttaaagtctgcatacattcagctgcaggaagctcacaccccatatgacccagacaagatccaggctgcagatcagcttgtcatagaggagctcacgaagctctcagagctcaagcatgcttacagagaaaagaatcctaagcctgtagcggcaacacctcaagatgcacggctgctttctgaaatacaagagcaacagaacttgctgaagacatatgaggtcatggtaaagaagttccagtcccaaatccagactagagatactgagataacacatttacagcagcaaatcgatgaggctaaacttcggaaatcaaagcttgagaagaaactgaaacaaaggggcttactcaacaaggaatctgaggaatctgatgatgaagacaactacttttccatcgagttgacaccaagtttatttacatctgctgttgataatgcataccaatctatacatgatttttcaaagcctttgatcaacatgatgaaagctgcagggtgggatcttgatgctgctgctaatgcaattgaacctgctgtggtttacacaaggagggctcacaaaaagtatgctttcgagtcatatatttgccaaagaatgtttggtggtttccaagaagagagcttttctgttaaggctgctaacattactgtttccaatgaggctttcttccatcagttccttgcagtacgagccatggatcctttggatgtcttgagccaaaatcctgattcggtttttgggaagttttgcagaagcaagtacctattacttgtgcacccaaaaatggaaggctctttctttggtaacatggatcagagaaactatgtaatgagcggtggccatccgaggacacctttctatcaagcatttctgaagttagcgaagtcgatatggttactgcacaggctggcatactcctttgatccaaaagtcaaggtctttcaagtgaagaaggggagtgacttctccgaaattcacatggaaagtgttgtcaagaacatcatcctagatgaaggtgcagagaggcctaaagttggcctaatggtgatgcctgggttcttgattgggactagtgtcatacaatctcgggtgtatctttcaggtgtcaagtctgctgattga

SEQ ID NO: 2689 - DNA, 2610 bp, Oryza sativa
atggaggccgtcgaggagctcgcgcagctgtcggaggcgatgcgccaggcggcgtcgctgctggccgacgacgacccctccgacgactccgccccacgccgcccctccaccttcctcaacgccgtcgcgctcggcaacgtcggggcgggcaagtcggccgtgctgaacagcctcatcggccaccccgtgctgccgacgggggagaacggggcgacgagggcgccaattgtggtggacctgcagagggacccgggcctcagcagcaagtccatcgtgctgcaaatcgacagcaagtcgcagcaggtgtccgcaagttcgctgcggcattcgctgcaggacaggctcagcaagggggcgtccagcggatccagtaggggccgtgtagaggggatcaatctcaagctgcggacgagtacagctcccccactaaagctggttgatttacctgggatagaccagcgagctgttgacgattcaatgattaatgaatatgctgggcacaatgatgcaatactgctagttgtgatacctgcaatgcaagcagctgatgttgcgtcatctcgagctcttaggctggccaaggatattgatgcagatggcaccagaactgtaggtgtgataagtaaagttgatcaagcagaaggagatgcaaaaactatagcttgtgttcaggcccttctgtcgaataagggcccaaaaaaccttccagatatcgagtgggttgctctgataggacaatcagttgcaattgcgtcagctcaagcagcaggttctgaaaactcactagaaacagcatggaatgctgaagctgaaaccctcagatccatcttaactggagctccaaaaagtaaactaggtagaatagctctggttgacaccattgctaagcagatacgtaaacggatgaaagtgcgacttcctaacctattgagtggtcttcagggtaagtcccagatggttcaagatgaactggcacggctgggagaatctatggtacaaagtgctgaagggactcgggctgttgctttggaactctgccgggaattcgaggataagtttcttgctcatattacatctggcgaggggtctggttggaaagttgttgcaagttttgaagggaaattcccagagagaattaaacagctgccactggacaggcactttgacctcagcaatgttaaaaggattgtcttggaagccgatggttatcaaccgtacctgatatctccagagaaagggttgaggtccttgataaagatagtattggatatggcaaaggagccatcacgactctgtgttgaagaggtacatcgtgtattgttagacattgtccaatgcttcagcaaatgcccacaccaggacttggaagatatcctccattcaagcgcgagaatggaaaggcaacgccgtgaggatgaattaaaaaatcgatcctccaagaaaccacaggatgctgaccaacccatgggaaaaagggcctccagtccccagacaggatctgagaaagacacaaaagacaaatcagcgaaagacaaagacaaagacaaatcaggccagcaagacaaagacgcaaaagaggggtcctctgtgcaggttgctggttcttctggtgaaattactgcaggttaccttttgaagaaaagtgcaaaaacaaatggatggagtaggaggtggtttgtcctcaatgagaaaagcggaaagcttggctacacgaagaaacaagaggagagacattttcgtggtgtcatcactcttgaggagtgtaaccttgaagaagtagaggaggaagaacctcctaaaagtttgaaggattcaaaaaaggcaaatgggccagagaaaggcccaagtctcgtctttaagataactaacagggttgcctacaaaacagttctaaaagctcatagtgctgttgtattgaaagctgagagcacggccgacaaagttgagtgggtaaataagatacgggctgtaattcaaagcaaagggggatcattcaagggtccaaatactgatggtggttccatgagacaaagcaattccgatggtgctctggatactatggcacggagacctgctgatcctgaagaagaacttagatggatgtcccatgaagttcgtggttatgttgaggctgttttgaatagtctggcagcaaatgtcccaaaggctattgtgttgtgccaagtggagaaggcaaaggaagatatgctaaaccagctatatagttcaataagtgggcaaagcaatgcaaaaattgaagagcttctgcaagaggaccataatgctaaacgtagaagggaaaaataccaaaaacaatcatctctcttgtcaaagcttacccgtcaacttagtgtccatgacaacagggctgcttcttatgccaatgatatctctgaagctgagagcccccggacacccaaccgcccaggtgaggattggaggtctgccttcgattccgcatccaacggacccagctcaggcagcgaatcaaggtcaagaagcgctgatggacgcagagggcgctatgaaaacggcgacgtgacctccggtgccaactccggcagccgacgcactccaaaccggttacctccagcacctcctaaatactaa

SEQ ID NO: 2690 - DNA, 930 bp, Oryza sativa
atggctggcaggtcgagatacgacaaccccttcgaggagggcggcggcgacgaggtcaaccctttcgcggataaagcttctaaaggaggatcagcaggtcaatccagctattccggaggcgcattctatacaacacaatcacgccctagtgctccaccggccacccacctttcgcctcttcctcctgagccagctgacttctacaatgacttctcgaccccggtggatattccaatggacactagcaaggatatgaaaacaagggagaaggaacttcttgcaaaggaagccgagctaaacaggcgagagaagatttgcactgctgatcttactagttttgcagctggtattgtgttggaagacaaaaactggcctccatttttccccatcatccataatgatattggcaatgagatacctgtccacctgcaaagaacacagtatgtcgcatttgcgtcactcttaggattggtcctgtgcttgttttggaacatcatctgtgttacggctgcttggattaaaggggaaggtcccaagatctggtttcttgctgtcatctatttcattcttggatgcccaggtgcctactatctgtggtaccgaccactttaccgtgccatgaggaatgagagtgctctgaaatttggatggtttttcctgttctacttggtccacatcgctttctgtgtgtatgcggctgtttctccatcaattctatttgtagggaaatcattgacaggaatttttccagcaatcagcttaataggcaatactgttatcgttgggcgtttttcagaggaaaatttatctaaccttgtgagcactgtgctccctgcactgcagcgtgtgtatctttacttccggggcagcgggaaagaggccgagatgaagcgcgaggctgcacgcagcgcagcgagggcggcgttttga

SEQ ID NO: 2691 - DNA, 546 bp, Oryza sativa
atggcgtcttcttccgttctgatcaagctgctcgtcgtcgtcggctgcgccgccgcggcctccgcggcgacgctyaccgtgggtggtagctccgggtggacgcttggccagaactacgatacttgggcaagtggccaaaccttcgcggttggagacaagctcgtgttcagcttcgttggggcgcacacggtgacggaggtgaacaagaacgattacgacaactgcgccgtcgcaagcaactcgatcagctcgaccagcaccagcccagccaccctcgacctcgccgccgccggcatgcactactacatctgcaccatcagcggccactgcgccggcggcatgaagctggccatcaacgtcggcagcggctccggctccggctccggctccgggacgccacccagcaccaccccaggaagcagcggcacgccgccggccaccccttcttccccctccaagccgaccggcggcgcgtccgccggcctgcaggccagcgccgccgtcgccgccgccgccggcgtcctcgtcaagctcgccctcttctga

SEQ ID NO: 2692 - DNA, 1329 bp, Oryza sativa
atggcgtcccgcatcgcctctcgcctcctccgccgctccaacgcgactctaggcctcatcaggagttattcacatgccaggaactacagcagtcaactttcagctcttattccaattggttcccagagctcaaagcttacaagaagacgctattacttgccaaatgcctctccgtaccaactctggagtaggtcatttgcatctgacaatggagaccaggttgaagctgttgtccctttcatgggtgaatctgtaactgatggaactcttgctaacttcttgaagaaacctggtgacagagttgaggctgatgagcccatagcacagattgaaactgataaggttactatagatgttgctagtccggaagctggtgttattgaaaagttcattgctagcgaaggtgatactgttactccaggcaccaaagttgctatcatatcaaagtctgcggcaccagctgaaacacatgttgctccgtctgaggattcaaccccaaaagaaacgcctccaaaagctgaggagacaaaaccaaaattagaagagaagtcaccaaaagcagaacctcccaagatgcctctgccacccaaaacctcccctacagaaccacagctccctccaaaagaacgagaacggagggtgccaatgccaaggctcaggaagcgtattgcaaaccgtttgaaggattcacaaaacacatttgcaatgctgaccacatttaatgaagttgacatgactaatttgatgaagctgcggtctgattataaggatgagtttgtcaccaagcacggtgtcaaattgggtctgatgtcctgctttgtcaagggctgctgttacagcactttcaaaaaccaacccaattgtcaatggctgtcattgatggtgatgacatcatatacmgagacctatgttgacatcagtgttgctgttggtacttccaagggtcttgtggtgcctgttatccgagatgctgataacatgaactttgcggacattgagaaagggataaacgcccttgcaaagaaggctactgagggggcactctcaattgatgagatggcaggaggaacattcaccatctctaacggtggtgtttacggaagccttatcagcacacctatcatcaaccccccacagtctgctattcttggaatgcactccattgtacaacgccctgtggtcgtggacggcaacattctcgcgaggccaatgatgtaccttgcgctgacatatgaccacaggctgatcgacggcagagaagctgtctacttcctgcgccgcatcaaggacgtggttgaagacccacggagattgctcctcgacatataa

SEQ ID NO: 2693 - DNA, 1023 bp, Oryza sativa
atggggaggggacgagcgccgtgctgcgccaaggtggggctgaacaggggttcgtggacgccgcaggaggacatgcggctcatcgcctacatccagaagcacggccacgccaactggcgagccctccccaagcaggccggattgctgcggtgcggcaagagctgccgcctccggtggatcaactacctgcgccccgacctgaagcgcggcaacttcaccgccgacgaggaggacaccatcatcaagctgcacggcctactcgggaacaagtggtccaagatcgcgtcgtgcctgcccgggaggacggacaacgagatcaagaacgtgtggaacacccacctgaagaagagggtgtcgcagagagagaagccaggtgacaccaagaagaagggcaaggccgcggacgccagcgacgacgccgacgcgcattccccgtcgtcgtcggcgtcctcctcgacgacgacggcggccaataacaacaacagcggcgacacggccggcgagcagtgcggcacgagcaaggagcccgagaacgtcgacgtgtccttcttcgagcaagacatcgacatctcggacatgctggtggacgcgcccacggaggcgccgctggtcgcggcgccaatgccgccgtccccgtgctcgtcgtcctccctgacgacgacgacgtgcgtcggcgccgtgtcggacgagctgctcgacctgccggagatcgacatcgagccggatatatggagcatcatcgacggctacggcggcgatgagcccggcgacggcgatgcaacagtgccatgtaccgccagcccgggagaggagggagcagagtggtgggtagagaatttggagaaggagctcggcctgtgggggcccatggacgagtccctggcccatccggacccacccggacaggtttgttacccgggcccactcacggaaacagagggggacccagtctccacctacttccagtccgggcccaccgcctctccgctccaggagatcgcatcacccgccgttctctcatga

SEQ ID NO: 2694 - DNA, 717 bp, Oryza sativa
atggcagcctacgggaagccgcagccgccgctgaacgacgcgtactacggcccgccgatcccgccgccaccggcggcagcgtactacggcgcagcggcgcctccgcccgcgccacgccggagcggcgcgcaccgtctgttctgctgcctcttcagggtgctcgccktcgccsttatygcgctsggaaccgccgtcctcgtcctctggctcatctaccgccccagcgtcktcaaggcctacgccgaaaccgctgcgctgtcccgcttcgacctcaccaacggcggcagcctcctcgtgtacaacctcaccgtgggcatgcgcgtgcgcaaccccaaccgcttcggcatcaacttcaggagcgtcgacgcgcaggcgtcctacgacggcgaccggttcgggtacgcgccgctgcagccgttatacgttggtcggaagagcgacgccaggttcgacgtgacgctgagcggctcggcggccatcgacgaccgcgacgtggagcgcacataccggagggagacggcgcaggggtcttacgaggttaaggtcagggtgtacgctagacaaggattcaaggtcaggggcttcaggctgaacaacaagagcaaattcacctgcacgctgaacctgccggcgcccaactccggcaacggcaccgcgagcgggacgccgacgacggtgttcacgaggaagcagccgaagtgcgacgtggactattga

SEQ ID NO: 2695 - DNA, 1110 bp, Oryza sativa
atgagggttgaagcaacacaacacagggatataaggcgctacaagtgtgaattttgcacggttgttaggtccaaaaaatgtctcatccgagctcacatggttgctcatcataaggaagaactggacaaatcggaaatctacaagtcaaatggggaaaaggttgttcatgaaggtgaccacacctgccaagagtgtggtgcttctttccagaagccagctcatctgaagcagcatatgcaaagtcactctgatgagagatcgttcatttgcccacttgaagactgccctttcagctacattaggaaagatcacttgaaccgtcatatgcttaagcatcaagggaagttgtttacctgctctatggatggttgtggtaggaagttcagtataaaggcaaatatgcaaaggcatgtaaaggaaatccatgaggatgaaactgctactaaaagcaaccggcagtttgtttgcaaggaggagggctgtaacaaggttttcaagtatgcttcaaagatgaagaaacatgaagaatcacatgtgaaattggactacgtggaagtagtctgctgtgaaccaggctgcatgaagacattcacaaatgttgaatgtttgagggctcataatcaggcttgccatcaatatgttcagtgtgatatctgtggggaaaaacacctgaagaagaacattaaaaggcacctacgagcccatgaggaggtgccatctactgaaaggataaaatgcagttttgagggctgtgaatgctctttttccaataaatcaaatttaaccaaacatataaaggcgtcccatgatcaagtaaaacctttcgcatgtcgattcacggggtgtgaaaaggtgtttccatacaagcatgtcagggacaaccatgagaaatccagcgctcatgtatacactcaggcaaacttcacggagatggacgagcagttactctcgtgtccgagaggtggacggaagaggaaagctgtgactgtcgaaactcttacgcgcaagagggtgaccatgcacggcgacgcttcgtcgttggacaatggaactgagtacctgcgctggttgctttctggtggggatgatgattcgagccaaactcattag

SEQ ID NO: 2696 - DNA, 1044 bp, Oryza sativa
atggcgccagtcggggcagcaatggagtggcatgatctggagggggtgtcgatggcagagtgtagtggagggcacgtgggagtggtcgtcaacggcggagaaaagcgagcgatggccggccggccgtcgccgccaattgctgatgctgaagagaatttgggtgagagcgaagtgcgtgaggcccatctggcgaaatccttgtacttcatgagggttggagagaaggaaaaagcactggagcagcttaaagttactgaagggaaaactgtagctgttggccagaaaatggatcttgtgttctacactttgcaaataggccttttccacatggactttgatctcatctcaaaatccattgacaaggcaaagaacctgtttgaggaaggaggcgactgggagagaaagaaccgattgaaagtatatgaaggcctatacttcatggcaacgagaaacttcaagaaagctgccagcttatttttagattccatctcaactttcacaacttacgagttgtttccatatgatacttttgtcttctatacagtcatcacaagcataatcacattggatcgtgtatctctaaaacaaaaggtggtagatgcaccagaaattttggcagtgattggcaaagtacctcatctatctgagtttctgaactccctttacaattgccagtacaagtcattttttgttgcattctctggcatgacggagcagattaagttggatcgctatcttcagcctcatttccgctactataygagggaagtgcggaccgttgtctattcacagtttttggagtcatacaagagtgtgacaatggaagcgatggccgcagcatttggtgtgactgttgatttcatagaccaggaattgtcgcggttcattgcagctgggaagcttcactgcaagatcgataaggttgctggtgttctggagacaaaccgacctgacgctaggaatgccttctaccaagcgaccatcaagcaaggggacttcttgctgaaccgcatccagaaactgtcacgagtcattgacttgtaa

SEQ ID NO: 2697 - DNA, 710 bp, Oryza sativa
atggcgcccagagcagctacggtggagaaggttgctgtggcgccacccaccgggcttggtcttggcgtcggcggaggtgtcggagccgggggtcctcactacaggggcgtccgcaagcgcccgtgggggcgttacgcagcggagatccgtgaccctgccaagaagagccgggtgtggctcggtacctacgacacggcagaggaggccgcccgcgcctacgacgccgccgctcgagagttccggggtgccaaggcaaaaacaaactttccgtttgcatcacagtcgatggtcggctgtggcggcagccccagcagcaatagcacggtagacaccggttgcgscggggttcagacgcctatgcgggccatgcctctgccgccgactctggacttggatttgttccaccggcgcggctgctgtgacttcgcagtcgccggcaccggcgttcgctttcctttcagaggatatcccgttgcacgtccagcaacgcatccttactttttctatgagcaggctgcagcggctgccgcagctgaggctggataccgtatgatgaagcttgcaccgccggtcaccgtggcggcggttgcacaaagtgactccgactcctcgtcggtggttgatctcgcgccgtcacctccagcggttacggcgaacaaggcggcagctttcgatctggatctgaaccggccgccgccggtagagaacta

SEQ ID NO: 2698 - DNA, 1884 bp, Oryza sativa
atggagggaagcagacaatcgagtatgtgtatggctttccttctcctctacttaccagtagtcgtggacgacgaaactggctttttcgccgtggcgccatggaccttgttccacgacgggcaccacgtgtggctgcggagccgcgccaacggcctgtacctctgcgccgacgacgacaggagcggcgtctccctgcagcaggaccgcgcgtccgtgcacgcggcktgggcggtgcacatactccacttcaacggcggcgacgtcctcatgctccacagcgccgcgaacgggcggtacctcgcggcctacagggccgagggatcgtggaacgtcgagcggctcaacctcaaccggctgccgtcgctcaccttcagctggtacgctctggggtcgagatacggggacgacgtcctgctgcgtcacttcaagagcatgttcttcctccgagctcttttcaggagggatcgtatcagcaatagcggcgccgtcggcctttgcgcgatggaccggggcaccacgaccatgcagtgggtggtggaggccatacccccaagagagtccatacctacccttccagatcctttgccgcccagttctttatccggtgtgtaccgcatctggtatgtgcgagcaaatcctgatgggattatctccccaaacgactggaggctgttcttattctacggtaggttcagaaagggaaagcgtcaaaccttctgtttcactgttgttctgaaggttatgaactgctgcctctcaagcttggactgccacttgctccacccaacgcgcgagtctgtgtgccgccgccgccgccgccgctccgatggaaaccgccgcggcgggccgccgcgcgtgcaggccctagccgacgccggcgtctccttcctccsggcgcagtacgtccagccgccggaactccgcccggaccccaccaccaccacccaccgccgcgccccgaccgccgcctccctctccgtccccgtcgtcgacctctcatcgcccggtgcgggcgacgccgtccgccgcgcgtgcgccgagtggggcgccttccacgtggtcggccacggcgtccggccggggctgctcgacgcgatgcgtggggcggggctcgccttyttccgctcccccatggaggagaagctccggttcgcctgcgaccaggccaggggcgccgccgccgaggggtacggcagccggatgctcgccaacgacgactccgtgcttgactggcgcgactacttcgaccaccacaccctcccggattcccgccgcgatcccacccggtggcccgatttcgtccccggctacagggacactgttgtgaaatacagcgacagcatgaaagatctcgctcaaaaattgctgcgcattgtctctgaaagtctgaacttgccaccttcgtatatagaagaagcagtgggggaagtttatcagaatattactgttagctactattctccttgcccacaacctgatcttgctcttggattgcaatctcattctgatatgggtgcaataacacttctaatacaagatgatgtgggtgggcttgaagtactgaaggacgggctgtggatacctgttccttctttgcctgatggaatccttgtaattttggctgaccagacagagatcataaccaatggaagatacaagagtgctgtgcatcgagctattgtcaatgctgatcgtgcccgcttgtcagtagcaacattctacgatccatccaaatctcgaaaaatttgtactgctccacagctcgtttgcaaggagcatccacagaagtaccgggatgtgatatatggtgactatgtctcatcttggtatagcaaaggcccagagggcaagcgcaacattgatgccctcctgatcgagcaatag

SEQ ID NO: 2699 - DNA, 690 bp, Oryza sativa
atggcgaactcaccgacgctgacaatgctggtgttcctagctattgggctatctctcgtcctctccgcagccggcgtgtctgtggagagcgtggtcaccgaggcgttcttcaacgggatcaagaaccaggccccgaacggctgcgccggtaagagcttctacacacggcaatcgttcctgaacgccgcccgctcctactcgggcttcgccaatgaccgcaccaacgacgactccaagcgcgagatcgctgccttcttcgcgcatgtcacacacgagactggacatatgtgctacatcaatgagataaatggggcaaacatggactattgtgacaagagcaacaaacagtggccgtgccagccgggcaagaagtactacggacgcgggccgctgcagatctcatggaacttcaactacgggccggcgggaaagaacatcgggttcgacgggctaagggacccagacaaggtggcgcaggacccgacaatctctttcaagacggcgctctggttctggatgaacaacgtgcaccaggtgatgtcgcaggggtttggcgccaccatccgggccatcaacggtgcgctcgagtgcaacgggaagaaccccggtgccgtcaacgcaagggtaaactactacaaggactactgccgccagttcggcgtcagcccggggggcaacctctactgttga

SEQ ID NO: 2700 - DNA, 1053 bp, Oryza sativa
atggcgactaccagctctaaaaacgagaggtggagcctcgccggcgccaccgcgctcgtcaccggcggcagcaaaggcatcggccgcgccatcgtcgaggagctcgccagcttgggcgcgacggtgcacacctgcgcccggaccgaggcgccgctgaacagatgccgggaggagttgacggccaagggccttgccgtcaccgtctccgtctgtgacgtctcgttgcgtgccgacagggaggcgctcgccggcacggtgcgcgagctcttcggcggcaagctcagcatcctggtgaactgcgccgggatgtcgttcctgaagccggcggtggagctgacgccggacgattgctcgcaggtgatggggatgaacttcgagtcgtgcttccacttgagccagctggcgtaccctctcctcaaggcctctcagagaggttgtatcatcaacatctcgtccattgcttcggtggtcgcgttctgctctcttcccaacgccgtctactcagctgctaaagactgcagctgcctgaattctgctggacgcgctacagtagttagaaacagaggaaacagaggaatgcaaggcagagtggagcgacgagcaatgaaccaagtcacaaggaacctggctgctgagtgggcgaacgatgggatcagagttaactgtgttgcgccaggcttcattcgtactccgctcctatctgaattcgtggagggtaacgagttggggcgagcagagttcagccgtgttcccatgggccgtctcggtgaaccagaggacatcgcatcgctggtggcgtttctgtcaatgccagcgtcctcctatataaccgggcgtgacgatagcgtagggcacagcaataggtgttggaagcagagtttgggaatggtggcgtttccgctcgccgcactccgaaaagaggcttcttcttctctgcctccactgaatagcgtcggcaagcaatggcaccagggccaggatgttgacagatcagatcgattggctctagccaatggcaaggacaaggtggcaaaaggagctcatcacatatga

SEQ ID NO: 2701 - DNA, 2277 bp, Oryza sativa
atggctcctgtcttcttcctcctcctcttcagccaaatctttctctgcaccgcagtggacaccatcaactccaccacgccgctgtccgggacgcagaagatcgtctccaagggcggcaggttcgcccttggattctacaccccgccacaaggtaacaacaccgcctccggcaccggcaactactacatagctatatggtacaacaacataccgttgcagacgacggtgtggacggccaacagcgacgtgccggtgtctgacccgaccaccgcatccttgtccatcggcagcgatggcaatcttgtcctccttgatcaatccaagaacaggcagctgtggtcgaccaacgtaagtgtggcctccaactccaccgttgccgtcatccaggacggcggtagcctcgacctcatggatgccaccaattcatccatagtctactggaggagcatagatcatccgacaaacacctggcttccgggcggcaagctggggctgaacaagaccactggtgtgagccagcggcttgtgccatggaggaacaatgcaaacccgtcccctgggctgttctcccttgagctggatcccaacggcacaacgcagtacttcatccagtggaacgactccatcacttactggaccagcggcccttggaacggtaatatcttcagtcttgtgcccgagatgacggccggctacaactacaacttccggttcattaacaatgtctcggagagctacttcatatactccatgaaggatgactcgatcatctcgcggttcaccattgatgtgaatgggcagatcaagcagtggacatgggtaccagcctcggagaattggatcttgttctggtcccagccacggacgcagtgtgaggtgtacgggctctgcggcgcatatggaagttgcaacctcaatgtcctgccgttctgcaactgcatcaaggggttcagccagaagtttcagagtgattgggacctccaggattttactggtgggtgcaagagaaacgtaccgttgcagtgccagaccaactcaagctctgcacagactcagcctgataagttctattccatggttagtgtgaggctacctgataatgctcagagtgcagtggccgctagttctcaggcctgtcaggttgcttgcctgaataattgctcctgtaatgcttacacttacaatagtagtggctgctttgtttggcatggggacttgattaacctccaagaccaatacaatgggaatggaggaggcacactcttcctcaggcttgcagcgtctgaacttccagactctaaaaagagcaagaaaatgatcattggtgcagttgtaggtggagttgctgcagctttgataatccttgcaattgtgttgttcatcgtattccagaaatgccgccgagacaggactcttcgcatatccaagactacagggggcgcactgattgccttccggtacagtgatctgcagcatgtcaccagcaacttctcagagaagctgggtggaggtgcctttggcacagtatttaaagggaagctcccagattcaacagccattgcagtgaagaggcttgatggactgagccagggggagaagcaattccgtgctgaggtaagcaccatcgggaccatccaacatgtcaatctggttcgcctacttggtttctgctctgaaggatcaagaagactgcttgtctatgagtacatgccaaagggctccctggaattgcagctgttccatgccgtgttttggacaacaatgagagggacaaggggttaccttgcgcctgagtggatcagtggtgtgccgattactcctaaggcagatgtcttcagctatggcatgatgctcttcgaactcatatcaggcagaaggaatgctgatctaggggaggagggaaagtcctctttcttcccaactttggctgtaaacaaactccaggaaggtgatgtgcagaccttgttagaccccaggttgaatggagatgccagtgctgatgagctcacaaaagcttgcaaggttgcctgctggtgtatccaagatgatgaaaatggcagacctacaatgggtcaggtcgtccaaattttagagggattccttgatgtcaacatgcctcctgttccaaggtcactgaaggttcttgatgaaagccctgatgtcataaattttttctcagatgtttcatcaagtcaaacttcgcagatgcataatagcacagcttcttcgcagacaaagagttctacttcaggtggttcacaatttcagagcacataa

SEQ ID NO: 2702 - DNA, 1218 bp, Oryza sativa
atggcaagtgctagctcaccggaaggtgcaagttcgagctctcctgaaaaggtcaagatggtcaccgtcctgagcatcgacggcggcggcgtcagagggatcatcccggccaccatcctcgccttccttgagaaagagctccaaaaactggatggtccggatgctaggatcgctgactacttcgacgtcgtcgccggcacgagcaccggtggcctcctgacggcgatgctcactgctccaaacgagaacaaccggccactgttcgccgccgacgaattggccaaattctacatcgaacactcgcccagcatcttcccacagaagaactgggtcttgtccaagatcgccggcacgctgaggatggtgagtggcccaaagtacgacggcaagtacctccattcgctgctccgagagaagctcggcgacacgaggctggacaaggcgctgacgaacgtggttattcccaccttcgacatcgctaacctgcaaccaaccatcttctccaaattcgagttgaagtacaagccactgaagaatgctctcctgtcggacatttcgatcagcacctccgccgcaccgaccttcttcccggcgcactatttcgagaccaaagacgacaatggccagacgagggagttcaacctcgtcgacggtggggtcgccgccaacaacccgacattgtgtgcaatgagccaagtgtccaagtatatcatcctcgaggacaaggaagattgcgacttcttcccggtgaagccgacggagtatggcaagttcatggtgatctccatcggctgtgggtcgaatcacgatcagaaatacaaggccaaggacgctgccaagtggggaatcttcaactggctcatcaagggtagctcagctcccatcatcgacatgtttacttctgctagtgctgacatggttgacatccacctcggtgtgctcttcagcgctcttcaatgcgaaaagaactacttacgcatacagtatgatcagttgacgggcagtgcgggctcgatcgacgactgctccaaggaaaacatggataacctggtgaagattggggaaatgcttctcgacaagaacgtctcacgagtagacctggagaccggccattacgtggatgtggccggcgaaggcacgaacagagatcagcttgccaagttcgcaaagcagctctccgacgagcggcgccggcgccaaaacgagccctcaaattaa

SEQ ID NO: 2703 - DNA, 1524 bp, Oryza sativa
atggtggagagggctgaaaagctgaaggacgatgtccgcacaatgtttgagacatgcgacagcacagagggaaggttgcagttagtagatgcaatccaacatctcggaatagatcacctcttcaaagaagagatagaatactcactaagtgaaatcaatgcaagtgaattcattagctctagcctccatgatgttgctctgcggtttcgtttgcttaggcagcatggctttcatgtatctccagatgtattcaacaaattcaaaggcgatgatgggaggtttgttagtggaataactaatgacccaaggggcttattaagtttatacaacgcagcccatcttctcacacacgatgagccagaacttgaagaagccatctcttttgcaacgcaacatcttgcatcattgagtagtggaactgatctcaatccacatctaattgatcaaatcaatcgtgcccttgatgtaccattaccaaggacgtacagaagaatggaaactttgtgctatatgccggagtatagacaagaagaagggcacattcccattcttctagaacttgcaatgctggattttaaccttctgcagcatgtccacttaaaggagcttaaagctatttctgagtggtggaaagatctttatggatacatgggtttaagttacattagggatcgcgtggtggagtcctacgtttggtcctatgttgtgttctacgaggaagactcagcgcttgcacgaatgatctttaccaagataattgcattcataatccttatggatgacacttatgattcctatgccacgatccaggaatgcaggaagctgaatgaagccatccaaagatgggatgagagcgctaccgcattcctaccagaatacattaagaagttctacagtgcactgttaaaaaccttcaaggagtttgagattcatgtggaggatgatggccaataccgaattgatcacacaaaaaaagctttccaaaatctatctgcttattatcttcaagaagcggaatggtcatatcagaattacaagccaagctttgaagagcaagtggctttgtctacggtaacctcaaccgtgccactactatgtgtgtctactacagtcggtcgaggtgatgcactaacgaacgaagcatttgagtgggcagcaaatgatattggtgccaaaatagcgtgtgcaaagataacacgtttcatgaatgacattgcggcatttaagcagcgtggaagaaagaacaggggggacgtggtgagcacagtggagtgctacatgaatgagaacaaggtcacaagcgagggcgccttcaccaagatcgacttgatgatagaagatgaatggaggacgatcaaccaggctctctgtgaacatcgtgagctcctcccagcagtgcaacaagtgttgaatttagctatttgcgcgacattcttttacgggaagagaaaggacgcctacacattctccacacatcttcaggagacagttgagagtctctttgttaggccagtttctatctag

SEQ ID NO: 2704 - DNA, 930 bp, Oryza sativa
atggccgtggacctgatgggctgctacgccccgcgccgcgcagacgaccagctcgccatccaggaggcggccaccgccggcctccgcagcctggagatgctcgtgtcgtccctctcctcctcctctcaggccgccggggctcacaaggcctcgccgcagcagcagccgttcggcgagatcgccgaccaggccgtctccaagttccgcaaggtcatctccatcctcgaccgcaccggccacgcccgcttccgccgcggcccggtcgagtcgtctgctcccgccgcccccgtcgctgctgctccccctcctcctcctccaccaccggcgccggtcgctgccgccctcgcgccgacctcctcgcagccgcagaccctgacgctggacttcacgaagccgaacctgaccatgtcggccgcgacgtccgtgacatccacgtcgttcttctcgtcggtgacggccggcgagggaagcgtttccaagggccggagcctgctctcctccggcaagccgccgctgtctgggcacaagcggaagccctgcgccggcggccactccgaggccaccgccaacggcggccgctgccactgctccaagagaaggaagaaccgggtgaagaggacgatccgagtgccggcaatcagctcgaagatcgccgacatcccgccggacgaatactcgtggaggaagtacggccagaaacccatcaagggctccccttacccacggggctactacaagtgcagcacagtgagaggatgccccgcgcggaagcacgtggagcgcgccaccgacgacccggcgatgctggtcgtgacctacgagggcgagcaccgccacacgccggggcccctcccggcgccacccgccgccgccgccgtcgccgcgatgccggtttccgtcgccgtgtccaccggcaacggacatgtctaa

SEQ ID NO: 2705 - DNA, 1767 bp, Oryza sativa
atggagaaggtgggcgggaagccgccgcagtcgcgcctctgcttcctcgccacgctctgcgccatgttctgggtcctcatcttctacttccacttcttcgtcatcgccaacgagcctggctccgcgggggcggacaccgccgccggcgccgcggcgagcattgcccgcgcagaacttccgctccccgaacccgagcgcgtctccgatcccgcggttcccctccctccgcctgccctcgtctcggagccgccacctaccaccgctactgtcgccaaagtggaagatgaggagaagcccacggccgtcgcccaccaggaggcggcgcccagggattacgcgttccagcgagcgctcaagaccgcggagaacaagagcgacccgtgcggcggccggtacatctacgtgcacgagctgccgccgcggttcaacgacgacatgctccgggagtgcgagaggctcagcctctggaccaatatgtgcaagttcatgagcaacgaagggcttggtccgccgttgggcaacgaggaaggggtgttctccaacaccggctggtacgcgacgaaccagtttatggtggatgtcatcttcaggaaccggatgaagcagtacgagtgcctgaccaaggactcgtccatcgctgccgcggtgtttgtgccgttctacgccgggtttgatgtggcgaggtatctttgggggcacaacatttcgacgagggatgccgcgtcgctggatttgatagattggctgaggaagaggcctgaatggaatgtgatgggcgggcgtgaccatttcttagttggcggcaggattgcgtgggatttcaggcgcttgacggacgaagagtcggattggggcaacaagctgcttttcatgccggctgcgaagaatatgtcgatgttggtggtggagtcaagcccatggaatgccaatgattttgcgataccatatcctacttacttccaccctgccaaggatgctgatgttttgctttggcaggatagaatgaggagcctggaacgaccatggttgttctcgtttgctggggctcctcgtcctgatgatcccaagtctatcagaagtcagcttattgatcaatgcaggacatcaagtgtctgtaaattgctggagtgtgatcttggggagagcaagtgccattcccctagcgcaatcatgaatatgttccagaactctttgttctgcttgcagccccaaggtgattcgtatacgagaagatctgccttcgactcgatgctggctggttgcattcctgttttctttcatcctggttcagcgtatgtccaatatacgtggcatcttccgaagaactatacacggtactctgtcttcatccctgaagatggcgtccgtaagggaaatgtcagcattgaggacaggcttaaaagtatccatccagatatggtcaagaagatgagggaagaggtcattagtctcatcccaagggtgatatatgctgatccaaggtcaaagctggagaccctgaaggatgcattcgatgtttctgtagaggcaataattaacaaggtgacacagttgagaagagatatcatcgaagatcatgaagataaagattttgttgaagagaatagctggaagtatgatctgttggaagaagggcagaggacaattgggcctcatgaatgggacccgttcttctctaagcccaaggacaagggtggagattctactaatccatctactaatgctgccaagaactcctggaaaaacgaacaaagaggtcagaactaa

SEQ ID NO: 2706 - DNA, 3093 bp, Oryza sativa
atgacaagtgctagacacttgttcttcaccttgtccttctccttcttggcgctcttgagctgcattgccgtgtgcaatgccggtgacgaggccgccgcgttgctggccatcaaggcgtctctcgtcgatccattgggggagctgaaaggatggagctctgcgccacattgcacatggaagggcgtgcgctgcgacgcccggggcgcggtcaccggcctcaacctcgccgccatgaacctgagcggcgccatcccggacgacatcctcggcctcgccgggctcacctcgatcgtcctgcagagcaacgcgttcgacggcgagctgccgccggtgctcgtgtccatcccgacgctccgcgagctcgacgtcagcgacaacaacttcaagggcaggttcccggccggcctcggggcgtgcgcctcgctgacgcacctcaacgcgtccgggaacaacttcgccggcccgctcccggccgacatcggcaacgccaccgcgctcgagacgctcgacttcaggggtggcttcttctccggcggcatcccgaagacgtatggcaagctccagaagctcaagttcttgggcctctcgggcaacaacctcaatggcgctctcccggctgagctgttcgagctctcgtcattggagcagctcatcatcgggtacaacgagttcagcggcgcgatcccggccgccattggcaatctcgccaagctccagtacctcgacatggcgatcggcagcttagagggccccattccgccggagctcggccggctgccgtacctcaacaccgtttacctctacaagaacaacattggcggccagataccgaaggagctcggcaacctctcctccctcatcatgctcgacctctccgacaacgcgatcaccggcacgatcccgccggagttggcgcagctcactaacctgcagctgcttaacctgatgtgcaacaagatcaagggcggcatcccggccggcattggcgagctccccaagctcgaggtgcttgagctgtggaacaactcactcaccggcccgttgccgccgtcgctcggcaaagcgcagccgctgcagtggctggacgtgtcgacgaacgccttgtccgggccggtgcccgccgggctctgcgacagcggcaacctgacgaagctgatactgttcaacaatgtcttcacgggcgcgatccccgcggggctcacgacgtgttcgacgcttgtccgcgtcagggcgcacaacaaccggctcaacggcactgtgccgttggggctcgggcggctgccgcggctgcagcgcctggagctcgccggcaatgagctgtccggcgagatccccgacgacctggcgctctcgacgtcgctctccttcatcgacctctcgcacaaccagctgcggtcggcgctgccgtcgaacatcctgtccatccctgcgctgcagacgttcgcggcggcggacaacgagctgaccggtggcgtgccggacgagcttgccgattgcccgtcgttgtcggccctcgacctgtcgaacaaccggctatccggcgcgatcccggccagcctcgcgtcgtgccagaggctcgtttcgctgagcctccggaacaaccggttcacagggcagatccctgctgctgtcgccatgatgccgacattgtccgtcctcgatctctccaacaacttcttctccggcgagatcccgagcaacttcggcagctcgccggcgctcgagatgctgaacctggcgtacaacaacctcaccggccccgtgccggcgacggggctcctgaggacgatcaaccccgacgaccttgccgggaacccgggactctgtggcggcgtcctgcctccgtgcggggcaagctctctccggtcatcgtcgtcggaatcgtatgaccttcgccgctcacacatgaagcacattgccgctggctgggccatcggcatctccgccgtgattgcggcatgcggagccatgtttcttggcaagcagctgtaccaccggtggtacgtccatggcggatgctgcgacgatgccgccgtggaggaagaagggagcggctcgtggccatggcgcctcacggcgttccagcggttgagtttcaccagcgccgaggtgctcgcgtgcatcaaggaggctaacattgtcggcatgggcggcacgggggtggtgtaccgcgccgacatgccacgccaccacgccgtggtcgccgtcaagaagctgtggcgcgccgccgggtgccccgaggaggccaccacggtggacgggcggacggacgtcgaggcgggaggcgagttcgcggccgaggtgaagctcctcgggcggctccggcaccggaacgtcgtgcgcatgctgggctacgtgagcaacaacctggacacgatggtgatctacgagtacatggtcaatggcagcctgtgggatgcgctgcacggccagcggaagggcaagatgctgatggactgggtgtcgcggtacaacgtggcggcgggcgtcgccgccgggctcgcctacctgcaccacgactgccggccgccggtcatccaccgcgacgtcaagtcgagcaacgtcctcctcgacgacaacatggacgccaagatcgccgacttcggcctcgcccgcgtcatggcgcgcgcccacgagaccgtctccgtcgtcgccggctcgtacggctacatcgcgccggagtacgggtacacgctgaaggtggatcagaagagtgacatctacagcttcggtgtcgtcctcatggagctcctcaccggacggcggccgatcgagccggagtacggcgagagccaggacatcgtcgggtggatcagggagcggctgcgcagcaacaccggggtggaggagcttctcgacgccagcgtcggcggccgcgtcgaccacgtacgggaggagatgctgctggtgctgcgggtggcggtgctgtgcacggccaagtcacccaaggaccggcccaccatgcgcgacgtggtgaccatgctcggggaggcgaagccccggcggaagagcagcagcgccacggtggccgccaccgtcgtggacaaggacaagccggtgttcacgacgtcgcccgactccggttacctatag

SEQ ID NO: 2707 - DNA, 2058 bp, Oryza sativa
atggcgcaatcgcgttcacacgccatggccgcgttcgccttcgtcgtcgtcttcctcctctccggcgcgccgggagcccggtcgcagcagccgtacggctcgcaggtggccgactgccccaacaagcacaacgacaccggcctcctgggctacttctgcagcagcggcggcggcggcggcggcgcgccgtcgtcgtcgtcgtcgtcgtgccagacctacctcaccttccacgccacgccgcgctaccccgacctcgccgccatcgcgtcgctcctcggcgccgacgcgtccagcctcgccgccgcgaactccgcggcgttgcccaccgcggcgctcgcgccgggcgccaaggtgctcgtcccggcgacctgctcctgcacgggcgccgcctactaccagcggaacgcgacgtacgtggcggtcgccggcgacacgctgctggtgatcgcgaacgacacgttccagggcctgtccacgtgccaggcggtgcaggagcaggccctcggcgacgcgccggcgaggtcgctcctggcggggcagcgcgttcaccgtgccgctccggtgcgcgtgcccgagcgccgcccaggccgccgccggcttgaggtacctggtgacgtacctggttcgacgagttcgacgagttgggcgccatcgctgcgaggttcggcgtcgacgccgggaacatctcggcggccaacgagatggccattactgacaccatatacccttttcacaacgctgctcatccccgtcaagtccaagcccgacgtgtcgcagctccggtcgccgccgccgccgcctcctccgccgccggcggcgcctgctccgaccacgaaccgcaagaaccacaccggagtctacgtcggcatcggtgcggccgccgtggctgttctcgccgtggtcaccgccgttgtggctgcccttgctgtgagggcgaggaggcagcgacggcgagccaccgccgctgtcgccgccgccggaggcaagggcggtaaaggcaacgacaaggcgtcgccggcgttcaccggcggcgaggtgtccgtgtcgatcagcgaggcgttctcgggcctctccgacatcaagtcctccctgaaggtgttcacctacgcggagctcgcggcggcgaccgacggcttcagcccggaccgccgcgtcggcgggtcggtgtaccgcgccgtgttcaacggcgacgcggccgccgtggaggtcgtggaccgggacgtgtcggcggaggtggagatcatgaggaagatcaaccacctcaaccttgtcaggctcatcggcctctgccaccaccgcggccggtggtacctcgtctcggagtacgccgagcacggcacgctccgcgaccgcytcyttgccggcggcggcgcgccgccgctgagctggtcgcagcgcgtgcaggtggccctcgacgtcgccgaggggctccgctacctgcacgggtacacgcggccgccgtacgtgcacatggacgtcagcagcgacagcgtcctcctcgccggcggcgccgacctccgcggcaagctccgcaacttcggcggcgccagggtcatccgcggcggcggcggcgaggcgttcacgatgacgagcaacatcgccgggacgcgcgggtacacggcgccggagtacctggagcacggcgtcgtgtcgcccaaggccgacgtgtactccctcggcgtcgtgctcctggagctcgtcaccggcaagggcgtcgacgagctggaggccgacggcgccggcgacccgttcgccggcatgaacgcgctggccggagacctcgacggcggcagcgaagacgacgcggcggtgacgaggagaatggaggagttcttggacccggcgatggcggcgaccgggagcagctgcccgcgcgaggccgtggcgatgatggtgaagctgatcgagaggtgcgtccgccgcgacgcggcggcgcggccgggaatgggggaggtggcgcagcatctgctgatgttgcacggcgtctccggcgacggctggcacagctcgctggagcactaccggagctccggcggcgacggcggcgaacagccatag

SEQ ID NO: 2708 - DNA, 1116 bp, Oryza sativa
atggccaccaccacctcccctctcgttgtcgtcctcctcgccgtcgtcgcggcgatcgccgtctcgctggtgcaaccggcgttcgccttgccggccggtctcccggacatcaagtctctcactaatccatggtcggcgttcaagaacctctccgggtgccacttcggcgacgagaggcaaggccttggcaagctcaaggactacctatggcacttcggctacctctcctatccgtcgtcgtcgtcgttgtcgccgtcgttcaatgatctgttcgacgccgacatggagctggcaatcaagatgtaccaggggaacttcggcctcgacgtcaccggcgacctcgacgcggcgaccgtgtcccagatgatggcgccgcggtgcggcgtcgccgacgtcgtgaacggcacgtccaccatgggcggcggcggcggcgtccgcggccgcgggctgtactcctacttccccggctcgccgcggtggccgcggtcaaggacgacgctgaggtacgcgatcacggcgacgtcgcagacgtccatcgaccgggcgacgctgagcaaggtgttcgcgagcgcgttcgcgcggtggtcggcggcgacgacgctcaacttcacggaggccgcgtcggcggccgacgccgacatcaccatcgggttctacggcggcgaccacggcgacggcgaggctttcgacgggccgctcggcacgctggcgcacgcgttctcgccgaccaacgggcgcctccacctggacgcctcggaggcgtgggtggccggcggcgacgtgacgcgggcgtcgtcgaacgcagccgtcgacctggagtccgtggcggtgcacgagatcggccacatcctcggcctcggccactcgtcggcggcggactccatcatgttcccgacgctcacgtcgcgcaccaagaaggtgaacctcgccaccgacgacgtcgccggcatccagggcctgtacgggaacaaccccaacttcaagggcgtcacgccgccggcgacgagcagccgggagatggacagcgccggcgccggcgagctctcccggccgtggcgacgcttgctcgacggcgccgcgggcttgctcgtcgggttgtcgctagcgtggttgtag

SEQ ID NO: 2709 - DNA, 2094 bp, Oryza sativa
atgggccgccggttgcgggccgtctcggcccacctcctgccgccggcgtccaccaccaccaccaccggcggcgttgacctcgccgccaaccccaccgccggcgagtacgcgcacgcttctccagtgcagggctacagtgctgtgctccctgagaagttgcagaccgggaagtggaatgtataccggaatgcgaagacacctcttaggttaatagatagattccctgatacccctgatattgcaacgcttcatgataatttcgtgtatgcagttgagacctttagggactgtagatacctgggcacaagaatctgcgctgatggaacagttggggactacaaatggatgacatatggagaagctagtacaaacaggactgcaataggttctggtcttatttatcatggaatacctgaaggtgcatgcatkggtttgtattttataaacagacctgagtggatcatagttgatcatgcctgtgcagcatattcattcgtgtctgtgccactttatgacactcttggtccagatgcagttcagttcattgtcaaccatgcgacagtagaagctattttctgtgtgcctcaaacactaagcactctgttaagctttataactcaaatgccatgtgttcgccttatagtggtaattggtggagacaatgcaaatatgccatctaccccaacatctactggagtggaaattataatttactccagactactcaaccagggaaagatgagttctagaccttttcgtcctccaaaacctgaagatgttgccactatttgttacactagtggcacaaccggcacaccaaagggagttgttctttctcataggaacttaatcgcaaatgtagcaggatcaagtgtggtcattaagttttacccatctgatgtgtacatctcatatctacctttagctcacatctatgagagagttaaccagattgcactgcttcactatggagttgccattggattctaccaaggggataatttgaagctgatggatgatctggctgcactgagaccaacagtattttctagcgtaccccggctatataacagaatttatgctgcaattacaaatgctgtgaaggagtctggagggttgaaagaaagattttttcatgctgcatacaatgctaagaggcaagccattatgaatggacgaaatctgtccccaatgtgggacaaattggtatttaacaaaataaaagctaggcttggtggacgtgtgaggcttatgtcttcaggtgcttctccattgtcagcagatgtcatggaattcctaagagtatgcttcggttgtctcgtaattgaaggatatggaatgacagagacatcctgtgtcatcgctacaatggattgtgatgataggttaattggtcatgttggacctccaaatccatcttgtgagattaagctagtggatgtcccagaaatgaattacacctctgaggatcaaccatatcctcgtggagaaatttgtgttaggggaactacgatattttttggttactataaggatgaaatccaaacgagagaggtcattgatgaggacggttggttgcacactggagacataggtttgtggctgcctggagggcgtttaaaaattatagataggaaaaagaacattttcaagttagctcaaggagaatacatagctcccgagaagattgagaatgtctatgctaagtgcaagtttattgcgcagtgctttatatatggtgatagtttaaactcttctttggttgccgtagtagcagttgaaccagaggtgttgaaggcttgggctgcatcggaaggaatccagtacgaggatttaagacagctatgcgctgatacaagggcaagagctgctgtcctggctgacatggactctattggaaaggaggcacagctaagaggttttgaatttgccaaagctgttacccttgttgctgagcctttcacactagaaaatggtctcctcaccccaacattcaagatcaaaagaccgcaagctaaggcatactttgcaaaagaaatcgcagatatgtacgcacaactgcgtgaagcagaatcaacaaagtccaagttgtaa

SEQ ID NO: 2710 - DNA, 1806 bp, Oryza sativa
atgagcggcgacggacacggatcggtgcctccagtyagctatkggcscaaatkgcccaaccgcsgcgggcscgtttccggcattgccgggaagaagaatttgtttgcaattaacggcaatttgcaaagggccccgctaagtkgcccygaatcaatcactcctgtaaaggaagtatctagctttgagccctctgtatggggggatttctttatcaactatgacccaaagccactacagagccttgaccagagagcctacgcattttcacagagatcggaggattggatgatggaaaaggctgataaactaaaacaggacgtccgtatactgtttgagacgcacaatgatacagccaagaaaatgcacttagtagatgcagttcaacgtcttggaatagatcaccttttccaagatgagataaacaatgcaataagtgacatcaaagaaagtgaattcactagctctagtctccacgaggttgctctccactttcgcttacttagggagcatggcatttgggtatctccagatgtattcgaaaaattcaaaggagaggatgggaggttcatcaatacaatagctgatgaaccaagggcattattaagtttgtacaatgcagctcacctccttgtccatgatgagccagaacttgaagaagctatgtcttttgcaaggcaccacctcgaatcaatgagggacggaagtaggctcaaggcccctctagataatcaaatcaaccgtgccctacacttaccattaccgagaacctacaagagagttgaaatgttgcattacatgctggagtacggacaggaggaagartgtattgttgttcttttagatcttgcaaagctggaatttaaccttctgcagcatgtccacttgaaggagctcaaagctttttctcagtggtggaaagatctttatggatatgtcgagctaagtcatgttagagatcgtgcagtggagtcatatctttggtcctatgcgctgttctatgaagaaaacttaacactcacacggatgatccttgccaagataattgtattcattgtccttatggatgacacatatgatgatcatgccaccatcgaggaatgcaggaagctgaatgaagccatacaaagatgggatgaaagtgctatctcattactaccagagtacatgaaaaagttctaccgtgcactgcagaattacttcagggagactgaagctcaagtagaggccagtgacaaataccgggtgacctgcatgaaaaaagagttccaaaatctatccacgtattacctgcaagaatttgaatggttgcatcaaaattacaagccagcatttaaggagcgggttgctttgtcaaccctgtccagtactgttccactactctgtgtgactgctgcagttggccagggtgatgcagtaacgaaggaatcatttgaattgacaacagtacgatcaagtgccgttatagcttgtgcaaagattatgcgtttcatgaacgacattgctgcattcaagtctggaagaaagaacaaaggagatgccgcaaacactgtagagtgctatatgaatgagaacaaggttacaagcgaagttgccttagacaagatcgaatcaatgattgaaagtgaatggagaaccttgaatcaggttcgttgtgatcatcaccagcagttccctgtggtgcaacgacttttgaacttggccgtatcagtgccattcttttacgataagaagaaagatgcatatacattttccaggtatattcaggagattgttggggatctgtttgtgaatcctgtccccatctag

SEQ ID NO: 2711 - DNA, 1002 bp, Oryza sativa
atggcgagtggtgggagcagcaatgccgggagcctgacgcagtggctgagggagaaggggttcgacgaggaggccatcgggcggatgtcgagacggtgcaagaaccttcacggccttgacgccggcgaggcctccggggtgtgggactacctcctgaacgtcgtcaagatcgagcggcggaagctccggtacgtggtcaccaagtgccccaaggtgctcaccctgtccgtcgacgacaagctcgtccccacggtgcagtgcctcaccacgctgcaggctaagcccggcgaggttgcgcaggccattgtcaagttcccccagatactgttccacagcgtggaggagaagctctgccctctcctcgccttcttccagacgcttggcatctctgagaagcagctcgccaagctgctcatggtcaacccgcgcctcatcagctacagcattgaggccaagttctcgcagaccgtcaacttcctcgttggccttggcattgacaaggagggtatgatcggcaagatcatggcaaaggagccctacatcatgggttacagtgttgacaagcgccttcgtcctactgccgagttcctcaagtcggcggtcgggcttgaggggtcaaatcttcagagggtgatcatgagttttcctgatattttgtcgcgagatgtcgataagattctgcggcccaatttggcgttcttacagagctgcggtttcagcaaggatcaggtcatggcattggtggctggataccctcctgttctcatcaagagtgtcaagcattgcctggagcctaggatgaagttccttgttgaagaaatggggcgggacatgggtgaggtggtggattacccccagttctttcgccatggtctcaagaggagcctggagtaccgccacaaggtgctcaagcagatgaattcaaggtgcagcctcagtgagatgcttgactgtaatcagaagaagtttgccatgaaatttggtttgcttgcagcagtttag

SEQ ID NO: 2712 - DNA, 1152 bp, Oryza sativa
atgaagaacgtcttctgcatgaagggtgggcaaggggagtccagttacctcaaaaacagtaaagttcagtttagaaacctgcaaatgatgctgcgtgccctggaggagacactggacaaggtcgtgctcccacaccacgggccggggaggcttctgctgacggcggctgacctcggctgctcatgcggccgcaacacgctcgtcgtcgccgatgcgatcgtgcagcacatgaccaagctctgtcgtcgtcgcggcaagggcgagcatggtgacgacgccgcggctgatccggagttctgcttctacttctccgacctaccgagcaacgacttcaacaccctcttcggcctcctcccgcaccgcggcgccgcttcctccggcgaaggcggccgtgggcggcggcactacttcgccgccgccgtgcctggctcgttccatgaccgtctgttcccggagcgatctatcgacgtgttcacctccaccttctgcctgcactggctctctcaggtgccggaagaagtcgccgacaagtggtcgccggcgtacaacaaggagaaggtgttcgtccacggcggctcggaggaaaccggcgcggcgtacaggcggcagttccagtccgacatggcgcgcttcctgcgctgccgcgccgcggagctgaagcccggtggcgccatgttcctggtcttcctcggccgcccgtcgtccgccggcccgaccgaccaaggccgcagcctgagccagttcggcgccatgttcgaggagtcgtggcgcgacctcgtcggcgaggggttgatcgacggcgagaggatggacagcttcaacgtcccgtcgtacgccgcgacgctggaggagttcagggaggtcgtcgacgccgacggctcgttcgaggtcaaccggctggagctcgtgatgggaagccctctcgccgtggacgacgacgacgacgactcccacgaccgccgcgcggtcgggcgcacggtggcgaacaaccagcgatcggtcttcggtccgctcgtcgaagcgcacatcggcaaggagctcgccgacgagctgttcgtccgggtgcagagccgcgcagaagcgctcgacgacgagctcgtggacgagatgcgggtccacatccacatcgtctgctcgctttcacttgtgtga

SEQ ID NO: 2713 - DNA, 1140 bp, Oryza sativa
atgcaagagcagcagcaggacttcaagaacgtcttctgtatggagggtggccagggcgagtccagttacatcaacaacagccaatctcagtcccgaaacctgaaaatgatgctgtacgcccttgaggagacactggacaagatccagctccctcgtcaccgtccggggaacaagccgctactgacggccgccgacctgggatgctcatgcggccaaaatactctcctgatcgcggacgtgatcgtcgaccacatgaccgacaaatccttcggcagcaaggacgacgacggcctggaattctgcttctacttttccgacctcccgagcaacgacttcaacaccctatttcacctcctcccacagcaagctgctgccgcgggcagagatgggcggcagagccggcgctacttcgccgccgccgtacctggctctttccatgatcgcctgttccccgagcgatccatcaacgtgttcacctccaccttctcattgcactggctctcacaggtgccgaagagagtcgtcgacaagcaatcgccggcatacaacaaaggtaaagtgttcgtgcatggtgcctctgaggagacgggcacggcataccaacgacaattccggtctgacatgatgcgctttctacactgtcgtgccgccgagatgaagcctggtggtgccattttcattgtcagccttggccgcctatcatccacccgcggccccacggagcaaggctacatctatgaagtgtattgcagcatgttcgaggactcattgcgtgatctcatcgaagaggagatggtcgatggcgagaagatggacaactttaacgtccccctttacgctgctacagtagaggagttcaaggaggctgtggacgccgacggctcgtttaagatcaaccagttggagctcgtgatgggaagccctcccgtcgtggatgatcccgctaaccgcggcgtggtcgggcgcatggtagcgaactacatgcgtgccctctttgggccactcgtcaacacgcacatcggcggggcgatggctgacgagctgttcatccggatgcagtgccgcgcagaaatacgtgccgaggagcttgtggatgaaatgtgcttcgcccatattctatgctcgctttcactggtgtaa

SEQ ID NO: 2714 - DNA, 1182 bp, Oryza sativa
atggcgggaaaaggaggtaagggcttgctcgccgcgaagacgacggccgccaagtcggcggagaaggacaaggggaagaaggcccccgtctcccgctcgtcccgcgctggtctccaggaaggtggtagtatgccagtggcaccaactgtggtggtttcagctaccatggaagccaaccatgataggactctgttccctgttggccgtatccatcgccagttgaagcaaaggactcaggcaaatggacgtgttggtgctactgccgcagtttactctgctgctattctggagtacttaacagctgaggttctggaactggctgggaacgctagcaaggatctgaaggtcaagcgtatcacccctcgccatctgcagcttgccatccgtggagatgaggagctcgacactctcatcaagggtaccatcgctggtggagtggtcaagagctttgttttctttgtcacttttcattattttacactccaggctgactggatccagcatagatatacggtacgtggaggatggtctactactcaaatccgagctaaagctactaaccctaatgaaaggttatcattctgttccaagtcaattcttgcatcaataaccaatacaagttgcccccctgctgtttatccccagaaacttacttaccctttactttcacccttggctgtcattcagtggtgtgactgtgaaggtggcggagcctgcatggaagggctgacgagcgagcagatggtggcgttccaggaggcgttcttgctcttcgacaagaacggcgatggatgcatcaccttggaagagctggctgcggtgactcgttctcttggccttgagccgaccgatcaggagctcaacgacatgatgagggaagttgatacagatggcaatgggatcatagattttcaggagttcctgagcctcattgccaggaagatgaaggatggggatggcgacgaagagctgaaagaagctttcgaggtcctagacaaggatcagaatggttttatctccccaactgagctgaggacagtgatgaccaatcttggggagaagatgacagacgaggaggttgagcagatgataagggaggcggataccgatggcgacgggcaggtgaactacgatgaatttgtgataatgatgaaaaacgctgaacggaagatatctgggtga

SEQ ID NO: 2715 - DNA, 1005 bp, Oryza sativa
atgacaaaaaccatcggcggcacaacaaaaatcaacccaatttatctgaccggaaaaatwaaaaagcttccaaaaaaaaatctgaccaaaccgaccaaagggcaaaatgggaacccaaaaaaactctctataaatgttgactccaggcaatcagcgtggccgcgtcacagcacacagacatcggcgaagcaaagcgcaccacgcacacggaaagagaggagaggtcacatcgcggcggcggcggcgaggatgttggcggtgtttgatccgacggtggccaagtgcccggagggcctccggagcccgccggttgccggcggcsccyttgcggccsgcggcgcgggcgcgctgatgaagggcttcgccggagcgcacgccgacgcggtcaccgtcagcctgggccccgccggcgccctcgcctactcggcggccaaccagagccccctcgtccccaggttgtttggtgctgtgaatgacatattctgcctgttccaaggacacattgagaacattgccagtctgaagcaacactatggtctgagcaagacagcaactgaggttaccatcctgattgaggcctacaggaccctcagggacaggggccctctcccagctagtcaggtcgtgagagatctcagcgggaagttcacgttcatcctgtatgacactctgtcaaaatccaccttcgttgctgcagatgctgatggtagcattcctttcttctggggcgttgactccgagaaccaccttgtgttctctgacaatgttgaccttctcaaggcatcctgcgggaactcgtttgcgccattccccaaaggctgcttctacaccacctctggagggctgcagagcttcgagcacccgctgaacgagctgaagcctgtgccgcgggtcgacagccagggccagatgtgcggctccaactacaaggtcgacagcgaggccaagaaggactccgggatccctcgggtcggcagcgccgcagactggtccaaccatttctga

SEQ ID NO: 2716 - DNA, 945 bp, Oryza sativa
atggcgcagcggcacgagcggtggatggccaagcacggccgcgcctacgccgacgacgccgagaaggcgcggcggctggaggtgttcagggacaacgtggcgttcatcgagtcggtgaacgccgccgcgagccagcacaagttctggctggaggagaaccagttcgccgacctcaccaacgccgagttcagggccacgcggacggggctcaggccgtcgtcgtcgcgcggcaaccgcgccccgacgtcgttccggtacgccaacgtcagcaccggcgatctcccggcgagcgtcgactggcgcggcaagggcgccgtcaaccccgtcaaggaccaaggcgattgcgggtgttgctgggcgttctcggcggtggcggccatggagggagccgtgaagctggccacggggaagctggtgtcgctgtcggagcagcagctggtgtcgtgcgacgtcaagggcgaggaccagggctgcgagggcgggctcatggacgacgcgttcgacttcatcatcaagaacggcggcctcgccgcggagtccgactacccgtacacggcgagcgacgacaagtgcgccaccgccggcgccggcgccgccgccgcgaccatcaaggggtacgaggacgtgccggcgaacgacgaggcggcgctgctcaaggccgtggcgaaccagccggtgtcggtggccatcgacggcggcgaccggcacttccagttctacaagggcggcgtcctctccggcgccgccggctgcgccaccgagctggaccacgcgatcacggcggtcgggtacggcgtggcgagcgacgggaccaagtactggctgatgaagaactcgtggggcacgtcgtggggggaggacggctacgtcaggatggagaggggcgtcgccgacaaggagggcgtctgtggcctcgccatgatggcctcctacccgacggcgtga

SEQ ID NO: 2717 - DNA, 597 bp, Oryza sativa
atggcggccaaccccggcaacaagatccgcaacgccaagctggttcttcttggagatgtgggcacgggcaagtcgagcctcgttctccggtttgtgaagggccagtttgttgagttccaggagtccaccatcggcgcggccttcttctcgcaaaccttggcggttaacgatgagacggtgaagttcgaaatctgggatactgcagggcaggagaggtatcatagcttggctccgatgtactatcggggtgcggctgccgcgatagttgtctacgacatcacaaatgcggcctctttcacacgtgcaaaaaaatgggttcaagaacttcaagcgcaaggaaacccaaacacgataatggctcttgctggtaacaaggctgatatggtagaggcgaggcaggtgccagcagaagaggcaaagacctacgcacaagagaatggccttttcttcatggaaacatctgcgaaaacggcgatcaatgtgaacgatgtattccacgagatcgcaaagagattgcttcaaggacagcaggctcaagacacaccggctggaatggttctcaaccagagaccagctgagaggatgatcatgcagtga

SEQ ID NO: 2718 - DNA, 690 bp, Oryza sativa
atggcctcctcgaacttctttcttctcacagctctcatcgctttggtcgctactcaggccatggcttctgatcccagtcctcttcaggacttctgcgttgccgacaggaactctccagtacatgtcaatgggttcccttgcaaggatgctaaagatgtgaatgttgatgacttcttcctagcagctaacctcgacaagccgatggacacaaccaagagcaaggctggatccaatgttacattgatcaatgtgatgaaactcgcaggtctcaacacccttggcatctccatggcaaggatcgactatgctcctaaagggcaaaacccaccacacacgcatccccgtgctaccgagatcctaactgttcttgagggtacactctatgttggttttgttacatcgaaccaagcaaacggagaaaacaagctcttcaccaagacacttaacaagggtgatgtcttcgtgttcccacaaggtctcattcacttccagttcaatccaagctatgataagccagcagttgccatcgctgcacttagcagccagaaccctggagcgattaccattgctaatgcagtatttggatcaaattcaccaatctcggatgacgttcttgctaaggcatttcaggtggacaagaaagctgtggattggctccaagctcagttctgggagaacaaccataactaa

SEQ ID NO: 2719 - DNA, 1845 bp, Oryza sativa
atggtgccgttgtacgtggcgatgatactggcgtacgggtcggtgaagtggtggcgcatcttcacgccggaccagtgctccgggatcaaccgcttcgtggcgctcttcgccgtgccgctgctgtcgttccacttcatctccaccaacaacccgtacacgatgaacctccggttcatcgccgccgacacgctgcagaagctgatggtgctggccatgctcacggcgtggagccacctcagccgccgggggagcctcgagtggaccatcacgctcttctccctctccacgctgcccaacacgctcgtcatggggatccctttgctcaagggcatgtacggggagttctccggcagcctcatggtgcagatcgtcgtgctgcagtgcatcatctggtacacgctcatgctcttcatgttcgagtaccgcggcgcccggatgctcatcaccgagcagttcccggacaccgccgccaacatcgcctccatcgtcgtcgacccggacgtcgtgtcgctggacggcaggagggacgccatcgagacggagacggaggtgaaggaggacggcaggatacacgtcaccgtgcgccgctccaacgcgtctcgctcggacatctactcccgccgctccatgggcttctccagcaccacgccgcggccgagcaacctcaccaacgccgagatctactcgctgcagtcgtcgcggaacccgacgccgaggggttcaagcttcaaccacaccgacttctactccatggtgggccgcagctccaacttcggcgcggccgacgcgttcggcgtccgcaccggcgccacgccgcgcccgtccaactacgaggacgacgcgtccaagcccaagtacccgctcccggcgtcgaatgcggcgcccatggcgggccactacccggcgccgaacccggccgtgtcgtcggcgcccaagggcgccaagaaggcggccacgaacgggcaggccaagggcgaggacctccacatgttcgtctggagctccagcgcgtcgcccgtgtccgacgtcttcggcggcggcgcgccagactacaacgacgccgcggcagtcaagtccccccgcaaaagtagcaatcttttatcttcaccgtgtactatttgcctgatttggggagcatttcttgggctaatttgtactgactcgtatatttcttttacgtcagtggatggagcgaaggacagggaggactacgtggagcgggacgatttcagcttcgggaacaggggcgtcatggacagggacgcggaggcaggggacgagaaggcggcggcggcggcgggcgccgaccccagcaaggccatggcggcgccgacggcgatgccgccgacgagcgtgatgacccgcctcatcctgatcatggtgtggcgcaagctcatccgcaacccgaacacctactccagcctcatcggcctcatctggtccctcgtctgcttcaggtggaacttcgagatgccggccatcgtcctgaaatccatctcgatcctgtcggacgcggggctcggcatggccatgttcagtctcggtctgttcatggcgctgcagccgcacatcatcgcgtgcgggaacaaggtggcgacgtacgccatggcggtgcggttcctggccgggccggccgtgatggcggcggcgtccttcgccgtcggactccgtggcacgctcctgcacgtcgccattgtccaggcagctctgccccagggcattgtccccttcgtcttcgccaaggagtacagcgtgcaccctagcattctcagcacagctgtcatctttggcatgctcatcgccttgcctatcaccctcgtctactacatcttgcttgggctgtaa

SEQ ID NO: 2720 - DNA, 1206 bp, Oryza sativa
atgacctaccacctccttgagataacgaggagtaagcgcatatcaagtactccgaggattgaacctgatagtgttgctgcagtagcagtactgaccaaacgacctaaatctgccaggaaccatgagtgtgagcagctggattgtcaaggcagcaatgatcagggtttttcggattcaagtaccctaataagttctatcggtcgagataactcaatcagttgcctcgcccgttgctctcgttcagattatggctccattgcatcagtcaatcggaacttccactcacttgtccgcagtggggagctttacaaggaacggcgtcagttggggattgcagaacattgggtctatttctcctgcaacgtgcaggagtgggaagcttatgacccttaccgttcacggtggatgacactcccaaagatgccacacaatgagtgtttcatgtgctcagacaaggagtcacttgcagtgggcaccgaactcctggtttttggcaaggagattctttcccacattgttctgagttacagtattctgacaaactcgtggtcgcctggtgttgatatgaatgcccctagatgcttgtttggatcagctagctttggagagaaagcaattgtagctggtggcatggatgctcaaggtcgggtgctacgctctgctgagctgtacaactctgaaactaagagatggataacactcccatgcatgaacaaggctaggcgaatgtgttctggagtctttatgaacggcaaattttacgtaattgggggaatggccagtaacacggaggtgctgacctgcggagaagagtatgatttggagaaaggtacctggagggtgatagagaacatgtctgaggggctcaacggtgcaagtggtgcacctccccttgttgctgttgttgaaaatgagttatatgctgcacaatatgcaggaaagctagtaaggaaatataacataaaggataacacatggacaacactgggagagttaccagagcggccagaagctgtgaatggctggggtattgcattccgaggatgtggagagcggctcttggtgattggtggaccaagagtgatgggaggggggatgattgagctccattcatggatcccgagggaggggccgttgcggtggaacatgatcgggagcaagccttctggtaactttgtttataactgtgctgtcatggggtgctga

SEQ ID NO: 2721 - DNA, 795 bp, Oryza sativa
atgaattccaagttccagctgatattgtcaaccttcgttgtcattgccgctttcaccctgcttccacgtccttgcgcttccatcgagttccaccgcaagctctccagctggtccaatggcggagctacgtggtatggtgctgctaatggcgctggaagtgatggtggggcatgtgggtaccaggctgccgtcgaccaggcaccgttctcgtccatgatcgccgccggcagcccttccatctacaagtccggcctgggctgcggctcttgctaccaggtgaaatgcagtggaaatagcgcttgctcgggcaacccggtgactgtggtcctcaccgacgagtgccccgggggcccgtgcctcagcgagccggtccacttcgacctgagcgggacggcgttcggtgccatggcgaatcctggccaggccgaccagctgcgcgccgccggcgtcctccaaatccagtacaaccgggtgccgtgcaactggggcggagtgatgctcaccttcgccgtggacgccggctcgaaccccagctacttcgcggtgctcgtcaagtacgagaacggggacggcgacctctccgggatggacctcatgcagacaggggccggcgccgcctggacgccgatgcagcagtcgtggggcgccgtctggaagctgagcgccggcgcggcgctgcaggcgccgctctccatccgcctcacgtccagctccggcaagacgctcgtcgccagcaacgtcatcccttccggctggaagcccggcgcgtcgtacacatcgacggtgaactactaa

SEQ ID NO: 2722 - DNA, 834 bp, Oryza sativa
atggggagggcgccgtgctgcgagaaggaggggctgaggagaggggcgtggagccccgaggaggacgaccgcctcgtcgcctacatccgccgccacggccaccccaactggcgcgcgctccccaagcaagccgggcttctccgctgcgggaagagctgcaggctgcggtggatcaactacctccggccggacatcaagcgggggaacttcaccgccgacgaggaggacctcatcgtccgcctccacaactccctcggcaacaggtggtcagccatcgccgcccagatgccgggtcgcactgacaacgagatcaagaacgtgtggcacactcacctcaagaagaggctggacgacgaacggaagctcgccgccgccggcggtggcggtggccgccggccgcatacgcgcaagcagcccaaggcggcaaagagcgccgccgccgtcaagcgcgaggcgacgccgtccgtcagcgtcgacaccagtagcggcgtgacgtgctccacggtgaccgagtcgtcgccgtcgtcggccgacggcgaccaccggcggcagcagcagcaaacgcagcatgccgctgtcaaggaggagagcttcagctcgggcggcaactgccggcggcgcggcggcgcccagggcagcggccacatggacaaaacttctggtcgtcacggaggttaccgggatgatgccggcctcggcgacatggacgaggagctggccatcgccggcacgtcgtcggcggcggcggcgaggagcgacgacatggagttckggcycaagawgctcctcgrgtccggggacatgggggatttggccgtcttgaaatctatttaa

SEQ ID NO: 2723 - DNA, 1014 bp, Oryza sativa
atgccggagtactgcgtcaccggcgggacggggttcatcgcgtcgcacctcatccgcgcgctgctcgccgccagccacaccgtccgcgccaccgtcagagacccagaggatgaagccaaggtggggttcctatgggagcttgatggcgcgagcgagcggctgcagctggtgaaggccgacctgatggtggarggtagcttcgacgacgccgtccgcggcgtcgacggcgtgttccacgcggcgtcccccgtcgtggtggtcggcaacagcagcagcaacaacggcaagccgaacgacgacgacgacgaggaggaggtccagcagcggctagtggagccgatcgtgcgcggcgcgtcgaacgtgctccgctcctgcgccagggcgtcgccgcgcccgcgccgcgtggtgttcacctcctcctgctcctgcgtccgctacggcgccggcgcggcggcggcgctgaacgaktcgcactggagcgacgccgcctactgcgcggcgcacggcctctggtacgcctacgccaagacgctggcgragaggragscttggcggctggccaaggagcgcggcctcgacatggtcgccgtgaacccgtccttcgtcgtgggccccatcctgtcgcaagcgccgacgagcacggcgctgatcgtgctcgccytcctccgcggcgagctccccaggtacccgaacacgacggtggggttcgtccacgtggacgacgcggtgctggcccacgtggtggccatggaggacgccagggcgtcggggcggctcatctgctcgtgccacgtggcgcactggtcggagatcgtggggtcgctgagggagaggtacccggggtacccgatccccgcggagtgcggcagccacaagggagacgacagggcccacaagatggacaccgccaagatcagggctctcggcttcccgccattcctctccgtgcagcagatgttcgacgactgcatcaagagcttccaggacaagggcctccttcctcctcacgcttga

SEQ ID NO: 2724 - DNA, 912 bp, Oryza sativa
atgtcaagttccacgaattcgacggttttggcggaatcggtagcgactgggagctcagtggatgttgagcttctaccctttgtgaatgacaaacatggtggtgtgatcgttgagatgacggccccgatggatccccaattgttttcagcttccttgaaagcatcattgtcaaaatggagggaacagggaataagaggtgtctggataaaattgcccatcagccttgccaaccttattcaatatgcagtggaggaagggttctggtaccaccatgcagaggaaacttacttaatgcttgcatactggcttccagctacaacacatacattacctgtaaatgctactcaccgtgtgggtgttggagcatttgtaatgaatgacaaaagagaggtattggctgtccaagaaaagagtggtgtacttcgaggcctaggtgtatggaaatttccaactggagttgttgaaccaggagaagatataaacttaggagctgtaagagaagtaaaagaagagactgggattgatacagaatttgttgaagttcttgccttcaggcagagccacaaagctttttttgataaatcggatctgttttttgtttgcatattacggccactttcctttgatattaccaagcaagattcagaaatcgaggcagctcagtggatgcctgtggaggaatttgctgctcaaccatttgtccagaaacatgagctagtgaagtacattcttgaagtgggtttggcgaaggttgacaaggactatgcaggattttcgccaatcctcataaaatccgcattcacggacaaaaaatcgttcttttacatgaacaggagggacctggacaaggcctcagaatccagtagtacacagaaaaagactgaaaaacctttgttcatggaaaaactgtag

SEQ ID NO: 2725 - DNA, 939 bp, Oryza sativa
atggcggcctcctcctcctcctcgtcgccggccgcggcctccgctcccttcgccgcgccggggccccaccgccgccccggactcgcgctgcgcccctcgccgccgacgccgccttcctcctccttgtcctgctgccgcgcttcccccgccgccgcggccgtctcgtccgtctccgccaccgccgccccgaatcgcgggcccagggggatgggtcttcgttgccgggcatcggagggagcggcggcggcggcgcggaaggaggccccgctcaaggtgatgatctcgggtgcacccgcgtctgggaagggaacgcaatgccgcatgatcgtcgagaagtatggtttggttcacatatcaactggggatcttctgcgggccgaagtatcttctggcaccgaaataggcaagaaagcaaaagaatatatggacaatggtatgctagtcccggatcaagttgtgacagatatggtggtatcacgactatcacaacctgatgttagagaaagaggatggcttctcgatggttacccgagaagttatgcccaggcacaaagtctcgaaagtatgaaaatacgaccagatatattcattgtgctggaaattgagctttacaatcagttcatcaaattcttagttcatgagaatattacaggatacttcaacaatgtatctacggttcctgatgatattctaatcgacagatgtgttggaagaaggttggatcctgagactggcaaaatttaccacataaagaacttccctccggagaatgatgaagtttctgctcgtcttgttacacgctctgatgatacatttgagaaggttaaatcacgtcttgatacttacaaacaaaattctgaagctgttatcccaacatactcagatttgctcaaccaggttcttatatgtgttcctattcatatcagagcactgatttaa

SEQ ID NO: 2726 - DNA, 1686 bp, Oryza sativa
atggagctgttctasgagctgctcctcasggcggctgcctccctcctggtggccttcctggtggccaggctgctggcctccgccgccaccgccagtgatccccgccgccgcgcgcccgatcacgccgccgtgatcgcggaggaggaggcggtggtggtggaggaggagaggatcatcgaggtcgatgaggtcgaggtgaagagcgcgcgcgcragggartgcgtggtttcggaggggtgggtcraggtggggagggcctcgtcggcggaggggaagctcgagtgcttgccggaggaagaggaggctcccgcgaaggccgctcgggagcttgttctcgatgccgttttggaggaacgcgaggaggaaggacaagttggcgaagagcggtgcgatttggccgctgcggtggcggaggtcgtgggagtgaagccgcatgagttgggggttgaagctgctcccggggaggtatctgacgtgacgctggaggaagggaaggtgcaggatgttggggtggagcagcatgatttggtcgccgaggctgctccaagggaagctcttgacacagggttggagaaacagggtgttcccatcattgaagcggttgaaatcaagcggcaggatgatctgggtgctgaggtagctccgagtgacgttcctgaggtggaatttgagcaacagggagttcgcattattgaagctattgatgtgaatcaacatcatcgggttgctctggctgctcctgcggaagttgttgatgcgggattggaggagagggtccaagctattgaagcagggtcatctggattgacttccgagacagttcctgaagaggttcttgacgagttatctgagaagcaagaagagcaagttattgaagagaaggaacatcaattgggctgcagcgactgctccaagacggaggaacttaaagaagaacaatcctctgaaaaagctgtcaatgttcatgaagaagttcagagtaaggacgaagctaaatgcaagctccatctggttgatcaacaagaaggttcggcttctaaggtggagctggtggggaggaataccgacaatgtggaaattagccatggaagcagttctggtgacaaaatgattgctgagttgaccgaggaggaattgacattgcaaggtgtgcccgcagatgagactcagacagacatggaatttggggagtgggaagggattgaaagaactgagatagaaaagaggtttggtgtggcagcagcgtttgcatctagtgacgccgggatggctgccctgtcaaagcttgatagtgatgtgcagctgcagctgcagggactccttaaggttgccattgatggtccatgctatgactctacacagccacttaccttgaggccttcatctcgtgcaaaatgggctgcttggcaaaagctagggaacatgtatccggagacagctatggaaagatacatgaatcttttgtcagaggctattccaggatggatgggtgacaatatctcgggcacaaaggaacatgaagctggtgatgatgctgtagggtctgtcttaacaatgacttcaaatacaatcaaccaacatgacagtcaagggaatgaagacaatactggcatgtatgaaggtcacttgacaagttcccctaacccagagaaaggcataggtgcagatcacaatgcatgcatttga

SEQ ID NO: 2727 - DNA, 873 bp, Oryza sativa
atggcggggaggtacgaccggaaccccttcgacgaggacgacgtcaaccccttcgcgggtggaagtgtacctccagcttccaactctcggatgccacctcttcctcacgaacctgggttctataatgatcgtggtgccacagtggacatacctcttgattcaaccaaggacatgaagaaaaaggagaaagaactgcaggcaaaggaggctgagctaaacaaacgggaaagcgaattgagaagaagagaagaagctgcatccagagctgggattgtcattgaagagaaaaactggccacccttcttccctattattcatcatgacatttcaaatgagataccaatccacctacaaaggatgcaataccttgcattttcttcattgttgggattggcggcatgtcttttctggaacataattgcaactacagcagcatggattaaaggggcaggtgttatgatctggttgctagccattatctactttatatctggtgtacctggagcctatgtgttatggactgagagtgctttgaagtttggatggtttttcctgttttacttgatattccgtgcagtgctaacagtgtttgccccctttcagatccatatactgttctgcatctggtctgctgtggctcccccatttcctttcaaaggaaagtctctggctgggattttgccggctattgatgtcataggaaacaatgctattgtggggatattttacttcattggatttggactgttctgccttgaatcactactcagcgttgttgtcatccagcaagtatacatgtatttccgtggaagtgggaaggctgctgagatgaaacgtgaagcagctcgtggtgctatgagatcggccttttga

SEQ ID NO: 2728 - DNA, 1155 bp, Oryza sativa
atggtggtggtggtggccatgccgccggcgctctccctcctcgttctcctcgttctcgcgctccacggaggcgccggcgactccacgccgccgccgccgctgcggctcgtccgcggcgcgcggcgcttggcgttcgacgaggggtacacgcggattttcggcgacggcaacctcgccgtcctccgcgaacggccgccgcktccgcttaaccctcgacgagtccaccgcgccgccgtcaagctccccgcctactacgccgccggcgtcgtcgtcgccttctacctgtcgaacggcgacacgtacgagaagacccacgacgaggtggacttcgagttcctcggcaacgtgcgcgggcgcgagtggcgcgtgcagacgaacgtgtacggcaatggcagcaccgccgccggcarggaggagcgctacgacctcccgttcgaccccaccggacgagctccaccattactccatcctctggactcgccgccgaatcatgtcagccatttcaaaaacatttcaaagaagagattctacgtggacgagacgccgatcagggaggtggtgaggacggcggcgatgggggcggcgttcccggcgaagccgatgtcggtgtacgccacaatctgggacggctcggcgtgggccacgctcggcgggcgctacagggtgaactacaggtacgcgccgttcgtcgccgagttcgccgacctcgtcctccacggctgcgccgtcgacccgctcgccgtcgaacactccgcgtcgtgcggggacgaggaggaggaggcggccgaggccgtcgtgtcgtccgcggcgatggcggcgttccggcgcggccacatgtcctactcctactgccacgaccggcggaggtacccggtcgcgctgtccgagtgcgcgcttaaccggcggcgcagcctccctcggccgcctgttcggccccgacgggatgaagcgccgccgcgctcgccgcgcccgcgacgcctcgtcgtagcgccggccgcgggggcgctgtacagaaaacacaggaatggccgtttgattgaaccccaggaaaaatgcaagaattgtatgagagaaatagactcaaaggaaagttaccaagatgttgagggcccctttgataggatttatgtaggaatttatgtaggaatttcatag

SEQ ID NO: 2729 - DNA, 2090 bp, Oryza sativa
atggaatcggcgcacggcggatcggatcgcccaggtttagcaatgtgcgattttgtcggttgggtaagatgccgctttcagatggaaatcgcatcacgtgttcatggtttgtacaggcagcaacctgcactaaaattccggcgagccagtatacctgaaaaagatacggacgcaaccaatgcctctagtgtgtctcctgtgagcagcagcagcagctggcgcagggatagtagctgcacgaagggagaaggctcaatggattcgcaggagccaagagttgatgctgaacaaaaacctgttctttctgataaccctgaagagcagaccattcctagcaaagatgagaaggtccttgaacccaccatttcacacgattcaaatggtatcaatctaccaagtgaaggacaagcccaagctggcacttccaatataggtgggggacacaatgctgcatatcctcaaaccatgtattcttctcaggcacagccattctattaccaaggtccaggatatgataacccttcaaatgaatgggatggatatcctccttatgtgagtgttgaaggcttggaagcaggtccagcggttgtatacaatgatgatcctcaattgatgtaccatggtggctatggctatgacccttatgctcattattctcctatctcaacgcctgtaccggctgctgttagtggagatggtcagctctactctcctcagcagttctccttctcggctccttactaccagcaatcagtaccacctggcatgccatatttaagctctcctactccaatatcacagggtgaggcaatggtgccgattgacccaacacaaggggcttttatcgccgaaactctgagtcctaacagcttccttttcggaccaagacctgaatggttccgatcgtctgaaggaaatgggtcgtttccatcacctgcggcttcacctcaacctgctggtggcgtttcagggccctttggacaaagcaacttccctatggcttctggaatgcaatctcctcagcacaggcccttctatggttttgggacaccaagtgactcttacggaagagtgttctctcatggtggatatttcccacaggccactaattatgggggccctttccctagctttggcctgaatggtacgagttctattccgatggaaaaaggccgcaggagaggaaggggcaatgctcttctttgcagctgcaatggttcacttgacttcctcaatgagcaaagccgaggcccacgtgccactaggcctaagaagcaaccagaggatggcggcaaggatgagaagccttctgcaggcgttgattgcgagttgtacaacaggcctgactttgttacagagtacaagaatgccagatttttcatcataaaatcatacagcgaagacaatgtgcacaagagcatcaaatatggtgtttgggctagcaccacaaacgggaacaagaaactagactcagcctaccgtgaagcaaaggagaaagaagagcattgcccaatttttctgctgttttcggtgaatgctagtgcacaattctgtggtgttgcagagatgattgggccagtggattttgagaagagtgttgactattggcagcaagataagtggactggccagttccctgttaagtggcacattgtgaaggatgttccaaataatcttttccgccatataattcttgaaaacaatgataataaacctgtgaccaacagccgggacacacaagaggtaaaactcgaacaaggtatggagatgctgaaaatcttcaaggatcatgaggaggatgcatcgatactcgatgactttgacttctacgaggagcgtgagagagccctgctggacaataaggcgcggctgcatcagcaacatcagctgcccagctctactgtggttgagcccaagaagcccttgactgtggccactgatctagttggtcatataactaagagctttgcgcaggcagttcggcttggtgaggccaagaatgtgagccctaattcagctgacaaaggtgccagtggggattcatctgtcgctgcaaagcctttggaagttaaagaggccggcttagcata

SEQ ID NO: 2730 - DNA, 1503 bp, Oryza sativa
atggagaatagccagatgtggcttctgtggggagccctctccgtggcgctcttcttctacttctccaccctgcgacgacgctacgccggcggcaagccccttcccccgggcccgacgccgctgccgctcatcggcaacctacacttggtcggcggcggcacgttccaccacaagctcagggacctggcacgcgtccacggccccgtcatgacgctcaagctcggactcgccaccaacgtggtcatctcctcccgggaggccgccatcgaggcgtacaccaagtacgaccgccacctcgccgcgcgcgccaccccggacaccttccgcgcctgcggcttcgccgaccgctccatggtgttcatcccgagctccgacccgcagtggaaggccctgcgggggatccacgcctcgcacgtcttcaccccgcgggtgctcgccgcggtgcgccccatccgcgagaggaaggtgggcgacctcatcgcctacctccgcgcgcacgccggggaggaggtgctcgtcggccacgccatgtacacgggcatcctcaacatggtgtccttctcctacttctccgtcgacatcgtcgacatgggctcgcagatggcccgcgagctgcgggaggtggtggacgacatcatcttggtggtcgggaagcccaacgtgtccgacttctacccgttcctccggccgctggacctgcagggcctgcgccgctggacgacgaagcggttcaacagggtgttctccatcatgggcgacatcatcgaccgccgtttggctcacatccgcgacaacaagccgaggcacgacgacttcctcgactcaatcctcgagctcatggctgccggcaagatcgatcgtgtcaacgtgctcaacatgttgttcgaggctttcgttgccggggctgacaccatggctcttaccttggagtgggtaatggccgagctgctcaaaaacccgagcgtgatggccaaggcgcgcgccgagctgagggatgtgctcggcgacaaggagatcgtggaggaggccgacgcggcgaggctgccctacctgcaggccgtgctgaaggaggccatgagactgcacccggtgggcgcgctgctgctgccgcacttcgccatggaggacggcgtggaggtcggcggctacgcggtgcccaagggctccacggtgctcttcaacgcgtgggcgatcatgcgcgacgcggcggcktgggagaggcccgacgagttcgtgccggagcggttcgtggagaggacgccgcagctggacttcagagggaaggacgtggagttcatgccgttcgggtccgggaggcggctgtgccctgggctgccgttggccgagcgtgtcgtgccgttcattctggcgtcgatgctgcacacgttcgagtgggagctccccggcggcatgacggcggaggagttggacgtgtccgagaagttcaagactgccaatgtccttgctgtgcctctcaaggctgtgcctgtcctgatcaaatag

SEQ ID NO: 2731 - DNA, 2232 bp, Oryza sativa
atggcggcggcaaaggaggcagcaggtgaggaggcgtcgacgcagacgatcaacgggaggaaggggacgttcgtgcggctcgagcagcaggaggatcaggagcggcagccggcggcgacgtacaccatggacggcagcggcggcggcggcagggtgcagcacgtgatggacagctacttctcgagcgcgcccaagatccggacgcggtcggtgcgcatggcggcggcgggcgtgatgagcatcggcggctaccgggcggagcggctcaagagcatcggccgcgtgttccaggaggacctcaccaacatgtcccagaagatcttcgacccgcaggacgcgttcctggtgcggatgaaccgcctcttcgtcatggcctgcatcgtctccgtcgccgtcgacccactcttcttctacctccccgccgtcaccgccaccgacagcaacacctgcatcggcttcgaccgcggcctcgccacgggcgccaccgcggtgcgctcggccatcgacctcttctacctcgcccgcatcgcgctccagttccggacggcgtacatcgcgccgtcgtcgcgggtgttcggccgcggcgagctggtgatcgacccggccgccatcgcgcggcgctacgtccgccgcttcttcgtcgtcgacctcctctccgtgctcccgctgccgcagatccccatctggaacttcctccaccgccccaagggcgccgacctcctgcccaccaagaacgccctcctcttcatcgtcctcgtccagtacatcccccgcctcgtccgcttctaccccatcacctccgagctcaagcgcaccaccggcgtcttcgccgagaccgccttcgccggcgccgcctactacctcctcctctacatgctcgccagccacatggtgggggcgttctggtacctgctatcgatcgagaggctggacgactgctggagggagaactgcagggtgctcaagttccatcagtgcaagaagtacatgtactgcggaggagggaacctggggcagtcgggtttcctggagtggaggacgatgatccggcaggtgctggtgatggagtgcgcgccggcggacgaggccgggaccgggttccagtacgggatcttcacgacggcgatccagtcgggcgtggtgtcgacgacgaacctggtcgccaaggtgctcttctgcctctggtgggggctccagaacctgagcaccgtggggcaggggctgaagacgacgcactacaagggggaggccctgttcgccatcttcctcgccgtgttcggcctcatcctcatggcgctcctcatcggcaacatgcagacgtacctgcagtcgatgacgctgcggcttgaggagatgcggctgcggcgccgcgactcggagcagtggatgcgccaccgcgtgctccccgtcgacctccaggagcgcgtgtggcggcacgaccagtaccggtggctggagacgcggggcgtggacgaggacagcctcgtgcgcagcctccccaaggacctgcggcgggacgtgaagcggcacctctgcctccgcctcgtccgccgcgtgccgctgttcgccaacatggacgagcgcctcctcgacgccatctgcgagcgcctcaagcccagcctgtgcacggaggccacctacatcctccgggaaggggaccccgtggacgagatgctgttcatcatccgcgggaggctggagagctccaccacggacggcgggaggatggggttcttcaaccggggcctcctcaaggaaggggacttctgcggggaggagctcctgacgtgggcgctcgaccccaaggccgccgccaacctgccgctgtcgacgcgcaccgtcaaggccatctccgaggtggaggcgttcgcgctccacgccgacgagctcaagttcgtcgccgggcagttcaggcggctgcacagcaagcagctgcagcagacgttccggttctactcgcagcagtggcgcacctgggcgtcctgcttcatccaggccgcctggaggaggcacctcaagcgcagggccgccgagcagcgccgccgcgaggaggaggaggaggaggaggccgcgtcggcgtcgtcgtcctgccagatcaccaccaccgtcctcgtatcgcgcttcgccaagaacgccatgcgcggcgcgcagcggcaacggtcgcgccgggacgccaacctcatcgtcctgcccaaaccgccggagcctgacttccagaccatggagtactga

SEQ ID NO: 2732 - DNA, 1760 bp, Oryza sativa
atggtggatcggcgcatggcgttcgcggcggaggccgacgttgatagcaaggccgcctttggattcttcggaggcgagtgcttcgtcggcgagggcgacctggtcaacccggcgccgccgccgccgcagcagcagcaggtgcacgagggcggattcgccgccgaggacgagagcgacggcgacgacgacgacgacgacgacgacgacgtggacgacatcgaggagctggagcgccgcatgtggcgcgaccgcgtccggcacaagcggctcaaggagcttcagcagagccgcgccgggagggagagccgggcgggcgacgccggcggcggaggcaggcagcagcggcagtcgcaggagcaggcgcggcggaagaagatgtcgcgggcgcaggacgggatcctcaagtacatgctcaagatgatggaggtgtgcaacgcgcaggggttcgtgtacggcatcatcccggagaaggggaagccggtgagcggcgcctccgacaacctccgctcatggtggaaggagaaggtccgcttcgaccgcaatggcccggccgccatcgccaagtaccaggccgacaacgccgtgccggggtgcgacggcgacgccggcggcgccgcgccggcggggccgcattccctgcacgagctgcaggacaccacgctgggatcgctgctctcggcgctcatgcagcactgcgacccgccgcagcgccgcttcccgctggagaagggcgtgccgccgccgtggtggccggaggggagcgaggcgtggtggcccgaggccggcgtgcccaaggagctcggcccgccgccgtacaagaagccgcacgacctcaagaaggcgtggaaggtcgccgtgctcaccgccgtcatcaagcacatgtcccccgacgtcgacaaggtccgccgcctcgtgcgtcagtccaagtgcctccaggacaagatgaccgccaaggagatcgtcacctggctcgccgtcctcaagcaggaggaggacctctatctcaagctccatcccggcgccctccccccgccgctctccgccgcgtccttcaacgccagcgtctccggcgagtacgacgtcgaaggagtcgacggcgacgaggccgggaacaacaacctgcagaaggcgcagaacgacgcgaccgcgttcatggacctcaccaccaccatggatgctgctctgagcaacaacaagttcctgatcatgccgctgatgaaggaagaggccatcgacgtcgacttcatccagaagaggagcgagccggagctgatgctgagcagcgacagccatgcccgcgtctacacctgcggcaacgtgcagtgcccgcacagcaactacgcgctcggcttcctcgaccgcaacgaacgcaacgcccatcagtacgcctgcaagcacaacgccgccgccgccgccgccgagagcaagccgccgccgccgcacatcttcgagccactcggcagcttcgacttcgacctccccgtcgacggccagagatgcctcgccgggctgatgaccatgtacgacaacgacgtcgccgccgccacgcagatgcaccaccaccaccatcagcagcagcaggctaatttcttcatccgcgacgacgcgccgttcggaggcgacgtcgccgccacggcggcggcggcgccggagttcaggttcagttcaaatttcaacgtgacaggagggggcgccgtggactacggcggcgccatgcagcaaccgccggcgaagtacgccggatccaactggttctactg

SEQ ID NO: 2733 - DNA, 1752 bp, Oryza sativa
atggcggcaaggagggctgcttcctccctcctctctcgcggcctcatcgcgaggccttctgctgcctcctccactggcgactccgctatccttggagcaggctcagcacggggcttcttgcctggatcacttcacagattcagcgctgcaccggccgccgctgccaccgccgcagccactgaggagccgatccagccgccggtggacgtgaagtacaccaagctcctcatcaatggcaacttcgtcgatgcagcatctgggaagacgttcgcgacggtggatccccgcaccggcgatgtcattgcccgcgtggccgagggcgacgcggaggacgtcaaccgcgccgtcgccgccgcccgccgggccttcgacgagggcccgtggccgcggatgaccgcctacgagcggtgcagggtgttgctgcggttcgcggacctgatcgagcagcacgccgatgagatcgcggcgctggagacgtgggacggcgggaagacgctggagcagacgacggggacggaggtgccgatggtggcgcggtacatgcggtactacggcgggtgggcggacaagatccacggcctcgtcgtgccggcggatgggccacaccacgtgcaggtgctacacgagcccatcggcgtggccgggcagatcatcccctggaacttcccgctgctcatgttcgcctggaaggtcggcccggcgctcgcctgcggcaacgccgtcgtgctcaagaccgccgagcagacgccgctctccgcgctcttcgtcgccagcctgctccacgaggctggcctccccgacggcgttctcaacgtcgtctccggctttggtccgaccgccggcgccgctctctccagccacatgggtgtcgacaagcttgcattcaccggttcgacgggcacgggcaagatcgtgcttgagctggccgcaaggagcaaccttaagccggtgacgctggagctcggaggcaaatcacctttcatcgtcatggatgacgccgatgtcgaccaggccgtcgagcttgcgcaccgcgcgctcttcttcaaccaggggcaatgctgctgcgcggggtcacgcacgttcgtgcacgagcgcgtctacgacgagttcgtggagaaggccagggctcgcgctctgcagcgtgtggtcggcgacccattcaggacaggcgtcgagcaggggcctcagatcgacggcgagcaattcaagaagatcttgcagtacgtcaagtcgggcgtggacagtggcgccacactcgtggccggcggcgacagggcgggcagcagggggttctacatccagccaaccgtctttgcagacgtcgaggacgaaatgaagatcgcgcaggaggagatattcgggccggtgcagtccatcctcaagttcaggtttgcaacactagaattcccccgaattccatctgaccgtgacagattatcaactggaatttatacaaacaccttacgtgcaatgtgcagcacggtggaggaggtggtgcggagggcgaacgcgacgccatacgggctggcggcgggggtgttcacccagaggctggacgcggcgaacaccctggcgcgggcattgagggtcgggacggtgtgggtgaacacctacgacgtgttcgacgcggccgtcccgttcggcggctacaagatgagcggcgttggcagggagaagggcgtctacagcctccgcaactacctccagaccaaggccgtcgtcacgcccatcaaggacgccgcctggttgtag

SEQ ID NO: 2734 - DNA, 1503 bp, Oryza sativa
atgtcgccgtcgtcgtcatcatcatcatggcgggctctcgtgcttgtcgccgccgccgtcttgtcattctccggccatgtcgtcgtcgccgccgccgccgccggacaccctgattacgccgacgcgctcgccaagtcgattctcttcttccaagggcagaggtccggccgccttccgccggaccaggccgtcaagtggaggtccaactccggcctctccgacggttcggcggcgaacgttgacctcaccggcggctactacgacggcggcgacaacgtcaagttcgggttcccgatggcgttcacgacgacgatgctgtcgtggggcgtcgtggagtacggcgggcggatgcgggggcgcgtactccgcgaagcgcgcgacgcggtgcggtgggcggcggactacctcctcagggcggcgacggcgaccccgggtgtgctctacgtcggcgtcggcgaccccgacgccgaccaccggtgctgggagcggccggaggacatggacacgccgcgggccgtgtactcggtgtcggcgtcgagccccgggtcggacgtggccgccgagaccgcggcggcgctcgccgccgcgtcgctggcgctcagggccgccgacccggggtactcccggaggctgctcgcggcggcgagggacgtcatggcgttcgccgtgcggcaccaggggaagtacagcgaccacgttggcggcgacgtgggcgcatactacgcctcctactccggctaccaggacgagctcctgtgggggtccgcgtggcttctctgggcgacgaggaacgcctcctacctcgactacctcgcctccctcggcgccaacgacggcgtcgacatgttcagctgggacaacaagctcgccggagcgcgcgtcctcctgtcgcggagggcgctggtgaatggcgatcggaggctggacgcgttccggcggctggcggaggacttcatctgtaggatcctgccggggtcgccgtcgtcgacgacgcagtacacgcccggcgggatgatgtacaagtccggtcacgccaacctgcagtacgtcacctcggccagcttcctcctcaccacgttcgccaagtacatggccgtctccaaccacaccttctcctgccagagcctccctgtcaccgccaagaccctccgagctctcgccaggaaacaggtggactacatcctgggcgcgaacccgcaggggatgtcgtacatggtgggctacggcgcgcggttcccgcagaggatacaccacaggggggcgtcgatgccgtcggtggcggcgtacccggcgcacatcggctgccaggaagggttcagcggctacttcaacgccggcggcgccaaccccaacgtccacaccggcgccgtcgtcggcgggccggaccagcacgacgcgttccctgacgagcgcggcgactacgaccggtcggagccgacgacgtacaccaacgccgccctcgtcggctgcctcgcctacttcgccggcagctacaggagctga

SEQ ID NO: 2735 - DNA, 993 bp, Oryza sativa
atggccgtccagattcctgacgggataatgggtgagaccatcgccaaggatgtcaccgagttgattgggaacacgccgttggtgtacctcaaccgggtgacggatgggtgcgtcgggcgcgtcgcggccaagctcgagtccatggagccatgctccagcgtcaaggataggattggatacagtatgatcactgatgcagaggagaaggggctgatcactccaggcaagagtgtgctgattgagccaactagtggcaacacaggcattggactggccttcatggctgctgcaaagggttacaggcttgtactcacgatgccggcctccatgagcatggagaggagaatcatattgaaggcttttggtgctgaattgatacttactgacccactcttgggaatgaaaggagctgtccaaaaggcagaagaactggcagcgaagacaaacaactcatttatcctccaacaattcgagaaccctgctaacccaaagatccattacgagaccactggacctgaaatctggaaaggaacaggaggtaaagttgatggtttagtttctggtattgggacaggtggcactattactggagctggacgatacctcagagagcaaaatcctgatatcaagatctatggtgtggagccagtcgagagcgctgtcttatctggtggaaagcctgggccacacaagattcaaggaattggagctggttttgttcctggggtcctggatgttgacctcatcaatgaaactgtacaagtttcaagtgatgaagctatcgagatggcaaaggctcttgcattgaaagaagggttgctggttggaatatcttcaggtgcagctgcagcagcagctgttaggctcgctcagaggccggaaaatgaaggaaaactttttgttgttgtcttcccaagctttggtgagcggtacctttcgtcggtgctcttccagtccatcaagaaggaagctgaaaacatggtggttgaatga

SEQ ID NO: 2736 - DNA, 2166 bp, Oryza sativa
atggcagcgggarggargtgctgcttccggagaggggctcccgcggcggtgctcgtgctgccgctgctgctgctgatcgccgcggcggcattgccccggcgggcgctcgcggccaccgtcgccgccgatgttgctgctataaatggactgtatgttgcacttggatcaccggctcttcctaaatggactgcgaatggtggtgacccctgtggtgatggttggcagggcgttgtatgtattggctcaaatatagattcaataattttcaatgctgcaaatttggaaggacagttaggcagcctggggaacttcacttcaataaccactataaatcttagcaacaacaatattggtggaactataccagaagatctacctgttacactgcagcatttttttatgtctgataaccagctcactggaagcattccgacgtcactatcaatgcttcagagtttaacagacatgtctctaaatgataatcatctcgacgggaaactgccagatgcttttggttcccttactggccttgtaaattttgatatttcatccaataacttcagtggttcattaccaccttctctgggaagcctgtcatcattgactacattaaaggatgggaacccatttaataccagcatagctccttctgcatcaccctcttcaacacctacaggctctacaccaacacaaacaccatcgtcaccttcatcttctggaactccttcgccatctagttcgccctctaattcttctggtggatctactgctcgagacagcagctctccatcatctaggaaacataagtcttcaaccctcaggattgttggatatgttcttctagctattgtcctgtttatagttacagtgctgctggtaatattttgcctgtccaagtaccaagagagacagtcaagacgtgattatacaacaagtcaggtggggagggttcatcagagggttgaagagccgaaagttaagcaagcttcagtgcagtcaaggaatgatgccaaaaaaggatcaacagaggttcctgaacggaggcagatgtataaaataactattcaattgctggcagctgctctcgagaagcctcctgaaaagagaaaagaacatcaatatacaaatagttttgaagagggaaatttgataagagagagtaggttgggaaaagtatatctggcagaacttcctgaaggcaggttcttggaagttatgaagattgataacgccaatgatagaataccggtagatgaatttctagaactggttgcaagtgtatcagatattaggcatcccaacatcctcgagcttgttggatactgtgcagaatatggtcagaggttacttgtttataatcatttcagtagaaaaacactgcatgatgtactacatgaaggggaggaattggatggtgcactatcatggaatgctcgcctccaagttgctcttggtgcagcaaaggccttagactatctacatgagagctgtgaacctccagtagtgcaccagaattttgagccagccaatgtgctccttggtaatggattctcagtacgtgtcgctgaatgtggactggcagaattgacgctgtcaggttctgttacacagttgtcaggtcgcatgagggcactgctgaattatgaagctcctgaaatccatgaagctgggacttttacctaccgaagtgatgtttacagttttggcgtggtaatgctagaacttctcactggccgtaaaccatatgacagttctcgtcctcgtgctgaacaacatcttgttagatgggctgattctcaatttcatgacattgagtccatatcaaagatggttgatccttctattcaaggagagtgttctgagaaagtactgtcacgttttgcagacatcatcagccgttgtattcggaaagtatactggtgtagaggtgttgttcagaggcggatgaaccctctcgacattcatatgctttccttctgtgaaactggacatgcacattctcctcctgcagggaaaaggatctcatttagattcattagcatctatatgaataactccccatttaggacagtgacacgtacacaggtgcccggccacaagaagaatcatggcgggcagatcatgcgtgacatcgcaggaagcaactcccaagttataacgggttga

SEQ ID NO: 2737 - DNA, 1790 bp, Oryza sativa
atgggtggggctaagcaggggcgcggcggcggcggcggctgctgctcccgcctctggttcatggtcgttctctccgccaccgtgacgctgctggtgcgccactgctacgaatccggcgtgatcggccaaggggccgccgccggcggcgtggtgcgcatcgagccggtgcaccgtggtttgtaccacactcggaaggcgagcccggtggatcgcggcggcggcggcggcggcacgtcgtkctctggccattcgcagtcgcygcacgacgcyggcggcagcgcgaagccggagtctccgcacgacagcggcgtcaaggcgccgtcggagctgaccaccgtcgagcacaccwmgcmgccgtccgagycwgcttctaccggmacggagtcygaygrtggaggcaagccatcgtcggcgtcgtcatcttcgctgccggcggcggcgcacccgttckcgcgcgcgctcgcggcggcgggcgacaagggcgaccggtgcggcgggcggtacgtgtacgtgcaggagctgcctccgcggttcaacaccgacatggtcaagaactgcgtggctctgttcccgtggaaagacatgtgcaagttcacggcgaacggcggcttcggcccgccgatgagcggcggcggcggcatgttccaggagaccgggtggtacaactccgacaagtacacggtggacatcatcttccacgagcggatgaggcggtacgagtgcctcaccgacgacccctccctggccgccgccgtgtacgtgccgttcttcgccggcctcgaggtgtggcgccacctctgggggttcaacgccaccgcgcgggacgccatggcgctggaggtggtggacatcatcacgtcgcggcccgagtggcgcgccatgggaggccgcgaccacttcttcaccgccggcctcatcacgtgggacttccggaggctggccgacggcgacgccggctggggsagcaagctgttcagccttccggcgataaagaacatgacggcgctcgtggtggaggcgagcccgtggcacctcaacgacgccgccatcccgttcccgackgcgttccacccggcgagcgacgaggccgtgttcgtctggcaggacaaggtccgccgcctcgagcgcccatggctcttctccttcgccggcgcggcgcgcccgggcagcgccaagtcgatccgttccgagctcatcacgcagtgcagggcgtcgagcgcgtgctcactcatggagtgccgcgacgggccgagcaacaagtgcggctcggcggcgagctacatgagactcttccagagctccaccttctgcctccagccgcagggcgactcgtacacgcgcaagtcggcgttcgacgccatgtcgccggtgcatcccggtgttcttccaccccggcacggcgtacgtccagtacacctggcactgcccaggaaccacgccgactactccgtctacatctccgaggacgacgtgcgccgcaacgccagcatcgaggagcggctgcggcggatcgcgccggccgccgtggagcggatgagggagacggtcatctcgctcatcccgacggtggtgtacgcgcagccgtcgtcgaggctggacacgatgaaggacgcgttcgacgtggcggtggacgccatcgtcgacaaggtgacgaggctgcggcgcgacatcgtcgacggccgcggcgaggaggagaagctggagatgtacagctggaagtatccattgctgcgagaagggcagaaggtcgaggacccccatgagtgggattcattgttcgcgttcgccta

SEQ ID NO: 2738 - DNA, 1797 bp, Oryza sativa
atgggtggggctaagcaggggcgcggcggcggcggcggctgctgctcccgcctctggttcatggtcgttctctccgscaccgtgacgctgctggtgcgccaatgstacgaatccggcgtgatcggccaaggggccgccgccggcggcgtggtgcgcatcgagccggtgcaccgtggtttgtaccacactcggaaggcgagcccggtggatcgcggcggcggcggcggcggcacgtcgttctctggccattcgcmgtcgccgcmagacgccggcggcagcgcgaagccggagtctccgcacgacagcggcgtcaaggcgccgtcggagctgaccaccgtcgagcacaccaagcagccgtccgagccagcttctaccggcacggagtcggatgatggaggcaagccatcgtcggcgtcgtcatcctcgctgccggcggcggcgcacccgttcgcgcgcgcgctcgcggcggcgggcgacaagggcgaccggtgcggcgggcggtacgtgtacgtgcaggagctgccaccgcggttcaacaccgacatggtaaagaactgcgcgacgctgttcccgtggacggacatgtgcgcgttcacggcgaacggcggcttcggcccgcagatgagcggcggcgacggcggcgtgttccaggagaccgggtggtacaactccgaccagtacacggtggacatcatcttccacgaccggatcaggcggtacgagtgcctcaccgacgacccctccctcgccgccgccgtgtacgtgccgttcttcgccggcctcgaggtggcgcgccacctctgggggttcaacgtcaccacccgggacgccatggcgctggaggtggtggacatcatcacgtcgcggtccgagtggcgcgccatgggaggccgcgaccacttcttcaccgccggccgcaccacgtgggacttccggaggctgaacgacggcgacgccggctggggcagcaagctgttcagccttccggcgatcaagaacatgacggcgctcgtggtggaggcgagcccgtggcacctcaacgacgccgccatcccgttcccgactgcgttccacccggcgagcgacgaggccgtgttcgtctggcaggacaaggtccgccgcctcgagcgcccatggctcttctccttcgccggcgcggcgcgcccgggcagcgccaagtccatccgttccgagctcatcgcgcaktgcagggcktcgagcgtgtgctccctgatggagtgcgccgacgggccgagcaacaagtgcggctcgccggcgagctacatgaggctgttccagagctccaccttctgcctccagccgcagggcgactcgtacacgcgcaagtcggcgttcgacgccatgctcgccggctgcatcccggtgttcttccaccccggcacggcgtacgtccagtacacctggcacctgcccaggaaccacgccgactactccgtctacatctccgaggacgacgtgcgccgcaacgccagcatcgaggagcggctgcggcggatcgcgccggccgccgtggagcggatgagggagacggtcatctcgctcatcccgacggtggtgtacgcgcagccgtcgtcgaggctggacacgatgaaggacgcgttcgacgtggcggtggacgccatcgtcgacaaggtgacgaggctgcggcgcgacatcgtcgacggccgcggcgaggaggagaagctggagatgtacagctggaagtatccattgctgcgagaagggcagaaggtcgaggacccccatgagtgggatccattgttcgcgttcggttag

SEQ ID NO: 2739 - DNA, 852 bp, Oryza sativa
atgagcgggaggagatcgttcttcgcatccaagaagccgtcgcggagcagcaaccccttcgactccgactccgacgatggcgggagggagcagagaccggcgagggcctcctccgtgcctcctccggccgaccagcggggctccctcttcggcggcggggatggcttctccgcctcgtcggcggcggcgaggagccggtacaggaacgacttccgcgacaccggcggcgtggaggcccagtcggtgcaggagctggagggctacgcggcgtacaaggcggaggagaccactcagcgggtgcagggctgcgtccgcatcgccgaggagatgagggataccgcgtccaagagcctcgtcaccatacaccagcagggccagcagatcacgcgcacgcacatgatgaccctcgacatcgaccaggatctctccaggagcgagaagctgctgggtgatcttgggggtatattttccaaaaagtggaagccaaaaaagaatggagaaatcagggggcctatgctaactagagatgattccttcattcggaagggcagccatttggaacaaaggcacaaactgggactatcggatcacccacctcaatcgaatgcacgccaattccattccgagccaacttcagccctccagaaagtggagatggagaaggcaaagcaggatgatggcctatctgatctaagtaacatattgaccgagctgaaaggcatggcggttgacatgggcactgagattgacagacaaacaaaggctttgggagattcagagaaggactacgacgaactgaacttcaggatcaagggagcaaacactcgggcacgccgtctgcttggaaaataa

SEQ ID NO: 2740 - DNA, 954 bp, Oryza sativa
atgggaagagagtcggcggcggcgtgctcgccgaagccgaagctgaggagggggctgtggtcgccggaggaggacgagaagctgttcaaccacatcagccgctatggcgtcggctgctggagctccgtcccaaagctcgccggattggagaggtgtggcaagagttgcaggctgagatggatcaactacctgaggcctgatctcaagagaggcagcttctcccagcaggaggaggagctcatcatcagcctccataaaatccttggcaacaggtggtcccagattgcggcgcagctgcccggccggacggacaacgagatcaagaacttctggaactcgtgcctcaagaagaagctccggcagcgcggcatcgatccggccacccacaagccgctcaacgacggcggcgccggcgccggagaagagcaccacgacgacggcgacaagcagcagctaatggacgactcgtcgtcgtctccctacggcgccgccggcggcgagcactcgtcgttccggtcggacaccctctgcgactacggcgggagcggcggcggcgtcgacgtcgtgtccgacgccggcacgtacagcgcctacaccggcgacagctccagcaacagcaacagcacggcgtggacatgcggcagcgtcgtcgtcggcggcgcgggcgagctgccgcwgccgccgctgctgccgcacatggacatgttcggccgggtcgacgccgagccgccgccgtacccgccgttcgacgtccaggccaggttcagcccctggcaccaccaccaccaccaccaccacgagccgacgctgccgacgccgccgcaaaggctggacggcggcggcggcgccgcggcgagcttcccgatccggtcgctgtcgcgggacatgccggagtcctgcttcgacctcggccgcggcgcgctcgacgacgagttcggcgtcgacttcctctga

SEQ ID NO: 2741 - DNA, 210 bp, Oryza sativa
atggacgccgtcgactcggtggtcgacccgctgcgcgagttcgccaaggacagcgtccgcctcgtcaagcgctgccacaagcccgaccgcaaggagttcaccaaggtggcggcgaggacggcgatcgggttcgtcgtcatgggcttcgtcggcttcttcgtcaagctcatcttcatccccatcaacaacatcatcgtcggatccggctga

SEQ ID NO: 2742 - DNA, 966 bp, Oryza sativa
atggcagcggcggcggcgaggcagacggtgtgcgtcaccggcgccggggggttcatggcctcgtcgcacgtcgagctgctcctctcccgggggaactacgcggtccgcggcaccgtgcgggatccaggtgatgccaagaatgatcatctcagggcgctacaaggtgccgaggagaggttgcagctgctcaaggctgatctgttggactatgacagtgtagcttcagcggttgccggctgtgagggcgtcttccatgtcgccagccctgtaccctcgggccgatccaccaaccctgaggtagaggtcatagctcctgctgtaacaggcacacttaatgtgttgaaggcctgccatgaggcaaaagttaagcgagttgtcatggtgtcttccattgctgccgtgttcagtaatcctaactggccaaaggataaggctttcactgaagacagttggtcagatgaggaattatgcagaaagaatcaggattggtattacctttcgaaaacggtggcagagcgtgaggcttttgcttatgcagcaaaaactgggctggacattgtaactatttgcccatcattggtgattggacccttaatgcaatctacagtaaacgcgagtagtaaagttctcattaactatttcaaaggagatcgtgacactgtcgaaaatagactccggaatgtagtggatgttcgtgatgttgccaatgctctccttttggcgtatgaaaatccagcatccggacgatacatctgcagctcagctccaataagagtctctgatatgataaacattttaaagaccttatatccaacttatacttatcccaaaaactttgtggatgtggaagagaacaccatatacagttttgagaaacttcagaagcttggctggagtttcaggcctattgaggaaaccctccgggacagcgtggaatcctacaaagcatttggcatccttgattga

SEQ ID NO: 2743 - DNA, 1038 bp, Oryza sativa
atgaggaccacggcgaggccaacggcggcggcgacggcgctcgcgctcatcctcgtcctggtgttctcgccgtcccccgccgctgccgcagcgagaatgttcaagaccatcgacgcccgacggagccagcatctggacctcggcggatcactggtcgggccagagagcgtcgcgttcgacggcaaaggccgcggcccatacagcggcgtctccgacggccgcgtcatgaggtggaacggcgaggcggctggctggagcacctacacgtacagccccagctacacgaaaaacaagtgcgcggcatcgactctccccacggttcaaaccgagagcaaatgcggccgttcgttgggcctacggtttcacttcaaaaccggcaacctgtacatcgccgacgcctacatgggattgatgcgagttgggccaggaggtggtgaggcaacagtgctagccacgaaggctgatggcgtgccacttcgcttcaccaatggggtggacattgatcaggttaccggagatgtgtatttcactgacagcagcatgaactaccaacgatctcagcacgagcaagtcacggcgaccaaggattcgaccggacggctcatgaagtatgacccacgaactaaccaagtcaccgttcttcaatccaacataacctacccgaacggtgtcgccattagcgctgaccgaacacatttgatcgttgcgttgaccggcccatgtaagttgaggtattggattcgaggtccaaaggttggtaagtccgaaccatttgtcgacttgccaggctatcctgataatgtgaggcctgatgagaaaggtggttactgggtagcgctccatcgtgagaagtatgagcttccatttggtccggacaatcacttggttgcaatgagagttagtgctggtggaaagctggtgcaacagatgagaggaccaaagagcttgagaccaactgaagtgatggagaggaaggatggcaaaatatacatgggaaatgttgaattgccatatgtcggagtcgtcaagagtatctag

SEQ ID NO: 2744 - DNA, 927 bp, Oryza sativa
atgttgggcggcgacgggagaacgaagacggtgtgcgtgaccggcgccgggggcttcgtggcgtcgtggctcgtcaagctcctcctctcccgcggctgctacaccgtccatggcaccgtccgtgatccaggcgacgccaagaacgcccacctgatgtctctggacggcgccgcggagaggctgcggctgttcaaggccgacctgctcgactacggcagcgtggcggcggccatcgccggctgcgacgacgtcttccatgttgatatacttgctcctgctgtaacgggcacgacgaatgtgctgaaggcttgttcagaagctaaggttgggagggttgtggtggtgtcatctgtctctgctgcgatggtgaatcctaactggtctgagggcaaggccatagatgaagattgctggtctgatgtcgattactgcagagccactaagaattggtatacccttgggaaaacacttgcggagattgaggcctttgattatgcgaagagaagtggattggatcttgtgacactctgcccatcgttggtgattggacctttgctgcaaccaactgtgaatgcgagcagtacagtcatacttggatgtctgaaaggtgattgtgaggtaaaaatcaaactgaggaactttgtggatgtcagggatgttgccgatgctcttcttttactgtatgaaaccccaggggtctccggacgatacatctgcagttcacacgcaagaaggatgcctcatatcattgacttactaaagagctggtatcccggttacaaatttgccgacaagtttgtggaagtgagcgatgagccgcaattcaactcggggaagctagagaagctaggatggaaaatcaagccatttgaggaaacactcagggacagtgttgaatcttatagagctgcaggtgtcctggattga

SEQ ID NO: 2745 - DNA, 945 bp, Oryza sativa
atgttcaagaccattgacgcccggcggagccagcatctggacctcggcggatcactggtcggcccggagagcgtcgcgttcgacggcaaaggccgcggcccgtacagcggcgtctccgacggccgcatcatgaggtggaacggcgaggccgctggctggagcacctacacgtacagccccagctacacgaaaaacaagtgcgcggcatcgactctccccacggtccagaccgagagcaaatgcggccgcccgttaggcctacggtttcactacaaaaccggcaacctgtacatcgccgacgcctacatgggattgatgcgagttggtccaaaaggcggggaggcaaccgtgctagccatgaaggctgatggcgtgccacttcgcttcaccaatggggtggacattgatcaggttaccggagatgtttatttcaccgacagcagcatgaactaccaacgatctcagcacgagcaagtcacggcgaccaaggattcgaccggacggctcatgaagtatgacccacgaactaaccaagtcaccgttcttcaatccaacataacctacccgaacggtgtcgccatgagcgctgaccgaacacatctgatcgttgcattgaccgggccatgtaagttgatgaggcattggatccgaggcccgaagactggcaaatctgaaccatttgttgacctgccaggctatcctgataatgtgaggcctgatggaaaaggtggttattggatagcgcttcatcgcgagaagtatgagcttccctttggtccggatagtcacttggttgctatgagggttagtgctggtgggaagctggttcaacagatgagaggaccaaagagcttgaggccaaccgaagtgatggagaggaaggatggcaaaatatacatgggaaatgttgaattgccgtatgtcggagtcgtcaaaagcagctag

SEQ ID NO: 2746 - DNA, 1485 bp, Oryza sativa
atggggaagcgcagggggaggcggaggaggtgctccgggaagcgccgcggcggcgatgcggatggaggcgggggcgggaagcggcggcgggagggggagagtgaggaggactactgcttcgcctgcaaggacggcggcctcctccgcttctgcgaccacaggaactgccacaaggcttaccatcctgagtgcgtggataaggatgacagcttcctcaattcagacgaacaattcatttgcaattaccgtggtaaccgccttaccacgtgggtgcgagaacccccctccaaacgttgtgtgaaacaagcagaatttgtcccagtcatgaggcaaacaatgggattttgcaacaactgtttgaggatggcaatcatgattgagaagaacgtcgatgttgactctgatggggagagggttgatttcagtgacagggagacatatgaatttttgttcaaggattactgggacataattagagaaaaagaagggttgacattggataatatgcgagaagcctatactcttctcagaagtggcttaaactgtaatgaactatcagatatggagaaacttccaaatagtgagcagagttcagatgatgatttcttgggcaatagtgatgacgacgatgagccagtttatccatctgtttcaaatggaacatcaaataaagtgaaaaccatactgaaggaaggaaaaacaaagaaacaggtttatgtgggatggggttcaatagaacttattggattcatgtcatcaataggcaaagatacatcaaaacctctagatcaatttggtgctgctgaagttgtgaagcagtacattcggcaaaacgatcttttgcagaaagataagaaaaaacaggtcatttgtgatggcaagctttggtctctgtttaggaaatcaaaactgaaatataacaagatatatagcttgttggaaaagcatattgctgaaaatatcacacccgaggatgaatcacttgatagttccgaggacaatactgattcaattatggaaaggaaaagtcggatcatgaactctgaattgagtactccagaagaggtgtctgaaagatacaggagatgctttgcttctcttgtccgtgaaaacattaaattaatctatttgaggagaactttagttattgatctgctaaagcaaccggatacgtttgaatgtaaagttattggctgttttgttagagtaaagaatgaccccagagagtatagtcgccacaagcctcaaaaactataccagcttggacaggtgacagttttcagtgacaaatcatttatttattatctgctaacaaaagcatacgtaacaggcattaggaaatcctcggaagaatacaagataagggacatatctacagatatccttttatgtatttccgacatgtggtctgatgtcaaaatttcagtgttgtcagatgaagactttgaggaggaatcagccgaggtacacaaactgacaatttaa

SEQ ID NO: 2747 - DNA, 339 bp, Oryza sativa
atggcgtcgttctcggaggctcccccgggcaaccccaaggccggcgagaagatcttcaagaccaagtgcgcccagtgccacaccgtcgacaagggcgccggccacaagcaaggtccaaacttgaatggtctgtttggaaggcagtcaggtaccacccctggttattcctactctacggccaacaagaacatggctgtgatctgggaggagaacacactttatgactacctgcttaatcctaagaagtacatccctggaaccaagatggtcttccctgggttgaagaagccacaggagcgtgctgatcttatttcctacctgaaggaagcaacctcttaa

SEQ ID NO: 2748 - DNA, 2094 bp, Oryza sativa
atgtcacgcctctgccaccacggcggccgcgtgctgctccccctcctcctcgtcgccgccgcttgcctcggcgatcctaccggtgacacctacgacaccgccatgtgcggcgcgcaagcttccatcacctgcggcggcgtcatcgtccggtacccgttctacctctccaacgcaaccagggcgctccccaagtacgccaactcgtccacgttctgcgggtacccggggctggagatcatctgcgacggcggcggcggcggcaaggccgtcatgatgctgggcaacgacagctacacggtgtcgcgcattgactacgccagcctcaccgtctccctcgccgacgccgacgtcgccaacggcacctgccccgtagtcagccataacgtgaccatcccaccggcaccctcgtcgctgcacctggccgacaccgtcggcatgctcatcttcttcttccgctgcgccttcgggccggcagccaatgccccacccaagccgccgagcatccacccgctcacctgcggcgagaactccgaggacgcgcccacgcagtcgttcctgctcccggcgagccccctgcctcccggcgacctctggcaccgcgggtgctcggcggtgtacggcgtgcccgtgctcggcggctccctcccgtccgacgcgaacgatcccgcgtggaggaaagacggctacatcgcgtcgctccgcaaggggttccagatgagctgggaccggagcgaccggtgctcccggtgcgagctaaccagcggcaagtgcggctacaaccagaacggcaagttcttgggctgcctctgcgccaatggcctcgtggacagcgacgcctgcagcaagatatccgactccaccctgcgcttggccggatcgaacttgaagacaaaaattatagcaggtgtggttggcgggggattatctgcggtgttcgctcttggattaatagccaccgtcttcttcgttcgcaagagaaagcacaagaaggtgaactcgtcttccaagctcctcaagtacagcggctccggcgggacacctcgctccatgggcggcgacatggagtccggcagtgtcaaggacctgcagactcacctcttcagctacgaggagctcgaggaggccaccgattccttcaacgagaacagagagctcggtgatggcggcttcggcaccgtctacaaagggatacttcgagacgggcgcgtggtggcggtgaagcggctgtacaacaacagctaccggcgggtggagcagttcgtgaacgaggcggcgatcctgtcgcggctgcggcacccgaacctggtgatgttctacgggtgcacgtcgagccagagcagggagctgctcctggtgtacgagttcgtggccaacggcacggtggccgaccacctgcacggccaccgcgcgcaggagcgcgcgctctcgtggccgctccgcctcaacatcgccgtcgagtcggccgccgcgctcacgtacctccacgccatcgagccacccatcgtgcaccgcgacgtcaagaccaccaacatcctcctcgacgccgacttccacgtcaaggtcgctgactttggcctctcccgcctcttccccctcgacgtcacgcacgtctccaccgctccccagggcaccccaggatacgtggatccggagtatcaccaatgctaccagcttaccgacaagagcgatgtgtacagcttcggcgttgtcctggtggagctcatctcgtcgaagccggcggtggacatcacccggcagcggaacgagatcaacctggccggcatggccatcaacaggatccagaagagccagctcgaggagctcgtggacctcgagctcggctacgagtccgacccggcgacgaagaagatgatgaccatggtcgccgagctggctttccggtgcctgcagcagaacggcgagatgaggccgccgatcaaggaggttctcgaggggctcaagggggtacaggacctatgcgtgatggagaaagatggaggcaaagacaagaagggacctgacccgccattatctcccgacacggtgcatgctcagtgggatagcaggcagacgactcctaacactagccagtga

SEQ ID NO: 2749 - DNA, 1329 bp, Oryza sativa
atggccgccgcatcgtcgtcgcgtgttctgctcgccgccgtcgccgtcctggccgccgccctcgcgggctgcggtgcgggggcggcgctggacgacccggcggggctcctgcggcgtgcgaaggaggcggagttcgcgggctggatggtggggctgcgccgccggatccacgagaacccggagctcgggtacgaggagttcgccaccagcgagctcgtgcgcagggagctcgacgcgctggggatcccctacaggcaccccttcgccgtcaccggcgtcgtcgccaccgtcggcaccggcggccctcccttcgtcgcgctccgggcggacatggacgcgctcccgatgcaggaaagtgtggaatgggagcacaagagtaaagtgcctggaaagatgcatgggtgtggtcacgatgcacatgttgctatgctgttgggttctgccaggatacttcaggaacaccgtgatgagctgaagggtaccgtagtacttgttttccaaccagctgaggaaggtggtggtggggcaaagaaaatgatagatgatggagctgtggaaaatatagaggccatttttggggttcatgttgctgatgttgtacctattggtgtggtggcatccaggccaggacctgtaatggcagggagtggattcttcgaggcagtaataagtggaaagggagggcatgctgcacttccccaccacactatagatccaatactggctgcatcaaatgttattgtaagccttcagcaacttgtttcccgggaagctgatcccctagactcacaggtagtaacagtaggaaaatttcaaggaggtggagccttcaatgtcatccctgattctgttacaattggtggcaccttccgagcctttttaaaagagagttttaatcaattgaagcagcgaattgaagaggtcattgtgtcacaagcatccgtgcagcggtgcaatgctgtcgtagacttcctcgacaaagaccgccctttcttccctccaacaatcaacagcgcggggctccacgatttctttgtgaaggtagctagcgagatggttggccccaagaatgtcagggacaagcagccactgatgggtgccgaggacttcgccttctacgctgatgcgattcctgcaacttactactacttcctgggcatgtacaacgagactcgcggaccgcaggcgcctcaccactccccctacttcaccatcaacgaagacgccctgccctacggtgcagccttgcaagcatcactagctgctcgctatctgcttgagcaccagccccctaccactggtaaggcgaaagcacatgacgagctgtag

SEQ ID NO: 2750 - DNA, 414 bp, Oryza sativa
atgtcgaacgacaacaagaaggtgtataccctggaggaggtcgccaagcacaactccaaggacgactgctggctcatcatcggcggaaaggtatacaatgtgtcgaaattccttgaggaccatccaggaggtgatgatgtcttgctatcttcaactggcaaggacgcgactgacgattttgaggatgtcgggcacagcacgactgctcgtgcgatgatggatgagtattacgttggcgacatcgacacatccacaatacccgcgaggacgaagtacgttcccccaaagcaaccacactacaaccaggacaagaccccggagttcatcatcaagatcctccagttcttggttcccctcgccatattgggcctggctgttgcaattaggatctacaccaagtcggagtccgcttag

SEQ ID NO: 2751 - DNA, 2493 bp, Oryza sativa
atggcgtcggagaccgagacgttcgccttccaggccgagatcaaccagctgctgtccctcatcatcaacaccttctactccaacaaggagatcttcctccgcgagctcatctccaaatcctccgatgcattggataagattaggttcgagagcctcacggacaagagcaagctcgatgcgcagccggagctgttcatccacattgtccccgacaaggctagcaacaccctgtcgatcatcgacagtggtgtcggcatgaccaagtcggacctcgtcaacaacctcggtaccatcgccaggtcggggaccaaggagttcatggaggcgctcgctgctggtgctgatgtgtccatgattgggcagtttggtgtcgggttctactccgcctaccttgttgctgagagggttgttgtgaccaccaagcacaacgacgacgagcagtatgtgtgggagtcacaggccggtgggtccttcactgttacacgtgatacctctggtgagcagcttggacggggtactaagatcaccctctacctcaaggatgatcagctggaataccttgaggagcgtcgcctcaaggatctggtgaagaagcattctgagttcatcagctaccctatctccctatggactgagaagacaactgagaaggagatttctgatgatgaagacgaggaagagaagaaggatgctgaggagggaaaggttgaggatgttgatgaggagaaggaagagaaagagaagaaaaagaagaagatcaaggaagtctctcacgagtggaacgtgatgaacaagcagaaacccatttggttgaggaagccagaggagatcaccaaggaagagtacgctgctttctacaagagcttgacaaacgactgggaggaacatctggctgtcaagcacttctctgtggagggtcagcttgaattcaaggccatcctgtttgtaccaaagagagcgccatttgacctctttgacaccaggaagaagcaaaacaacatcaagctgtacgtacgccgggtgtttatcatggacaactgtgaggagttgatcccagagtggctcagctttgtcaagggcattgttgattctgaagaccttcccctcaacatctcacgtgagatgctccagcagaacaagatcctgaaggtgatccgcaagaaccttgtgaagaagtgcgtggagctcttctttgagatcgctgagaacaaggaagactacaacaagttctacgaggctttctccaagaatctcaagcttggcatccatgaggattccaccaacaggaccaagattgctgagctcctgaggtatcactccaccaagagtggtgatgagttgaccagcctcaaggactacgtaacccggatgaaggagggccagagtgagatctattacatcactggtgagagcaagaaggctgttgagaactcccccttcctcgagaagctgaagaagaagggttatgaggtcctgtacatggttgatgccattgatgagtacgctgttggtcagcttaaggagtttgaaggcaagaagctcgtctctgccaccaaggaaggtctgaagcttgatgagagtgaggacgagaagaagcggcaggaggaactcaaggagaagttcgagggtctgtgcaaggtgatcaaggaggtgctcggtgacaaggtggagaaggttgttgtctctgaccgtgtggtggactctccctgctgtctagtcactggggagtatggctggactgctaacatggagaggatcatgaaggcccaggctctgagggactccagcatggccggctacatgtctagcaagaagaccatggagatcaacccggagaatgccatcatggacgagctccgcaagcgtgccgatgcggacaagaatgacaagtccgtgaaggacctggtgatgctgctcttcgagactgccctgctgacctccggtttcagcttggaggaccccaacaccttcggcaccaggatccaccgcatgctcaagctcggcctgagcatcgacgaggacgagtccgccgaggctgacgccgacatgccgccgctggaggacgacgccggcgagagcaagatggaggaggtcaagtacacattcagagaaacaaggctgcactcttgctgcagatcaagcggaggacttgcaatggaggcaaccaaggagacccagcagcagcagcagcagaggaagccggacgccggcgacacggtgcagctgccgatggacaccagcccgtacgtgcagtacaagaaggacgacggcctggaggactacaagctgcgcgcctacggcgcccgcggccacctccccgtctccgacgtcccccacggcggctgcggcaccgacgcccccaccatccccggcaccgccgtccccgtcgccacacagcgccgccaccaacaaggcgacaccgccgctgccgccgccggcaccggccgcgttgacaccgccaccgacgccatcaatcaccatggcgtgccatag

SEQ ID NO: 2752 - DNA, 1458 bp, Oryza sativa
atggcgtcctcgtcgtcgcttcttgttcgtgggagagcgttcgcgctggttgtggctgtagctctggtggctgctcctcgccggattaatggcggcgccgccgggccggcggcgaggacgaacgaccccaactggcacgtcttcagcgtcagctcgctgctgccgagctcggcctgcactgcatcgaaagcggcgtccaactcgtcggctctcggcgtcgtgcaccggcacgggccgtgctcgccggtgcaggctcgtcctcgcggcggcggcggcgctgtcacccacgccgagatcctggaacgcgaccaggccagggtcgactccatccaccgcaaggtcgccggcgccgggggcgcgccgtcggtggtcgacccggcacgcgcctcggagcagggcgtgtcgctgccggcgcagaggggcatctccctcggcaccggcaactacgtcgtgtccgtcgggctcgggacgccggcgaagcagtacgccgtgatcttcgacaccggcagcgacctgtcgtgggtgcagtgcaagccctgcgccgactgctacgagcagcaggacccgctgttcgacccgtcgctgtcgtcgacgtacgccgccgtggcgtgcggcgcgccggagtgccaggagctcgacgcgtcgggctgctcgtcggacagcaggtgccggtacgaggtccagtacggcgaccagtcgcagaccgacggcaacctcgtgcgcgaaacgctgacgctttcggcgtcggacacgttcccgggcttcgtcttcgggtgcggcgaccagaacgccgggctgttcggccaggtcgacgggctgttcggcctcggcagggagaaggtgtcgctgccgtcgcagggcgcgccgagctacggccccggattcacctactgcctaccgtcgtcgtcgagcggcaggggctacctgtccctcggcggcgccccgccggcgaacgcgcagttcacggcgctggccgacggcgcgacgccgtcgttctactacatcgacctcgtcggcatcaaggtcggcggccgcgcgatcaggatcccggcgacggcgttcgcggcggccggcggcacggtgatcgactccggcacggtgatcacccgccttccgccgcgcgcgtacgcgccgctccgcgcggcgttcgcgcgctccatggcgcagtacaagaaggcgcccgcgctgtccatcctcgacacgtgctacgacttcaccggccaccggacggcgcagatacccacggtggagctggcgttcgccggcggcgccaccgtcagcctcgacttcaccggcgtgctctacgtctccaaggtgtcgcaggcgtgcctggcgttcgcgcccaacgccgacgactcgtccatcgccatcctcgggaacacgcagcagaagacgttcgccgtcgcgtacgacgttgccaaccagaggatcggcttcggcgccaagggatgcagctga

SEQ ID NO: 2753 - DNA, 1593 bp, Oryza sativa
atggcgtggtgcttggtgttcatggtgttcttgatctactgcctcatctcgactgtcgggctgccggtggcgccggccgacgaggcggcgatgcagctgggcggcgtcggcggtgggcggctcagcgtggagccgtctgatgtgatggaggcgtcccttgactttgggcggctcaccagcgccgagccgctggccgtgttccacccgcgcggggccggcgacgtcgccgcgctggtgaaggcggcgtacgggtcggccagcggcatccgcgtctcggcgcgggggcacggccattccatcagcgggcaggcccaggcggccggcggggtggtcgtggacatgagtcacgggtggcgcgcggaggcggcggagaggacgttgccggtgtactcgccggcgctcggcgggcactacatcgacgtgtggggcggcgagctgtggatcgacgtgctcaactggacgctggcgcacggcgggctcgcgccgcgctcgtggacggactacctctacctttccgtgggcggcaccctctccaacgccggtataagtgggcaagctttccaccacgggccccagatcagcaacgtctacgagctcgacgtcgttaccgggaaaggagaggtggtgacctgctcggagtccaacaacccggacctcttcttcggcgcgctcggcgggctcggccagctcgggatcatcacgcgcgcgcgcatcgccctcgagcctgctcctcacagggttcgctggatccgggcgctctactccaacttcaccgagttcaccgcggaccaggagcggctcatctccctgcagcacggcggccggcggttcgactacgtggagggcttcgtcgtcgccgccgagggcctaatcaacaactggaggtcgtccttcttctcgccgcagaacccggtcaagctcagctcgctcaagcaccactccggggttctctactgcctggaggtcaccaagaattacgacgactccaccgccgtaaccgtcgaccaggacgtggaggcgctgctgggcgagctgaatttcatcccgggcacggtgttcacgacggacctgccgtacgtggacttcctagaccgcgtgcacaaggcggagctgaagctccgcggcaagggcatgtgggaggtcccgcacccgtggctcaacctcttcgtgccggcgtcccgcatcgccgacttcgaccgcggcgtcttccgcggcgtcctcggcagccgcaccgccgagaacttgatttgcgtacgttgcaggtgggacccgaggagctcggtggtgacgccggaggaggacgtgttctacctggtggcgttcctgcggtcggcggtgccgggctcgaccgacccggcgcagagcctggaggcgctggagcggcagaaccgggagatcctcgagttctgcgacgaggccggcatcggggccaagcagtacctgcccaaccacaaggcgcagcgcgagtgggaggcccatttcggagcgaggtgggctcggttcgcgcggctcaaggccgagttcgacccgcgggccatgctcgccaccggccagggaatcttcgactcgccgccgctcttggcggagtcctga

SEQ ID NO: 2754 - DNA, 1314 bp, Oryza sativa
atgaatgcgttggcagcgacgagcaggaacttcaagcaggcggccaagctgctgggcctggactccaagctggagaagagcttgctcatcccgttcagggagatcaaggttgaatgcacaattccgaaagatgatgggactttagcatcttatgttgggtttagggtccaacacgacaatgctaggggacctatgaagggtggaatcagataccaccatgaggttgatcctgatgaggtcaatgcgttggcacaactaatgacatggaagacggccgtggctaatattccatatggaggagctaaaggtggaataggatgcagccctggagatctcagcatctccgagctagagcgacttacccgtgttttcacccagaaaatccacgacttgattggcattcatacagatgttccagctccagatatgggaaccaactctcagacaatggcgtggatacttgacgaatactcaaagtttcatggttattcacctgctgtggaccttggaggatcacttggaagagatgcagctactggaaggggagttctgtttgctactgaagccttgcttgcagagcatggcaagggcattgctggccagcgttttgtaatacagggatttggtaatgttggatcctgggctgctcagctgatcagtgaagctggtggcaaggtgattgccatcagtgatgtcactggagctgtcaagaacagcaatgggcttgacattgcaaagctaatgaagcactcatcagagaaccgcgggatcaagggtttcgacggaggcgatgcaatcgacccacgctcactgcttactgaagaatgtgatgtcctcatcccggcagcacttggtggagttataaacaaggacaacgcaaatgagatcaaagcaaagtacatcattgaggctgcaaaccaccccacagaccctgaggcagatgaggcaagcacatctgacagtatctggcagacaaataccccaacagcaacaaaatgtaccatttgtctgaaatgctttctctctgaattccttctgcagatcctgtccaagaaaggcgttctcattcttccagacatcctcgcgaactccggtggtgtcacagtgagctacttcgagtgggttcagaacattcagggtttcatgtgggacgaggagaaggtgaacaatgagctgaagacctacatgacccgtgggttcagggatgtgaaggagatgtgcaggagccaccactgcgacctccgcatgggcgccttcaccctcggtgtcaaccgtgtcgctcgcgccaccgttctcagaggatgggaagcatga

SEQ ID NO: 2755 - DNA, 2607 bp, Oryza sativa
atgtcgtcgtcggcgtcgccggcggcgtggtgggcgcgcagccgcgtccgcatcctcctaccggtcatcttcctcgcccccgcgctctacttcctcctctctccaccctcctctccgcctttcttcttcactcttcccacctccagggaggagtcgccgtcggcgtcggggtcgcgggtcatatgggcgcagcggcgggtggcggagtggcggtcgtgcgggtggtggcgggcggcaatgccggctccgtcgaggaggaatgggtacatccggatcgactgctacggcgggctcaaccagctgcgacgcgatctatgtgatggaattgcggttgcgcgccttctcaacgcaacaatggttctgcccaagtttgaggttgctgcctactggaatgaatctagtggatttgcagacgttttcgatgttgattacttcattgagcaaaccagaggttatgtggaagttgtgaaggacatgcctgaagagatagcatcaaaagagccctttaaggttgattgcagcaaacgaaaaggacattttgattacgtggaaacggtgcttccagctctcttggagcatcagtatatttcactgacacctgccatgagccaaagaagagacagaaatccttcatacgcgaaagcttcttactgccaaggctgctacaatgcactgcggttgaataagaatgtggaaacaaaagctattgagcttctccaagccataccaaaacctttcttgtctcttcacctgagatttgaaccagatatggttgcctacagtcgatgtgtatacactggtctgtcttctaaatcactcagtgcaattgaagctgcacgtggggaggacaggaaggcattgactggtgaggctgcccttctgtggaggaaccgtggcaagtgccctctaacaccaagtgaaacagcatttatacttaaagcattaggtatccccacagacacaaacatttatttagctgctggcgatgggctaatggaacttgagggcttcacttccatttacaaaaatatatacactaaatcatccctcctaactcatgatgattttgagaagatgcatggcaatacaaaagctgctcttgattactatgtttcagtcagcagtgatgcttatgttgccaccttctttggaaatatggataagatggtaactgcgatgagaacaatgcaagggcaccagaagactctggtcttgagtaggagggcctatgcaaactacacagctgttggactttcaggggagcaactagctatggccatgtgggatgcccatcgagaggaatatatcatggggaggggatcagcccttcctgagcagtgcttctgtgagttcaaattaatcttcagatgtgcaaatatggatgagaattttactgcgatagagagcaatgctgacgataaagaagaaactgttcttggtgagatgggatttcacagtcagcatggtggctgggctctgtggagggaagctggctctcgtacagaaatgcatcttggcccgccttctgtttctcctgcgtactgttttgacttttcggcattacattacagttacagattctgttctgtagagttgggtagaaaactggatgcttctatgatgactgattattttaactatagttactcctcttaccagtgcagctctgcatcgtcagcgatcaagggtaccagggtggatcgcctacgagaagctagtgacacagggcatcatcgtggtcggcacaagagggcccgctcctctcctccacgccatgacgacgagccgccaccgccgccgccgctgtctccggcggtgacaggaggagcacacggcggcgccgcgtggcactcaacggtgctcgcggaggacgtcgaaagtgccgtcatcgtcgcggcgctgacgcacgtcatcagctccacggcggcggaggtgaccacggccgttcctccggtgacggttgcgccgcagcgagctgccacggctaccatgttcggacagcaagtgatgcagcagccgccgcgcggctttcctcctctgccgtcgtcgagcggatcagcagcgacggcgccggagcagcagcagccacggcggcgctaccgcggcgtgcggcagcggccgtgggggaagtgggcggcggagatccgcgacccggtgaaggcggcgcgggtgtggctcggcaccttcgacaccgccgaggacgccgcccgcgcctacgacgccgccgccgtccgcttcaagggctccaaggccaaggtcaacttccccgacgaagtcgccggcgccagcatcgccgccgtccagctgccacgccatcatcaacaccacccccgcaacgtcactgccgccgctgccggtgccggcgcatctgaggccacacttcagcctcgccggcggccagagcaccacaccggcgcccgcagccgccgccgtcgccgctccgccgcgggaggagttccccgacctcagcagctacgcgcacatactgcagagcggcgacctggagtacgacttccacgccgcggtttctgccggactaacgacgacagctgggcgatcgtcgtcgtcgtcgtcattgtcgatgccgccgccatccgaggatcttga

SEQ ID NO: 2756 - DNA, 639 bp, Oryza sativa
atggcggctacaactacaagtagcagcagcggcggcggcaaccggatctggacctcctcactcgccgtcctcgcgctcgccgtcgccctcgtctccctcctctccctccgcgcgccgccacctgctgcgcccagcatggccgacgacctgcccacctccgtccacgacatctccgtcaaggatataaagggaaatgatgtgaagctgagcgagtatgaggggaaggttcttcttattgttaatgtggcctcaaaatgtggcttaacaaattccaattacaaggagttgaatgtcttgtacgagaaatacaaagaaaaaggccttgagatactcgcatttccgtgcaaccaatttgctggtcaagagcctggcagcaatgaagagattgagcaaacagtttgtaccagattcaaagcagaatttcctatttttgacaagattgatgttaacgggaaggaggccgcaccgctatacaagttcttgaaatcacagaaaggtggattccttggtgatggcatcaaatggaacttcacgaagtttctcgttggtaaagatggcaaggttgttgagcgatatgccccgacgacttctccattaaagattgagaatgatatccagaagctacttgggacctcgtaa

SEQ ID NO: 2757 - DNA, 1146 bp, Oryza sativa
atgggttacaacgagctgattccggggttgccggaggaggtggcgagggagtgcctcatccgggtggggttcgaccagctgccggcggtgcgccgcatctcgcgccagtggaaggcggaggtggagtcgccggcgtacaaccgcctgaggaaggcggagggcctggcgcgcccggcgctcgcgctggtgcaggcgcggcgtgagctcgccgaggcgggcccggcggcggacaagcagtcgtcggccggcggtgtgccggggaactcgtaccggatggtgctgttggacccggcggaggggaggtggacgccgctgccggaggtkggtggagcgagtgggagcttgccgctgttctgccaggtggcggcggtggatggcggtgtggaggggaggaagcggctggtggtcgtcggcggctgggacccggagacgtgggcgccgacggactcggtgctcgtgtatgacttcctcacgggcgcgtkgcgccgtggcgcggccatgccgggcccgcgccggtcgttcttcgcgtgcgccgccgtcggcgggaaggtgttcgtcgccggtggccacgacgaggagaagaacgcccttcgatcggcgctggcgtacgacccggacgccgacgcgtgggccgcgctccccgacatggcggaggagcgcgacgagccgcgcgggctctgcgtcgacggcaagttcctggtcgtcggcgggtacccgacgccggcgcaggggcgattcgtcggctccgccgagtggttcgacccggcgacgtccacctggtccgccgtccaagaaggcttcgtcgacgacggcgcgtgcccgagaacctgcagcgccgcccccgaggccggagaccgcatgtacatgctccgcgacgggcacctcgtggcgcgccacggcgcaatctcctccgcccccgcggcgtggcggcccgtggcgccggtgccggaggacgcgcgcaccgcggcggccgtttccgtcatccccgacggccgcgtcgtggtcatcgggtccgactgccacggcggcgaccagacggtgtacacgctgcgggaggaggccggcaagcccgcgtcgtgggcgcgcgcgccggcgccgcccgagttctccgggcacgtccaggccgcctgccttctagaaatctga

SEQ ID NO: 2758 - DNA, 615 bp, Oryza sativa
atgatcttggagcagttcgacgagtcggcggcggagaaagcggatgcggcgatggtggtggcgccgccgtccaacttcgggatggtggacacgggggtgtaccggtcggggttcccggaccctgccagcttcggtttcctcaggggcctcggcctccgatctgtcgtgtatctgtgccctgaaccttacatggagacgaatgccgagttcttgaaggcggaggggatccgcctcttccaatttgggattgaggggaacaagttgtgtcttactacaggtgaagaagaccctaacgtgtccattcctgtggatgccatcatgggggctcttagggtcatacttgatgtaaggaatcacccagttctaatccattgcaaaagaggaaagcaccgtactggatgtcttgtgggctgcttcagaaagctgcagaattggtgtctctcatcagtctttgaagagtaccatcggtatgctgctggaaagtcacggttgtcagatctgaagtttatcgaatcatttgatgtcaactgcatgacggattgcctgctcaggctcatctaccactaccatggttgccttcagaaaagcaagcgcctggcatacagcgagagataa

SEQ ID NO: 2759 - DNA, 1104 bp, Oryza sativa
atggtgttgattcgtcttactatgctgatctttatcgccatcctccttgccggccgcacatgcgtacttgttgttgccggcggtggaatgccggcaaccttcgtgttcggtgactcgctcgtcgacgccggcaacaacaactatctcgtctccctgtccaaggcaaactacccaccaaacggcatcgacttcgacggacaccagcccaccggccggtacaccaacggccgcaccatcgtggatatactagggcaggaaatgtcgggaggatttgtgccgccctacctggcgccggagaccgccggcgacgtcctgcttaagggcgtcaactacgcgtccggcggcggaggcattctgaaccaaaccgggagcatcttcggtgggcgcatcaatctggacgcccagatcgacaactacgccaacaaccggcacgagctgatcaagcggcacggggagttggaggcggtgaccctgctccgtggcgcgctcttctcggtcacgatgggatccaacgatttcatcaacaactacctcaccccaatcttcggcgtgccggagcgcgccgtgacgccaccggaggtcttcgtcgacgccctcatatccaaataccgggagcagctcataaggctgtacctgctggacgcccgtaagatcgtggtggcgaacgttgggccgatcgggtgcatcccgtacctgagggacacgacgccgacggtcggaacggcgtgcgccgagttccctaaccagcttgcccgcaacttcaaccgcaagctgcgcggcctggtggacgagctgagcgccaacctcaccggctcccgcttcctytacgccgacgtctaccgcgtcttctccgacatcatcgccaactacaagtcgcacgggttcgaggtggcggactcggcgtgctgctacgtgagcgggaggttcggcgggttgctgccgtgcgggccgacgtcgcagtactgcgcggacaggtccaagtacgtgttctgggacccgtaccacccaagcgacgccgcgaacgcgctcatcgcccgccggatcatcgacggcgagccggcggacatcttcccgatcaacgtgcgccagctgatcacgagctga

SEQ ID NO: 2760 - DNA, 720 bp, Oryza sativa
atggctctactccagtctcggttcaggaggatatgcgtcttctgcgggagcagccagggcaagaagaagagctaccaggacgcagccgttgagcttggcaaggagctggtagcaaggaacattgatctagtgtatggtggaggaagtgtggggctcatgggcctggtctctcaagctgtctacaatggagggaggcatgttattggggtgattcccaagactcttatgcctagagaggtattagaaaaacatatatatatgattacgggtgagacagtaggggaggtgaaagcagtggcagatatgcatcagaggaaggctgagatggccaggcaatctgatgcgttcatagcactgcctggtgggtatggaacacttgaagagctcctggaagtaattgcctgggctcagctcggcattcacgacaagccggttggcctgctaaatgtggacggctactacaactctctgctgtcgttcatcgataaagctgtggaggaagagttcatcagcccctctgcgcgccatatcatcgtgttagctccaacaccaaaagaacttctcgagaagctagaggcgtactcccctcggcatgacaaggtcgtgccgaagatgcagtgggagatggagaagatgagctactgcaagagctgcgagatccctggcctgaaagaaggcaacaaggcgaccatccaagcacagcgaggaagcatgctctga

SEQ ID NO: 2761 - DNA, 1644 bp, Oryza sativa
atggggagcttcgcgaggaaggagcaccagttcctcgccgagcttggcctcgcgccgcggaaccccgggtccttcgcctgcggcgcctggggcggctcgggccccgtcgtcacgtccaccaacccgacgaacaaccaggcgcgtytccccccacacgatccgctcggttctaggcgctcgatttggtttgggccgccctggcatttttggggtgtcatcgcggaggtcgtggaggcgtccgcgcgtgagtacgaggagggcatgcgcgcctgctacgatgccgccaagacctggatggcgattccagctccaaagcgaggagaaattgttaggcaaattggtgatgcattgagagcaaagctccatcacctgggcaggcttgtgtcacttgagatggggaaaattcttcctgaagggattggagaggttcaggaaatcattgacatgtgtgattatgctgtgggcctaagtcgccagctaaatgggtccatcataccatctgaacgcccgaatcatatgatgatggaggtgtggaatcctcttggagttgttggtgttatcacagcattcaattttccttgtgctgtgctgggttggaatgcctgcatagctttggtatgtggaaactgtgttgtctggaaaggtgctccaactactccgttgatcactattgcaatgactaaaatagttgccagtgtattggagaggaacaacttgccaggctcaatttttacagcattctgtggtggtgctgacattggccaagcaatttctcttgacacaaggatacccttggtttcattcacaggaagcacaaaggttggtctaatggttcagcagcaagtgaatgcaagatttggcaaatgccttcttgaacttagtgggaacaatgccattattgtaatggatgatgcagacattcagctagctgtccgttcagtgttgtttgctgctgttggaacagcaggacaacgctgcactacatgtcgtaggctgcttcttcacgaaagcatataccgaacatttcttgatcaacttgttgaggtttataaacaagtccgaattggggatcctttggagaatggtacgttactggggccattgcacactcctgcttcaagagacgccttcttgaaaggcatccaaaccatcagatctcaggggggaaaaattctttatggaggatctgcaattgaatctgagggaaactttgttcagccaacaattgtggaaatttcaccctctgcaccggttgtgagagaagaactctttggtcctgttctttatgtgatgaaagttcagaatctgaaggaagcagttgaaatcaacaattctgttcctcaaggattgagcagttctatatttacaaagagaccagatattattttcaagtggattgggcctcatggtagtgactgtggcattgttaatgtaaatattcccacaaatggtgctgaaattggtggagcttttggtggagaaaaagctactggtggtggacgagaagcagggagtgattcgtggaagcagtacatgaggagggccacttggtcctccaacttattcagttgtgtcaccccggtccctaaacaggacggtctaaaamctttatatcaaaaaataattcataactttttcatgtga

SEQ ID NO: 2762 - DNA, 3879 bp, Oryza sativa
atggcggagggtgctctcgcctcgaccatcgtgaggcaggtgctgaccaagttcggctcctccgtctgggacgagctcgcgctcctctgtaccttcagggcggacctcgcggccatggaggcccagttcgccaccatccgcgccgtgctcgccgacgccgccgtccgcgactggctccgcaggctcagggacgtcgcccacgacatcgacgacttcctcgacgcctgccacaccgacctccgccgcggcgagggcgggggcgactgctccgtgtgcggcggcctcacgccgcgctcgttcgccatggcgcacaggctgaggtccctcaggcgcgagctgggcgccgtcgccgcatccaaggacaggttctccctgagccccgacgcccgcccgcccgcgtcgcggcagctcccctccgtcccactcatgcgcgagaccatctccatggtcgacgaggccaagacggtggggaggagcgcggacaaggagaggctcatgaggatggtcctcgacgcggcgggcgacgacgacgacgacgacgacgacggcgtctccgtcatccccatcgtcggcatcggcggcctcggcaagacgacgctggcgcagctggcgttcaacgaccggagggccaacgacgaggtgttcgacccccggatctgggtctccatgtccgccggcttcagcctcgccacgctggtccaggccgtgcaccccatcgtcgccgcgcccagcgagaggtgcgacctcgccaccacaaccaccaccaacctggaggccatcgcgcgcttcttgtccatggcgttcacggggaacaagtacctgctggtcctcgacgacgtgtggagcgagagccacgacgagtgggagcggctgaggctgctcctcaggggcggcaagcggggcagcaagatcatcgtgacgacgcggagccggaggatcggcatgatggtgggcaccgtgccgccattgatgctcaagagcctctctgatgaggattgctgggagctgttcaagaggaaggcctttgaggaagcagatgaggaattgtacccaaaattggtcaggatagggaaggagattgtccccaaatgcggcggcgtgccgctggcggcgaaggcccttgggagcatgctgaggttcaagaggaatgaggaatcatggattgctgtcagggacagtgagatttggcagctggataaggaggagaccatcttgccatctctcaaactcagctatgatcaaatgccacccgttctgaagcaatgcttcgcgtattgctcggtgtttcctcgaaaccatgagattgacaagggtaagcttattcagcaatgggttgctcttggctttgttgaaccctcaaagtatggttgccagccggtttctgataaagcggacgactgttttgagcacttgttgtggatgtcattccttcaagaggtagaccaacatgatttgtcaaagaaaggattagaggttgatggaagagttaagtacaaaattcacgacttggtgcatgaccttgctcagtctgttgccggggatgaagttcagatcataagcgctaagcgagtcaatgggaggacagaagcttgccgctatgcatcattgcatgatgatatggggtcgaccgatgttctttggagcatgcttcgcaaagtccgtgcgtttcattcctggggccgtagtcttgacattaatttatttcttcactccaggttcttgagagtactagatttgcgcggcagccaaattatggagctccctcaatcggttggtaaattgaagcatttgagatacttggacctttcttcatcccttatcagtactctgcccaattgcatcagtagtctccacaatttgcaaactcttcatttatacaattgcataaatctcaatgtgctgcccatgtcagtatgtgcccttgagaacctagaaatcttgaatctttcagcttgcaacttccatagcttgccagattctataggacatcttcaaaacctacaagatcttaacttgtccctttgcagtttccttgtgacattacctagctctattggtacactccaaagtttgcatttgctgaacttgaaaggatgtggcaaccttgaaattctacctgacactatatgcagcctgcaaaatttacatttcttgaacctttcacgatgtggtgttctccaagcactgcccaaaaatattggtaacctttcaaatttgttgcacctgaatttatcacaatgcactgatcttgaatcaatcccaacctcaataggtcgcattaagagcttgcatattctggatctgtctcactgtagtagtctgtcagagttaccaggatccattggtggtcttcatgaacttcagatactcattttatcacaccatgcaagcagtttggcattgcctgtatcaactagtcatctcccaaacttgcagactttagatctctcatggaatcttagtctagaggaattgcctgaatcaattggcaatcttcatagtttgaagaccctgatcttgttccagtgctggagtctacgtaagctgcctgagtctataaccaacctcatgatgttagagagtttgaactttgttggctgtgaaaacctagctaagttacctgatggcatgacaaggatcaccaatctgaaacatttaagaaatgaccaatgtcgatctttaaaacaactacctaatggatttgggcgatggactaaacttgaaacattgtccttactcatgataggtgacaagcatagcagtatcacggagctgaaagatctaaacaatctaactggtgagctcaggattgaatgttggtcacacaagatggatctgacaactgctgccaaaagagcaaactggagaaataagaaaaaactaagcaagttgaccttgttgtggaccattccttgttctgcggatgattttgaaaatgttgaaacatttcttgaagttcttgtgccacccgaaaatcttgaggtccttgaaatagatggttacatgggcactagatttcccagttggatgatgaagagcatggaatcatggctcccaaatcttgtctcattagatttaagcaacattcctaactgtagctgcctaccacccctcagacacatcccttatctccaatcgcttcatctccgatacatggccggtgtccatagcatgagctctgaaattcttgtgaaaagacagaaatgtgtgctgtaccagtcactgaaggaactccattttgaagacatgcctaacctagagacctggccaacttcagcagcgacagatgacagagctactcagccagaaggatccatgtttcctgttcttaaaactgtaaccgcaacaggatgcccaaagctcaggccgaaaccatgccttccagatgctataacagatttgtcaatctccgacagcagcgagatattgtcagtcaggaagatgtttggatcatcatcttccacatccgcatcacttctgaggagattgtggatcagaaagtccgatgtatcatccagtgagtggaaattgttgcagcacaggccaaaacttaaggatttttcaatcgaatactgcgaaatgctacgtgttcttgcagaacccatcaggtaccttaccactctgcgaaagctgaagatcagcaattgcactgaattggacgcgcttccagaatggattggtgatcttgtagcacttgaatctcttcaaataagttgctgcccaaagttggtctcgatcccaaaaggtttgcaacatttgactgctctggaggagttaactgtcactgcctgtagctctgagttgaacgaaaactgcaggaaagatacaggcaaggattggttcaagatctgtcatatcccaaacatcgtaatctcgtga

SEQ ID NO: 2763 - DNA, 1767 bp, Oryza sativa
atggcgacaacggcttcaaagataattcctcaaaccctcccagaaatcccaaccaccccagaaccacagcagtatactaagactgctccagacatccccaaatcaaacaattctcgttcttcagtacctaaattgctacaagaatcagaccgcggcaagttgaatcataaattggagccaaaggaacaaaagccaaaccaccacctgaaagagtctgttgatgtttcatcggccaagtgtccgacagaagtgagcgaagaaatggtttcagaaggtattgcaagtcaagaaaagaaggttgtggagtatgagagtgtgaatgggagctccacctcatttcacacatgcgaagggagtggtccaggaaaagcaagtggaagtgctaggatgacggatcgatccgagaccggtgaaaggggtagtagtagcagatgcaggccaagcacaagcagtgatatcagtgatgagagttcgtgtagcagcatgagcagcaccacgaagcctcataagtcaaatgattcacggtgggaggcgatccagacgatcagggtgagagatgggatcattgggttgagccatttcaggctgttgaagaagctaggctgtggtgatattggcagtgtatatctctctgaattgagcggggcgaaaagctatttcgcgatgaagattatggataaggcttcattagcaagccgcaagaagttgcttcgagctcaaactgagaaagaaattctgcaatgcctggatcacccctttcttcctacattgtacactcacttcgagactgacaagttctcatgcctggtgatggagttctgcccaggaggagacctgcatacccttaggcagaggcagccgggcaaatattttccagagcaagctgtcaaattctatgtagcagaaatcctcttggcattagagtacctgcacatgctcggcatcatataccgtgatctcaagccagaaaacgtcctcgttcgggaggatgggcacatcatgctatctgactttgacctctcactccgttgcgcggtgagtccaacactaataaaatcatccaacccggacgctgaagcactcaggaagaacagccaaggttactgtgtccagccagcatgcgtcgagccatcctgcgtgattcagccatcatgtgcagcccctacaacctgctttggccctcgattcttctccaaatccaagaaagatcgcaaaccgaagcctgaaattgcgacccagatcagcccttggccggagctcatagcggagcccagcgatgctcgttcaatgtcatttgttggaacacatgagtacttggccccagagatcatcaaaggcgagggccatggtagcgctgtcgattggtggaccttcgggatattcttgtatgaacttctgtttggaaagacaccattcaagggctctggcaacagggcaacactgttcaatgtcattggtcagccattgcgcttcccggagtacccaattgtcagcttctcagcaagagatttgataagaggtctacttgtgaaggagccccagcatcggttagcttacaaacgcggcgccacagagataaagcagcatccgttcttcgaaggcgtaaactgggcgttgatccgatgtgcaagcccaccggaggtaccaaagcctgtcgagattgagaggccaccaaagttgcccccatccacatctggaactactgatgtgtccagtggtgcgcctcagaagggttctgatggctacttagagtttgattttttctga

SEQ ID NO: 2764 - DNA, 1137 bp, Oryza sativa
atggggaagaagacgacgacgtcgtcgtcgccgtcgtggagctcgctgttcgggctcggctgcttcacctcctcccacagcgacggcggctcggcggcggccaagaacccggggacgccgctgccggcgcggccgtcgtcgtgcaacagcaacgacggggtggcggcggcggtgatgccgtcgccggaggacctgtcgcagtcgctggcggggagcggggtggaggcgttcacggtggaggagctgaggagggcgacgcgggacttctcggtgagcaacttcgtgggcgagggggggttcgggccggtgtacaaggggtacgtcgacgagcggctcaagcccggcgtgcgcgcgcaggccgtcgccgtcaagctgctcgacctcgagggctcccagggccacaaggaatggctggctgaagtcatatttcttgggcaattgagacatcatcacctcgtcaagctgatcggatactgctacgaggatgagcacagacttctcgtctacgagttcatggctaggggcagcttggagaagcacctcttcaaaaagtactctgcgtcgctgccgtggtcaacacgcttgaagatcgccattggagcggccagaggtttggccttcctccatgaagctgccaagcccgtcatctatcgcgacttcaagacctccaacatcctactcaactcggactacgaagcaaaactttcggatttcggactggccaaagatgggcctcaagaagacgagacacatgtctccactagagtgatgggcacacagggctatgccgcaccagaatacatcatgactgctatggtgtgtgctgctggagctactaaccggacggaaagcgtggataagaagagacggccgcgagagcaaaacctagtggaatgggctcggccatgcctacatgactctcgccggctcaaccgtgtcatcgacaaaagcttgaacgggcagtactcgactcgagccgtacaaaaggctgcggccatagcgtatcagtgcttgagtgttagccctaagtctcgaccccggatgtcagcggttgtggaggccctggaaccacttctggccatggatgatggcattgtagagccatttgtgtacatggcaccacccgagagtaaataa

SEQ ID NO: 2765 - DNA, 876 bp, Oryza sativa
atgtcgtcccgccgagacgtcctcgctgttgtcctcgtggccgcgctgctcccgccggcgttgtcccgtgggctttggctggggcaccacgggctggggcacgggcacgggcgatggcgcgcgccgcatgtcggcggacacggccagggacaggggccgcagcagcacgcgccgctcggcggcggcgggtggtcgtcggcgcacgccacgttctacggcgggggtgacgcgtcgggcaccatgggaggggcgtgcgggtacgggaacctctacagccaggggtacgggacgaacacggcggcgctgagcacggcgctgttcaacaacggcctcagctgcggcgcgtgcttcgaggtgcgctgcgacgccggcggcggcgggagccactcgtgcctgcccggctcggtcgtcgtcacggccaccaacttctgcccgccgaacaacgcgctcccgtccgacgacggcggctggtgcaaccctccgcgcgcgcacttcgacatgtcccagcccgtcttccagcgcatcgctctcttcaaggccggcattgtccccgtctcctaccgccgggtggcttgccagaagaagggcgggatccggttcaccatcaacgggcactcctacttcaacctggtgctggtgaccaacgtgggcggcgccggcgacgtgcacgcggtggccgtgaagtcggagcgctcggcggcgtggcaggccctgtcgcgcaactggggccagaactggcagagcgccgcgctcctcgacggtcaggcgctctccttccgcgtcaccaccggcgacggccgctccgtcgtctccaacaacgccgtcccccgtggctggtccttcggccagaccttcagcggggcccagttcaactga

SEQ ID NO: 2766 - DNA, 339 bp, Oryza sativa
atggcttctttcggcgtggcccccgttggaaacgcggcgagcggcaagaagatcttccggaccaagtgcgcgcagtgccacacggtggagcgcgggggcgcgcacaagcagggtcccaaccttcatggcctcttcggccgccagtccggcaccacccccggctacgcctactccaccgccaacaagaacatggccgtcgtctgggaggaaggcaccctctacgactacctgctcaaccctaagaagtacattccgggcaccaagatggtgttccccggcctgaagaagccgcaggagcgcaccgacctcatcgcctacctcaaggaatctaccgcctaa

SEQ ID NO: 2767 - DNA, 1140 bp, Oryza sativa
atggagaagatgatgccggggatggtgaaggaggagtggccgccgagctcgccggaggagggggaggcgccgaggcccatggaggggctgcacgaggtcgggccgccgccgttcctgaccaagacgttcgacctggtggccgacccggccaccgacggcgtcgtctcgtggggccgcgcgggcagcagcttcgtcgtctgggacccccacgtcttcgccgccgtcttcctcccacgcttcttcaagcacaacaatttctccagcttcgtccgccagctcaacacctacttcttggtccggacgaattacctgaacaagcgatcacatttctacagtttgagatttcagggtttcagaaagattgatcctgacagatgggaattcgcgaatgatggtttcctgagaggccagaggcatcttctaaagatgattaagaggaggagaccattgtcttatctccctggatctcagcaggcacttggcacctgccttgaggttggtcagttcggattagatgaagagatcgacaggctaaagcgtgacaagaacatcttactcgcggaggttgtgaaactaaggcacaagcagcaaagcacgaaagccaatatgcgagccatggaagagaggctgcaacatgcggagcagaagcaggtccagatgatgggtttcttggcaagagcaatgcagaaccctgacttctttcaccagttgattcaccagcaggataaaatgaaggggctcgaggacacattctcgaagaagaggacgaggtcgatagacatagtgccatttctcaaccccggggaggtcagccagggcgatcaactcgagtcgacattgctgtttgatccaaggccatttgctgaactgaatgatgagcctgcaaagtctgaactggagaatttagcactgaacatccagggtcttgggaagggcaagcaggatgtcaacaggactcgaaatcagccacgaaatcaggctagcaacgaaaccgagttaaccgacgacttctgggaggagcttctgaatgaaggagcaagagatgatgctgggattccagggatggagcgaagaagacctagatatgtcgatgcattagcgcagaagctgggttatctaagcaatagtagccaaaagtag

SEQ ID NO: 2768 - DNA, 2622 bp, Oryza sativa
atggcgtgcttggcggcgggcgccgaggcggcccctctcctcttccggcggcggctagcgccgtccccagtcgccgcgcgccgccgccttctcgtgtcgtgccgagctcgccgccgcggtctcaggactgctgcagaacttcctcggaagagtacaagtaatgataaacaccataatagggtgaatatgcagagagatgaagcatctgtttccagtgataaagaacggcaagagaaatatggagatgaaaatggtatatcaaaccttcaattggaagatttgatacaaatgatacaaaacactgagaagaatataatgcttctgaatcaagctcgtcttcaagcattggaacatgttgaaacagttcttaaagaaaaagaagacttacagaggaagttgaaaattttggagacgagattgtcagaaacagatgcacggcttaagctttcagctgaagggcagttcggtactgagattaatgactctctaccagtactggaattagatgatataaaggaagagaatatgctactgaaggatgacatacaatttctgaaaacaatgcttattgaggttgctgagacagagaacagtatattcacattagagaaggagcgtgctcttttagatgcttcgcttagggagctggagtctagatttatagatgcccaagcagatatgttgaagtctgatcctaggcagtatgatgcatggtgggagaaagtagaaaatttgggggacttgcttgagactgcaacaaacaaagtagagaatgctgctatggttctgggacgcaatcatgatttggaagataaggtcgacaaactagaggcatcgttggctgaagcaaatatatcaaagttctcttgttattttgttgatcttttgcaggaaaagataaaatcagtagaagagcgcttccaagtatgtaatcatgaaatgcattctcaaattgaactctatgagaattcaatagcggaatttcacgatattcttagcaagctagtggaggaaactgagaaacgatcactagagcattcagcaagtagcatgccttcagaattgtggagtaggatatctcttctgattgatggttggttgctcgagaagagaatatcctacaatgatgcaaatacattacgggaaatggtcaggaaaagggatagttgtcttcgggaagcatacttgtcatgcagaggtatgaaagatagggaaattgtggacaattttctaaagatcacattgccagggactagttctggcttgcacatcatccacatagcagcagagatggctcctgttgcaaaggttggtggtttggcggatgtgatatctggtcttggcaaggcacttcagaaaaagggccacctagtagagattattcttccaaaatatgactgcatgcagaatgaccaagttaataaccttaaggttttagatgttgttgtacaatcctactttgaaggaaatttgttcaacaacaaaatatggactgggactgttgaaggccttccagtctattttatcgagccacaacatccagcaaaattcttttggagggcacaatactatggagaacacgatgactttaaacgttttgcatacttcagccgtgcagcactggaattactttaccaatcgcagaagaaaattgacatcatccattgccatgactggcagactgcatttgtggcacctctttattgggaagcatatgcaaatctgggcttcaactcagctagaatttgcttcacctgccataattttgaatatcaaggagctgctcctgctcaagatttagcatgctgtggccttgatgttcagcaacttgatagggaagacaggatgcgggacaattcacatggcagaataaatgttgtcaagggtgcaattgtgtattccaacattgtgacaactgtatcaccaacatatgcactagaggtgcgatcagagggtggacgtggactacaagattcactcaaattacattccaggaaatttgttgggatacttaatggaatcgacacagacacatggaatccttcaacagatagacatctcaaggttcaatataatgctaatgatctccagggtaaggcagcaaacaaagcagctctcagaaagcagctaaacttatcttctacaaatgcttctcaaccactgagagagtttgagggtattgcagaccattttcagaacaataacaatatccgactgcttttgaagtatgatgattctttatcccattggatttatgcagcatctgacatgttcattgttccatccatgtttgagccatgtggcctcacacagatgattgccatgagatatggttctgtgccgattgttcggaaaaccggtggattgaatgacagtgtcttcgatttcgacgacgaaacgatacctaaggagctgcggaatggctttacgtttgtgcatcctgatgaaaaggctctaagtggtgcaatggagagagcgttcaactactacaatagaaagcctgaggtctggaaacagctggtgcagaaggacatgaggatagatttcagctgggcctcttcagcttcccagtacgaagatatctatcaaagagcagtggctcgagcgagggcagcagcatga

SEQ ID NO: 2769 - DNA, 1940 bp, Oryza sativa
atgccgtccgtgctggtcgaccgcgcgacgaacgacatgctcatcggcccggactgggccatgaacctggagatctgcgacaccctcaatcgagacccagggcaagcaaaagatgtcgtgaagtctatcaagaaacgaattgcacacaggaatgcgaaggtccagcttcttgctctcacgttactggagacgatgatcaaaaactgtggggacattgtccatatgcaagttgctgagaaagacatacttcatgaaatggtgaaaatagtcaagaaaaggcctgattttcatgtgaaagagaagatcctcactctgatagacacttggcaagaagtttttggcgggcgtgctggggccgtatttcctcaaagatcaaatggttctgttccaatatttactcctccacagactcaacctctgcaaaactatcctgcatctttacgcagtgctcagcaagagccacctggatcatcagtgccagatttgccttcattgagcctagcagaaattcagaatgcacgaggcatcatggatgttctttccgagatgttgaatgctttggatcctagtaacagagaggggcttaggcaagaggtcattgttgacctggtggatcaatgccgttcatacaagcagagagtggtagagctagtaaacactacctcgaatgaggagttgctcagccagggcctttctttgaatgatgatttgcagagagttctagcaaaacatgatgctattgctgcaggcgttgcagttaggttggagaaaacaaaatctctccaaaccaaaattgatagttctccacccgcaaatcctgggacttcaaaagcaccagttcaaagttcttcagggactgcaagtgccagcaaccaatctaccttagcacttcctgctccagcatcatccagtagtccaaaagctcctgcagcaccagtaccggttatcgaccttcttagtggagatgattacatcaaacctgaacctgcaaactcccttgcacttgttcctgtcacagaatattcagcagctgatcagaatgtgctagctcttgcagacatgtttgagcaaaataatgccaacagaagcaacaataaccttactaactcttttaatacatcggcaccaaattcaaatttccctgcatcacaagcatatcctgctccagtgcaacctgctctgcctcagcatcctgttgcttattcaaatggggtttcatccaatgccatcgtaccttactatgatgatcaaaatggaggccttccaccaccaccatgggagattcagcaatccatggacaacccaccccaacccacccaacttggccagatgccactgcaaccagggcaaccagtagggatgcacccccaatcaccacattctggtcagtttggccaaggatcattcatgtcaccacaacaaatggcaaatggtcagctaggaggaacacagccgcgacaatcaccacaaccgcagtccgcaccgaatctccaatacggagggatgatgatgtaccccaattcgatgcaagtcaatcagggagctggaatgtactcccaaccgatgtttgggggacagttctatggcatgagccatcatcatcagatgtatgctgttcagatggctggctatggatttggccagcaacctggagcttactacatcccgaatgcggcgtatgcttatgttagcgcgaatgagcttacccagaggatgaatgcggtttcggttcaggaaggtaattcacatggtggagcaatggcatccaggcctgaagattcactctttggtgatcttgtcagcattgccaagatgaaacagaacaaacctgcagctggcaaggtttacagcaaccttaaagcgttcttatttacccccgtcatttttttatcctcattttctgccatgtctgtggtgcatatatcaatatttgcatatta

SEQ ID NO: 2770 - DNA, 483 bp, Oryza sativa
atggagtgcggtggtgcgctgcagctgccgccggggttcaggttccacccgacggacgacgagctggtgatgtactacctgtgccgcaagtgcggcggcctccccctcgccgccccggtgatcgccgaggtggacctctacaagttcaacccatgggatctccccgagagggcgatgggaggggagaaggagtggtacttcttctcgccgcgggaccggaagtacccgaacgggcagcggccgaacagggcggcggggacggggtactggaaggcgacgggggcggacaagccggtggggtcgccgcgggcggtggcgatcaagaaggcgctcgtcttctacgccgggaagccgcccaagggcgtcaagaccaactggatcatgcacgagtaccgcctcgccgacgtcgaccgctccgccgccgcccgcaagctctccaagtcctcccacaacgccctcagggttagtatttacttcttttaa

SEQ ID NO: 2771 - DNA, 1383 bp, Oryza sativa
atgacggccgccgcggacgggctgcacccggcggagtgcggggtgggggagacgtgctcgaaggcgacgtcggggcagttcgcggtgctgttcatgtcgttcgcgttcctggtgctggggtcggcggggatccggccgtgcagcatgccgttcggcgccgaccagttcgacccccacacggagtccggcaagcgcggcatcaacagcttcttcaactggtactacttcaccttcacctccgccatgctcgtctccgccaccgtcatcatctacgtccagagcaacgtcagctggcccatcggcctcggcatccccaccgcgctcatgctcctcgcctgcgtcctcttcttcatgggcaccaggctctacgtccgcgtcacccccgagggctcccccttcaccagcatcgtccaggtgttcgccgccgcggcgaggaagcggtcgctcaagcagcccaaggaccccaagcaggacctgttcgacccgccgcacaccagcgccatcgtcaccaagctggcgcacacggaccagttccggtgcctcgacaaggcggccatcgtgtccggccccgacgacgtgcgcgccgggggcgccgcgccgtcgaacccgtggaggctgtgcagcgtgcagcaggtggaggaggtgaagtgcctcatccgcatcgtgcccgtctggtccacggggatcatctactacgtcgccgtcgtgcagcagtcgacctacgtggtgttgtccgcgctgcagtccgaccgacacctcggccggagcttccagatccccgcggcgtcgttcacggtgttcgccatgctggcgcagacgctgtggatccccatctacgaccgcctcctcgtgccgcgcctccgcagggtcacgggcaaggacgagggcctcaccctcctgcagcggcaggggatcgggatcgcgctgtcgacggtggcgatggtgatgtcggccgtggtggaggaccggaggcggcacatcgcgctgacgcagccgacgctggggacgaccatcaccgggggcgccatctcggccatgtccagcctgtggatggtgccgcagctcatggtgctggggctctcggaggcgttcaacctcatcagccagatcgagttctactacaaggagatcccggagcacatgcggagcgtggccggcgcgctcgccttctgcaacctggcgctggggaactacctcagtgggttcctcgtcaccatcgtgcaccggaccaccggcgccgggagcaactggctggcgcaggacctcaacaaggggaggctcgacctcttctactggatgatcgccggcatcggcatcttcaacatcatctacttcatgatctgcgccaagtggtacaggttcaagggggcagccgccaactga

SEQ ID NO: 2772 - DNA, 798 bp, Oryza sativa
atggcagcttgcttgccatccctctcaccgccgccgcatcaggcgccggtgccggcggcgacgaccgcgctggcggggaacctgacctcgtccctcctytccctgcccccgccgytgccccgcctcgccgtctygcaccgcagggcggtgktcgccgcggcctcgtcccggccccggcccccgccatcgcgggaggggggtgatggtggtggtgaggaggaggaggaggtggagagggcgatggggatggacggcggcatccctggcacctccggcgagttcctgcgccgcgtctcctcccgcgcgtacggcatgcggcgccacctcatggaatcgctcgactccctcgcctacgatgtgttggagacaaacccatggagagaagactccaaaccagtctatgtactggctagaagagataaccatctatggacaatgaaaacccgtaggagtcgcagtgaagttgaaagggaacttggaatgctcttaaagggagggggttcaggagttgggactaaatcaaaatactctggttccaagtttaacatgcttgttgaagatatcagagagggaatactggtatttgaagacgaggacgatgctgcaaaatactgtgacattctacagggtggcggccaaggttgtgaggggattgcagagatagaggcatcatcggttttcaacatctgccataaaatgaaagctcttgccgtccttttccgtcgtggtaggacccctccattgcctcaaagccttgagcgcgacttaagggcaagaaagagatcattggaagactag

SEQ ID NO: 2773 - DNA, 1314 bp, Oryza sativa
atggcgatgtcggcggctcacggcgaggactcgccgtactttgcagggtggagagcctatgatgaggacccctatgaccccatcaccaatcctcaaggtgtcatacagatgggccttgcagaaaaccaggtttcctttgatcttctagaggaatacatgagggagcacccggaggcgtcggattgcggcgccggggttcgagagaacgccctgttccaggactaccatggcctgaaatcattcaggaaggcaatggcgagcttcatggagacgataaggggaggcaaggcgaggttcgacccggaccgcgtcgtcctcaccgccggcgccaccgccgccaacgagcttctcaccttcatcctcgccgaccccggcgacgccctcctcgtccctaccccttactacccagggtttgacagggacttgaggtggaggaccggcgtgaacatcgtcccggtgagctgcgacagcgccgccgggttccaggtcaccgccggcgcgctccgggccgcgtacgacgaggccgtggcggcggggacgcgcgtccgcggcgtgctcatcacgaacccgtcgaacccgctcggcacgacggcggcgcgtggcgtcctcgagggcatcctcgacttcgtggcgcgccacgacatgcacctcatctccgacgagatctactccggctccgtgttcgccgcgccggacctggtcagcgtcgcggagctcgtcgacgagcgccgccgcgcgcgcggcggcgccgccgacgccgaggacatcgcccggcgcgtccacgtcgtgtacagcctctccaaggacctgggcctcccggggttccgcgtcggcgtggtctactcctacaacgacgccgtggtggccgcggcgaggcgcatgtcgagcttcacgctggtgtcgtcgcagacgcagcggacgctsgccgcgatgctgtccgacgcggcgttcgcggcggcgtacgtgcgctccaaccgcgaccgcctccgggagcggcacgcgcgcgcggtggccgggctgcggcgcgccggcgtggcgtgcctccgaggcgccaacgccgggctgttcgtgtgggtggacatgcgccgcctgctgggcgacggcgaggccaccgtcgccggcgagctgaggctgtggcggcgcgtggtcgccgaggcgaagctgaacatctcgccggggtcgtcgtgccattgccgggagccggggtggttcagggtgtgcttcgccaacatgagcttggagacgctggacgttgcactccatagactgggctgcttcatcaagaaatgggagcaagaacaacatgagaattaa

SEQ ID NO: 2774 - DNA, 1640 bp, Oryza sativa
atggtcaagatcaagatgcccgccctgttccgccgccggagcggctccaagtcgccgccgctgccgcaggccgaccccgcgtccggcggcgggtccccggcgccgacgccggaggaggagatggagcgggtgttccgcaagttcgacgccaacggcgacggccggatctcgcggtccgagctcggcgcgctgttcgagagcctcgggcacgcggccaccgacgacgagctcgcccgcatgatggccgaggcggacgccgacggcgacggcttcatcagcctcgacgagttcgccgccctaaacgccaccgccagcggcgacgcggccgccgtcgaggaggacctccgccacgccttccgcgtcttcgacgccgacggcaacggcaccatctccgccgccgagctcgcccgcgtcctccacggcctcggcgagaaggccaccgtccagcagtgccgccgcatgatcgagggcgtcgaccagaacggcgacggcctcatctccttcgaggaattcaagctcagccacctacctgaacctgaatatactagtgctgtgctgggaatggcaaggtcttatgtaatattttgtcagaagcatgcatggatgacaggcgggatgcggtggtgctccggctggcaggaggaaagctgctttgcgattggtgcagggacagatgtggctaatctgtttatctctatcaagagaacacaactactacttgccactgaagagtggctgcttgcaggcttggcttgcagctggggagagagcatgagcagcggcggcgtcggcggcgggagcttgggcgccggcttgctgtaccacaagttcgtcagcttcgcgctggaggagacccgactccggaccaccctcacccctcacccctcccagtatctatcagagctatgtcgcccaatagtggcagctagcttcaaccatgtttctaagccctgtctcaggctgtcaatatttctgtctcatgtaaatgaaaagttcaagtctataaaacccaatgatgataatacagttttcaatgctctctcattcagtgcaccgaaaattagattgcttcgcagcttgacaatcgagaagaaaaactcatatcaggttcttgactttgccgctttctctgaacctgaatacgatcttcctatattttgcgccaacgtttttacaactcatgcacaaagtattgttgtattggacctcaatcctctatatgatactacagtgcacaaggattacaaagataagtactataggagtataatgcctcttgtacacaagtataacgaggtctggcttgaattaatggaccaagcaattaaagaaaataacaaagcaacaattgctcgtaaccaagaagaacaacataaatatctcacatggagggctgagaaggatcctggctatccccttttgaagaagttaattggtgaaagtcgtgccgaggatctggtgatggagtttctgtttgaaggagtaaatactcttggaacaaaatcatttctggattatttccctgaatacgcccgtgatgatgggtcagtgaacaagaaaaggagtatgatcggcaagtcttttgaaactaggccttgggacgccaatggagaattcattggcgatgccgaagcacagta

SEQ ID NO: 2775 - DNA, 1023 bp, Oryza sativa
atgggcggcgtggcggcgggcaccaggtggatccaccacgtccggcggctcagcgccgccaaggtgtcggcggacgccctggagcgcggccagagccgggtcatcgacgcctccctcaccctcatccgcgagcgcgccaagctcaaggcagagttgctgcgcgctcttggtggtgtgaaagcttcagcatgcctcttaggtgttcctcttggtcacaactcatcgttcttacagggacctgcatttgctcctccccggataagggaagccatttggtgtggaagtaccaactctagcacagaagaaggcaaagaactcaatgatcctcgagtgctaacagatgttggtgatgtccccatacaagagattcgtgactgtggtgttgaagatgacagattgatgaatgttgtaagcgagtctgtcaaaacagtgatggaggaagatcctcttcggccattggtcctgggaggcgatcactcaatatcttatccagttgttagggctgtgtctgaaaagcttggtggacctgttgacattcttcaccttgacgcacatccagatatctacgatgcttttgaaggaaacatctattcgcatgcttcttcatttgcaagaataatggaaggaggttatgctaggaggcttctacaggttggaatcagatcaattaccaaagaagggcgtgagcaggggaagagatttggtgtggaacagtatgagatgcgcactttttcaaaagatagggagaagcttgaaagtctgaaacttggggaaggtgtgaagggagtgtacatctcagttgacgtggactgcctcgatcccgctttcgcgccaggtgtctctcacattgagccaggaggcctctccttccgcgacgtgctcaacatcctccataacctgcaaggagatgttgtcgccggagatgtggtggagttcaacccgcagcgtgacacggtggacgggatgacggctatggttgcagccaagctggtccgggagctcacagccaagatctccaagtga

SEQ ID NO: 2776 - DNA, 2757 bp, Oryza sativa
atggaggggtcgctagtccagtccgcgattgctccgaccatatacaggaggagcggcaccgcgcggttccgcgtgcgcgcgagggccacgatgatgcgtaccatgccaacacggaccctcaccctggggggtttccagggcctgcggcagacgaatttcctggactcgaggtcggtgattaagcgtgacttcggctctattgtcgcgagccagatttcacgcccccgagggttggggtcaagaggggtggtccgcgccatgtttgagcgcttcacggagaaggcaatcaaggtgatcatgcttgcacaggaagaagcgaggcgcctgggccacaactttgttgggacggagcaaattctactgggccttatcggtgagggcacaggaatcgcggcaaaggttctcaagtctatgggtatcaaccttaaggatgcccgtgtggaagttgagaagatcattggacgtggtagcgggtttgtggctgttgagatcccattcacgcctcgtgcaaagcgtgtcttggaactgtcacttgaagaagctcgccagctagggcataactatataggatctgagcacttacttctggggctacttcgtgagggtgaaggtgtagcagcacgggtactggaaagtcttggtgctgatccaaacaacattcgtacccaggtcataagaatggttggtgaaagcacagaagctgttggtgctggagttggtggcggaagcagtggccagaagatgcctacactcgaagagtatggcactaatttgactaagctggcagaagagggtaaactagacccagttgttggcaggcaggatcaaattgagcgtgtaactcaaattttgggaaggcggacaaagaacaacccttgcctaattggagaacctggtgttggaaagactgctattgctgaggggcttgcacaacgtatttccaatggtgacgttccagaaacaattgaaggaaagaaggttattactcttgacatggggctccttgttgctggtaccaagtaccgtggagagttcgaagaaagactgaagaaacttatggaggaaatcaaacaaaatgatgacattattctctttattgatgaagtgcacacgctaattggagcaggtgctgctgaaggtgcaattgatgctgccaacatcttgaaaccagctcttgctagaggtgaactgcagtgcattggtgccacaacacttgatgagtacaggaaacatattgagaaagatccagctttagagcgacggtttcaaccagttaaggttccagagccaactgttgatgaaacaatacaaatcttaagaggacttcgtgagcgatatgaactgcatcataagctgcgatacacagatgattctttaattgctgcagcacaattgtcataccagtatatcagtgatcgcttcctgcctgataaggctattgacttgattgatgaagcaggatctcgtgttaggctcaggcatgcacagctccctgatgaagccaaggagctggacaaagagcttcgacaggtaaccaaagacaagaacgaggctgtacgtggccaagattttgaaaaggctggggaattaagagatcgggaaatggaattgaaggcccaaattacagccattattgacaagagcaaggaaatggttaaagcagagactgaatccggtgaagtcggtccccttgttactgaggcagatattcagcatatcgtgtcctcttggactggaatacctgtggagaaagtctcatctgatgagtctgaccgtctccttaagatggaggagacactccatacgcgtatcattggtcaggatgaggctgtcaaagctattagccgtgccatccgccgtgctcgtgttggcctcaagaacccaaatcggcctattgctagcttcatcttctctggaccaactggtgtcggtaaatcagagttagcaaaggctcttgcagcctactactttggctcagaagaggccatgatcagactagacatgagtgagttcatggagaggcatacagtctccaagctcattggatcacctccaggttatgttggttacactgagggtggtcaactgacagaagcagttcgccgccgaccatacactgttgttctcttcgatgagattgaaaaggcacatcctgatgtcttcaacatgatgcttcagatcttagaagatggaagactaactgacagcaagggtcggactgttgatttcaagaacacactgttgatcatgacatcaaatgttggaagcagtgtcattgagaagggaggacggaagattggatttgaccttgactatgatgagaaagacaccagctacaataggattaagagcttggtgactgaagagctgaagcagtacttccgacctgagttcttaaacagattggacgagatgattgtgttccggcagcttaccaagctggaggttaaggagattgctgatattatgctcaaagaagtgtttgacaggctcaaggcaaaggacatcgacctccaggtgacagagaagttccgggatagagttgtcgacgaaggttacaacccaagctatggtgccaggcctctgcggcgtgctattatgaggcttctggaggacagcttggcggagaagatgttggctggcgaggtcaaggaaggtgactctgctattgttgatgtggattcagagggcaaggtgatagttcttaacggtggtagtggtgttccggaaccactggcacctgctctgagtgtctaa

SEQ ID NO: 2777 - DNA, 1794 bp, Oryza sativa
atggcggcggcggcggtgcgggtagacaaggccacgagcgagctgctgctcggccccgactggaccctcaacatcgacatctgcgacgccgtcaactccgatcacgggcaagcaaaagaggtgattaaagctttgaagaagcgtctccagcacaaaaattcaaaggttcagttttttgctttgacgctattggaaactctaatgaagaattgtggggatcatgtgcattcacaagttgtagagcgtgatatactgcaggagatgatcaaaattgttaagaagaagactgatatgcagttgagggacaaaattctagtactccttgaatcttggcaagaagcatttggtgggaatggtgggaagcatccccagtactactgggcatatgctgaaatgaagaaattgggcttggaatttcctcggcgatcacctgatgctgcaccaatacttactcctccaatcacacgcccaacatctttggaatcttatcatcaaccaagttacggaatgccagttaattcttcctctagatttgatgaggcaatgccatctaacgggccttccctgagttcatcggagatggaacgcatgttaggtgctgttgaactattaagcgagatgctgaaagcagtgaatccacatgatcgtggggctgtcaacgatgaaattatcacagagcttgtgaaacaatgccggtcagaccagaaaaagataataagtttggtaacttcattaagagatgaggagctcttgggccaagctcttgacttgaatgataggatgcagattctgcttggcaaacatgatgcaattgcatcaggttctcctctaccagatgaagaaacagatatcatgaatgaatcatcagcagaaacaacttcaactccagtggcaacaggggctcctcgagctgcagttgctgctatagtaccaactaatgttttcgatgaagaggaggaagatgaagatgacgagttctctcagctcgctcgcaggaattcgaaattcaggtctacaaatgctgagagcaccccttctggcgtagcaacatctttgtcgaccgcccatgacgatgagataacaagttcaggatcttctggtacctctacagtttcaccacctgttcaaagccatgcattggcactgcctgatcctccagctcctgttagaactgcagaagagcaagttatgagtgaccttcttgcactcaccatatcaaacccttcaccacctcaaactccaccaacacctgaagctaccaccaccatgaaccaaggtggctcgcaagccaatgatcatccacaacctagttactcaaaccaaggacttgctgctgcatcatacaacagctatgttgctccttgggctcagcctcaatgtcaaactccaggcattcagcttcagcagcatcaacaaccatcccagtcacaattgccctacaactcatctccctacccgccaccgccatgggcatcggaggacaccgccgagtccaaccctttcattgcagcttcactgaagaaccaacctacttccgcctcgccggttaatgtaccactgaatttgaggcctctacagcaatcaaattctttcggggttccgcttcgaagtgccgggccacaatcgccgataaacgggagcactaagcaaccgatgtctgcaggagctcgcaggccatcttatgtttcttctaacaaatacttcgatgatctgtttgagaaaaatgctgatggcagcctgatgaaggtgggcggtagcgttggtgggggcgcatcctcgccatacaagacataa

SEQ ID NO: 2778 - DNA, 936 bp, Oryza sativa
atggcggcggcggcggcggctccggctctatccttggccgaggcggcgccggtgacagcagttctggcaccgtgtcccacgccctcgaggacgttccgccgccgcagctgggtcgcggctatctgccggcccgccctgaaatgccaccacagtcgtcccctgaccgccgtggtcgccgcggctgcggctgccgctgcggcgggggactcgacgtcggccggcgtattccacggcgagtgcttcgtcgtgggggataacatcgacaccgaccagatcatcccggccgagcacctgaccctggagaccacccgctacgccgtcatcatcggcggcgccaacttcggctgcggctcctcccgcgagcacgcgcccgtcgccctgggcgccgccggcgcccgcgccgtcgtggccgagggctacgcgcgcatcttcttccgcaactccgtggccaccggtgaggtctacccgttggagctagcggacactggagcctggaaggagtgcaagaccggggatgtggtcacggtggaacttgataattgcgtcatgatcaaccacacatccggcaagcagtacaagctgaagcctatcggcgatgccgggccggagcagattttttcgcaaacaggaggagatgctttctgtgaaaacaaattacattcgcaagctgaattacagaggaacggacttgtttgttctgctgatcaggcagccttgggcagccggatagttgtggccgccgacggcagtgacggcctggccgccggcggggacagggatgggcacgacgccatgcgtgagcatggactggtagatctctacgagcaccttctcgccgtactccttgagctgccgcggccgcacgaaggaatactggcccgcggtgcattagggcgtgccggcgacgacgccagccacagcatggccgagacgtag

SEQ ID NO: 2779 - DNA, 1494 bp, Oryza sativa
atgacagctgagtccacaacacagccgccttcgccgcagccgcacttcgtcctcgcccctctcgcggcgcacggtcacgtcatccccatggtcgatctcgcgggcctcctcgccgcgcatggcgcacgcgccagcctcgtcacgacgccgctgaacgccacgaggctgcgcggcgtcgctgacaaggccgcgcgcgagaagctgcccctcgagatcgtggagctcccgttctcgccggccgtggcaggcctgccgtcggactgccagaacgccgacaagctctcggaggacgcgcagctcacgccctttctcatcgccatgcgcgccctcgacgcgcccttcgaggcctacgtgcgcgctctggagcggcgcccgagctgcatcatctccgactggtgcaacacgtgggccgccggagttgcctggaggatcggcatcccgcggctcttcttccacgggccgtcgtgcttctactcgctctgcgacctcaacgccgtcgtgcatggtcttcacgagcagatcgtcgccgacgacgaacaggagacgacctacgtcgtgcctagaatgccggtacgcgtgacggtgacgaagggcacggctcccggcttctttaactttccgggttatgaagcgctccgtgacgaggccatcgaggcgatgctcgccgccgacggcgtggtggtgaacaccttcctggacctcgaggctcagttcgtggcgtgctacgaggcggcactcggcaagccggtgtggacgcttggcccgctctgcttgcacaaccgggacgacgaggccatggcttcgtgtgggactgggagcacggacctgcgcgcgatcaccgcgtggctcgacgagcaggtcaccggctccgtcgtctacgtcagcttcggcagcgtcctgcgaaagcttccgaagcacctgttcgaggtcggcaatggcctcgaggactccggcaagccgttcctctgggtggtgaaggagtcggaattagtttcgtcgaggccggaggttcaggaatggctggacgagttcatggcgcgaaccgcgacgcgcggcctcgtggtgcgcgggtgggcgccgcaggtgaccatcctgtcgcaccgcgccgtcggtggcttcctcacgcactgcgggtggaactcgctgctggaggccatcgcccgtggcgtgcccgtggcgacgtggccacacttcgccgaccagttcctgaacgagcggctcgccgtggacgtgctcggcgtcggcgtgccgatcggcgtgacggcgccggtgagcatgttgaacgaggagtacttgacagttgatcggggtgacgtcgcgcgggtggtgtcggtgctgatggacggcggcggcgaggaggccgaggagaggaggaggaaggccaaggagtacggtgagcaagctcgaagggccatggcgaaaggaggctcctcgtatgagaatgtgatgcggctcattgcgaggttcatgcaaactggagtggaagaacactag

SEQ ID NO: 2780 - DNA, 800 bp, Oryza sativa
atggggactgctaagaaaagtgcaatctttgttgcactgctgtgcactcacattcttgtgaaccatgcatgtgacagtgatgtggtatttgggtacagtgggagtactggtccagagcattgggggagcttaagtcctaatttcacaacgtgctcaaaagggacgtaccagtccccaatcaacattttgaaagatgacgcagtttacaacccaaagttggagccccttgaaatggattatactgctgcaaacactaccattgttgacaatgtcttcaatattgcgctacgttacaacgacactgctgggactgtgaaggtggatgggaaaaagtataaactgaggcaattgcattggcactctccctcagagcacaccatcaatggccaaaggtttgcagtggagctccacatggttcaccattctgatgatggcaacattactgtcattgcagtcctttatcgacatgggaaacctgatccatttctttttcagataaaggataagttggctgcattatacttagagggctgtaaagcggagaaaggcgaacctcttcctgttggactcgtggatatgagggaattgaagaaaggcgcggataggtatttcagatacgttggatccctcacgacacctccatgcaccgaaaatgttatctggaacatttttggagagataagagaaatgaccaaagagcaggctgctgctttgagggcccctttgcacgggagttacaggcacaaccgcaggccgacacagccactcaatggtcgcaccgtgcagctcaattacatgta

SEQ ID NO: 2781 - DNA, 1119 bp, Oryza sativa
atggatgatccaatgctgaatgcggtgaaggaggaggagagccacggggacggaggagggttggaggtggtggcgggagaggatggggcggcggcggtggcggcgggggtggcgccgaggccgatggaggggctgcacgacgccgggccgccgccgttcctgaccaagacgtacgacatggtggacgacgccggcaccgacgccgccgtgtcgtggagcgcgacgagcaacagcttcgtggtgtgggatccccacgccttcgccaccgtcttgctccccaggttcttcaagcacaacaacttctccagcttcgtcaggcagctcaacacctatggtttcagaaaggtggatcctgatcggtgggaatttgcaaatgagaattttctgcggggacagagacatcttctcaagaacatcaagcgtagaaaaccaccttcccatactgcttcaaaccagcaatcccttgggccataccttgaggtgggccactttggatatgatgctgagatagaccggctgaagagagacaagcaattattgatggctgaggtggtgaagctaaggcaggagcagcagaatacaaaggcaaatctgaaagccatggaggataggctgcaaggaaccgagcagaggcaacagcagatgatggcattcttggcgcgtgtcatgaaaaatcctgagttcttaaaacaacttatgtcccagaatgagatgagaaaggagctccaagatgccatttcaaagaaaagaaggcgtcgcatagatcagggacctgaagttgacgacgtcggcactagcagtagcatagagcaagagtcaccggccttgtttgatccccaggagtcggtggaattcctcatcgatgggattccctccgatcttgaaaactcagctatggatgctggaggtctggtggagccacaggatttcgatgtcggcgcctccgaacagcagcagatcgggccccagggggagttgaacgacaatttctgggaggagctgctgaacgaagggcttgttggtgaggagaacgacaacccggtcgtcgaggacgacatgaatgtgttgtcggagaagatgggttacctcaactcaaatggcccaacggctggggaatag

SEQ ID NO: 2782 - DNA, 435 bp, Oryza sativa
atggtgcagcaccagggccggtaccccgctccgcccagcgcgttcccttactcggggctcgagtgctacggcacatcctcgggctcggcccaacgtccctccccgctgagccgtcggcgaccaggtgacttggtttgtgcgctgctcagcggtggcaagtatgcggagaaggtggtggtgctagcggggcagctgctctcggtgccggagggggtgtctctgacggacgccgccggcttgcctgaggtggcctgcaacatttggtcgactgcctggcgaattgttctcatccattgtggatcgagtggaattggtacatttgctatacagattgcaaagcaacttggaattaaggtttttgttactgcaggtttgttcagtaggacaaaaacagtacgagtatataataggatgttacagagattgctcaagtaa

SEQ ID NO: 2783 - DNA, 1263 bp, Oryza sativa
atggctgcttccgtgcagccgcggcagttcggccacctcgagccgggctccgcgccggtgcgcggcgccgcctcctcgaacggcgccaaggcgtaccctcccgcgaacggcatcccacgccgcgccgactcgccggtgcgcgggtgcggcttccctccgctcgtctcgccaccgccgcggaagccgcccagcgacgggtcggacgacgaggaggaggagcaggaggactggcgggagctgtacggctcgcacctgcagctggaggtggagccgccggtgcgcgacgcgcgcgacgagggcaccgccgacgcgtggatcgagcgcaacccgtcgctgatccggctcaccgggaagcacccgctgaactgcgagccgccgctggcgaggctcatgcaccacggcttcatcaccccggcggcgctgcactacgtgcgcaaccacggcgccgtgccgcggggtgactggtcgacgtggaccgtcgatgtgacggggctcgtcaagcggcccatgcggctcaccatggacgagctggtcaacggcttccccgccgtcgagatccccgtcacgctggtctgcgcgggcaaccgccgcaaggagcagaacatggtgcagcagacggtggggttcaactggggcgccgctggcgtgtctacgtcggtgtggcgcggcgcccgcctccgcgacgtgctccggcggtgcggcatcatgcccagcaagggcggcgcgctcaacgtgtgcttcgagggcgccgaggacctccccggcggcggcggctccaagtacggcaccagcatcacacgccagtgggcgctggacccgtcgcgggacatcatgctcgcctacatgcagaatggcgagccgctgctccccgaccacggcttccccgtccgcgccatcatccccggctgcatcggcggccgcatggtcaagtgggtcaagcgcatcatcgtcaccaccgccgagtccgacaactactaccatttacaagggacaaccgcgtcctcccgtcccatgtcgacgccgagctcgccaacgccgatggtaacgtatttaccattcattcatgcatgtgtaaaacacattttaccgttcatgcgaatatcgtggtggtacaagccagagtacatcatcaacgagctgaacgtgaactcggtgatcacgacgcccgggcacgacgagatcctgcccatcaacggcatcaccacgcagcgcggctacaccatgaagggatacgcctactccggtggcctgaaaaatctctag

SEQ ID NO: 2784 - DNA, 3885 bp, Oryza sativa
atggtatccaatagtttctggcttttcatcctgctagtgagcttcatccccatttctgcttgggcagaatcacgtgatataagtactctgttcactctgagggattcaatcaccgaaggaaaaggctttctccgtaactggtttgattcggaaactcccccatgcagctggtcaggcataacttgcataggacataatgttgtggcgattgatttgtcctctgttccactctatgctccgtttccattatgcattggggcattccagtcacttgttcggctcaacttcagtggatgtgggttttccggagagcttccggaagctttgggaaatttgcagaatctccagtacctagacttgagcaataacgagcttactgggccaatacctatctcactatataacctgaagatgctgaaggaaatggtgcttgactacaactccttgtcaggacaacttagtcctgctattgctcagctgcagcaccttactaagctatctatatccatgaattccatctccggaagccttccaccagatctgggcagcctgaagaacctggagttgttggacattaagatgaacacattcaatggatctataccagcaacttttgggaacctgtcttgtctcttgcactttgatgctagccagaataacctaactggatcaatattccctggaataacctcgttgacaaacctattgacacttgatctatcatcaaacagttttgagggaacaattcctagggagattggtcaactggaaaatctggaattactgattctaggaaagaatgatctcactggaaggattccacaagagattggtagtctgaagcagcttaagttacttcatctcgaggaatgtcagttcacaggcaaaataccttggtcaatcagtggactcagcagcttgacagaacttgacatatcagataacaactttgacgctgagctcccatcatccatgggtgagcttggcaatctaacacagctgattgcaaagaatgctgggctcagtgggaacatgccaaaagaacttgggaattgcaagaagcttactgttataaacctgtcattcaatgcccttattggacctattcctgaagaatttgcagatttagaggctattgtctcattttttgtggaaggaaataaactatcgggtcgtgtcccagattggattcagaaatggaaaaatgcaaggtccatcaggttgggacagaacaaattcagtggacctttgccagtgctgccattgcagcatctgctaagtttcgctgcagaatccaaccttctctcaggttctataccttctcacatatgccaagccaactccttgcattcactcttattgcatcataacaatctgactgggactattgatgaggcatttaaagggtgcacgaacctcactgaattgaacttgttagacaaccatattcatggggaggtaccaggatatttagcagaattacccctggttactctggagttgtcacaaaacaaattcgcagggatgttacctgcggagctgtgggagtcaaaaacccttctagagatatctctcagtaacaatgaaattaccggcccaatacctgagagtattggtaaactctctgtattgcaaaggttgcatatagacaataacttactcgaagggcctatccctcagtctgttggtgatctaaggaatctgaccaatctatccctgcgtggcaataggttatctgggatcattccactagcacttttcaactgcagaaaacttgccacgctggacttgagctataacaatctgactgggaacattccaagtgccatatctcacttgacattgcttgatagcttgattttgtcttccaaccagctgtctggttctatccctgctgagatttgcgtgggatttgagaatgaggctcaccctgactcagagtttcttcagcaccatggtcttcttgatctgtcatacaaccaattgactggtcagatcccaacatctataaagaactgtgcaatggtgatggtgctcaacctccaaggcaatttgctgaatggcaccattcctgtggagcttggcgagctaacaaatcttacatccattaacttgtcatttaatgaatttgttggaccaatgcttccatggtctggacctttggttcaattgcaaggccttattctgtccaataaccacctagatggctccattcctgctaagataggccaaatccttcccaaaattgcagtgctagacttgtcaagcaatgcactcactggcactctaccacagtctttgctctgcaacaattacctaaaccatctggatgtcagcaacaaccacctatctgggcatatccagttctcttgccccgatggcaaagaatactcaagtacactgctcttcttcaattcaagcagcaaccatttctcagggagcctagatgagtctatctcgaacttcacacaattgtctactcttgatatccacaacaatagcctcactggaaggttgccttcagcactttctgatctcagttctttgaattatcttgatctgtcgagcaacaatctctatggtgccataccctgtggaatctgcaatatatttggcctctcatttgccaacttctcaggtaactatattgacatgtacagcttggcagattgtgctgcaggaggcatttgttctactaatggtactgatcataaagcattgcatccatatcatcgggttcgaagggcaattaccatctgtgcctttacattcgtcatcatcattgttttagtgcttctggctgtttatctgagacggaagctggttagaagcaggcctttggcttttgaatctgccagtaaggccaaggctacagttgagcctacctcaactgatgaactgctaggaaagaagtcaagggaacctctgagtatcaatcttgcaacatttgagcatgcacttctgagggtcaccgcggatgatattctgaaagccacagaaaacttcagtaaggtgcacataataggtgatggtggatttggcactgtctacaaggcagcgctccctgaaggccggagagtcgcgatcaagaggctccatggtggccatcagttccaaggtgaccgtgagtttctagctgagatggagacaattggaaaggtgaaacatccaaacctcgtccctctacttggctactgtgtttgtggcgatgaacgattcctgatctacgagtacatggagaatgggagcctcgagatgtggctgagaaaccgagcagatgcacttgaagctcttggatggccggaccgtctcaagatctgcctcggttcagcccgtgggctcgccttcctgcatcatggctttgtgccccatatcatccaccgggacatgaagtcgagcaacattctactggatgagaacttcgagccgagggtctctgacttcggccttgcaaggatcatcagtgcctgtgagacccatgtcagcactgacattgccggtacatttggatacattcctccggagtatggcctcacaatgaagtccaccacgaaaggcgacgtctacagcttcggcgtcgtcatgctggagctcctcaccggacggccacctacaggccaggaggaggtgcaagggggtggaaacctcgtcggctgggtgcggtggatgatcgcccgcggtaagcagaacgagctgttcgatccatgcttgccggtttcaagcgtgtggcgggagcagatggcgcgcgtgctcgccatcgcccgggactgcaccgccgacgagccgttcaagaggccgacaatgctggaggtggtgaaggggctcaagatgacccacggcatggaatgtggacctctggtggtgaccgtctccagggacatgtaa

SEQ ID NO: 2785 - DNA, 1323 bp, Oryza sativa
atgtgccccgacattgaggaccgcgccgcggtggccggcgatgctggcatggaggtcgtcgggatgtcgtcggacgacatggatcagttcgacttctccgtcgatgacatagacttcggggacttcttcctgaggctggagacggtcgacccggccgagatcttcaccgacttcgaggcaatcgcgacgagtggaggcgaaggtgtgcaggaccaggaggtgcccaccgtcgagctcttggcgcctgcggacgacgtcggtgtgctggatccgtgcggcgatgtcgtcgtcggggaggagaacgcggcgtttgccggggctggagaggagaagggagggtgtaaccaggacgatgatgcgggggaagcgaatgtcgacgatggagccgcggcggttgaggccaagtcttcgtcgccgtcatcgacgacgtcgtcgtcgcaggaggctgagagccggcacaagtcatccagcaagagctcccatgggaagaagaaagcgaaggtggactggacgcctgagcttcaccggaggttcgtgcaggcggtggagcagctcggcatcgacaaggccgtgccgtcgaggatacttgagatcatggggatcgactctctcacccggcacaacatagccagccatcttcagaagtaccggtcacacagaaaacacatgattgcgagagaggcggaggcagcgagttggacccaacggcggcagatttacgccgccggtggaggtgctgttgcgaagaggccggagtccaacgcgtggaccgtgccaaccattggcttccctcctcctccgccaccaccaccatcaccggctccgattcaacattttgctcgcccgttgcatgtttggggccacccgacgatggacccgtcccgagttccagtgtggccaccgcggcacctcgttccccgtggcccggcgccaccatgggttccaccgccgccgccgtcggaccctgctttctggcaccacccttacatgagggggccagcacatgtgccaactcaagggacaccttgcatggcgatgcccatgccagctgcgagatttcctgctccaccggtgccaggagttgtcccgtgtccaatgtataggccattgactccaccagcactggcgagcaagaatcagcaggacgcacagcttcaactccaggttcaaccatcaagcgagagcatcgacgcagctatcggtgatgttttatcgaaaccgtggttgcctttgcctcttggactgaagccaccttcagtggacagtgtgatgggcgagctgcagaggcaaggcgtagcaaacgttcctccagcgtgtggatga

SEQ ID NO: 2786 - DNA, 1464 bp, Oryza sativa
atggccgccgccgccgccgccgccgcctccgccaccgccgccatctccggtgcgttactcccccacgccgtcgcatgccaccgcttgccgccgcggccgcagctcctcgcggtgtcctcctcattccgccgcctctccctgaccgcctcccctcgccgggccagccgcctggtccctcgcgcggacgccagcgcagaagcgggagaaccggagcccgccgctgaggctgaggctgaggctgttgctgcctcgactgacgctgaggtggaggagggtgaggcggaggcggctgtcgcggtggcggaggaagagcaggaggaagaagatgagcctccgccgccgagcaagcccccggttaagttcggggagatcattgggattctgaacaaacagttcattgaggaggctgaaaaggtgaagactttaccagatcttaggcctggtgacatcattgagcttagaatgcaacggcccaacaagaggagattgtcgctctttaagggcataattatagcaaaacacaaatctggtgttcacaccacaatccgtgtcagaaggattattgctggtgtcggagttgagattaccttccctattttgagatattcacccaggatcaaggaaattaaagtaatcaggcacaagaaagttattccatgtctcatagtggscaaaatgattggaacctcatctgccagttcctggaaagaaaggccggattttactctgaacgaagacaacgaagggaaaggtgtggcaatgggtggcggcggaacgctgatctccatctaccccgaggacctcactttcctatttgagctggacaaaccgtgctattgcaatctcaaggtggtgaacaacagcgagcatcatgttgcattcaaggttagctataaatgtattgtctacgtggaatgccacgtcggcggtcagctcctgtcaaacaaggtttggaccgactatggttcattaaatcaagatggatcacggacattcaggatacttttccttgggatccctgtgattgggccggaaaatccccgtcctgtcaaaacaacatcaccaaggaagtatttcgtccggccgaacgcgaacatcgtccagccatgggattcttgcacaataacaattacgctccaggcgcagaaagagtacccacaagatatgcaatgcaaggataagttcttgattcagagcactagggtagctgccagtactgacatggacgagattcctcctgatacgttcaacaaggaagttgataaggtgattgaggaaataaagcttaaggttgtttatacagtgcctagtggaagttccgacgactctggtattacatctttaggaagcaggagcttcaaatcgttgtctgacgatttcacgatgctgaagaatgcaagcattgaagaggtaatgcaactgatcctaaaggcatctctcattttatcagggaactacacctaa

SEQ ID NO: 2787 - DNA, 603 bp, Oryza sativa
atggagcggggggaggggaggaggggagattgctccgtgcaactttgtggaattattgagttacctcattgggtcaggaagaagagaacgcgaaggaaaagcgatggccctgattcaatcgctgaaaccatcaagtggtggaaggagcaaaaccagaagctccaggaggagaatagctccaggaaagcgccagccaaggggtccaagaaagggtgcatggctgggaaaggaggtccggaaaattcaaattgtgcttaccgcggtgtcaggcaacggacatggggtaagtgggtggctgagatccgtgaaccaaaccgtggaaggcgcctatggctaggatcatttcctactgcgctggaggctgcgcatgcatacgatgaggcggcaagggcaatgtatggtcccacagcacgtgtcaattttgcagataattccacagatgccaactctggctgcacatcagcaccttcattgatgatgtctaatgggccggccactataccttctgatgagaaggatgagctggaatctcctcctttcatcgtggctaatgggccagctgtgttgtatcagcctgatagaaggatgtgttggaacgtgtag

SEQ ID NO: 2788 - DNA, 1005 bp, Oryza sativa
  misc_feature (1)...(1005): n = A,T,C or G
atggcggcggcggttgggggcagcgggaggagggacgcggaggcggagctgaacctgccgccgggcttccgtttccacccgaccgacgaggagctcgtggtgcactacctctgccgcaaggttgcccggcagccgctccccgtcccaatcatcgccgaggtcgacctctacaagctcgacccctgggatctccctggtacgtacgcctcttcttttcttggtactctccgtcgatctgttcatccattgagaaggcgttgttcgggaggaaagagtggtacttcttyaacgccgagggaccggaagtacccgaacgggtcgaggccgaaccgcgcagcggggagagggtactggaaggcgacgggagccgacaagccggtggcgcccaaggggagcgcgaggacggtggggatcaagaaggcgctcgtgttctactccgggaaggcgccgaggggggtcaagacggactggatcatgcacgagtaccgcctngccgacgccgaccgsgccccgggcggcaagaagggctcacagaagctggacgagtgggtgctgtgccggctgtacaacaagaagaacaactgggagaaggtgaagctggagcagcaggacgtggcctccgtggcggcggcggcgccgcgcaaccaccaccatcagaacggcgaggtcatggacgcggcggcggctgacaccatgtccgacagcttccagacgcacgactccgacatcgacaacgcctccgccggcctgcggcacggtggctgcggcggcggcggcttcggcgacgtggcgccgccgaggaatgggttcgtgacggtgaaggaggacaacgactggttcaccggcctcaacttcgacgagctgcagccgccgtacatgatgaacctgcagcacatgcagatgcagatggtgaatccggcggcgccagggcacgacggcggctacttgcagtccatcagctcgccgcagatgaagatgtggcagacaatcctgccaccattctga

SEQ ID NO: 2789 - DNA, 600 bp, Oryza sativa
atgtaccaggcgatcccgtacagcagcacccggccgtggctcaggccggagccggcggcgagcktggtcgacgtcgtgaaggtggagacgacgacggccgtcgcgggtcggggcggtgaggcsgaggtcgtgggggaggaggaggcggcggaggtgcggagggcggtggcggagagcccggtgctggtggtggggaggcgcgggtgctgcctcatccacgtggtgaagcggctgctgcaggggctcggggtcaacccggccgtgcacgaggtcgccggcgaggccgcgctcaagggggttgtgccggccggtggggaggccgcggcgytccccgccgtgttcgtcggggggaagctcctcggcgggctcgaccgcctcatggccgtccacatctccggcgagctcgtgcccatcctcaagaaggccggtgccctctggcttaaatcaccatcatcttccttctctccttccaatkttggtcttcctttcttcacaacatcgtgccatcgtggttcaatcctggccgttggattcggttttacatcgcggcggatttcctctaggatatttttcctcctccttttccgtagggtgtgctaa

SEQ ID NO: 2790 - DNA, 753 bp, Oryza sativa
atggcgcggagtgccttcttcttccactgcgtcgccgccgtcgcggcgtgcatcgccgcgacggccgcggcgctcagtggcacggccacgttctacggcgggagcgacgcctccggcacaatgggcggcgcgtgcgggtacggcaacctgtactcgacggggtacgggacgaacacggcggcgctgagctcggcgctgttcaacgacggcgcggcgtgcggcgagtgctaccagatcacgtgcgaccagtccaactcgaagtggtgcaaggcgggcacgtcggtgaccatcaccgcgaccaacctctgcccaccggactactccaagccgagcaacgacggcggctggtgcaacccgccgcgccagcacttcgacatggcgcaacccgcctgggaacagatcggcgtctaccgcggcggtatcgtccccgtcaatttccagagggtgtcgtgcacgaggaaaggaggggtgaggttcaccatcaacgggaacagctacttcgagctggtgctgatcaccaacgtgggcgggccggggtcgatcaagtcggtgcagatcaagggaacaaagacggggtgggtgaccatgtcccggaactggggcgccaactggcaagccaacaactacctcaacaaccaggccatctccttctcggtcacctccaccgccggcaagacgctcgtcttcgaggacgtcgcgccgtccaactggcagttcggccagacattcaccagcggcgtgcagttctactag

SEQ ID NO: 2791 - DNA, 1614 bp, Oryza sativa
atggcgctcgccaccaactccgccgctgtttccggtggcgctgcggccgcggcgtcgtcggcgccccagccgcggctcgccgccacgttcctcccgatgaggaggcgaaccgtctcggcggtccacgcggccgacccggcgaagagcaacgggcccgtgcaggccgcggcgaaggcctcgtccccgtcgacggtkgcggcgccggagaagaagccggtkgggttkgggaagtkgacggtggatagctggaaggcgaagaaggcgctgcagctgcccgagtacccgagccaggaggagctcgactccgtgctcaagacgatcgagacgttcccgcccgtggtgttcgccggggaagcgcgccacctcgaggagcgcctcgccgacgccgccatgggccgcgccttcgtcctccagggcggcgactgcgccgagagcttcaaggagttcaacgccaacaacatccgtgacaccttccgcatcctgctccagatgggcgccgtcctcatgttcggcggccagatgcccgtcgtcaaggtcgggaggatggctggccagttcgccaagccgaggtctgattcgttcgaggagagggacggggttaagctgccgagttacaggggagacaacatcaatggcgacaccttcgacgagaagagccgcgtgccggacccgcagcggatgatccgcgcgtacgcgcagtcggtggcaacgytmaacctgctccgcgccttcgccacgggagggtacgccgccatgcagcgcgtcacgcagtggaacctcgatttcatggatcacagcgaacaaggagacaggtaccgtgaattggcacaccgggtggatgaggcacttggcttcatgactgcagcagggctaacagtcgaccatccgataatgacaacaactgacttctggacatcccatgagtgcctcctcttaccatatgagcagtctcttacacgtgaggattccaccagtggcctcttctatgactgctcagcccacatgctatgggttggtgagcgcactcgccagctcgatggagctcatgttgaatttctccgtggtgttgccaaccctcttggcataaaggtgagtgacaaaatgaacccccgtgacttggtgaagctcattgagattttgaacccatcaaacaagcctggaaggataaccataattacaagaatgggggcagagaacatgagggtgaaattgcctcatcttatccgtgctgtccgcaactctggacagattgtcacatggattactgatcccatgcatggaaacaccatcaaggctccatgtggtctgaagactcgtccattcgattccattctggctgaagtacgtgcgttcttcgatgtccatgatcaagaaggtagccacccaggaggtatccacctggaaatgactgggcagaacgtgactgaatgcatcggtggatcaaggaccgtcaccttcgatgacctgagcgaccgctaccacacccactgtgacccaaggctgaacgcgtcgcaatccctggagctcgccttcatcatcgccgagagactgaggcggaggaggatgcggtccggggtcaacagcaacctgccattgcccccattggctttctaa

SEQ ID NO: 2792 - DNA, 1203 bp, Oryza sativa
atggggcaccactgctgcagcaagcagaaggtgaagcgagggctgtggtcgccggaggaggacgagaagctcgtccggtacatctccgagcacggccacagctgctggagctccgtccccaagcacgccgggttgcagcggtgcggcaagagctgccggctccggtggatcaactacctccggcccgacctcaagcgcggcaccttctccgagcaggaggagcgcaccatcatcgacgtccaccgcatcctcggcaaccggtgggcgcagatcgccaagcacctgccagggcgcacggacaacgaggtgaagaatttctggaactcgtgcatcaagaagaagctcatcgcgcaggggctcgaccccaagacgcacaacctcctgccggcgtcgaagacgctcctccatggcggtggcggtggcggcgctgcaaaccctagcggcaacggcctcgcgcagttccagtctaacaacggcgcggcggcggcgggcaccacgccgttcaccatcagctctccggccaaggcggccgcctacgatgtcgcgccgccggcgttgtacgacgtcgtcctccctgctaaccccgccggtggaatgctgatggcgcatgatcaccaccatcatcaccaggtcgccgcggcggcggcgccggtgggatacccctacgccgaccacggcggcaacggcggaagcgtgctgatgagcttcagggatcagaacgccggcgtccacggcgccgcctccatggacttcatgaacggctcctcctcgtcctcttccatggagcagctcggcggcggcggcggcatgtcgtcgaacggcaacggcagcttcagcgcgagcatggcggcgttcatggacgaggaggcggcaatgtgggccaccgccgtcgcgccgccgggcatgggcggcctcgccgggatggatcaggtggcgcagcagcagcagcagcagcaagtgctggtgcaggatgcggccgtgggcgttgcgccgacgacgctgatgatgcacggcggcggcgccgccaccgccggtgcaatggtggtggacaagagcgtggagatggtggacgtctcgtcggcggtgtacggcggcgcgacggcgacggcgttcgatctagacctgatggtggagtcgtgcgggatgttctgcggcggcggcggcgccggcaacgccatggagcagctgcagtgggactgctaa

SEQ ID NO: 2793 - DNA, 1686 bp, Oryza sativa
atgatcacggtggtggacctgtaccacgtcctgacggcggttgtgccgttgtacgtggcgatgacgctggcgtacgcctccgtccggtggtggcgcatcttctccccggaccagtgctccggcatcaaccgcttcgtcgcgctcttcgccgtcccgctcctctccttccacttcatctccaccaacaaccccttcgccatgaacctccgcttcctcgccgccgacacgctccagaagctcatcgtcctcgccctcctcgcgctctggtgccgcctctccgcgcgcgggtccctcgactggctcatcaccctcttctccctctccaaccttccccaamaccctcgtcatgggcatcccgctgctcaaggggattgcatcatctggtacacgctcatgctgttcctcttcgagtaccgtggcgcgcggcttcttgtcatggagcagttcccggacaccgccgcctccatcgtctccttccgggtggattccgacgtcgtctcgctcgccggcggcggtggtggagccgcggagctgcaggcggaggcggaggtcggggacgatggcaagatgcgagtcaccgtgcgcaagtcgacgagctcgcgctccgaggcggcgtgctcgcacgggacgcagtcacactcgcagtccatgcagccgcgcgtctccaacctctccggcgtcgagatttactcgctgcagtcgtcgcggaacccgacgccgcggggctccagcttcaaccacgccgagttcttcaacatcgtcggcaacggcaagcacggcgacgaggagaagggcgccgccggtggcgggggccactcgccgcagccggtggtggggaagaggaaggacctgcacatgttcgtgtggagctcaagcgcctcgccggtgtcggagcgcgccgccgccgccgccgctgccggcgcggtgcacgtcttcggcggtggtggcgccgaccacggcgacgccaaaggtgctcaggcctatgatgagtacagcttcgggaacaagaatgagaaggacgggccgacactgtcgaagctggggtccaactcgacggcgcagctccggccaaaggacgacggcgaggggagggcggcagcgatgccgccggcgagcgtgatgacgaggctcatactgatcatggtctggaggaagctgatcaggaacccaaacacttactccagcctcctcggtgtcatctggtccctcgtctcctacaggtggggaattgagatgccggctatcatcgcccggtcgatttcgatcctttcagatgcagggctcggaatggccatgttcagcctaggattgttcatggcattgcagccacggatcattgcctgtgggaactcccttgcttcgtatgccatggccgtcaggttcctcgttggtcctgccgtcatggctgcggcctccatcgccgtcggacttcgcggggtgcttctgcacattgccattgttcaggtaagctgcaagttcaggcttctgcaccaaaatgcatccttaactgcaaaagaatctatcgtaactcaacaattgtcattgaactctcaggccgctcttcctcaaggaatcgtgcccttcgtgtttgccaaggagtacaatgttcatcctaacattctgagcacagcgtatgatctctttaccaccatttttttcagtattggagaaatgtccccattttga

SEQ ID NO: 2794 - DNA, 1158 bp, Oryza sativa
atggcggactgcatgcaggagtggccggagcccgtggtccgcgtgcaggcgctcgccgatagcggcctggaggccatcccgcgctgctacgtcaaaccaccgtgcgaccgccctgcccccgaggcggacgacgcgtcctccggcgccagcattccggtggtcgacctcggcaacggcggcgacgacgagggcggccagctcgcggaggccgtggcggcggcgtgccggggctggggcttcttccaggtggtaaaccacggggtgcggccggagctgatgcgcgcggcgcgggaggcgtggcacggcttcttccgcctgccgctccaggagaagcagaagtacgccaactcgccgcggacgtacgaggggtacggcagccggcttggcgtcgagaagggcgccatcctcgactggggagactactacttcctcgtcctctcgccggacgccgccaagagcccggccaaatactggccggccaatcccggcatctgcaaggaggtgtccgaggagtacgggagagaggtgatcaagctgtgcgagcggctgatgaggttgctgtcagcgagcctggggctggacgagacgcggttccaggaggcgttcggtggggcggactgcggcgcgggcctgcgcgccaactactacccgcggtgcccgcagccggacctcacgctgggcctctccgcccactccgatcccggcatcctcaccgtcctcctcgccgacgaccacgttcgcggcctccaggtacgccgccgtgacggccactgggtcaccgtgcagcccctccccgacgccttcatcgtcaacgtcggcgaccagattgaggaactaatatcttcttgtactgtgcatggatggaattcatggacggacgacgtacagatcttgagcaactcgatgtacaagagcgtggagcaccgcgtgatcgtgaacgccgaggaggagcgcatctcgctcgcactcttctacaacccgagaggcgacgtcccggtggcgccggcgccggagctggtgacgccggagcggccgtcgctctactaccgtccgatgaccttcgacgagtacagggtgtacgtcaggaagaatggccccaagggcaaggcacagcttgaggctctcaagggccagtcaatcacccaaaacaacgaataa

SEQ ID NO: 2795 - DNA, 1437 bp, Oryza sativa
atgaagcaaaccgtcgtcctgtaccccggcggcggcgtcggccacgtcgtccccatgctggagctcgccaaggtcttcgtcaagcacgggcacgacgtcaccatggtgctgctggagccgcccttcaagtcgtccgactccggcgccctcgccgtcgagcgcctcgtcgcctccaacccttccgtctccttccacgtcctcccgccactccccgsccccgacttcgccagcttcggcaagcacccgttcctcctcgtcatccagctcctgcgccagtacaacgagcggctcgagagcttcctcctctccatccctcgacagcgcctgcactccctcgtcatcgacatgttctgcgtcgacgccatcgacgtgtgcgcaaagctcggcgtgccggtgtacacgttcttcgcctcgggcgtctcggtgctgtccgtcttgacccagctcccaccgtttcttgccggtagggagacgggcctgaaggagcttggcgacacgccgcttgatttcctcggtgtttcgccgatgccggcgtctcatctcgtcaaggaattgctcgagcatccggaggacgagttgtgcaaggccatggtgaaccgctgggagcgcaacacggaaaccatgggcgtcctggtgaactcgttcgaatcgttggagagccgggcggctcaggcgctcagggacgacccgctctgcgtcccaggcaaggtgctgcctccgatctactgcgtcgggcctttggtcggcggcggcgcggaggaggcggccgagaggcacgagtgcctcgtctggctcgacgctcagccggagcacagcgtcgtgttcctctgcttcgggagcaagggcgtgttctccgcggagcagctcaaggagatcgccgtcggcttggagaactccaggcaacggttcatgtgggtcgtgcgcacgccgccgacaaccaccgaaggcttgaagaagtacttcgagcaacgcgcggcgccggacctcgacgcgctcttcccggatgggttcgtggagcgtaccaaggaccgtggcttcatcgtcacgacgtgggcgccgcaggtggacgtgctccgccaccgggcgaccggcgcgttcgtgacgcactgcgggtggaactcggcgctggagggcatcacggcgggggtgccgatgctgtgctggccgcagtacgcggagcagaagatgaacaaggtgttcatgacggcggagatgggcgtcggggtggagctggacgggtacaactcggactttgtcaaagcggaggagttggaggccaaggtgaggctggtgatggagtcggaggaagggaagcagctcagggctcgttcggctgcgcggaagaaggaggcagaggcggcgctggaggaagggggctcgtcgcacgctgcgttcgtccagttcctgtccgatgtggagaatcttgtccagaactaa

SEQ ID NO: 2796 - DNA, 1158 bp, Oryza sativa
atggcggcggcggcggtgtcgaaggcgtacgacatccaccggagctccgtgtcgtcgaggcascgcgcgctcaacgtcctcctcgtctccggcgactgcgtcctcgccggcctamagcctatattggtgtacatgtgtaaagtggatgggaagttcaaatttagcccagttagtgtaaacttcttgacagagattacaaaaattatatttgccatcatcatgctatgcatccaggccaggcgcctaaaggtgggagagaagccatttctcacagtttcaacattcatgcaggctgctcgcaacaatgttcttcttgcagttcctgctcttttctatgcyatcaacaattacatgaagtttgtaatgcagctatattttaatcctgcaacagtgaaaatgttgggtaatctcaaggttctggtgattgctgtgctcctaaaggtgataatgaggaggcgtttctccacaattcagtgggaagcccttgctcttttgttgattggtatatcggttaatcagctcaaatcactgcctgaaggttctagtacactgggtcttcctgttgctgctggtgcctacctatacacattatttttcgtaacagttcctgcattggcttcagtttacaatgaaaaggctctgaaaagccagtttgataccagtatatatcttcagaacttatttctgtatggatatggtgcaatatttaatttcctagggcttgtgatcactgccatcatccaaggtcctagtagctttaatattctggaagggcattcaaaggccacaatgtttcttatttgcaacaatgccgctcagggcatattatcgtcatttttcttcaaatatgcagatacaatattgaagaagtactcatcaacaatcgccacaatctttactggagtagcatctgctgtgttgtttggtcatactctgaccataaattttgttcttgcaatatcaatagtaattatatctatgcatcagtatctctcgaaccaaattaaggatgaagttccgagcagtaaaattgagatgggtgatgctcatgagcacagatcgaaggaatctgtagtcgtcaacgtgtctgattctattgctactgaggctaaacacaggcacggtactgatgagaggcagccacttcttcctgtttga

SEQ ID NO: 2797 - DNA, 1197 bp, Oryza sativa
atggcgggttcgaggttcgggtcgttcaagtcggagaagggggacccggccgccacggcggcgcagaggagggacccgtacgaggtgctcggcgtggggcgcaacgccaccgaccaggagatcaagagcgccttccgccgcatggcgctcaagtaccacccggacaagaatggcgatgatcctgttgcatcagacatgttccaggaagtcacattctcctacaacatcctgtcagatcccgataagaggcggcagtacgacacatcaggatttgaggccatcgaagccgatagccaggaattggagctggacctatcgagtctcaataccgtgaacaccgtgtttgctgctcttttcagcaaacttggtgtgccgataaagacaaccgtatcagcaacagttttagaggaggcattgaatggatcggttatggtttctcagctccagcttggaaactctgttcacaggaaggtggaaaagcaatcagctcatttttattctgttgacataacagaaaaggaagctaaaatggggttagtttgtcgtgtgaaatcaactgatagaagcaaatttaagttgctttactttgagcttgaagaaaatggtggcctgagccttgctttgcaggaagacagtgtaaagactgggaaggttacttctgctgggatgtattttcttggctttcctgtgtatcgttttgaacaaaacaacctgtgtcaattacttaagacagtacgaatccccttaaactctacgcttcactcaggtgacaatttcttcagaagtgtgaactatactatagaggttgtatgtggtgaatctttccctgctgaaaaggagaagctccagagtgttgaggcaaagatactcacaaaacgagcagagctatccaaatttgagaccgagtacagagaaatcgataatcttctgaaggaaaggaatgaaatccatgcgtcctataccaacaattcaccactgaagaggagttcaagcaggagtaaagctaaatcgccttcaaaattttccaaaggtgaggaggaaaacagtcagagaaaggaaaagaaagtgaaagaccaacccacgggtggatgcagaagtgcagatgaagattcaaacgaaaagaaaaccaaagagcggttcccaaagaagaaatggttaaacattcctttcaaaattgacaggagaaagccatgctga

SEQ ID NO: 2798 - DNA, 2720 bp, Oryza sativa
atggcgtcctcgcaggagaaggccaagacgggtgttctgagaaatgccgcagcgctgctcgacgaaatgcagctcatgggagaaacacagggtgccaagaaggtgatcaactcggagctctggcacgcttgtgccgggccgcttgttgcagcgacaactagaaagattccaaattcccgcattccgaactacccaaacctgccatctcagttgctgtgtcaagttcacaacatcaccttgcatgccgacaaggacactgatgaagtttatgcacagatgacccttcagccagtaaactctgaaacggatgtattccctattccaactcttggtgcttataccaaaagcaagcaccccactgaatatttctgcaagaatttaaccgcaagtgatacgagtacacatggtggtttctcggtgccacgaagggctgcagagaagttgttcccacaactggattactcaatgcaacctcctaaccaggagcttattgttcgagatttgcatgataacatgtggacattccgtcacatttatcgtggacagccaaaacgacatcttctaacaactggatggagtctctttgttggggcaaagcgtctaaaagcaggggactctgtcttatttataagcatgcacattggcgttcttgctgctgcagctcatgccgcatcaagtggtagttcatttactatctactacaatcctaggacaagtccttcgccatttgtaattcctgtagcaaggtacaacaaggcaacatatatgcaaccatcagttggaatgagatttgcgatgatgtttgagacagaggagtcaagcaagcgcagatacacaggtacagttgtgggaataagtgactacgaccccatgagatggcccaattctaaatggcgcaacttacaggtcgaatgggatgaacatgggtatggagaaagacctgagcgtgtgagcatatgggatattgaaactccagaaaacactcttgtgttcccttcgtcgaccttgaattcaaagcggcaatgtcttcctggttatggagtttcagtgcctgggatggaaattggatcagcaaatatgtcatcatttccaagggctcagggtaatccctatggcagtttgcagcacattccagctgttggatcagaattggctatcatgcttctcaaccaatctggtcaaacccttgggagtccccttagttttcaccagtcctcatattctagtattatccaaaatgtgaagcaaaattatatccctcctctaacagttagcacttcagcttgtttgacaaagcaagaaagcctgccttcagatgatgcccagcaccagttccatatggcaaatatgcagaatggtgatcttgaaggctctgaagtccagcctgtcattgattcgatttctgagtcaaagttgaatgctacatcaagagatccaagaaacacagattcatacacaagtcgaagtacttcggagcaaaacagtaagggtgagcctagaggcaagactcgtaggagtaagaagggcttgcctcacaaaaccgtttcagagaaatctgacctttcttcagccccttcttggatctgtgacaatcagcaggttggtttagaatcgaaactggttggttgtgatgaacaagtaaactgtggaaatattgaagattcatcaggtgcacttactcaaggtaattttgttggacagccgcatggccatcaggttgaacaaaagggagtgctgtcgccaccaaaggtagaatcatcaaaatcacctgatggaggaaagtctgtcaattcgtttccaaaccaagggtgtttttcgcagttcattgatggtcttgattggatgactcagccttcctactaccaagactccaatgtaattcaaccagccggtgtgtcagagaacattttcagttcttctgcagatatacctccctcaatgattgctgatactatggagacttttcaggcttcatgtctttctgattgccttcctaattccatacaagaattcatctccagcccagatctgaattcactaacctttctttcacctgacatgcaaaatttggaggtccaactccagcatgatggaagcaatttgccaagcacgtccaactcgtttgtacagatgagtttttctgaagagagtgcaagtcagagtgcaaacttaagtggacttcacatggaatctacacacagaagcataaacaccacttcatgctctcaaccaatgtctactgggggctttgatgcagggatgtactcaaagttgccacgtttaaaagaatcccaaatcttgtctttgccagagattcataccaattccatgggaacatcagcttgcagtatggatgcaaccgagtacagccttgaccgaagtgcgaagccgatgaaaccaccagtgcggacatatacaaaggttcaaaagcaaggatcagttggaagatctatcgatgttacagggtttagaaattaccatgagttgagatctgccatcgcttgcatgtttggtctccaggggaaattggagcatcctggcagttcagagtggaagcttgtatatgtcgactacgaaaatgatgttcttcttgtcggagatgatccatgggaggaattcatcaactgtgtccggtgcatccggattttgtcaccttcagaagtacaacagatgagcgagaatggcatgcatgttttgaacgactgtattcaagcagctta

SEQ ID NO: 2799 - DNA, 2415 bp, Oryza sativa
atggggccactcctcgagcgttggatcagccgcgagggacgatccgacggaggagatgcgtctggtccagttctgttttggtgtgttcttattatttttgctgttcctgatgcaatccgctcgtcttccttacgtcttggtcaagtagcaccgcgcctcgttctcttctcgaattttaaggcgtttcggagtccgaaatttgctaagattttacctggcagtgatcttttttcccctcgtgttcttggcttccgtacccgtgttgtactgttgcttgatgtttttgaagttgggtttgctctgttttgcaaagcaagctccactatgggtaacagccttcctgtagaatcgaaggtcactgttgaagaagaaaatgatagaattaagtatatcgtgtcatctatgcagggattgggtcataaaatggaagatgctcatgcagctattctaagtcttgatgataccacgtccacgtcattttttggtgtttatgatggccatggaggagctgaagtagcatcgtactgcgcaaaacgatttcacattgagctttgcaatcatgaagactatcacaatgatctcaccaacgcactggacaatgtgttttttagcatggatgagaacctgcaacaatccgatgcttggagagagttagttattcctcgtgataatggatggatgtattttctcaaggctggtgtctgtgctaacttttggcctttcccgcaggcgtatactgggccagcatatgaagggagcacagcatgtgtggttgtcatcagaggtgaccaaatgattgttggacatgctggtgattctcgttgcgtactctcaagacaaggtggtctggctattgatttatcctccgatcataaaccaagaacaagcgagtctgaaagagagagagttcaaaatgcaggaggaatatctcttggagttgattgtgaaaaagtaatggagaattatgtaatcaaggaacaatggatcctcggttactttggggaaagtgtaacaatctcaagatcaattggtgactttgctttcaagcagaacaaagatttaaatcgtgaagaacaaatgttgatatgtgatcctgacatccacactcatgacataactggtgacatggaatttcttgttatagcaagtcaaggcctctggtcttgcatggaaagtgcggatgtggttgcttacatacatgtccgtttattggagggtgtaragctgcgtgtcatctgtgaggagcttgttcagtccggcttggcatcgggcgagaacacgaccgtcatcctggttcagttcaagcccggcgccttccagttccagtatgagctagtcgatcccgctgcctttgacactgccgcctctaacgttgccagcaccagtgccggcccggctggtggcagcgacagcgacacgagcgccacgagcgacgagggcgtcgacgacactgccactgccgggaccaccaccacgggctatgaggccggctccagcaccggccccggcagcggcggcggcagcgccaatgccgcgttcgacagcggcggcgacctcgccgctaacttggacatcgccactaacttcggcagcgacgacctcgccgctaacttggacatcgccacggacatcgacaccgaggacgtcttcaccttcatcaacagcgacgacacgttcggcatcaacagcgacgaggtggagctcgatcccaacttcaggcccaagcctcaggtccgcagggcccacgacggcccctytcccaytcccagcgaaatcgaggccgacctcaatgccagccccacgaggtacaatatgagggatatcttcgaggccttcgacaaagtcgaggccgagttgggcggcttcccgttacagggccacgatgtctccagcaccagcaccaaccccaacaccgcgactgacactggcagtggcagccgcaccggcgacgatgacgtcgacggcgccattgccagagccatggccgtggctagcagcgtcatgacgggcgcgggctacgaggtcgactccaccaccaccaatcccagcgctgcggctgacactggcagctacaccggcgacgagatcaaggtcgacgacagcaccagcggcagtgccaggggtgacagcggcgagctcgtcaacaacgacaccaccgttgctgacaacaatgccagtggcgttgctgacagcaccaccgtcggcgacgaggtcgatcccactgccactgtcgcggccgacgacagcaacaccggcgacaaggtcgatccccctgccatcaccaaagccacggccgacagcaacaccagcggcgaggtcgacgtcgacgccactgccactgccactgccagcgccagcgccgccgtggctgatgacgagggcacggctcctgatgacagcgagggcagcccgtag

SEQ ID NO: 2800 - DNA, 3522 bp, Oryza sativa
atgtgggccgagcccgagattgcagtcaattacggcccacgaagaggcggatgcgagtcgtcttcatctcgtccgacgcttcaacccgcaccgatcctgcgccaccccttcgccggcggcttctcccctcctcttcctccgccgctgcatcgccgtcccaggaacttggacacgtcgcctctcgccggcgaccatcatcatggtgctagtaggtttgctagtacaagtgttgtgaagcagtcttcaggtggtctgcttggctggtttcttggtggtaactcaagccagcttcctccgcttgatgttccactcccaggcgttataatttctccacctctgccagattttgtagagccatctaagacaaagatcaccactcttccaaatggcatcaagatcgcatcggagacatcaccgattccggctgtatcagtgggactgtacattgattgtggttctgtttatgagacatcttcttcatctggaacatcacatctattggagagaatggccttcaagagcacgacaaaccggagtcacttgcggttagttagggaggtagaagccattggaggaaatgtctttgcatctgcttctcgcgaacaaatgagctatacttatgatgcactgaagtgttatgcaccagaaatggttgaagttctcatcgacagtgtgaggaacccagcatttttagaatgggaggtcaaagagcagctccagaagataaaatctgaaatatctgaagtgtctggtgatccacatggtctacttatggaagcgctccattcggctggatattctggggctctggcaaaacctttgatggcttcagaatccgcggtgaacagattggatgttgctaccttggaggaattcgttyctgaaaactacactgcccccaggatggtacttgcagcatcaggaattgagcacgatgagttggtttcagtcgcagaaccacttctatcagaccttcccagtgtgaaacgtcctgaagagccaaaatcagtgtatgtaggaggggattatcattgccaagcagattctacaagtacacacattgcacttgcctttgaggttccaggtggctggcgtcaagagaaaactgcaatgattgtgactgtgcttcaggtgctcatgggtggaggagggtccttctcgaccggtggccctgggaaaggaatgcattcttggttgtatctccgtgtcttgaacaattatggacagatcgaatcattctctgctttcagcagtatttacaacaattctggcctttttggaatacatgcaaccactaacccagattttgtatcaagtgctgtggatttggcagcaagggaactccatgaagttgcaactcctggaaaagttacacaagaacaacttgatcgtgctaaagaggctaccaagtcttcagttctgatggacttggaatcaagaatcgtggcctctgaagatattggaagacaggtactgacttatggtgaaaggaaacctattgagtacttcctgaaaactgttgaggagatcactttaaatgacatttcttcaactgcaaagaagattatttcttcgccgcttacattggcatcatggggtgatgtggcatgctgcgtttttgttcagacgcacgccaatatcgtccttcctgttttacattttaatatagaatcagatgttatggcctcatggttaagccatttgcctattcatcggtgtcagctttcgtttcctgcggcgcaagccagttacgcgacgccgggaattgactcggctttgcttctggacgtggacgacatggcgggcggcgatgcgggattaaatgaaggcctaaagaaacaggctaaacctcgattacgcctccccaaaaccgccgcgaaacgaagcgaaagcgagttcctccgatcccgaccatttgctcttytcatggsgtcttccaaatcatcttccgcggaagacgaccaacgaggaacaacccccggtttgaagaaggaggaggacgaggatccgtgggcscgaagcgggcttccccccgcggcgccggagcacgcgatgaaggcggcgctgccgttctccgcgacgtgcgtgcggatctcccgcgactcctaccccaacctccgcgccctccgcaacgcctcctccgtcagcctcgccgacgccgcctacgtgaagatctccgagggggacttcggctacgtcctcgacgacgtgccgcacctcgtcgaccacctccccgatgcccccacttatcccaatccactacaagatcatccagcctattcaactgtcaagcaatattttgttaatgaagatgacactgtaccccaaaaggtggtcgttcagaagaacagccggcggggggttcacttccgtcgtgctggacctcgtcagaaggtttattttgagtcagatgaagtgaaagcatgcattgtaacttgtggaggcctttgccctggtcttaacactgtcatcagagagctcgtctgtggtttggcgcacatgtataatgtcagcaaaatctatggtatacagaatggatacaagggcttctattctagcaattaccttactctgacgccaaagagtgtcgatgacatccacaagaggggtgggacagttcttggcacatcacgaggtggccatgatacaaaaaagattgttgacaacattcaggatcgtggaattaatcaggtctatatcattggaggagatggaacacagaagggtgcatatgagatcttcaaggaaatccgaaaacgtgggctaaaggtttctgttgctgggattcccaagacaatagataatgacatagcgatcattgacaagtcatttggttttgatacggccgtagaagaggcccagcgtgccattgattcagctcatgtggaagcttgcagtgctgagaatggaataggcttagtaaaactgatgggccgttatagtgagagaaggctgaaagagaacaagcacatggttattgttgttgctgagggagcagggcaggatcttatagccaaaagtttatctacttctgagcagcaagatgcatcaggaaataagctactgcttgatattggtctttggctgactcacaagataaaggaccacttcaagagcaaaaagatggagatgactattaaatatatagatcctacctacatgatccgagctattccaagcaatgcatcagacaatgtctactgcacgctgctggcccacagtgctattcatggtgcaatggccggctatagcttcactgttggaaatgtcaacggcagacatgcctacatacctttctatagggtgacatccacacggaacaaggtcaagatcactgataggatgtgggcgaggctgctatcatcaaccaaccagccaagcttcctaagccagaaggacatcgacgaagccaaagagaacgataggacggccaacaagccaccacttcccaccggcctcagccatcatgtggcaaactctttcgaccagtctgcatcatcttcgtcgaacagccagatatga

SEQ ID NO: 2801 - DNA, 2823 bp, Oryza sativa
atggcggcacggtcgtggttgcttctcctctgcttcgtcgccgtcgccaccgccggagtgctccaagctcgtgcccaacctgacagcaacggtttcatcagcgtagactgtggcctcccggggaagacgggcttcgtggacgacaagaccaagatatcctacgcggcggacgacggcttcaccgacggcggcgcgtgccacaacatctcggcggagtacatcacgccggggctcgccaagcgctaccacaccctgcgcagcttcccggacggcaagcgcaactgctacacgctccggtcactcgtcgccgggctcaagtaccttttccgcaccaccttcttttacggcaactacgacggcctcaacaagctacccgtgtttgatctctacgtcggcgtcaactactggacgatggtgaacatcacgggccccggcgacgcggtgatcgtggaggccatcgtcgtcgtgccggatgacttcgtgcaggtctgcctggtgaacaccggcgccgggacgccgttcatctccgggttggacctgaggcctctcaagaacacgctctacccgcagtcgaacgccacgcagggccttgtcctcctcggccggctcaacttcggcccgaccgattacaccgacgtcataaggtacccggatgatccgcacgacaggatatggttcccgtgggtggactcgaccaaatggagccagatatcatcgacgaagaaagtgcaggatctagacaacgacatgtacgagacgccgacggcggtgatgcagacggcgatcacgccgcggaacgcctccaggaacatcgagttctcctgggaccccgtgccgctgcccaacgacccgacgcccgggtacatcgccatcttccacttctccgagctgcagctcctccccggcaacgccgtgcgcgagttctacatcaacctcaacggcaagccgtggtccctgaccgccttcaagccggagtacctctacaacgacgccaccttcaaccggaacccattcctacggtacccgcagtacaacatctccatcaacgccaccgccaactcgacgctgccgccgctcatcaacgccgtcgaggtgttctccgtcatccccactgccaccattggcactgacccagaggacgtggctgcaatcacggcgatcaaggagaagtatcaggtggtgaagaactggatgggtgacccatgtgttccgaagatgcttgcgtgggacaagttgacctgcagctatgccatttctaaccctgcaagaatcattggcctaaacctgtcctccagtggtttgagcggtgaggtatcgtcctatttcgggaatcttaaggctattcaaaacttggatttgtcaaataataaattgacaggtccaattccagacgccctttcacagttaccttcattgacatttctagatttgacaggaaatcaactcagtggatcgatcccgtctggtcttctcaagagaattcaagatggctctctaaatctaagatatggaaataatccaaacctctgcactaatggcgattcatgccagccagcaaaaaagaagagcaagctagctatctacatagttattccaatagttatagttctggttgtggtgataatatcagtggcagtactactttgttgcctgttgagacggaaaaagcaagcagcaatgagcaattctgtgaagccacaaaatgagacagtgagcaatgtgtcgtcaaatggcggatacgggcatagttcatcactacaacttaagaatcgtcgatttacgtacaatgaacttgagaagataacgaacaacttccagcgggtgcttggccgtggagggtttgggtacgtttacgacggcttcttggaggatggcactcaagtggcagtgaaattgcggtctgaatcttccaatcaaggtgctaaggagttcctcgcggaggctcaaattttaacccggattcatcacaagaatcttgtctctatgattggttactgtaaggatggggaatacatggcacttgtatatgagtacatgtcagaaggaacactacaagaacacattgcaggtaaaaacaacaacaggatatatttaacctggagagagaggcttcgaatagcactagaatctgcacaagggctagaatacctacacaaggcgtgcaacccaccacttattcatagggatgtgaaggcgaccaacatcctattgaacacaaggcttgaggcgaagattgctgactttggcctatccaagacattcaatcacgttaatgacacccatgtatctacgaacacgcttgttggcacacctggatatgtggatccagagtaccaagcaacaatgcaaccaaccaccaagagcgacgtctatagctttggtgttgtcttattggagttgatcacagggaagccgtctattctacgtgaaccagggcccattagcatcatccagtgggcacggcaacgtttggcacgaggtaacatcgaaggtgtggtggatgcacacatgcatggtgaccatgatgtgaatggtgtgtggaaggccgcagacattgcccttaaatgcaccgcacagacatcgacacaacgacccactatgaccgatgtggtagctcagctgcaggagtgcctagagctcgaggataggcgatgtggcatggaagatacatataacaacttctatgccggcaacaacaatgatcccaactcaagttataacatgtacaacacggaccagtccactgatgtgagtcaaaacaacacgatggagcataattttgaaagagtgccaaccatggctacagggccagttgcacgataa

SEQ ID NO: 2802 - DNA, 2883 bp, Oryza sativa
atggcggcacggtcgtcgttgtttcttctctgcctcgccaccgccaccgccggcgtactccaagctcgtgcccagcctgacagcaaaggtttcatcagcgtagactgcgggctcccggggaagacgagctacattgacgacaagaccaagatatcctacgcctcggacgacggattcaccgacggcggcaagcactacaacgtctcgccggagtacatcaagccggcggtcacggcgcgctactacaacgtgcgcagcttccccgacggcgcgcgcaactgctacacgctccggtcgctcgtggccggcctcaagtatctcatccgcgccaccttcatctgcccgtgtccgtttgacctccacatcggcgtcaacttctggacggtggtgaacatcacggacccgatccagccggtgaaccgggaggccatcgtcgtcgtgcccgacgactccgtgcaagtctgcctggtgaacaccggcgccgggacaccgttcatctccgggttggacctcaggcctcttatgaacaagctctacccgcaggtgaacgccactcagggcctactccaactcgccaggctcaacttcggcccatctgacgaaacctccatcaggtatccggatgatccgcacgacagagtatggtttccttggtttgatgcggccaagtggaacgagatatcaacgacaaacagggttcagaacatagacaacgacctgttcgaggcgccgacggcggtgatgcagacagcggtcacgccaatcaacgcctccaacaacatcgacttcttctggaactcacagccgcagcccaacgacccagcgccagggtacatcgccatctttcacttctccgagcttgagaacctccccaacaacgccacacggcaattctatatcaacatcaacggcatattgttcgacgatggtttcacaccatcgtttctctacgccgaggcctcctacagctccaaaccctttgtgcgacacccgcagtacaacatcaccattaacgccaccgccaactcgacgatgccgccgctcatcaacgccgtcgaggtgtactctgtcatctccaccgctaacattggcaccgactcacaagatgtatcagcaatcatgacgatcaaggcgaagtaccaggtgaaaaagaattggatgggtgacccgtgcctccctagaaatcttgcgtgggataatttgacctgcagctatgccatttctaaccctgcaagaatcacgagcttaaacctgtcaaaaattggtttgagtggtgagatatcgtccctcttttgggaatctcaaggccctccaatatttggatctatcaaacaacaacttgacaggctcgattccaaatgccctttcacagttgtcttcattgacaatcttctggtggtagacaacgacagcgatggcggacggttgaaggcgcggcgcgcgcggttgagggccgaaggagaagggagcagcggtaagggcagagggcgtcaagctccggcagctgagctctatacaagcttgaggccacggtggcggagagatttgacaggaaaccaactaaatggaacaattccgcctggacttctcaagagaattcaggatggctttttaaatctaagatatggaaataacccaaatctttgcaccaatggcaactcatgtcaaccaccaaaaaacaagagcaagctagctatctacattgttgttcctatagttctggtcctcgcgatagtatcagtgacgacactactctattgcctactgagaagaaaaaaacaaggatcaatgaacaattctgtaaagcgacaaaacgagacaatgagatatgggccaacaaataatggctccgggcataattcatcactgcggcttgagaaccgctggtttacatataatgaactggagaagataacgaacaaattccagcgagttcttggacaaggaggctttggaaaagtctatgatggcttcttggaggatggcactgaagtggcagtcaaagtgaggactgaatcttccaaccaaggtgataaggagtttcttgtagaggstcaaattttaacccggattcatcacaagaaccttgtctctatgatcggctattgtaaggatgagaaatatatggcacttgtgtatgagtacatgtcagaaggaacccttcaagaacacattgcaggaaaaggaaatgatgggagatacttaacctggaaagagaggcttcgaattgcgctggaatctgctcaagggctagagtacctacacaaagggtgcaaccctcctcttattcaccgtgatgtgaagggaaccaacattttgttgaacacgaggctagaggccaagattgctgattttggtttgtccaaggttttcaatcctgagaacggcacccatgtatctacgaacaaacttgttggcacacctggatatgtggatccagaagaaatactaattgtaagacttattgggactgaccaaatgcgtaggtaccaatcaacaatgcaaccaacgactaagagtgatgtctatagctttggtgttgtcctgttggagttggtaacagggaagccagctatcttgcgtgatccagagcccatcagcatcatccattgggcacaacaacgcttagcacggggtaacattgagggtgtggtgaatgcaagcatgcatggtgactacgatgtgaatggcctatggaaggttgcagacattgcactcaagtgtacggcgctttcgtcagcacaccgccccactatgaccgacgtggtggcacagttgcaagagtgcctcgagctagaggataagcaccaggtcagtgatataaacaatggcttttataatggcaatagtggcgatctaaactctaacttctacaccacttaa

SEQ ID NO: 2803 - DNA, 2829 bp, Oryza sativa
atggcggcatggtcgtggttaattctactatgcctcgtcgccgccgccaccgccggcgtgctccaagctcgtgcccagcctgatagcaaaggtttcattagcgtagactgcggcctcccggggaagacgagctacgtggacgacaagaccaagatatcctacgcggcggacgacggcttcaccgacggcggctcgttccacaacatctcggcggagtacatcacgccggcgctctcggcgcgctaccacaacgtgcgcagcttccccgacggcgcgcgcaactgctacacgctccggtcgctcgtggccggcctcaagtacctcatccgcgccaccttcatgtacggcaactacgacggcctcagcaagctgccaatcttcgacgtctacatcggcgtcaacttctggatgatggtcaacatctcggacccctccggcgcgacgctcctggaggccatcgtcgtcgtgccggacgacttcgtgcaggtttgcctcgtgaacaccggcaccgggacaccgttcatctccgggctggacctcaggcctctcgagaagaagctctacccgcaggcgaacgacaagcggggcctgtccttgttcggcagatggaactttggcccaattagtactaccgagttcatcaggtaccccgacgatccacacgacagaatatggatgccttgggtctcgccatcatattgggtcgaggtatcgacgacgaggccggtgcagcacacggacgaggacgtattcgacgcgccgacgaaggtgatgcagacggcgattgcgccgctcaacgcctcgagcaacatcgagttcgcctgggtaccctacacgcagcccaaggacccggcgccggggtacatcaccgtcatgcacttctccgagctgcagctccgctccagcaacgccacgcgccagttctacatcaacctcaacggcaacatggtgtttagccagggctacacgccggcgtacctctacgccgacgccatcttcaacagcaacccgttcctacgatacccgcagtacaacatctccatcaacgccaccgccaactcgacgctgccaccgatcatcaacgccatcgaggtgttctccgtcttctccaccgccaccgttggcacagatggtcaggatgcttccgccatgatggtgatcaaggaaaagtatcaggtgaagaagaactggatgggtgatccgtgcgttccaaagacgcttgcgtgggataagttgacatgcagctatgacagctccaaacctgcaagaatcacagacataaatctgtcatccggtggtttaagtggtgagatatcgtccgcttttgcgaatctcaaggctcttcaaaacttggatctgtcaaacaacaatttgacaggttcgattccagatgcactttcacagttgccttcgttggcagtattagatttgacaggaaatcaactcaatggttcaattccatctggacttctcaaaagaattcaagatggtaccctaaatataaaatacggaaataacccaaacctctgcaccaacgacaattcatgtcagccagcaaaacacaagagcaagcttgccatctatgtagctgttcctgtagttctggttttggtgatagtatcagtcacaatactgctcttttgccttctgggacgaaaaaagaagcaaggatcaatgaacacttccgtaaagccgcagaatgagacagcgagctatgtgccgacaaatggcagccatgggcatggctcatcaatgcagcttgagaaccgacggtttacttacaatgatttagagaagataacaaacaactttcagcgagtgctcggcgaaggagggtttgggaaggtctacgatggcttcttggaagatggcactcaagtggcagtcaaattaaggtctgaatcttccaaccaaggggataaggaatttctcgcagaggctcagattttaactcggattcaccacaagagccttgtatctatgatcggttattgcaaggatgggaaatacatggcacttgtctatgagtacatgtcagaaggaacccttcgagaacatatttcaggtaaaagaaacaacgggagatacttaacctggagagagaggcttcgaatcgcgctggaatccgctcaagggctagagtacctacacaagtggtgcaatccgcctcttattcacagagatgtgaaggctaccaacattctattgaatgcgaagctagaggctaagattgctgattttggcttatccaagacgttcaatcttgagaatggcacacatgtatctacgaacacgcttgttggcacacctggatacgtggatccagagtaccaggcaacaatgcaaccaacgaccaagagtgacgtctatagctttggtgttgtcctattggagctggtcacagggaagccggctgtcctacgtgatccagagcccataagtatcattcattgggcgcaacagcgcctagcacagggtaatattgagggagtggtggatgcacgtatgcatggtgaccatgatgtaaatggtgtatggaaggctacggacatcgcactcaagtgtaccacacaagtatcggcacaacggcccactatgaccgatgtggtggcacaactgcaagagtgcctcgagctcgaggaggggcgttgtgccatcagcaatgcgaacaacaatttctataccgacaataacagcaactctaactcaagttatgacatgtatgccactgaccactctattgatgtaagtcagaacagcgctgcatttgagacggagcgtaattttggaaggatgccatcaacggccaccggtccagctgcacgataa

SEQ ID NO: 2804 - DNA, 2010 bp, Oryza sativa
atggagggggggacgaagaaagttttcacagttcaggtggaggatggaaagcccaggaaggacggccggccggcggtagggccagtgttcaggagtgcactgtcaaaggatggattcccgccacttgagcctgacatgaaaacatcatgggacgtgttcagggtcgcagcaggcaagtacccagataatcggatgctcggatggcgtcctgtaaaagatggagtgatagggccatacatatggaaatcatacagggaagtgtatgaagaagtcctgcaagttggatctgctttgcagcagctgggggtgaagccaggttcccggattggaatatatggatcaaactgccctcagtggatagtagcaatgcaggcttgcaatggttacagcttaatctgtgtcccactctacgatacgttaggtgcaggagctgttgacttcattattgaccatgctgaaatcgatgttatctttgttcaggacaagaaaataaaagaaatactgtccgcaaattgcaagtctgctaagagagtgaaaggactggtggcatttacttcgggaacaagcgaagaaatcacaagtgctgatcagattgggatgaagttgtactcgtggaaagatttcttaaaaatgggaaaggaaaatccagcccaaccttgtgctccaaaaccaaatgatacatgcaccatcatgtacacaagtgggacaagtggagagcccaaaggtgtcatgcttagccatgagagtcatgccatatatgtgaaaggtgtggacctcttcatggagcagtttgacgataagatgacaacagatgatgtgtttctttcctttctaccgcttgctcacatccttgaccgcatgatcgaggagtttttctttcacaaaggagcctcagttggctattatcatggggatttgaatgccttgagagatgatctcatggagctaaagccaactctactagttggggtgcctcgagtgtatgaaaaaatttatgaaggtatcttgaaggccttatcagaactcagaccactcagaagattaattttcaatgctctgtataaccgcaaactggcaaacatgaaagcaggctgcacgcacaaaactgcttcaccttttgcagatatgttggctttccgcaaggtcaaagcaaggcttggtggtcgtcttcgcctattaatctcgggtggggctccattaagtaatgagatcgaagagttcttgagagtaaccagctgcgcatactttatccaaggctatggtttaacagaaacactgggacctagcacggtctgttaccctgatgacatgtccctggttggaactgttggcgtggctgctacctatacggaattgcgattggaagaagtgcctgagatgggttacaatccacttggtactccttcccgtggtgaaatatgcgtccgaggaaacttcttcaccggatactataaaaatcctgagctcacgaatgaggtcatggctgatggatggtttcacacaggtgacattggagagatgaactcagatggaatcctgaaggtaattgaccgaaagaaaaatatattcaagttgtcacaaggggagtatgttgcagttgaatacctggagaaagtatatgttttccctccaaccgttgaagatgtctgggtatatggggacagcttcagatcaatgttagtggcagtagttaatccacatgaagagaacaccatgaagtgggcagaatcaaatggctgcaagggttcttttgctgaaatatgcaagtctgaaggccttaaagagcatatcctgaaagagctgcaatctgttgcagcaaggaacargctacggggatttgagtatgtcaaaggtgtaatattggaccctattccttttgaccttgaaagggatttggtgactgcaacaatgaaaaagaaaagaaacaacatgctaaaatattacaagcctgagattgagaaagtataccaaaaactggaggaacagagggttgccgccaaatcaaagtaa

SEQ ID NO: 2805 - DNA, 1130 bp, Oryza sativa
atgaatccattgcgcgtcatcgtgaaagaggaggagctcgacttcgccgccgcggcggcggcggcggcggcgggtgagggctcgccgtcgtcgtgggcggtcggcgtgatggacctgcctcgtccaatggagggcctcggcgaggccgggccgccgccgttcttgtgcaagacgtacgaggtcgtggacgaccccggcacggacaccgtcatctcgtgggggttcgccggcaacagcttcgtcgtctgggacgccaatgcgttcgccgccgtgctcctcccgcgctacttcaagcacagcaacttctccagcttcgtccgccagctcaacacctacgggttcaggaaggtcgatccggatagatgggagttcgcgaacgaggggttcttgcgggggaagaaggagctcctgaagacgatcaagcgacgccggccgccgccgtcgagccccccgtcgtcttcgtcgtcgtcgtcgtcgtcgcagcaccagcagcagccggcggcggcgtgcctggaggtggggcagttcgggcgcgacggcgtggtgaaccggctgcagcgcgacaagagcgtcctgatcgcggaggtggtgaagctgcggcaggagcagcagacgacgcgcgcgcagatgcaggcgatggaggagcgcatctcggcggcggagcagaagcagcagcagatgacggtgttcctggcgcgcgccatgaagaacccgggcttcctccagatgctcgtcgaccggcaggccggccagcacggcgcccggaacagggtgctcgaggacgccctctccaagaagcgccgccgccccatcgagtacctcctcacccgcaacggcgagacctgcgccgccggcgagtcggcagctatgctggcggcggacggcgtggcggagccggacggcgacaccaccccgcgcggcgacggcggcggcggcggcggcggcgacaccgagagcttctggatgcagctgctcagcctcggcctggaggagaagcagcgagaggacggcgtcgccggcggcgtccaggagagtaacagcggcggcgctgacgtggacaacgacgaggaggatgacgacgatgacgtggacgtgctcgtgcagagcatatatcacctcagccccaagtg

SEQ ID NO: 2806 - DNA, 1370 bp, Oryza sativa
atggacgtcgtcgtcgagagcccgccggtgagggacgagaagaaagtcgacgtcgccgcgattggaggcgcgcctccaatagtctttgagagttttgcaccatcgacgcagagagattcaaccatcatcargaaggtcaaggagcaaacggcggcggagctctccggagacgacgacgacgacgagcccgacgacctcgtctccctgagcctctgcacgaggcccaacgccgccgcgacgcgccggaagggccacgagaggacgccgtcgtccggcggcggcggcgacgacgggcggctgtccctcgggctgagctgcgctcgcggcggcgttgcctccgacgacgacgacgacaagcaggcgagccgccgcgcgttgccgccgatgcccgtgctgaacctcagctccgacagcagcggggacgccgccggcgccggcgcckgcgagctacccagccgaacaaagcgtccaggagctcgagcggcggcgcgatgcgccgacgacaagagtgctgcagcagcagcagccaagaaggctagtcaaagtcagagtcaaatgaacgatgggtgtcagtggcggaaatacgggcagaaaatctcaaaggggaacccttgcccgcgcgcctattaccgttgcaccgttgcacccaactgccctgtacgcaagcaggtgcagagatgcgcggacgacatgtcgatcctgatcacgacgtacgagggcacgcacagccacccgctgccgccggcggcggcggcgatggcgtccacaacgtcggccgcggcggcgatgctgacgtctggctcgaccaactccacgatgcacggcagcggcggcgttcaccaccacctgccgttcgcctcggccgtcggcggcggcggcggcgtcgggctgctcggcccgaccaccatctccaccgccacgtcctgccccaccgtcacgctcgacctcaccgcgccgcactcgctcctgcacccgtcgtcggcgtcgccytacgccgccgccgccgcggggtacgagtccagcagggcgctgccggcggcgtggagcagcgggtacctggcgtacggcggcgcggcggcggcgcagccatactacgccaagggcgttgcgccgtcgccgttcggccatcatttcggcatgatgggcatggcggcggcggcggcgaggccggcgccggagcagctgttcggcggccagacgacgtcgccgtacctgcwgagagccatcggcggcggcggcgtcgcgccggcggccgtgacggacacgatcgcgaaggcgatcacgtcggacccgagcttccagtcggttttggcggcggcgatcacgtcctacatggggcgcggcggcggcgcggcggcgccgaacaagtg

SEQ ID NO: 2807 - DNA, 1926 bp, Oryza sativa
  misc_feature (1)...(1926): n = A,T,C or G
atggctaggggaggaggagcagctggtgtgtccatggctcatcacctcggcattgccttggtggtgcttgtctttgccgccatggcgcaggtggcgcgcggcggcggcggcggccatgactatggcatggcgctgagcaagagcatcctctacttcgaggcgcagcgctccggcgtgctcccgggtagccagaggatcgcatggagggccaactccggcctcgccgacggcaaggccaacggcgtggatcttgttggtgggtactacgacgccggcgacaacgtcaagttcgggctgccgatggcgttcacggtgaccatgatggcgtggagcgtcatcgagtacggcgaggagatggcggcggccggcgarctcggccacgccgtggaggccatcaagtggggcaccgactacttcgccaaggcgcacccggagcccaacgtgctctacgctgaggtcggcgatggtgactccgaccacaactgctggcagcggccggaggacatgacgacaagccgtcaggcgtaccgccttgatcctcagaatcccggctctgacctcgccggagaaaccgccgcggccatggcggctgcgtcactcgtcttccgtagctccaacccgggctacgcagaccaactcctgcaacactctaaacagctgtttgatttcgccgacaagtaccggggaaggtacgacaacagcatcaccgtcgcgaggaactattacgggtcattcagcggatacggggatgagctactgtgggcgtcggcgtggctataccaagcgagcgacgaccgccgctacctcgactacttggccaacaacgcggatgcgctaggcgggaacgggctggtccatcaaccagttttgggtgggaacgtcaagtaccccggagttcaaatcctagctgcaaagtttctcctccaaggcaaagccggcgagcacgccggcgtcctgcagggataccggcggaaggcggacttcttcgcgtgctcgtgcctcgggaaggacgccgccgacaacgtcgggaggacgcccggcggaatgctgtaccaccagaggtggaacaacatccagttcgtcaccagcgcgtcgttcctcctcgccgtntactccgaccaccttgccggcggcgccgtgaggtgctcgggcggcggcggggcggtggccggggcggcggagctcctggcgttcgccaagtcgcaggtggactacatcctggggagcaacccgagggggacgagctacatggtcggctatggcgccgtctacccgcggcaggcgcaccaccgcggctcgtccatcgcctccatcagggccagcccgtcgttcgtgagctgcagggaggggtacgcgagctggtacgggcggcggggcggcaaccccaacctgctcgacggcgccgtcgtcggcggccccgacgagcacgacgacttcgccgacgagaggaacaactacgagcagacggaggcggccacctacaacaacgccccgctcatgggcatcctcgcccgtctcgccgccggccatggcgcccgcgcccgcggccggcttggccagtcacttcaacacggaatcgctgcaaatcacacttcactgcctcatggtgccaatcaccagcatgcgtcgccggtggagatcgagcagaaggcgacggcgtcgtgggagaaggacgggaggacgtaccaccggtacgcggtgacggtgagcaacaggtcgccggcgggcggcaagacggtggaggagctccacatcggcatcggcaagctgtacggcccggtgtgggggctcgagaaggcggcgaggtacggctacgtgctcccgagctggaccccgtcgctgcccgccggcgagagcgccgccttcgtctacgtccacgccgcgccgccggccgacgtctgggtcaccggctacaagctcgtctga

SEQ ID NO: 2808 - DNA, 1116 bp, Oryza sativa
atgatcatactgaccaaggatctcaaggggaacacagcctaccagagagttaccctatctgctctgatcacgaggagtgcattgtccgccccgagaggatcaagattcagaaaggttaacgttgtgaaagtgcctcgaagatttatgaagatgtgttcacaaacttcagagctcatgaaggttgctgatttcatcaatgaaattcgtcaggctggcagaaatggagagctttcaggtgaaaccttcatattcttcaacaagcagattaaagggaacaagagggagatcattcagcttggcgtcccactatttcagcccaccacagaggaatctaattgtcacatagaagcaatcccccttgtcctccaggctgtcattgatcatcttgttctttggcgtttaataccagaaagcaggaaacctaacagtgtcatcatcaacttcttcgatgaggatgagcactcgcagccctacttcaagcctcctcacctggacaacccaatctccactctcctgctgtccgagactacgatggcatttggaaggtcacttgtcactgacagcaatggcaactacaagggaccccttacgctctcactgaagcaagggtcactcctggtgatgcgcgggaacagcgcggacatggctcgccacgtcgtgtgcccatcgtccaaccgccgcgtgagcatcacgttcgtgcgcgtgaggccgtcgacgccggtggacctcagcccgctcccgtcgcccaccaaggccatgacgctgtggcaggcgccgccgccgcagcagcagcagacgatcccggcgcccggcatgcagcagaagccgcagcacggcggcgccatcatcggctacggcccggcgccgcaggccgtgctggcgcctgcgtggggcatggccgtgcgcgcggcgcccgtcatgatggtcgccgggcccgcgccggcgaggccgatggtgatggcccccgccggcggcaacaagcggatgagccgcagcggcaccggcgtyttcctgccgtggacggtcgggcccaagaggtacaacaagcacctcccgccgcgcatccagaagcgccggttctcggcgatgatgtcgccgatcgaggcccagggctga

SEQ ID NO: 2809 - DNA, 576 bp, Oryza sativa
atggccatcacacgccgccaacctcctctcctcctcctcttcctcgccgttgccgccgccgccaccatcgccggcgcgtcacagtccaccaggcccaggccggcggtgagcccggccgcggcggcggacttcgtgcggcggtcgtgccgcgcgacgcggtacccgcaggccgcggttaacstcggcsccgaccgcgggggttcctgctcgggctacctcgggggcggcggctcctccagctcgtccaagcgctccggcggcggcggcaggggcggcgcggtgggggactgcgcggacacgctgcgggacgcggaggagcggctgcggcagtcggcggcggagatgagccggatggggcggtcggggagcccgcggttcgcgtggcggctgagcaacgtgcagacctgggccagcgccgcgctcaccgacgcctccacctgcctcgactccctcgccacctacgccgcccccggcatcgacgtcgacgccctcaggaagcgcgtcggcgccgtctcccaggccaccagcaacgccctsgccctcgtcaacaacctcgatccgcaccaccacttgtaa

SEQ ID NO: 2810 - DNA, 1056 bp, Oryza sativa
atggaccaggagataatgaagaagcacagcgcgtggcttaagctgctcctcgggcccaagaagccggcgaggtcggcggcgatcgtcgagacgtgggcggcggaccggtcgaagctgctcctcgggcccaagatcgcgtcggggtccaacagccgcatccaccgcggcatgtacggggagcaaccagtggccgtgaagatcatgcacgcgccagtgggcgacgacgacgacgacgtgcaggtccggcgtgagatggaggcgcagttcgacgccgaggtgtccctcctgtcgcggctgcgccaccccaacgtcgtgcggctcgtcggcgtgtgccgggagccggaggtgtactggatcatcaccgagctcatgcgacgcggcacgctcagcgcgtacctgcacgggcgggagccctactcgctgccgccggagaccatcgtccgcctcgcgcttgacgtcgcccgtggcatggagtacctccacgcgcgtggcgtcgtccaccgcgacctcaagccggagaacctgatgctcgacggcggcgggcgcgtcaaggtcgccgacctgggcacgtcctgcctcgaggccacctgccgcggcgacaagtgctcctccaaggcgggcacgttccggtggatggcgccggagatgatccacgacaagcgctgcaaccgcaaggtggacgtgtacagcttcggcctcgtgctgtgggagctcaccacctgcctcgtgccgttccagaacttgagccccgtgcaggtcgcctactccgtctgcgacagggacgccaggccgccgctctcgccgtcgtgcccgccggccatcaacagcctcatcaagaggtgctggtccaccgaaccagcgaggcgtcccgagttcaaacagatcgtgtccgtgctggagagctacgaccgctgcctccggcaaggcctgccaatggtggcgctgccggagccgtcgtcatcgccgctggcctcgttgctcggcgccttcaagatccgatcctgcacgagcacaacgcgttcctccataaccgatcatagaagagttcatccttag

SEQ ID NO: 2811 - DNA, 855 bp, Oryza sativa
atgagcagctgcttcaacggcggcgccggctggccggagccggtggtgcgcgtgcaggccgtgtcggactcgtgcggcgcgacgatccccgagcggtacgtcaaggcgccgtccgagcggccgtcgtcgctggacggcggcggcggcctgaacaatatcccggtggtggacatgtcaatgccggacggggaggagaccgcacgagccgtggcggcggcttgccgggagtggggtttcttccaggcggtgaaccacggcgtgcgccccgagctgctgcgccgggcgcacgcggcgtggcgcgggttcttcgcgcggcccgcggaggcccgcgaggcccgcctcggcacggccaagggcgggcccctcgactggggcgactactacttcctccacctcctcccggcggcgctcaagagccacgacaagtggccgacgtcgtccgtccccgcgggcggcggcggcctgcgggaggcgacggaggagtacgcggaggaggtggtgcggctgtgcaggagggtgatgaggctactgtcgagggggctcgggctggacgacgggaggctgcaggcggcgttcggcggggtcggcggcgagggcgcgtgcttgagggtcaacttctacccgcgctgcccgcagccggagctgacgctcggcgtcgcgtcccactccgaccccggcggcatgaccatgctgctcgtcgacgaccacgtcaggggcctccaggtgaagaacgccggccactggatcaccgtcgaccctgttcccgacgccttcatcgtcaacatcggcgaccagatacaggattttatttgcacatccaagatctcttacaaaaacggtatgaaagctaattaa

SEQ ID NO: 2812 - DNA, 825 bp, Oryza sativa
atggcggcgatctcgcgcgcgatccgggcgtgcgccgccgcggggtcccggcggagcatggcgtcgtcggcgaaggaggtggcggcggccggggcgcgggcggcggcggcggtggcgcggcgcgggcgggagcgggagcgggaggaggacgggaggcgcgtgcagtgggtgttcctgggctgccccggggtggggaagggcacctacgccagccgcctctcgcagatgctccgcgtgccccacatcgccaccggcgatctcgtccgcgacgccctcgcctccccgggccccttctccgagcagcttgcggagattgtgaataatggaaagctagtgtcggatgagatcataataaatcttctgtcaaagcggcttgaagagggagcagaaaagggtgagctgggcttcatccttgatggttttccaagaaccataagacaagcggagatacttgaaggagtcacggatattgatttggtcatcaacctcaaactccgagaagaggctctgcttgcaaaatgccttggtagaaggatgtgcagccagtgtggtggaaattttaatgtagcgtccattgatatggagggcgaaaatggtggtcctcgaatgtacatgcctccactactgcctcctccacagtgtgaatcaaagttgataactaggcctgatgatactgaagaggtgtgtgagccagtggaggacttctacagagcacgtggtaaactattggagttcaatctaccaggaggaattccagaatcatggccgaagttactgcaagcattgaatttagaccctggcaatgaaagatctgcagcagcatga

SEQ ID NO: 2813 - DNA, 1002 bp, Oryza sativa
atgacatcagccgtggccgcgccgcctgccaccggcggcaagcgaccggtgcttctgctgcgccgcatcaacgaccgtctcgcggcggagcttcgctcgcgcttccgcgtcctcaacttctacgaatcaagcgctcccctcctcgccttcctcgccgccgccgccgcggggcccgaccccccgctygccgccgtcgtcgtcgccggcggagccatccaggtcaacgccgcgttccttgacgcggtgccctcccttggctgcgtcgtcaccaccggcgcaggcgtcgaccacatcgacctcgccgagtgcgcgcgccgcggggtcgcggtggccggcgcaggcacggtcttctccaccgacgtggcggaccacgccgtcggtctcctcgtcgacgtgctccggcgcatctcggcgtccgaccggtacgtccgccgcgggctctgggcggcgcgtggggactacccgcttggatccaagctaagtggcaagcatgtaggtatcatcggcttgggcagcattggatcactgattgcaaagaggctccaagcattcggctgcaccatttcctacaactccaggagaccaaaggattctgtctcctacaactacttccccgatgtcaccgacctcgccgctgcatccgacgtgctcatcgtcgcgtgcgcgctgaacgatgagacgcggcacatcgtcgacagtagtgtgctagaagcccttggaaaagacggcgtcgttgtgaacatcgctcgcggcgggattgttgatgaggcagagctgatcagggcactgaaggaagggagaattgcaggtgcagggcttgatgtgtttgagaaggagcctgatgtgccggcagagctcctgtccatggacaatgtggtgctcacggcgcatgaagctgtcttcaccactgaatccaactgggacctggccgacctcatgattgcaaacctggaggccttcttctccggtggcccattgcttactcctgtacttcccaagtaa

SEQ ID NO: 2814 - DNA, 696 bp, Oryza sativa
atggctggagaaggagatgatcaactgaagcttctcggattgtgggtgagcccatacactcaccgagtgaagcttgcactcagcttcaagggcctgagctacgagtacgtcgaggaggacctcagcaacaagagcgagctgcttctcagcaccaacccggtgcacaagaaggtgcccgtgctcatccacaacggcaagcccatctgcgagtcgcaggtcatcgtgcagtacctcgacgaggagttccccaactccggcgtctcgctcctcccatctgactcctacgatcgcgccattgctcgtttctgggctgcctacatcaacgacaagctgatgccgtcgtggctgcagtcgtcgatgggcaagacggaggaggagagggcggaggcgctgaagcagacgttggaggcggtggcgaacctggagacggcgttcaaggagtgttccaaggggaagcccttcttcggcggcgacaccgtcgggtacctggacgtgtcgctcggcgccatgatcggatggatgcgcgccggcgaggctctgcacgggaggaggaccttcgatgccactagaagccctctcctgaacgcgtggatggagcgcttcgccgcgctggacgccgccaaggccgccatgccggacaacaacaagctggtcgagttcgtcagggttaggcgggctgccgctgcgaacaactga

SEQ ID NO: 2815 - DNA, 2187 bp, Oryza sativa
atggagtgcgagaacgggcacgtcgccgccgccgccaacggcagcagcctgtgcgtggctaagccgcgtgccgacccgctcaactgggggaaggcggcggaggagctgtccgggagccatctggacgcggtgaagcgcatggtggaggagtaccgcaggcccgtggtgacgatcgagggcgccagcctgaccatcgcgcaggtcgcggcggtggcctccgccggcgccgccagggtggagctcgacgagtccgcccgcggccgcgtcaaggccagcagcgactgggtcatgaacagcatgatgaacggcaccgacagctacggcgtcaccaccggcttcggcgccacctcccaccggaggaccaaggagggcggcgcgctccagcgagagcttatccggtttcttaatgccggggcgttcggcaacggcgacgacggccacgtgctgccggccgcggcgacgcgggcagccatgctcgtccgcatcaacactctgctccaggggtactctggcatccggttcgagatcctcgagacgatcgccacgctgcttaacgccaacgtgacgccgtgcttgccgctccggggcacgatcaccgcgtccggcgacctcgtcccgctctcctacatcgcgggactcgtcaccggccgaccaaactctgtggcggtgacgcccgatggcaggaaggtggatgccgcggaggcgttcaagatcgccggcatccagcacggcttcttcgagctccagcccaaggaaggcctcgccatggtgaacggcacggccgtcggctccgggctcgcctcgatggtgctctttgaggcgaacgtccttggcgtgctcgcggaggtcctctccgcggtgttctgcgaggtcatgaacggcaagccggagtacaccgaccacctgacgcacaagcttaagcaccacccgggacagattgaggcagccgccattatggagcacatcttggaggggagctcctacatgatgctggcgaagaagctcggcgagctcgacccgctgatgaagcccaagcaagacaggtacgcgctccgcacgtcgccgcaatggctcggcccccagattgaggtcatccgtgccgccaccaagtcgatcgagcgcgagatcaactccgtcaacgacaacccgctcattgacgtctcccgtggcaaggcgctccacggcggcaacttccagggcacacccatcggcgtgtccatggacaacaccaggctcgccattgccgcgatcggtaagctcatgttcgcgcagttctctgagctcgtgaacgatttctacaacaacggcctgccgtccaacctgtccggtgggcgcaacccgagcttggactacggcttcaagggtgccgagatcgccatggcatcgtactgctctgagctccagttcttggccaaccctgtgaccaaccatgtccagagcgcggagcagcacaaccaagacgtcaactctctcggcctcatctcgtccaggaagacggccgaggccatcgacgtgctcaagctcatgtcctcgacgttcttgatcgcgctatgccaggccatcgacctgcgccacctcgaagagaacgtcaggagcgccgtcaagggctgcgtgacgacggtggcgaggaagaccctgagcaccagcgccaccggcgacctccacaaggcccggttctgcgagaaggacctgctccaggcgatcgaccgcgaggccgtgttcgcgtacgcggacgacccctgcagcgccaactacccgctgatgcagaagatgcgcgccgtcctcatcgagcacgcgctggccaacggcgaggcggagcgcaacgtcgacacctcggtgttcgccaaggtcgcgacgttcgaggaggagctccgcgtggcgctgcccagggaggtggaggctgcccgtgcggccgtggagaacggcaccgccgcaaaggcgaacaggatcaccgagtgcaggtcgtacccgctctaccggttcgtccgcgaggagctcgggacagagtacttgaccggggagaagacgcggtcgcccggcgaggaggtgaacaaggtgttcgtcgccatgaaccagggcaagcacatcgacgcactgcctcgagtgcctcaaggagtggaacggcgagcctctgcccatctgctgattgctgaacagaggaccgacgagaagatagcaaaatattag

SEQ ID NO: 2816 - DNA, 690 bp, Oryza sativa; identical to SEQ ID NO: 2718

SEQ ID NO: 2817 - DNA, 1218 bp, Oryza sativa
atggcacgcttgccttctcatcgtctcgcggctctcctcctcctcctcctcgtcgtggtctcgccgtgtcacgcggcggcggcggcggcggcggacggtgggcagaggccgactaggccgaaagccgtggcgatgccggtggtcagggacggcgcgacgaggcagtacgtggcgacgttccagcagcgaacgccgcgggtggcggtgaaggccgtggtggacctctcgggcggcgccacgctctgggtggactgcgacgccgccgccgggtacgcgtcgtcctcgtacgccggcgtgccatgcgggtccaagccctgccgcctcgtggagagcccctcctgcagctacatcgccagctgcctgggctcgccgccgtctccggcgtgcctcaaccgcacctgcaccgggcacgccgagaacacggtcacgagctccgtcggcagaggcaacgtcgtcaccgacgtgctgtcgctgcccaccaccttcccctcggccccggtccggcaagggccgctcgccaccgcgccggcgttcctgttcacctgcgggcccacgtccctgacccaaggcctcgccgccggcgccgctggcatggcgtccctcagccgcgcccgcctcgcgctccccgcgcagctggctggcaccttccgcttctcccgcaagttcgcgctctgcctcccttcggtcgacgccggcgtcgtcgtcttcggcgacgcgcgctacgtgttcgacggcatggaccactccaactcgctgctctacacgccgctcatcaccaggacgacggacaggtcgagcgaatacttcatcagcctgaagcgcgtcgtggtggacgaccgcgccgtgccgctgaacgcgacgctgctcgacgtcggcaccaagctgagcacggtctcgccctacaccgtgctggagacctccatccacgaggcggtcacgcgcgcgttcgcggcgtcgatggccacggcggggatcccgcgcgtcccggccgtggcgccgttcgagctgtgctacgacgggagcaaggtggagagcagcgccatcacaggggagccggccgtgccggtggtgttcgagctgcacgtgcagagcgaggtgaggtcgaaggtggcgrccgtggatggtgtcgggggcgaacctgatggcgcgcgccgacggcggggcgctctgcctcgccgtggtggacggcggagcggacgccggaggcgccggtggtga

SEQ ID NO: 2818 - DNA, 2505 bp, Oryza sativa
atgccccaccaccgccacctcactccgtctccctcccacgaggagcacgagaccccaaacccctcgctaacccctcctccaatgcagctcgccgccctcgcctccgacgagcccccgccgccgccgccggagcaatccccccggcggatcgtggtcgcccacaggctccccctgaacgcgacgccggaccccggatcccccttcggcttcgccttctccctcagcgccgacgcccacgcgctccagctctcgcacggcctcggcctcgcccacgtcgtcttcgtcggcaccctccccgcggaggccgcccgcgcgctgcggcgctccgacgagctcgaccgccacctcctcgggtgcttctcctgcctcccggtgttcctcccgccgcgcgcccacgacgagttctacgccgggttctgcaagcactacctgtggccgcgcctccactacctgctcccgmacgcgccggcggccaacggctacctccacttcgacgccgggctgtaccgctcctacgcgtcggcgaacaggagcttcgccgcgcgcgtcgtcgaggtgctctccccggacgacggcgacctcgtgttcgtccacgactaccacctctggctcctcccttccttcctccgccgcggctgcccgcgctgccgcgtcgggtttttcctccactcgccgttcccctccgccgaggtgttccgatccatccccgtccgggaggatctcctccgcgccctcctcaacgccgatctcgtcggcttccacacctacgactacgcgcgtcacttcctctccgcgtgctctcgcctcctcggcctcgcctacacctcccggcacggccgcgtcggcatcaactaccatggcaggacggtgctgatcaagttcctctccgtcggcgtcgacatgggccttctccgcaccgccatggcttcgccggaggccgccgccaagttcagggagatcactgaggtggagtacaagggccgcgtactcatggtgggcgtggacgacgtcgatatcttcaagggcgtgaggctgaagctcctggccatggagagtttgctcgagacgtacccggcgttgcgcggcagggtggtgctcgtccagatccacaaccccacgcgctgcggcggccgcgacgtggagcgcgtccgcggcgagacggccaagatacaggcgcgcatcaacgcgcggttcggcggtccggggtaccagccggtcgtcgtcgtcgaccgcgccgtccccatggccgagaaggtggcgtactacgccgccgccgagtgctgcgtcgtcagcgccgtccgcgacgggctcaaccgcatcccgtacttctacacggtgtgccgggaggagggccccgtcgacgcgaagggcgccgccggcggccagccgcggcacagcgccatcgttctctccgagttcgtcgggtgctcgccgtcgctgagcggcgcgatccgcgtgaacccctggaacatcgaggccatggcggaggccatgcacggcgcgctcaccatgaacgtcgccgagaagcaggcgaggcacgtgaagcactacacgtacctcaagctgcacgacgtgatccgsgccgccgccgccgcagccgccggcggmggmggcggcaggctgatcctcctcgactacgacggcacgctggagcccaccggcgcgttcgacaacgcgcccagcgacgcggtgatcgtcatcctcgacgagctttgctccgaccctaacaacgtcgtcttcatcgtcagcggccggagcaaggacgacctcgaacgctggctcgcgccatgcgccaacctcggcatcgccgcggagcacggctacttcattaggtggagcagggacgcgccatgggagaccatggcgagcaagcagctggcggcggccatggagtggaaggcggcggccaagaacgtgatgaggcactacgcggaggcgacggacgggtcgtacatcgaggcgaaggagacggggatggtgtggcgctacgaggacgccgacccgaggctggcgccattgcaggccaaggagctcctcgaccacctcgccaccgtgctcgccagcgagcccgtcgccgtgcgcagcggctacaagatcgtcgaggtgatccctcagggcgtgagcaagggcgtcgcggcggagtgcatcgtgtcggccatggcggcgcgccgcggtggcgcgctggggttcgtcctgtgcgtcggggacgaccgctccgacgaggacatgttcggggctctcgcgagcctctgcggcggcggcaagaacggcggtgcttcgtcttccaccaccaccaccaccgcgctccttgcggcggcgcaggtgtttgcgtgcacggtggggaacaagccgagcatggcgagctactacctcaacgacaaggaggaggtcgtcgacatgctccatggcctggccttctcgtcgccgtcgtcccggctccgcgccgcggcggctccccggcggccggcggatttcgatatcaagtccctcctccggtgtgagtaa

SEQ ID NO: 2819 - DNA, 996 bp, Oryza sativa
atggccgcctccgcccgccgcgcgtcccagctgctgggatccgcggcctcccgcctcctccacgcgcggggcttcgcggcggcggccgcggccgcgccgtcgccggcggtgttcgtggacaagagcacccgcgtgatctgccagggcatcaccgggaagaacggcaccttccacaccgagcaggccatcgagtacggcaccaccatggtaggtggggttacccctaagaaaggtggaaccgagcacctaggccttccggtgttcaactctgtggcagaagctaaggctgagacaaaggcgaatgcatctgttatatatgttccaccaccatttgctgctgctgcaataatggaagcgatggaggccgaacttgaccttgttgtctgcattaccgaagggatacctcagcatgacatggtgaaagtgaaggctgctctgaacaagcaatcaaaaactcggttgattggaccaaattgccctggtatcattaagccgggtgaatgtaaaattggaatcatgccaggttacatccacaagccaggtcgtgttgggatagtatctcgctctggtaccttgacatatgaagcggtgtttcaaacaacagccgtaggcttggggcagtcaacgtgtgttggcattggtggtgatcccttcaatggcacgaattttgttgattgccttgaaaagtttgttgatgatcctcagacagaaggtattgttctcatcggagaaattggaggtactgctgargargatkctgcagccttcattcaggagagcaaaacacaaaagcctgttgttgcattcatagctggactcactgctccacctgggcgtcgcatgggtcatgctggagcaattgtgtcagggggcaagggtacggcacaagacaaaatcaaggctctcagagaggctggggttactgttgttgagtcaccagcgaagattggttcaactatgttcgaaattttcaagcaacgcggaatgttagaatag

SEQ ID NO: 2820 - DNA, 1896 bp, Oryza sativa
atggactcggtgccggccgccggagtcggcgtcggcggcggcggcgcgggcgcgggctacccggagtccacggagtcatccccacgcagccggggcggcgactcgtgggacgagcccttcccttcctccgccgcggcggcggccgcggctgccgggggagggaggctccgcctcatgtgcagcttcggcgggcggatcgtgccgcgccccacggacaagtcgctgtgctacctcggcggggagacccggatcgtggccgtcgagcggaacgcctcgctggccgacgtccacgcgcggctctcccgctcgctcctcggcggccagccgtttactctcaagtaccagctccccaacgaggacctcgactcgctcatctcggtctccaccgacgaggacctcgataacctcgtcgacgagtacgaccgcatcgccgccacctcctccggcggcggctcctcccgcacgtcgcggatccgcctcttcctcttcccggccaagcccgagtcatcctcctccctcggctccctcctcgacgactcctccaagtccgagtcatggttcgtcgacgccctcaacagcgccatctccggctccctcgacggcatcccgcgcgggatctccaccgactccgcctcagtcaactgcctcctcggcctcgaggacgactcctccacgcactcccgcggcggcccgcctaactcttctcccgccgaggaacagcgcgccaaccagcagaagctcgccgcggccgcggccgttgctgcggcgaggcacccgcacgacgtgcagtccgtgccggactcgccgatgattgacaagaactcctcgttcggatcaacgtcctctgcgccatcgctgtcgaatctaccgccgatacgggtgcggcccgaggatcgcccgccggatagccgactcgccccgcaggttcccgttgaggatcacttcgcccagatggggatctccgatcagccggtgcagcctgtaattgggggatacatgcagccgccgccacaggtgccgatccccaacatggctgtccccagcatctccccctcggatgcgtccagccgagtgttctccgacgatgacaagtccgatcacggcggcggcggaggtcggaagccgcagccacccaagccggaggttccacctgtcgctgaccccaccaacagagccatgtactacaacgatagatcgcctcctgctgaattgaagcgtgacatgccgatgcatgcgcgcaccgcagcagcaaccccaccaccacagcagcaacagccagtcccacagcaatatgtcactgcacaaaatcagcatttcattcacaatccagctactggcacattcatcccaatccaatcctattaccaccatccggtccctcagcaagcaccacagccgcccatgccgcagcctgtgccacagccacaacaatcacacgctttcgacccaaatactggcatgtattacattcccatgcgcacgaatgcgcctcaggcatatagcatgcctcctggtgccgctgctgtgccgcctcccacccttgttgacactacaccaaaaccaaccgtgccaattcctcagatggccgtgaagcagcctgaactgcagcaacctggtttgtaccgaactaccgcagcacctacccctgtaccagcgtctaatgctcctgcgtatgctgggatgggctaccaccatgttattcaaacacaccatcatccagcgccacagcctgcagcgactgtggcaggcaattttggatatgactatggtgatcccacgcgagcacaggtcttctactcgcaggcagcggcaccaccaacattgccacctcagtatcagcccatgggctcgcccgatgctggccaggctgacctgaaacaggcccgggcttcatag

SEQ ID NO: 2821 - DNA, 1278 bp, Oryza sativa
atgggaagtcgcagcggcggccgccaccgactcttcctccgattcatcgccctctggtcgctgctcctcatcgccgccggggaggtcatcttcgaggagcgcttcgaagatggttgggagtcccgctgggtgaagtctgattggaaaaggagcgaagggaaagctggaacgttcaaacacacggcaggaagatattctggagatcctgatgacaaaggtatacagacaacgttggacgccaggcattttgctatatcggccaagatccccgaattcagtaacaagggccgtacattggtactccagtattccataaagtttgagcaggatattgaatgtggtggtggatatattaaacttatgtctggttatgtcaaccagaagaaatttagtggagacactccatacagcttaatgtttgggccagatatatgcggaactcaaacgaagaagctccatcttatactttcttatcaagggcagaactaccctatcaagaaagatctgcaatgtgaaacagacaagttgacgcatgtttacacattcatactaaggcctgatgcgtcctatagcatactagttgataaccgtgaaagagaatcagggagcatgtacactgactgggacatcctccctcctcgcaagattaaggatgttcatgccaaaaagcctaaggattgggatgacagagaatatattgaggatccagatgcagttaaaccagagggctatgattctattccaaaggagattcctgatccaaaagacaaaaagcctgacacgtgggatgatgatgatgatggcatatggaagcctagaatgataccaaatccagcatacaagggaccatggaagcgcaagaaaatcaagaatcctaactacaagggtaaatggaagatcccatggattgataatccagagtttgaggatgatccagacctatatgtgctgaaacccttgaaatatattggaattgaggtttggcaggtaaaggctggttcggtttttgacaacatcctcatttgtgacgatccggaatatgcaagaaaagctgctgaggaaacatggggtgcaaacagggaggccgaaaaagaggcttttgaagaagctgagaaggagaggaaagctagagaggataaggaagctgaacgagcaagggaggaaggagagcgacggaggagagagaggggtgatcggcaccgtggcagggattacaaggacagatacaaaagacgtcatagggatcactgggatgatgactaccatgatgagctttga

SEQ ID NO: 2822 - DNA, 3222 bp, Oryza sativa
atggacggtgcgaaatcggggaagcaatgccatgtctgccagatctgcggcgacggcgtgggcacggcggcggacggcgagctcttcaccgcctgcgacgtctgcgggttcccggtgtgccggccatgctacgagtacgagcgcaaggacggcagccaggcgtgcccgcagtgcaagaccaagtacaagcgccacaaggggagcccgccgatacttggggatgaaagcgatgatgttgatgcggatgatgctagtgatgtgaactatccaacatccggcaaccaggaccataagcacaagattgccgagaggatgctcacctggcgcatgaactctgggaggaatgatgatattgtccattctaagtatgatagtggtgagattggtcatcccaagtatgacagtggtgaaatccctcgcatatatatcccatcgctcactcacagccagatctcaggtgaaattcctggagcgtcccctgatcatatgatgtctcccgttgggaacattggcagacgtgggcatccatttccctatgtgaaccattcaccaaacccatcaagggagttttctggtagccttggcaatgttgcatggaaagagagagtagatggctggaaaatgaaggataaaggtgcaattcccatggctaatggtactagcattgctccttcagaaggtcgtggggttggtgacattgatgcatctactgactataacatggaggacgccttactgaatgatgaaacacgccaacctctatcgagaaaagtgccaatttcgtcatccagaataaatccgtacaggatggttattgtgctccgattgattgtcctatgtatattcttgcactaccgtatcacaaatcctgtgcgtaatgcatacccgctatggttgctctctgtcatatgtgagatttggtttgctctatcctggattctggatcagttccccaagtggtccccaatcaaccgtgaaacttacctggataggctggctttaaggtatgaccgggaaggtgaaccatctcaattggctcctgttgacatttttgtcagtactgtggatcctatgaaagaacctcctcttgtcactgccaatactgtgctctccatccttgctgtggattaccctgttgataaggtatcttgctatgtgtctgatgatggagctgcaatgttaacatttgatgcgcttgctgagacttcagaatttgctagaaaatgggtaccgttctgtaaaaagtacagcatagaacccagagctccagagtggtactttgcacagaaaattgattacttgaaagacaaagttcaggcttcttttgttaaagatcgtcgtgccatgaagagggaatatgaagaatttaaagttcgtgttaatgctctcgtcgccaaggcacagaaagttcctgaggaaggatggattatgcaagatggcacaccttggcctggtaacaataccagagaccatcctggaatgattcaggttttccttggtcatagtggaggccttgataccgaaggcaatgagcttcctcgtttagtctatgtgtctcgtgagaaacgtcctggattccaacaccataaaaaggctggtgctatgaatgcacttgttcgtgtatcagctgtccttactaatggacaatacttgttgaatcttgactgtgatcactacatcaacaatagcaaagctctccgagaggctatgtgcttccttatggatccaaacctaggaaggcgtgtctgttatgtccaattccctcagaggtttgacggtatcgatagaaatgatcgatatgcaaacaggaacaccgtgtttttcgatattaatttgagaggtctcgatggtctccaaggaccagtttatgtgggaaccggttgtgtgttcaacagaacagctctttatggttatgaaccccccattaagcagaagaggccaggttacttctcttcgctttgtgggggacgaaagaagacaaaaaagtcgaaggagaagagcacggaaaagaaaaagtcacacaaacatgtggacagttctgtgccagtttttaatcttgaagatatagaggaagggattgaaggttctggatttgatgatgagaaatcactactgatgtctcaaatgagcttagagaaaagatttggtcaatctagtgtttttgtagcctccactctgatggaatatggtggtgttcctcaatccgcaactccagaatctcttctgaaagaggccatacatgttatcagctgtggctatgaagacaaaagtgactggggaactgagattggatggatctatggttctgttacagaagatattctcactggattcaagatgcatgcacgtggctggcggtcaatctactgcatgcctaagcgaccagcattcaaggggtctgccccaattaatctttcggatcgtctgaaccaggtgcttcggtgggctcttggttctgtggaaattctttttagcaggcattgtcccatatggtatgggtacggaggacggcttaagttcctggagagatttgcttacatcaacaccactatttatccactcacatcgattccactcctcttgtactgcatattgccagctatctgtcttctcactgggaagttcatcataccagagattagcaactttgcgagtatttggtttatctctctctttctgtcaatctttgctactggtatccttgagatgaggtggagtggtgttggcatcgatgaatggtggaggaatgagcagttttgggttattggaggtatttccgctcatctatttgcggtcttccagggtctgctgaaggtgcttgctggaattgataccagcttcactgtcacctcaaaggcctctgatgaagaaggcgatttcgctgagctctacatgttcaagtggacaacccttctgatcccaccgaccactattttgatcatcaacctggtcggtgttgttgctggtatctcctacgctatcaacagtggctaccagtcatggggtccgctctttgggaagctcttctttgccttctgggtgattgtccacctgtaccccttccttaagggtctcatgggtcggcagaaccgtacaccgaccattgttgttgtttgggccatcctccttgcatcgatcttctccttgctgtgggttcgtatcgatccattcaccacccgtgtcacaggccctgatacccaaaaatgtggtatcaactgctag

SEQ ID NO: 2823 - DNA, 2115 bp, Oryza sativa
atggccgtgttcatcatcgccaataatcctttggcgcgctatgccgtcttgtttgctgctgctgtctttcttgtcgccgccgcgcaggcacagcctaccacgcccccgccgccgccgccgccggagatggactgcaacggtatactcctcacctacaacctcgatcgccgtgacaagatcaggccattcgtcgccgcacccgaagccgacgcccagccctactccttccgcgccaccgccaccgtcctcaactccggcacccgcgctctccgctcctggacgctgcgcctcaccttccaccaccgcgaaatcctcgtccaactcgatggcgccgtgctcacctccggcgccgacctgccctacaacaccacggcagacaacgccacctccttctccggctacccgcagacggacctcctcaccccgatcgccaccgccggcgacctcaccaagatacaggccacgctcaacctggtcggcacgctgttcgcggggccaccgccgtacgtcccgctcccttccgcgctctcgctcgccgacccgtcctacacctgcccgccggccatcaacgtctccacgtcgaccctctcaacctgctgcatcctcacgccggaggccgcggcgaacgcgagcgccggcgacttggacgcgggcagggcgacgtcgtacctcccgcgcggcgcgggcgacctggtgatcacctacgacgtgctccaggcgcacgagaccacgtacctggcgcaggtgaccctggagaacgacgcgctgctgggccgcctcgacggctgggagctgtcgtgggagtggctccgcggcgagttcatcagctccatgcgaggagcctacccgcgccaggtcggcgccaccgactgcgtctacggcgcgcagggagccttctacaagggcctcgacttctccaaggtgctcaactgcgaccgcaagccggccgttcttgacctgccgccgtcgcgccgcggcgacgaggacatcggagggatcgaccactgctgccggaacggcaccatgctgcccaagtccgtggacgcggcgcagtccaagtcggcgttccagatggaggtgtacaagatgccgcctgacctcaaccggaccaagctgtacgctccggccaacttcagggtgtccggcgcgtcgccgctgaatccggagtacgcgtgcgggcagccggtgcgggtgaccccaacggagctccctgacccgagcgggctcgcgtcgacgacgctggcgctggcgacatggcaggtggtgtgcaacatgacggcggcgccgccgtccaagccgcccagctgctgcgtgaccttctccgcgttctacaacgagtcggtgatcccttgcagaacctgcgcgtgcggctgcccggcgagccccgcggcggcctgcagcacgacggcgccgtcgatgctcctgccgccgtacgcgctgctgatgccgttcgagaggcgggggagggaggcggtgtggtgggccggcgagaagcggctgggggtgccgaggccgatgccctgcggcgacagctgcggcgtgagcatcaactggcacgtggcgacggactacgccggcgggtggagcgcgcgggcgacgctgttcaactgggagggcgcggacgtggcggagtggttcttggcggtggcgatggagaagcaggcgtacgacgggttcgagcaggcgttcacgttcaacgccacggcgatggggaacggcaccaccatgatcttgatgaaggggagggaagggttccagtacctcaagagggagagcaacatgagcggcgtcgactaccccgttgccgggaagcagcagtcggtgctgctgttcaccaaaaagaggagccgcggcggcatcgacgtggtcggcggctacgggttcccgacgaaggattccgagcagtgcccatcgtcgttgtcttgtcctattgtggactactcttcttgtattcatgtcgtccattctactggtgttgtcgctgctgtaaaaacgttcaacgcgtcgctgggagaggagacaggaggcgctgctaggatggtttgtgatatgatgtatggcggcggtgggggtggagatgagaggagggctagggttgtgatttatcgctattaa

SEQ ID NO: 2824 - DNA, 825 bp, Oryza sativa
atggcttcctccttcgccgccgtcttcttcagcagcgccttcgctgcctgcttcgctgaggtgtgcaccattcctctcgacacagccaaagtgcggcttcagctgcaaaagaaagcagccctagctacaggcggaggaggagggaccactggaggaatgctgggcacaataatgtgcatcgcaagggaggaaggggtggccgcgctttggaacggcatcatccctggccttcaccgccagtgcgtctatggcggactccgcatcgccttgtatgagcctgtcagtgtcatagcaattgttgtggcaaatccaactgatcttgtcaaagtgagattgcaagctgatggaaagcccaccactgtcaagaggcactattctggagccctcaatgcgtatgctaccataatcagacaggaaggtattggagctttgtggactggcctcggtccaaacatagcacgcaatgctataattaatgctaccgagttggccagctacgaccaactcaaacagatgtttctaaaacttcctgggtttactgataacgtttttacccatcttttagctggacttggtgctggattttttgctgtttgcattggctctccagtggatgtggtgaaatcaagaatgatgggtgacgcaacgtacaagagtacactagactgttttgcaaagacattaaagaatgatggacttcctgctttttataaagggttcattgcaaacttttgccgcattgggtcatggaatgtgataatgtttttaacactggagcaggggaaaaatggaaagaaaaaggaagtcctagtctcatcgctatag

SEQ ID NO: 2825 - DNA, 450 bp, Oryza sativa
atggcggaccagctcaccgacgaccagatcgccgagttcaaggaggccttcagcctcttcgacaaggacggcgatggttgcatcacaaccaaggagctgggaaccgtgatgcgttcgctggggcagaacccaacggaggccgagctccaggacatgatcaacgaggtcgacgcggacggcaacggcaccatcgacttcccggagttcctcaacctgatggcacgcaagatgaaggacaccgactcggaggaggagctcaaggaggcgttcagggtgttcgacaaagaccagaacggcttcatctccgccgccgagctccgccacgtcatgaccaacctcggcgagaagctgaccgacgaggaggtcgacgagatgatccgcgaagccgacgtcgacggtgacggccagatcaactacgaggagttcgtcaaggtcatgatggccaagtga

SEQ ID NO: 2826 - DNA, 1010 bp, Oryza sativa
atgagctccgagtctgaggcggcgcccgggaccgggaagctggtgtgcgtcaccggcgcgtcggggtacatcgcgtcgtggctcgtcaggctgctcctcgcccgcggctacacggtccgcgccaccatccgggacacctctgacccaaagaaaacactacacctgcgtgccctggatggagccaacgaaagactccatttgttcgaagcaaatctgctggaagagggctctttcgatgctgcggtcaatggttgtgattgtgttttccatacggcttctcccttttaccacaatgttaaagatcctaaggctgagttacttgaccctgcagtcaaaggaacccttaatgttctaggctcctgcaagaaagcttccattagaagagttatcgtgacatcatccatggctgctgttgcctacaatgggaaaccaagaactcctgatgtagttgttgatgagacatggttttcagttccagagatttgtgaaaagcatcagcaatggtatgttctgtccaagaccctagcagaggaggctgcttggaagttttcaaaagataatggatttgaaatagttacggtgaacccagcaatggtcattggtcccctgctgcagccttcactgaatactagtgctgaagcaattctgaagctaatcaatggatcatcctcgacatatcctaatttcagctttggctggataaacgttaaggatgttgccctggcacatatccttgcatatgaagttccttcagcaaatggaagatattgcatggttgaaagagttgcgcactactcagagctcgtccaaatcattcgtgagatgtatcccaatattcctctgccagacaagtgtgcagatgacaagccatcagtgccaatctaccaggtatcaaaggaaaagataaaaagcttgggcctggaactgactcccctgcacacgagcatcaaggagaccatcgagagcttgaaagagaaaggatttgttacttttgattcaagcaacctgta

SEQ ID NO: 2827 - DNA, 1053 bp, Oryza sativa
atggccgccggcatcgccgtcaacgcgctcggccacgccgaccccgactgggtcgccgccgtctccgcccaggccgccaccctcgtccacgccagcaacgtccagtacaccgtcccccaggccagtctcgaacgcgtcacgcccaccgctcaccacgtgttcgacgcattgcccaaccctctccgcctcgtggaggcctccttcgcggaccgcgtcttcttcgccaacaccggcacggaggccaacgaggccgccatcaagttcgccaggaagtaccagagggtttcgcgccccgacggggacgcgcccaccgagttcatgtcgttcaccaactgcttccatggcaggacaatggggtcgctcgcgctcaccagcaaggtgcagtaccgggagccgttcgcgccggtgatgcccggcgcgacgttcgccgagtacgggaacctagaggaggccaagaaggtgattcagtccggcaaaattgctgccgtgttcgtcgagcccatgcagggcgagggtgggatccatagtgccaccaaggagttcttgcaggggctgcgggatgcttgcgatgaggctggagctctcttggtttttgatgaggtgcaatgtggtctgggacgcactggttacctctgggcgtatgaagcctatggagtagtacctgacattatgaccttggcaaagccattggcgggtggtctccccatcggtgtagtcttggtcaccgagaaggttgcttcagcgataaactacggcgaccatggtaccacattcgggggaggccctcttgtttgccaggctgcattgaccacattggacaagatccagaaacctggcttcctagcagaggtggccaagaaaggagagaacttcaagcagcttctcagtaccaagctgagtggaaacgcccatgtgaaagagatccgggggatcggtctcatcgtcggcatcgagctcgatgttccagcgggtcctttggtcgatgcatgcttggaccgcggtgtcatagtgctgacagccgggaaaggcaatgttgtgaggcaatgttgctga

SEQ ID NO: 2828 - DNA, 1880 bp, Oryza sativa
atggcgttggcggcgaaggagaggaagctgagtaggcttgggagtaagggcagtggcggaggagggggaagtgggagtttcggggcgagggggcagcgggcgccggcggggacgcagcggcggctgttcgcggcgttcttcgcgttcctcttcgccggcgcggtgctcttcggcgccgcgcacgtcattggagcatccttccggcccgtgctcaagaccgcstggccgtcggccaccctgaacgccgtgtcgtcggagcgcggcgcgcagcaagccggcatggtcagcgtcgacgccgtgttgccttctgttcatatccagcacgcggttgccttgccggaccatgttctcctgatgctcagagatggctcattgctgccggcttcggggcaatttgagtgcctgtactcccctgtcaactcgtcgcagctgcgtcgccagcccttgtccgtcgctaccttgccggatggacccagcctcgtccattgtcccgccggaccatccagggtcgctgtgtccctctcactggcgcagtcggttccggtggcgccgttgcaatgggatcggctggtgtacactgcacttattgacagcaaggacaactccaccgttgtgtttgcaaaggggatgaacctccgtccgggtcgtctaggtgtgccatcacggtacgagtgtgtctttggccgagacttttcgaagccaaagcttgttgtcacctccccagtggtttctgctgctcaggagatattccggactaagggccggggaagctctacactcccctcaatcgcgyaaccggagccgcttcctcggtacaacaagcattggagacgaaaggcacactcaatgtgtgtctgcaccatgcttcgcaaccaagcacggttcctgcgggaatggatcatctatcactcacgtattggtgtgcagcggtggttcatctatgacaacaacagcgacgatggcattgaggaggtcctcaacaccatggattcatccaggtacaatgtgacacgctatttatggccatggatgaaatctcaggaggctggatttgcacattgtgcactcagggctcgagagagctgtgagtgggtggggttcattgacatagatgagttcctgcacttccctggcaaccaaacactacaagatgtcctccgaaattactctgtcaagccacggatcggtgagctcaggactgcatgccatagttttggtccatcaggccggactaagatcccaaagaaaggtgttacaacaggctacacctgccggctggctgcacctgagcgccataagtcaattgtcaggccagacgcattgaacccatccctcatcaatgtggtgcaccacttccatctgaaggaagggatgaaatatgtgaacattggtcagggtatgatgctgatcaaccactacaaataccaagtctgggaggtgttcaaggataagttctccggacgtgtcgcgacatatgttgctgattggcaggacgaggagaatgttggatcaagggacagggctcctgggcttgggaccaaaccggttgaaccagaggattggccgagacgtttctgtgaagtatatgataacggtttgaaagattttgttcagaaagttttcacagacccacacactggaaatcttccatgtgcctgttcagttgttcacctatctgacaatgcaaacaaaatcgttgtgaagaaggctacaaccgagttcagtaaccacgagctggttaactggccgtttgtgatgcagacaaggatggctattttcactaaagctggtggaaacgtatctgaagagactgcatcaacatccagtggacaacagtgcctgaatttctggcagagcaaaatcctccactttgcaccctg

SEQ ID NO: 2829 - DNA, 1269 bp, Oryza sativa
atggggaattgctggggcgccaagatcagctcggagagcccttgccgcagcgcctcctccccttctggggggacatccaagtatgctagcaactccagtgtgtctgcagcctcggtgccgccaacaccacggagcgaggatgagatcctggaggcagcaaatgtcaaggcctttgccttcaatgagctgaggactgccaccagaaacttccggccagacagtgtgcttggtgagggaggctttggatcagtcttcaaagggtggatcgatgagaagacgctcgcaccaactaagccaggcacagggatggtcattgctgtaaagaagttgaatcaggaaggccaccagggtcacagggaatggctggctgaagtgaattatcttggacagttgtcacacccatatcttgtaaggctcgttgggtactgcgtcgaagatgagcagcgtcttcttgtttatgagttcatgccacgtggtagcttggaaaatcatcttttcaggaggagtacgcattttcagccgctctcctggaaccttcggatgaaaattgcccttggagcagcaaaagggctcgcatttctccacagtgacaaggttaaagtcatctaccgtgatttcaagacctctaatgtccttttggatgcggtacggagtcctcagaactattatcctttgtgttcacaagatagcttaactggtgatctgatagacagactgtattttcagaactatgatgcaaagctctctgattttgggctggcaaaggatggaccgactggtgacaagagccatgtctccacaagggtgatggggacttatggatatgctgcaccagaataccttgcaacaggccatctgaccaccaagagcgacgtctatagctttggagttgtgctgctagagatgctatcaggacgacgagcactggacaagaaccgcccaaccggggagcacaatctggtggagtgggctaggccatacctgatgagcaagcggcgcatcttccgcatcctggacgcccggttgggcgggcagtactcccttgccaaggcccagaaggctgcaacactggcacttcaatgcatctctgtggaggccaagaacaggcctaacatggagcaggttgttgctgtattagaacagctccaggattccaaggagacaggggcaaatcctcagctgcagaagaagtccagcagcaagaacgcaggcagcaatggatcgaaaccgtcatcgaaggggaagcccgcaaatgcgaggctggtttaa

SEQ ID NO: 2830 - DNA, 2163 bp, Oryza sativa
atggtgattgagcttccctttgacaatcaatacaccaccacagaaacagaacagccacatgatgggtcttcctgttcttcccagcagcaactcagcttgtacaactacagccccagcgatccgcagctgttttcccagccaaccacaggatcaagaacgtatttgtcaggtgcagtcaccatccctgggatttgcaatgacaaaagtaatcttggacaacaacaatttcagattgatgcagcgcttagtctagggtaccagaggatcagatcaagcgatgccctttgctacataagtcgggtgctgatggaggacgtcgatgagagggttgacctgcaccaaggggaggctgctcttcaggctgcagagaaacccttctatgatattcttggccagatacgcctgatgagagcagtagcagaaacaattatcataataggtaccatagtagccattccagttttcaacatgttaacagccccttggccaaccccattgagtccatatagctatggcaggagtctttttcttccaaaccaacacttggtaagcactgcctggacttctacctttggcatccctggcttccaaattagaagaggtgccgaggaggcaaagagatttgttccaattattgataagttggtgatcgatttggacactgaccgggggctctccatttcaaaaatgaccacgaaggcaaaagtaggagacaagaaaagatatgcaatctttgagttgacagatcaaaggcacagcccttacaccacagacttggatatcttggaagggaggaacagcaaacgctatgccatcacttactgtgaaataatccggaatgatatgtttgacagggttctgctctgctatggtgtggagaatttcgccgaagcatcaaatcttcgaaaaataatgacgaagcaagcacgcaagaattcactgaatggacaaaccagaggatctgcacaacggaaattacggggtatgaaacaactcaagaaggatgtagttgatctcaggaatctcctcatccactgtgcacaagcagtagcagctgacgaccgcatttcggccagtgaactagtgaagaagataagacagcattcttcaccagatggagatagtaaccagaggttggcattttacttggtggatggtctggaggcgcgcttggctgggatcgggagccaggtgtatcgcaagctcatggcaagccgaaccagtgctgagagtttgttgaaggcttacagcctctacctttcagcttgccctttcgaaagggcgtcattcgcctatgcaaaccaaactattcttgatgcatcaaaggggcagcaaccaagaaaggtgcacattgttcatttcggcatttgcactggctttcagtggccatcattgattcagcggcttgcaaatgaagaagggggtccacccaagcttaggatcacaggtatagatatgccccagccaggtttccacccctgtgaaataattgaggagacagggaagcggttggctgattatgcaaacttgttcaaggtgccttttcaatatcagggcattgcttcacggtgggaaaccgtacaaattgaggacctgaacattgacaaggatgaagtgctcatagtcaactgtatgttcaggatgaagaatcttggtgatgagatggtatctatgaatagcgcaagggatagggtgctgaaaataatgaggatgatgaacccaagggtttttattctcggtattgtcaatggatcatacagctctcccttcttcatcacacgtttcaaagaggttctgttccattactcttcattgtttgacatgattgatgcaaatgttccacgggataacgaggcgaggaagatgatagaggggggactctttgggcaggaagcacttaacatcatagcatgcgagggtgcagaaaggactgagaggccagaaagttacaagcagtggcaagcacggtgcctcaaggctgggttcaagcagctccctgtcgatccagccaccttgaaagagataataaatatgaagaaagggatttaccatgaggactttgtagctgatgaagatggtgcctggctactacaaggatggaaagggagagtaatttatgccatatccacatggaagccaaatgaatcatatttggatcagtaa

SEQ ID NO: 2831 - DNA, 1890 bp, Oryza sativa
atggacagccctgagtattgtcagaccaactcaaacataactcttgattatataaacagaatattgatggaggaggatattgatgaaaagatcagcataaaaaaaggacaggatgcacttcaggcgacagagaagcccttctatgatattcttgggaaggcatacccatcttcatctaaggagacagcaattaacggtgacagtcaagcagattaccctgataatggtagcagcagttatcatgaacaggcatgtagtggtagctttgttagtgatctccttgggtcacaggatgcgcattcgataaccaccgactggtcttctgaatttgaccgtttggctttgcaattcaggagaggtgttgaggaagcaaagaggttcattccaaatattgaaaagttggtggatgatccagagaagaatggtctttatgcttgcaaacaaacaacagagacaacagaacagaagggcaagcatgagaacaaaataaggaatcatcctcatgatcctcatgttgagcacatagagttgatggaagcaaggaacagtaagcatatggccatctccactagtgaaacaatacgggatgaaatgtttgatagtattctgctctgcaataggcagctccctggtgaagttgctaaccttagaggaatgatggcaaaagaagcaagcgacaacccaaagaaatttcaaagcaaaggatatggaaaagggcaaaggaagccacacagtagtaagaagaaacagaaagaggcaatagatctcagtgttcttctcatccaatgtgcacaagcgatagcatctaacaaccatccctttgctagtgagctactgaggaaaataaggcatcacgctttgccagatggagatggttctcagaggctagcaaactgctttgcagatggcctcgaggctcgcttggctgggactgggagtcaaatgtacgaaaaactgatggcgaaacaaacgagcaccagagacatgctaaaggcctatcatctatattttgtagcatgcccttttgagatggtaacatactacttctccaacaaaaccatcattgatgcattggaggggaaaacaacattgcatatcgttgattttggcatcctcttcggctttcagtggccatgtctaattcagcgacttgcaaagcgagaaggtggcccccctaagcttcgtatcacaggtgtagatgtaccccagcctggttttcgccctcatgaaaggattgaggagactggaaagcggttggcagagtatgcaaatatgttcaacgtacctttccagtatcatggcattgcttcaagatgggaaactatctgcatcgaggatctcagtattgacaaggatgaggtactcataatcaactgcatgtcacgaatgagaaagctaggtgatgagacagaaaacattgatagtgcaagggatagggtactacacatgatgaagaggatgaacccgcaggttttcattcttggtgttgtgaatggattgtacagctccccattctttctgactagattcagagaggttttattccattactcatcactttttgatatgctcgacaacaatgttcctaggaaccatgaagcaaggatattggtagagaaggatctctttgggaatgatgcacttaatgctgtagcatgcgaaggtgcagaaaggattgagaggccagaaagctacaaacagtggcaaatgaggatcctcagggctgggttcaagcaacgtcctgttaatcaagccattctgaatagatcagtacattacaaggaattttatcatgaagactttgtaattgatgaagatagtggctggctgctgcagggatggaaggggaggataatacaggcactgtcaacatggaaagtggaaacctag

SEQ ID NO: 2832 - DNA, 930 bp, Oryza sativa
atggggtcgctggggcggcggccgtgggttggtgggttgacggcggcgatgatttttgctgttgctgtgtgcggtttctgcttcagtggggcgtcggcggcggcggcagcgccgacgttcggcgacaacttcgagatcaccggagccgaggatcacgtcaagacctccgccgacggccagacgtggtacctctacctcgacaacaagactggcgtcgggttccagacgaaggagaggtatctcttcgggtggttcagcatgaacctcaagctcgccggcaacgactccgccggcgtcgtcaccgcctactacatgtgctccgacgtggacgcggcgccgcagcgcgacgagctggacttcgagttcctggggaaccggacgggtgagccctacatcatccagaccaacgtgtaccgcagcggcgtcggcggccgggagatgcgccactcgctgtggttcgaccccaccgccgacttccactcctactccatcctctggaaccccaagcagatcgtgttcttcgtggacaaggtgccgatccgcgagtaccggaactcggacaagcccaacaccttcttcccgatcatgaagccgatgtacgtgttctccagcatctggaacgccgacgactgggcgacgcgcggcgggctggagaagacggactggaccaaggcgccgttcatctcctcctaccgcgacttcaccgccgacgcgtgctcctggggcacggcggcggcgagcccgcccagctgcgcggcgtccaccggcaacagctggtgggaccagccgccggcgtgggcgctcgacgccggccagcgcgaggactccgcctgggtggcgaggaacctcgtcatctacgactactgcgacgaccgcaagcggttcccctccccgccggaggaatgcttgctccggacgaccagctcgtga

SEQ ID NO: 2833 - DNA, 2160 bp, Oryza sativa
atgcttctgctccatccgcgtccgctccccgctccagctccggcgaggcgattcgagcccgccgtccgggtcccaccgcctcgccgtcgtcgtcgtcgtcggcggcctcctcttcctccgctcgcctccgcctccgcctccgccgcgatctacagcgttggtagctccgacgaggacgcgttcaccaggtgctccgggtacctcttcgaggagggcgcggcgaccgagggggagctccccacggcttacgatctcgccggcatcggcgccgtctaccgccgcaggccgctcctcgtggtccggcgggcactgcagattggcacctccttcggccgatggtttacgctgcgatacctcgaccgcgtcaacgagcgctccgacgacatgttcgagatcagggctgctcaactcaggcgaatactattggaacttggcccgacatttgtgaagattgcacaggcagtttcatcgcgaccggatgtgattccacctgcgtaccttgacgaactttcactacttcaagaccgtatagcaccattttcaactgaggttgcttttaacattatagaaacagagcttgggttgccactggacatgattttctcagagatatcaccagagcctgttgctgctgcatctcttgggcaggtttatcaggccaggcttcgttccaacaggaaggttgttgctgtcaaagtacaaagacctggagttcaagcagcaatttccttggatatctacatcttgagattccttgctggtgtcgctaggaaggctggcaagctgaacacagatcttcaggctgtactagatgaatgggcatcaagtttatttaggctagttagctacctgattttaaaaataaggttcatattcttagagctacacattgaatacagggaattatatgggaaatttagagatgtactagttccagaaatgtatctggaacaaacaagaagacgagtccttatcatggaatgggttgagggggaaaaactgtcagaagtcagagaccaatatttggttgaggtcggagtatactgctcactttctcagcttttggaatatggattttaccatgcagatccacatcctggaaatcttttgcgtacagttgatgggaagctagcgtatttagatttcggaatgatgggagaattccgacaagaacttcgtgatggatttattgaagcctgtcttcaccttgttaaccgtgattttgatggtttagcaaaagattttgttactctcggtttacttcctccaactgctcagaaagatgaagtgacaaaagcattgacaggtgtatttcaaaatgctgttgacagaggggtgcaaaatataagctttggagatctgtcagggaatcttggtcgaactatgtataaattcaagttccagataccttcttacttctctcttgtaattcgaagccttgctgtcttggaaggcattgcaatcagcttcaatcccaactacaaagtcttgggcagttcatacccatggattgcaagaaaagttctcacagacagctcaccaaagctccgatcaactttgcagacgcttctttataaggatggcactttccagattgaccgtttggagtctttgctaactgagtcgcttcgagcaagaacagagcagtccctgaccagggatcaacaagaggaaactgatagttccaaatttgcaattaaacaagtcttgtcatttactcttactgaacagggtgccttcgtgaaggatttacttcttcaggagattgctaagggattagatgcacttggagctgctacattgagttctgcaacatctgctgcagcctccagattgccgtttgctgttccatccccatcaccctcactagacaatgaggatgccactaacttgagaaatttacatcgccttctcctacttttgtccaaggtccctcagaaggaggattcatctccaattccaggatacaatagcactgaggagaacgaaggtgatagtacagatgagatttctcttgtgttatatgaaatgagatctctaccagagttgttgccagtactttctgtcattcctgaggtaagaatggaaatacaagtaggatatggaaatacaagtaggatggaaatgtatatcaggatcgacgttgaatatgatctgtag

SEQ ID NO: 2834 - DNA, 3156 bp, Oryza sativa
atggatattattgacttgtgttcagacagtgaagagtacttcagcccgtactcagatacagaagacaatcttgattttgacgatcccaatgatggtgttaaccaggtggttttgcacaacacagcatttggcaataatagttcagaactactagtcgggctggatgacgataactggttaaacaacactcatgctttatcctctcatagacctgctgagaatagatcagacattattgaaagcagcagcggtgtcaacactgactgtcagaatagtgcttggcaatacaggactcttccacataccttcatgagcagcagttacaagtctcgtccactttctctaacaggaggtaacaatgttgaaagtacacaccccactgtgaagcctaacactgtgcactataatggaattgggttcccttcacctgctattgcaagtggctacaagccatatgttagttatggccagggtgtttcaattgatgatgatgacgatgatgtctatgaggttctgcatcaaccatttccgttcagtcattcgagtttaggtgacaagaagatcgaggaagaatccacttggaagtacaatggttttcaaacaagttctgcctatggaatcgagatgcctacatctgcaatgtcaacaggtggtgtctctgcatatggaggtctaaactcacataggatctttcctccatcagtgccatacaacaattctgttaacaattttggagtcaatggccttggcactcagagccacttaaatatagaaaagaggctttttggccgtgatgagagggtggtgtatgatgaagccctgaagcaaatcagtcaagaaacaacggaagaaaatttgcctgaaggtgttatgtcagtatcactccttaagcaccagagaatagcattagcttggatggtttccagggagaatagctcacattgttcaggtggaattttggcagacgatcagggtcttgggaagacaatatcaactattgcccttatacaaaaggagagggttgagcagtctaagttcatgtctgctgatgtgggcagcatgaaatctgtagctaaccttgatgaggatgatgaagtagtgatagtcatggacaagaagcaactgaagggtgaatctgtgaatatgctacaggattcaacactgtttccatcatcagaagcagcaagtgatgccgcagatctgaagccctgggctagtctaccggggtctgctgttgatagaatggtaaatgctgtcaaagttgaacccaagaagaaggctagagtgagaccatcgccttcgtcaactttgaggtctgctaatagatcaactgcgggaacactagtggtgtgtccagccagcgttcttagacagtgggctagtgagttggctgccaaggttactgaaagttctaaattgtctgttttggtttatcatggaggttcaaggactaaagatccaactgagttgacaaaatatgatgttgttgtcaccacatacactattgtagccaatgaggtacccaaacaaaactttgatgaggatatggaggaaaagaacagcgaaacatatgggttatgtccagcattttctattggcaataaaagaaagaaagacagcgaaccaaagaagaaaaagaaacccaaaaattcagatgctgaccttgatggtggaccacttgccagagtgcgatggttcagagttgtgcttgatgaagctcaaacaataaagaatcacaatactcaagtggctagagcctgttgtggactgagagcaaaacggagatggtgtttatcaggaactcctatacaaaatacaattgatgatctgtatagttatttccgtttcttgaagtatgaaccatattctgtgtatggttcctttcgctctatgataaaataccaaatttctagagatgcaactcgtggatataagaaactccaagctgtcttgaagatagttctgttgcggcgcacaaaagaaacactaatcgatggagaaccaatcataaaattgccaccaaaaacgattcagctgagcaaaatagacttctcaaaagaggagcgaactttctatatgatgcttgaagaaggttctagggaaaagttcaaggaatatgcttctgctgggacgataagagaaaattttgcaaacattcttgtattgctgctgcgacttcggcaggcttgtgaccatcctcttcttttgaagggaaaggaaaaagatttgattgatactggttctgtagaagtggcaaacaaacttcctaaggaaacagtgataaatttgcttggacagctggaaggagactatgcaatttgttccagatgcagtgacccacctgaggatgttgttgtagcaacatgtggtcatgttttctgttatcagtgtgtgcataagagcttaacaagtgatgagaatgtctgtccctccccttcttgtgggaagaaattaagcgctcaaacagttttttcacctggagtgttaaggttttgtatagctgataaattggagtctggtgcaacaactagtagttctgtagaagcagatggctctccatcaatctgtgaaagcagttacatatcttctaagatcagggcaaccactgacatacttaactcaatcgtgaatacacctgctctaacttggagtgatactatggaatcaagtccaagtgaagtagccccttctaaggcgatagtattctcccagtggactggcttgctggacttgctggagctttcgctggatagcagccgtataaaattcagaaggcttgatggtgcaatgtctctcaacttaagagaagcagcagtgagagaattcaacactgatccagaggtgagagtgatgctcatgtcacttaaggctggaaatcttggtctcaacatggtagctgcttgccatgtgattatgattgatccatggtggaacccttatgctgaggaccaggcagttgatagagcacacagaattggtcagacccgtcctgtaaccgtttcccgcttaactatcaaagacacagtggaagatcggattttagctctacaggagaagaagagaaagatggtccaatctgcttttggtgaggacaaacctggcggcagtgcaactcggctcaccatagatgatctccaatatctattcggaatatga

SEQ ID NO: 2835 - DNA, 3624 bp, Oryza sativa
atggctggctttccgctgatcacatcagcgatcacttgcgcagtgggcatcatcttcttctccgtttgctacctgcatccggcaccggtcgccgccttgtacttcaactactccaccttcagccaggacgacgggaacaccatcagactcgaaggcgacgcctccttcggcgacgggtggatcgacatcagcgccaacaggtacggccacaggggacacagcaaaggccgggcatcgtacagcgcccggccgatgctcctctggagcagggacaccggcgaggttgccagcttcaccacgcgcttctccttcaacatcaccccgcccaaagaggacggcggcatcgacaacaagggcaccggcatggccttcttcctcgccgcctacccgtccatgctcccgagcggggtcgatgagctcggctacaacatcggtctcaccgaccaaggcccggacgccgtggcgactggcgacagccggttcgtcgcggtggagttcgacaccttcaacaacaccatggtgcacgaccccgacgccacctacgaccacctcggcatcgatgtcaactcagtcgtgtccaacaagaccttgaccttgcccagcttcaccctcgtcgggaacatgaccgccgtcgtcgagtacgacaacgtctccagcatcctggccatgaggctgcacctcggctatgggcttagtggcccccgtcaccggccggattacaaccttagctacaaggttgacctcaagagcgtgctgccggagctggtctccgttggcttctccgcctccacgaccacatcctttgagctgcatcagctgcattcatggtatttcagctcatcgttggaaccaaaggccgcggtgcgtggcagagttgtagcgggagccaccgttggcacggtaatgttcgtcatactcctcttcgccatggtagcagtccttgtacgacaacgtcagagcaagaagagggagacagaggaggcaaagaacggaggcatggatggcagcgacgacgacgatgacgacgacggcgagaccatcgtagagatcgagatggggacggggccaaggcgatttccatactacgaacttgtcgaggcgaccaagagtttcgcggcggaggagaagcttgggcaaggcggtttcggcacagtgtatcggggctacctcagagagcagggcctcgccgtcgccataaagagattcaccaaagattcctccaagcaaggcaggaaggagtacaagtcagagatcaaggtcataagccgtttgcgccaccgcaatctcgtgcagctcatcggctggtgccatggccacgacgagctccttcttgtttacgagctcgtccccaaccgtagcctcgacatccatctccacggcaatggcaccttcctcacatggccaatgagtgtacgcattgactcgatcaatcaacggggagggaacacaacacggcggccatcgatggccggcgttttgcagatcacatcgtcgacgaccaccacgaggtacaatattgtcggcctcatcttcttcttctccgtcttctgcgacgatctctactcgccggctccagtcgccttggccttgaccttcaaccacaccaacttcggcccggacgagcagacgaacatcaggctggaaggcgacgccgccttcagcgccgacttctccttcagcggcgacggcggcgggtgggtcgacatcagcgccaacaggcacggcagcatcgaagacagccgtggcagggtgtcgacggcggcatcgacaacaagggcgccggcatggccttcttcctcgccggcttcccgtcgaggctccccggctcctaccccttacaacctcggcctcaccaaccagaccgccgaccaggtggccgccggcgacgaccggttcgtcgccgtggagttcgacaccttcaacgacaccatcgtgcacgaccccgacgccacctacgaccacctcggcgtcgacgtcaactccgtcgtgtccaagacgaccttgaccttgcccagcttcaccctcgtcgggaacatgaccgccgtcgtcgagtacgacaacgtctccagcatcctggccatgaggctgcacctcggctatgggcttagtggcccccgtcaccggccggattacaaccttagctacaaggttgacctcaagagcgtgttgccggagcaggtcgccgtcggcttctccgccgcgacgtccacatccgtcgagctgcatcagctgcgttcatggtacttcagctcgtcgctggaacccaaggccgcaccgccaccggtggcgccgccgtcaccgtcaccaccgcctacctccggttcaggaagtggcggggttgtagcgggagccaccgtcggcgcagcactgttcgtcgtgctcctcttggccatggtagcagtcgtcgtactcgtacgacgacgacatcagaggaagaagatgagggaggcggaggaggcgaacgacgacgacgatgacacggaaggcgatcccatcatggagatcgagaacgggacggggccgaggcggttcgcgtaccatgtgctcgtcaacgcaaccaagagcttcgcggcggaggagaagcttggccagggcggattcggcgcagtgtaccggggctatctaagagagcagggcctcgccgtcgccattaagaggttcatcaaagattcctccaaccaagggaggagggagtacaagtcagagatcaaggtcataagccgtctgcgccaccgcaatctcgtgcagctcatcggctggtgccatggccacgacgagctccttcttgtttacgagctcgtccccaaccgtagcctcgacatccatctccacggcaatggcaccttcctcacatggccaatgagggtcaagattattcttgggctcggatcagccctattctaccttcatgaggagtgggagcaatgtgtcgtacaccgtgacatcaagccaagcaatgtcatgttggatgagtccttcaatgccaaactaggtgacttcggacttgcaaggttcattgatcacatcgtggggatgcagacaatgactgcagtctctgggacaccgggctatgttgatcctgaatgcgtgatcaccggcagagcaagcgcagaatccgacgtttatagcttcggcattgtcctactggaggtggcgtgcsggaggaggccgatgagcttactagacagccagaagaatggtatcttccggttggtcgagtgggcttgggatttgtacggcaagggagacattctcatggccgctgatgagcggctcaacggcgactacgacgcggcggagatggagcgtgtcattgtcatcgggctctggtgcgcacaccctgatccgaacgcgcgtccgtctatcagaaatgccatggctatgctccaatccggtgggcaactgccagtgttgccggctaagatgcccgtgccgatgtacattcctccagtggtctctgtagatgagctcttcacgtcgcctgcagggatgtcatcctcaagtgcgacgcagtcatcaacaacaacggtgagtggctacgcaacccacatctcgacttcttctgacacatccacttcagctggttcgaaggactcgtcttcgttgctcaaacatcagttctag

SEQ ID NO: 2836 - DNA, 1542 bp, Oryza sativa
atggcacaaatgctagacggcctaaggcatgatgagcaagcatcgctgcatgctccacaggaggccagcaccatgccgacgatgtcgtgctctgatctcctgctcgccatgatgtgccctcttatcctcctgctcatcatcttccgttgctatgcctacgcaacaaggtccggcgggatgctcagcagggtcccctcgccgccgggaaggcttccggtgattggccacatgcacctcatcagctctctcccgcacaaatcactccgcgaccttgcaactaagcatggtcctgatctgatgctcctccacctcggcgcggtgccaaccctagtggtttcgtcggctcgtacagcacaggccatcctacgcactcatgaccgtgtgtttgcgtcacggccctacaatactatagccgacatcctcttgtatggcgcaacagatgtggcattctcaccatatggtgactattggcggcaaataaagaagatcgtcaccatgaatctcctgaccatcaagaaggtccactcctatggccagacacggcaacaggaggtgcggctggtaatggccaagatcgtcgaggaggcggcgacacatatggcaatagacttgactgagctgctcagctgctactccaacaacatggtgtgccatgctgtgtctggcaagttttttcgcgaagaaggtcggaaccagctattcaaggagctgatcgagatcaactcgtcgctccttggtggcttcaaccttgaggattacttccctagcttggccaggctacctgttgtcaggaggttgctctgtgccaaggcctatcacgtcaagaggagatgggatcagttgcttgaccaactcatcgatgaccacgctagcaagcgaagatcctccatgctcgacaacaatgatgaggagagtgacttcatcgatgttctactctctattcaacaagagtatggcctcactaaggataacatcaaagcaaacttggttgtcatgttcgaggctggaacagatacatcatacatagagctagagtatgccatggccgagctaatacagaagccccagctgatggccaagctacaggctgaggtgaggggtgtggtaccaaaagggcaggaaatcgttactgaggagcagctaggtaggatgccctacctaaaggcggtgatcaaggagacactccgactacaccccgcagcgccacttcttgtgcctcatgtctccatggttgactgtaatgttgagggctatactataccctcaggcactcgtgtcatcgtcaatgcatgggctattgccagggaccctagctattgggaaaatgccgaggagttcatgccagagaggttccttagcaacacaatggctgggtacaatggaaataatttcaatttcttgccattcggaactggtcggaggatatgcccaggtatgaacttcgcgatcgccgccatcgaggtcatgctagcaagccttgtgtatcgcttcaattggaagctaccaataggattcaagcagcaaatggaggcatcgatatga

SEQ ID NO: 2837 - DNA, 1704 bp, Oryza sativa
atggcggtggaggaggcggcggagagctgcggaagccacgcggcggcgtcggccgctggtcgtcgtggtggtggaggcggcggcggtggagggccacgtcgtcgtcttcgtctgcgtcggccggggcgcggcggcggcggcggcgccggaagcagcagcagcagcagcgccacaagctggagttacgccatggatgtgaacgtggagagggcggaggacgtgctgacgcataagcggctcttggagcaggcgaaggatccggcgcagcggccggctttcgccgtgcgggccgtgcaggtgtctccaattcttgatgggaatcagactgatgctgattcaaacactgcaggggaggaggttgcttcaaggctgttgaacagacaacagagcattcaccctcctcctgcctttggttcatctacaaatcttgaggcccttgctcttgaggctagcaagtcccaaggacaagaccatgatagcacctcagataatgtcaattacagacccatgcatgaaatcaccttctccaccattgacaaaccaaagcttcttagcgagctcacatcgctgcttggcgaacttggtctaaacattcaagaagcacatgcgttttcaacaaatgatggctactcactcgatgtctttgttgttgttggttggcatgatgaggaaactgaggatttaatagaatcagtacggaaagaaattggcaagattgatgagacgcagggatggtctacaactcattcatggtcttctccagttgaaaatatgcagattggggagaattcagcagctgaccatgttgaaatacctagggatggtgccagtgaatgggagattgatgtaaagctactcaagtttgggaataaagtagcatccggatcatatggtgatctttatcggggtacatattgcagccaagatgttgctatcaaagtgctcaaacctgagaggataaatgcggacatgcagcgtgaatttgcccaggaagtatatattatgaggaaggttcgccacaagaatgttgtacaatttattggtgcatgcactaaaccccccaatctatgtatagtcacagaatatatgtcaggtgggagtgtttatgattacctgcataaacataaaggtgtattcaagctccctgctttacttggagttgtgatggatgtttcaaaaggcatgagctacttgcaccaaaacaatattattcatcgagatttgaaaactgctaatctccttatggatgaaaatgggacagttaaggttgctgattttggtgttgcacgtgttaaagctcaatctggagtaatgactgctgaaacagggacatatcgttggatggctccagaggttatagaacacaagccctatgatcacaaggccgatgttttaagttttggaattttgatgtgggagctgctcacagggaagattccttatgagtacctgacaccattacaagcagctgtaggtgtggttcagaagggattacggcctacaataccaaaaaatgctcatgcaaaactttctgagcttcttcagaaatgttggcaacaggagcctgctgaaagaccagatttctctgaaatattagaaactcttcagagaatagcagaggaggttggtgatgagcatgatggaaagcacaaggagaaaatactgggcggactattttcagctttgagggggcstgggcactaa

SEQ ID NO: 2838 - DNA, 3873 bp, Oryza sativa
atgacgacgccacgacggcgcgctgacccatcgcccccgcctgctcgccgcctcctccaccgcctcggctccgcggcctccggtctgcagacgctggcgtacagctcgaagaaggaaggcggcggcggcgacatgggcccacgcaacggcggttcctcttctaatagaagaccaggatttgttgattcttcttcatggagatattttgactcgagggttgttggtattactagaggggatatacctcgccatgcctggactgtcctacacatgctaaaacgaaaagggtttgcagcttatcttgttgggggatgcgtgagagatttgctactgaaaagggcacctaaagattttgatgtgattactaccgcaagcctccagcagattaagaaaatggttttccaacgatgtataattattggcaaacgctttccaatatgccaggttaatatgtatggcacaaaaattgaggtttctagctttagcacgaatgcaaatcatgtgaaaggaagtaaaaatataggatgttcagaggagtttaaacgttatgatgagggggatattcttctctggcagaattctatgaaaagagactttacaataaacagcttattctttaatccatttaactttaagatttatgattatgtgaatggagtaagggatattagcaaaaacaaggtgtctacagtgattcctgcccgtgtttcattcaaggaagaccctggtagaaaatttagattctggtttatttcagccaggattttgcgtggcttgagaattgctgctcgccttggttttgagttctccagtgaaacttctgctgcaatacgggaactttctttgtccataacagatattgacaaggcaagattaatgatggaattgaattatttattgtcttatggggcagcagcttcttctcttaggttacttagaaaatatggacttctcgattttttgctgcctttccaggcagcatatatgtcggatcagatgaaggataaatcaaatgacacagatttaatgctcatgaaactactggctaatcttgataaattactctctgctgatcagccatgcccctcctgtttgtgtcttagggacacactgatgtgcactttgaatgttcccattttgtgtctaatacaattcttgtatattttgagcaagtcacgtctatggcatttcatgttattccacaggttagcactgttgacatttcacagtgcattggtaaattctccacatgatgcccagggcgcagtcaacttcttgaatcaagacattggagcaccagccccgtttattccagaaacactagggccttctcggagcaaactggagaatctcatggaacaaacatcacatttagcatcactagtcaagtcgtcagttgatacgttgacatctatagatgctctccaacaatcactggccaaatactcaaaggcttcacaagtttcaggactggtgcttgtatctagcagagagagggagagagtgttgagaatatttgagggccttgatactgacttaacttcatatgaagggacaagagggatgcaggaaattgattataagttactgaaggatgggcaccctggtgaggtccggtttgttcttgggcaaaggaccagtaaggtactatattgttttgatgggccgagactattagatggcaaaaggggcaaagcccaattactgaagcccatgcatactctgtccctgttggccttggacacaaatcgtgagaaggacagattctcaccagctatcttctcaccggctgcttctcagaatattcggactcccacaaacaggaccctatacacattcgacagcagaatacgtattatgctcaaatacgccttcgcgtggcggtcgctccggtccacgtgggggcccaccccacctcccttccctcgcctcgccgactcgccgtgggcccccaccgacgcaaaggaatcacagccttccatctctgtcgcgcacttatttccgccgttaatctctccgcccaaagttattccgccgcctcctcttccccccctcctcgttctcctccctcccacaagcccgtgcagacgagacgcgacacgcgacacgggaagaggaggggggaggggaacacacgccamamtcctttcgcccgcatcgmattsgaaccgcacgcgtcgaaggatcgggaaggcgcagccccgcgtcggatcgagagctagggttatgagcggcggggacggggaagaggcagccgccgcggcggcggccgcgacgctgcacatccggtgcaccaacggctccaagctcgcggtgcgggccgacctggggctcagcgtcggggcgttcaaggcgatcgtcgccgagagctgcgacgtgccggcgccgcagcagcggctgatctacaagggccggatcttgaaggacgagcaaaccctagccagctacggtgttgagacggatcacaccattcacatggtccgtggtgctgcaccaccaccagcgtcaaccgcacctcctgcagccaacaatgtaactcctgccattaatgctaccactgcttccaattcaccagcagttggttttggaggtttgttgcatggtcttgggggttcaggttctgctaacagtggagggttgggctcatttggttctggccttccagaactatcccagatgcaacaacagctatccgagaaccctacgttgatgagagaaataatgaatatgccactcatgcagaatatattgaatagccctgatctaattcgcaatataattatgaacaacccccaaatgcgtgaaattgttgatcgtaatccagatcttgctcatgtcctcaatgatccaagcattctccgccagactgttgaagcagctaggaatcctgaacttatgcgagagatgatgcggaacacagacagagccatgagcaacattgaatcttctccagaagggttcaatatgctccgccgcatgtatgaaactgttcaagagccatttctgaatgcaacaacgatggctggggagggtgatagaagttcaaacccattttctgctctcctaggaaatcatggatcaaaccaagccagagatccagctgcaaattcaccaacgaccacctcagaatccacaacaggttctcctgctccaaacactaatccacttccaaatccctggagcacaactgctggagctgcacagggagcaacaaggccctctccagttaccaatgcaaggagtgccacagctggtggcctaggagggttaagttctacagatttgggaggtatgctgggtggtkgctcggatacttccttcttgagtcaggtgttgcaaaatcctacaatgatgcaaatgatgcagaacattatgtcaaatcctcagtccatgaatcagctgcttaatatcaacccaaatgtacgtaatatgatggaatctaacactcagttgagggagatgttccagaacccagaatttgttcgccagttgacatctcctgaaactttgcagcaattaatctcattccagcagtccttgatgtcacaacttggtcaacaacaagctggcccagagcgaacccaatcaggtgctggtgcagaatactttaatggcacgacttatgagagtactttaatgccaggcaatactaacctcaacaatctgatgagcatgttcagtgggctcggtgctggtggtggcctaggtgttcctagtgcacccaatgttccaccagaagagctatatgcaacacaactagctcagctccaagaaatgggtttctttgacacacaggagaacattcgagctttgattgctacagcgggaaatgttcatgctgcggtggagcgacttcttgggaatattggctga

SEQ ID NO: 2839 - DNA, 1059 bp, Oryza sativa
atggattcacggatgctgctgatgctgatgcagctgctcggctccccgacatcgctcgccgttctcctcctctccttcttccaaggctcggtcggcgtcggcgcaatcaccttcaccttcaccaaccggtgcacggacacggtgtggccgggggtgctgtcgggctccggcacgccgccgctggagaccaccggcttcgcgctctcgccgggggggtcgcgctccctctacgcgccgtcggggtggtcgggccgcttctgggcgcgctccggctgcgaattcgacgactccggcaagggctcctgcgccacgggggactgcggctccggccaggtggagtgccgcggcgcgggcgcttccccgcccgccacgctcgccgagttcaccctcaacggcgccgacggcaaggacttctacgacgtcagcctcgtcgacggctacaacctccccatgctcgtccaggcctccgcccccgactgccccgacaccggctgcctcgtcgacctcaacgagcgctgcccctccgagctccgcgccgacgatggccgcgcttgccgcagcgcctgcgaggcgttcggccgacctgagtactgctgcaatggcgcctacggcaacccggacacctgccacccttcccagtactcgcagctcttcaagtcggcgtgccctaaatcctacagctacgcctacgacgacgccacctccaccttcacctgcaaccacaccgattacaccatcaccttctgcccccgatccactccatccagcacattgagattttgggctaaaattggggatttcgatgtggaacatgaattggggaaagtaaagtgggaattcaaagaacggatcacggagaccgagccacgagcagctcgaagatgcggtgtggctggcgagcttgaaggccagcagtggcgcggggatggctgcaactgcggcatcatggccggcatccttagctttccaatctgccttggcaattgcagtggtgatcctgcttgcccagcaggagcatcccgtattattcagctagtagcaagtgagaaggattcttga

SEQ ID NO: 2840 - DNA, 4059 bp, Oryza sativa
atggcagctacagaggccgccacagattcatcgggtccgcgatatgctcctgatgacccaacgctccctgcaccctggaaaggactaatcgatggatcaaccttgtactactggaaccctgatactaatgagactcaatatgagaggccggtggccgctgtgcctcccttgccaacaggtcctcctccagtaaccactacacctatgccaacatccgcatcaggggctttttcacagcctagcatgcagtcgaaccaaggtggtcaagtatcacagtcccagcaggaacgacctggtcagacagtataccctcaagccagccatcttgggcatcagcaactccaacagccaacccagcaatcaccgtttcagccaacggctcagcatcaagctccgtttcagcattcacaacgagcgccctatcaacaacagcagcagcagatgtcgcagcaacctcctgcccatcagtaccccagcacacatccacaacatatgccataccagcatggccattatatgcaaccccagcagcagcagtttcagcagggcccacaatattcatatcaggttggccagcagcaacagatgccgcaagctgcctacaatcaaggtcagcagcagcctatttctcaagctgcctacaaccaaagtcagcagccagcgcaagccgtgggtgcctacaatcaaggtcagcagccgcctgtttctcaagcctcatacaaccaaagtcagcagccaacacaagctgcaggtgcctacaatcaaggccagcagccgtcaatgccccaagcttcctataatcaagttcagccgccacaaatggcacatgctacttacaatcaaggtcagcagccacctggaatgaggatccctcagggtcaggtgcaacctcagcaatcaccgggctttcatcaacccgctcaggtttcacaagtgctgcaaggttcacagtctcaaggacttcaaatgccgccacagcaaggccaactccagcatggcttccatttgacaactcctcagggaaaacaaccacatcatggccatgtaggtcctcaattgagccaagtgccacttgggcagcagagttccactctgaaggttgacgagacaggagttacaggaggtcttgatggaaaacagactggtttttcattaccactcagtcagcagcgtggccagggtcctgtttcaaaacaacagttaccttctaatcatcaactttctggatcacataatcagccaaatattcctggagctggagggccatcatatcctgcaaagcatcatcttggtggatcatccccaggcgaggctaacaacatgaattttttgagctcacctgctcaaatgcatcaaggtggtatggatacaaactatcgacaacatccagctagcagtcctgtcgttccaaatcatattggtccttcaccagttcggcctccaatgggtttcaagatgggcagtagtgaggatcactttgaaagaaatgagctttactcttctggcaggatggatggaacaaataatctccagcagcagccaaagcttgctgcactaccaccactaaaccggccgcaggatatgaggaacgggccgccttatcctcagccagataatttaggggcttttaacatgggacctccacattcagtgccaaatttgcataaccatggtccgtttcctgaagcttcaatgaggcctccgtccagaatgtttgctcccccaaattttccgagcattgcttcagctgacgcatatcgtcaacaccatgaagtcactgcagtgggtgagaatgtgcctcctccatttatgacattcgaggctactggattccctccagagatcttgcaagagatccatgcagctggcttcttaaaccccactccaattcaagctcaaacatggcctgttgcactgcaaaatcgggacatagtagctattgccaagacaggatcagggaagacgctggggtaccttattcctgcttttatacatcttaggcgataccaaaacaacccaatgttgggccctacagtgttagttttggcccctacccgagagcttgcttcacaaatacaagacgaagcagtcaagtttggtcgatcatctagagtctcctgcacttgtctgtatggggggacttcaaagggccttcagctaagagaacttgagcgtggagcagatattgtcgttgcaactcctggacgtcttaatgatatcctggagatgaggaagattagtctccatcaagtttcatttcttgtgcttgatgaggctgaccgtatgcttgatatgggttttgagccacaaatacgtaagattgtggatgagattcctcgaaacagacagactctgatgtatacggccacttggccaaaggaagttacaaaaattgctggggatttactgaaagatcctgttcaggttaatattggtagcattgatgaactcgttgccaacaaatccatcacacagtatgtagaggtggttccaccattggacaagcagcggcgattggagcagatacttagagctcaagaaaggggctctaaggtcatcatattctgctcaaccaagaaaatgtgtgaccagcttgctcgtgacattggtcgtagttttggtgctgcaagtattcatggtgataaatcacaggctgaaagggataatgttctgaatcagtttcgcactggcagagctccaatattagtagccacagatgttgctgctcgtgggcttgacatcaaagatatcagagtagtgatcaattatgactttcccactgggatcgaggactatgttcaccgtatagggcgtacaggaagggctggggcaactggagtctcatatactttcttttctgaacaagattggaaatatgctggtgatttggtgaaagtcttggaaggtgctaatcagcatgtccctccagagttgcaagagatggctgcaagaggtgcagctggagctccaagaaatcaagctggtgggatgagccgttgggatggacctggtggtggtggtaaccgttttgaatctgctgttggtattcctggtagttatggtggaattagggatggcccaggcggctttggtggccgtgatggcccrcaggcggttttggtgggatgcagcgygagagtcctggtggcttgtggtcgagagwctgtcaatgggacgctgcgtgcctttgaaggtcgagagggtgctgctcctggtagctttggtgggagagttgttcgtggacctggtggttttggtggcagaggtggaggaagtcctggtggttttggtggccgtggtggcaggggtgattctcatggttttggtgaacgtgggaggggtgacttttctggctttggtgaacgtggcaggggtgattcttctggctttggtgtacgagccgtggtgatctctggtggacgtggtgggagagggcgtggatttggagggcgtggacgatctgaccgaggcccacatgaccgttttatctcagatggacgtggaagatacgataaccgccgaggatttggtggcaagggtcgggaccggagctacagccgcagcccagatagaggccgctcgcgaggctatgaccgaagaagtggcagtaggagcctaagtagtaggagcagaagccgaagcaggagctggtcacgtagtaggagccgcagcaggagctggagccggagccgtagccgcagccgcagcccaagtcgcagcaggagcagaagctatgaccagggtgcaggaccggcacgcaggccccggcctagatccggcttcgatgtcctgccacctgcaaccggagccggtcctgcttcaaccggtcctgggcctgtagctgtacctgcacctggatcagcaggtcctgttcccccgcaggtacctgcacaatcactggctgatgcatctgcaatgtcaccaatgtcaccaggtggcctagcacaagaaggtgcaccgttcaacggcgggaacgatggcggcctcgtcccagcacaaggggtactccctttccagggttctgatgtagcaatgccaccaaattttggctgcagctga

SEQ ID NO: 2841 - DNA, 1626 bp, Oryza sativa
atggcggcggggctactgctgaagctggtcgggttctgcttctgggccgtcttctggctcggcggcgccgccaccgtcagcaccaacgccggcggcgaggcggcggcggcggcggtggtggtggacgcgcggtccgccattgctgtgacggacgaggacttcgtgtgcgcgacgctggattggtggccgccggacaagtgcgactacggcacctgcagctggggactcgccaccctcctcaacatggatctttcaaacaaaatcctgttgaatgccgtcaaagcattctcacctctgaagcttaggctgggaggatccttgcaggatgtgttgatatacgacaccggcgatcctcggcagccgtgcactccgttcacgaagaactcatcggccatgttcggtttcactcaaggttgcctgccgttgcatagatgggacgagctcaatgcattcttccaaaaatcaggagcaaaaattatctttgggctgaatgctctgaatggtagggttccaatgtctgatgattctttaggagggccatggaattacaccaatgcggcttccttcattcgctacactgtcagcaagggctatgacatccatggatgggaactcggaaatgaactcagtggcagtggagttggagctcgagttgatgcagaccaatatgcacaagatgttctagctctgaaacaaatcattgacaactcctaccaaggccatgcatcaaagccactggtgatcgcaccgggaggtttctttgatgcagcctggttcactgagcttatcagcagaacaaagccaaaccagatggatgtgatgactcaccacatctacaatctaggccctggcgtcgacacgcacctgattgataaaattcttgacccgtcttacctcgacggcgaggccggcacattcagcagtctccaggggatactgaagtctgcagggacgtccaccgtcgcgtgggtcggcgaggctggaggcgcttacaacagtggtcaccaccttgtaactgatgcttttgtgttcagcttctggtacttggatcagctaggaatgtcatctaagtatgacacaaagacctactgcagacagaccttgattggagggaactatggtctgctcaacacaacaacgtttgaaccaaaccctgattactacagtgctttactatggaaccgcctcatgggaaccaaggttctctcggcaacattcaacggcaccaacaagatccgcgcttacgcacattgcgcaagagattcacgtgggatcactctactcctgatcaacctcagtggcaacaacacaaaccatatctacgtgacgagcgaaggcgtgcaaccttacagcacaaagaaggagggccgcagaaggttcggacgcatccccgggctcggcgaagaagctcagctcatcagagaagagtaccatctcacccccaaagatgggagcctgcagagccagcatgtgctgctgaatggcaatgtgttggcacctgatgccaatggagagatccctaagctggagcctgtgcaggtggagggaacacagcccataacagtggctccttactccattgtgtttgctcatattcccagattctatgctcctgcctgtaggtag

SEQ ID NO: 2842 - DNA, 1347 bp, Oryza sativa
atggtgtccgaccacgacgacggcaagctgccggcgcagtggaagaaggtgtgcgtcgtcggcggcgggatggcggggctggcggcggcgcscgagctgcggcgagagggcctcgacgtgacggtgctcgagcagcgcggcggcgtcggcgggcagtggctgtacgacgcggcgaccgacgccggcgacccgctcggcatggccggcgtgcacagcagcgtgttcgcctcgctccgtctcaatagcccgagggagtccataggcttctccgacttcccgttccgccccaccaacgacgccggcggcaacgcgcggcggtaccccgtccacggcgagctcctcaggcgccacggcgargcggaaaccgaggaggtgttcgacgccgtcgtggtggccatcgggcactactcgcagccaaggctcccgaccgtcgacgggatggataggtggaggaggaaacagctccattcccactcgtaccgcgtcccggactccttcgccggcgaggtcgtcgtcatcgttgggtgcagcgtgagcggcgcagagctcgcgcttgagctccgccgcgtcgccaaggaggtccacctcagcaccaagtcgacggaggagaccatcacgtcggcgatgtccaaaagtgtcgccaggtacgaaaacctccacctgagaccacaggtcgaacacctgcgcgaggacgggactgtggtgttcgacgacggctcgttcgtcgtcgccgacgccatcatctactgcaccgggtacaactactcgttcccgttcctggacacgaacgggaaggtcaccgtcgacgacaaccgcgtcgggccgctgtacgagcacgtgttcccgccggagctggcgccgtcgctgtcgttcgtgggcatcccagccaaggtgcttctgccggtgttcatcgaggtgcaggcgaggtgggtggcgcaggtgctgtccgggcggaggacgctgccgtcgcaggaggagatgcagcgcgccgtcgaggagcacagccgcggcatggaggccgccggcttgccgaagcggtggacgcatgacatgttcttggacctggaacgctgcgacgactccggcgagcgcacctgcggcttcccgcggatggagcagtggaagaaggagatctttttctcgtccctctccgacatggtcgacgacatggagagcttccgcgacggctaccacgacagtgacctcgtccgcgacggccttgcgccggcacggctggactcccgtcgcgccgcggccgcaggaggaggacgacgacgcaaaagcaattggagtggcgaacatataacaaaaattaccgggtgcaatacgtactccctccttccctaa

SEQ ID NO: 2843 - DNA, 1365 bp, Oryza sativa
atggcatcctgcaagaaggtgtgcgtgatcggcgccggtgtgtctggcctcgccgccgcgcgcgagctgcggcgagagggcctcgacgtgacggtgctcgagcagcgcggcggcgtcggcgggcagtggctgtacgacacggcgaccgacgccggcgacccgctcggcgtggccggcgtgcacagcagcatgtacgcgtcgctccgcctcatcaccccgagggaggtgatgggcttctccgacttcccgttccgcccaggcaaggacggcgactccggcgccggcgagktcracgcgcggcggttccccggccacgccgagttcctcaggtacatcagggagttatgcgacgtgttcggcctcatggacgccgttcggctcaacacggcggtcacgcgcgtcgccatggcgccgccgcggcgcgacggctcgctgcggtgggcggtkaggagcaaacaccacggcgaggcggagacggaggagccaaggctcccgaccatcgacgggatggacaggtggaggaggaggcagctgcattcccattcctaccgcgtcccggacgccttccatggcgaggtggtggtgatcgtgggctgcggcatcagcagcaaggacatcgggctagagctccgccgcgtcgccaaggaggtgcacctgagcgcaaagtcgccggaggaggccatgacgccggcgatgtccaagattctcgccaggtacgacaaccttcacctccacccacagatcgaacacctgcgcgaggacgggacggtggtgttcgtcgacggcacatgcgtcgtcgccgacgccgtcgtctactgcaccggcaacacctactcgtacccgttcctggacacggacggcaaggtcaccgtcgacgacaaccgcgtcgggccgctgttcgaccacgtgttcccgccggcgctcgcgccgtcgctgtcgttcgtggggatcccggccatggtggtggtgccgctgttcaacgaggtgcaggcgaggtgggtggcgcaggtgctgtccgggcggagggcgctgccgtcgccggaggagatggcgcgcgccgcggaggagtacaaccgcggcagggaggccgccggcgtggcgaagcggcggacgcacgacatcctggacctggagtactgcgacgactacggcgagcgcaactgcggcttcccgcggctggaggcttggaagaaggagctcatgtggtcttcctacctcaccatgtgcgacaacctcgagaccttccgcgacgactaccatgacagcgacctcgtcgccgacggcctgaggctgcacggctggatctcaccggcgacgacgctgacgcagcagggcgacgatgacaaacggccccatcttttatga

SEQ ID NO: 2844 - DNA, 1389 bp, Oryza sativa
atggtgtccaaccacgacgacggcaagccaccggcgaagtggaagaaggtgtgcgtcgtcggggcgggcatggccggccttgcggcggcgcgggagctgcgccgggagggccacgccgtgacggtgcttgagcaggccggcgacgtgggcgggcagtggctgtacgacccgcgcaccgacgacccgctcggcgcgtccccggcgccggtgctcctctacctcaaggacttctgcgacgcgttcggcctcatggacgccgtccgcctcagcctcaacaccagggtcctccgcgtcgccatggcgcctcctcaatgtcgcgcccccgccgtcgccggcggcgagcggaaatgggtggtcaggtccgtacgcgtcggcgagcgcgacgacacgggtgttcaggaagaggtgttcgacgccgtcgtggtcgccaccgggcactactcgcagcccagcgtgccaaccatcaaaggaatggaggcgtggaggcggcggcagctgcacagccactcgtaccggctgccggagccgttccgcgacgaggtggttgtcatggtgggctgcggcgacagcggcaaggacatcgcgctggacctcatcagcgtcgccaaggaggtgcacctcacggacaagtcgacggaggaggccacgacgccggcgatgtccaagctgctcgccaagtacgccaacctccacctgaggccacgggtcgaacacctgtgcgaggacgggacggtggtgttcgtcgacggctcgcgcgtcgtcgccgacaccgtcatgtactgcaccgggtacgtctactcgttcccgttcctggacacggacggggtggtcaccgtcgacgacaaccgcgtcgggccgctgttcgagcacgtgttcccgccggcgctggcgccgtcgctgtcgttcgtcggcgtcccgaggaaggtgccggcgccatggttcttcgaggcgcaggggaagtgggtggcgcaggtgctgtccgggaggaggacgctgccgccggtggaggagatgctgcgcgccgtcgacgagcactaccgcgccagggcggccgccggcgtgccggtcaagtacacgcacgagctcggcggcatcgagcctcagaagtacatcgagttcggggagaagtattgcgggttcccgcgctacgaggattggaagagggagatgatcgtgtccaccatcagtaggagggatgacgacgacatggagacatttcgcgaccgcgtcgacgacgacagtgaccatgtccggctctgcctcaagagctggcactgctcatcacctgctcgacatcaagcctctcttgctgtttctgctgctgatggccatcctcctcctcctcgtcttgcacagacggccaaggccatcgctgctgatgctctgtag

SEQ ID NO: 2845 - DNA, 1040 bp, Oryza sativa
atggagatgacgatgtcgtcggcggcgacgtcgctgccgccggggttccggttccacccgacggacgaggagctgatcctgcactacctccgcagccgcgccaccgccgggcagtgccccgtccccatcatcgccgacgtcgacatctacaagttcgatccatgggacctgccatcgaaggcggtgtacggggagagtgagtggtatttcttcagcccgcgagaccgcaagtaccccaacggaatccggccgaaccgcgccgccgggtcggggtactggaaggcgacgggaaccgacaagcccatccacgacagcgccaccggcgagagcgtcggcgtcaagaaggccctcgtcttctaccgcggccgccctcccaagggcaccaagaccagctggatcatgcacgagtaccgcctcgccgccgaccctctcgccgccgccgcaaacacctacaagccctcctcctcctcccgattccgcaacgtctccatgaggctggacgactgggtgctctgccggatctacaagaagtccggccaggcgtcgccgatgatgccgccgctcgccgccgactacgaccacgacgagccgtccggagtccttgacgacgcctacagcttctacgcgccgccgatgatcagcaccacgctcatccccaagctccccaagatcccctccatctccgagctcttcgacgagcacgcgctcgcccagatcttcgacgccgccgccgacccgccggccgaccaccatcagcatgccctcgccgtccacccctccctgaaccagctcctcggcgtcggcgacaacttcctcgcggagtgctacccgtcgacggcgtccacggccaccgttgccggcggcaagcgcaaggcgagcccggccggagactacgccggcggcggccacacgccggcgaagaggctcaacggctcatgcttcgacgtggcgccgcagtccgtggtgggcggcttgcaagcgacgccgtcgtcagtcctcgccggactcaaccaccagatgcttcctcctcagctattctg

SEQ ID NO: 2846 - DNA, 1344 bp, Oryza sativa
atggcggtggcgtcgcggctcgcggtggcccgggtggccccggacgggggagcggcggggaggaggaggaggaggagggggcggccggtggtcgcggtcccgacggcggcggggagggggagggggcgaggcggggccgtggcagcgagcccaccgacggaggaggcggtgcagatgacggagccgctcaccaaggaggacctcatggcctacctcgtctccgggtgcaagcccaaggagaactggagaattggcacagaacatgagaagttcggttttgaagttgatacattgcgtcctataaagtacgatcagatccgtgacatcctgaatggacttgctgagagatttgattgggacaagatagttgaagaaaataatgttatcggtctcaagcagggaaagcaaagcatttcactagaacctggtggtcagtttgaacttagtggtgctcctcttgaaacattacatcaaacttgtgctgaggtcaattcacatctttaccaggtcaaagcagttggagaggaaatggggattggatttctcggaattggttttcagccaaagtgggcactgagtgacataccaataatgcccaagggaaggtacgaaattatgaggaattacatgcctaaagttggctctcttgggcttgatatgatgttccgaacatgcactgttcagattgcaacagcaaatattttgctaattctcccttcaaagaaggaaaaccaaatgggtatccttagcttaagaagccatatttggactgatactgacaacaaccgctcagggatgcttcctttggtgttcgatgactcatttgggtttgagcgatatgtggactatgcattagatgtcccgatgtattttgtctatcgaaataagaagtacattgactgtactggaatgtcatttcgggattttatggtaggaaaactcccacaagctccsggggagctgcctactttgaatgactgggagaaccatctaacaacratatttcctgaggtyaggctgaagcgatatctagagatgagaggtgctgatggtggcccatggaggagattgtgtgctttgccagyattttgggttgggctgttgtatgatgaggaatcactgcaaagtatttcggacatgacctctgattggacaaatgaggaaagagaaatgctaaggcgaaagaatggattagaaagaagagggtacaaggaagttggtttcttaagagaggttgatgcagtgatcagttcaggagtgaccccagctgagaggctgctcaatttgtacgagacgaagtggcaacgcagcgtcgatcctgtcttccaggagttgttatactga

SEQ ID NO: 2847 - DNA, 1503 bp, Oryza sativa
atggggatcagaatgggaaggcgactcctcttcaccttgttcttgggagctctgttctgcaatggcgtttacgccaagtttacccggtacagcttccccaaggacttcatcttcggcacaggttcagcagcttatcagtatgagggcgcctacaaagaagggggcaaaggtcctagcgtctgggacaacttcactcacattccaggtaaaattttaaacaatgataacggcgatgtggcaaatgacttctatcaccgatacaaggaggatgtgagcctcctgaaggacatgaacatggatgctttccggttctccattgcgtggaccaggatcctgccaaatggatccttgagtggaggaataaacaaagaaggggttgctttctacaacagcttgatcaatgatgtcatagcaaaagggatgatcccatttgtcactatcttccactgggacacccccttggctctggaaagcaaatacggaggattcctcagtgaagacatagtgaaagaatacgtggacttcgcggaggtgtgctttcgcgagttcggcgaccgtgtcaagtactggaccacatttaatgagccattcacatatagcgcctacggctacggcaagggcgtgtttgcgccgggacgatgctcttcatatgtttccaagtcatgcggcgtcggtgactccagtcgcgagccctacctcgtggcacaccacatccacctctcccacgctgccgctgtccagctttaccgcaccaagtaccagccaacacagaagggacagatcggcatggtggtggtcacccactggttcgtgccgtacgacaactccgacgctgaccgtggcgctgtgcaacggagcctagacttcatctatgggtggttcatggaccctatcgtgcatggtgactacccaggcaccatgagaggttggctcggcaatcggctgccagagttcacgcctgaacagtcggcgatggtgaagggctcctacgacttcatcggagttaattactacaccacctactacgctaagagtataccgccgcctaactccaacgagctatcctacgacctcgacaaccgcgccaacaccaccggcttccgtaatggcaaacccatcggtccacaggaatttacaccgatcttcttcaactaccctccaggtctccgtgagctcctcctctacaccaagaggagatacaacaacccgaccatctatgttacagaaaacggcatcgatgagggtaacaacagcacactgccagaggcgctcaaggatggacacaggatcgagttccactcaaagcacctgcagttcgtcaaccacgccatcaagaatggggtgaacgtgaagggctacttcacgtggacattcatggactgctttgagtggggtgacggctaccttgacaggttcggcctcatctacgtcgaccgcaagacgctcaagcgctaccgcaaggagtccagctactggatcgaagacttcctcaagaggcactga

SEQ ID NO: 2848 - DNA, 1190 bp, Oryza sativa
atggccgcacttgataccttcctctttacctcggagtctgtgaacgagggccaccctgacaagctctgcgaccaagtctcagatgctgtgcttgatgcctgcctcgccgaggaccctgacagcaaggtcgcttgtgagacctgcaccaagacaaacatggtcatggtctttggtgagatcaccaccaaggctaacgttgactatgagaagattgtcagggagacatgccgtaacatcggttttgtgtcagctgatgtcggtctcgatgctgaccactgcaaggtgcttgtgaacatcgagcagcagtcccctgacattgcacagggtgtgcacggccacttcaccaagcgccctgaggagattggtgctggtgaccagggacacatgtttggatatgcaactgatgagacccctgagttgatgcccctcagccatgtccttgctaccaagcttggcgctcgtcttacggaggttcgcaagaatgggacctgcgcatggctcaggcctgacgggaagacccaagtgactgttgagtaccgcaatgagagcggtgccagggtccctgtccgtgtccacaccgtcctcatctctacccagcatgatgagacagtcaccaacgatgagattgctgctgacctgaaggagcatgtcatcaagcctgtcattcccgagcagtaccttgatgagaagacaatcttccatcttaacccatctggtcgcttcgtcattggcggacctcatggtgatgctggtctcactggccggaagatcatcattgacacttatggtggctggggagctcacggtggtggtgccttctctggcaaggacccaaccaaggttgaccgcagtggagcatacgtcgcaaggcaagctgccaagagcattgttgctagtggccttgctcgccgctgcattgtccaagtatcatacgccatcggtgtcccagagccactgtccgtattcgtcgacacatacggcactggcaggatccctgacaaggagatcctcaagattgtgaaggagaacttcgacttcaggcctggcatgatcatcatcaaccttgacctcaagaaaggcggcaacggacgctacctcaagacggcggcttacggtcacttcggaagggacgacccagacttcacctgggaggtggtgaagcccctcaagtgggagaagccttctgccta

SEQ ID NO: 2849 - DNA, 789 bp, Oryza sativa
atggtgtcgaggcttaagcatgaacatgttgttgagctgcttggttattgtgttgatggaaatctccgtgtccttgcttatgagtttgcgactatgggttctcttcatgatatgcttcatggaaggaagggtgttaaaggagctcaacctggtccagtcttatcatgggcacaacgtgtgaagatagctgttggggcagcaaaaggcctggagtatcttcatgagaaagcacagcctcatatcatacacagggacatcaagtccagcaatgttctccttttcgatgatgatgttgctaaaatagctgactttgatttgtcaaaccaagctcctgacatggcagctcggcttcactctactagggttcttggaacctttggatatcatgcacctgaaattatatcaactactaatgttggtctaaattctgtggccaggtatgcaatgactggacagcttagctccaagagtgatgtgtacagttttggagttgttcttcttgagctattgaccggaaggaaacctgttgaccatacattaccaaggggacagcagagtcttgtgacttgggccaccccaaggcttagtgaagacaaggttaggcaatgtgttgactcaagacttggaggggactatcctcctaaagctgtcgcaaagtttgcagctgttgcggcgttatgcgttcagtatgaagcggactttcgaccaaacatgagcattgtcgtgaaagcgctgcaacccctgctgaatgctcgggcaactaaccctggagaaaatgccgggtcataa

SEQ ID NO: 2850 - DNA, 1200 bp, Oryza sativa
atggaaatattttcaaagcgcgttagccatgcacatcttatagttgttagtcaagctcaaggttctgttttcatctgcttgaagaggaggaaggcttccaaaaaccagaacactccaatcatcccagcaccgaacaaaatcaaaagaggaaattgcgcgatcttcgatttaccaacactgcaaattgcaactgataacttctctaacagtaataagctcggggaaggcggtttcggtactgtgtacaggggaaagcttggtaatgggcaaaaagtagcagtgaagaagctgtcacaagcacagtacaccagagagggactgaaccagctgcacaatgaacttcagttgttggctgagcttcagcacaagaattttgtcagattactgggtttttgctcgcatcaggatgagatgatgcttgtttatgagcacattaagaacgggagccttgacatctttctttttgatactagtagggcgaagacacttaactgggagcaacggtacaatatcattcttggaatcgcaaagggaatattgtatcttcacgaagattcaagcataaggatcattcaccgtgatttgaaagcgaacaatatattgttggatgaaaacatgaacccaaaaattgcagactttgggttgggaaggctactaggaggtggccatactcagactaagacggctacagttgtcggaacatacgggtatatggcaccagagtatgcgctatttgggaaggtatcacctaagatcgatattttcagctttggtgttttggttcttgaaattgtaaccgggagaaggaatagcggtttcgacaccacatacaacgcagtgaatctcctgacagaagtgtggaattgctggacaaaggggacggcactgcagctggctgatcaatcacttgatggatattccgacagcaaagtgctacgatgcatccacattggtcttctttgtgtccaagagagccccattgacaggccaagcatatcttcagtgattctaatgttaaccagacgcagaataaaactccagcaaccgcggcaaccggcattcttctttggaggggacttcagttcagtttatcaacaacaacacagacatcgcaactacatgtatgataagagtggcgtgattgttgaggataaattctctgtaaatgatgtcaccaatactgatccctatcctagatga

SEQ ID NO: 2851 - DNA, 2060 bp, Oryza sativa
atggcgcatcgcgctggctgcctctcgatgctgctcaccgccgccgtcgtgctgctggcgctggcgccgcgtggcgcggcgtacccgtggcaggtgtgcggcacgacgggcaacttcacggccaacagcacgtaccaggccaacctcgacgccgtcgcggcggcgctgccccggaacatctcgtcgtcgccggacctcttcgcgaccgccatggtgggcgccgtgccggagcaggtgtcggcgctggcgctgtgccgcggggacgccaacgccacggagtgctccggctgcctcgccacggcgttccaggacgtgcagaacatgtgcgcctacgacaaggacgccgccatctactacgacccttgcatcctctactactccaacgtccccttcctctcctccgtcgacaacgccgcctcgacgagccgcgtcaacctgcagaacgtcacgtcggacccgggcaggttcaacggcatggtggcggcgctggtgaacgccaccgccgactacgccgcgcacaactccacccgccggtacgcgtccggcgaggccgtcctcgacagggagtcggagttccccaaggtgtacagctgggcgcagtgcacgccggacctgacgccggcgcartgcggcgactgcctcgccgccatcatagccaagctgccgaggttgttcacgaaccgcatcggcggcagggttcttggagtcaggtgcagctaccggtacgaggtaaaccccttcctcaatggcctggtgatggtgcatctgactgcgccaccgattccgacagcatcaccgcccgccgctgccgcggcggcggccggagaagggaaagattacaatgttcctcgcttggttctagcaattttgctgcctactatagcagctttagtgctaatcaacattctagtttggctctgcttctggaggaggatggagaggctacgatcaggagcaactcagccatattccagcaactctgctgaatcggagaatatttcaagtgtggagtcgatgcttatcgacatttcgactttacgagctgctacagggtgttttgcagaacgcaacaagcttggcgaaggtggatttggtgcagtgtacaagggtactctgcctgatggcgatgaaatagcagtgaagagattatcgaagagttcagcacaaggagtgggagagctgaagaacgagctcgcattggttgcaaagctccagcacaagaatcttgtcaggcttgtcggtgtctgcctggagcaagaggagaggcttctcgtctatgagtttgttcccaaccgcagcctcgatcagatcctctttgacgccgacaagcgtcaacagcttgattggggaaagaggtacaagatcatcaacggcattgctcgtggcctgcaatacctccacgaggactcgcagctcaaggtagtccaccgtgatctcaaagcgagcaacatcttgctcgacatgaacatgaacccgaagatctctgactttgggctcgcgaggctcttcgggcgagaccagacgcagggggtcaccaacctcgtcatcggcacatatgggtacatgtcaccggaatatgcgatgcgaggcaactactccctcaagtccgacgtgttcagcttcggcgtcatggtgctggagatcgtgacggggaagaagaacaacgactgctacaactccctgcaatccgaagacctcttaacccttgtgagcactaaccatatgatcctactcgtctgttcatggaaaaatgaggtgtgggagcagtggacggcgagggcggtgtcggaggcggtcgacccggtgatgggcggcggtttctcgtggagcgacgtgatgcggtgcatccacatcggtctgctctgcgtgcaggagaaccctgcggatcggccggtgatgtcgtcggtggtgatgatgctcggcagcgacacggtgtcgctcagggcgccgtccaagccggcgttctgtgccaggaggaacggcggcaccggcggtgccggtgccagctcggggggcacgtcgtctggtacgtcgacggcggcgtcggtgcaaggcaagta

SEQ ID NO: 2852 - DNA, 1983 bp, Oryza sativa
atggccacctttgcgcgccaccgcgtcctcctctgccgcctcgccgcggcgctcctcctcgctccggtggcggcggcccagccgtggcagttctgcgggcagggcggcaactactcggcgaacggcacctaccagtccaacctcgccgggctctccgccaccctccccaagaacgcctccgcgtcccggacgctcttcgccaaggacagcctcggcgccgtcccggacatcgtctacgcgctcgcgctctgcgcggcgacgtcgcaacgcacgctgcgagggggccagcagctgtgcccctacaacaaggacgtgttcatcgtctacgacctctgctacctccgcttcaccaaccgcaacctcctcgcctccgccacggacaacgggagccccatgatgctcatgaacgcgcagaacgcgagcgcgacggcggaggtgttcgacgccgccgccgccaccctcctcaacgccaccagcggctacgcggcggcgaactcgtccaggcggttcgccacgggggaggaggccttcgatgccgccgaccccaccatctacgggctgtcccagtgcacgccggacatgtcgccggacgactgccggagctgcctcgggggcataatcgcgttgatacctcagtacttcggccggaagaggggcgcgagggttatcgggacgcgctgcaactacaggtacgaggtgtatcctttcttcgccggaggctcgatgctgcggctcccggcgccggcgaactcgacgccgacggcgccaaccggaggaagaaagaaaaataaaagtggcacagctctagccattgcattgcccctagttgttatattgttggctacggttgtcatttgtctttctgttcagaggtggagaaaaagatcaaggtcaaaacagcaatcttcatattcaattcaaatggcggaggacattgaaagcacggattcactttttatcgatctatcaacactgcgtgctgcaacgggtaacttttctgagagcaataggattggtgaaggaggatttggttcagtttataagggcgtccttcctagtggtgaagagatagctgtaaagaggctctctatgagttcaggacaaggaatagaagagctaaaaaatgagcttgttttggttgctaaacttcagcagaagaatcttgttaggcttgttggtgtctgcttgcaagaacatgagaaattgcttgtgtatgaatacatgcccaatagaagtatcgacaccattctatttgatcttgagaaaaggaaggagttagactggggaaaaagatttaggataataaatggaattgctcgcgcattacagtatcttcatgaagattctcaactgagaataattcaccgagacctcaaagcaagcaatgttttattagactccgattataaccctaagatttcagactttggcttggcaagactatttgagggtgatcaaacaagggaagtcacaagccgtgtggtaggaacatatggatatatggcaccagagtacgcgatgcgtggccactattctgtaaaatcagacgtctttagctttggcatattgatgatagaaattgtgacaggaagaagaagcagtggttcatatagctttgatcaatcatatgatctcctaagccgtgtatgggagcactggaccatgggaacaattttggagatgatggatccctctcttacaagccatgctcctcgagaccagatgctcaagtgtattcacattgggctactgtgtgttcaagataacccagcagatcgacctatgatgtcaacagtgaatatcatgcttagcagcaacacagtgtctcttcaatccccatccaagccatcatttttcattcccaagagtggtacagactcaaatatatactcggaatcatacccacaaacttcccaaccgacccataggtctgggatgatgtcagttaatgatgtgtctgttacagagcttgaaccaagataa

SEQ ID NO: 2853 - DNA, 1290 bp, Oryza sativa
atgggagagaaacatatcatcctgccaagattggttccaagtaagctatcgcaccgccagcagctgtgtggtcatcgatcagtttctgagatttcaggtgtagtggatgaaaccttgggaaagaggcctctggatgggcagaatgatatactcagatacagggtgttcactagtacgtggaatgttggtggtatgacaccatccagtgatctagacttggaggattggatggattcaacagctaactcctatgacatctacgttcttgggttccaagagatagtgccactcaacgcaagaaacgtgcttggtcctaggaatagctgtatatctacaaagtggaactcactgattggggaggcactaaacaaaaggaggagaagaggagcagtgttgcatcaagaaatcacaaatagcagtgcaacggagagatctgcgcaggaagaacactttagatgcatcatgaacaagcagatggtgggcatctttatgtcagtctgggtgagaagcaatcttaggccatacattcaccatctgaatgtgtcttgtgttggttcaggcatcatgggctacctagggaacaagggctcggtgtcaattcgatttgtgctacacgagacgagcttttgctttgtttgctgtcacctggcttcaggcggcaaacaaggggatgtactgctgaggaactttgatgctgcggatatactcgtgaggacgagatttcctggtggtgcaacccaagaattgccaaagaagatccttgaccacgatcaagtcgttttgctcggtgacttaaattataggatatccttggaagaggctgagacaaggttgttggtggaagacaagaattggtccatcctgttagagaacgaccagctattgatcgagttctcgacgggtcggcatttcgacggttggcaagaagggctgatcacgttctctcccacctacaagtaccaccccaactccgatcagtactactggtgcttcgacggtgcgcttggaaaaaagaagcgtgccccagcatggtgtgaccgcattckttggcgcggtaagggcctgaagcaaatccaatacgacacatgcaactacaggttgtccgaccaccggccgtgctctcagctcttcgagttagttacaaatggtctaggaggatacgtgccatttaaccmaagatttactcatgagggcatgactgccaatctgaaactgaacgactcgatcatgattcacggscatktatyccstggrayccggatggattttcagcgtcaaatacttcgataa

SEQ ID NO: 2854 - DNA, 1698 bp, Oryza sativa
atggacaggcgaggaaatccggcagttaaagcaaaaactgggaattggagatcttccatcctcttgctagtcaactatgggctcgtgacatgcgccttcttcggcgtcggggtgaaccttgtggtgttcctgcggcgggtgctccaccaggacaacgcagaggcagccaacagcatcagcaagtggaccggcacggtctacatcttctccctcatcggcgccttcatgagcgactcctactggggccgatacatcacgtgtgcaatcttccagatgatctatgtcacgggcctggtgatactgtcactcgcgtcgtggttcttgctggtgaagcccaccggctgcggcgccgcgggggagcactgcgacgcgccgtcgagcgccggcgtcgcgctcttctacctgtcgacctacatgatcgcgttcggcaacggagggtaccagccgtccatcgccacgttcggctccgaccagttcgacgagacggaccccagggaggcccgctccaaggtggccttcttcagctacttctacctggcgctcaacgtgggctccctcttctccaacacggtgctggtgtactacgaggacgaggggaggtgggtcatggggttctgggtctcggccgcggcggcggccatggcgctcgtgctcttcttgctcggcacccccaactaccgccacttcaagccgaccggcaacccgttgacccgcatcgcgcaggtgttcgtcgccgcgttccgcaagtggcgcgccgaggtgccacgcagcgagctcctgcacgaggttgacggcgacgagtcccagattgctggcatccgaaagatcctccacagcgaccagatcaggttccttgacaaggcggcgacggtcaccgaggaggactactgcacgccggagaacatgcaggatccgtggaggctgtgcacggtgacccaggtggaggaagtgaagtgcatcctgaagatgctgcccatctggctgtgcacgatcgtatactcggtggtgttcacccagatggcgtcgctgttcgtggagcagggaaccaccatgaacaccaacatcgggtcgttccacgtgcccgcggcgagcatgtcggtgttcgacatcctcagcgtgctggcgttcatcgccatctaccggcgcgtgctcgtgccggtcatgtcgcgcctgtccggcaacccgcaggggctgaccgagctgcagcggatgggcgtggggctcgtggtcggcatggcggccatggtggtcgccggcgtggtggaggtggagcggctgaagcgggtgggcgcgccggaccagccgagctccctgagcgtgctgtggcaggtgccgcagtacgcgctgatcggggcgtcggaggtgttcatgtacgtggggcagctggagttcttcaacgggcaggcccccgacggcgtgaagagcttcgggagctcgctgtgcatggcgtccatctcgctggggaactacgtgagcatcatgctggtgagcgtggtcaccagcctcaccgccggcgacaggcggcccgggtggatccccgggaacctcaactccggccacctcgacaggttctacttcctcctcgccgcgctctcgctggtcgacctcgccgtgtacgtcgcgtgcgccgtgtggtacaagggcatcaagctcgacagcaacgaggagaaggcgaacaagatcaccgtgcacgtttag

SEQ ID NO: 2855 - DNA, 5289 bp, Oryza sativa
atgcccctcctgtccatacttctgcttccatttcaccatggtctttcaaataaatctacaacaaaggatttcatgaaaattggttcaattgtgtgcttttgtgctgtccatagtcatggttttaaaatgctttttgcactctccgcggttcttcggcatacaccttctactcctgttgggttcactatcttaaaggctggtctgaacaagtcagttctgctgtcagtgtataactcgcaaaattcgcgaaatggtcaagctgatcgaagtacacatgggttagtctcaaaatttgttaaactatatcctgatctgggatttgatcccgaggcctcgctgttgatgaatgtttggcaatcattggctgttctagtagtaatgcaactttatagctatgaaagacggcagaatagtgacaagaactttggtgtatctgatgcttctgaatctgggcttctggggttcctaaggagattgttaatttggcatagtgagaagatattatcagttactgtgttctatgcttgcctatcatcaatcagtttatctggcctaatttatcttttaggtctcattatgttttccattttacctaaagtttctcgaattccttccaaggtttaccttgtttacactggtttacttgctacatcagaatacctatttcaaatgttatgtgaacctgctcaaatgtgtcctggtcagcagttccatggcttgtctgtctttcttggtttgaagcattatgatgctggattttggggtgtcgaatatggtcttcgaggaaaagttttggtaatcgtggcttgcaccattcagtataatgttttccattggttggatttgatgccaacatctcttttacatgagggcaaatgggaagaaccttgccagctctttatctctggtgatacatcttctaacgctagggacaataacaaggatagtcattcatcaaataggtttagttcattgttttcaaaagttcaaggtctgattggtagcagctcaagttcatctctgagttcagggagcacttgtcagacatcagaacctgtccagaatgagacaagcggctcagatgagggcaaaagatactcattttcaaagatttggggaatgtcaaaagaaagccacaagtgggataagagaaagattatttccttgagaagagaaagatttgaaactcagaagacaacctttaaatgctacatgaaattctggatggaaaatctctttaaattgcgagagatcttatccagaaactgtggcctctttttgttgttctctttgcttcggtcctactactcgagtactttgctctttggaaggaaggaatgccctggttacacagtatcaatgacattgaagttcattgtcgcgaatgctggaaaaattcaaggattttctttgcatattgctcaaaatgttggctggttacggtccgatcgtttctctggtttctcagactcagatacttatcatcagatgatgtcacaaaggaaaaatgcattagtttggagggacctctcattggaaacaaaaagtttctggacttttcttgattatatacggctttatgcttattgccatttattggacatagttttagcattaattgctattactggtacgctggagtatgatgtgctgcaccttggttatcttggatttgctttggttttcttcagaatgaggcttgaaatattgaagagaaaaaataaaatattcaagtatctgcggatgtataattttgcgcttattgttttatcacttgcttatcaatctccttattttgggcaatttagctctggcaagtgtgaccaaattgactatatttatgaaattattggattttacaagtatgattatggttttaagataacatcacgatcagcttttgttgagatagtgatcttcttattggtgtcaattcaatcatacatctttagttctggtgaatttgattatgtatcaagataccttgaggctgaacaaattggtgcgatggtccatgagcaggagaaaaaagctttgaagaaaactgaacagctccaacatcttcgaaggtccgaggagcaaaaacgtgagcggaacatgcaagtggaaaggatgaaatctgagatgtacaatttacaaagtcagcttaatcgaatgaattccttcaccccaatcaacaatgcatctcacagtgaaggcttacgtcacaggaggaatactaagttgtatactgatattgacaccccgttgcaagatagtgggattggatcaccaagaaaggaggataagactggtagcacagactcatcccaatcctttgaattttctgtagaagatgcacagaagagcttgacagatttaatgttccggactccatgtgatactcctaggtcaccaatcagggggacaagtgaagaatttaaggtgactgataatgctaggaactcactgggttcaacatccgagatcactgaggtcgaagaaaatgagggcaaagtgaatcataatttactaaaactgcagtatggaagaggggcagttaaggaaaacccactaaaatctgctgtgcaattaattggtgatggtgtctcccaagttcagtcctttggaaaccaggcagttacaaatattgtgagcttcttgaacattgatccagaagaaccacattccagtgatcatcctgcagaagatgacatttatgatatggtagaaagtcagagggaaacacatgatggccagttgttaagaacacattcagttacctctggaaatggcacaaaatcgtctgcaaacatgccgataggtgtaatctttcgcttgctatccatggtttaccttggagcacttttcttgtatgctctttgtgtgaactatgggccaagttacctgttttgggtcattgttctgatctacactgagctgaacattctctcacaatatatataccagattgtcattcagcactgtggtttgaacatacatatacctcttctccagagattaggttttccggatgataaaataaaggcatcatttgttgtcagcatattgcctctctttctggtgtatatatctaccctcttgcagagttccataacggctaaagatggtgaatgggttcctgtaacagagttcagctttctaagtgcaagaaataatgtagaagagaaacaacgtatgccttacaattggagagataggctaaaaaatattcacttgcctgtaatgaatcttataaggatgattgggagaggcatatctagatattggttgtcactaacacaaggggcagaatctcctccatattttgtgcaagttacaatggaagtaaaccattggccagaagatggaattcaaccagaaagaatagagtcagcaataaacagggtccttgctatagctcatgaagaaagatgtcaagccaactcgccttcatcttgccattcttgtagtcgggttcggattcaaagtattgagcgaagcaaagaaaactctagtatggctcttgctgtcctagaagttgtctatgctgctcccttggactgccaatcagcaggatggtacaaatcactcactccagctgctgatgtagagaaggagattcatgaatcacaaaaggcaggactttttgaagatgtaaattttccttacccagtagtctctgtgattggcggtggtaaaagggaaattgatctttatgcatattattttggtgctgatttggcagtattctttcttgttgccatgttctatcaatctgttcttaaaaacaaaagtgaatttctggaagtttaccagctggaggatcagtttcccaaagagtttgttttcatcctaatgattctctttttcttgattgtggttgatcgcatcatatatctgtggtcatttgccacaggaaaagtcattttctatcttttcaacctagtgcttttcacatactctgtcactgaatatgcttggggaatggagctagtgcacagaaatgttggaggatttgttctacgtgcaatctatcttacaaagtcgatttccttggcacttcaagctttacagattagatatggtattcccaacaagagtaacttgtatcgacagtttttgacaagcaaagttacacaagtaaattattttggtttccggctttaccgtgctctgcccttcttgtatgagctgcggtgtgtgcttgattggtcatgtacaactacatcattaacaatgtatgattggcttaagatatacagtagtggtaacccaacaaatattgccaaccctattattgatgtaagtgttaagattgatataaaagctcttggtggtaggttaaccttttttaaaaccaccgtctgtgaaaagataccatggaaacacatgagggcctatgatgatgttgaccctctagattatttgggaggatataatgttgaggacattcaacttatttgttgccaaccggatgcatcgacgatgtggttgataccagctccagtgcaaaccagattcattcaatcccttgaggagacagaaatgatttttggaaacatggagcttattttaaattgggattttctcagagctagaccaaaagggaaggaactagtgaaatatgagtcacctgttgatcgtagtccaagtgtagatgatgttaaacgagtgctaaacgggactataaatagcttcaggataactgatgcttaccctagatactttcgggttactggatcaggtgaagtgcgacgattagaagcatcgatagattcagtaagtggcgaactgctcttgaataatggcactcctccttggtggtcattctatgatacaaacccatcagatttggctggctgtcaaggccttaatggtcccatggccatcgttgtgtctgaggaaacacctcagggtattattggtgaaacactgagcaaattcagcatttggagtttgtacattacctttgtgttagctgttgcaagatttattagactgcaatgctcagatctgagaatgagaataccttatgagaatcttccatcttgtgacaggttacttgacatctgtgaaggcatttatgcagcacgagcagagggtgagttagaagtggaagaagttctatattggacattgaatattaacggcctatttgaaaagctggagattgtagccggtccggtgggagatattaagagcagagtatttgtagtcaaaagctccctaaacagggactatgttatgaaaataaatcttagatgggaccaaattgagcaaactattgaaattttaagaataaactaa

SEQ ID NO: 2856 - DNA, 708 bp, Oryza sativa
atgaacgcgttccggctagccggggacatgacccacctcctcagcgtggtggtgctcctcctgaagatccacaccatcaagtcctgcgcagctgcatgtggctcacaatatagttggattgggcaagccgtgtttgaatgcaactcagatggcatatctctaaagacccaggagctatatgcacttgtgtttgctgctcgttacttggacctgttcattcattttatatctctgtataacactgtcatgaagttggtctttctggcaagttctttctcaatagtttggtacatgaggcggcataagattgtccgaagaacctatgacaaggatcatgacacctttcgtcatcacttcttagtgttgccatgtttggctctggccctccttattaatgagaggtttacttttagagaggttatgtgggcattctccatatatttagaagctgtagcaattctacctcaacttgtgttgctacagcgcacgaggaatattgacaacctgactggccaatatgtcttctttctaggtgcataccgtgtgctgtatatccttaactggatctaccgatacttcactgagccccatttcgttcattggataagctggkttgcgggcatcgtgcagactctcttgtatgctgacttcttctactattacataatgagctggaagaacaatgtgaagctggagctaccagcctga

SEQ ID NO: 2857 - DNA, 1356 bp, Oryza sativa
atggagcaggcacgcgttggctcagccatgatcttcctactcctcgctttcctgtcagaggtttctgcatccatatcgcagcagcagcagcagcaatgcggtggtgcatcgtctgcaggagtgagagctggcttctggctgccatcctcgagccactactcgcctctcggcagcatcgacacctcgctgtacagccatctctactacagctcgctctccatcgacgagacccgctgcgccgtcgcgccgccgtcctccggtgaagagagctccattctttccaatttctcgagcagcatcaagtcctccggtgggggtttcgctgtcaagaccatcttgtccattggcacggatgagttcagggaggatgtgtccaatgccgccttctccaggatggcctcggagaagaaccttcggagagcgttcatcaactcgtcgatcgaattggctcgtgccaatggcttcgatggcctcgacttggcgtggaggtttcccgcaacgcagctggacatggagaacctcggagatcttctcgcggaatggcgagccgagatcatggaggattcgacgaccagatcgaccgagcctctcctgctgacggctactgtttacttctcgaaccacctgttcggcatggccgacactaacctcaactacccgatagacgacatgtcgagcagcctcgattgggtgaacattatcacgttcagcctgcacaagaacagcaacgtcaccacggctgacgcgcctctctacgacaaggattctcacttctcggctagctatggtgtcatctcgtggctggatgcagggctccctccatgcaagcttgtgatggggatacctctgtttggaaggtcttggttcctcagaaacaaggacaagaacgggctaggagcaccaactgcagctgctggaacaaagcagagaaagagcaaccagatcggcgtaatcgcgtacgcagagatcgaagagtacctgaagtctcagagtgtttttgttactcatgacaaccagtcagtggcagactacttctacagcggtgatctctgggtcagcttcgacagtgccgtggttgtgcaggagaaggtggagtttgtggcgaagtctcagttgcttgggtacttcctctcgaccatcagctttgatgactcaaactacacattgtccaagcaagcatcacagtcctggaatcaatatcatgtttcttcatatgcgcaaggtagttttggaattatgcaagaaggagctataatccaagatctgcatgcatcaacagggtcaccaagtagttggtattcaaaaactctcagctacttgttattgtcaataatacttgtattggaggttctataa

SEQ ID NO: 2858 - DNA, 1293 bp, Oryza sativa
atgtcgtcggcggcggcggtggtgcgcgtggtgtcgaggcgcaccgtgaagccggcagcgcctcggccgcgggagagcatccccctcacctcctgggacctctccatgctctccgccgattacatccagaaaggcctcgtcttccccccgccgccgccttgcctcctagtcgtcgaccacctcgccgccgccctctccaccacgctcaacacctactaccccgtcgccggccgcttcgtcacccacaaccacccggaacctgaaggcggctgctccgtctccatcgactgcgacggccagggcgtccagatcgtccacgccgtcgccgatgccgtcactgtcgccgacctcctccctcccgacgcccacgtcccgcccctcctccactccttcttcccgctcggggacgccgtcaactacgacggccaccatctccccctcttcgtcgtccaggtcacccacctcgttgacggcgtcttcctctccttcgtctacaaccacgsgytctccgatggaaccgcattctgggacttcctcaatgcgtgggtcgagattgcgcgcgccagctgcctcgccgcgcccacctcgcccccacccttgttcaaccgttggtctccctctcccggagacggagccccggtcgtgctgccgtacgccgacctgtcggagctgatcgagaggctgcagccgccgctgctgtgcgagcggatgctacacttctcatcggagtcgctggtggcgctcaaggagcgggctcgccaagagctcctggcggccggggacacggcgggcgcggccgcgctgacgaggttccaggcgctgagctcgctgctgtggagggagtacttcggcaacagcatctacgccatcagcaccggagaaggtgcaggcgttcggagctggtggagcgcgggcacgggtgggcggcggcggctggttgggcgggcggtggcggcgcacacggacgcggacatcagggcgcgggtggcggcgtgggaggtgaagccgataatatacacggcgaggtacttcgacccgtcgggggtgatgatggggagctcgccgcggttcgacatgtacggctgcgactttgggtgggggaaggcgctggcggcgcggagcggcaaggccaacaagatggacggcaaggcgtcgctgtacccggggcgggagggcggaggaagcatagatgcggaggtggtgctcactccacaccacatggcggcgctggacgacgaccacgagctgtgggccgccgtcacgccgctactgctcaacaacaacaaaccttga

SEQ ID NO: 2859 - DNA, 980 bp, Oryza sativa
atggaggctcagaaccaagaggtcgctgccctggtcgagaagatcgccggcctccacgccgccatctccaagctgccgtcgctgagcccatccgccgaggtggacgcgctcttcaccgacctcgtcacggcgtgcgtcccggcgagccccgtcgacgtggccaagctcggcccggaggcgcaggcgatgcgggaggagctcatccgcctctgctccgccgccgagggccacctcgaggcgcactacgccgacatgctcgccgccttcgacaacccgctcgaccacctcgcccgcttcccgtactacggcaactacgtcaacctgagcaagctggagtacgacctcctcgtccgctacgtccccggcattgcccccacccgcgtcgccttcgtcgggtcgggcccgctgccgttcagctccctcgtgctcgccgcgcaccacctgccggacgcggtgttcgacaactacgaccggtgcggcgcggccaacgagcgggcgaggaggctgttccgcggcgccgacgagggcctcggcgcgcgcatggcgttccacaccgccgacgtggcgaccctgacgggggagctcggcgcgtacgacgtcgtgttcctggcggcgctcgtgggcatggcggccgaggagaaggccggggtgatcgcgcacctgggcgcgcacatggcggacggcgcggcgctcgtcgtgcggagcgcgcacggggcgcgcgggttcctgtacccgatcgtcgatctcgaggacatccggcggggcgggttcgacgtgctggccgtgtaccaccccgacgacgaggtgatcaactccgtcatcgtcgctcgcaaggccgacccgcgtcgcggcggcgggctcgccggcgcacgcggcgcggttccagtggtgagcccgccgtgcaagtgctgcaagatggaggcggccgccggcgcgttccagaaggcggaagagttcgccgccaagaggctatccgtctg

SEQ ID NO: 2860 - DNA, 999 bp, Oryza sativa
atggaggctcagaaccaagaggtcgctgccctggtcgagaagatcgccggcctccacgccgccatctccaagctgccgtcgctgagcccatccgccgaggtggacgcgctcttcaccgacctcgtcacggcgtgcgtcccggcgagccccgtcgacgtggccaagctcggcccggaggcgcaggcgatgcgggaggagctcatccgcctctgctccgccgccgagggccacctcgaggcgcactacgccgacatgctcgccgccttcgacaacccgctcgaccacctcgcccgcttcccgtactacggcaactacgtcaacctgagcaagctggagtacgacctcctcgtccgctacgtccccggcattgcccccacccgcgtcgccttcgtcgggtcgggcccgctgccgttcagctccctcgtgctcgccgcgcaccacctgccggacgcggtgttcgacaactacgaccggtgcggcgcggccaacgagcgggcgaggaggctgttccgcggcgccgacgagggcctcggcgcgcgcatggcgttccacaccgccgacgtggcgaccctgacgggggagctcggcgcgtacgacgtcgtgttcctggcggcgctcgtgggcatggcggccgaggagaaggccggggtgatcgcgcacctgggcgcgcacatggcggacggcgcggcgctcgtcgtgcggagcgcgcacggggcgcscgggttcctgtacccgatcgtcgatcccgaggacgtcaggcktggcgggttcgacgttctggcggtgtgccacccggaggacgaggtgatcaactccgtcatcgtcgcccgcaaggtcggtgccgccgccgccgccgccgcggcgcgcagagacgagctcgcggactcgcgcggcgtggttctgccggtggtcgggccgccgtccacgtgctgcaaggtggaggcgagcgcggttgagaaggcagaagagtttgccgccaacaaggagctgtccgtctaa

SEQ ID NO: 2861 - DNA, 1329 bp, Oryza sativa
atggccatggctgcggcgagcgccatgcggccattagctcccctcttccttttcttcttcttctcccttgccgcctccgcgagtgacaacattcttgccaactcatctctcgccgatggccagaagcttgtctcggccggtggggtcttcgagctcgggttcttcaccccgccgggctcgacgacggcggcgaggttcttgggaatatggtacagggacatcgatccgccgaccgtggtgtgggtggccaaccgggatgctccggtgagcggcacggccgggagcttggctgtcgtcgtcaacggcggcggcggcggcggcgggkcggtggtcgtctggtgctcggcgatgggtcggggcgagtggctgttggatagtggcaacttcgtgctcgccggcggcggtggctccggggatgtgatctggcagagcttcgattacccgtcggacactctgctccccggcatgaagtttgggtgggacctcaccaccgggctcgaccgctacctgacgacgtggaggagcgccggcgacccgtcgccgggcgactacacgttcaagatcgacccgcgcggcgcgccggaggggttcatctggtacaacggcacgtcgccggtgtaccggaacgggccgtgggacgggctgcagttcagcggcgagccggagattgagcccaaaaaaaccagtttccgcttcgagttcgtcgccaaccgcaccgacgtctactacaccttcgtcgtcgacggcggcggcggcggcggagtcctctcgaggttcgtgctgaaccagtcgagcgcgcagcggtacgtgtggctgccgcaggccggcgggtggagcctctactggtcgctgccgcgggaccagtgcgaccagtacgcgcaatgcggcgcctacggcgtctgcgacgtcggcgccgcgtcgatgtgcggctgcccggccgggttcgcgccggcgtcgcccaggaactgggagctcagggacagctccgccgggtgcgcgcggcggacgcggctcaactgcacgggcgacgggttcctgccgctgcgcggcgtgaagcttcccgacaccaccaacgcgacggtggacgcggccatcgccgtcgaccagtgcagggcgaggtgcctggccaactgctcctgcgtggcgtacgccgcgtccgacgtcaggggaggcgggagcggctgcatcatgtggagctcgccgctcgtggacatcaggaagttctcctatggcggcgaggacctgttcatgcgtctcgccgcatccgatttgcgtatgattctcctctcctctctagttcgtatgccatatactttccttcgtttttaa

SEQ ID NO: 2862 - DNA, 560 bp, Oryza sativa
atggcaaggcctggtagtggtaacatcccaggatcagcatgcattcctcttctgattctgctgctgctgctgctgctactgcatccatcagaagctcagccttctcctggctactacccaagcaagatgttcaggtcgatggccttctatgaagggtacagcaccctgtggggcccacagcaccagaccctgtcccaggatcagaagtctctcaccctgtggatggaccgtagctcagggagcgggttcaagtcgacacggtcgtaccggaacggctacttcggggcgtcgatcagggtgcagccgggctacaccgccggcgtcaacacggccttctacctgtcgaacacggagcagtacccggggcaccacgacgagatcgacatggagctgctggggacggtgccgggggagccgtacacgctgcagacgaacgtctacgtgcgcggctccggcgacggcaacatcgtcggccgcgagatgcgcttccacctctggttcgaccccaccgccggcttccaccactacgccatcctctggaaccccgaccaaatcttgta

SEQ ID NO: 2863 - DNA, 2475 bp, Oryza sativa
atgccctccctccccaactccggcgacgagggcggcgccccgcctccgactccgccgccgccgggggcgcgccgcgtggtggtcgcccaccgcytccccctccgcgcggatcccaatccgggcgcgccgcacgggttcgacttctccctcgacccgcacgcgctcccgctccagctctcccatggcgtcccccgccccgtcgtcttcgtcggcgtgctcccctccgccgtcgccgaggccgtccaggcgtccgacgagctcgcggccgatctcctcgcgcggttctcatgctacctggtgttcctccccgccaagctccacgccgacttctacgacggcttctgcaagcactacatgtggccgcatctccactatctcctcccgctcgcgccctcctacggcaggggcggcggcctccccttcaacggcgacctctaccgcgccttcctcaccgtcaacacccacttcgccgagcgcgtgttcgagctcctcaaccccgacgaggacctggtgttcgtccacgactaccacctctgggcgttccccaccttcctccgccacaaatccccgcgcgcccgcataggtttcttcctccactctcccttcccctcctccgagctcttccgcgccatccccgtccgcgaggacctcctccgcgccctcctcaacgccgatctcgtgggcttccacaccttcgattacgcgcgccacttcctctccgcgtgctccagggtcctcggcctctccaaccgcttgcgccgcggctacatcgggatcgagtacttcggccgcacggtggtcgtcaagatcctctccgtcggcatcgacatgggccagctccgcgcggttctgccgttgccggagacggtcgccaaggccaacgagattgctgacaagtacaggggacgacagctgatgctcggcgtggacgacatggatttgttcaaggggattgggctcaagctcttggccatggagaggctgctggagtcgcgggcggacttgcgtggccaggtggtcctcgtgcagatcaacaacccggcgcggagccttggccgcgacgtcgacgaggtccgcgcggaggtgctggcgatccgtgaccggatcaatgcccggttcggctgggcggggtacgagccggtggttgtgatcgacggcgccatgccgatgcacgacaaggtggcgttctacacgtccgcggacatctgcatcgtgaatgccgtgcgcgacgggctgaacaggataccgtacttctacaccgtgtgccggcaggagggcccggttcccaccgctcctgccgggaagccgaggcagagcgccatcatcgtgtcagagtttgtcgggtgctcgccgtcgctgagcggcgcgatccgcgtcaacccctggaacgtggacgacgtcgcggacgccatgaacacggcgctgaggatgagcgacggcgagaagcagctgcgccaggagaagcactacaggtacgtgagcacgcacgacgtcgtctactgggcgcagtcgttcgaccaggacctgcagaaggcctgcaaggacaactcgtccatggtgatcctcaacttcggcctcggcatgggcttccgcgtcgtcgcgctcggccccagcttcaagaaactctcacccgagctcattgaccaagcataccgccagactggcaacaggctcatcttactggactacgatggcacagtgatgccacaggggctgatcaacaaggcgcccagtgaggaagtgatccgtactctgaatgaactgtgctctgatccgatgaacaccgttttcgtcgtcagcgggcgggcaaaggatgaactggctgaatggtttgcaccatgcgacgagaagctggggatctctgcagagcacggctacttcacaaggtggagcagggattctccctgggagtcatgcaagttggtgacacattttaattggaagaacatcgcagggcctgtaatgaagcactacagtgatgcaaccgatgggtcatacatcgaggttaaagaaacatcactagtgtggcactatgaggaagccgatccggattttggatcatgccaggccaaagagctccaggaccacctgcagaatgtgcttgcgaacgagccagtctttgtgaagagcggccatcagattgtggaagttaatcctcagggtgtgggcaaaggagtcgccgtgcgtaatctcatttcaaccatgggaaatcgtggcagcttgccagatttcatcctctgcgtcggcgatgaccggtcggatgaagacatgttcgaggctatgatcagcccttcgcctgcgttcccggagactgcacagatcttcccctgcactgttggcaacaagccgagcttggccaagtactacctggatgacccggctgatgttgtgaagatgctccagggcctgacggactcgccgacccagcagcaaccgcggccccccgtctcgttcgaaaactcgctagatgattga

SEQ ID NO: 2864 - DNA, 1143 bp, Oryza sativa
atggcggggtacggggaggagaaccagaacggcatgaacgggtacgaggaggaggaggaggaagaggaggtkgaggargtccraggaggttgcagaggagaggcgaggcggaggtggagaatggagggcgtcggcaatggcgaggaagcggggaggactgcgggtggtggagagggcggtgattcgtcggggaaaatttttgttggaggtgtagcctgggagacaactgaagaatcgttcaccaagcattttgagaaatatggagctatatctgattctgtgatcatgaaagacaagcatacaaagatgcctcgtggatttggttttgttacattttcggatccatctgttattgacaaggttctgcaagatgaacacactatagatggaagaacagttgaagttaaaaggactgtcccgagggaggaaatgtcgtcgaaagatggtcctaaaacgagaaaaatctttgttggtggtattccaccatctcttactgaagataaattgaaggagcatttctcttcatatgggaaggtagttgagcatcagataatgcttgaccatggcactgggcggtcacgaggctttggctttgtcacatttgaaaatgaggacgctgttgaaagggttatgtcagaagggagaatgcatgatcttgcagggaaacaggttgaaataaagaaggctgagcctaagaaacctggcgggggtgattctagctctaatgggagacatagtcacgggagtggtggtggccaccgtagttcttaccgtggtagtggtggtggcaattctggaagcagcagcagcggtggctatggtggatatggtggtggctatcggtcagctgctgcagcttattacggtagcacaggttatgctggctatggcagaggttatggatatggaggtaaccccgcatttgggtcaggctttggctctggctatggtggttcaatgtatggaggtccatatggtgcctatggtgcatatggtggtgcctatggaggtggtggtgcatatggtgcaccgggtggctacggtgcaggaggatatggtgcttatggcggagctggaggtatgggcggtggtgggagcacaagtggtagaggctcgagcagataccacccgtacggaaaatga

SEQ ID NO: 2865 - DNA, 3456 bp, Oryza sativa
  misc_feature (1)...(3456): n = A,T,C or G
atgccgggttcgcctagccgaatnggaggccggamcaacaacgaggccgccggcggcgggcccgccgccgagggcggcagcgccgtcggcggcccggggttcacgcgcgtcgtccactgcaacaactccgccgtgcaccgccggaagccgctcaagtacccgaccaactacatctccacgaccaagtacaacatcctcaccttcctccccaaggccatcttcgagcagttccgccgcgtcgccaacctctacttcctcctcaccgccatcctctcgctcaccccggtgtgccccttctccgccgtcagcatgatcgcgccgctggcttttgttgttgggcttagtatgatcaaggaaggggtcgaggactggcggcgattcatgcaggacatgaaagtgaacaaccgcaaggttgccgtccacaagggcgaaggcgaattcgagtaccggcactgggaggaccttgctgttggtgatgtggtcaaggttgagaaggaccagttcttccctgctgatttactactgctgtcctcgagttatgaggatggcatttgctacgtcgagacaatgaaccttgatggtgaaacgaacctcaaggtaaagaggtcacttgaggttacgctgccattggaagaggacgagtcatttaaggatttccaaggattgataaggtgtgaggacccaaacccaagcttgtacaccttcattggtaaccttgagtatgagaggcagatttatgccatcgatccgtttcagatacttctcagggactcaaagctgaggaatacatcctttatctatggagtggtcatttttactgggcatgacagcaaggttatgcagaactcaactgagtcgccatccaagaggagcacgattgaaaagaagatggacttgatcatatatattttgttcactgtactggttcttatatcactcatcagttcgattggatttgctgtgaggatcaagtatgatttgcccaactggtggtacttgcagccagagaagtccaataaattggatgatccaacacgtcctgctctttctgggatattccatctcattacagcactcattctttatgggtatttgattcctatctcactgtatgtgtcaattgaacttgtgaaggtattgcaagcacatttcataaatcaggaccttcatatgtttgatgaggatacaggcaatactgctcaggcccgaacatcaaacttgaatgaggagcttggccaggttcatacaattttgtcagataagactggcactttgacctgtaatcagatggatttcttgaaatgttcgattgccggggtttcatatggtgtgggttcaagtgaagttgaactcgctgctgcaaaacagatggcgtcaggcgatgatggccaagatattcatgtacaagatgtatgggagaataatgaggatgaaatacagctagtagaaggagtgactttcagtgttggaaggacccgaaagtcctcaataaaaggttttagttttgaggatgaccgccttatgcaagggaactggactaaggagccaaattcttctacgattcttatgttcttcaggatacttgctgtttgtcacactgcaattcctgaggtgaatgaggcaactggtgctcttacctatgaagcagaatcacctgatgaaggggctttccttgtggcagccagagaatttggatttgaatttttcaagagaacacaatcaagtgtctttgtcagggagaaattcagctcttccaatggcccagttgagagggagttcaagattctcaatctattggagttcaacagcaaaagaaaacgaatgtcagtaattctgaaggatgaagatgggcaaattcttcttttttgcaaaggagcagatagcatcatatttgatagactggcaaaaaatggaaggatgattgaagctgatacgagcaagcatctcaatgattatgagtgctcgatgaatcagaatattcctcttggaatgctgagtttcttaaagccaaagacctctattggacctgacagagaattgcaacttgagcgagtctcagaattgattgaaagagacctgatccttgttggggcaactgcagtagaggacaaactgcaaagtggggttcctcagtgcatagatcgtttggcacaagcaggtctcaaaaatctggkttctgacagatacgcatgcagtttactgaggcaaggcatgagaaggatatgtttgtcaatacccactgatgaccaagtagcccaggatgcaaataaggctgcaaaggagagtctcatgtcgcaaatcgcaaatggttcacaaatggtcaagctagagaaggatcctgatgcagcatttgctctagttatagatggaaaagcgctcacatttgctttggaagatgacatgaagcatatgttcctgaatcttgcaatagagtgcgcttctgtcatatgttgccgtgtgtccccaaagcaaaaagcactggtgactcgactggtcaaagaaggtattggaaaaactacattagcaataggtgatggtgcaaatgatgtaggcatgattcaagaagctgatataggagttggtataagtggggtagagggcatgcagatctgctacttcttctacaagaatattgcttttggacttactatattttactttgaggcatttgctggattttctggtcaatcagtttatgatgattggtttatgctgctcttcaatgttgttcttacctcactgcctgttatctcacttggggtatttgagcaggatgtttcatctgaaatctgcttgcagttcccggcgttatatcagcaaggaccgagaaatcttttcttcgattggtaccggattttaggatggatggcgaatggcctctactcatctctggccatattctttctcaacatctgtatattctatgatcaggcaatccgttctggaggacagactgctgacatggctgcagtgggaactactatgttcacctgcatcatctgggctgtcaacatgcagattgcgctgacaatgagccatttcacctggattcaacatctctttgtctggggcagcgtaggtacttggtacctcttcataatcgtctatggctcggcgttgaggtcccgcgacaattaccagattctactggaggttcttggacctgctcccttgtactgggcagcaactcttctggtgactgctgcttgcaacatgccctacctgatccacatatcctaccagagattgtgcaatccacttgatcaccatgtgattcaagagatcaagtacctgaagaaggacgtcgaagaccaaacgatgtggaagagggagcggtcgaaggcccggcagcggacgaagattggtttcaccgcgagggtcgatgcgaagatcaagcagatcagggggaagttgcacaagaaggccccatccctaaccatccatactgtatcgtag

SEQ ID NO: 2866 - DNA, 2790 bp, Oryza sativa
atggccctttacttttcccctcttgtcctctctccggactctgggtcgtcgcttctctccccacaaggattttckaaatttcattgccatcaagaacacacaggcttcagtggtttggaggtatggcgtattgaaaacttcaagcctgttcccgtgccaacatcttcacacggaaaattttacatgggtgattcatatatcatcttgaagacgacagccttgaaaaatggttcatttcgccatgatctccactactggcttggaaaggatactagtcaggacgaagctggaactgctgcaattctaactgtggagcttgatgctgcccttggagggcgtgctgtccagtacagggaagtacaaggcggtgaaactgaaaagcttctctcctattttagaccatgcatcatgccacagccaggaggggtagcttctgggttcaatcatgtagaggtcaatcagcaagatcatgttacccgcttatatgtgtgccaaggaaagcatgttgttcatgttaaagaggttccttttgttcgttcatcccttaatcacgaggacatattcattttggataccgcgaacaaaattttccagttcaatggctctaactcatgcattcaagagagagcaaaagctcttgaagttgtgcaatatatcaaagatactttccatgagggcaagtgcsaarttgcagctgttgaggatggaaagttgatggccgatactgaagctggtgaattttggggtttgtttggtggttttgctcctctcccaaagaagacatcttcagaggacaatggggatgataaggaaactgtgaccaaattgctatgttttaaccaaggaacgctggagcatattagttttgaatctttggagcatgagttacttgagacaaacaaatgctacttgttggactgtggagctgaaatgtatgtttggatgggcagaggtacttctttgcaagtgagaaagggtgcaagtgaagctgctgagaaattgctcattgatgagaaccgaaaaggatcaaatgttatcaaagtgattgagggattcgaaacaatcatgttcaagtcaaaatttaacaagtggccgcctactcctgatttgaagctgtcatctgaggatggccgaggcaaagtggcagctctactcagaagtcaaggattggatgttaaaggattgatgaaggctgctcctgaagaagaagaaccccaaccttatattgattgcactggtcatttacaggtctggcgagtaaatggcgatggcaagactcttctttcatcttctgatcaatcaaaactttacaccggagattgctacatttttcaatacacatacactggagatgataaggaggaatgtcttattggaacttggtttgggaagaagagtgttgaggaggacagaacatcggcaatttcactagctagcaagatgtttcaggctgcaaaattccaggctgcccaggctcgcctctatgaagggaaagaaccgattcaatttttcgtcatatttcagagtcttcaagtttttaagggtggacttagctctggatacaagaactttattgctgtaaatggtaccgatgacgacacttacgttgaaggtgggcttgctctcttccggattcaaggctcaggatcagaaaacatgcaagcaattcaagttgatgcagtgtcttcgtcattaaattcatcctactgctacattctacacaatggaaacactgtgttcacatggactgggaaccttacaacctcactggataatgacttggttgagagacagctagatgtaattaaggtaacaggaggtaccaccatttctggtgtaaaactgggtatctctaggtataaggtcaaggaaatacaccactttactcaggatgacctgatggcagaagatattttcgttctagactgccgcaccgacttgtttgtttgggttggacaggaggtggatgccaaattgagatcacaagcgatggacatcggtgagaaatttcttctacatgatttccttatggaaaatctctcgcaagacacaccaatttttattgttacagaaggaagtgagccacagttttttactaggttcttcacttgggactcagcaaaatcgctgatgcatggcagttcataccagaggaagcttgcaatagtaaagggtggagcaactccatcgcttgataaacctaaaaggcgaacaccagcgttttcaggaaggaacgcaggacaagataaatctcagcagcgcacaagaagtatgtcccacagcccagaacgtcaccgtattcgaggaagatctccagctttcaccgcaatagcttctgcctttgagaacccaagtacccggtatctttccacccctccccctgctgtcaagaagcttttcccaagatccggagggtctgaattgccaaagacatcatccaaacaatcagctatcaatgctctcaccagtgctttcgagggtcctacgaaaagtacaatacctaagtctgtaaaagcgagccccgaggcagagaaggcaatacaggaggaaggctcaacgatcggtgaaagtgaaaacgagccagaagatgatgagaacagcacaatctacccatatgaacgtttgaccaccacatctgatgatcctgctcctgacattgatgttaccaagcgagaggtctacttatcatcagttgagttcacagagaagtttggcatgacaagggcatcattcaaaaaccttccaaaatggaagcaaaacaggctaaagtctgatctccagctcttttag

SEQ ID NO: 2867 - DNA, 3423 bp, Oryza sativa
atggaaaccagagtcaagatcatgctcaagctcctgggagaggaagccgatacgttcggcaagagagccgagatgtactaccgcaggaggccagaggtgattaaccatgtggaagaggtttacagggcctacagagctctcgttgaacgctacgaccacttatccaaggagctgcataaggccaaccacaccattgctactgcatgcccacaacacgacgtctccttgttacaagaacaagacgatgctgaattcacacccatcagaatacaggaatccactactactgtacaggaggttttgaacccaaaaggacatgcgcgcccctgtgctcctcacttcaccaaacagaatgcgcaacaagagatcgacacacttcaaaaggctatacttgtcctgcaaaccgagaaagaattcgttaagagctcttacgagactgggattaccaagtatcgggagatcgagaagcagattgcagatatgcaggaccaggtatgccacatccaaaatgagtttgatgcacatgcgtccatcgaggatgatgaagcccgtgccctgatgaccattacagctcttagatcttgtcaaggcacagtagctaatcttgtgaaaatatttgaagagttagtcagggttgcagcaggggagtccgaaaaagtaaattatctccgacaaaaactgtatgctatgaactacatcattgacccgtctaagggagaagttggcacaacaaacatcgcagtgaaaaatagagtttatcctaatactcaggaaatactggagctgcaacctatatatgaaaaaatcgaaaagttttttgagctcaactctgaatctgttgtgcaggagatggcagagagagttgatgagcttgttgataaggtcatgaacttggagctcaaattcccaaagcagtccgctcaaatcaagcagctgaaggaagataatgatagcctcaaagataggttggatgatctacaagatgagatagcacttcgagatgatccaagtgacttaagtgaacagctcaagttagcagaagatgagttgaacagagtcaaggctcttgaaagatctgttattgaggaagaagttcttgttagcacagtcttttctgaagttgttagttgcatcactaatatctcaaaggcctttggatctattgatccagaggacatgactagtttatcagctgcagttgaaaatgatggggaaataacatcagatgatatcagcacctcactgccagaagaagaattcaggggtacagaggaagcaactacagatgataatttgggcagagacaggtgtagaaaagaagatgcctcaggagttgagggtcatgattcactagatggtactgatggcattgatgactgtaagaatggcaacgaggaaaactttcaaagtgaaaatcgcttaatccaagaagacttgatggataaaaggtcaatacaagctagcaataacattgatcgaattgttattccaggcaaagaaaatggttttaacaacgcatgtgaaggcaaaatagattgcagcccatcaggtaatacgaagaaatatagagacataggaaatgatgttattgacaactctgttcaaggggaaagtttgaaaggtgaacatccaccaacggtaataagtcagactcacctcccacactcagaatgtttagatactttaaccaataaaagtgactccgatgagaaagggtcatcagtggttgttactgtgaattcattcggaggcagcaagagaatacaaggcttaaggattggtggcgatgaaaattctatgtctgggaacagcttgatccaggaagaactcagagatgacaaatcactaaaaacacctggatatgttaatttggttggttctacaaaccaacatagtttgagtgatggaagcaccactgaagaaatctcattacccaaagtttctaatagttgtttcagtgatgcagatatgagactggaattatgtcatactgaagaagcaatatctgttgaagaatggccaaaacaagatggtcagctgattgccccagaaactatgaaaagtttgaacggaggcagcaaagttgactcatctgagaaaggtggccgcacttcattagagcatatgaacagcatacaggatttgaagactagtgaacttgtggatgcacattcgtcaagagtgtatcagcaagtacccaaagtaacaacaaaatcaaacaatattgctagttgcattcctcatggtgagctagagatgagaagttcggatggcagagaacatacaagacaagcaagtaccttgagcaagcctggaagcatgagcttgcgcgtcaattctagtttggttgcagaaagagatgcacctagctggcaggagtttctccttgatggcattgaaggtagagaagcattattgctagacgactacactttaattctccggaactataaagaaacaaagagaaggcttgctgaattggaaaagaaaaatgagcaacatcccaaagagacaaagacagtaataagggagttgaggaatgcaaattccatgaaatatgttgagatccagtccctaagagatctcctggatccttcagaagatatatcatccacacatagtaaaatgggttttaacagatcaaatcatcctttggacacagaaatttctgtgctggagggaatcgatgtaagacacactggtgtacggaagaatacttcacctttcgaagtgaagttcagatctgagattgatgctctggttgaggaaaacttgcagttcttggtaaggtttagcatggcttgccaccgcatgcaggactttgacagcaaatatcaggagctacaaaagggaatgggggattttgaagttaagaagacaggagaacctgatgctgcagccgagtctgatcctgctgaaaagaagttgagagagctaagaactgaactggatgtatggtttgaacagaatgcacttcttgatcaagacctgcagctcaaaaccatgtctctttgcagattgcaggaggagatagctgaagccttgcgtgctagcgcagagactgatggtggtaggtttacaccatacgaagcagccaagtttcaaggggaggtactgaacatgcaacagtctagtggtaagatcgagagggagttacagtcagcactgaagcgcatgagagaacttgaaggcaaggtcaatgacggcttgcagaagctgcgtgagagctttgatctttcatgcaggaggtcatctttggtggaggaagaaagcagcagcaccagctaccacagccaattcaaacacttcccgactagaacaagagtgccattgcggaacttcctattcggcacaaagccgaagaagaaatcaatatttgcctgcataaatcctacgttgcagaaacagttcagcgatctgtga

SEQ ID NO: 2868 - DNA, 1194 bp, Oryza sativa
atggcagctcccaagcccattgctcggcttatttcccatgtcattcttgatttagatggtaccctcttaaacacagactgtgttgtaagtcaagtgctgaaaccatttctagtcaaaaatgggaaaaagtgggacagcaagaaagctcataaattagttggaaagacaccttatgaggcagcagctgttgttttagaagattatggactcccttactcaacagaagaatttctctcaatgcttactccaatgttcaatgagcaatggtgcaacataaaagctcttcctggagctaatcggttgataaaacatttgaagagtaatggagtaccagctgctttggcttccaactcaccaagatcaaacattgacgcaaaaatttcctgccatcaaggatggaaagagtcgttctccgcaattgttggtggtgatgaagtagagaaggggaagccatccccagatatatttttggaagctgcaaaacgaatgaatacaaatcctccaaattgcttagtaatcgaggactccttaccaggtgttgcagctggaaaagctgcaggaatgcatgtcatagctgtaccttcagtccccaaaaggactgctgaattcagttctgctgatgaggtgatcaattccctccttgacgtaaagcctgaaaaatggggattgccaccatttagtgattggatcgatgataccttaccaatagaaccatggtttattggtggacctgtgattaaaggatttggccgtggttctaaagtactaggaattccaacagccaacttacctgcagaaaacttctccgacgtactatcagagcatacatcaggggtatactttggctgggctggactttcaacgcgaggtatatttaagatggtcatgagcattggctggaacccttattttgataacacggagaagactattgaaccatggttgcttcacgattttggtgaagacttttacggagaggagctgcgccttgttattgttggttacatacgacccgaggccaactttccttcacttgagagcttgatagagaggattcacgaggatgcaaggatatcagataaggccctgaatttaccattatacgccaagtataaagactcgccgtacctaagaaattccttgaaggaggacaattctgctaacgggaaccagtcagtgatagattccaagtga

SEQ ID NO: 2869 - DNA, 462 bp, Oryza sativa
atggcgacgtgcacacttgcaacttcatgtgtgtccttgagcaatgctagaactcaggcctccaaggtggcggcggtcaagagcccggcatctctaagcttcttcagccaaggcatgcagtttccaagcctgaaggcctcctccaagaagcttgacgtctcggcaatggctacctacaaggttaagctcatcacaccagaagggcaagagcacgagttcgaggctccggatgacacctacatccttgatgccgccgagaccgctggagtagagcttccctactcatgccgtgctggagcatgctctacctgtgccggtaagatcgaggctggctccgtcgaccagtcggatggatcattccttgatgatgcgcagcaggaagaaggctatgtgctgacatgtgtctcctaccctaagtccgactgcgtcatccatactcacaaggaaggagacctttactaa

SEQ ID NO: 2870 - DNA, 2634 bp, Oryza sativa
atgaggcggaacctgaagacgaacgtcggcatcaccgtcttcccgatcctcatctgcgtgctgctcgtcgtgcttcagaacgtgatcaacggggagctcgacaagcccaagtaccagtgcggctgcgaatgcaccgagagtgacctggatgggacctgcctgcggaaggagtgcggcatccagcactcgacgctggagcaggtgaatgtgttcatagttcttgagtacttccaattgacaggtgtttcaggtcgggtgtttcctgccctttatccgttgcctaatgtgacagactacctgatgcctcctcccttttctccctctcaagtgacagactatcttgatatcctctccaggatagttgttcctcgttgcatgcccttcatgtttgggaccattccatacaatgcagggggcgtacccttacatatcgactctttcgtagggctgcctagattgtattctgatgtcctgttgaatgaaccagatatacagtgtattgaagttcagatgttgtggcgtgaaagtgcatcagttatcaactatgaactgtttaagggttacgtacaaagaggaggagaaacaaatgagtttgttgcaggttatgacttcttgaacacgacaggatatgacctcaatataaatgtttggtacaactctacttataatgataacactgcatattcatttatcgcagcattacgagttccacgattggtgaatgcaatatccaatgcatacctaaaatttatcagaggaagtggggtggatatgctgcttgaatatgtaaaagagatgcccaaagttggaacaaggtttaggcttgatctctcttctcttctcagtgtgctattcttcacatggatagttgaactacttttcccagttatgttgacatatctggtgtatgagaaggaacaaaagctaaaaattatgatgaagatgcatggtctgaaggatgggccttactggctaatttcttatgcttatttctttgctctatcggttatctatatgacattttttgtgatttttggctccttaattggtaattttcttccaatctattttcacgaaggtgctgttctgacaaataaatctagatatttcaatagattttttttgattgcacttgcattttttgtggcatctttcttttcatctgtcaagacagccactgtgattggatacatttatgtatttggctctggcttgctaggggcatttctttttcgtttctttgttgaggacaggacctttcccaatggttggttgttagtaatggagattgtcccaggattttccctctatcgaggactatatgaacttggccaatatgctttctctggaagtgctatgggagcctctggcatgacatggggaaatttgagagacccaatcaatggaatgtgtggtatatttatcatcatgacagtagaatgggcatttctccttatgttagcattctatttggatcaagtctctccagtaggtggtggtgtcaggaaaaggcccttattcttcttcaggtgtttacagaagaagcacacaccgtcattgcagaagcctagctttgtgcaacagggttctaaagtaattgtcgatatggagaagccagatgttgctcaagaaagagaagtagttgagcaacttttggtaggccgcaatgcaaatcaagctattatatgtcacaacctcaagaagatctatcctggaagggatggaaaccctgataagctggcggttcgaggattatctcttgccgtaccaaaagggcagtgctttggaatgcttggcccaaatggagctgggaaaacatccttcattagtatgatgattgggcttgttaaacctacatctggtacttcctatgttcatggaatggatatcaatatggatatggatcacatatatacaaacatgggggtgtgcccacagcatgacttactttgggaaccattgactggaaaagaacatctgttcttttatggcaggctgaagaatcttaaaggtgctgtgttggtgaaggctgttgaggatgctctgaagagcgtaaatctgttccatggtggtgttggtgataagcaagtgggaaagtacagcggaggcatgaaaagaaggctcagtgtggcaatatcattgattggagaccccaaagtcgttttcatggatgaaccaagcactgggctagaccccgcatcaagaaataacttgtggaatgttgtgaaggaggccaagcgaaacccgcactcgatggaggaggctgaagtactttgtgatcgacttggcatctttgtcgatggcgatttccaatgtcttggaaatcctaaggagctaaaggcgagatatgggggagcatacatattcacaatgacaacatctccagaccaagaacaagaggttgaacggctagttcatgacttgtctccgagcgcaaataagatctaccacctatctggaactcaaaagttcgagctgccaaagcaagaggtgaaaatagccgaggtatttcgcgcagttgaggatgcgaagaaacggttcaccgtgcatgcctggggcctggttgataccaccttggaggatgtcttcataaaggttgccaagggagcaaaggcatccagtgttaatagttag

SEQ ID NO: 2871 - DNA, 1893 bp, Oryza sativa
atgccgcccggcgcgcgagcaagacgcatcgccgcactcgacctgatcttcctcgtgtttctccggctcgccagcgcgtatcaacgaccatccgacgcgcatatcaactgcatcgacagcttctgtctcggcggctacacctgcagcgaaaccaccgccaccacgtcctgcaccgcctacctcaccttccgctccgaccccccgctctccgtcgcctacctcctcaacgcgacgccctccgccgtcgccgccgccaactctgtccccctcgccgtctcccccgtcgacggcacgcagctcctcctcgtccctgtcccctgctcctgcaaccgggccaccggctactaccaacacaacaccacctacgccattcaggaacttgataccttcttcctcatcgccaataacacgttccaggggctcacgacgtaccaaagcatcatcgccaataaccctgcaagcgaagctatgtctccagtgatcaacggccccctcgccgtgccgctccgctgcgcgtgcccctctgcgactacgggacgaataaacaatctgctgacgtacgtggtccaggagggggacaacgtgaccagcatcgcgcgcagattcaactctacgcacggcgacgtgcttgccgccaacacgttgttggtcccgctcgtccacccgccgcattcgcgagtggtgctcgcgaatactactattacttccacgactccgccggaatctcagaaattttacgtgtcgagtccctgcagcaatggcttgctggctggcttgggtatcggcgtcggatgcggcgtctctgcgtgggctgccgttcttgctgtgttcttgctatggcgtcgaaggcggcggcgccccgtcggcgacagctcaggcatggccagggagacccccctggtagcggctgtgcgtggcgcggtggagactctggctgcctacagctacgcggacatcgagacggcgacggcggggttcgcggaggagcggagagtggccgccggatcgtcggtgtaccgcgcggtgatcaacggcgaggctttcgcggtgaaacgcgtggccgccggcggcgacgacgtgcgcggtgaggtcgacgtcctcggccgcgtcaaccactccggcctcgtccggctccggggcctgtgcgcgaacggagacgacacctacctggtgctcgagttcgccgagaacggcgcgctcagcgagtggcttcaccccggcagcgcagccgcgtgtctccgccgtgtcctcggctggaagcagcgcgttctggtggcgctcgacgtcgcgggtgggctcaactacctgcaccacttcaccaaccctccctacgtgcacaagaatctcaacagcggcaacgtcctcctcgacgcgaacctccgcgcgaaggtctcgagcctcgggttcgcgcgcgccgtggccgtcgccgtcgcagccggagacgacagcatcgccctgatgacacaccacgtcgtgggcacccacggttacctggcgccggagtacctggagcacggcctgatcagtcccaagctcgacgtgttcagcttcggtgtcatccagctcgagctcttgtccgggaagacggcggcgtttgtcaccgacgatgacgggcagaacatgctgctgtggcaggcggcggacgggctcgtcgacggcgatggcgcatggttcaagctgagggcgttcatggaccctcagctgcaaggccactacccgatcggtgtcgcgtccgcggtggccgcgctggccgttcggtgcgtggcgcgggagccacgggcgcggccttccatggaggaggtgttcgtcacgctctcagcggtgtacaacctcacggttgattgggatcctcagaattacagcgcatcagcttctatggtcctcggtaggtag

SEQ ID NO: 2872 - DNA, 1434 bp, Oryza sativa
atgtcggggaggatagaggagtggtggcggcatggcaggcagcggtcgctcgtcgagggcaccgtatccggctccggtggccaaccaggttgtatcgcctccgcgctcatggccgcaaggatgcttcgcttcaccactgctcgtctcctccggcctcggtgccggcgtctctatcatggctgcagcgacggcgcggcggcgtgcagtgtcgtcggcgagagggtgacggtgctgaccatcgatggcggcggcatccgggggatcatcccgggcaaggtgctcgagttcttggagaacgagctccagcagctggatgggccagaggcgaggctggccgactacttcgactacatcgccgggacgagcaccggcgggctgatcaccgcgatgctggccgcgcccggcgccggcggggacggacggcggcggccgctgttcgccgccaaggagatttgtccgttctaccaggagcacggcccgcgcatcttcccccagaggtggtgcaagctcgcctccactgtcgccgcggtgtgggggcccaagtacaacggtaggtacctccgcaacatggtccgggaggtgctcggcgaaatgacggtgggcgacacgctcaccaatgtcgtcatccccaccttcgacgtccgtctgctccagcccgtcatcttctccacatacgacgctaagcattcgcctttgaagaacgcgctgctctccgacgtctgcatcggcacgtcggcggcgccgacgtacctccccgcgcactgcttccggacacacgacggcgccggcgaaacgcgcgagtacaacctcatcgacggcggcgtcgctgccaacaatcctacgatggtagccatgacgatgatcacggaggagatgatagcagaggagaaggcacggttgttcttggcgaagccgccggaggagtgcgggcggttcctgctgctgtccatcggcaccggattggcctccgacgaggggctgtacacggcggagaagtgctcccggtgggggacgctcgggtggctgcggcacaggggcatggcgcccatcatcgacatcttcatggcggggagctccgacatggtcgacatccacatcggcgtcaagttccagctgctccacattgagcgtaactacctccgcatccaggaataccaggactacgacccgctcaaggccacggcggcggcggcgctggacgaggcgacgccggagaacatgaggaacctcgtcggcgtcggcgagcgcatgctggagcagcaggttacgagggtcaacgtggagaccgggaggtacgagaaggtctccgacgaggggagcaacgccgacgcgctcatcaggatggcgaggcagctctcggaggagaggacggcgaggctgcagcggcggatgggcgaagtgacggcggccagtgcctgtgccactgggttttag

SEQ ID NO: 2873 - DNA, 768 bp, Oryza sativa
atggagccattttcacacatgaaaggaccccaggataatgaaaatgggtatcaggctagaaagctacactactacagaatgattgccctctccccccttgatatacctccatataatttgcttccagttgatgtgatgttggagataaatagcctgttcagctttcgggcaaacgaagaattcctccaaaatgatatcagggtaaagccagaccttgatgccctgggtacgctaggcgatgctgggtggtacagcatccgtgcaattttgtgggctgttgactatgagcttcccaagactgtgatcgccctgcgcaaccctgttaggaaccaagctggcgtgctccttgcctgcggagcaacattgtactgggctgatggaaagattgccaccttcaactgttctttcctcaccaacctcaccatggacatgaccatcgttggaacaaacggtacgcttcacgtcaccgactttgtcatcccatatgaagagaagtacgcggcattcaacatggcgtccaagtcaaagtttgctgaactccacatcggatgggatccactgccgagcaagcatgtcgtctctacagacctgccacaggaagccctcatggtccaggaattctcaagggcaatcacattacaaatttccatcctcaaagctcaagaggcacacctggccaagttggagaagacattttcaagacttcaacaatcaacatcacaacctttgtccctgctgacatttttgccagttctgaaaaatttctga

SEQ ID NO: 2874 - DNA, 1776 bp, Oryza sativa
atggagatcggcgccgttgagaacgggggtgtcgtcggtggtgaagttgtggcaggcaagagggggaagacgccgcaagcaactgagacatttgaaaaggttgcgacaattggagtggtagcaaatttgacggtctatcttgtgaagcgcttcaacattgggcaaattgaggcagctaatattaccaacatattcttcggtacgcttaactttgcgccattgctaggcgccttcatctccgacgtctacttgggaaggttcaaaacactagcctatggatgcttcgccagcctcctggggatgctgggaatgactttgtatgcatcacttccagctctcaagccaccgatctgccatgaaaaaacccgactaggcggaggctgcaacagtccatcaacactccagctaagtgtgctatacctttctctaggctttctaattatcggtggaggagcgatccggccttgtagcttgccctttggagtagaccagtttgataagaccgacgaagaaggtcgaaagggactaaacagctattataattggtactatggaacaagtactgctgcccttgtgttatctatgattgtcatcatctacatccagaacaatgtcagctggccaataggatttggcatacccacattactcatgtttctcgccattatcatgttatttctgggtaccaacctgtacgtccatgtacaaccagagggaagcatatttgctggaattgcccaggttttagtggcttcatttaaaaagagaaatctcaagcttccttgtcctcatgatataaaccaacaaggattgatgctctacaaccctccttccaagggcaaccgcgtattcagattgccacttacttcccagttcaggtttctgaacaagggtgcaattgtaatgggtgatgatataaatgttgatggttctgcaagaaactcttgggagctttgcaacgtccaacaaatagaggaggtcaaatgcttaataagaattgtgccggtttgtatttctggagtcttatgctttgtcgcattggctcagcaattcacctatataatcttgcaaacatttacaatggactgtcactttgggacgcactttgaaatcccagcaggctctgttgtatccatatcccttattgccctaactctattcatccccatttatgaccggattttagtaccaatagctagaggattcactggagtggaaagtggtattacacttctacagagacagggtataggattggccatttctcccatttcaatggtggtagcaggacttgtcgaacgtaagaggaggaactcagccttgtcgaatggaggaatatcgcctatgtcagtcttgtggcttgcaccccaacttgttttaatgggtattgctgaggccttcaatgcagttggacaaatagaattctacaataagcagtttccagagaacatgcaaaccctagcaggatctctgttcttctgtactatagctggagcaaactacctgagtactgctctggcaaacatcatgagaaaggtcacgaccagagatggtcactcaagctggttaacagacaacattaatcttggcaaactcgactattacttctattttattgcccttatgggagtcctgaaccttatttattttcttatatgctcacacttctaccaatataaggtaatgtcactccattctgaagaatccatcaaaatacctaccaaggaagaagaagccacagagatcgacattgacacagatgcacctagcaaatga

SEQ ID NO: 2875 - DNA, 2394 bp, Oryza sativa
atggctcctgaggcggcggcggcggccttgaagccgatgaaggcaacgtcggacggcgtgttccagggggaggaccccctggaagcggccctgcctctggccatcgtgcagatttgcatcgtcgtcgtgctcacccgcgtgctcgccttcttcctccgcccgctccggcagccgcgcgtcatcgcggagatcatcggcggcatcatgctcggcccgtccgcgatcggccggaacagcgcgttcatcaacacggtgttccccaagcagagcctcacggtgctcgacaccctcgccaacatcggcctcctcttcttcctcttcctcgtcggcctcgagctcgacctccgcgccatccgccgcacgggagctggcgcgctcgccatcgccgtcgccggcatctccctccccttcgtcctcgggatcggcacctccgtcgtcctccagaacaccgtcaaccgcggcgtccccacggggcccttcctcgtcttcatgggcgtcgccctctccatcaccgcgttcccggtgctggcgcgcatcctcgccgagctcaagctgctcaccaccgacctcggccgcatggccatgtccgcggcggccgtgaacgacgtcgccgcgtggatactcctcgcgctcgccatcgcgttgtcgggctccggctcgcctttcgtgtcgctctgggtgctcctcagcggcgtcggcttcgtcctctcgtcgttcttcttcatccggccgctgctctcgtggatggcgcggcgatcccccgagggcgagcccgtgaaggagctatacatatgcacgacgctcaccatcgtgctcgccgccggcttcatcaccgacaccatcggcatccacgcgctgttcggcgccttcatcgtcggcatcatcgtgcccaaggaagggcccttcgctggcgtcctcctggagaaggtggaggacctcatctctggcctcttcctgccgctctacttcgtgtcgagtggcctcaagaccaacgtcctgaccatcaagggcggggactcgtgggggctcctcgtgctcgtcgtcgcgacggcgtgcatcggcaagatcggcggcacagtgctcgcgtcgctcatcgtgcgtgtgccgctccgtgaggcggtgacgctcggggtgctgatgaacaccaaggggctcgtggagctcatcgtgctcaacatcggcaaggaccggcacgtcctcaacgacgagaccttcgccatcctcgtgctcatggcgctcataaacaccttcatcaccacgccgctggtgatggccatctacaagccggcgcggcgcgcccccccgtacaagaaccgcgccgtccagcgcccgaaccccgacgacgagctccgcatgatggtgtgcttccacagcacgcgaaacatccccaccatgatcaacctcatggagtcgtcgcgtgggacgcggcggcgcggcatcaccgtgtacgccatgcacctcgtcgagctctcggagcggtcgtccgccatcaacatggtccacaaggcgcggcgcaacgggatgccgttctggaaccggcggcgcaacggggacggcgaccagctcgtcgtcgcgttcgagacgtaccagcagctgagccacgtgtccattcgcgccatgacggccatctccgacctccacaccatccacgaggacgtggtcaccagcgcgcaccagaagcgcgccgcgctcatcgtgctccccttccacaagctccaccagatggacggccacatggagtccctcggcgacgagtaccagcacatcaaccagcgggtgctccaccacgcgccgtgctccgtcggcatcctcgtcgaccgcggcctcggcggcgccgcgcaggtcgccgccagcgacgtgtcctacaacatcgtcgtcctcttcttcggcggccgggacgaccgcgaggccctctcctacgccacgcgcatggtcgagcacccgggcatcgcactccacgtgatacgcttcgtcccagagtccggcggcggcggcgcgaacgacaaagccgcggcggacgatgcgttcctcgcagagttccgcggcaaagtcgccggcgggaacgactccatccggtacgaggagaggacgtccagagggaaggcggacgtggtggaggcgatcaaggcgatgggtccgaccaacctgttcctcgttggacaggggtcgccgtgcgcgccgctgatggaaccgagcgctgagtgcccggagctcgggccggtggggagctacctggcgatgccggacttctcgacggtggcgtcggtgctggtgatgaagcagtacgacccgacggcggagcactacgaactcgtcgaggagtcgcggacaccgccgtggacatcgacacaccggggcctcgtagagggtgatgcccttagtcgtaagtcgtaa

SEQ ID NO: 2876 - DNA, 1707 bp, Oryza sativa
atgagcgggagcggcggaggcggaggaggaggagccggcggggacggcgcgagggcgctggaccagacgccgacgtgggccgtggcggccgtctgcgccgtcatcgtcgccgcctccatcctcctcgagggcctcctccaccaccttggccagtggttcagcaagaggaggaagaaggcgctgttcgacgcgctggagaaggtcaaatccgagctgatgacgctggggttcatctcgttgctgctcagtgtcacggggaggtacatatcgcgcatctgcatcccggtgggagccgcggacaccatgcttccctgcagcctccggaggagttcttcagagcaggaggtgcccggtggtggtggccatggccggcgacacctatctggagatccaaccaattttaaatgcgccaaaggtatggtgtcgcttgtttcagctgatgggcttcaccagctgcatatcttcgtgttcttcctggcagtctttcatgtcgcattcagtgctattacaatgtctctgggtagagcaaagacacgtatatggaaggagtgggagaaggagacttgctcccttacctacgagttttcatatgacccctcaaagttcaggcttactcatcaaacgtcttttgtgaggcaacatgcaagctgttggagcaaaagtactattctgctctattttgtgagcttctttaggcagttcttcagatctgttagaaggacagactacctgactttgaggcacggattcattgctgctcatttatctctagggactaggttcaattttcggaaatacatcaaaaggtcactggaggacgattttaagacagttgttggcattagtgcacccttatgggcttctgcgttggccattatgctcttcaatgttcatggatggcataacttgttctggttctctacaatcccccttgtagtaactttagcagttggaacaaagctgcaggctataattgcaatgatggctgttgaaattaaagagaggcatacagtaattcaaggaatgccggtggtgaaactcagtgatgaacatttttggttcgggaagccacgtctggttcttcatcttatccatttcgcgtcatttcagtacgaattcgggttgagatcctgcttccatgacaactttgagcttatcatcgccagagtctgccttggggttgtcgttcaattcatgtgcagctatatcacacttccactctatgctctcgtatctcagatgggttcacagatgaagagaacgattttcgacgagcagacggcgaaggccctgaagaaatggcacaaggcagcagtggtgaagaagaagcagcagaaggggtcatcccatgagccaggttcagagacaccgggcacggagacgacgacgacgacggcgacggcaacggaggagagccagcgagaacgcgacgccgcggccatgccggtgcgccacctccaccgctacaagaccatcgcccacgtcggcgcgacggggacgctgtccgactcggactgctccgacacggacacgccgttcgcgtcgccgacgaggctcctgataccgccgacaaagcagcggagcctcgacgccgggagggcggaggtgcgcgtggacgtcgactcgacgccgacgccgacaccaccggagcgccatgacagcttctccttcccgaggttgcctgctcacaatttgcagcagaaatga

SEQ ID NO: 2877 - DNA, 1947 bp, Oryza sativa
atggccgttgcagtactggatcggagcttcagcagtgaatatcctgcaagcagcagaactgaggggagatcatgtagttggaaaagagtctttgtccaaactgaaaatggttatgtcctgggcattgaactggagaggggagaaaatgcacacactgtgaaaaagaagctccaggtagccctcaaggtacccacagaggagagctcactgacctttggtgatctggttctgaataatgatctcagcagtattcgcaatgactcaccactgctcctcagaaagaatcaaatgcaccggagcagctcaactccttgcctctctcctactgctcatgatgtgcaggagcaagatcacagcgaacccattgaaatccttggatgtttgagcccctcttctcggatgaagcagcttgctaaggatgttgtggaagccataaggaatggtgttgacccggtacctgttaatagtggcatgggtggcgcatactacttcaagaacatttacggggaacgtgttgcaattgtcaagccaacagatgaagaaccatttgctccaaataatcctaaaggttttgtggggaagacccttggactgccaggcctcaaaagatcagtaccggtcggtgagactgggctccgagaggttgctgcttaccttcttgaccatgataactttgcaaatgtcccacccacaatgctggtcaagatcacgcactctgtgttcaatgtgaatgatactgtcagctgcaaaagtaaagtcttccacaacaaattgcaggctgtgagcaagcttgcatcattgcagcaatttattgctcatgattatgatgctagtgaccatgggacatcaagcttccctgtatctgcagtgcacaggattggcatacttgacatcagaatattcaacacggacaggcacgcaggaaatcttctggttaggaagcttggacctgggcctgacaattttggagtgcagactgaactcattcctattgaccatggtctctgtcttccagaaagtctagaagacccttactttgaatggattcactggccacaggcatccattcctttcactgaggaggaactcgaatacattgcaaatctggatcctgtaaaagatgctgaaatgcttcgcttggagctgccctttatccgtggagcatgtctgagggtgctggtgctatcaacaatatttctcaaagaagctgcagcatttggcctctgcttatcagagataggagagatgatgagtaggcaattcactgggaaagaagaggagccaagtgagcttgagcttctttgcatggaggcaaggaagtgggtcaagaaaagagagctatttcttccagaagccggagttgaagatgacaatgatggcatcacccagttctctatcgacagcgaagatggttcagatgcatctgaattaccatctttcagcaagttcgggctcatgaatgctagtcacagaaatccactgtcaaagttagatgagtgtgatgaggaagatggtgaagaggaagaggatgatgatggtgatgaagaggatgatgatgaagatatgttcaaagatgatgctggcaacttgaaaaatccgttttcgaagcatattccttcagtctcaaagttatcagcatcatttaaggggctcggtttcattgggaaagctagagcctaccacaaaggtgttcccaagaacaaggtgactgctaaaactaactatagtggcaaaggtagtgagcatcagtctggtagcaggagtgccaatgagcttctccctcccagcgccagttttgtgaagctgtccgacatgggctctgatgagtggagcgcattcctcgacaagttccaggagctgctcccgagcgccttccgagcccggaagcacgccgctgctgatggccctcgtccgttgcagaggctgggcacttcttgccagttttga

SEQ ID NO: 2878 - DNA, 1425 bp, Oryza sativa
atggcgcatgtggcttttgttgcgctcctcttcttgctgctcgtcgggcattgcctcggaggcaaggttggcatctgctacggccgcaacgccgatgacctgccggcgccggacaaggtggtgcagctcatccagcagcagtcgctcaagtacgtgcgcatctacgacaccaacatcgacgtcatcaaggccttcgccaacaccggcgtcgagctcatggtcggcgtccccaactccgacctcctccccttcgcgcagtaccagtccaacgtcgatacctggctcaagaacagcatcctcccctactacccggccaccatgatcacctacatcaccgtcggcgccgaggtcaccgagagccccgtcaacgtgtccgccctcgtcgtgcctgccatgcgcaatgtgcatactgccctcaagaaggccggcctgcacaagaagatcaccatctcgagcacgcactcgctcgggatactgtcccggtcgtttccgccgtccgcgggggcgttcaacagcagctacgcctacttcctgaagccgatgctggagttcctcgtggagaaccaggcaccgttcatggtggatttgtacccctactatgcgtaccagaactcaccaagcaatgtctcgctgaactacgcgctgttctcgccgcagtctcaggatgtgattgaccccaacaccggactggtttacacaaacatgttcgatgcgcagatcgattccattttctttgcactgatggctctgaactttaagactctgaagatcatggtcaccgagacagggtggccaaacaaaggggcagctaaggagaccggagcaacacctgacaatgctcagacctacaacactaatctcattcgtcatgttgttaatgacagcggcacacctgcaaaacctggggaagaaattgatgtgtacattttttcattgttcaatgagaacaggaaaccaggaattgagtctgagaggaactgggggctgttcttccctgaccaaagctctatatacagtctagattggactggcagaggcaatgtggacatcatgactggaggaaacattacaaatgcaaatggtacttggtgtgttgcttctgctaatgcgtctgagacagatctacagaatggtttaaattgggcatgtggaccaggcaatgttgattgctctgctattcaaccgagtcagccctgctaccagcctgatacattggcatcacatgcttcatatgccttcaacagctattatcagcaaaatggagctaacgatgtagcttgtgactttggcggtactggagtgcggacaactaaagatccaagttatgacacttgtgtttatatggctgccgggtatggaaaagctttctcatatctttgttcaatttttttgaagcattttttcaccaactcctttgagaaatag

SEQ ID NO: 2879 - DNA, 1335 bp, Oryza sativa
atggcgggagggttctctgtgtcggggtccggggtggagttcgaggcgaagatcacgccgatcgtcatcatctcctgcatcatggcggccaccggcggcctcatgttcggctacgacgtcggtatctcaggcggagtgacatcgatggatgacttcctgcgcgagttcttcccgacggtgctgaagaagaagcacgaggacaaggagagcaactactgcaaaggtgaatacgtgcaggccgttccattgttcctgtcggagatcgcgccgacgaggatccgcggcgggctcaacatcctcttccagctcaacgtcaccatcggcatcctcttcgccaacctcgtcaactacggcaccgccaagatccacccgtggggatggcggctgtcgctgtcgctggccggcatcccggcggcgctgctgacgctgggcgcgctgttcgtggtggacacgcccaacagcctgatcgagcgcgggaggctggaggaagggaaggcggtgctgaggaagatccgggggacggacaacgtggagccggagttcaacgagatcgtggaggcragccgcgtggcgcaggaggtgaagcacccgttccgcaacctgctccagcgccggaaccggccgcagctggtgatcgccgtgctgctgcagatattccagcagttcacgggcatcaacgccatcatgttctacgcgcccgtgctgttcaacacgctcgggttcaagaccgacgcgtcgctctactccgcggtgatcacgggggccgtgaacgtgctgtccacgctggtgtccgtctactcggtggacagggtggggaggcggatgctgctgctggaggccggcgtgcagatgttcctgtcgcaggtggccatcgccgtcgtgctggggatcaaggtgacggaccggtcggacaacctcggccacgggtgggcgatcatggtggtggtgatggtgtgcacgttcgtgtcctccttcgcgtggtcgtggggcccgctcgggtggctcatccccagcgagacgttcccgctggagacgcggtcggcggggcagagcgtcaccgtgtgcgtcaacctgctcttcaccttcgtcatcgcgcaggcgttcctctccatgctctgccacctcaagtacgccatcttcgccttcttctccgcgtgggtcgtcgtcatgtcgctcttcgtgctcttcttcctgcccgagaccaagaacatccccatcgaggagatgaccgagagggtgtggaagcagcactggttctggaagcgcttcatggacgacgccgacaaacaccacgtcgtccccaatggcgggaagagcaacggcgccaccgtttaa

SEQ ID NO: 2880 - DNA, 1602 bp, Oryza sativa
atgacaccttctgagatggattttttcaccgagtacggtgagggaaacaggtacaagatagaagaggttataggaaaagggagttatggtgtggtttgctctgctttggacactcacaccggtgataaagttgctatcaagaaaatcaatgacatctttgagcatgtgtccgatgcaacacggatacttcgcgagatcaagttgcttagactcctgcgacatccggatatcgtggaaattaagcatattctacttcctccatcaaggagagaattcaaggatatctacgttgtttttgaactcatggagtctgatttgcaccaagttataaaggccaacgatgacttgactcctgaacactaccagtttttcttgtatcagttgctccgaggactgaaatatatacacacagcaaatgtatttcatcgagatctcaaaccaaaaaatatcttggcgaatgctgattgtaagctcaaaatatgtgatttcggccttgcaagggtagcttttagtgatactccaaaccgccatcttctggacggattatattgcaacaagtatacaccagcaatagatatatggagtattggctgcatatttgccgagcttttaaccggaaaacctcttttccctgggaagaatgtggttcatcaacttgatataattacagatctactaggaacaccttctccagaaacaatatctaggattagaaatgagaaggcaagacgttacttgaacagtatgaggcggaaaaaacctataccatttacacagaagttcccaaatgcagatccacttgcaatgcggttgttagagagaatgttagcttttgatccaaaagatcggccaagtgctgaggaggcgcttgctgatccttatttcaagaacatagccaatgttgatagagagccttctgctcaacctatcacaaagctagagtttgagttcgagaggcggagaattactaaggaagatataagggaactcatatatagagaaattctggagtatcatccaaagatgctgagggagttccttgagggaactgagtccactggtttcatgtacccaagtgcagtagaccattttaaaaaacagtttgcataccttgaagaacattatgccaagggatcaacagcagctccacctgagagacaacataactcattaccaaggccttgtgttgtctattcagataaccggccacaaagcacagccagtgtcactgaggatctttccaggtgtttaatcagagacaacaatctaaaatcacaggattctgcttcagtcggtgcaagcagaatccctcaaggtgctgctgcaagacctggtaaagcagttggttcggtgctgcgttacggtaactgttcgacatccgctgctgagcaacaatatgagcagcgaagggttgttcggaacccagcaattgctccaaacagcagtgttcctctggggagctcataccccagaagaaaccagacctgcaagagtgaaacaggtgatgttgaaaggatcgattccagccaaaccggtccaccgaagccatatgtggcgaacaaactgcctgctaccgtcgatggtcggagtggccactggtaa

SEQ ID NO: 2881 - DNA, 440 bp, Oryza sativa
atgcctgaatctgtgcgggtgtgtgagggcagtttccgacagagcattgcagatgagagcgtggtcgctcttgccaatggctgccctcacctgcggtcgctggggctctactactgccagaacatcaccgaccgggcaatgtactcgctggcggcgaacagccggcgggtgaggagcaaaggccggagctgggacgcggcggcgaggaagaacgccggcgccggcgccgacgggctggccagcctgaacatcagccagtgcacggcgctgacgccgccggcggtccaggcggtgtgcgactccttcccggcgctccacacgtgcccggagcggcactccctcatcatcagcggatgcctcagcctcacctccgtccactgcgcctgcgctcaccacccgcaccgccatgggagggccatcctctccaaccatgcctacta

SEQ ID NO: 2882 - DNA, 780 bp, Oryza sativa
atggcggccgccgcagctcgcagcatcccctaccggtggaccctcgccggcgcgacggcgctcgtcaccggcggcagcaaaggcatcgggcatgcgatagtggaggagctcgccggattcggggcgcgcgtgcacacgtgcgcccggaacgcggcggagctggaggcgagccggcggcggtgggaggagcgggggctccgcgtcaccgccaccgtctgcgacgtctccgcgcgcggcgaccgggagaggctggtcgccgcggcggcggcggatttcggcggcaggctggacatcctcgtcaacaacgtcggccggaccatgttccgggcggccgcggcgtgctccggcgaggacttcgccgtgctcgtggccaccaacctcgagtcctgcttcacctctcccagctcgcgcacccgctcctgctygccgccggcggcgcccgcggcggcggaggcggctgcgtgcgtcggcatgccggcgctggccgtgtactccatgaccaagggcggcatgaaccagctcacgcggagcctcgccgccgagtgggccggcgacggcattcgtgtcaactgcgtcgcgccgggaggcgtcaagactgatatctgccaagacgagacgatagacccggagctgatcaagagcgagatggaccggctgccgatgcggcggctggcggagccggaggaggtggcggccacggtggcgttcctctgcatgccggcggcctcctacatcaccggccaggtcgtcggcgtcgacggcggacgcaccatttcctag

SEQ ID NO: 2883 - DNA, 1914 bp, Oryza sativa
atggacgaggaggattactcgtgggttcggcggacaaggttctcccactccgtcgtccgctccaagtccggcagggagcagttcggtgcattcgtcgagcagttcaaccgcggcgcggcacggaggcagagagggcccggttcagggttcatgctccatggcctcaacttggaaccgagggcgaggctcccagccaccacctcggcgaattcctccgttccgaggacgacaggatcgtcgaatgctcagccatcgtcggagacgaagccagcttcgtcgtcctcggacgccaaactggagcagcacgagaagagcctcaacttggaaccaaggacgaggctctcggccaccacctcggcgaattcctctgttccgtggacgacaggatcgtcgaatgcccagccgttgtcagagacaaagacagcttcgtcctcctcggacgccaaaccggagcagcaagagaagcctcgtgatcatcagccgtcgcaagaagtgtccaccaagcaggatgataaggctgaaaatgacacgaaggcaacagccacatctgggcctctcgagttctccttccatcctgatgagcaaaccttgaggctgcagagggcgtgttccagccctgttcctttcccaagcaacaagaacatgctggtggctgatgctgcagcacgtagctcatctctcaaggttgccggcgaggggccgaagccgaagccgaagcagagagcaaggtcccctcccctgcgtcgtgacgttcctgagctgttcaaggaggccaaatcgtcaagcaagaggttttccacaccgccaccgcgccggaagccttcgtctccaccggcgccgagcaggagccctcctcatgtctttgccacggcgagagcgcatggcaagccgaagcataagaaggattcctctgccaatggaagggcgaaggtcgccgcacttgaggtgctcgagaaatggaccgtcgatcgctcgcagctgctcatcgggcacaggttcgcctccggggcgcacagtcgcttgttccatggaatctacaaggagcagcctgtcgccgtgaagttcatcaggcaacctgaggatgaggaagatgcagagctggccgcgcagcttgaaaagcagttcaacacggaggtcaccacactgtcccgcctgaaccatcctaatgtcattaagctgattggagcatgcagtagcccacctgtcttttgtgtcatcaccgagtttctttctgggggttctttaagaacatttctgcacaagcaggagcacaaatctctacctttagagaagatcatttcaattggtttggatattgcaaatggcattggatatattcactcacaaggagttgttcatcgtgatgtgaaaccagagaacatcatatttgattcagaattttgtgcgaagattgttgattttggaatatcttgtgaagaagcagagtgtgaccctctggcgaatgacackgggactttcagatggatggctccagagatgatgaagcacaaaccttatggtcgaaaggttgatgtttacagctttggccttatcttatgggaaatgtttaccgggtcggtaccttatgaagacttgaatccattccaggcagcttttgctgtttttgataagaacgagaggccggtcatccccagtagctgccctgcgccactacggcttctaattgagcaatgttgggcctcgcaaccagataaaaggcctgaattctggcaaatagtacagatattggacaagtttaaggcggttctagataaagatggaacactggacaatatgccatgcttaaacttgcaaggaactcatgatcacaagaattggctagctcactgggtccagaagctcaaacatacccatcatgatctctctggacctccgccaccaaaattgatgtag

SEQ ID NO: 2884 - DNA, 810 bp, Oryza sativa
atggttatggaggacggcgagatgagcctgtcgaacctggtgctcggcttcttcgaggaggctgagagggagcagagatggccggagaacggcgacgacgacgacgagggctccagcggcagcggcgccgccgagagcaaggccttctggcagaaccagcactcccagctgcatgaggctttggccaagaccagccaggtagagagcaggatacgggaggacacggaggaggcaatcaggaagatgcgcgccgcgggcgccgtctgctcctgcgcgaggcgggcggcggccggggactgccggagctgcacgctccggcatgtcgacgagcggctgcgcgacgccgggtacaacagcgccatctgcaagtccaagtggacgcgctcgccggacatcccttcaggcgagcacagctacgtggacgtggtggtgcagacgaggagcggcaaggcggtgcgggtggtggtggagctgaacttccgcgccgagttcgaggtggcccgcgccagcgcggagtaccgcgcgctggtgaccgcgctgccggaggtgttcgtcggacgcgccgaccggctgcgcgccgtcgtcaaggccatgtgcgccgcggccaagcagtgcatgaaggagaacaacatgcacatgggcccctggaggaagcacaagtacatgcagtccaagtggctcggcacgccagagcgtktcgcggccgcggcggcggcgccggtggcggtctggtcgccggagaagcagaccaagttcagggcgtccatgctcagctttgacttcgcccgggccgccgtggaggttgcgtga

SEQ ID NO: 2885 - DNA, 1914 bp, Oryza sativa
atggacacgccattgctgctgctgcttcccttcctggcggcatgtctgctcgcgccgcggcacgcggcggargcggccgtcacgagctgcgcgccgaggagcgggtacaagatcctcggcgtgtcgtacgccaaccgcaccgtcgtcgtcgccaacgacaacgtccagaccgacgccagcggctgcccggtgcccaagatcgacgtctccgccagcctcaccctcgcgccgttcaccgccagcccggccaacagccagctcgtcttcctcttcaactgcaccagcagcagcaggccgccgccggcagggttcgtcaacgtcacgtgccccgggagcgaaaggccgtggttccggctcgacacgagctacaacaacaccgccgccagagtggtcgccggaggctgcgactacgcggccgttccggtggtcggcgtgccgggggcgagcccgacggactacccgcagctgctccggggaggctacatgctggagtggagggcgcccgccggcgactgcatggcgtgcaatgccagcggcggccagtgtggctacgacgccgacacggaggcgttcgcctgcatctgctccgacggctcatcgcgcccggggatatgtgggtggttagaactgacaaaaggaaatgcaaagaagtccgggaacaaggtcatcctgatagtgtcactgtcgatctgtgcgactgggttggtgctattggcatgcatcgccatcgtctacaagtgtcgccgacgtatgcaaaatcgtttcagttttctgaacgccatggacggtgcaagcagaacggatactgcaaaggtggagaagctgctgcagagttacggatccctagctccccggaggttcaggtactcggagctgaagaagataacgaagtccttcagccagcggctcggcgagggcggctacggcacggtgttcagcggcacgctcgccgacggccgcgccgtcgccgtcaagttcctccaccactccaagcccaacggcgaggagttcctcaacgaggtggtcagcattggccggacgagccatgtcaacatcgtctccctgctcggcttctgcctcgagggctccaagcgagccctcgtctacgagtacatgcccaatggctcgctggacaagtacatctactcgacgtcggcggcggcggcggcggaggcggaggaggcggaggcgacggcgagccctgacagggatgttctggggtggaaggtgctgcaggagatcgccgtcggcgtggcgcgggggctggagtacctgcacgacgggtgcaacacgcggatcatccacttcgacatcaagccgcacaacgtgctcctcgacgagggattccggcccaagatcgccgacttcgggatggcgaagctgtgcaacccaaaggagagcatcctgtcgatggcggacacgagggggacgatagggttcatcgcgccggaggtgttctcccgcgggttcggcgacatctcgaccaagtccgacgtgtacagctacgggatgctgctgctggagatggtcggcggcgggagcaacgtcaaggcctacgccgagaagggcgccagcggcacgttcttcccgctctgggtctacgaccacctgctcgaggacggcggcgtgctgcagagcgtcgccgccgccgccgccgccacggccggcggcggcgccggatcaccgggaggcgaggagatcgcgaggaagatggcgctgatcgggctgtggtgcatacagaccgtgccggcgaacaggccgtcgatgggcaaggtgctggaaatgctggagagaagcgtccacgagctcgccatgccgccgcggccgtaccactcgaactcgtcgtccccgtcgcggccgtcgagctacccctcctytgcctcggatttcacgcagcggtcagtgtcgtgttga

SEQ ID NO: 2886 - DNA, 1040 bp, Oryza sativa
atggacgcgctcgtggtgcggcggctcggggaccccacgctggcccccggcggcgaggcctccccgtttgcgccggtcaccggggaccacccggcgccggcgctcgcgtcgccgamgtccgtgcgggtgcgcctkgcggccamcagcctcaacttcgccacctacctgcaggtacagggcaagtaccaggagcgccccgcgctaccgttcgtcccgggctccgactacgcggggttcgtcgacgccgtcggccccgccgtgcggaggttccgccccggggaccgcgtctgcggcctcgccgccgtcggctccttcgcggatctcatcgtcgccgacgagaagcagctattttcggtgcctgatggatgtgaccttgttgctgctggagcattgcctgttgcatttggtacatcgcatttggcccttgtacacagagctgaactaaaggctggccaggtgctacttgttctgggtgctgctggtggtgtcggggcatctgctgtacaaataggaaaagtttgtggtgctgttgttattgcagttgctaggggaactgagaaattgcagtatctcaagactataggagctgaccatgtaattgactcaagcaaggaaagtattatggaaagtgccaaatcttttttaaaagccaaaggcctcaaaggtgttgatgtcttatatgatcctgttggaggcaaattaacacaagatagcctaaaacttctcaattggggtgcacatattctgataattggatttgccagtggagatgtaccaattattcgagcaaacatcgctcttgttaagaattggacaattcatggtttgtactggggaagctacttcactcatcggccacctgtactcattgactccctcaatgaactcttttcatggctttcaaaggggttgataaaaatccagatttcccacacttacaggctccctgaggcacatctcgctttcgcagccctgagagacaggaaggccgttggtaaagtgatgattgtgatgggctcaccagcaaaatcaagactcta

SEQ ID NO: 2887 - DNA, 1458 bp, Oryza sativa
atggcggagatcgtggtggcgccgcgggcgccggcgccggcggggaagtggggcgccgcgccgccgcaggagctggtcgagaggctcaaggactacggccaggagggcgccttcgcgctctgggacgagctcgcccccgaggagcgcgacttcctcgtccgggacatcgagagcctagatcttgctaggattgaccggatcgtccgatgctcgctcagatcacaaggtgttcctttgccagccgtcgagcctgtgccggagtcgagtgtctcgaccgtcgaagatagaactcctgaggacaagcagaggtggtggaagaggggcttgaaagccatttcagaggggaaattggctgttgtccttttggctggtggtcagggaacaaggcttggcagttctgatcctaagggatgcttcagcatcgggcttccatctggaaagtcacttttccaacttcaagctgaacgaattttgtgcatacagaagctggctgctcagtccactgatggtactccacaaatacactggtatataatgactagcccctttactgatgaagcgactcgaaaattttttgaaagccacagatattttggcttagagcctgaccaagtaacatttttccagcaaggtactatcccatgtgtctcagctgatggaaggtttattatggaaacaccatacaaggtagcaagggctcctgatggcaatggtggagtgtatgctgctctaaaatctcaaaggttgctggacgatatggctggaagaggtgtgaaatatgtagattgctatggagttgacaatgtattggtccgtgttgctgatccaacattcctaggatatttcattgacaagggcgtgtctgctgctgcaaaggtcgtaaggaaggcatatccacaggagaaagttggagtgtttgttcagcgtggcaggggtgggcctctttctgtagttgagtacagtgaaatggatgcagctatgactactgaaataaatcaaggcacagggcgccttcgttattgttggagcaatgtatgcctgcatatgtttactttggattttcttaatcaagtaacaaatagtcttgaaaaggacagcatttaccatttagcagagaagaagattccttcaatccatgggtacacggcaggcttaaagcttgaacagtttatatttgacgtgttcacctattctccatcaacagctctttttgagattttgagggaggaggaatttgcaccagtaaagaatgctaatggtgcaacttatgatactcctgatagtgccagattaatgctgctccgccttcacagccgatgggtggtagctgcaggtggctttttgactcattccgtgcccttgtatatgacaggtgttgaagtttctccacttagctcttatgcgggagagaacctggaagccatatgccgtggacggacattccaatgcaccgagtga

SEQ ID NO: 2888 - DNA, 2382 bp, Oryza sativa
atggcgtctatttcggatagcgagacgacgaaccatgggagcatatgggatttggatcagaaccttgatcagcccatggatgaggaggctagccggctcaagaacatgtacacagagaagaagttctcgtcgattttgttattacggctcgcgtttcagagccttggtgttgtcttcggtgacttaggtacatctccattatatgtcttctacaatatattccctcatggggtcgatgatgatgaggatgttattggggctctttccttgatcatttacaccctcaccctcattcctctgatgaagtatgtttttgttgtcttgcgggcaaatgataatggccaaggtggcacattcgctctctattctttactttgccggcatgcaaaggtcagcactattcccaaccaacataagacagatgaagaattaacaacatatagtcggcaaacttatgaagagaattcacttgcagcaaaaataaagagatggctagagggacatgtgtataaaaagaactgtcttcttattctagttctcattggtacctgcacagccattggagatgggatccttactcctgctatatcagttctctctgcatcaggtggaataagagttcagaatcagaagatgagtacagatgtggttgtagtcgttgctgtgatcatactaattggcttattcagcatgcaacactatggtacagataaagttggatggctctttgcacctatagtgctcctttggtttatcctaattgggactattggggcactgaacatacacaagtacaacagttcagtcctaaaagcatataatccagtctatatctatcggtatttccgacgagggaagtctgagagctggacctcccttggaggaatcatgcttagcatcacagggactgaagcattatatgctgacttatgtcatttccctgtcttggccattcagattgctttcacgttagtggtgttcccttgccttctcctagcatacaccggacaggctgcgtacattattagcaacaaggaccatgtagttgatgccttttatcgctccattccagataccatatactggccagtattcatcattgcaactcttgcagcaatagttgcaagtcaagccactatatctgctacatactcgataataaagcaagctctcgcactgggctgttttcctcgagtcagtgtcgtccacacctcaaagaaatttctcgggcagatttacatccctgacatcaactgggtacttatgattctttgcattgcagtaacagctggattcaaaaaccaaagtcagataggaaatgcatatggaactgcagtggtgatagttatgctggtcacgacatttctcatggtcccaataatgctgttagtatggaaaagccactggatccttgttgtcatttttatcgtgctctcgttgatggtggagctcccatacttcacagcctgcattaacaaggttgaccaaggtggttgggttccacttgttgttgcaactacctgcttcatcatcatgtatgtgtggcatttctgcaccgtgaagcggtatgaatttgagatgcacagcaaggtttccatggcctggattttaggactcggaccaagcctcggcctcgtcagggtgcctgggataggcttcgtgtacaccgagctggcaagtggagtgcctcatatcttctcccatttcatcaccaacctccctgccatccactcggtcgtcgtcttcgtttgtgtcaagtacctcccagtatatacagtcccaaccgaagaaaggttcatcgtgaagaggatcgggccaaagaacttccacatgttccgttgtgtcgcgaggtacgggtacaaggacatccacaagagagatgacgacttcgagaagatgctccttgacaggctcttgctcttcgtcaggctggagagcatgatggatgactattcggactccgaagacttcaccatgatggaggagaagacccagggatcaagcaatgcgctgctgctaactggaaaggctgggagcaacacaatgtgctccactggtgacctgagctactcatcacaggactccattgttccagccaagtcacccataagagggaacagcctgacaaggtactcgagccagacgttcggcgatgaactggagttcctgaacctggagttcctgaaccggtgcaaggacgctggtgtcgtgcacatcctggggaacactgtggttcacgcgcgccctgattcagggatcatcaagaaggttgctgtgaattatgtgtttgcattcctcaggaagatctgcagggagaacagtgtgatattcaatgttccccatgaaagtcttctcaatgtaggccagatatactatatatga

SEQ ID NO: 2889 - DNA, 957 bp, Oryza sativa
atggagctaatcacaaacgtctccgagtatgagcagcttgcaaagcagaagctgccgaagatgatctacgactactacgcctctggtgcagaagatcaatggactctcaaggagaacagggaggccttctcaagaattctgtttcgaccgcgaatactgattgatgtatcccgtatcaacatggctacaaatgtcttgggcttcaacatttccatgcccataatgattgctccctcagccatgcagaaaatggcccaccccgaaggagagcttgctactgcaagagcagcttctgctgcaggaacaataatgacattgtcttcatggtccacttctagtgttgaagaggtttacaaggataggaatatagtacggcaacttgtcagaagggctgaattggctggttttaaggcgattgcactcactgtcgacactccaaggcttggtcgcagggaagctgacatcaagaacagattcaacttacctccacatctggtattgaagaattttgaagcgctggatctcggcaagatggacaagacaaatgattctggccttgcttcctatgttgctagccaagttgaccgctctctgtcttggacggacgtgaagtggctacagacaatcacctcgttgccgatcttagtgaaaggagtcatgactgcagaagatactaggcttgctgtcgaaagtggcgcggccggtatcatcgtgtccaaccatggagctcgccagctagattatgttcctgcaactatcagctgcctggaagagattggcaggccggtgctgttctcgctggccgtggacggcgaggccggcgtgaggaaggtgctgcagatgctccgcgacgagctggagctcaccatggcgctcagcggatgcacgtcgctggccgagatcacccgcaaccacgtcatcaccgacagcgacaggatccgccgctccaggctgtag

SEQ ID NO: 2890 - DNA, 360 bp, Oryza sativa
atggccaagagctcgttcaagctggaccacacgctcgagaggaggcaggctgaggctaaccgtatcagagaaaagtacagtgacagaattcctgtgattgttgagaaagctgaaagaagtgatattcctgacatcgacaagaaaaagtacctggtccctgctgatcttaccgttgggcagtttgtctatgttgttcggaagcggatcaagctcagtcctgagaaagcaatcttcatctttgtgaagaatactcttccaccaacagctgctctgatgtccgcaatttacgaggagaacaaggatgaggatgggttcctctacatgacctacagtggcgagaacacctttgggctgctctag

SEQ ID NO: 2891 - DNA, 1040 bp, Oryza sativa
atggtggacatgctgatgctgctcgtcggggaggcaatggcgcctctcctyaaccgcctctactacaactccggcggcaacagcctatggatggtcacgctcgcgcagtccgccggagcgccgctgctggtcatccccttcctcctyamgccgcgggccgccgccgtcggggagcctcggccggcgccggcggcatccaagatggtcgccatctgcgtggccctcgggctcgtcgtcggctgcgacaacctcatgtactcgtacgccatgctgtacctgccggtgtccacgttctcgctcctcgccgcgacgcagctggcgttcaacgcggtcacgtcgcgcctcatcaacgcgcagcggttcacgccgctcgtcgtcaactccgtcgtcgtgctcaccttctccgccgcgctgctcggcgtcgacgacccctcctcctccgtcggcggcggcgccggcggcgacgccgttcagcgtggcaagcacgccgccggcgtcgtcctcaccctgtccgcgtccgccgtctacgcgctcatcctgtccctgttcgaggccaccttcgacaaggtgatcggagcagcgacgccgcggtgggtgctcaagatgcagatctccacgaacgcggtggccgcgacggtgtcggcgacggcgctgttcgcgtcgggggagtggaggacgatcggcggcgagatggcggcgttcaagggcgggaaggcggcgtacgcggcgaccgtggtgggggtcgccgtggggtggcaggcggcgacgctgggcgccgtgaggctgatcgcgagggtgtcgtcgctgttcgcgaacgtgacgggcaccctggcgctgccgatggtgccggtgctggcggtggcgctgttcggggacaagatgacgggcaccaaggtggtagccatgctcatggccgtgtgggggtttctctcgtacgtgtaccagcactacctcgacggccggcgagcggcggcgcgagaggggagggtgcatgcggcggctggctgtggcatctgcacagatcaaatgaattattctta

SEQ ID NO: 2892 - DNA, 1572 bp, Oryza sativa
atggacgcccacctcctcctcctcgcgcgcccgcgagccctagccctcgccgccgcgcgagcccccggtggcgtcgccggcttcaggcggcccgcctcggcgcgccgggtggccccgcgccgcgtcgtacttcgaccggtggcggcgctggggggtggtggtggatttgcggaggtgggggagctgttcgggcgcgtcgaggcgttcctctacacggtcgcggatgcggccgtctcggcgtccccggaggtggtgcagggaggcggcggggggaccaaggaggcggccggggactggctctccggcatcaccaactccatggagaccgtgctcaaggttttaaaagatggtctgtcagctctccatgttccttatccgtatggatttgcaatcatccttctaacagttctcgtcaaggcagctacatttcctcttacaaagaagcaggttgagtctgcaattgcaatgaggtcactgcaacctcaagttaaggctattcaagaacgttatgctggtgatcaggaaaggatacagcttgaaactgctcgtttatataagttgtcagatgttgacccgctcgcagggtgcttgcctactcttgtgacaataccggtttggattggtctatacagagctctctccaatgtagctaatgagggacttcttaccgaaggctttttctggataccttctttggctggccctacaacaattgctgcacggcaaagtggccagggaatatcatggctatttccctttacggatggtcatccacctcttggctggtcggacactctggcataccttgttttaccagttcttcttgttatttcccaatatgtatcttctcaagtaatgcagccaccacagaacaatgatcctagccaacaaggtgctcaagctgtagtgaagttcctgcctttgctaattggttattttgctctctctgttccttctggactaagtctatattggcttacgaataatatccttagcactgcacaacaagtatggcttcaaaagcttggaggtgccaaaaatcccgtcaaagaatacattgataagctcgctaaagaagaatcaactaatcttggaaagcccgagcctgctattaagagtgatcctctccctaaagttggtaaacccccggccagtcaagagccagaaccaagtggaccacaacgtggtgaaagatttagaaaactaaaggaagaagagtcaaggagaaaagtgtttttggaaaaagcggaacagacagaacaggcaggcacacaagctggcatcgtcgatggaaaacagaattcagatgcatctggagacaacatagatgaacagaaactgaagttctctgtgctgttgacaaactcaaaacaggaatctcatgaaaatgaaccaattatagctaacggcaatggtggacttagccatagtacaaatgaaatgataccaaatggaagcatgaaagaggatataattcaggaatcaactgacagccattcttcagttatcgaccctacgtcacatgacgctcataaatcgagggacgaagagaacgaacaagatgcagtgtag

SEQ ID NO: 2893 - DNA, 1503 bp, Oryza sativa
atggatgtcaaccagctctggttactgtgggcaacactcgccgtgtcactgctctactacatcagcaaccggagacgccgcgtgggcggccggcgacgatgtccacctggtcccatgccgctcccgctcgtcggcaacctgctcaacctgcgcggccacctcccacccgcgctcgcgaggctagcgcgcacgtacggccccgtgatgatgctaaagatgggcctcaccaccaccgtcgtcatctcctccggcgacgcggcgagggaggccttcacgaagcacgaccggcacctcgccgcgcgcaccgtcctggacgtcactcgttctctcgacttcgccgaccggtccatgatatggctgccgagctccgataccgtctggaagacgctccgcggcgtcacggcggcgagcatcttctcgccgcgtggcctcgccgccctgcgcggcgtccgcgagagcaaggtgcgggacctggtgggctacttccgtgggcgcgccggggaggtcgtggacgtccgccacgccgtgtacggctgcatgctcagcctcgtgtcgagcgcgttcttctccgtcgacgtggtcgacctgagcgccgagtccgagaacgagttccggcagagcatgacgttcctcatggaggtggtgtcgaagacgaacgtctccgatttcttccctttcctccggccgctcgacttgcagggatggcgtcgcttgaccgaaaggtatctgggcagagtcacctgcttcttggatgacgtgatcgaccgccgtttcgccgccgacgcctcggcaaacaggcacggcgacttcttggactccctcctcgacctcgtgtccaccggcaagatcgtccgcgaaaacgtgacaaccattttgctcgacgtgttcatagccgggagcgacacgatcacggccacggtggagtgggcgatggccgagctgctccgcaacccaagcgaaatggccaaggtgcgcgccgagatggacggcgctctcggcggcaagaaaaccgtcgacgagcccgacatcgcgaggctgccgtacctccaggcggtcgtgaaagaggcgatgcggctgcacccggcagcgccgctgctgttgccccaccgggcggtggaggacggcgtggaggtcggcggctactgcgtgccgaagggctcgatggtgatcttcaacgtgtgggcgataatgcgcgacccggcggcgtgggagaggccggaggagttcatgccggagcggttcatccgccggggagatgatgacgaggtggatttctgggggaagacgttcgagttcatcccgttcgggtccggccggagggtgtgcgccggcctgccgatggcggaacgtgtcgtgccgttcatgctggcgtcgctgctgcgcgcgttcgagtggcgactccccgacggcgtgtcggccgaggagttggacatgcgccacaggtttaccattgccaacttccgtgccatccctctcaaggccgtgcccgttgtggtcagctag

SEQ ID NO: 2894 - DNA, 1467 bp, Oryza sativa
atggtggtgagcgtggccgcgaccgactcggacacggcccagccggtgcagtactccaccttcttcgcctcccgctacgtccgcgacccgctcccgcggttcaggatgccggagcagtcgatcccgagggaggcggcgtaccagatcatcaacgacgagctgatgctggacgggaacccgcggctaaacctgggcgtccttcgtcaccacgtggatggagcccgaaaccgttgtgtgaatatgatagctcacctgttcaatgcaccaatcaaggaggatgaaacagctattggagttgggacggtgggatcctcagaagcaattatgcttgcaggactggcattcaagaggaagtggcaaaacaaacggaaggaacaggggaagccatgtgacaaacccaacattgttactggtgctaatgttcaggtttgctgggagaaatttgccagatattttgaagtagaactgaaggaggttaagctcagtgaaggatactatgtcatggatcctgtaaaggctgttgaaatggtggatgagaacactatatgcgttgcggccatcttgggctctactctcactggagagtttgaggatgttaagttattgaataatctcctaacagaaaagaataaggaaactgggttgtctctggaggtcgatcggtatgaccaggaaaactggtgggatgtgccaattcatgttgatgcagcaagtggaggatttatagcaccttttctataccctgagcttgaatgggacttcaggctaccactggtgaagagcatcaatgtcagtgggcacaagtatggccttgtgtatccaggtgttggttgggtcatttggcgaagcaaagaggatttgcctgaagaactcattttccatataaactatctggggacagaccagccgacgttcactctgaacttctccaaaggttccagccagataatcgcacagtactatcaactaatacgcctgggattcgagggatacaagaacatcatgcagaattgcatggagaacacagcaatactaagggaaggcatagaggcgactggtcgattcgaaatcctctccaaggaggccggtgtgcccttggtggcgttctcgctcaaggacagcggcaggtacaccgtgttcgacatctccgagcacctgaggaggttcggctggatcgtgccggcgtacaccatgccggccaacgccgagcacgtcgccgtcctccgcgtcgtcatcagggaggacttcagccggagcctcgccgagcggctcgtctcggacatcgtcaagatcctgcacgagctggacgcccattcggcccaggtgctgaagatctccagcgccatcgcgaagcagcaatcgggcgacgatggcgtggtcaccaagaagagcgtcctggagaccgagagggagatcttcgcgtactggagggaccaggtgaagaagaagcagaccggaatctgctag

SEQ ID NO: 2895 - DNA, 753 bp, Oryza sativa
atggtggatgactttatttcaaatcctgatatacataaatatggttgtgcacttgtgcgcattcttcgctcaggccgaaagttatcctttgtttatccaaaaacaaggtcgaacttaggaccagtaggacaaaagatcaagggaattaatcacgcattatctcctaaggagatcataagcacatactgcaaagaagttcgggagctcggattcagactgtacggagcgatatccgagagcctgggcttggaacaggactacatcaagaaggttcttggtgagcaggagcagcatatggcggtgaacttctaccccaagtgcccggagccagagctgacgttcggactgccggcgcacaccgacccgaacgccctcaccatcctcctcatggaccagcaggtggccggcctgcaagttctcaaggaaggcaggtggatcgccgtgaatccacagcccaacgcgctggtgatcaacattggtgatcagctacaggcgctaagcaacggaagatacaagagcgtgtggcaccgtgctgtcgtcaactctgacaaagcgaggatgtccgtcgcatcgttcctgtgcccctgcaacgacgtgctcatcggcccagctcagaagctcatcaccgatggctccccggccgtctaccggaactacacctacgacgagtactacaagaagttctggagcagaaacctcgaccaagaacactgcttggagctcttcagaacaacacctacagacacatcttga

SEQ ID NO: 2896 - DNA, 798 bp, Oryza sativa
atgagttcagctcgccgcctcctcctcctcgccggcgccgctgccgccatcgcactcctgctctcggccactgccccggtggccggagccgaggacgacggctacagctacatccctggctcgcccagggggccgcagaactggggcagcctgaaaccggaatgggccacctgcagcagcggtaagatgcagtcgccaatcaacctcggcctcctcgacctcaccttggctcccggcctcggcaacctcaactacacctacaagaacgccaacgcctccgtcgtcaaccgtggccacgacatcatggttaggtttgacggcgacgctggtagcctaaagataaatggcacggcgtaccagctccggcaaatgcactggcatacgccgtcggagcacaccatcgatggccggaggtatgacatggagctacatatggtgcacctcaatgcccagaaccaggccgccgtcattggcatcctctacaccatcggcaccaccccggacgagtttctgcaaaagatggagccttatataattgcgatatcaaaccaagaaggtaaagagaagatggtcgttggtggggcggatccaaatgtagccaagggaaaggataccgtgtactatcgctacatgggctcctttaccacaccaccttgcacggagggggtcatctggaccgttgtcaggaaggtgcacaccgtgtcactgtcccaaatcacacttctcaaggcagctgtgctcatgggtaatgagaacaacgcgagacccctccaggatgtgaacaacaggggagattga

SEQ ID NO: 2897 - DNA, 1587 bp, Oryza sativa
atgatgcccagagctcagttaaccacatttctcatcgtcactagcttcctctctactgtcccctatctcagggcaccggtgcatggtggcgtcctcactagttacgatgtttcttctttggatatcatgtccaaaatccacactgatcatgacgcgactaccaaggcrtcatcggactttggccatattgtacatgctacaccaaacggggtatttcgtcctaccttccctgctgacatcgctgccctaatccgcttatcactctctcagccgacacccttcaccgtggcaccacgaggcaagggccactcctctcgaggacaggccttcgccccgggcggcattgttgttgacatgtcggctctcggtgatcacggtcaccataccagtcaccgtatcgacgtgtcggttgataggatgtatgtggatgccggtggcgagcagctatggatcgacgtgctccacactgccctcaagcatggtctcacgccacgtgtatggaccgactacctccgcatcaccgtcggtggcacgctctccaacgccggcatcggtgggcaggcattccggcatgggccacagatctccaacgtccacgaacttgatgtggtgacaggaatgggtgagatgatcacttgctcaccagaggtgaactcggccctgttcttcgcggtgctaggtgggttgggtcagtttggggtcataacccgggccagaatcagacttgaaccagctccgaaaagagttaaatgggttcgaatcgcttactcagatgttcacccatttactaccgaccaagagttgcttatctcaaaatgggctagcggatctgggttcgattacgttgagggccaggtccagctcaatcggaccttgacccaaggccgcaggtcgtcttccttcttctctgcaaccgaccttgctcggctcactgggcttgccattgatactggatccgtagcgatctattacattgagggagcaatgtactatgacgataacaccgccgcttccgtggatcagaaacttgatgcgctactggaggagctgagcttcgtccggggcttcgtgttcgtcagggacgcatcgtacgtggagttccttgaccgggttgggcgggaggagcagaatctccggtcagccggcgcctgggacgtgccccacccatggctcaacctcttcgtccccaggtctcgcatcctccacttcgacgccgccgtcttcaagggcatcctccgcaacgccaaccccgtcggcctcatcctcatgtaccccatgaataaggacatgtgggatgacaggatgacggcgatgacgccggacgaggacgtgttctacgccgtcgggctactgaggtcggcggttgccggtggcagcggcggcgacgtggagcagctggagagggagaacgcggcggtgctggagctctgcgamctygccggcggcggcatcgggtgcaggcagtacctgccgcamcaagcgtcgcgggacgggtggaggcgccatttcggcgcgaaatggggcagggtcgccgacctcaaggcccggaggttaatttgcgagggtgctgaatggtttggtttgtaa

SEQ ID NO: 2898 - DNA, 993 bp, Oryza sativa
atggcaaagcatggcgttgcttccgttttaacactggcattggtccttggagttgcggccattcctacagtggtgcaatctatcggcgtgtgctacggcgtgatcgggaacaacctgccgtcgccgagcgacgtcgtgcagctctacaagtccaacggcatcgactccatgcgcatctacttcccaagaagcgacatcctccaggccctcagcggctcaagcatcgccctcaccatggacgtcggcaacgatcagctcggctccctcgcctccgacccctccgccgccgccgccttcgtccagaacaacatccaggcgttcccgggcgtcaacttccgctacatcacggtcggcaacgaggtttccggcggcgacacgcagaacatcctcccggccatgcagaacatgaacagcgccctctccgccgccggcctcggcaacatcaaggtgtcgacgtcggtgtcccagggcgtgaccgccggcttcccgccgtccgccggcacgttctccgcctcgcacatggggcccatagctcagtacctggcgagcaccggcgcgccgctgctcgccaacgtctacccctacttcgcctacgtgggcaaccaggcccagatcgacatcaactacgcgctcttcacgtcgccgggcacggtggtgcaggacggcggcaacgcgtaccagaacctgttcgacgccatcgtcgacacgttctactccgcgctggagagcgccggcgccgggagcgtcccgatcgtggtgtcggagagcgggtggccgtcggccggcggcacggcggcgagcgccggcaacgcgcagacgtacaaccagaacctgatcaaccacgtcgggcaggggacgcccaagaggcccgggagcatcgagacctacattttcgccatgttcaacgagaaccagaagggaggcgacgagacggagaggcacttcggcctcttcaacccggaccagtcgccggcatactccatcaatttctaa

SEQ ID NO: 2899 - DNA, 1515 bp, Oryza sativa
atggcgctcgcgatcaccgccgccgtggtgttcgtccgctacaagaacggcgagggggttttccccttycccggcgtgcccggsgccgtygaccacaagtacgccgaagcgttcgccgtggccctccagttcttccagttcttgatcgatgaagccgggaagctggtgaacaacacgatccactggagaggtgactcggcgctggacgacggcaaggaggccgggattgatctctccaaggggatgtacgacgccggcgaccacatgaagttcggattccccatggcgttcacggccaccatgctctcttggtccgtcctcgagtacggcgacgccatgcgcgccgccgaccagcgcgactccgccattgacgcgctgaattggatcatggattacctcgtcaatgcccacccctccgacgacgtcctctacatccaggtgggtgatcctaaagcagaccacaagtgctgggagcggccggagaagatgaaggagaagaggccactgaccaagatcacgcccaagtcccccggcagcgacgtggcggcggagacggcggcggccatggcggcggcgtcgctggtgtacaagacgatcaacaagacgtactcgtcgtcgctcctggaccacggcgagaggctgttcgccttcgccgacaagcaccggggatcctacacccggacgttcccggagctcagcgcgttctacaactccaccacgtaccaggacgagctcctctgggcggcgagctggctctaccacgccaccggcaaccacagctacctcgcctacgccaccggcaagaacaaggacttcgccgacctgggcaacccgagatacttcagctgggacgacaagcgcgccggaaccgaggttcttttgtcgagggtgagcttctttgcttcgcaaggatcagacgttgcacaagacgatgttcttgggatgtwcaagcagactgctgatgccgtcatgtgcattctcctgccggattcagagaccgccgctttcagaacagaaggtggtttgctgtacgttgccgagtggaactcactccagcacccggtggcatcggcgttcctcgccgcggtttacagcgactacatgcagagctccgggaagacggagctgagctgcagcgggcagggcttctcgccggccgacctgcgcaaattcgccaagtcccaggcggattacttgctaggcagcaacccgatgaagattagttacctagtcgggtacggcgaccggtacccggagaaggtgcaccaccgcggcgcgtccatcccggaggacgtcgacaccggctgcgacggccacaagtggctggagacgtccaagcccaacccaaacgtcgccaccggcgcgctcgtcggcggtccgtacaagaacgacagcttcgtcgacgagcgcgacaacgtgatgcagaacgaggccaccacctacaacagcgccctcgtcgccggcttgctctccgccctcgtctccacctcctccctcgcgcgatccttgtcatga

SEQ ID NO: 2900 - DNA, 1713 bp, Oryza sativa
atgagcaaaggtgctatcatcggcgcttccaccgtgctggtggtggcggtggtggcagccgtgtgcgtggtgtcgttcaagaacggcggcggcggcaaggaggatggcgagctgtccacgtcggtgaagtcggtgaaggccttctgccagccgacggactaccagcagacgtgcgaggaggagctggggaaggccgccggcaatggcgccagctcgccgacggacctggccaaggccatgttcgccgtgacgtcggagaagatctccaaggccatcagcgagtcgtcgacgctggaggagctcaagaacgacaagcgcacgtcgggcgccctgcagaactgcaaggagctgctggagtatgccgtggacgacctcaagacgtcgttcgagaagctcggggggttcgagatgaccaacttccacaaggccgtggacgacctccgcacctggctcagcgccgccctcacctaccagggcacctgcctcgacggcttcctcaacaccaccaccgacgccgccgacaagatgaaaagcgccctcaacagctcgcaggagctcacggaggacatcctcgccgtcgtcgaccagttctccgccacgctcggcagcctcaacatcggccgccgccgcctgctcgccgacgacggcatgccggtgtggatgtcggagggcgggaggcggcagctgctggaggcggcggggcccgaggccgggcccgtggagttcaagccggacgtgacggtggcggcggacgggagcggcgacgtgaagacgatcggcgaggcggtggcgaaggtgcccccgaagaacaaggagcggtacaccatctacgtgaaggccgggacgtacaatgagtacgtgtcggtggggcggccggcgacgaacgtgaacatgataggcgacggcatcgggaagaccatcatcacggggaacaagaacttcaagatgaacctgacgaccaaggacacggcgacgatggaggcgatcgggaacggcttcttcatgagggggatcacggtggagaacacggcggggccggagaaccaccaggcggtggctctccgcgcgcagagcgacatggcggtgttctaccagtgcgagttcgacgggtaccaggacacgctgtacccgcacgcgcagcgccagttcttccgcgactgcacagtgtcggggacaatcgacttcatattcgggaactcgcaggcaagcaaaatagttgttcttcagaactgcttgctccagcctcgtaagccgatggacaaccaggtgaacatcataacggcgcaggggcggcgggagaagaggtcggcgggagggacggtgatccacaactgcacggtggcgccgcacccggacctggagaagttcacggacaaggtgaagacgtacctggcgcggccgtggaaggagtactcgcggaccatcttcgtgcagaacgagatcggggcggtggtggatccggtggggtggctggagtggaacggcaacttcgccctggacaccctctactacgcggaggttgacaaccatggccccggcgccgacatgagcaagcgcgccaagtggaagggcgtccagtccctcacctaccaggacgtccagaaggagttcaccgtggaggccttcatccagggccaggagttcatccccaagttcggcgtcccttacatccccggccttctcccccagacgcagcagggcaggatgcactaa

SEQ ID NO: 2901 - DNA, 1116 bp, Oryza sativa
atgcaggcgctccgaccggccgccgccgccgccgcggcgaggacctactccgccgccgccaaggagatgactgtgcgtgaagcattgaattctgcccttgatgaggagatgtctgctgacccttctgttttcttgatgggagaagaggttggagaataccaaggggcatataagatatcgaagggtttgttagacaaatatggccctgatagggttcttgacacaccaatcacagaggctggttttactggaattggtgttggtgctgcctatcaaggtcttcgccctgtggttgagttcatgacatttaacttctctatgcaggcaattgatcacatcataaattcagctgccaagtcgaactacatgtcagctggtcagataaacgttcctattgtttttagagggccaaacggtgctgctgctggtgttggtgctcagcactctcagtgttatgcggcttggtatgcgcatgtaccaggattgaaggtcctaactccttattctgcagaagatgctcggggcttgctaaaagcagcaatcagggatccagaccctgttgttttcttggaaaatgaactgctctatggtgaatcattccctgtttctgcggaagttcttgattctagcttctgtcttccgattgggaaggctaagatagagcaagaaggaaaagatgttacaattaccgcattctccaagatggtcggatatgctcttcaggatgttagagagccacaaatgaaggagaaggatgtcaaatttcaggctgcagagatactttccaaggagggaatcagtgctgaggtgatcaatcttcggtcaattaggccattggatagagctactatcaatgcatcagttaggaaaaccaacagattggtaacccttgaagaaggatttccacaacatggggttggcgctgaaatatgcatgtctgttgtagaggacagctttgaatatcttgatgcgccagttgagaggattgctggagctgatgtgcccatgccctacgctgccaaccttgagaggatggctgttccacaggttgaggacattgttcgtgcagcgaagcgagcctgctacagagcagtaccaatggcagcaacagcctaa

SEQ ID NO: 2902 - DNA, 2544 bp, Oryza sativa
atggaagaaaatgaagtaaaagacgagaacattccgaactgggctcggtacagtggatttgaagaaaatacaacgggtgatgtggatggggctgttgaagataacaacgctataaatgatcttggtcagatgttgcgggacatcaaagagaactgggaaagtgaaaaggaggtccagcgggacgccctcgacgtctctcttctcaacgcatgggctttattcaaaagggccgtaggcaagtgtgcaaagcaggaccaggggaataacttctgcagctactacatcacgtctgcaagtatacccactgcctatcaacccaaatctacgggggatggcgataagctgattgccgactatgtcgactgcctcatgtccctggacaccaactcccgctcttgccagaatgacgccctgattcttgaaggagctccagatgatgtagacgacgacgccgctgcggcggcggccgcggcggcggagcaggatgtgatgagagattttgctcctggtgatggtgatggtgatgctgatgctgagaatgatcccaaggagccggtgctcggcatgacgttcgagtccgacgaggcggcaaagatgttctacaatgagtacgccaggtggctcgggttccccttccgcgtcggccggtcccggcgatcgaagggcatggaggaggttgtaatcatgaagaggttcgtttgctcgagggaaggggcgcacaagaagaagcagccatcgacgtccggcgaggctaccagtaagcgtgagagggcatcgatgcgggaaggttgcaatgccatgatggaggtggtcagggacaaggaccattgggttgtctccaagcttgagaaggctcacaaccatagccttggcatcggcaccagatacgggtatcttcgtgccagaggattgcctgatgtgtccaacaagatcgctgcgatgggctctgacgggaccgcctctcttaggcagaatttccttggggagaccggtgacggccagggtcttcttgattatctgaagaagaagcaagccaatgaccccaggtgttcccatgccatacaggtcgacaagaatggttgtctgatgaatgttttttgggctgattctagagctaaagaagcctatcggcattttggggatgctgtcacatttgacacgtcatataagaagaccaagtatatgatgccctttgttaccttctcaggtgtcaaccatcatcttcagacagtaatttttggttgtgcgtttcttatggaagaaactgaatcctcattttcttggctgtttgaaacttggttagcagcaatgggtgggaaggcaccaggctcgttagtcactgaccaaaatagggctatgaaggctgcaattggaaaggtttttccagatacctgtcaccgcttctgcaagtggtatattttgagtagaaccaaacaaaaattatgtcatgcatactctgagcatccggacctgagggatgagatagaaagctgtgtgattgaatctgaaactatctctacttttgaaacatcatggatgtcaatcctcgagaaatatgacttgagaaaacatgcatggcttcaagcaatttacaatatacgccaaaagtgggttcctttgtacatgatgggtacattctttgcagaaatatcacccacacaaaaattggagaccatgaatgacttttataagaaatacttcaatacaaagacaacgctggaggttttccttaatcaatttgattcgaccatgacaagtcgatatgaaaatgaagcacaagcagatatagacactcggttaaatgaggcaactacaaggactgcatcgccaatagagaaacaggcagcaagcacttacacaaaagcagtcttcagtaggtttcaagaagaattcacagaatccttgggttatatcattcagaaaactgaagaaggcagagtaaacaaattcagcatcacaaaagatgaagatgatccatcagacacattctgtgtgacttataatgcttccagtaagatggcaaagtgtagttgcaagtactttaagttctcaggtattttatgccgtcatattcttggagtattcataatagttgatccacgcacacttccacctgattactttttgaaacgttggacgaggaatgccagacatgatgaattgttggaagacaacagcaataaccacaaagatgctacttgtcaatccattacaagccgttacaatgtcctgtgtgctgatgccatcagatgtgctgacaaaggatctgcatcaaaggctgtgtataaagcagcaaaagacatcttacagaaggcatatgaagaaatcattgcctatgaaagaaatcctggcagaggattacaaagggatgctataaacatcaatgaggatatcacaatagatgataccatgaatgatcaatctttgccagatttctggacaaaagattatattaaaggtatttggcatcagaagtgcaaggtttgtaatgatattgggttactgacgtttattgttttcttcaaaattactcctgaagcatag

SEQ ID NO: 2903 - DNA, 1212 bp, Oryza sativa
atggcgcccaataattgcagcccaaatctgttcgatttagttgctagtgtttgctacgtatggatgtttggggatttctctcaaaatactgttggtagattgatgaaatcatggaaacagatgcagatctttgtgaagacactcactggcaagaccatcaccctcgaggttgagtcctctgatacaattgacaatgtgaaggccaagattcaggacaaggagggcattccacctgaccagcaacgtctcatctttgctggcaagcaactagaggatggccgcaccctcgcggattacaacatccagaaggagtccaccctccaccttgtccttcgcctcaggggaggcatgcagatctttgtgaagaccttgacaggaaagaccatcactcttgcggtcgagtcctcggacaagatcgacaatgtgaaggcgaagattcaggacaaggagggaattcccccggaccagcagcgcctcatctttgcagacaagcagctcgaggatggacgtacactggctgattacaacattcagaaggagtccaccttgcacctggtgctccgcctccgtgtggccgaaaaatcaatcctgcttattctggatatgtgttctttatttccagaaaacgtagataagtacgcgatttggccgactgatggctgcgattttgctataatactgttgctatctactgccttgcgtgccacagtgatgctgatgcacaacgtgcaccacctccgtggtggccagcttgttgatctcaacagggtgaatgcaggccctgaccataaccgcggggtgccagccaatggtgcccatcagtttaattgccccgatgatggttttgccttggcaggtggtacatgtgccgtggcctctgctgcttcttgcgttgatgacctggttcatcggctgcctcaggctctacggttttcaaatcgcttttcctgtatattatcatcagcacggtggcaacaacagccaagggatggaatggtgaataatgcagagatggaggaggagaacgccattccggatgagggcagtctggcctggagcggctacgccctgatggtcttatcagtgttggcattgtggtctggcttggtcactgaaccggtggcggtcttcctgtccttcctgcttctgctgcttgggtgcggctttcttcacctcgccatgctcgcaccgtccaagcccaagatgttctga

SEQ ID NO: 2904 - DNA, 2412 bp, Oryza sativa
atgtcgggccccaagctcgaccgcaccccgagcatccgcgaccgcgtcgaggacaccctccacgcccaccgcaacgagctcgtcgccctcctctccaagtacgtgagccaggggaaggggatcctgcagccgcaccacatcctcgamgcgctcgacgaggtccagagctccggcggccgcgccctcgtcgagggccccttcctcgacgtcctccgstycgcccaggaggcgatcgtgctgccgccgttcgtggcgatcgcggtgcggccgcggccaggggtgtgggagtacgtccgcgtgaacgtgcacgagctcagcgtcgagcagctcaccgtgtcggagtacctccgcttcaaggaggagctcgtcgacggccagtacaacgatccgtacatacttgagcttgattttgagccattcaatgcctcggttccacgcccaaatcggtcatcatcaattggaaatggcgtgcagtttctcaacaggcacttgtcttcgatcatgttccggaacaaggattgcctggagcccctacttgatttccttcgtgggcatcggcataagggtcatgatacagagtctgggaagacttcaagtctgtgcttgacaaaagctgaggagcacttgtcgaaactcccagctgacacaccatactcacagttcgcatataagtttcaagaatggggattggagaagggttggggcgacacagctggatatgtcttggagatgatacatctccttctggatgtgcttcaagcgcctgatccatctactcttgagacgttcttgggaaggatccccatgatctttaatgtcgtcgtagtgtctcctcatggatattttggccaagccaatgtgttgggcttaccagatactggagggcagattgtctatatactggaccaagtccgtgcattggagaatgagatggttcttaggttaaagaaacaaggccttgattttacccctaaaattcttattgttactcggctgataccagaagcaaaagggacatcatgcaatcagcgtcttgagagaataagtgggacacaacatacttacatattacgagtgccattcagaaatgaaaatgggatactcaggaaatggatatcaagatttgatgtatggccctacctggagaaatttgcagaggatgctgctggtgagattgctgcagaactacaaggtactccagacttcataattggaaactacagtgacggtaatcttgttgcatcattgctatcttacaagatgggaattacccagtgcaatattgctcatgctttggaaaagactaaatatccagactcagacatatactggacgaagtacgatgagaagtaccatttctcctgtcagttcacagctgatataatcgccatgaacaatgctgattttataatcaccagcacataccaggaaattgctggcagcaaaaacacagttggacagtatgagagccatactgcatttactcttcctggtctgtatcgtattgtccatgggattgatgtttttgacccaaagttcaacatagtctctccaggagcagacatgtctatatactttccgtacactgaaaaggccaagcggctcacttcgcttcatggttcacttgaaaacttgatttctgacccagagcaaaatgacgaacatattggacacctggatgacagatcaaaacccattctcttttccatggcaagacttgaccgagttaagaacataacagggttggttgaagcttatgctaaaaacgctaggctgagggagctggtaaaccttgtcgtggttgctggctataacgatgtcaagaaatccaaggacagagaagaaatcgcagagattgagaagatgcatgaacttattaagacctataacttgtttgggcagttccgttggatctcggctcagacgaacagggctcgcaatggtgagctctatcgctacatagctgatactcatggtgccttcgtgcagccagctttctacgaagcattcggtctcactgttgtggaggccatgacatgtggactccctacttttgcaacagtccatggtggacctgccgagattatagagcacgggatctcagggttccacatagatccttatcatccggatcaagctgcaaatctgatagctgacttcttcgaacaatgtaaacaagaccccaaccattgggttgaagtttctaatagaggcctacaacgtatatatgagaaatatacatggaagatctactctgagaggttgatgacattggctggggtttatggcttctggaagtatgtctcgaagcttgagaggcgggagaccaggcgctatcttgagatgttctacatattgaagttccgtgaactgccaaractkkaccytcttgcagtagatgaggcacactga

SEQ ID NO: 2905 - DNA, 579 bp, Oryza sativa
atgccgtcgtcgagcaggacggagacggtgaagaacgcgctgtcgcggtgggcgcggagagtcggcgagacgaccaggaaggccgaggacctgtcgcgcaacacatggcagcacctgaggacggcgccgagcatcggggaggcggccgtggggaggatcgcgcaggggaccaaggtcctggccgagggcggccacgacaggatattccggcaggcgttcagcgcgccgcccgacgagcagctccgcaagtcctacgcgtgctacctctccacctccgccggcccggtgatgggcatcctgtacctctccacggccagggtcgccttctgcagcgacagcccactctcctacgaggccggcggcggcagcaaagagtggagctactacaaggtggcgattcctctgcacaggctgaggtcggcgagcccgtcggccagcaagcagaggcccgcggagaagttcatccagctcgtgtcggtggaccgccatgagttctggttgatgggctttgtgaactacgacagcgcggtcaagcacttgcaggaggctctcagcggcttccaccacctgcaagcgtga

SEQ ID NO: 2906 - DNA, 1236 bp, Oryza sativa
atggcatatggtgcaactttcctggcacatcaactataccaaatggagggaggtcatgccatagatcaaatgggcaccaacactgagcccacacagcgatcgaccatgcacaagaattgccatcgtcacgagtattctagcactcaacgctcggtggcggcaggcagcggcatgtgcgtggaggaactcgaaggcgcagagaggctcgattttggtggggttgcggagctcgagacaacaccggcagacttcgagatggagaaagtttgtgagaacacagtatctcttgatttcaagcaggctaggtcgagcagttttgtcccagttatccgatcaggggactggtcggatattggaggtcgcgattacatggaagatgctcatgtctgcatctcagatctagctaataattttggtcataattcagtggatgatgagattatttccttttatggggtctttgatgggcatggtggaaaagatgcagctcattatgtgcgtgataacttgccacgggttatcgtggaagatgctgattttcctcttgagctagagaaagttgtcaggaggtcatttgtgcaaactgatagtcaatttgcagagaggtgctctcatcagaatgcactttcttctggaacgacagcgcttacagcaatgatttttggaaggtctcttctggttgctaatgctggtgattgccgagcagttctttcaaggcgtggtaccgcaattgaaatgtccaaggaccacaggacttgctgcctcaacgaaagaaagcgtatagaatcacttggcggctatgttgatgatggctatttgaatggtcaattagcagtcactagagcattgggtgactggcatctcgagggtctgaaagaagtgggtgagccaggtggccccttgagcgcggaaccagagctcaagatgatcacactgacgaaggaagacgagttcttgataataggaagcgacggcatctgggacttcttctcgaaccagaatgccgtggatttcaccaggaagaggctccaagagcacaatgacttgaggttgtgctgcaagcagatcgtcgaggaggcaataaggcgaggggcctcagacaacctaacggcggtgatggtctcattccaccaggaggcccctcctcagctcagagtgaacaggacggggagggtcgagcggagcatatcggctgaagggcttcacagcctcagggtgctcctggaaggccaatga

SEQ ID NO: 2907 - DNA, 1077 bp, Oryza sativa
atgtcgcagaggagagttgcagggcccatgggagtgatgagcaagcagcagcaggaggccatggcagaggagatgatggagctgaggcgaggaccatggaccctcgaggaagacaacctcctcatgaactacattgcctgccatggcgaaggccgctggaatctcctcgcccgctgctccgggttgaagaggacgggcaagagctgcaggctaagatggctcaactacctcaagcctgacataaagcgcgggaatctgacgccggaggagcagctgctcattcttgagctccattccaggtggggaaacaggtggtcgaggatagcgcagcatctgccggggaggacggacaacgagatcaagaactactggaggacgagggtgcagaagcaggccaggcagctcaaggtcgacgccaacagcaccgtcttccgcgacgccgtccgctgctattggatgcctcgcctcctcgagaagatggccggagcagccaccgaccccactccgccgccgccaccgccactccaccaccacgccgccatggccaccgcctcctcctcgccgttcgacttcgacacccacctgcagcaagcagaagcagcaacggcgtgcgtcgtcccgaacaacgtgtaccaccaccacatcgacccgagcccgagcacgtcgacgtcggccggctcgacggcggccgcggcggcgttccagccgctgccctgcttctccgagctgagatgggaccagcagatgcagtcctccggcgagctcgacgacggcgccgccggcgtgttcgtcgactcggcgtcggcgctgggaagcctcagcctcgacgggctggaccttggtccggccgagtactactccgactcgacgctcctcgactacctcaactccagctgcaccggcagcgccatgatgacgatgatgaccgcctccggcaacgccggcagctacaactactgcggcggcgccatggacggcggcgacacgtggaggtccgacgagctaatggatgagttgttccatcatatcgatcaagatagaagtactagtgatcgatcaagcaaaaatcaaaagtag

SEQ ID NO: 2908 - DNA, 2742 bp, Oryza sativa
atggaggttgacccaycgtcgtctttgccgggcgcgggggaaggaggaggaggaggaatcggcggcgggggtggggatttgtggccgttcgactcgctcaccacgtcgctgctgttctcgtcggtgtcggcctcaccgcagccgctgccggcctcgtcgtcgtcgtggctcacgccgccctcgccgctgtggctgttcgacgagcgccagctgctcccgctcgacatgggcgcccccgctgcccccgccaccgctccgcccgccgaggccgccgccgtggtcgaggaagtccatcggacccgctccgggaattctgacacgactagtaagagggttgatcagattaatagcaaatggcagtttcacctatctattgatgataacacggacagctcatgcttgtttaaggagaggcttacacaggctcttagatacttcaaggagtccacagatcagcatctgctggttcaagtttgggcaccggttaagagtggagaccggtatgtgcttactacttcaggacagccctttgtacttgaccagcagagtattgggcttcttcagtacagggctgtatccatgatgtacatgttctcggtggatggagaaaatgctggagagctggggctacctgggcgtgtgtacaaacaaaaggttcctgagtggacaccgaatgtgcagtattatagcagtactgagtacccacgccttaaccatgcaatcagttacaatgttcatggtactgtagccttgcctgtttttgatccttctgttcaaaattgtattgcggttgttgaacttataatgacatcaaagaagatcaactatgctggtgaggttgataaagtctgcaaagctcttgaggcagtaaatctcaaaagcactgagatattgraccatccgaatgtccagatatgcaatgaaggccgccaatctgctttggtggagatactggagatcttgacggtcgtatgtgaagagcacaagcttcctttgggctcaaacctgggttccttgcaagtttgcatgtcaaccagtgatgtggcatttcatgttatcgatgctcatatgtggggatttagagatgcatgtgtagaacatcacctacagaagggacaaggagtttctgggaaggcttttatctatcgtcgaccttgcttttctaaagatatcagtcaattctgcaagttggagtatccccttgtacactatgctcgaatgtttggtctagctggctgctttgcaatatgtttgcaaagtatgtatactggagatgatgattatatattagagttcttcctgccaccaaattgcaggaacgaagatgatcaaaatgccttgttggagtccatattagctcgaatgaagaagtgccttcgtaccctaaaggtagttggcaacggagacaccaatgaagtttgtctgcaaataagtaatgtgctaataattgagactgaagatttgaagacaaatgtgcactttgagaattctgaaggttgctttcgtgaatcgcctgaaagtaatggaagccaaagagtccacgaggttgataatgatggcaacaaagtttcaatcatgtcagagagacatttgctagctgatgacaactctcaaaacaatggggcatctgttggcaggccaaatggtagtggtgcttctgattcgcttcacaaaagtaataaaccccctgaaaggagacgaggaaaagctgaaaaaacaatcagcttagatgttcttcagcaatatttctcaggaagcctaaaaaatgcagcaaaaagccttggtgtatgtcccacaaccatgaaacgcatctgcaggcaacatgggatttctcgttggccatctcgaaaaattaacaaggtcaaccggtctctctcaaaactaaagcaggtaattgagtctgttcaaggctcagatgcggcatttaatctcacgtctatcacaggtcctctccctattcctgttggaccttcatcagattctcagaatctagagaaagcaagtccaaataaagttgcagaactttcaaatctggctgttgagggggacagagattcatccttgcaaaagccaatagaaaatgacaacttagctatattgatgtcacagcaagggtttatagatgcaaacaataacttgcaacttgaagcagacaaagcttctcactcgagaagctcatctggagaaggcagtataaactcacgtacctcagaggcctcatgccatggaagtcctgcaaaccagacatttgtttgcaagccaattgcatcgacgttcgctgaaccacaattaattccagaggcgtttactaaagagccctttcaagaaccagcactaccgctttccaggatgctcattgaggattctggaagttccaaagatttgaagaatctcttcacttcagcagttgatcaaccatttttagcacgttcaagcaatttggcgctgatgcaaaattcagggacggtgaccataaaggctagctttaaggaagacattgtcaggttccgcttcccatgttccggtagcgttactgcattgaaagatgaagtagccaaaaggctaaggatggatgttggcatgtttgatatcaagtatctcgacgatgatcatgagtgggtgaagttagcatgcaacgcggacttggaagaatgcatggagatctctggtagccatgtcatcaggctgttggttagcgatgttgcggcacaccttggtagttcctgtggaagctcaggttga

SEQ ID NO: 2909 - DNA, 417 bp, Oryza sativa
atggcgaccggcaacctggccagcgtggtggtggcggtggacgggagcgaggagagcatgaacgcgctgcggtgggcgctcgacaacctccgcctccgccccgacggcgcgctcgtcgtgctccacgtccagccgccgccgagcatcgccgccgggctcaaccccggacccatccccttcggcggcccgagcgaggtggaggtgccggcgttcacgcaggcgatcgaggcgcaccagcggcggatcacgcaggctatcctggatcacgcgctcaagatttgctccgagaagaatgtggaggtgaagacggatgtggtcgttggggatcctaaggagaagatctgcgaggtgacggcaaatctcaaggccgatctgctcgtcatggggtgccgtgcttttggccccctcaagaggtaa

SEQ ID NO: 2910 - DNA, 1032 bp, Oryza sativa
atggagtccggccggctcatcttcagcacggcgggctccggcgccgggcagatgctcttcttggactgcggcgctggcggcggcggcgtcggcggcggggccatgttccatcgaggggcgagaccggtgctcggcatggaggaaggagggcgcggcgtcaagcggcccttcttcaccacccccgacgagctcctcgaagaggagtactacgacgagcagctcccggagaagaagcggcgcctcacgccggagcaggtgcatctgctggagaggagcttcgaggaggagaacaagctggagccggagcggaagacggagctggcgcggaagctagggctgcagccgcggcaggtcgccgtgtggttccagaaccgccgcgcgcgctggaagaccaagcagctcgagcgcgacttcgaccgcctcaaggcgtcgttcgacgccctccgcgccgaccacgacgccctcctccaggacaaccaccgcctccactctcaggtcatgtcgttgaccgagaagctgcaagagaaggagacgacgaccgagggcagcgccggcgcggccgttgacgtcccgggcttgcctgcggcggccgacgtgaaggtcgccgtcccggacgccgaggaaccggcgctggaggaggcggcggcggcgttcgaggagcagcaggagcagcaggtgaaggccgaggacaggctgagcacgggcagcggcgggagcgcggtggtggacacggacgcgcaactggtggtcgggtgcggccggcagcatctcgccgccgtggacagcagcgtggagtcgtacttcccgggcggcgacgagtaccacgactgcgtgatgggccccatggaccacgccgcggggggcatccagtcggaggaggacgacggcgccggcagcgacgagggctgcagctactacgccgacgacgccggcgtcctcttcgccgaccacggccaccaccaccaccaccaacacgcggacgacgacgaggaggacggccagcagatcagctgctggtggatgtggaactag

SEQ ID NO: 2911 - DNA, 1250 bp, Oryza sativa
atggtggcggaggcggaggtgatgcatcagcccgtgccggtgttggaggtgccgtaccaccggtgcgtcgccaagggtgtcgaggaggtggccgccgcggcggcggtcgcgccgccgccggtggtcgaggtcgaggttgccgtccaggtgcctcacatggtttattatggagtttactgcctttctgtttattacacgagattgttttctgttcgtggatgcaaaagactgacacagtttgggttggagagtgctgctggtgcaccgagcatatcagttgatgcactacagtttgttcccagtattcgatctggtagctttgctgatattggacctaggaggtacatggaagatgagcacatccggatagatgatctctctgcccatcttggatcgctcttggtgtgtccgttgcctagtgccttctatggggtcttcgatggccatggaggcctggatgctgcagcctacatgaaaaggcatgcaatgaggttcctgtttgaggacagtgagttcccacaagcatcgcaagtagatgaaacatatgttcagtcagttgagaactctgtgcgcagagcgttcttgcaagcagatcttgccttagctgatgatttagatatcagccgctcttccggaactacagcactcaccgcattagtcttcggaaggcaattgctggttgcaaatgcgggggattgccgtgcggtcctttgccggagaggcgtagcgatggagatgtctcgagatcacagagcaaactatgccgaggagtgtgaacgggttgctgcatccggaggatacatcgaggatggctacctcaacggagtcctatccgtgacacgggccctaggggactgggacatgaaaatgcccgacggctcgatatcccctctcatcgccgagccagagttccgacagaccatgctcacggaggacgacgagttcctcatcatggggtgcgacgggatctgggacgtgatgaccagccagcacgcggtgagcatcgtccgacgggggctccggcagcacgacgaccccgagaggtgcgcgagggagcttgtcatggaggccaagaggctcgagaccgccgacaacctgacggtgatcgtcgtctgcttcgtctcggagcttgggtcgccgcggcaggagcaggtgggggggcaggcgggggtggcgaggccgaggagttgcaagagcctctctgcggaggccctgtgcaacctgaggagctggctggagactgatcgcta

SEQ ID NO: 2912 - DNA, 1479 bp, Oryza sativa
atggcgcgtgcgcgtgcgtctgccatgggcgccgctcctcctccgcacctgcgtagccatgacctcgttgtcgtcgtcgccgtcgccgcggcggcgctatgtctcgcgtgccgaggtgcgtcggcgggcggcggcggcggcgtcgacgtgctcgatcgggcgaggcggccggagttcgcggcgtggatggcgggcgtcaggtgggccatccacgagcggccagagctggcgttcgaggagatcgagaccagcaggctggtgagggcggagctcgacgccatgggcgtcgcgtacaggcacccggtcgccggcacgggcgtcgtcgcgaccgtaggcaccgggcgcccgccgttcgtcgcgctgcgcgccgacatggatgcactcccgatgcagggcaaatatagacatttgtacatcgaattactttacttaaattatgtccaaaatatggccggagaggaggtgcagtgggagcacaagagtaaggtggccatgaagatgcacgcctgcggccacgacgcacacaccaccatgctcctcggcgccgccaggatcctccaggagcgacgccatgagctgcagtttcatattgttcagtactctattttgcagctgaaagcatcagcgggtacggtggtcctcctcttccagccgggggaggaggtgggcaccggggccaggaggatggtggaagccggcgccgtggacaacgtggaggccatcttcgggttccacgtcagcgtggagctccccaccggcgtggtgggatcgcggcccggcccgctgctcgccggctgcggcttcttcgaggcggtgatcaccgggaagggcggccacgccgcacacccccacgccagcgtcgaccccatcttggccgcttccaccgtcgtcctcgccctgcagggcctcgtctcgcgggaggccgacccgctggaggcccaggtggtgacggtgacgaggttcctcgccggcgaagcgctcaacgtgatcccggagtcgatcacgatcggcggcacgttccgggtgttctcgaacgagggcttcttgcggctgaagcggcggatcgaggaggtgatcgtggcgcadtcggcggtgtaccggtgcgccgcggcggtggacttccacgcggggggcaggccgctgctgcccccgaccatcaacagcgcggcgctgcacgcgcacttccaggccgtcgcggcggagacgctcggcgcctcggccgcggtcctcggcgcgatggagccgtgcatggggagcgaggacttcgccgtcttctccgaggccgtgccggcgtcccacttctacttcgtcggggtgcgcaacgaggcggaggggctggtgcacctcgcgcactcgccgcacttccgcgtcgacgacgccgcgctcccgtacggcgcggcgttgcacgccagcctcgccatgaggtacctggacgaacgccggcgcgagggcggctcgcaccctcacgaggaactctag

SEQ ID NO: 2913 - DNA, 1419 bp, Oryza sativa
atggcaaaattccacgtaactggttatataacaagttttggcagcttagaatgggcaaagacacatgatgcagcaacacaaacatctctagtcgtttcatctcttgtagatggtggtgctatgtgtgttggaaaaactgttattgatgaaatggcatttagtatccatggtgagaataaacattttggcacaccaacaaatcctgctgctccagatcgagtacctggaggatgttcaagtgggtcagctgttgctgttgctgctggcattgtagatttttccttaggtattgataccattggaggagtaagggtaccaggtagttattgtggcgtcttggcattccggccttcacatgctgttgtccccaacaatggtgttattcctgtcgctcctagcctggatgccataggttggtttgcgagggatccaagtgtactgcgtcgtgttggccatctccttctgaggctaccctacgctgatattcgacaacccagacatttctacatagcagatgattgctttgaaatgtcaaaggtgcatgcaagaagattgactcaggtggtgacgaaatctgtggaaaagctatttgggatttttgctggccaccaacttcctcatgttgatttttttcccttgcgtattacattaggacaagtcctgggtcatgttaatcttgaaaattatttggcttcaagaatacccagcctgaggaacaattcaaatggtcatggtgactcaaagttttcttcattgctagcactttctagggctatgcagtttcttcacaaacatgaattcaaagatcaacatatggagtggataaactctgttaagcctgctgttgatgcatgcatagttggtaatttgtctgatgatggtgagtcaactatcaataacagtcaagatgcaaggaaagaagtccgtgcagctctcggtgctcttcttaaggatgatggaattctggtcattccaactgttctgggatgccccccaaaactaaatgccagggaactttcatctcaggactacaatgttcagacatcatgtcttacatctttagctagcatgtcagggtgttgccagggtaacattgcatttaaggagaaacaatggcaaaaggcaataaatttctatactgaagcaatcaaattaaataataaagtggctacatactacagcaacagagctgctgcttttctagagctagctagttaccgccaagctgaggcagattgcacaagtgccatcgatattgatccaaagattgtaaaagcttatttgaggagaggcactgcaagggagatgctgggttactacaaggaggctgttgatgatttcagccacgcccttgttctagaacccatgaacaagacagctggtgtggccatcaataggttaaagaagctatttccgtaa

SEQ ID NO: 2914 - DNA, 2580 bp, Oryza sativa
atggcggcctcggtggagtacaagctggctccgcacccgtgggcgagcaatgctccgtcgagcaacctcgacttgttcccgtccggcggcggcaagcgccgttcgggctccgagaccgactccgacgacgaggacagcataccaccggactggaggtcgctgtaccacccgcggctggaggtggcggagccggccgtcaaggacccccgcgacgaggccacctccgacgcgtgggtgcgtcgccacccggcgctcgtccggctcaccggcaagcacccgttcaactccgagccgccgctgccgcgcctcatgtcgcacggcttcatcacgccggcgccgctccactacgtgaccgggctcgtcaagcgccccgcgaggctcaacatggagcagctcgtgaccgggttcgaggccgtggagctccccgtcacgctggtgtgcgcgggcaaccggcgcaaggagcagaacatggtgcgccagaccgtgggcttcaactggggccccggcgccatctccacctccgtgtggcgcggcgtgcggctgcgcgacgtgctgcggtggtgcggtgtcatgggcgcctccgccggcgcggccaacgtgtgcttcgagggcgccgaggacctcccaggcggcggcgggtgcaagtacggcaccagcctgcgccgcgaggtggccatggaccccgcccacgacgtcatcctcgcctacatgcagaacggcgagccgctcacgcccgaccacggcttccccgtccgggtcatcgtcccgggcttcatcggcggccgcatggtgaaatggctcaagcgcatcatcgtcgcgtccagcgagtcggagagctactaccattaccgcgacaaccgcgtcctcccgtctcacgtcgacgccgagctcgccaatgccgaagcttggtggtacaagccggagtacatgataaacgagctgaacataaactcggtgatcaccacgccgggacacgatgaggtgctccccatcaatgcgctgacgacgcagcggccgtatacgatgaagggatacgcctactccggcggtggccggaaagttacaagggtagaggtgaccctggacggcggcgagacgtggcaggtgtgcaaccttgaccacccggagaggccgaccaagtacggaaagtactggtgctggtgcttctggtccgtcgatgtcgaggtgctcgagctgctcgccgccaaggagatcgccgtccgcgcctgggacgagtccctcaacacccagccggagaagctcatttggaatctcatgggcatgatgaacaactgctggttcagggtgaagacgaagacgtgcaggccgcacaagggggagatcgggctggtgttcgagcacccgacgcagccggcaaccaggccggcgggtgatggcgaggcagaagcacctcgagacgtcggagagcgcggtgagcacgctgaagcgcagcactacaccatgtccgaggtgcgccgccacacgacgccggagtccgcctggatcatcgtgcacggccatgtctacgactgcacggggttcctcaaggaccaccccggcggcgccgacagcatcatgatcaacgccggcaccgactgcaccgaggaattcgacgccatccactccgacaaggcccgtggcctcctcgagatgtaccgcatcggcgagctcatcgtcaccggcagcgactactcgccgcagagcagcagtgctgacctcacgtccatcgttgagagccctacggcagcggcggcgcccgccgtgccggtgtcgaccgtcgcgctgtccaacccgcgggagaaggtgaaatgccggctcatggacaagaagagcctgtcctacaacgtgcgcctgttccggttcgcgctgccgtcgccggaccagaagctcgggctaccggtcggcaagcacgtgtacgtgtgcgcgtcgatcggcggcaagctctgcatgcgcgcgtacacgccgacgagctccgtcgacgaggtcggctacatcgagctcctgatcaagatatacttcaagggcgaggaccccaagttccccgacggcgggctcatgtcgcagtacctggactacctgccgctcggcgccaccatcgacatcaagggcccgatcgggcacatcgagtacgccggccgcggcgccttcacggtgaacggcgagcgccggttcgcgcggcggctcgccatggtggccggcgggacggggatcacgccggtgtaccaggtgatccaggccgtgctctgggaccagcccgacgacggaacggagatgcacgtggtgtacgcgaaccggacggaggacgacatgctcctccgggaggagatcgaccggtgggcggcggcgcacccggcgcggctcaaggtgtggtacgtggtgagcaaggtggcgcggccggaggacgggtgggagtacggcgtggggagggtggacgagcggacgctcagggagcacctgccgccgggcgacggcgagacgctcgcgctcgtgtgcgggccgccggcgatggtcgagtgcacggtgcggccgggcctggagaagatgggctatgacctcgacaagtcctgcctcgtcttctga

SEQ ID NO: 2915 - DNA, 957 bp, Oryza sativa
atgggcgcgggcgggaggtgggtggaggagtacgggcgttcgtcgtcgccgtcgtccaacctgcagtgcttcttggactgcaccacccccgccgtcgacacgcacctcctccccaaggcgaatggccggttttcgagcgattcttggcaccacgccgagatggacagcgtcgagtacttcaacctcgcggacctatgggagcagtactatgagtggagcgcgtacggggctggaactacggtgcagctgtatggaggggaaagagtagtccaatactatgttccctacttgtcagggatacagctatataccaacaaagcccagactgcatccaggagttttggtgaagataatggcatggactattggagcgatgatgaggacaatgagaagatgtcaagatcttggagttcaacatctgaagactcattatttaactgtgatgcaataagtggcaatagaaaacgccacgggcacatgtattttgagttcttcgaggtttgctctccttatggaaggattccactcattgacaaggtgtatgaactatcccagagctatcctgggttgacatccctgagaagtgttgacctttcgccggcaagtggaatgccagttccctggtatcccatctaccatattccctaccagcgcaatgtgaaggacttatctgcatgcttcctaacttatcataccatttcctcttcatttcaagattacgcgctcgagagcatggccaacgggaagcgaaacgacgagacggagaagaaggtcagcaagactcatcttgctccgttcgggctcgcggcgcacaagctgcagggttctctctggaccaacccgagaacaggggaccgtgacaggatggtctccctcttcggcgccgcggattcctggctcaagcagctcggagtccagcaccatgactacaactacttcatcactcaccccatgtga

SEQ ID NO: 2916 - DNA, 2046 bp, Oryza sativa
atggagacgacgacgacggagaggcggcggctgttcgcgacggagaaggtgggcggcagggcggtgtacaggctgcaggcggcgacggtggccgccgggatactgctggtgctctactacagggcgacgcgcgtgccggccgccggcgaagggcgggcggcgtggctggggatggcggcggcggagctctggttcgccgtctactgggtcatcacgcagtccgtccggtggtgccccgtccgccgccgcaccttcaagaacaggctcgccgagagatacaaagaaaatctacctggtgtggatgtttttgtatgcactgcagacccacacgcagagccaccaagccttgtcatctctaccatcctatcagtcatggcatacaattacccatcagaaaaaataagtgtgtatctttctgatgatggtggttcaattcttactttctacgctctatgggaggcatccatgtttgcaaagaaatggctaccattctgcagaagatataacattgagccaaggtccccagctgcttacttctcggaatcagaagggcatcacaatctgtgctccccaaaagaatggtcatttatcaaggttctgatagatgggaaaagccaaaatgcagttgatgacgacggaaatgtgctaccaacactggtatacatggcgcgcgagaagagccctcagtatcaccataacttcaaagccggggcattgaacgctttgataagggtatcagcactgataagtgacagccctgttatcttgaatgtggactgtgacatgtattccaacaatagtgattcaatcagagatgcgttgtgcttcttccttgatgaagaaatgagccacaaaattggatttgtccagtatcctcagaactacaacaatatgaccaaaaataatatatatgggaactctctcaatgttatcaatcatgtggagatgcgtggtttggacagtgctggtggatgtctctatattggcacaggatgcttccatagaagagagatcctttgtggtaagaaattcagcaaagattacaaggaagactggggcagaggaataaaggaaagaggacatgagaacatagatgagattgaagagaaggcaaaatctttagcaacctgcacttatgaacttaggacacaatggggcaatgagattggagtgaaatatggttgcccagtagaggatgtcatcactggattggcaatacattgccgaggatgggagtcagtctacatggaacctcaaagggcagcatttgtgggtgtagctccagcaacacttgcccagacaatactgcaacacaagagatggagtgagggcaatttcacaatttttctttcaaagcacaacaccttcctgtttggacatggaaaaatcagcttgcagttacagatgggctactgcatatatggattatgggcagccaattcactgcctacaatctactatgttatgattccagcactaggtcttgtcaaaggcactcccctatttccagagattatgagtccatgggctacacccttcatatatgtattttgtgtgaagaccctctacagtctttatgaggcattattatctggggatacattgaaaggatggtggaatggacaaaggatgtggatggtgaaaagaattacctcatatctatatggcttcattgacaccatccgaaaattgttaggattgtcaaagatgtcatttgaaattacagcaaaggtaagtgatggcgatgaagcaaagaggtatgagcaagaaatccttgagtttgggtcatcatctcctgaatttgtgatcatcgcaactgtcgcattactgaacttcgtctgcctagttgcagggctaagcaaaataatggcaggtgtgtggaatgtgtttttaccccaggtcattctatgtggactgatagtgatcactaatatcccaatttatgaggcaatgtttgtgagaaaggataaggggagaataccattaccagtcacactagcttcaattggctttgtaatgttggcattcctgttaccaatagtttga

SEQ ID NO: 2917 - DNA, 858 bp, Oryza sativa
atggagatggtgctgcagaggacgagccaccacccggtgcccggggagcagcaggaggcggcggcggagctgtcgtcggctgagctccggcgagggccgtggaccgtcgatgaggacctcaccctcatcaattacatctctgatcacggcgagggccgctggaacgcactcgcacgcgccgccggtctgaagaggactgggaagagctgccggctccggtggctgaactatctccggccggatgtgaagcgcggcaacttcaccgcagaggagcagctgctcatcctcgacctccactcccgatggggcaaccgatggtccaagatagcacaacatttgcctgggaggaccgacaacgagatcaagaactactggaggaccagagtgcaaaagcatgccaagcaactcaattgtgatgtcaacagcaagaggttcaaggatgccatgaagtacctatggatgcctcgccttgccgagcgcatccatgccagggctggcgctgttgatgatagcggagactacagcaacaacgacttatcatgtgtatctggtgtaacaatggccactgttgctaattgttttgatggctctccgagcatggtgactagctcatcttccgattcgttcacgtcggagtcacaagatttgaagaagattaacttacatgtgcatggtgatgatgagaagatgaactctgaagactggatgcaggaggtggaccatgagttttggtctacagagattcagcctaataatgaacagtttcaggaccaacagcttaacggttgggtgcaaggtttttctgagggtttgtccgaaactctatggagtctagaggacatatggaagatgcaataa

SEQ ID NO: 2918 - DNA, 1248 bp, Oryza sativa
atggcggcgaagcggcttcacgacggctacggacaggaggaccagcccgacgacaagcgtgtgcgccgcatgccgtccttctcgacggtgatccgtgaggccttgatggtgaagcagatgcagactctgttcgtcgcactggagccacttctccgtagagtggtgcaggaggagctccaggcaggtctcgtgcgcagcccgcgttacatcgagaggatgtcgcctgagacgccgccggctcagccgccgatgtggaagctggcgttccggttcaagccgcagctcccgatcttcaccgggagcaagatcgaggacgtgaacggcaacccactggagatcatcctcgtcgacgtcgacaccggcgcgccggcgacgatctcgcagcctctgcgcgtcgaggtcgtcccggtcctgggcgacttcccgccggacgaccgcgagcactggacggcggaggagttccagcagaggggcatcgtgaaggagcgctccggcaagcgcccgctcctcaccggcgacgtcagcctcaccatgcgcgacggctgcgtcgtcgtgaacgagctccagttcacggacaactcctcctgggttcgctgccgcaggttccgcatcggcgtccgcgtcgtgccgggcagctacgacggcccaagaataggcgaggccatgaccgagcccttcgtcgtcagagaccaccgcggcgaactgtacaggaagcactaccctcccgttcttggcgacgatgtctggaggcttgagaagattggcaaggagggtgccttccacaggaagctgacgcagcacaacgtcaggaacgtgcaggagttcttgcggctgctcacggttaagccggacgagctgcgcgctatcatgggcgacggcatgaccgatcgcatgtgggaggtgacgacgagccacgccaagaagtgcgtccccggcgacaaggtgtacatgtacagcacgcagcacggcaccgtctacgtcaactccatcttcgagctcgtgaagctgctgctggcggcgtacgagcagcgaaacaacctccaagaggccgacgccatggcgctccactgcaacgacgttcctctgctgcagaatgcagcggagataactatcccggcgcttggagacacgcagctgtggattcagaacagtctcaacagccaagaaatcgacttccaggtcgacgagatcccccaagctaactttgcgcttcagtggactggccaaatgtacaacatttcaggctaa

SEQ ID NO: 2919 - DNA, 849 bp, Oryza sativa
atggggtacttgagctccgtgatccccacggatggatcgccggtcagcggcggcggcctcagccagaatggtaagtttagctatgggtatgcgagctcccctggtaaaagggcttccatggaagacttttacgagacaagaattgactctgttgatgggcagattattggtctttttggagtttttgatggtcatggtggtgctaaagtagctgagtatgttaaacagaatctcttcagtcatcttctaaggcatccaaagttcatcagtgacaccaaagtggcaatagatgatgcttataaaagtaccgacagtgaattcttagaatctgacagcagtcaaaaccagtgtggatcaactgcatcaaccgctgtccttgttggtgaccgtctctttgttgcaaacgttggagactctagggctatcatatgcagggggggaaatgctatagctgtttcaaaagatcacaagcctgatcagacagatgagcgacaacgtatcgaagatgctggaggttttgtaatgtgggcaggaacatggcgtgttggtggtgtgcttgctgtttctcgcgcttttggtgacaaactcttaaagcagtatgtagttgtggatcctgagattcgggaggaagttattgatcactctctcgagttcctcattcttgcaagtgatgggctgtgggatgtagtaaccaatgaggaggctgtcgacatgaccagatcgattcatgacccagaagaagctgcaaagaagctcttgcaagaggcctacaagagggagagcagtgacaacataacttgtgttgtcgtgcgcttcttgcatgggcaagggagtagtggatatgcttaa

SEQ ID NO: 2920 - DNA, 3237 bp, Oryza sativa
atgaagaacttcctccggaagctccacatcggcgactcggccggcgatggcgcctcgtcgctcgcgcctcctccgccggtctccaaaaagggcggcggaggcggtggaggtggcggtggtggtggagcgcagcacgagcataagcacggttctgggatctcgagctggcttagctccgtgaccgggcggccgcagacgcagccgtcgccatcgccgccgtttgcggcggacgcggtggtggaggcggaggcggcggcgttggcgtcgtcggtggaggtgaggaggctggaggtcgaggaggaggaggagaaggcgaggagggagtcgcgggaggagtcggtgaggaagagggagatggagaaggagaagcaggaggcggagctggaggagtaccacatgcagctcgcgctggagatgagcgcgcgggaggatcccgaggcgacgcagatcgaggtagccaagcagatcagtctcggctcctgcccgctccagagctcccccgccgaggtcgtcgccttccgctactggagtttcagtgcccttagctacgacgacaaaatcttggatggtttctatgacatttttgtcattggggacgagcccacattgccaaccataccctccttgacggaactgcatcaacagccattttcacatgcatccaaaacagaagccgtattggtcaacagagcacaagacaccaaacttgtacaacttgagcagaaggcactcatcatggctgtggaagttcgctcgaaaactccagagtttgttgggcacaacctggtccagagactagctactttagtttccgactacatgggtggaccagtcatcgatccagaaagctttttgtccaagtaccagaatgtgagcagctctctgagagctagtataagaagtgctgttatgcctctcggtgagttaacaattggtctggctcgtcaccgtgcactgctttttaaggttttggccgacagcctcgctgttccttgtcgactagttaaaggaagacagtacactggatcggatgatggagctttgagcattgtgaaatttaatgatggaagggagtacattgttgatctcatgtcagatccaggtactcttataccttcagacggtgcgggcttgggtagagaatttgaagatagtttatttgcagatagtcaccatgttaacaaagatgactgtaacactcagttggggtcttcctttagtgaagtctcaagttctatgtatggttcttttgagaatgagtcacttgaaaaagtatccacacccagcaattttgggcattctgatccttatggcataacaactggccagactggcagccagggatcagcggtatctggttcatttggggaactatcaattagcacaagcacaagtgaaaatttgcctgttattcatgaatctagaaatacagaccataccatgagtacacagagcaaagataagtcctctgcagcgaataattcgtcatcaagttctccttcatcttctgaggtgggtggtgctccagcagtacgaaggatgaaagtgaaagatgtctcagaatatatgattagtgctgcaaaagaaaacccccagatagctgagaggatccatgctgtcttacttgaaaatggagttgtcccaccacctgatttgttttcagaagaatcaagggaacaacctaaagaccttattgtgtatgacacatctctgtttcaaactaaagatgaaatgataaagaggatgaatgagcttgaatctacaacaaacgctgatttttgtcatggtccttcggtgccacatccccctggacatgaactccaaacaaaggctgttccttatcggattcctctggatcttaaacctatccaggggctgggtacctaccatccctcagattcccggaacagtactggtagttcacatatgtatgaaccatctgcacctccccaggaggatccactacaacttataaaacaaatgcctgttgcagcagctgctgttgcaaccgctgcagtggttgcatcctcaatggttgtcgctgcagctaaatctaacagtgatatcaaactcgacgtgcctgttgctgctgcggcgactgctgctgcagttgtggctacaactgctgctgttaacaagcagtacgaatacttggaacctggttgtcaattgcttagtttgccaagttcttcaggggcaaatgaattgatcccgaagggtagacatgacttctgggataatcagcttgaaattgatcatggacaaactagtgttcccgagaaagaaaaagatttggttgaagtacctcaggaagctgaaagagtctctgacaagtcggttgggactgaaagctcaagatctgatattgccctagatggtgttgcagagtttgaaatccaatgggaagagatcactctgggagaacgtgttgggctaggatcctttggagaggtgtacaaaggggaatggcatggaacagaagtcgcagtgaagaaattcttgcagcaagatatatcaagcgatgctctggatgaatttagaactgagttccaaataatgaagagattgcgtcatccaaatgttgttctatttatgggtgctgttactcgtgtacctaatctttctatcgtgaccgagtttcttccaagaggtagtttgtttcgattgattcatcgacccaacaaccaattggatgaaagaagacgtctaagaatggcacttgatgtggctcgtggtatgaattatttgcacaattgctcccctgttgtagtgcaccgagatttgaaatctccaaaccttcttgttgacaagaattgggttgtgaaggtttgtgattttggtttatcacgtatgaagaatagtaccttcctttcctcgagatccacggctggcacagcagagtggatggcaccagaagtacttcgaaacgaaccatctgatgagaaatgtgatgttttcagctacggggttatattatgggaacttttcacactacttcagccatgggaaggtatgaaccccatgcaagttgttggagctgttggttttcagcaacgtcgccttgatattccagctcatgtggatcccaccatagcagagataataaggagatgctggcaaacagacccaaagatgcgtccatcattttcagagatcatgtcttccttaaaaccattattgaaaaacacgcttgccaatcaaccccaaaggcagcgagtgcaacgagcagatggctaa

SEQ ID NO: 2921 - DNA, 825 bp, Oryza sativa
atggctcaaagggtaggacactctgctgatggggtttttgtcatgatcgttgatgaagataagtcacatgccaacttcgcaagaggcatgctctccagcctcaattttcatgtgatagtgtactcaagtcctgtgaatgcactcgtttttctggagaataacgcacaagacgtcgctgtagtcttggcagcagtggacatgaaacaattgagtggttttcagttcctcgaagctgcaagagtgaaacgccaggaccttcaagttatcatgatgtcagctgagacaacaatgtccacaatgatgaggtgtgttaaactcggtgcacgttttctagtgaagaagcctcttaacgaagaaactgtaggtaatctgtggcagcatgttgacctgaaagttttgaagatggagaagatcagggaattactgcaagatcctggacaagagacggtgataactattagttatgaagagcaattctctggagaaactgaagcagatgaaaataatgaagaggaggaagtgaattcctttgaagctaagaaggctgattcagttaaagttcaatcagatgagaagggacatgacaatgctaaaatctctaacactgctgctgctgaagggtctgatgaaaaagtctctagtggtgatggtcatgtagtgcctaaagcgtataataatgtgaatgttgaagagagcataggtagtaacaatacttcaggtgaacaagtctccgacaagatcaagagtgatgcaagagttggggtgatccttgtggactacccagattttgaggatgatgagaccaagaaacccacaagcacttag

SEQ ID NO: 2922 - DNA, 2355 bp, Oryza sativa
atggctgtaggaacagagagtggctcgggcggcgtagccgagagcgcccccttgacgccaatgtcggcaatgacaacaacgcccatatcggcgaggtcsgtgargtgggagagcgacatgccggaaatcgaggagggaggcggcgggctggagcggccgctgctgcgccgccgcggcaccaacaccacgtcgcagatggccatcgtcggcgccaacgtttgccccatcgagagcctcgattacgaacttgtggagaatgaagtgtacaagcaggactggagatcaagggggaaattgcaaatcttccactatcagatccttaaatgggtcctagcacttcttgttggattaatagttggcctaataggattcttcaacaacattgccgtcgaaaacatagccgggttcaagctgctcctgacgaccaatctaatgctccagaacaggtacaaggcggcctttctatggtttatcagctgcaatgcaatgttggcagcagccgctgcagcattgtgcgcttactttggcccagcggctgccggatctggcatacctgaggtgaaggcctatctgaatggtgtcgacgcgccgtccatcttagcgcccagtaccctcttcgtcaagattgttgggtctatatttggggtgtctgctgggtttgtgctgggcaaggaagggtctatggtgcacactggggcttgtgttgcctcctttctaggacaaggcgggtcgcgcaagtatggcttcacttggaattggctcaggtacttcaagaatgatttggaccgcagggatctgatcacctgtggagctgcagcaggagttacagcagccttccgcgcccctgtcggcggtgtcctcttcgcacttgaagaagcaacatcctggtggcggagcgcgcttctctggaggacattctccacgacagcagtggcggcaatggtgctaaggtccctaatagagtactgccgcagcggcaactgtggcctgttcgggaaaggagggctgatcatgttcgacgtaagttcacaggtgacatcatacaccaccatggatctcgccgcggttgtgctgctcgccatcgtcggcgggctacttggagcactcttcaacttcctcctcaatcggatccttcgtgtgtatagctacatcaacgagaaaggcgcgccgtacaagatcattcttacggtggtcatctcgctggtcacctcgtgctgctccttcggcttgccgtggctgacggcgtgcacgccatgcccgccggagctggccgccagcggccactgcccgaccatcggccgctccggcaacttcaagaacttccggtgtccgccggggcagtacaacgccatggcgtcgctgttcctcaacaccaacgacgacgccatccgcaacctcttcagcggcggcacggagagcgagttcggcgtgcccatgctgctcgcgttcttcaccgccgtctactcgctcggcctggtcacctacggcgtggccgtgccgtcgggcctcttcatccccgtgatcctctccggcgcgtcgttcggccggctgctcgggaagctgctcggcgtgctcaccggcctcgacacggggctcttcgcgctgctcggcgcggcgtccttcctcggcgggacgatgcggatgacggtgtcggtgtgcgtcatcctcctggagctcaccaacgacctcctgctgctgccgctcatcatgctggtgctgctcgtctccaagacggtggccgactgcttcaacaagggcgtgtacgagcagatggtgcgcatgaaggggctcccttacctggaggcgcacgccgagccgtgcatgcgcagcctggtcgccggcgacgtcgtgtccgcgccgctcatcgccttctccagcgtcgagagcgtcggcaccgtcgtggacacgctgcgccgcacggggcacaacgggttcccggtgatcgaggacgcgccgttcgcgccggagccggagctgtgcggcctcgtgctgcgctcccacctcctcgtgctcctccgcgccaagaccttcaccgccgaccgcgtcaagaccggcgccgccgaggtgttccgcaagctcgcgccgttcgacttcgccaagcccgggtcgggcaagggcctcaccgtcgacgacctggacctcaccgaggaggagatggccatgtacgtcgacctccacccgatcgccaaccgctcgccgtacaccgtagtggagaacatgtcgctggccaaggccgccgtgctcttccgccagctcggcctccgccacatgtgcgtcgtgccgaggacgccgggggtaatagagcttaccaacttagctgaatcctacatgcttttccgccatttttgcatctga

SEQ ID NO: 2923 - DNA, 1752 bp, Oryza sativa
  misc_feature (1)...(1752): n = A,T,C or G
atggaggccgacgacagcggcggtggcggcggcagggcacgcaggtccgtcgaggtggacttcttctccgacgagaagaagaacatgaagaagagccgtgtctcgggcggcgtcgccgccgaggcggacgacgccaagggacccgccgccgccggcctcgccatcaagaaggaggacctcaccattaacgttagccgccgccgccttcttcgctcgtcgatcgccagacacctgtttaactcacggcgatctaacgcgtgtgctcgtccgtgttcgttgcagcttcttcccgccgggaacaacgcgaggagcgaccggtcgatggtggtcgacgacgacgcggcgtcgcggccggatcacgaggagaagagccggagcagcaacgagctcgcggcgatgcaggcggagctgggccgcatgaacgaggagaaccagcggctccgggggatgctgacccaggtgaccaccagctaccaggcgctgcagatgcatctcgtcgcgctcatgcagcaaaggcctcaaatgatgcagcctccgacccagccggagccacctccgcctcaccaggatggcaaggccgagggcgcggtcgtgccgaggcaattcctcgatctgggcccgtcctccggcgccggcggcgaggcggcggaggagccgtccaactcgtcgacggaggccggcagcccgcgtcggtcgtcgtctaccggcaacaaggaccaagaacgtggtgacagcccggacgcgccgtcgacggcggcggcgtggttgccgggacgcgccatggcgccgcagatgggcgccgccggcgcggcgggcaagagccatgatcagcaagcccaggatgccaacatgaggaaggcccgcgtctccgttcgcgcgcgatccgaagcgccaatcatcgccgatgggtgccaatggaggaagtacggtcagaagatggcgaagggaaacccttgtccacgcgcgtactaccgctgcaccatggccaccggctgcccggtgcggaagcaggtgcaacggtgcgcggaggaccggtccatcctgatcaccacgtacgagggcacgcacaaccacccgctgccgccggccgcgatggcgatggcgtccaccacgtcggcggcggcgtcgatgcttctgtcggggtccatgccgagcgccgacggcgccgcggggctcatgagctccaacttcctggcgcgcaccgtgctgccgtgctcgtccagcatggccaccatctcggcgtcggccccgttcccgacggtcacgctcgacctcacccacgcgccgccgggcgcgccgaacgccgtgccgctcaacgccgcgcggccgggcgcgccggcgccgcagttccaggtgccgctgccaggcggagggatggcgccggcgttcgccgtgccgccgcaggtgctgtacaaccagtccaagttctccggcctgcagatgtcctccgattcagccgaggccgccgccgccgccgccgccgccgcgcagttcgcgcaaccgaggccgccgatcgggcagctgcctggccctctctccgacaccgtcagcgcggcggaggnggcgatcaccgctgaccccaacttcacggtggcgctcgcggcggcgatcacgtccatcataggcggccagcacgcggcggcagctggcaacagcaacgcgaacaacaccaacaccaacaccacgagcaacaccaacaacacaagcagcaacaacacgacgagcaacaacaccaacagcgagacgcagtaa

SEQ ID NO: 2924 - DNA, 990 bp, Oryza sativa
atggccgcttattccctcgtcttcgtcttcgtcggcgtcgccgtcttcgtcctcgcgccaccagcctccgccgtgcccttcatcgtcctgcacgggatcggagaccagtgcgccaaccatggtgtcgccaagttcacccgccttctcgccgactgtgaaatcggaagtggaacatgggactcttggttaatgcctcttcagaaacaggctgatattgtttgcagtaaggtgattcaactttcccttttggataataccttcctacgctatgatgatgtaaaagaaatgaaggaactctccaatggttacaatatagttggtctttcacaggggaacctgattggtcgagcagttgttgagttttgtgatgatgggccaccggtcaagaatttcatttcactcggtggccctcatgctggtactgcttcagtgccactttgtggttctggtattttttgcattcttgctgattccctgattaaaatggagatctactcagactatgtccaggcacatcttgcacctagtggttacatgaaaatcccaactgatatttcagattatttaaagggttgtagatttcttccaaagcttaacaatgagttaccaggtgaaagaaatgccacctacaaggaaaggtttagcagcttagagaatttggtattaatcatgtttcaggatgacgctgtcttgatacctcgggaaacagcatggtttggttactatccagatggaggtttcgatcctgtcctgccccctcagaagacaaagctgtacatggaggactggattggtctcaagacgctggatgatgaggggagagtgaaattcgtgtccgtgccaggggggcacctgggtatttccaagactgacatgatgaagtacatcgtgccctacttgaagggaaaggacaatggaaaggcttggattgctgcgacttggcgtgccatcaccaacaccatcggtggggaagcgtttgtgctcaactag

SEQ ID NO: 2925 - DNA, 1665 bp, Oryza sativa
atggaggattatcaagaacaaccttcaaagtccaattttgctactgaccttggatcacatgcatattctaaggaagccaggacacttggaagagtatatcatgggcagcagccttacttttccccttcaagctgttcttgggaaaaatcttctgcattaaaagtagtgccaaatagtccagatgcatcagggcatatagtcggggaaatgagaaccaaaaccaacatcctcagtgcaaggtcaaattacctttcatatcctactgatgttcctcatataaggtatcgagatgaagttaaagttgatcttagccaagatgataattccaaacagtacagaagacctgatcaatttactgccttctcaaacttcaatggtcaatcttctgaacaccttgagacagccaaaggggcaaactacatggatgagatcactccaatttcacgtcaatggtgctttgataatagaggcccatcactaccaagagggctggtctatggtgatgagataccatcgctatcttctaagaagtgtaatggcaatgttgcatcatcatattcaagaatatgggattatagtgctgaaaccacatcagtcagacaatgctatggcgataaaatcccatcattgtctcaccattggcactaccgagataagatccccttgcattctggtcagtggtgccatgatgctgaggcacgcccattgtcgaactaccagcaaggtgcttcttatgggaatggtcgtttaagagataatatttccaggggtggtaggaatgagcaagtcaacattatctcaagcagacgtactatgacaaaacctagggtggctaacaaggttgtaagcagcaccgatcactacaagattaataaggataacctatggagaaattctgaggatataagggatcaagttcgtggcccccgggcaaataaattaaataattcttcaacatcatctatcaagaataatgccatccctcctttggtctgtagagatcaaattaatagaccagagttcacagttcagtatgagcatgcaaagttctttatgataaagtcatatagcgaagatgatgttcataaaggtatcaaatacaatgtttgggcaagcactccaaatggtaacaataagctggatgctgcttttcatgaagctcagattttaatgaaggagcagggcaaaaggtgccctatattcctattcttttcggttaataccagtgggcagtttgtaggattagctgagatgttaggtcctgttgatttcaagaagaccatggacttttggcagcaggataaatggaatggatttttccctgtaatgtggcacattataaaggacattccaaatcggttcttcaaacatataactcttgaaaataatgaaggcaaagtagttacttttagcagggacactcaggagattgggctgccccagggtctggaaatgttgaagattttcaaggcatatcaccagggaacatcaattctggatgatttttatttttacgaagaaaaggaaaacatgcgccatgcccagaagggaagaaatttggaaacaaccaatcaagatttgttctctgatgacttcagatcaatatcagtgatggcaactggagctaaagatcttgagagtttatgggtcaggaactcgggatag

SEQ ID NO: 2926 - DNA, 549 bp, Oryza sativa
atgagcatcgagtacgattacctgttcaagctgctcctcatcggcgactcctccgtcggcaagtcctgcctcctcctccgatttgctaaaatccgaaccattgaactcgatgggaagacagtgaagctacagatttgggacacagcaggtcaggaaaggttcaggacaataacaagcagttattaccggggagctcatggaatcattattgtttatgatgtgacagacatggaaagcttcaataatgtgaagcagtggttgagtgagattgataggtatgccagtgacagtgtatgcaagcttctagttgggaacaagtgtgatttggttgacagtaaggcttttgcagagtcattagggatttcttttcttgagacaagtgcaaaggaatccatcaatgtggaggaagctttcttaaccatgtcgtcagacatcaagaaaaggatggcaacccaacctgccgtggagaggaaaccaactgtccatattcacatgagaggccagcccattcaacagcagaacagcagcagtagctgctgctcatcatga

SEQ ID NO: 2927 - DNA, 1587 bp, Oryza sativa
atgtcccccgcggagctcctcgccaaggtggcgcagttcgacgcgctcatcgtgcgcagcggcaccaaggtgacgagggaggtgctggaggccgggcgcgggcggctgcgcttggtgggccgcgccggcgtcgggatcgacaacgtcgacctccaggccgccaccgaggccggctgcctcgtcgtcaacgcccccaccgccaacaccgtcgccgccgccgagcacggcatcgcgctcctcgcctccatggcgcgcaacgtctcccaggccgacgccgccctcaaggccgtctacagccgcactctcactgttttcactgcacaagggaaatggcaaagaaccaagtacgttggagtttctctggtcgggaagacacttgcggtaatgggctttggcaaggttggttcagaggtagccaggcgggcgaaagggctcggtatgcatgtgattgctcatgatccgtacgcccctgccgatagggctcgtgccattggagctgaactggtctctttcgatgaggccattggcagagccgacttcatctcccttcacatgcctctcaccccagcaacatccaaggtcttcaacgacgaatccttttctaggatgaagaatggagttcggatcatcaatgtggccaggggtggagtgatcgacgaagatgctcttgtcagagcccttgactctggcaaagttgctcaggcagcccttgatgtcttcactgaggagcccccagccaaggacagcaagctagtcctccatgagaatgttactgttacaccccatcttggagcaagtacagtggaggcccaggagggcgtcgctatcgagatagccgaagctgtcgtcggtgcactgagaggtgagctcgcagcaacagccgtgaatgctcccatggtcccagctgaggtcatgtcagagcttgccccgtatgtttcactggcagagaagctgggcaagctggcggtgcagctcgtcgcaggcgagagcggcggcatcaagggcgtcaaggtggtgtacaccacggcccgtggcccggacgacctcgacacgaggctcctccgcgccatggtgaccaagggcatcgtggagcccgtgtcgagcacgttcgtcaacctggtgaacgccgactacacggcgaagcagcgcggcctgcgcatcaccgaggagcgggtctcccacgagagccccgccgcggaggcgccgctggagtccatccaggtgaggctctcacacgtccagtccaagttcgccggcgccatcagcgacggcggcgacatcgtcctcgaggggagggtcaagtacggcgtgccgcacctcaccgtcgtcgggccctacgaggtggacgtcagcctggagggcaacctgatcctgtgccggcagatcgaccagcccggcatgatcggcaaggtcggcaacatcctcggccagacgaacgtcaacatcagcttcatgagcgtcggccggaccttccgcggcaagcaggccatcatggccatcggcgtcgacgaggagcccgacaaggagaccctcgagcacatcggccacatcccggcgatcgaggagttcgtcttcctcgagctatga

SEQ ID NO: 2928 - DNA, 2244 bp, Oryza sativa
atgaacggcacgccgatctccgcgtccgccgcggccggcgtcgacggagtcggcgcggcggtggcgctggcggccgcgaccaagaagagtgccgccgcggcggccgccgtcgccgagatggcgaaaaccctcaccgtcgacacggacgacgccttcgcggggctcctcgagctcgccgcggacgacgacgcggagggcctgcgccgcgcgctggagcgcgccccgctgccgccgcggacgaggcgggcctctggtacgccgccgcaggtcctcgagcaccgcacgccgctgatggtcgcggccactatggcagcctcgcggtgcttcgctgctgctgtcctcccgtccgtcgatgtcaatcgccgctgtggctccgacggcaccacgccctccactgtcgcggcgtctggtggctcgccgtcttgtgtggaggccgtcaagctgctgcttgctgctggggctgatgctgatgccacggatgcttccggatatcgtccagctgatgtgatctctgttcctccaaagatgtttgacgccaagattgccctccaagatcttcttggatgcccaaaggctgggcatggcgttctccgggtggtgacaagggccgcaaactctatgttgtcacctgtatcatcccctacagcagaagatgcacgatctccatcagctgctgtgatgatgacgacaaagtttgcagatcttccaagggttgtgacatcggaaaagaaagaatatccagtggatccgtcccttcccgatatcaagaacagcatctatgcttccgatgagttccgcatgtactcatttaagatcaggccatgctcgcgggcgtactcacatgattggactgagtgcccgtttgttcacccaggggagaacgcacggcgtcgggaccctcgcaagtatcactacagctgtgtgccatgccccgactttagaaagggagtttgccggcgtggtgacatgtgtgaatatgctcatggcgtgttcgagtgttggctccatccagcacagtaccgtactcgcctttgcaaggatggcacaagctgtaatcgccgtgtctgtttctttgcgcatacaactgatgagctccgaccactatatgtttccactggatctgcagtaccatccccaagagcctcggcaacagctacaatggagatggctgcagcaatgggcttgatgcctggttctccatcatcagtttcagcagtcatgtccccatttacaccaccaatgtccccttcaggcaatgggatgcccccttcattgggctggcagcagccaaatgttccgacactacaccttccaggcagcagccttcagtcgagccggctccgtacctcacttagtgcaagggatatgcctgctgatgattactccctgatgcaggatattgattcacagcttataaatgatttgtgctattcacgtattggttcatcaacaggaaaccacacgtctcggaccaagtccctaaatccgtcaaacttggatgatctcttctctgctgagatggtctcttccccgaggtatagtaatgctgatcagggtggtatgttttcaccatctcacaaggctgctttccttaatcagttccagcaacagcagcaggcacttctttcaccaatcaacacagtcttctccccgaagtctgtggacaaccagcagttgccttcacactcatctctgttgcaagcatcacttggtatatcctcccctggccgcatgtctcctcgatgtgttgaatctgggtcccctatgaactctcatcttgctgctgctcttgctcagcgtgagaagcaacagcagacaatgagaagtctcagttctcgtgatcttgggccgagtgctgcaagagcatcaggtgttgttggctcccctctaagctcatcatggtcaaagtggggatcaccttcagggacacctgactggggtgttaatggtgaagaattgggcaagcttcgccggtcatcatcgtttgagctgagatctggtggtgatgatccagatctctcttgggtacacacactggttaaggaatctccaccagagaagcaagtcactactgctgaatccataaactctgttggaccttcaccactgatgcctcccagtgtaagcaacggtgaaggtcctagtctgaatgccccgctggatgggcatgaccaagctgctgttattggagcattgcttgaacagatgcagcttgatcagcatattggtagtctagcaacataa

SEQ ID NO: 2929 - DNA, 1386 bp, Oryza sativa
atggcgagcacgcttcttgtccctgtccctgctcatcctcctcctcggcttctcctccagcttggcagccgggcaagtcctgtttcaggtaagaggtcgcccatgagttgggttgcaggctgcagtgaactgatcgtgttttgttctgagcctgagagaatggtgctcttgtgtttgatgatgatgcagggcttcaactgggagtcgtggaaggagaatggcgggtggtacaacatgctgatgggcaaggtggacgacatcgccgccgccggcatcacccacgtctggctccctccgccgtctcaatctgtcgccgaacaaggctacatgccggggcggctgtacgatctggacgcttccaagtacggcaacgaggcgcagctcaagtcgctgatcgaggcgttccacggcaagggcgtccaggtgatcgccgacatcgtcatcaaccaccgcacggcggagcacaaggacggccgcggcatctactgcctcttcgagggcgggacgcccgactcccgcctcgactggggcccgcacatgatctgccgcggcgacccctacggcgacggcaccggcaacccggacaccggcgccgacttcggcgccgcgcctgacatcgaccacctcaacaagcgcgtccagcgcgagctcatcggctggctcgactggctcaagatggacatcggcttcgacgcgtggcgcctcgacttcgccaagggctactccgccgacgtggcaaagatctacatcgacgccaccgagccgagcttcgccgtggccgagatatggacgtcgctggcgtacggcggggacggcaagccggactatgaccagaacgcgcaccggcaggagctggtcaactgggtcgaccgcgtcggcggcgccaacagcaacgccacgacgttcgacttcaccaccaagggcatcctcaacgtcgccgtggagggcgagctatggcgcctccgcggcgaggacggcaaggcgcccggcatgatcgggtggtggccggctaaggcgacgaccttcrtcgacaaccatgacaccggctcgacgcagcacmtgtggccgttcccctccgacaaggtcatgcagggctacgcatacatcctcacccaccccggcaacccatgcatcttctacgaccatttcttcgattggggtctcaaggaggagatcgagcgcctggtgtcaatcagaaaccggcaggggatccacccggcgagcgagctgcgcatcatggaagctgacagcgatctctacctcgcggagatcgatggcaaggtgatcacaaagattggaccaagatacgacgtcgaacacctcatccccgaaggcttccaggtcgtcgcgcacggtgatggctacgcaatctgggagaaaatctga

SEQ ID NO: 2930 - DNA, 6477 bp, Oryza sativa
atggcggcgtcgacgtccacggaggtggtagtgccggcgggtgcgggtgcgggkgcgggggccgggargtggaggcgggatgcgctggcgcacacgctggggtcgcggaggctgcccgagggcgtggcggacgccggggagagggtgcccgacgccgtcgcgccgggggtcatgcccttcatccgcgccgccgacaaggtcgagcaggatagcccgcgcgtcgccttcctctgtcgccgatatgcgtacaacaaagtccaaagaatggatccatcatcagtccaacgtggagttcgacagttcaaaacatacatgtcagttaagctagatcagatattagataagtcttctataaagaacaattacgatgtagataatcttgctagtcatttacaaccttacaaatgggagcaggacgacacccaagttatgggcaatgatgcaaaggaaattcaacgattttataagagttattgtgctgagctgagtaggatatcagaaaagagaaactttgaggaagtggctagacgttaccaagtggcatctgctctttatgaagtgttaagagatgtgacaaacaacaaagttgattctgaggtgatgaagattgcgaaagtgattgaggagaagagtgttcatttcaagaactacaagtacaacattattcccctgaactttccaggttcatctgaggcaattgtggaactccatgagataaaaggtgctattgatgcgctaaatagcatcgatggccttccaatgccacacatgtctactatgcacacggatgggaataaatccatacgagatttacttgactggctttcactagcatttggatttcagaaatcaaatgtggaaaatcaaagagaaaacttggttttgctgctcgcaaatattggcacaaggactgctgggcaagaccatcctctggttgacactgtgaataaattatggaaaaagatacttcagaactaccaatcatggtgtagctatttgcatgttagttcaagtatcatgaacgttgagacagtcacacaaaataaacaacaattaatgctccttcacattgggttgtatcttcttatctggggtgaggcctcgaatgttcgttttatgcctgagtgcctgtgctacatatttcaccatatggcaagacagttgcacaaaatgatcgaagaaaataattttcaatcaccaccaggatttgaagaagagggatcatttctgaaaactgccattgaacctatctacaaggttttgcagaaagagaagctcttgtgcttacaaactgttattcttattttaaccaaaaaaaggaagcacataagagtaaaggtgtctgtgagttttcgttttcttccacgcaggtcagagaaatgttttgcaaggcttaactggccatgggaccttacagcggacttcttttatcaagggcgcactacatcaacaaagcccaaaacgaattttgttgaagtccgcacatttctacacatatttagaagttttaatcgaatgtggatgtttttcatactagcttttcaggcaatgctaatagtatcatggagttcgtctggatctctttctgcgcttgctgatgcaactgttttcagaagtgttttaagtgtctttataacagctgctctactcaacttcattaaagtaactctggacatagtgcttactttccaagcatgggggaatatggactggatacaaatagtcagatatctattaaaattcttcgtggccattgcttggataataattcttccattagcatattctagttccatcagatacccatctggtgctggaaaactcctgaatagttggaatatcatggaacgctcaaactggcgtgtaattggtcttattatgtggtggattcagccaagattatatgttgcacgtggtatgcatgaagatatattgtccattattaagtatgtcttcttttgggtcgttttgctcacctgcaagcttgcatttagtttttatgttgagatatccccaattattggtccgacaaagttccttcttaaccaaggagttgggaactatgagtggcatgaaatcttccctttcctgccacacaaccttggtgtcgtcattactatatgggccccaatcgtcatggtgtacttcatggatatacaaatatggtatgctattttttcaactgcatttgggggtgtttcaggtgcccttaagtcatgttgcagccttcatggtaggatggagaaggcacactgctttgaatctctcaaccagggatcggatcccattgacacaccctttactggttttttgacaaaagaatgctgtggtgggcctcgagggaaaggattaggattttgtttgggccaccacagacactcttccttccccagccaggccaacctgtcccagtttaatgcacattggttctttcggcacaaccaaactgtgttttttgccaaagaaattaagctgtgtgagaatgaaagtgtaggtggctacaatgcatacaggggccatcttttagggggaaaatctcctctgacgtactgccctctgatgtgggtcgctgacatatgggcccgcgagctaggggcccacatgtcagccactcaaagtcagagggcatattccactatgccattcactgtagggttaaccctcaacttttattttgatagagaaagggacatactgatggctccgtcattttcaagtagtttttctgttactccatggcctcctttccttgttgccaagatgctcatggtctcaggaatataccaggtacccacagctcttcacatggccatgacttctaaagaaggggattaccatgagttgattgaaaaaatcagactagaccaagctagattcaatgctgtcatagaatgctacgagtccttggttcttattcttaagaatcttctgctagacaataatgatcagaaaatcgtcgatgccattgataaaacagtgcttgatagtgtggaaaataatacacttttggaagattttcatatggcagagattggcaaagtcagcaacacgctggcaaaattattgcatctactgagcaatgaatctactgatggtactgctgagagaaaaatcattaatgctctgcaagattttatggaaattactacacgggatttcatgaaagatggacagggtattttgaaagatgagaatgagagaaagcagaggttcacacatttagacatggatatgataaaggaatcgttttggaaggagaagtttgtccggttgcacttattgttgactatgaaggattccgcaatggatgtaccaacaaatttggatgctcggcgtaggatcaccttctttgcaaactcactgttcatgaaaatgccaaaagcacctcaagttcatgatatgatttcatttagtgttttgactccatattataatgaggaagtgctctattcttctcatgaactgaataagaagaatgaagatggcatttcaattttgttctatctacaaaagatttatccagatgaatggaagaactttctagaacgcattggagttgacccagaaaatgaagaggcagtaaaagggtacatggatgatgtccgtatctgggcatcttaccgtggtcaaacacttgccagaactgtgagaggaatgatgtactacagacgagctcttgaactacaatgctatgaggatatgacaaatgctcaagctgatttagacggagaggaatctgcaaggtccaaggccattgctgatataaaattcacttatgttgtttcctgccaactctatggcatgcataaggcatcaaaggattcccgtgaaaaaggtctttatgaaaacatcttaaatctcatgttaacgtatccagcattgcgtattgcttacattgatgagaaagaagtgccattaccaaatggtaaaatggagaaacaatattactcagttcttgtgaaaggcaatgatgaggaaatttaccggataaggctcccaggtaaaccaacagatattggcgagggaaagcctaataatcaaaatcacgctataatcttcactagaggagaagcgcttcaagcaattgacatgaaccaggataattaccttgaggaagcatttaaaatgagaaatctactggaagagttccttattaaacacggaaagtctgaaccaacaatattgggtgttcgcgaacatatctttactgggagtgtttcatcccttgcgtggtttatgtcaaaccaagagactagtttcgttaccattggacaacgtgttcttgcgaacactctcaaggtacgattccattatggtcaccctgatgttttcgatagaatctttcacctcacaaggggtggcataagcaaggcatcaaaggttatcaaccttagcgaggatatctttgcaggattcaattcaaccctgcggcaaggaaatgttactcatcatgaatatatacagctgggtaaaggacgtgatgttggaatgaatcaaatatccaactttgaggccaaggtggcaaacggaaatggtgaacaaacactctgtcgagatatttatcgactagggcacagatttgatttctacaggatgttgtctctatacttcactacagttggtttctacttcaatagtatggtggctgttcttacagtgtatgtatttttatacgggaggttatatcttgttttgagtggcctagagaagtcaattctccaggatccacaaattaagaacatcaagccctttgaaaatgcacttgcaactcaatctattttccaacttggaatgttgctcgtcctccctatgatgatagaggttggcttggagaaaggatttggcagagccttgggagagtttgtaataatgcaacttcaattagcttctgttttcttcactttccatcttggaacgaagactcactactatggaagaacaatacttcatggtggtgcaaaatatagaggtacaggccgggggtttgttgtgcgccatgcaaagtttgctgagaattaccggatgtattcccggagccactttgtgaaagcactggagctactcattcttttggttgtctatctagcttatggcatttcgtacaggagctcaagtttgtatcyatatgtcacaatttcaatatggttccttgttttctgttggctgtttgcaccttttgtcttcaatccatcatgctttgagtggcacaagactgttgatgactggactgactggtggcattggatgagcaatagaggaggtattggcctggcaccagagcaaagttgggaggcttggtggataagtgaacatgaccacctgaggaatggtacaatacgtagcctgctgttggagttcgtcctctcccttcgcttcttgatataccaatatggtattgtttatcatttacacatagtgcatgggaacagaagcttcatggtgtatgcactatcatggctggttatagctatagttcttgtatcacttaaggtcgtctcaatggggagagagaagtttattaccaattttcaacttgtattccgtatcctcaagggcattgtctttattgtcctcatcagcttggtggtcatattatttgttgttttcaatctgactgtctctgatgttggtgccagtattttggcattcatccctactggctggtttattcttcagattgcacagctctgtggaccattgttccggagattggtgacggagccgctctgcgccctgttctgttcatgttgcaccgggggcaccgcatgcaaggggcgttgctgcgccaggtttaggctgaggagccgggatgtgctccgcaagatcgggccatgggactccatccaggagatggcgaggatgtacgagtacaccatggggatcctcatcttcttccccatcgccgtcctgtcgtggttccccttcgtctccgagtttcagactcggctgctcttcaaccaggccttcagccgggggctgcagatctccaggatcctcaccggccagaatggtttgactagtacaatccgatgtaacttttcctggcaccgatatggcggttctgggatttatttgtttctggccttagtttccctagttaccctggtgttcctgttgggtattatgatcccacaggtgccgtataataatgctgtgaattatggacctaatgggtatggaggaagggaccaaaacaacaaacccagtacacctatgagatctcacctgctaacaatgacgcccaagattctcactattggtattgctgatgaacattttggtgctgtcgtacgacgtgccggaaggaacattacagagatcattcaggctagtggtgccaggatcaagatatctgatagggataactggaacatcagaagctattcaggcagcagagtctatgataatgcacagggtgtcagccagttccgagaggtgataaaatctcgtgaagagacgaggggcattatcatctga

SEQ ID NO: 2931 - DNA, 2180 bp, Oryza sativa
atscgggccagggagatgcacccgctgtgctgcctcgtctccgactgcgcgttgggtggaggcggcggagggggaggtggtgaggggggaggaggagactgctcgccgacgaaggcggcggttgggggagaggaggaggtggtggcggtggccggggtgctgtacaagtggaccaacatcgggaaggggttgcggccgcggtggttcgcgatccggggcggcgtcctggcctactccaagatccgccgccgcgtcgccgccgagccgcctcccgaggccgccgccgccgccgcagccaacggcgtcaggctcatcggcgtgccccgcggcggcgtcggggaccagcccatcggattcgtccctctcaagatctcatcatttagcgaaagtaaatcggatgataaacggttctacatcattaccccaaccaagacgcttcagctgaggactggctctgctaaggaccgtgtggcttggattgaagcacttgtttctgcgaggagtgaatattctcttaacgggggtgtaccgtgtgaccagaatgagggatcattttccactgaaaagcttaggaatcgcttgcatgctgaaggtgttggagaggcaactattaaagactgtgaacagatcattcactcagaattttcacagtatcacactcagatgaagcaacggtgtgaagactatttaaacttcattggcagtcttccaagggaacttgaggtagttaattcgggagatgcatctgctattgagaagccacagtcggagttgttcaaacatgactgttccagctctggaaaatgtagtgagtacagcaacactgaatcttctgatgatgctggcaaacaagaggtagggcagttgtcagatgaggatgagtttcatttctatgatacaaggcaaagtttcagtgacactgctgcaagtcctgacttgaaaatgagatgttcaaatagtgggagtggagctcacaagtttggtgaattactagctatcgacaagacgaatgaatacttattgtcatcttcaaaacgccgttcagagttacccgtaccaatagaaaaggagaaaggtgttagcctttggtcaatgatcaaagataatgttggcaaggatcttacaagatgctttgaagatttggagtattccaatttactggatcgtgcatatgaatatggttcaaggggaaacgggctgatgagaattctttatgttgctgcatttgctgtctctggatatgcttccacggattctcgcccctgcaaacctttcaatccattgttgggggaaacatacgaagctgattatcctgaaaaagggatccgtttcttctctgaaaaggttagtcatcatccgatggtcatggcatgccattgtgaagggaaaggttggaaattttggggtgacagcaatctaaagagcaaattttgggggcagtccattcaactcgatcctagcggtgtgctaactctacagtttgatgatggagaaactttccagtggagtaaggttacgacaacaattaataaccttatcattggccgagtctattgccatcaccatggcacgatgaacataagtggaaacaggcaatattcatgtaagctgactttcaaagagcaatccttcctcgatcgtaatcctcgccaggttcaaggacttgttacggatgctaatgggaccaaagttgcattcttgatgggaaagtgggacgagagcatgtcttgcatcattggtgatgatgcttctaaagtgaactcccgtaatgcaaatcagagtacgggtgccactttattgtgggagaaaaatgtgcctccagccaatcccactcgatataacctgtcatcatttgcaatcactttgaacgagttgacaccaggtcttaaggagaagcttccaccaacggattcaagactcaggccagatcagcggcatctagagaatggggagtacgaaaaggctaactctgaaaaattgcgcctggagacgaggcagaggatggcaaggaagatgcaggagagtggttggaagccaagatggttccaaagggacacagaggatggaacattccgttatgtcggaggttactgggaggcaagggagcagaggaaatgggttggttgcaatgacatattcggcaataatgtgtccactctttgcaccagcgcaagtatata

SEQ ID NO: 2932 - DNA, 2322 bp, Oryza sativa
atggtcatggatgctggggtgcacgacgtgtgcacgatgctgcccggatccaagcgcgacgcgcacctgccgctgccaatctacccccaaatcgccgccgccaatgggttcgcgacggcggaggagttcgacccgctgctgttcctttcgcccgatgcggtttgcggcggcggcggcggcgactacctgaatattgtctccgcgcagcccatctcggcggcctccaccaacggcgcgtcgccgccgagagatgtctcggtctctgcttcggcggcgtcgtcggcggcggcgcagcatgacgactccgaggctttctcggatatcgtcctggggtacatcaaccgcatgctcatggccgaggacatcgacgagaagttcgagcactacccggtgaacgccgatgatctgctcgccgccgagaagccgttcctcgagatcctcgccgaccagtcgccgtactcgggcggcagctcggtcgagagtcccgacggcagcagcgccgccaactcctgtaacagcctcagtccctgcaactgtagctcgtcctccgacgggcttggcgccgtgccgcagacgccggtcctcgagttccccacggccgccttctcgcagacgccccagctgtacggggatctgatccccacggggggcatggtggaatcgggcggcgcctggccgtacgacccgacggaattctatcagctccagaccaagccggttcgtgagaacctcccgtcgcaatcttcgtcgttcgcgtcttcgaacggcagcagtgttactttctcagaaggattcgagtcgttgctgagcccggctggtgtcttgcctgatgttagcctgaatgattttgttgtgcagaaccaacaggctttgcagttccgccgcgggtttcaagaggcaagcaagtttcttcctgatgagagcaagcttgtgattgatgtggataagctctacagtggagatgaggggagtaggttccttggtgaggttagacaagagaagaagcttgtgaaggtgaagacagaaacctctgatgttgaatcagcaggtcaccgaggaaagaagcatttctatggtgatgacctggatgcggaggaagggaggtgcagcaagcattccgcgcaagggattgacactgaccaccttgtgagggatttgatggacaaggtcttgctatgcaatggtgagacatgctcaaaaggtgttaaggagttgcgtgaggctctgcagcatgatgtggcgaaacattcaggcggaggccatggcaaagggtccagccatggcaagggtcgtggaaagaaacaacccaagaaggaggtggttgacctggagacccttctcatccattgtgctcagtctgtggccactgatgacaggcgcagtgcaactgagctcctgaagcagatcaggcagcatgctcatgccaatggtgatgcttgcccatttaagaagatctctcattactttgccaatcaaacaattttgaatgctgtggagaaggccaagaaagttcacattgtcgattatggcatatactatggatttcagtggccgtgtcttattcagcggctatctaacaggcctggaggcccaccaaagcttaggatcactggaattgacacacctcagcctggtttccgcccagcagaacgcacagaggagacggggagatatctaagtgattatgctcagaccttcaatgttccttttgaattccaagctattgcgtctcgatttgaggctgtccggatggaggatctccacattgaggaggatgaggttctgattgtcaactgcatgttcaaattcaagaatttgatggatgagagtgtggtggctgagagtccaaggaacatggcattgaagacaattaggaagatgaacccacatgtgttcattcatggggtggtgaatggatcttacaatgcaccattttttgtgacacgcttccgggaggccttgttccactattctgctatcttcgacatgttggagactaacattcccaaggataatgagcagaggttgctcattgagtctgctctatttagccgggaggcaatcaatgtgatctcttgtgagggactggagaggatggagaggccagagacatacaagcaatggcaggtacggaaccagagggttgggttcaagcagttgccattgaaccaggatatgatgaagcgtgcgcgggagaaggtcaggtgctaccacaaggacttcatcatcgatgaggacaacaggtggttactacaaggatggaaagggcgcattttgttcgcactgtcgacatggaagccagataatcgatcatcttcatag

SEQ ID NO: 2933 - DNA, 2886 bp, Oryza sativa
atggggtggaggatggcggtgagtcggctcctccatggctgtgttcttgtgctgcttcttgcagcggcggttgttcaggctcagcgggcggcgacgaggactgatccgactgaagcggcggcgctgaacgcggtgttcgcgaagctagggcagcaggcgcagtcgtcatggaacctcagcggcgacccctgcaccggccgggcgacggacggctccgccatcgacgacaccagcttcaacccggccatcacctgcgactgcaccttccagaacagcaccatctgccgcatcaccaagctgaaaatacatgccgtggatgcgtctggcccgataccggaagagctgcggaacctcacgcgcttgaccgatctgaatttaggacaaaatttattatcagggcctttgccatcgttcattggggagctgactaatatgcagaaaatgacatttggcatcaattcattatctggacctattccaaaggagctcggtaatcttacgaatcttatatcactgggtttgggctcaaaccatttcaatggttcgcttcctacagaactagggaacctgatcaaacttcaggaactgtacattgacagtgctggcttaagtggtccgttaccatcatcattgtccaagcttacaagaatgcaaatattgtgggcatcagataacaattttactggacaaataccagattatattgggagctggaatttgacagacctgcggtttcaaggcaattcttttcaaggtccaattcccgctgctctttctaatcttgtccaattatcaagcttgattttgaggaactgtaggatatctgataatcttgcatcattagacttttcaaagtttgcgagtttaagcttactagatttttcttacaaccagctctcaggaaactttcctccttgggctagtgataaaaatttacaatttatcttaccttcagggctggcatgccttcagagaaatacatccttctttcttggttctccacagtcttcctcctttgctgtgaactgtggtagcaatagattcatatcaggctcagataatttaaggtatgaaactgatgatgtcaatcttcaagcagcatcatataatgttacaggagcaccaacgtggggtgttagcaacgttggaaagttcatggacgcaccaaatgggaattacataatctacagctcccgccagtttcagaacaccctagattcagaactgttccaaacttcaaggatgtcaccatcatccttaagatactatggtattggacttgagaatggaaactatacagtcactcttcaatttgcagagtttggaatcgaagatacacagtcttggaagagcctagggagaagggtttttgatatatatgtgcagggtgaacgcaaggagaagaactttgacatcaggaagacagcaggcgataaatcttacactgttgttaagaagcaatacaaagttcctgtgaccaaaaacttccttgagattcatctcttctgggctggcaagggcacttgctgcattcctactcaaggatactatgggcccactatctcagctctgagtgtaatccctgcaggatcaatttttgcatacctctgtaagatcccattttctcttttcaatctaacaagtggcctctgttcagatttcacccctacagtgggtaatacagcacataaaaacaagagtactagtaaaacaggtgtaattgttggagttgtagttggtgtgacggttttaggtttggtagcacttgttggaatctttatgtggagacagaaaaggagaaaattatcactggagcaacaagagctatacagtattgtcggaagacctaatgtattcagttatagtgaactaaggtctgcaactgaaaattttagttccagcaaccgccttggtgaaggaggatatgggacagtttataagggcaagttaactgatggaagggtagtggcagtgaagcagctatctcaaacatctcatcaagggaaaaaacaatttgcgacggagatagaaactatatcccgagtgcaacatcgtaatctcgtgaagttgtatggttgctgccttgaaggcaataatccactgctggtttatgagtacatggaaaacggaagccttgataaagcattgtttggaactgagaaattgaccatagattggccagcacgttttgagatatgcctaggcattgcaagaggtctggcttatcttcatgaagagtccagcatctgtgttgtgcacagggacatcaaggccagcaatgtcttaattgacgccaatctcaatcctaagatctctgattttgggctagccaaactttatgatgacaagaagacgcatgtcagcacgaaggttgctggcacattcggttatcttgcacctgagtacgccatgagaggccatatgaccgagaaagttgacgtctttgcatttggcgtggtcttattggagactttagccggacggccaaactatgatgatacgcttgaagaagacaaaatttatattttcgaatgggcctgggagctgtacgagaacaacaaccctctgggcctcgtagacccaaagctcaaggaattcaaccgggaggaggtgctccgtgccatccgcgtcgccctcctctgcacccagggctcgcctcaccagcggccgccaatgtcgagggtcgtgtcgatgctcgccggcgatgtcgaggtgcccgatgtgctgacaaagccgagctacatcaccgagtggcagatcaagggtggcaacaccagcttcgccaacagcggagtcagcgggcagtcgagctcggcgccgggatcggcctcggagcagcaaggctcgtcattgttcttgaactccgtcatcccggaaggccggtga

SEQ ID NO: 2934 - DNA, 2790 bp, Oryza sativa
atggctctctctgtgctcctgctgcttcttgcagcggttgctcaggctcagaaagcaccgacggcgacgactgatcggattgaggcggaggcgctgaaggctgtgttcgagaagctcgaccagaaggcggaatggaacaccaccggcgatccgtgcagcggcgcggcgacggacagcaccgacatcaacgactccagcatcaacccggccatcaagtgcgactgctccgaccagaacaacacagtgtgccacatcaccgggctaaatttatcacataattttttggtagggactataccatcgttcattggggagttggctgctatgcagtacattaagtctcacattttatctcttgaacacactaggacttttggcatcaatgcattatctggatctattccaaaggagcttggtaaccttacaaatctcgtatccctgggtttcagctcaaacaattttagtggttcccttccttcagaacttgggagcctgttcaaacttgaggaattgttcattgacagtgctggcttaagtggagagctaccatcatcattatccaagcttacaagaatgaaaatattgtgggcatcggataataattttactgggcaaataccggattatattgggagctggaatttaacagacctgcggtttcaaggaaattcttttcaaggtccacttccagctaatctttctaatcttgtccaattaacaaacttgattttgaggaactgtatggtatctgatagtcttgcattaatagacttttcgaagtttgcaagtttaaccttactagatttttcttacaaccagctttcaggaaatttccctttttgggttagtgaggaagatttgcaatttgccttaccttcggggctggagtgtcttcagcaaaatactccgtgctttcttggttctccacattctgcctcctttgctgtggactgtggtagcaccagattcatatcaggctcacgtaattccagctatcaagctgatgctaccaatcttggagctgcatcatatcatgttacagaacctttgacatggggtattagcaacgttggaaagttcatggacacaccaaatggaactaccataatcaacaacgcgcgccagtttcaggccacgctagattcggaattgttccaaactgcaaggatgtcgccatcatctttaagatattacggtattggacttcagaatggaaactatacagtctcacttcaatttgcagagtttgggtttgaagatacagagtcttggaaaagccgagggagaagggttttcgatatatatgtacagggtgaacgtaaggagaaggactttgacatcaagaaggaagcaggtggtaaatcttacactgcagttaagaaggattatatcgtttctgtcaccagaaacttcgttgagattcatctcttctgggctggcaagggaacttgctgcattcctactcaaggatactatgggcccactatctcagctctgagtttaagcccaagtgaactttttttgttagatttcacccctacaattggtaacgtggcagaacaaaacagtagtactagtaaaacagttgtaattgttgcagttgcaattggtgtgacaattttaggtttggtagcacttgttggaatctttctttggagaaagaaaaggagaaagctatcactggagcaacaagagctgtacagtattgttggaagacctaatatattcagttatggtgaactaaggtccgcaactgaaaattttagttccagcaaccgtcttggtgaaggaggatatggggcagtttataagggtaagctaatggatggaaggatagtggcagtgaagcagctatctcaaacatctcatcaagggaaaaaacaattcgcaactgaaatagaaactatatcccgagtgcaacaccgtaatctcgtgaagttgtatggttgttgccttgaaggcaataatccactgctggtttatgagtatatggagaatgggagccttgataaagcactgttcggaactgagaaattacatatagggtggccagcacgctttgaaatatgcttgggcattgcaagaggtctggcttatcttcatgaagagtcaagcatccgtgttgtgcacagggacatcaaggccagcaatgtcttacttgacgccaatctcaatcctaagatctcggatttcgggctagccaaactttatgatgacaagatgactcatgttagcacaaaagttgctggtacatttggttatcttgcacctgagtacgccatgagaggacatatgactgagaaagttgatgtgtttgcatttggcgtggtcttattggagactttagctggccggccaaactatgatgatgtgcttgaagaagacaaaatttatattttcgaatgggtctggaggctgtacgagagcgaacgcgcccttgacatcgtagacccaaacctcacagaattcaacagcgaggaggtgctccgcgccatccacgtggccctcctctgcacccagggctcacctcaccggcggccgtccatgtcgagggtcgtggcgatgctcaccggcgacgctgaggtgggcgaggtggcggcgaagcccagctacatcacggagtggcagatcaagggcggcggcaccaccaccaccaccaccggctcctcgtccacgagcagcagcgccgccaacgggcagtggagctcggcgccgccgccgccgagggccacctcctcgccgaagatgtcgtcgccgttcttgagctccgtcgtcgacgaaggcaggtga

SEQ ID NO: 2935 - DNA, 582 bp, Oryza sativa
atggagcacatcctcgacttcttcaacacctggagccgcaaggccgaggagctcgcctccaacatctggttcaacctgaagacggcgccgtcgatgtcggacgcggcgatggggaagctgagcctgggagcgaaggccctcagcgagggcggcttcgacaagctctacaagcagacgttcgccggcgccggcgccgacgagcggctgaggaagacgttcgcctgctacctctcgacggcgacgggccccgtcgccggcacgctgtacctgaccgaccggagcgtcgcgttctgcagcgaccggccgctctccttcgcggcgccctcggggcagacggcgtggagctactacaaggtgatgatcccggtggccaaggtcgccgccgccgagccggtgacgatgaaggagagcccgccggagaagtacgtgcacgtcgtgacggtggactcgcatgacttctggttcatggggttcgttagctatgacaaggccgtgcaccacctcgtccaggccgtctcctcccagcaacgtggcggcgccgccgctgacacggccgccgccgtccccggagacggcaagtga

SEQ ID NO: 2936 - DNA, 1068 bp, Oryza sativa
atgtggtgttgcagcggcgccgaggaggagctccacggcgcgccggccgccaacccggcggcgccgccaccgcgagcaccagggccgccgagagggccgaacgcgccgagagccggcggcgcgccggcgaaggtgctgccgatcgacgtcccggccgtggcgctggcggagctcaaccgtctcacsggcaacttcggcgacaggtcgctggtcggggagggatcctatggccgcgtgtaccgcgccacgctgagcaccggcgaggccgccgccgtcaagatgttcgacaacaacggcggctccggccagtcagaagccgacttctgcgcgcagctgtccgtggtgtccaggctcaagtgcgaccacttcacccagctgctgggctactgcctggagctcaacaaccgcatcgtgctctacgagttcgccaccaaaggctccctctacgacatcctccacgggaagaagggggtgaagggggcggagcccgggccggtgttgacgtggagccagcgagcacggatcgcgtacggcgcggcgaggggactggagtacctgcacgagcgcgcgcagccaccgatcgtccaccgcgacatccgctccagcaacgcgctcgtcttcgacggccacgacgccaagatcggcgacttcaacctcaccaaccagtcgccggactccgccgcccgcctccactccaccaaggtgctcggcaccttcggctaccacgcgccagagtatgcaatgacgggacaattgacccagaagagcgatgtttacagcttcggtgttgtccttcttgagcttttgactgggaggaagcctgtggatcacaccatgcccaaggggcagcagagcttggttacctgggccactccaaggttaagcgaggacaaggttaagcagtgcgtggatcccaagctgaacgacgagtacccaccaaaggcagtggccaagctcgcggcggtggcggcgctgtgcgtccagtacgaggctgatttcaggcccaacatgacgatcgtcgtcaaggctctgcagcctctcatcagtgctcgtccaggagatcattag

SEQ ID NO: 2937 - DNA, 3033 bp, Oryza sativa
atgggactgcacatatggtgttggttggttgtcttgttcagcttggccccattgtgttgtagtttgagcgcagatggcctggctcttctggatctagccaagactctgatactgcccagctccataagctcgaattggagtgctgatgatgcaactccgtgtacatggaaaggagttgattgtgatgaaatgagcaatgtggtttctcttaacttatcatattctggattgtctggttctctaggtcctcagataggactcatgaagcacctgaaagtcattgatttatcaggtaatggtatatcaggaccaatgcccagttccattggcaactgcaccaaactggaggtgctccatctactacgtaatcgattgagtgggatccttccagatacattgagcaatattgaagcattaagggtttttgatctctcccgcaatagcttcacaggcaaggtcaatttcagatttgagaactgcaagcttgaggagttcatcttgtcattcaattatctcagaggcgaaatcccggtgtggatagggaattgcagcagcttgacacagcttgcatttgtcaacaatagtatcaccggtcaaataccaagttcaatcggtttattgagaaacctttcttaccttgtactttcccagaactccttgtctggcacaatccctcctgagattggtaactgccaattgctgatatggctgcatctagatgcaaaccagctcgagggcactataccaaaagaactagcaaacctgaggaacttgcagaagctctatctttttgagaattgcctcactggggagtttcctgaagatatatggggaatccaaagcctactatctgtcgacatctataaaaacaatttcactgggcagctgcctatagtgttggctgagatgaagcagctccagcaaattacgctattcaataattcattcactggtgtcataccacaggggttgggtgtaaatagcagtttgtccgtaattgatttcataaacaatagttttgttggcacaatccctccaaaaatttgttcagggggaagattggaagttttgaacttgggttcaaatcttctcaatggtagcatcccctctggtatcgctgactgcccaactttgagacgagtaattctcaaccaaaataatctcattggatcaattccacaatttgtaaattgtagcagtcttaattatattgatctcagctataatttattaagtggggacattcctgctagcttgagcaaatgtatcaatgttacatttgtgaactggtcatggaacaagcttgctggtctaataccatcagaaattgggaacttagggaacttaagtagtcttaacctctcaggaaacagactatatggtgaactccctgtggaaatttctggatgctccaagttatataagcttgatttgagctacaactctttgaacggttcggcactcacaactgtaagtagccttaaatttctgtcacagctacggttgcaggagaataaattcagtggaggtatacctgattctttatctcagttggatatgcttattgaactgcaacttggtggcaacattcttgggggtagtatcccttcatcgttaggaaagttagttaaactgggcattgcattaaacctcagtagaaatggactagttggtgacattccaccactaggcaatttggtggagctgcagagtttagatttgtcatttaataacctcaccggaggtcttgcttcattaggaaacctacagtttttgtatttcttgaatgtttcctacaacatgtttagtggaccagtaccaaaaaatcttgtgaggtttctgaattccactccaagttcatttagtggaaatgcagatctatgtatctcttgccatgaaaatgattcatcttgcacaggttctaatgttttgagaccttgtggttcaatgagtaaaaaaagtgcactcacaccactcaaggttgctatgatagttcttggttcggtttttgctggtgcatttctgatactctgtgtccttctaaaatataatttcaagcctaagattaacagtgatttaggtatattatttcaaggatcttcttctaaattaaatgaggctgtagaagtgactgaaaacttcaataacaagtacattatcggttccggggcccatggaattgtctacaaggcagtactgaggtcaggagaagtatatgctgtaaagaagcttgtacatgctgctcacaagggctcaaatgcaagcatgatccgcgagctgcagacgcttggtcaaattaggcacaggaacctgataagacttaatgaattcttgtttaagcatgagtatggtttgatcctatatgattttatggagaatggtagcctgtatgatgtgttgcatgggactgagcccactccaactttggactggagcatccgctacagcatagctcttggaacagcccatggtctagcatatctccataatgactgtcaccctgctatcatacatcgagatattaaaccaaaaaatatattgctggacaacgacatggtaccgcatatctcagattttggcattgcaaagctcatggatcaatatcctgctgctttacagaccacaggaatcgttggtactattggatatatggccccagaaatggccttttcaaccaaggctaccacagaattcgatgtgtacagttacggtgtggtattacttgagttgatcaccagaaagatggctgtggattcctcattccctggcaacatggacatagttagctgggtatcctccaagttgaatgagactaatcagatcgaaactatttgcgacccagctctcattactgaagtatatggaacacatgaaatggaagaagtgcgcaagctgttgtcattagctcttagatgcacagcaaaggaggcaagccaaaggccttccatggccgttgttgtcaaagagctgacagatgcaagacatgttgctggctcatactcgaagcagaattcaggccccagcaattcttga

SEQ ID NO: 2938 - DNA, 2300 bp, Oryza sativa
atgtcttctgttcatccgaaccttgtgactacttcgaatcattctacaccatcaagagacgaatcattccactacttcgaacctgatgctacgatggaggcaataaatagattggatgtgcgagataactcagatatttattcaaatgatgatataacttctccagtaatagaggatgacaacaccagtacaccaaaaaaaatatcaagaattccactcaattgctccgtttttacaccagagtgtgatgataagataaggcctgcggtagggatgacatttgaagatattgcctctgttgaaaaattttacaagtcatatgcacaccaagttgggttctcagtgcgtattgggcagcaaaagaagttggatggcgtggttcagtgcaagcactttgtgtgctcaaggcaaggatggaaacatgtgaatgataaggagattgttgatccatcgaagaaaaaaaagattaaattgaaagaaactagatgtggatgtgatgcacacatttacgtgaagctatgttctgataacaagtacacgatagcttccttggttgagcaccatagtcatggacttgtatcgccagataagctgcatttgataagatcaaatcgtgaagttagtgagagggcaaaaactacactcttcacatgcagcagagcaagcataggaacctcccaggcatataggctccttcacgtgagtgatgggggatttcagaatgttggatgcactaagagagacttgcagaattactatcgggacctaagaaagaaaattaagaatgcggatgctcaaatgtttgtggcccagctatgtagaaaaaatgaggtcaattcatcctttttttatgattttgatgtggatgaacatggcagattgaagtatgtgttttgggcagatgctacaagcaggaagaactatagtcactttggcgatatcgtatcatttgattctacgtacaccactaaccagtatgacatgatttttgcaccatttactggggtaaatcatcacttgcaaagtgtgttttatggtgctgcattcttagcaaatgagaagattccagcatatgtttggttgtttaagaccttcctaagagcaatgggagggaaagcccctacactcatcataactgacgaagatgccagcatgaaagcagctattgaaaaagtttttccaaccacggtgcataggttgtgtatgtggcatatcatggaaaaaatgtcagacaagatcggaccactatggagagaagactgcgatttaagggaaatgatgaagtcatgtgtttggagatcagaaactgctactgagttcgaatcacagtggaaatctatcattttggactttcacttggaggacaatgagtggctgtcaaataggtttgacattcgtaaatcatggattccagcatatttcatggacatatctttggctggcattctcaaaacaacttcaaggtcagagagtgcaaattcgtttttcaaccgtttcattcatcgcaagcttgctcttgttgagttttggctcaggtttgtcacatctttagaatgccaacgccaagaggagttgaaggcagataacacaagcatccatacaacatacaaacctgtaactccttgggcaatggagacacaaggtagcattatgttcacgcatgaggtttttgacaaacttcgagaagagattatagccgccagagatctttgttgtgttaaagacattgcacaatgtgatgggttgaaaattgttaccattagtgatggatctcacaagctcagggtagtccgttgcaatacaacgacaatgatagcgaactgttcgtgcaagctatttgagtccgatgggatcccgtgtcatcatattattctagttttgagaggtgaaaatcaaaatgagttaccaactgcatacatcatgaagagatgggagaaaagagtgaaaagggagaatgtgtatgacgaacaaggcaaccttatagaagagaagccaattgactcctcggaggcggcaatgagaaagaaaatatcaattgcacgcaacaaatttgaagatctcatacaaaaggctaagcactcagatgaaggcattgacttcttaacatctagtgtgttcaaccttgaggcacccttggaccaaatggtgtctaatgtcaagcatactagacatgaggagtttgagtcttttcttggttgcacaattcctactgaaattgatatacacccaccaactgatattcattcgagggggagaagcaaaagaattagaagaagcaaggatgacaatactgtggattg

SEQ ID NO: 2939 - DNA, 2322 bp, Oryza sativa
atggaggccgcggcggcggcggcgtcggcggcgccgcacctgctgcactgcggtggcttcggccgtctgcctggtctcgcggcgtcgctgccgggccgtcggcgccggcgcccatcccgccgcgtcctcgccgtcgccacggagcccaagccctccgcctccgccccggcgcctcgctccaggtcgaggacgaggacccctaatgacatctcctccacccggttcggggaggtgtccaaggagatccagcgagtgcggaagcagatggaggaggacgagcagctcgccacgctcatgcgcggcctccgcggccagaacctccgcgactcccaattcgccgacgacaacgtccgcctccgcctcgtcgaggtttcatccatgaacaacaatgaggcgctgcctctcgtgtacagtcctgagatcatttctgcatactgggggaagcgcccgagggccgtcgccacacggatcgtgcaattgctgtctgttgctggtggtttcatctctcatctcatatcagacctcataaacaacaagctcaaggagaatgaagtagcgcgtgcgattgagctgagggaaattgtgacatctttgggtcctgcttatattaagcttggccaagcactaagtattcgaccagatattctgtcccctgcagcaatgactgaattgcagaaactttgtgataaggttccttcgttctccgatgatcttgcaatgactcttcttgaagaagagcttgggcggccgtggcacgaaatatactctgaattatctccttccccaattgctgccgcatctctggggcaggtttacaagggccgcttgaaagaaaccggagaacttgtagctgtgaaagtacagaggccgtttgtacttgaaactgtcacaattgatttattcatcattagaaacttgggcctggtactaaggagatttccgcaggtctccattgatgttgttggcctagtagatgagtgggctgctcgatttttcgaagaacttgattatgtgaatgaaggagaaaatggcaatcgctttgctgaaatgatgaaaaaggatcttccgcaggtcgttgtaccaaagacataccagaaatacacatctagaaaagttcttactacacaatggatagatggggagaagctgtcacaaagtacagaggatgatgttggttgcttgatactggatttttccatgctgatccacatccctggcaatatgattaggacaccagatggaaaactagctattcttgattttgggcttgtaactaaattgacagatgaccaaaagtacggaatgattgaagcaatagcccacctcattcatcgtgattatgatgcgatagtcaaggactttgtgaagcttggtttcatccctgagggagttaacttggacccaatcttgcctgtattggccaaagtttttgatcaagcacttgaaggaggtggcgcaaagaatataaactttcaagagttagcagcagatctagcacagataacatttgattacccattcaggatacctccgtacttkgctttgattatcagagccattggagtattggagggtatagctttggtgggtgaccctgaatttgccattgtggatgaagcatacccatatattgcgcagagactactaacagatgagtcacctcgtctaaggagcgccttgcgatacacaatatatggcaaaacaggtgtattcgacgcagaaagattcattgatgtcatgcaagctttcgagaattttattcgtgcagcaaagagtggtggtggggagaacttgaaaggcagcatggctgagctggctgagataggaactctaccaagcacaagtttagttcctgcatttccaatggccatatcacagcctgagcaaccagtcaaagctcgggctgctctttcttttctactctctgagaggggcgacttttttagggagttcattcttgatgagattgtcaaagccatagatgcagtttcaagggagcaactgatacaaattgctgcatcttttgggctaggaaatgctaccccagttttcagcatggttcctgtcagagctagagcactgcttcctacaatcacagaggaagacagggtcatcttgaacaatgttgagaaggttgtgaagtttttgacagctgggaacaatccaacaacaattgatggggatgtaaatgttggtgtatcttgtacaagagcttctacctgtgttgccgagcatttcgtcgaagatcctaccagaggtcatgagccggttgtcatcgcgagtatttgcacggttgatccgggaggcatttttgtgaagtga

SEQ ID NO: 2940 - DNA, 1974 bp, Oryza sativa
atgggcgagcttgctgatctcgttgtcgtgccgtcgcagccgccgctcgccggcggccggcgggacaggctggcggcgctgctggagctcgcggcggcggatgatgttgatgggctcaggggggcgctcgcggagggaggcgaggaggcggcggagttggctgatggggtcgggctgtggtatggtcggagcaaggcgtacgaggcgcgcacgccgctgatggtggcggcgacgtacggcagcgccggggtggtctcgctgctggtgggcctcggcggttgcgtcgacgtcaaccgtcgccctggagccgacggcgccaccgcgctccactgcgccgcctccggtggctcgcgcaacgccgtcgctgttgtcaagctgcttttggccgctggcgccgatccggccacccccgattccgccggccgcttccccgccgacgtcatcctagctcctccggcttcgccagatgcccttggcgatctcgaggtgctcctcggccgccgccgagcactcgccgtggcgacctcggtggcttcaggttcgtcatcccctccgctctcgtcctcaccagatgagggcaacaggtcgccctcgtcgcgttcgtcgtcgctgtctcccatcactgtggatcgtgggaagaaggagtatccggtggatccaactctgccggacatcaagagcagcgtgtatgcttcggatgagttccgcatgtttgcgttcaaggtccggccctgctcccgtgcctactcacacgactggactgagtgcccgtttgtgcaccccggcgagaacgcccgccgccgtgatccccgcaagcacccatacactgctgtgccttgccccaactttcgccggcctggtggctgccctagcggcgatagctgtgagttctcgcatggcgtgtttgagagctggctacacccatcacagtatcgcacaaggctctgcaaggagggagcagcttgcgcccgtcgcatttgcttctttgcccatgatgaggatgagctccgccatgtgcctcacaacagtggtgccggcctgctgtctccccgcgcttcttcatccattgatatgactgctgcagctgcgctcgggcttcttccaggttctcctaccagacactttgcaccgccgcctgtgtcaccatctgctgggagcaatggaggagctgctgctgcgcattggctccaaggcagtaggctgcgttcttctttcaatgcaagggatgctgctgttgatgaccttggcatgctcctcgaatgggaatcacaataccttggggcactctgcctgccacccagcagccgcccccaaccacgcctttcagctggtctgagtatcaggccaacaattgctccatccaatcttgaagacatgtatgcttcagacatggcaatgtctccgaggttccctaatgaccaaggtcactcagtctactcaccagcccacaaatcagccctcctcaacaagcttcatcaacagaagggcctcttatcacctgttaacaccaacagaatgtactccccaagggctcttgatccgtcatctttggcacattctccatttggtggcatgtctccccggtccccccgtaccatggaacctacatcacccctaagtgctcgtgtaggagcccctgccacacagcggccttctgttggttcaccacggaattccagtgcttggggcaccgtggggtccccgatgggtaaggttgactggggtgtcgatagcgaggagctagtccgcttgagacgccctgcacaaccagggtttggagaagatgagacagatgtatcatgggtgcagtcactggtaagcaatgctgagcttaatggcaagaggggcgaagtacaaggcatgcctggtacttctgcattgatgaacaggcctgacctgaacaatcagggtgacttgttggaccagacggtgatcggtgcttggcttgagcagatgcacctggatcagaagtga

SEQ ID NO: 2941 - DNA, 2660 bp, Oryza sativa
atggccgcggagccggaggagcgcctcgacgtcctcaccgccggcggcgagaagacaggcgcctccaaggccaggcacgccgcagctaccccctacccagcttactcccgccgccgcttcggttggattccattcgatcggatcgcgtcggaggtgcacagggacggcgactaccaccgggcggtgcacgtgtggatctacagcgagagcaccggggagctgctgctgcagcgccgcgcggactgcaaggacacgtggcccggccagtgggacatctccagcgccggccacatctccgccggcgactcctctctctcctccgcgcagcgggagctcgatgaagaactaggcatcaaacttccatctgatgctttcgagctgttatttgtttttcttcaggaatgtgttatcaacaatggcacatacaccaacaatgagtacaatgatgtttatcttgtgactactttaactccaattccacttgaggcattcactctccaagaaagtgaagtatctgcggttaggtatatgcatcttgacgagtacaagagctgccttgcaaaagaaagcggagaatatgtgccttacgatgtgaatgggacatatggccaactatttagtattattgaagaaaggtacaaagacaatatcgaatcccgcagtttaaccttgcaaaagcaaatcaaccgttatgctcccatccatttggaaccagagttgactagtctatcagaaggagacagggaagccttgggatatattcttaaagcatcaatagttattgatgacatcttttatgagcaggtttggaatagcaactgcacgctgagagactggctgaaagcacgtgctaactactcttcttttgataagttgaagtggttgtattattccattaataagagtccatggtcctgccttgatgaaaataaggcttttctatcgactgcagattctgctgtgaaattactcacagatgccaccaaatcagtttcaggatggaaggggattgagtatcgtgctgcatttcctcgagataatcctcccggggcaaacttttatcctcctgatatggacaaaatggagtttgaattatggaaaaatggactgcctgaaaaggagcaaaaatatgcaactggattttttactgtcataaaacggcatgatgccttgttgccttcaatactagcgcagtcagatggatcaaatcaaaccaagacatcagatgatcttttcgttgttccatactctgaggagtacaaatcatcccttgagaaagctgctgagcttcttcataaagcatctgaatgttctgattctccaagcctcaagaatttgctcaaaaccaaggcaaatgctttcctttcaaatgattactatgaatctgatatagcttggatggagctgcttgattccttcgttcttggagaaattgttcttgaatgttttaaggcaatttgcaatcttttttttttggaaaaagagaacagtaggactccaacttggatgtcactattggcccatacgagacactatgaagatggtctttttagttataagatctacaaagaattttctccttgggatcctttcctacctgttcttgtcatctacctatttgctggtcaagtatttagcatggaatttgcatcaaacaccacatattattttgaaacttcagcaacctttgaagcatttgttggtgtacgggatgacattgccacttctcaagttaaactcttcggtgatcaactccgggatttagagaagcatcttccactggacaacatttacaaatccgacaatgtatctgctgctccaattcgcgttatcaatcttctgtacaactctggggatgtgaaaggcccacaaactattgcttttaatttgcccaatgatgagcggattgtgaatgaacgagggacctcgatggttatgcttaagaacatttcagaagctaagtttaagcatatcttaaagcctatagctaatgcttgcatcagagaggaacaggaagattatgttgattttgagccttattatacacatattgtttgccatgaatgctgccatggaattggtcctcattccataacccttccaactggtaaaagatcaacagttagaatgaaaatgcagcatattcacttagcaatggaaaataactttgctaatactcaggaacttcaagaatttcattcagcattggaggaggccaaagctgatatagttggtctatgggcactgaattttcttattaaaaagggtttacttcctaagagcctatcagaatccatgtatgtctcattcctggctggatgcttccgatcgatccgctttggactagaagaagctcatggaaaagggcaagctttgcagtttaactggttgtatgagaaaggggcttttgtcttgcattctgatggaaaattctcagttgatttcacaaaggttgaggacgctgtcgagagtctcagtagagagatcctgacaatacaagcaaagggcgataagcctgctgcccagtctcttctgcagtcccatgcaagcttgacgcaaccactgcgtgtggcgctggacaaaatagaacacatgcaggtgcctgttgatatcactcctatattcggcacagcaaataagctgcttgcaaacgatcagta

SEQ ID NO: 2942 - DNA, 1509 bp, Oryza sativa
atggttcatctgccgcaccaggggaagctgcggcgggatgtcaaggaggaggcgctggacgacggcgacgcggcggcacaggcagaggcgtcgccgttccacaagaggtcccgccttgctctacagcactggagcacagacggtggtagtgtgtccaatcaacagtcatcccaacatggtttccttgatgagcctagcccattgggcttgcggctgaagaagagcccctctctggtggatttgatccaaatgaagcttgtgcaggctggtaaggccaaagatgtccagcatagtggaaccgctagtgcctcagagaaattgaaggcttccaatttccctggttctgttctaagaattggatcttgggagtgggtgtcaaggtatgaaggcgatctggttgcaaaatgctattttgctaagcataaacttgtgtgggaagtactggatggtggtctgaagagcaagattgagatacagtggtctgacatctgtgccatgaaggtggtttctccagaaaatgaacctgggatcttggagatcgcattgtcccggcagccacttttctttcgagaaactaatccacagccaaggaaacacactttatggcaggcaacatctgatttcactggtggacaagcaagcattcacaggaggcattttcttcagtgcccgccaggaatgatgaataagcatgttgagaagcttgttcattgtgacccacgtctatattcactaagccagcagaacgacatcaatttggataatccgtactttgaatcaaagtcttctatatttgaagatgcagagggcataaaaggccaagattttgagcataaagatgatggcgatcagttagctccccaaagatttacagaactgttaccgcctcattctgcatcagttagtggtactcaagtgattaaacaagatgctgcttctggtgattgtgaacggcaagaaagcatctataattggaacggtatcaaggtaccggggataaggcgctccatgtccaaaagtgagattgcaaatcacattgggaatcatatctacagacagatgtattcagggaacctacctgcagttcatcgtggggattccacgtcaagtaaagtaacattagatggaataacccgattcctcttgggcagcacccagatcatcggcgatggcgatggcgatggctcaatgggtaaactgacatttgatgagcttaccagacaactcctcaatgattcccagataaccaacgcagctgatgaaaggatgctcatgtcaagggtcaactccctctgcagcctgattcagagagattcaggttcaggccagacaaaccccagcagcagcattcatggtgacaatgagatgcaagaaaggaagccccaaccttatgcgcttccggtgtcagcagacagtggaagcaacacctcattgccgccgaggcaagaatcgtttggggatctcctgacgcacctgcctcgcatctcatcatttcctcacttcttgtga

SEQ ID NO: 2943 - DNA, 1398 bp, Oryza sativa
atggcgcccgtgaaggaccaggagagctcggctaacccggcgtcggcatcgggctgctctgtcggaggcatcggcggcggcgtcggaggtaacagcggctgcccgcggcgggggccggggctggggcsgcggaggaggggscggctgttccgcgccggggggaaggtgatggtggagcccggggatccgccgtccgcccaggaggtggcggatgaggaggccagcgaggtggagcaggaggcggcgccggtggagagggaaccaccacaggaggagggtggtgatgtagaggtgtcgtctgcaccggcagagatggaggtggtggagggggatgcaatggaggtgtcacctgagccagcagtggctgtgggggagtcggagttggaaggccgaccaggcgaggaggaggaggtgtcctcgcctgtggtttctcaaggggagaggaagcaggagactgctgctgctgctcctgtgccagcagtggaggagaagaaacacaaggatcaagagaataagcacaaagagagggaaagggagaaggagagagagagggtggatgaagtgggctacatgagtggtggatggaagagtgaggatggatttctgagttgtggatattcgagttttagaggaaaaagagcaagcatggaagacttctatgatataaaatcatctaaaattgatgataaacaaataagcctctttggaatatttgatggtcatggtggttcacgtgctgctgagtatttgaaggagcacttgtttgagaacctcatgaaacatccagagttcatgacaaatacaaaattagcaataagcgaaacatataaaaaaactgattcagagtttttggattctgaaagccacactcatagagatgatggatcaaccgcatcgacagcggttttggttggaaatcatctctatgtggcaaatgttggcgactctcgtgctgtaatatcaaaggctggcaaagctattgcactctctgaggatcacaagccaaatagaagcgatgagaggaagcgaattgagagtgctggtggggttgttatgtgggctggaacttggagggtaggtggtgtacttgcaatgtctcgggcatttggcaaccgcttgttgaagcaatttgttgttgcagatcctgagattcaggaacaagaaatagatgatgaattggagtttctgattttagctagtgatgggctgtgggatgtggttccgaatgaggatgctgtttcactcgtgaagattgaggaggaacctgaggcagcagctcggaagctgacagagactgcattttcccgagggagtggtgacaatatcacatgcattgtcgtgaaatttcaacatgacaagatggacggtgattcctcaccaacaagcgataaaagctga

SEQ ID NO: 2944 - DNA, 1065 bp, Oryza sativa
atggtttcggccttgttgcggacgatcctggtgacgggcggcgccggctacatcggcagccacaccgtcctccagcttctccaactcggcttccgcgttgtcgtcctcgacaacctcgacaacgcctccgagctcgccatcctccgcgtcagggaactcgccggacacaacgccaacaacctcgacttccgcaaggttgacctccgcgacaagcaagcgttggaccaaatcttctcctctcaaaggtttgaggctgtcatccattttgccgggctgaaagctgttggcgagagcgtgcagaagcccctgctttactacgacaacaacctcatcggcaccatcactctcctgcaggtcatggccgcacatggctgcaccaagctggtgttctcatcatccgcaactgtctacgggtggcccaaggaggtgccctgcactgaagaatccccactttgtgcaatgaacccctacggcagaacaaagctggtaatcgaagacatgtgccgggatctgcatgcctcagacccaaactggaagatcatactgctccgatacttcaaccctgttggagctcacccaagcgggtacattggtgaggacccctgcggcatcccaaacaacctcatgcccttcgtccagcaggtcgctgttggcaggaggccggcccttaccgtctatggaaccgactacaacaccaaggatggaactggggttcgtgactatatccatgttgttgatctagcggatggtcatatcgccgcgttaaggaagctctatgaagattctgatagaataggatgtgaggtgtacaatctgggcactggaaaggggacatctgtgctggaaatggttgcagcattcgagaaagcttctggaaagaaaatcccgcttgtatttgctggacgaaggcctggagatgccgagatcgtttacgctcaaactgccaaagctgagaaggaactgaaatggaaggcaaaatacggggtagaggagatgtgcagggacctgtggaattgggcgagcaagaacccctacgggtatggatcgccggacagtagcaactga

SEQ ID NO: 2945 - DNA, 2202 bp, Oryza sativa
atggcgagctcaggagcgccgctctgttcctctgctctcgttcttcttccctgcctgtttgtcatagccatggccgctctgcagagtggtgtggtggtattggcggacgccgctgacaccgtygccgccgaccggccgttgtccggcaggcagaggccactggtgtccaaccgcggcaagttcgcgctagacgcatcgaacacctccatcatccwctggcagagcttcgaccatttcggcratacctggctccccggcggcaagctcggccggaacaagctcrccggcgtgagcactsgtctkgtcgcatggaaggcacgcaatgacccagyccccggcgtgttctccctcgagctggacccgaacggcacgagccaatacctgctcsaatggaacagtacacwgcagtastggacaagcggcaactggaccggccgcatcttcaccggcgtgccggagatgacgccgaccggcakctacccgaaytcgctgtacaccttcgactacgtcaayggcgagaacgrgagctacttcgtgtacgayctcaaggacgactcggtcctcacgaggttcgtcttgggcgagatggggcagatccagttcttgacatggatgaacggcgccaacgactggatgctgttctggtcgcagcccaaggcgcagtgcgacgtgtactcgttgtgtgggccgttcagtgtctgcaccgagaatgcaatggcaccttgtagctgcctccgtggcttcggtgagcaaaacgttggcgaatggttgcagggagatcacacttcagggtgcagaagaaacgtggagctgcagtgcagcagcaatggctcggtggtaggaaggagtactgatcggttctacacgatgggcaatgtaagattaccaagcgatgcagagagtgtggtggccacaagtactgatcagtgtgagcaagcatgcctaagaagttgttcttgcactgcttactcctacaacggcagctgctcactgtggcatggagacctcatcaacctgcaggatgtgtctgccatcggtagccaaggaagcaacgctgttttgattcgcttggctgcttcagaattgtctagccagaagcagaagcatgccaagaagttgatcactattgccattgttgctactattgttgcagcactcatggtagctgccttggttgtcatcttgagaagaagaatggtaaagggaacgacacaagtggaaggttccttgatatcattcacataccgtgacctgaaatctatgacaaaaaatttctctgaaaaactcgggggaggtgcattcggttcagtgttcaaagggtcgttgcctgatgcgaccatggtggccgtgaagaagctcgaaggttttcatcagggcgagaagcagtttcgcgcagaggtgagcacaatcggcaacatccaacacgtcaacctgattcgattgctcgggttttgttcggagaaatcgcgacgactactcgtctacgagtacatgccaaatggttcactggacaagcaactttttgacggcagaaaacatgtcctgagctgggacacgaggtaccagattgctcttggaatcgcaaggggattagactatctccacgagaaatgcagggattgcatcatacactgcgacatcaagccagagaacatactgctggatggctcgtttgctcccaaggtcgccgacttcggcctcgccaagctcatgggccgcgacatcagccgcgtgctgaccacggcgaggggcacggtggggtacatcgagccggagtggctcgccggcacggctgtgacggcgaaggcggacgtgttcagctacggcatgacgctgctcgagatcgtgtcggggaggaggaacgtggagcggagggaggacggcaccgcggacattctcccgttgctggcggcgagcaggctcgtcggcggcgtcggcgacggccgccgggaggagctggtcagcgccgtggtggacggccggctcggcggcgacgccgacatgggcgaggcggagagagcatgcagggtggcgttctggtgcatccaggacgacgagaacgcgaggccggccatggcgacggtggtgcaggtgctcgaagggctcgtggagatcggcgtcccgccgattccgagatcacttcaactccttgccgatgaatcgaattatttgcagttctccgatttattaccgtcgaagtga

SEQ ID NO: 2946 - DNA, 1377 bp, Oryza sativa
atggcggcctccacctccgccacctccttctccactcccaccaagcccgcctcctcctcctcctcctcctcaagtcccaactccgtctgcttcgccagggcgtcggggaggtgcaggatggcgtcggtggtggtgagggcggaggcggtggacgcgaccatcagcccgacggtgagcgcgctgcggccgtccaagaccatggccatcaccgaccaggccacggcgctgcggcaggctggcgtcccggtcatcggcctcgccgccggggagcccgacttcgacacgccgcacgtgattgctgaggctgggatgaatgcaattaaggatggttatacaaggtacactcctaatgctgggactttggagctgagaaaggctatctgcaataaactccaagaggaaaatgggatatcctacagtccagatcaggtgctggtgagcaatggagctaagcaatgcattacgcaagccgtacttgccgtttgctcacctggtgatgaggttttgataccagcaccatactgggtcagttatcctgagatggctacattggctggtgcaactccagtgatccttcctacaagcatatcagagaatttcttgctaaggccagagctgcttgcttcaaagatcaacgagaaatcgaggcttttgattctctgctctccttctaatccaactggatcagtatatccaaaggagctgcttgaagaaatagctgacatagtcaagaagtatcctaggcttcttgttttgtctgatgagatttatgagcatatcatctatcagccagcaaaacacacaagctttgcttcattgcctggaatgtgggatagaacattaactgtaaatggtttttctaaggcttttgcaatgacgggctggcgacttggataccttgcagccccaaaacattttgttgcagcctgtggaaagatccaaagccagtttacttcaggtgctagtagcatatcacagaaggcagggctcgctgctttgaaccttggctacgctggtggtgaagcagtctcaactatggtcaaagcattccaggaacgtcgtgattaccttgtaaaaagtttcaaggaactgccaggtgtgaagatatcagagcctcagggtgccttttatttgttcatcgacttcagctcctactatggatctgaagtagagggttttggcactatcaaggactctgagtccctctgcatgttcctcttggagaaagcacaggttgcacttgtcccgggcgatgcatttggggacgacaaatgcatccgcatgtcatatgctgcagcactatctacgcttcaaactgctatggagaaaatcaaagaagctgttgcgctgatcaaaccccgtgttgctgctaagtga

SEQ ID NO: 2947 - DNA, 924 bp, Oryza sativa
atggcgatgcagacggggttcgccacctccaaggtcctcatcctcgtcggcgcagggttgacgagctcgatcgtgctgcggaatggccggctatctgacgtgttggcggagcttcaggagcttatgaaaggtgtaaaccaaggagaaggttcgagtgcctatgacatcgcccttcttcaatctcagattcgaaatttagcacaagaagttagagatttgactatatcaaggcctattaccatattgagtggcaactccgactctggaggcagtttatcctcctacatactgcctgcagctgcagttggagcaatgggttactgctatatgtggtggaagggattgtccttatcggatgtcatgtttgttaccaaacgcaacatgaccaaagctgttgagagtatgtcgaagcaattggatcaagtgtcttcagctttagctgcaacaaaaaggcatctaagtcagcgcctggaaaatttagatgggaaaatggatgagcaagtggaggtctccaaaattattagaaacgaggtgaatgatgtcaaagatgatctgtctcaaattggatttgatattgcagcaatccaacagatggttgctggattggatgcaactaatgctggtgtatggtacctctgccaaatagctggaggtctaaaagatggaataaatgccaagttttttcaggaagctaatgaaaaactcaagctcacagagttggctcagtctgaaagaaaggcagtgaaggggcttgaatctgttctggagagcagaaaggaacaaaaggcaatcgactccaaacaaaataccaccgcgataattgacgccgaaaagcccgtgaaaacggtcgatgggcctgtgaaaagcggcgcggtgcacaggtgtagcagaatctcatttcggaaggaaggcctcgctttgtga

SEQ ID NO: 2948 - DNA, 1130 bp, Oryza sativa
atgaggggccgggcggcggtgttcgcggcggtgctggtcgtgttcctggtggcgtgcaccgccgcggcggcggcggcggcgattaccatatcgaggaagcaccagcacaggccggcgtccggggcggcggcgaaggcggcgtgcgacgtgttcgcggcggggarctgggtggtggacgagtcgtacccgctctacgactcggcgacctgccccttcatccgcgccgagttcgactgccgccggtacggccgccccgacaaggagtacctcaagtaccggtggcagcccagcccgccgtgctccaggcccaggttcgacggggttgcgttgctgaggatgtggagcgggaagaaggtgatgttcgtgggggactcgctggcgctgaaccagtacgagtcgctgctgtgcatgctgcacgccgccgcgcccaacgcccggaccaccgtcacgccggcgtcggggaaggtcgatcccctyaccaccgcccgcttcgaggagttcaacgtgacgatcgtgtactacctgacgcactacctggtggacattgtcaacgagaaggccgggcgagtactcaagctggacgccatcgaccaggcacgcaactggctcagcgccgacgtgctcgtcttcgattcctggcactggtggccgcgctccggcccgacccaaccatgggactacatccaggagggcaacacggtggtgaaggacatggacaggacggaggcgttcagcaaggcgctcaacacctgggctagatgggtcgacgccaacctcctccagaccaacaccagagtcttcttccagggcatctccccctctcactacaggggccaagattggggcgacacggcgagtgcgacgtgcatggggcagacgcggccggtgaacggcacggcgtaccccggggggccgatcccgcagcaggcggtsctgaggagcgccytcgccggcatggcgaagccggtgtacctgctggacttcacctacctgtcgcagctgaggaaggacgcgcacccgaccaagtacaacggcggcatcttcggcgacgactgcacccactggtgcgtcgccggcctcccggatacctggaacgtcctcttctacgccgcgctcaccggccagcactg

SEQ ID NO: 2949 - DNA, 1280 bp, Oryza sativa
atggcggggctggcggccgcgcgcgagctgcggcgggaaggcctcgacgtgacggtgctcgagcagctcgccggcgtcggcgggcagtggctgtacgacgcggcgaccgacgccggcgacccgctcggcatggccggcgtgcacagcagcgtgttcgcctcgctccgtatcaacggcccgagggagtccatcggcttctccgacttcccgttccgccccaccaacgacgccggcggcgacgcgcggcggtaccccgtccacggcgagctccwcaggctcaacaccacggtcacgcgagtcgccatggcaccgccgcggcgcgacgggtcgctgcggtgggcggtgaggagcaagcgccacggcgaggcggagacagaggaggtgttcgacgccgtcgtggtggccatcgggcactactcgcagccaaggctcccgaccatcgacgggatggataggtggaggaggaaacagctccattcccactcgtaccgcgtcccggactccttcgccggcgaggtcgtcgtcatcgttgggtgcagcgtgagcggcgcagagctcgcccttgagctccgccgcgtcgccaaggaggtccacctcagcaccaagtcgacggaggagaccatcacgtcggcgatgtccaaaagtgtcgccaggtacgaaaacctccacctgcgaccacaggtcgaacacctgcgcgaggacgggactgtggtgttcgacgacggctcgttcgtcgtcgccgacgctgtcatctactgcaccgggtacaactactcgttcccgttcctggacacgaacgggaaggtcaccgtcgacgacaaccgcgtcgggccgctgtacgagcacgtgttcccgccggagctggcgccgtcgctgtcgttcgtgggcatcccgggcaaggtggtcctgccggtgttcatcgaggtgcaggcgaggtgggtggcgcaggtgctgtccgggcggaggacgctgccgtcgccggaggagatgcagcgcgccgtcgaggagcacacccgcggcatggaggccgccgggttgccgaagcggtggacgcatgacatgttcttgaacctggaacgctgcgacgactacggcgagcgcatctgcggcttcccgcggatggaacagtggaagaaggagatctttgtgtcatccctctccgacatggtcgacgacatcgagaacttccgcgacggctaccacgacagcgacctcgtccgcgacgccctgcgccggcacggttggactcccgccgaggaggacgacgacgcccacaaata

SEQ ID NO: 2950 - DNA, 645 bp, Oryza sativa
atggcaatgaaggtgtatgggctgccaatgtcgaccaatgtagcccgcgtactggtgtgtttggaggaagctggggaacaatatgaagttgttccgattgatttctcaattgctgagcacaagagcccagagcatacttcacgtaatccatttggtcaagtcccagctcttcaggatggtgatttaattcyttttgagtcacgtgcaatttcgaagtacgtgcttcgtaagaacaactctgaactcctgaaggagcacaacctttctgacgctgccaaggttgatgtgtggctggaagctgagtcacaccatttcgatgagcccatgtccgtggtcatctaccaatgcctcatcctccctgtgtatttcggtggacaaaccgatgcgaaggttgtggaagagaatctggagaagctcaagaagacatttcaggtgtatgaagagcgtctgtgcaagttcaggtacttagctggagacttcctgagccttgcggatctgagccatttcccaactgcgtactacctgctggccacccctcatgctgctatgctcgatgagttccctcttgtgaaggcttggatcgatggcatgttggccaggccgtctgtcaagaaggtcatagagatgatgaaggcaactgcctag

SEQ ID NO: 2951 - DNA, 1029 bp, Oryza sativa
atgggtgaggagaagaaggataaggcgagcggcaaggacgccggcgagaagaaggacgccgccggcggcggcaagaaggcggcggcggcggcgccggggcctatcgtgctcaaggtcgagttgcattgcgccggctgcgccagcaaggtcaagaaggccatcaagcgcgcccccggtacgtgtgcgcggttgttcgcggcgcggtcggttgtggagacggttgtgacggacacggcggggaacaaggtggtggtcaccggcgcggcggacgcggcggagctgaaggagcgcatcgaggcgcggaccaagaaggccgtgcagatcgtctccgccggcgccggcccgccgcccaagaaggataaggaggagaagaaggacaaggacaagaagggcggcggcgacgacaagaaggccgagaaggagaagggcggcggcggcggcgataagaaggcggagaaggagaagggcggcggcgacaagcccaaggaggagaagaaagccaaggagcccaaagagggatgcatcgaccgcatcaagcgccgcatctacaagatcaaaggggtgaaggatgtggcggtggacgccgccaaggacctggtcaaggtgaccggcaccatggacgccgccgcgctcccgggctacctcaaggacaagctcagccggcaagtcgaggacggcggcggcggcgacaagaaggacaaaaaggagggcggcggttgcggcggcgacaagaaggacgccggcggcgagaagacggacaaggacaagtcggcggccgcctcggcgtccgtggcgccggtgcccctcgccgacgcgggcatgttccagatgccgccgcagtacggcttcaacccgtaccacgtccaccccggcgccgcctactacggcggcgccccgccgcccaaccccgccgccttctaccaccaccccaacgccgccgccgccgccgcgtaccagccctacccgtacaacgtccatgccccccagatgttcagcgacgagaaccccaacgcctgctccgtcatgtga

SEQ ID NO: 2952 - DNA, 3060 bp, Oryza sativa
atgttggcctctatgacatttgcttacactagttccatgcctctcctagccatgctactcatcctcctcatacaggttcagtccaggagcacgcttgccgacggtacgagctcgtcggcatcggcacagccagctccatgccttccaggccaggcttgggcgctgctccgcctgaagaactcattcgatgcaacagccggcgactactccgccgcattccggtcatggatcgctggcacggactgctgccgctgggagggcatccgatgcggcggcgcccaaggccgtgccgtcacctccctcgacttgggataccgatggctacgatccccaggtcttgatgatgcactcttcagcctaacctccctcgagtaccttgacatctcttggaacgacttcagtgcgtccaagctcccagccactgggtttgagaagctcgccgagctcacccatcttgacctctgcagcaccaacttcgccggccgggtacccgttggcatcggccgcctcaagagcctggcctaccttgacctgtccacaacattctttgaagatgagctggacgatgagaacaacgtcatctattactactcagacacaatttcacagctctcggaaccgagcttggagaccttgctcgcaaacctcaccaacctggaggagcttcgtctgggcatggtgaacatgtcgagaaacggcgcacggtggtgcgacgccatggccaggtcctccccaaagctgcgggtcattagcatgccgtactgctcactctccggtcccatttgccactcactctcggccttgcgatcactttcagtgatagagctgcactacaatcatttgtctggtccagttcctgagctcctggctactctctccaaccttactgttcttcagctttcaaataacatgcttgaaggggtgtttcctcccatcatattccagcttcagaaattaactagtattagcctcactaataatcttgggatctccggaaaactgcctaatttctctgctcacagttacttacaaagtatatctgtgagcaacaccaacttctccggcacaattccagcttccatcagcaacctcaaatatctgaaggagttggcacttggagctagtggtttctctggaatgctgccatcttccattggtaagctgaaatctttacgtatactagaggtgtctgggttagagctacaaggatccatgccgtcatggatttcaaatctgacttttttgaatgttctcaagttcttccattgtggtttgtccggaccaatacctgcttctgtcggatccttaacgaaattgagagaattggcactgtacaattgccacttttcaggagaggtatctgcgctgatatcaaatttgactcgcttgcaaaccctcctgctccattcaaacaactttattggcacagtggagctagcctcatactcaaaactgcaaaatctttctgtcctcaatctctcaaataataaactagttgtggttgatggagaaaatagttcttcagtagtgtcctaccccagtattagcttcttacgtctagcatcttgcagcatatctagcttccctaacatcttgaggcatctcccttatattactagtcttgacctttcatataaccagatccaaggtgcaatacctcagtggacatgggagacatggacgatgaactttttcttgttgaacctatcacataataactttacgagtattggatccaatcctttacttcccctttacattgaatactttgatctcagtttcaacaattttgatggagcaataccagtaccacaaaaaggaagtatcacacttgattactcaaccaaccggttctcatctatgcctcttaatttctccagttaccttaagaatacagtcgttctcaaagcctccgacaatagcctctctggaaacattccctcatcgatttgtgatgcaattaagagtttacaactacttgatctctctaataacaacttgacaggctcaatgccatcatgtctgacgcmaaatgcmagtgcattgcaggtattaagtctaaaacaaaaccatcttactggcgagttacctgataatatcaaggaaggttgtgcattaagtgcattagacttcagtggcaatatgattcaaggacagctaccaagatctttggttgcctgtaggaatctggagatccttgacatcggcaacaatcaaattagtgaccacttcccatgttggatgagtaaacttcctgaacttcaagtcctggtcctcaagtctaacaagttccatgggaaaataatggatcctttgtataccagagatggaaacaactgtcaattttccatgttgcggattgctgacatagcctcaaacaacttcagtggcacattgccagaagagttgtttaagatgctcaagtccatgatgaccaggtcagataacgagactttagtcatggaacatcagtattcccatggccagacataccagtttactgctgcactcacatacaaaggcaatgacataacaatttccaagatcttgagatcacttgtgctcattgatgtctcaaataatgaattcgatggtagcatcccttcaagcattggggaacttgcgttgcttcatggactcaacatgtctcataacatgcttacagggccaattccaactcagtttgacaatttgaacaaccttgagtcgttggacctctcctcaaataagctttctggtgagattccacaagagctagcatcgttgaacttccttgcaacattgaatttgtcctataatatgttggctggaagaataccacaatcgtcacacttctcgacattttccaatgcctcttttgagggaaatattgggctctgcggacccccattgtctaaacaatgtagctaccgatctgaaccaaacatcatgccacatgcttccaagaaggatcccatagatgttctactttttctcttcactgggttgggatttggtgtctgctttggaattacaattttagtgatatggggaagcaacaacaggaagcagcaagcctga

SEQ ID NO: 2953 - DNA, 669 bp, Oryza sativa
atggcgtccctcgccaactcttctgtccacctcctcctcctcgtcgtggtgctcgccgccgccgccgatgcggtgacgttcaccatcgtcaacaagtgcgggtacaccgtgtggccggcggcgctgccgtcgggcgacggcaatcagctcgacccggggcagagctgggccgtgtacgtgccggcgggcaccaagggcgcgcgcgtktgggggcgcacgggctgcggcttcatctccggcggcagcctagggcagtgccagacgggcgactgcggcggcacgctgcggtgcgcggccgtcggcgcgccgcccgtcacggtggccgagttctcgctgggccaggcgagcaaggacgactacttcgacatctcgctcgtggatgggttcaacgcgccaatggccatcgtgccggcggcggcgggcgggcggcggtgcccccgcggcgggcctcggtgcgcggcggagatcacgctgcagtgccccggcgagctgcgcgccaaggccgggtgcagcaacccgtgcagggggaacagcacgtgcgggccgaccaaggacacggagttcttcaagaagctgtgcccggagacggtcacctacgcccgggacggccaaggcaccaccttcacctgccccgccggcaccgactaccagatcgtcttctgcccatga

SEQ ID NO: 2954 - DNA, 639 bp, Oryza sativa
atggcagctcccgccatcctccgcctcctccctcttctcctcctcgccgccgccgcgaacgccgccacgttcaccatcaccaacaagtgccagatcaccgtgtgggcggcagccgtgccgtccggcggcgggcagcagctggacccggggcagcagtgggtgatcgacgtgccggccggcacgacgggcgggcgcgtktgggcgcgcacgggctgcagcttcgacggcagcggcaacgggcgccgcccaaacacgctggcggagttcgcgctgaaccagttcagcaacctcgacttcttcgacatctccctcatcgacggattcaacgtgcccatggacttcctccccgccggcgacggcgccgggtgcgccaagggcgggccgcggtgcgaggcggacgtggcggggcagtgcccgagcgagctgagggcgcccggcgggtgcaacaacgcgtgcacggtgttcaagcaggaccagtactgctgcaccggctcggcggcgaacaactgcggcccgaccaactactcgcagttcttcaaggggctctgcccggacgcctacagctaccccaaggacgaccagacgagcaccttcacttgcccggccggcaccaactaccaggtcgtcttctgcccatga

SEQ ID NO: 2955 - DNA, 2232 bp, Oryza sativa
atggcggggctcgcggtgtcggcttccccagctccggcgccggcgtccttccggccggcggcggcggcctcgcgcttcggcccgtgtgcacaggttgcaggacctgctgccaattttagaacacgagtttgtggactgagatgtttgatcgctgcaaagctgaagttccggaaggccttgaagaggcatggatggcagcttcgaaggaatctagaagtccgagccaatgataaagtgcctgattggttggaggctacaccactgactgagaatataatgtctcgggacgtacaactcgcgtatggttggtattgggaaaaccaattctgttttgctaccaagcatgcactcgaccgaatttctgtggctattggcctatcattcctttggtttcatggtatcgattctggaggtgaaacatcaaatacatgccctgatactttggacagttcagtcattgagcaaagttcaatgcatcacaaacttaacccctctgaaacccatcctcctgtgctgaaggaagaccctgttctattcgacgacccacctgaaagcgcagcgcctctttgcattgctgtaattggagcaactggtgaactggcaaaaaataaagtgttccctgcactatttgctctgtattacagtggttttcttcctcagaatgtcggtatatttgggtattctaggaagacactaacggatgaagatttaagatccatgattgaagccaatttgacctgccgggttgaccaccacgaaaactgtgatgaaaagttaaatgaatttcttaaaaggacatactatatagatgcaggatatgacaacaaagatgggatggtgaaactaaattccaaaatgtcacagatagagggcttacatggttcattaataggcctatttgtttcaaagggtaattgtgcagcaaacaggatattttaccttgctgttccccaagaggcacttcttgatgttgcactgtcactagctgacagtgcccaaactatgcaaggctggaataggataataattgagaaaccatttggcttcactggtttgtcttcacatcgggtaacacaatcactgctgtcaagatttgaggaggagcagatttacaggattgatcatcttttggggaaggatctgattgaaaatctcaccgtcttgagattttctaatttggtgtttgaacctttgtggagtcgcacctatatacgcaatgtacaggtcatattttctgaagaaacagcagcagaaatccaagggagatactttggaaattatggcataattcgtgacatagtgcatagtcacattcttcaaacaatagcactatttgcgatggaaccacctgtaagccttgatggagaggatatccgagatgaaaaggtgaaggtgctcagatcaattcgacaggtgaaccttgaggatgttgttcttggtcaactgaaagatacctctgtgaaagttgacagatatacaaaatcattgacaccaacctattttgctgctgccatgtacattgacaattcgcgttgggatggagtaccatttttgatcaagacaggaattgggctcatggaaaatagagctgagattcgtattcagtttcgccatgttcctggcaatatctatcgtgaacgctttggccatgacatagatcttgacacaaatgagctgatcttgcgtgatcaacctgaagaagccatccttttgaaagtcaacaataaggtcccaggacttgggctccagttagatgcttcagaactcaacctgctttacagggataggtacaatgtcgaactgccagattcgtatgagcatcttcttcttgatgtgcttgatggagacagtcatctattcatgcgcagtgatgaagtagctgctgcatggaacgtgctaactccactaatccatgagattgatcagaatagaatagctcctgagctctacgaggctgggggtagaggacccgttaatgcgtactaccttgctgctaaacatgggattgttaaaattgtttccccagattgcaccacccggggcagcggaggcggagaaatgcatgtaacacctaaggttcatttagtgactactaccgtagtattggaaagtttgcccctttcaaattcttccgttggcaagatattgtttgtaaacaagtcgcatggactgttcgcgattgcaggtggccaggtggggatatgggcacggaaatttggcttaagggtctaa

SEQ ID NO: 2956 - DNA, 930 bp, Oryza sativa
atggcggaggcgaagcagcagcagcagcagccgcaggcggcgacggcggcggcggcgagcggggtgtggaagacggtgaagcccttcgccaacggcggcgcctccgggatgctcgccacctgcgtcatccagcccatcgacatggtcaaggtgaggatccagttgggtgagggctcggcggcttctgtcaccaagaaaatgcttgcaaatgagggaattagtgccttctacaagggcttgtctgctggtttgctcaggcaagcaacatacacaaccgctcgtctcggatcctttagggttctaacaaacaaagcggttgaagcaaatgatgggaagccactgcctctagtccagaaagctggtattggtctcaccgcaggagcaattggagcctgtgttggtagtcctgcggatttggcactcattaggatgcaggctgattcaacgttgccagcagcccaaagtcgcaattataagaatgcttttcatgcactttatcgtattgctgctgatgaaggtgttctagcactttggaagggcgcaggtccaactgtagtgagagctatgtcgctaaatatgggcatgcttgcctcctatgatcagagtgtggagttatttagagacacacttggtgctggagaagtcactactgtacttggggccagtgctgtttcagggttatgtgcgtctgcttgcagtttaccctttgattatgtgaagacacagattcaaaagatgcagcctgatgcctccgggaagtatccatacactgggtctcttgattgtgccatgaagaccttgaagagtggaggcccatttaagttctacactggctttcctgtgtactgtgtcaggattgcaccacatgccatgatgacttggatattcctaaatgagatccagaagctcgagaagcgtttaggcctctaa

SEQ ID NO: 2957 - DNA, 1845 bp, Oryza sativa
atggcggcgacgatgaacaagacgccggcaaccaccttcctgctgataccggcggcggcgtcgctggcgtcggcgttcgactacgccggcgcgttcgacaagtgcctcctgttcttcgaggcgcagcgctccggcaagctccccgacgaccgcctcgtccggtggcgcggcgactccgccctcaccgacggcttctcccagggggtggatttggtgggcgggtactacgactccggcgaccacgtgaagttcgggctcccgatggcgtacgcggtgacgatgctgtcgtggggggtggtcgagttcgagaaggagatggtcgacggcaacaagctccaccgcgtcctcgacgccatccgctggggcaccaactacttcgtcaaggcccacacccagcacaacgccctctgggtccaggtgggtgacggcgacagcgaccacctgtgctgggagcgcgccgaggacatgtcgacgccgcgcacggcgttcaagatcgacatcaacaaccccgggtcggaggtcgccggcgagaccgccgccgctctcgccgccgccgccaaggccttcaagccctacgaccgcatgtactccgacctcctcctcctccactccaagcagctgttcacgttcgcggacacgttcaggggcaagtacgacgactcgctgcagagcgccaagaagttctacccgtcggcgtccggctaccaggacgagctgctgtgggcggcggcgtggctgtacgaggcgaccggcgacgagcagtacctccgctacgtgtcccagaacgcggaggcgttcggcggcaccggctgggccgtcaccgagttctcctgggacaacaagtacgccggcctccaggtcctcctctccaaggtcctcttcgagcagggcggcagcgccgccggctacgccgacacgctgaagcagtatcaggccaaggccgagttcttcctctgcgcctgcctccagaagaacaacggccacaacgtcaagatgacccctggtggtctcatgtacgtgagcgactggagcaacatgcagtacgtgagctcgtcggcgttcctcctcaccgtctacgccgactacctcgccgagtcgcggggaacgctcaggtgcccggacggcgaggtgaagccggcggagatcctccggttcgcgaggtcgcaggtcgactacgtcctcggcaagaaccccaaggggatgagctacatggtcggatacggcagctactacccgacgcacgtccaccaccgcggcgcgtccatcccgtccatctacgccatgaacgccaccgtcgggtgcatggaaagcttcgacaagtactacaacagcaagaacgccgaccccaacgtcctccacggcgccctcgtcggcggccccgacgccaacgacgcctacgacgacgaccgctgcaactaccagcacgccgagcccaccctcgccggcaacgcccccatgtccggcgtcttcgcccgcctcgccgcctcgcccgccgataacacgccggagtacacgccggcgccaaatgccccctcgccatcaaatggtgggtcgccgttggagttcgtgcacacggtgacgaacacgtggaaggcaaacggcgtggactactaccggcacgtggtgacggcgaagaacacgtgcggccacgccatcacctacctgaagctgcagatcaaggagctctccggggagatctacggcgtctcccgcacgaacgccaaggacatgtacgagttcccgtcgtggatgacacggctcgacgccggcgcgcagctcaccatcgtctacatccagggcggccccgccgccaagatcgccgtcgtcgagtacaagacggcctga

SEQ ID NO: 2958 - DNA, 4425 bp, Oryza sativa
  misc_feature (1)...(4425): n = A,T,C or G
atggcgccccgcagagatcgaagggagggcctgccatggccgctccacgggacgaaagttaatattatagtaggttctcatgtttgggctgaagaccctgaaattgcctgggtcgatggagaagttgttaagatcaaaggtgaagaggccgagatccaagcaaccaatggaaagacgatcaccgcaaatttgtcgaaactgtatcctaaagatatggaagcagctgctggtggagttgatgatatgacaaagctatcctacctccatgagccaggagttctgcagaatttggcaaccagatatgaacttaatgaaatatatacatatacgggaaacattctcatcgccgtcaatcctttccaaagattgccacatttgtatgatccacatatgatgcaacagtacaagggagcaccatttggagagttaagtccacatgttttcgctgtggcagatgttgcatacagagcaatgattcatgaagggaaaagcaactctattcttgtgagtggtgagagcggtgcaggtaaaacagaaacaacaaaaatgcttatgagatatcttgcctatttgggtggccgagctgctaccgagggaagaacagtagagcaacaagttctcgaatcaaatccagtccttgaagcttttggcaatgctaaaactgtcagaaacaacaattctagtcggtttggtaagtttgttgagattcagtttgataagcaagggaggatctcaggtgctgctgtgagaacttacttgctagaaaggtcacgggtgtgccaaatttctgatcctgaacgcaactaccactgcttctatctcctttgtgccgcaccacaggaggaggttgagaagtacaaattaggaaatcctaagacttttcattatcttaatcaatcaaattgctacgagttggttggggttagtgatgctcatgaatacttggctaccagaagagcaatggatattgttggcatcagtactcaggaacaggatgctattttcagggttgttgcagctatccttcatatcggtgtgattctggagccttgggagatgctctttgcaagcgktgtcatggtaacaccagaggaggttntaaaaaggagccttgatccttacaatgcaactgtcagcagggacggtctagctaagacaatatattcccgcttgtttgactggcttgttgataaaataaacagctcaattggacaagatcctaactctaaatctcttattggtgtcttggatatctatggttttgagagcttcaagttgaacagttttgaacaattctgtattaattatacaaatgaaaaattgcaacaacatttcaatcagcacgttttcaagatggaacaggaagagtataccaaagaacaaattgattggagctatattgagtttgttgataatcaggatgttcttgaccttattgagaagatgaggcatgtatgtttccctaagtcaacacatgagactttttcccagaagctgtaccagacatttcaaaagcacaaacggtttgtcaaaccaaagctatctcgcacagattttacaatctgtcactacgctggagaggtgttgtatcaatctgaccaattccttgataaaaacaaagactatgttgtggccgagcaccaggagttactaagcgcttccaaatgctcgtttatctctggactttttcctcctctgccagaggaaacatccaaatcctccaagttctcttcgattggagcacgcttcaagcaacaacttcaagctcttatggaaacactaaactctacagaacctcattatatcagatgtgtcaagccaaacaatgtgctaaaaccggcgatttttgagaatgtcaatgtcatgcaacagttgcgttgtggtggtgtacttgaggcaatcaggatcagctgtgcaggttatcctacacgtcgcacattttatgagtttttgcatcgctttggaatacttgctcaagaggcccttgaaggaaattgcgacgaaaaggttgcatgcaagaggattcttgaaaagaagggtcttgtgggatttcagataggcaaaacaaaagtttttctgagagctggccagatggccgaattagacgctaggagaactgaagtgctcggtgctgcggcaaaaacgattcaagggaaaatacggacacatatcatgcggaagaagttcgttaattggaggaaggcatctatatctgttcaggcaatatggagaggaagattggcttgtaaactgtttgatcaaatgcgaagggtagcagctgccatcaaagttcagaaaamccaacgtatgcatcaggctaggaggtcctataaacacctaaatgcttcggttcttgtagtgcaaacggcattgcgagcgatggcagcaagaaatacgttcagatacaagaagcagtctaaggcagcagttaaaattcaggcccgttataggtgccatacagctcatgtgtaccataagaagttgaaacgcgcagccattgttgcgcaatgtagatggagaggaaagattgcaaggaaggaactcagaaaacttaaaatggaagctagagaaacaggtgctctcaaggaagcaaaggataaactcgaaaagaaagtggaagaacttacatggcgtgtgcagttagagaagagaatgaggacagacttggaagaagcgaaagcacaggagttgtcaaaactgcagagctctatggaagctctgcaggctaaattggacgagacaagtgcaaagcttgttaaggaaagagaagttgctagggctattgaggaggcacctcctgtagtgcaacaaactgaggttctagtccaggacactgaaaaggttgattccttgacagcagaggtggaagaactcaagacctcactacaatcagaaaaacaaagagcggatgatttggaaaaaaaacgctctgaagaacaacaagcaaatgaagaaaaacaaaagaaaatggaagagactgatgtaaaaatgcgtcaattccaggaatatcttagaaggttagaggagaagctcgctaatgtagaatctgagaataaagtccttcgtcagcaagctgtctcaatggctccaagtaaaattttgtcaggccgttccaagtccattttacagaggaatgcagaaagtgttcatgtatcaagcggcgattcgaaagcagccccagagtccaataacatatcctctcctaaaaaggaatttgacttcgatgataagccacagaagtcacttaatgaaaagcagcaggaaaatcaagatctattaattaggtgcattgctcagcatttgggctttgctggaaatcggccagtcgctgcttgcatcatatacaagtgccttcttcactggagatcatttgaagtagagaggacaagtgtttttgaccgcattattcagaccattggtcatgctattgagacacaggacaacaacgaagtcttagcatattggctctcaaatgcttcaacacttctgctgttgcttcaaaggacactgaaggcaagtggatcaacagggatggctccgcagcgacggagatcgtcatccgccactctttttggaaggatgacccagagcttcagaggaactccccaaggtgtgaatctttctctgataaatgggagcatggttagtggagtagagactctacgacaagtcgaagcaaagtatccggcgttgttgtttaagcagcaacttacggcgtatgtggaaaagatatatggaatgatccgggacaatttgaagaaagagatctctcctttgcttggtttgtgcattcaggttcctccatttttggtacgaaaggtattcactcagatattctcattcatcaacgtacagctttttaacagtctgctgttgagaagggagtgctgttcgttcagcaatggtgagtatgtaaaagcgggattagctgaactcgagcattggtgctatcgagctaccgatgagtatgcaggttcagcctgggacgaacttaaacatattagacaagctattggtttcctggtgattcatcaaaagccaaagaaaacgttggatgaaataagtcatgacctttgtccagtacttagtatacaacagttatacaggatcagtactatgtactgggatgataagtatggaacacacagcgtgtccccagaggttatatcaaacatgagagtattaatgactgaagactctaacaatcctgtgagcaattcatttcttctggatgacgactcgaggttatttatgcttccatcaattgctcatattatgctaactattccccaaaaaaaaagtatacctttctccgtcgatgatatatccaaatcgatggagcagattgacatttctgacattgaaccacctccgctcattcgagagaactcaggctttgtatttctgttgccgccccctgaataa

SEQ ID NO: 2959 - DNA, 650 bp, Oryza sativa
atggcggcgtcgcaggcgtacctcgacaaggcgcagctccggcagagctaccgcaacgtctggcacaccgacctcaccaacgccatcacggccgacttcacatgctgctgcttgtctctgtggtgcggaccatgtgtgtcttacatgctgcgcaaacgtgcgctctacaatgacatgtcgagatatgtgtgctgtgctgggtacatgccatgcagcgggagatgcggcgagagcaactgccccgaagtgtgccttgcaaccgaggtgttctgctgctttggtaactcggtggcttcaaccaggttcctgctgcaagatgagttcaacattcagacaacccagtgcgacaactgcatcattggcttcatgttttgtctccaacaattcgcctgcatctgttcgctggtcgcttgcatcgttggcagcgaagaactttccgaggcctcgcagttgatttcctgcatatctaacatggtctactggacggtttgctcttgtatgcagacacagcacaaggtcgagatggacaagagggacggcaagtttggacctatgacagtgcctccaatgcagcagatgtctcgcatcgatcaaccggttccgccttatgttgggtatgcgccacaggcacagccagcatactacaggta

SEQ ID NO: 2960 - DNA, 1460 bp, Oryza sativa
atgggctcaaactcgcgcctgcacgccgtgctcatcccgtacccggcgcagggccacgtcacgcccctcctgcacctcgccaaggtgctccactccagggggttccacgtcaccttcgtcaactccgagtacaaccaccaccgcctcctccgttcccgcggcaccggcgcgctggccggcctcgacgacttccggttcgagaccatcccggacggcctgccgccgccgtccgaatccgacaacgacgacgtcacgcaggacatccccacggtctgcacgtccttcctcacgcacggccccgcggcgttcggggccctcctggcgcggctcaacagcgagcccgggacgccgccggtgagctgcgttataccggacggcgtgatgagcttcgcacagagagtggccagcgacatgggcatccttgccccggcgttctggaccaccagcgcctgcggcttcatgggatatctccactacgccgagctcatcgacagaggctacgtgccactcaaagatgagagctacctgaccaacggatacctcgacaccgtgctcgactgggtgccggggatgccaggcatccggctgcgcgacatgcccagcttcatccgcacgaccgaccgggacgagttcatgctcaacttcgacagcggcgaggcgcagaacgcgcgccacgcgcagggcctcatcctcaacacgttcgacgcggtggagcacgacgtcgtcgacgcgctgcgccgcatcttcccgcgcgtgtacacagtcggcccgctcctgacgttcgcgggggccgcagcggcgcggcgccccgaggtgggcgcgatcggcggcaacctctggaaggaggacgcgagctgccttcggtggctggacgcccagcagcccggctcggtcgtgtacgtcaacttcggtagcatcaccgtcatgtcgccggctcatctcgccgagttcgcgtgggggttggcgcgctgcggccggccattcctgtgggtcatcaggcccgacctcgtcgccagcgagaaggccatgctgccggaagagttcgtcagcgagaccaaagagagagggatctttctgagctggtgcccgcaagagcaagtcctggagcatccggcgaccggcctgttcttgacgcattccggctggaactcgacgctggagagcataagcgccggcgtgccgatgatctgctggccgttcttcgccgagcagatgaccaactgccgctacgcttgcaccaagtgggacattggactggaaattgacaccgacgtgaagagggaggaggtggcacggctcgtgcaagaggccatggatggagagaaaagcaaggatatgagagcgaaagcaatggcgtggaaggagaaagccgtggcggcaacggaggaaggaggcacttcgagcgccggaatagatcgtttggttgaatttctgcttgcaagaggtgatcacgcaagctg

SEQ ID NO: 2961 - DNA, 2240 bp, Oryza sativa
atgctgcggcggcggcaaggggacgaggtccgggaggaagaagccgccgcygccgcsgctgcaggaaagggtgcccctcgggcggcccccsgcttggccttggcggctggccggcttcgcggtcctyctcctcctycttggccttcttggcctycgggctgcttcgcmamcacggcggccccgggggacggcggcttttggcgcytggcgctcgtgtgcgaggcgtggttcgcggcgctttgcgcgttmaacgtgagcgccaagtggagccccgtccggttcgtcaagcggccggagaacctcgtggcggagggcaggacgccgtcgacgacggcggcggagtacggcgagctgccggcggtggacatgctggtgacgacggcggacccggcgctggagccgccgctggtgacggtgaacacggtgctctcgctgctcgccctcgactacccgcgcgccggcsagcggctggcctgctacgtctccgacgacgggtgctcgccgctgacgtgccacgcgctgcgggaggccgccgggttcgccgccgcgtgggtgcccttctgccgccggtacggcgtcgccgtcagggccccgttccggtacttctcctcctcctcctcgccggagtccggcggcccggccgatcgcaagttcttggacgactggacattcatgaaggatgagtatgacaagttagtgcggcgcatcaagaacaccgacgagcgctccctcctccggcacggcggcggcgagttcttcgccgagttcttgaacgtcgagaggaggaatcaccccaccatcgtcaagacgagggtgtcagctgtgatgaccaacgcaccgatcatgctgaacatggactgcgacatgtttgtgaacaatccccaggccgtcctccatgcgatgtgcctgctgctggggttcgacgacgaggccagcagcgggttcgtccaggcgccgcagagattctacgacgccctcaaggacgatccatttgggaaccagatggagtgttttttcaagagatttatcagtggggttcaaggagttcagggtgccttttatgctggaaccggctgctttcaccgtaggaaagcagtttatggcgtgccaccgaacttcaatggagccgagagagaagataccataggttcatcgtcttataaggagcttcataccaggtttggaaactcagaggaattgaacgaatcagcaagaaacatcatttgggatctgtcctctaagccaatggttgatatatcaagtcgcattgaagtggcaaaagcagtttcagcttgcaactatgatattggcacatgttggggacaggaggttggttgggtctatggatcactaacagragacatattgaccggacagcggatacacgcgatgggttggagatccgtattgatggtaaccgaaccacccgcattcatgggctccgcgccgattggaggaccagcctgcctaactcagttcaagagatgggcaactggccaatctgagataatcatcagccggaacaacccaattctcgcaaccatgttcaagcgcctcaaattccggcaatgtcttgcctacctgatcgtccttgggtggcctctgagagcgccttttgagctatgctatggattgttgggaccttattgcatactcacaaaccaatccttcttgccaaaggcatcagaagatggtttcagcgtcccgttagccctattcatatcctataacacatacaacttcatggagtacatggcgtgcgggctctccgcccgtgcatggtggaacaatcataggatgcaacggatcatctcggtctctgcctggacactagcatttcttaccgtgctcctcaagtccttaggcctctccgaaactgtttttgaggtcaccggcaaggacaaaagcatgtctgatgacgatgacaacaccgatggtgctgaccctgggaggttcaccttcgactcattgccggtgttcatccccgtgacggcacttgcgatgttaaacatcgttgcggtcactgtcggagcatgtagggtagctttcgggacagcggaaggtgtgccctgtgccccgggtatcggcgaattcatgtgttgtgggtggctggtgctgtgcttcttcccgtttgtaagagggatagtgtggggcaagggaagctatgggatcccttggagtgtcaagctgaaggctagcttacttgtggctatgtttgttaccttctgcaaaagaaacta

SEQ ID NO: 2962 - DNA, 1707 bp, Oryza sativa
atggcgcagaagtttctcctcgggggcgtgggcgcgatcctcgtcgtcgcggtcgtcgtcggcgtggtcgccaccgtcacccgctccggcaacaaggccggggacaacttcaccgtcccgggggaggccaacctcgccacctccggcaagtccgtcgagtccctgtgcgcgcccacgctgtacaaggagtcgtgcgagaagacgctcaccacggccaccagtggcaccgagaaccccaaggaggtgttctctaccgtcgccaagtcggcgctcgagtcgatcaagtcggcggtggagaagtcgaaggcgatcggcgaagccaagacgagcgacagcatgacggagagcgcgcgcgaggactgcaaggccctcctggaggactccgtggacgacctcaggggcatggtcgagatggccggcggcgacgtcaaggtgctgttcagccgctccgacgacctcgagcactggctcaccggcgtcatgacattcatggacacctgcgccgacgggttcgccgacgagaagctcaaggccgacatgcacagtgtgctgcgcaacgccagcgagctcagcagcaacgcgctcgccatcaccaacaccctcggcgccatcttcaagaagctcgacctcgacatgttcaagggtgagaatcccattcaccggagcctcatcgcggagcaggaaacggtgggcggcttcccgtcgtggatgaaggcgcccgacaggaagctgctcgcctccggcgaccgcaaccggccgcagcccaacgcggtggtggcccaggacggcagcggccagttcaagaccatccaggaggccgtgaacagcatgcccaagggccaccagggccggtacgtcatctacgtgaaggccggcctgtacgacgagatcgtcatggtccccaaggacaaggtgaacatcttcatgtacggcgacgggcccaagcgcagccgcgtcaccggccgcaagagcttcgccgacggcatcaccaccatgaagaccgccaccttctccgtcgaggcggccgggttcatctgcaagaacatggggttccacaacaccgccggcgcggagcggcaccaggcggtggcgctgcgcatcaacggcgacctcggggccttctacaactgccggttcgacgcgttccaggacaccctgtacgtgcacgcccggcgccagttcttccgcaactgcgtcatctccggcaccatcgacttcatcttcggcaactccgccgccgtcttccagaactgcctcatcatcacccgccgccccatggacaaccagcagaactcggtgacggcgcacggccgcaccgaccccaacatgaagtccggcctcgtcatccagaactgccgcctcgtgcccgaccagaagctcttcccggacaggttcaagatcccctcctacctcggccgcccatggaaggagtactcccgcctcgtcatcatggagagcaccatcgccgacttcatcaagccggagggctacatgccatggaacggcgaattcgcgctcaacacgctctactacgccgagttcaacaaccgcggccccggcgccggcaccagcaagcgcgtcaactggaaggggttccgcgtcatcggccagaaggaggccgagcagttcaccgccgggccgttcgtcgacggcgggacctggctcaagttcaccggcacgccgcacttcctcggcttcaaggtctaa

SEQ ID NO: 2963 - DNA, 1335 bp, Oryza sativa
atggccgccgccgtcgggaaccctaacgcggccgccgctgcgtcgatctcggcgtcgagggtcggtgcgggggcgttgcgcgcggggggcttgagggtggcggcggggaggaggggagcgggggctgtggtggcggcggcaatgcggccggcgaaggcggtggcgtcgccggcgaaaggaggcggccggggaggtgaacggggcggcgttcggggggttcgcgaggcccgacgcgttcgggaggttcgggaagttcgggggcaaaaagaacttgatggtattctcaaggattacgtcggccgggagaccccgctgtactttgcggagcgattgactgagcactacaagcgcgctgatggcacaggccccatgatttacctcaagagggaggatcttaaccacactggcgcccacaagatcaacaatgctgtcgctcaagtcttgcttgccaagcggcttgggaaggaacgtatcatcgccgagactggcgccggccagcacggtgttgccactgccacggtgtgcgcgaggtttgggctgcagtgcatcatctacatgggtgctcaggatatggagaggcaggcacttaatgttttcaggatgaagcttcttggagcagaggtgagggcagtacattctgggacagcaactttgaaggatgccacctcggaggccatccgtgactgggtcaccaatgttgagaacactcactacattttgggatcagttgctggtccgcatccatacccgatgatggtgagagagttccataaggtgattggcaaggagacccgtagacaggccatggagaagtggggtggcaagcctgatgtcttggttgcttgtgttggtggtggatcaaacgccatgggtctcttccatgagttcgttgatgatcaagatataagaatgattggagtggaggctgctggctatggtgtagacactgacaaacatgctgccactttgacaaagggagaagtgggagttctccatggatcattgagctatgtgttgcaggatgatgatggacaagttattgaaccccactccattagtgctgggctggactaccctggtgttgggcctgagcatagctttttgaaggatattggacgtgctgaatatgacagcgtgacagatcaggaggcactggatgctttcaagcgcgtctctcggctggagggcatcatccctgctctggagacgtcccatgcgctcgcctacctggagaagctctgcccaacgctgcccgacggcgtgagggtggtggtgaactgcagtggaagaggagacaaggatgtccacacagccagcaagtaccttgatgtctga

SEQ ID NO: 2964 - DNA, 1340 bp, Oryza sativa
atggagtcggatcaggggaagctgttcatcggcggcatctcgtgggagaccaccgaggagaagctccgcgaccacttcgccgcctacggcgacgtctcccaggccgccgtcatgcgcgacaagctcaccggccgcccccgcggcttcggcttcgtcgtcttctccgacccttcctccgtcgacgccgccctcgtcgacccccacaccctcgacggccgcacggttgatgtgaagcgggcgctctcgcgggaggagcagcaggccgcgaaggcggcgaaccctagcgcgggggggaggcacgcctccggtgggggcggtggtkggggargcgccggtggtggtggtggtggcggcggtggtgacgccggcggtgcgcggacgaagaagatcttcgtcggcgggctgccctccaacctgacggaggacgagttccggcagtacttccagacctacggggtcgtcaccgacgtcgtcgtcatgtacgaccagaacacgcagcggccgagggggttcgggttcatcaccttsgacgcggaggacgccgttgaccgcgtgctgcacaagaccttccatgacctgagcgggaagatggtggaggttgaagcgcgccctgcccagggaggccaaccctggctccggcagtggtggccgttccatgggaggcggcgcagaggtgacgctagcaggtatggtcaggcgcagcagggtagtggtggttatcccggttatggtgctggaggatatggtgctggtacggttggttatggatatgggcatgctaaccctggaactgcgtatgggaattatggggctggaggatttggaggtgttcctgctgggtatggtgggcattatggcaatccaaatgcgcctggttcaggttaccagggtggtcctccaggagcaaacagaggaccatggggtggtcaagctccgtctggttatggcactgggagttatggtggcaatgcaggctatgctgcttggaacaactcttctgctggaggtaatgcacccactagtcaggccgctggtgcaggcacaggctatgggagccagggctatggatatggtggatatggaggagatgcatcgtatggtaatcatggtggatatgggggttatggaggaaggggagatggtgctggcaatccagctgctggcggtggatctgggtatggtgctggctatggaagcgggaatggcggttctggttatccaaatgcttgggctgatccttcacaaggtggagggtttggggcttcagtcaatggagtgtctgaaggccaatcaaattatggcagtggttatggtggtgtgcaacctagggttgctcagta

SEQ ID NO: 2965 - DNA, 2376 bp, Oryza sativa
atggggcgccaccagcgttcgggctccctctcggtgacctcctccgcgacgccctcgtccgacgccaccgagctcgacttcgccgccgccgccgacgtcggctgcccgttcggacgcgtcgacgcgctcggccccgtcgagctccgcgagaccgcctacgagatcttcttcatgtcctgccgctcctcctccggcgggaacaccgccggcgcagcagaggtgtcgtcgccggtggccgggccgaggggcggcggcggcagccgcktcaagaaggcgctggggctcaaggcgagkcgkctgtcgtcgtcktcggcgscgatggtggcgcasccgatgatggtgcgcacgctgagccagacgtcggggccggcgtccccggggcgtgggcggcggccgatgacgtcggcggagatcatgcggcagcagatgcgcgtgaccgagcagagcgacgcgcggctgcggcggacgctgatgcgcgccgtcgtcgggcaggtcggcaggaggcccgacaccatcgtcctccccctcgagctcctccggcaactgaagccggcggagttcgccgacggcgaggagtaccaccagtggcagttccgccaggtgaagctcctcgaggccggcctcatcctccacccttccctccccctcgaccgcctcaactccgccgtgctccgcttccgcgaggtgatgcgtgccaccgagatccgcgccatcgacaccgccaagagctccgacgccatgcgcaccctcaccagcgccgtccacgccctcgcctggcgctcggcgtcggcacgmgcggcggcgacgctgccattggccgacggctaccgctcaacgcccgtgcacaacgtgtgcctcgcgtgggcgttcttccagcagtacgtcgtcaccggccaggtcgagccggagctcgccgccgccgcgctcgccgtgctcgccgacgtcgcagccgacgccagggggacccgcgacgcggtgtacggcaaggcgctcctcggcgcgctcggcgccatgcaggagtggtccgagaagcggctgctggactaccacgacagctacgagaagggcatcggcggcgcccccaccgaggtcatggagatcctcctctccatctcgctcgccgccggcaagatcatcgccgaccgtgatgccgccgccgacgccgacgacgccgccaatttcgccggtgaccgcgtcgactactacatcaggtgttcgatgaagaacgccttcaccaagattctcgagagcggaatgggcgacggcgacggcgagccgggggtggtgctgacgcagctggcgagggacacggaggagctcgccgtcgtggagcggcggagcttcagcccggtgctgaggccgtggcacccggcgccggtggccgtcgcggcggtcaccctgcacggctgctacggcgtcgtgctgaggcagtacctcggcaaggtgaccatcctcacggaggagctcgtccgcgtgctccagtcggcgagcaggatggagaaggccatggcgcagatgacggcggaggacgccgccgactgccgcgacgaccgggccaaggccatcgtcggcgacatggagccctacgaggtggattccgtcgttatgggcttgctcaaggtgtggatggacgacaggttcaagatcaccatggactgcctcgccagagccaaagaaaccgagagctggataccaaaatccaaagatgaaccttttgccgggtcagcgatggagatgatgaagctggctaagtataccgtcgaagagttctccgagatcccggcgagcgcgaaagacgaggtggtgcaagacctcgtcgacggcctcgaggcgatcttccaagagtacatctccttcgtcgcctcgtgcggggccaagcagaattacctcccaccgttgccaccattgacgaggtgcaaccaggactcgggcttcttcaagctgtggaggaagacggtgctgccgtcgtgccaagcgccggagggcggcccacgcggcgtcggcgttggcggcggctcgcaccacgtcccgcggccgtcgatcagccgcggcacgcagcgcctctacgtccgcctcaacacgctcgagtacgtcctcacgcacctccacgccatcgacaagtcgctcgtcgccgcgccgtcgccacgcttcgacggcgcgcgcgccgcggcgaagtcggcgatcgcccgcgtcgccgaggtggcggcgttccgcctcgtgttcctcgactcgcgccactccttctaccagggcctctacctccgcggcgtcgccgacacgcggatcaggccggcgctgcgcgcgctgaagcagaacctgacgttcctggtgtcggtgctcgccgacagggcgcagccaktggcgttccggaggtga

SEQ ID NO: 2966 - DNA, 3867 bp, Oryza sativa
atggccgtggccactggagctgtgatgctgttcttggcagctactctctctggggttagtgccaacacagactcagatgatgtgaatgctctcaatgtcttgtacacaagcatgaattctccatcccagctgacgaattgggtgtcacaaaatggagacccctgtggacagtcctggcttgggatcacttgctcgggttccagggtgacagcaataaaattatccggcatggggatcaacgggactttgggctacaacatgaatctactgacttcactagttgaacttgatacgagcaagaataatcttggaggcagtgacattccttataaccttcctccaaatcttgagagattaaaccttgcagaaaacaacttcaccggaagcataccatactctatatcgcaaatgattgcacttagaattttaaatcttggacataatcatcttgcaaccaccaatgatatgttcaaccagctaactaacctaacaacatttaatctgcagaacaacggattcaatggcacaatagatgtccttgctgatcttccgcttactgacttaaatgttgcaaataaccaattcaccggatggatacctgataagctaaagaaaataaagaatctccagacaaatggaaactcgtttggaagtggtccttcaccaccacctccaccatatcaatctccaccttataaatctcctccatacaaatctccacaatctcgacaacctgctcctccaactactactgttaacaataatccgtctgatgatggtcgcaaacactctaaactaagtggtggtgccatagccggaattgtagtatgtttggtagttgtgggtgcaatagttgccttctttgtgatcaagaagaaatattggtcattgccacgaggaggagatcctgaacagaaggaacctctcagccctattgtttcaggatttaaagacagtcttaaacagatgaagtcaatcaagatcatctcaacaattggcaaggaagaattacagaaaactgtttcaatgaatttaaaacctccaacaagaattgacttgcacaagtccattgatgaaaatgatgtcaccagcaagtctttcacaaggaaaataagttttagttccatcagaacacctgcatacactgtggcagacctacaggtggcaacaggcagcttctgtgctgacaatttaattggagaggggttattcggtcgtgtttacaaggcgaaattcaatgaccacaaggtcctggctgtgaagaaaatcaatttctctgcattcccgggccatccttcagatttgttcattgagttagttgcaaatatttcaaggttaaatcatccaagcctttctgagttagttggctactgttcagagcatgggcagtgcttactggcatatgagttctaccgaaatggttctcttaaagacttgcttcatctagtggatgatcaaagccaaccgttgtcttggaatagccgtgtgaagattgcccttggatctgcgagggcattagaatatctacatgaaacttgttcaccttccgtgatacacaagaatttcaagtcatccaatatttttctggataacgagctaaatccccatctttcagattctgggtttgctgaccttattcctaaccgggaatctcaggtgtcagatgaggactcaggatacagggcccctgaggtgaccatgtctggccagtactccgtgaagagtgacgtgtacagcttcggtgttgtcatgctagagctcctgactggccggaaaccttttgacagatcccggccacggtcggagcagtcactggtcgggtkggcaactccccagctgcacgacatcgacgctttggaccagatggtcgascctgcactccaggggctgtacccttcgaaatcgctctcccgcttcgctgacgcgatcgcgctctgcgttcagtccgaaccggagttcaggccgccgatgtcggaggtcgtccagttgctggtccgccttgtgcagagagccaacatgacgaggatgtgcggcgccgacgtatctgctcttgggcgttctctgaaaccctcgcggaaagcatcgaggcatgttgttccgtgcagggcgcgctcgtttacgcagtgttccctagggggtggttctgcggaccaggagattgtgattgcactgggcagcaatgtgggggatagaatcagtacgtttgacagggcattgcgtatgatgaagaactcgggtgtaaatatcaccaggcatgcctgcttgtatgagacttccccggcttatgtgactgatcagccgcggttcctgaactctgctgttaggggcacaaccaagctggaacctcatgaattgctcaagaagctaaaggaaattgagaaggatatagggcgcactgacgggataaggtatggtcccagaccgatcgatctggacattcttctatatggcaaatcacatattagtactgagaatctaactgtgccacatgaacgcatccatgagaggccgttcgttttagcacctcttgttgaccttctaggctcatccactgatgataacgtggaaaaaagttggcattctcttgcaaagtgcactggtgggttctttgaatcatgggataaacttggaggtgaatctataattggaacagaaggaattaaaagggtattgccagtcggaaatcgtctgttggattggtctgagaggactcttgtcatgggggtgcttaatttgacaccagacagcttcagtgatggtggtaagtttcaggaagtggaagctgccattgctcagaccaagttattaatatcagaaggtgcagacatcattgatattggtgctcaatccactaggccccttgcaagaagattatctgcagacgaagagcttgagaggttggttcctgttctagatgcgatcacaggaattcctgagatggaaggcaagctgctctcagtggatacattctatgcagaagtcgctgctgaagctgtgaaaagaggagtacacattgttaatgatgtatctggtggacagattgacccaagaattcttgaagttgtagctgaacttggagttccatatgtgactatgcatatgagaggagatccatctactatgcaaagtgaacagaatctactatacggtgatgtttgtaaagaagttgcttctgagctatataaaagggtgagacaagcagagttgtctgggattcctttgtggaggatagttcttgatcctggtattggattctccaagaattccaaacataaccttgaagttatcatgggtttggaatctattagaacagagataggtaaaatgagtttaggtgcttcacatgtgccaattttacttggaccctcaaggaaaagatttttaggtgaaatatgcaatcgtgtcaatcccactgagagagatgctgctaccatggtcgttgctactgctgggatattgaatggtgctaatatatccttcatggacctgcagttccccaatggacaactaacatatgttactggcgacaggattacagcaagtggttttcttccattatttggtgggttgcttcaagctcatgggaaatacccaggagaaactagagtcagcttctcttgcaagaataagcaaggcaccaagttcactcctatgtttcaatggcctgataagtctctgtcatttggagttactcaagccttagcatggaaaagagctggtctcatgccttggtatcatgctaaaggcatgcatctatttcggatgaaactgtcagaatgcaagtgccggatgattaagctggtcataaccggaatggttgttcccatgatatcgattcaggtttctgaggacattacttgttgctag

SEQ ID NO: 2967 - DNA, 1167 bp, Oryza sativa
atggagctggggctgagcttgggggatgcggtgaccgtggcggatggcgggaggctggagctggttcttgggctcggggttggggttggggctggggtgaggagaggagaggaggaggagagggggaggagggaggatgtggtgggagctgggaggtgggcggcgatggcggcggcctcgccggagccgtcggtgcggctcagcctcgtgtcgagcctcgggctccactggccttccgagaccgggcgttcggaggcggcggcgcgtgggttcgacgtgaaccgggcgccgtcggtggcggcgggcgcgccggggatggaggacgacgaggagggcccgggcgccgcgccggcgttgtcgtcgtcgcccaacgacagcgggggatccttcccgctggacctctccgggcaaggcctccgtggccacgccgaggcggcggcgcagggtggcggcggcggcggcggcggcgagcggtcgtcctcgcgcgcgagcgacgacgacgagggcgcgtccgcgcgcaagaagctgcgactctccaaggagcagtcggcgttcctcgaggagagcttcaaggagcacagcacgctgaatcccctgctcctcttcttagaatatgctcgaacacgcgagtgtttgtttctactagctcgttcttggccattgacgctgatgcttctcaccggcggcgagcagaagcagaaggtggcgctggcgaagcagctcaacctccggccgcggcaagtggaggtctggttccagaaccgccgagccaggacgaagctgaagcagacggaggtggactgcgagtacctgaagcgctgctgcgagacgctcaccgaggagaaccggcggctgcacaaggagctcgccgagctgcgcgcgctcaagacggcgcgccccttctacatgcacctcccggccacgaccctctccatgtgcccctcctgcgagcgtgtcgcctccaaccctggccaccgcttcgacctccgccccctgcctgcggccacgtccccggcggcggcgccgaccgcggccgcaagaaccgccgtcgcgtcgcccgagccgcaccggccgtcgtccttcgccgcgctgttcgcggcacccctcggcttcccgctgaccgccgcccagccgcggccgccgccgccggcgagcaactgcctgtaa

SEQ ID NO: 2968 - DNA, 1455 bp, Oryza sativa
atggagatgacgacgaccaagaggcagcaggatcatcaggtggagacgatgacgacgaagaagattgatgaagaagatgaagaggtggacgacgacggtcgggcgaagcggagggggacggtgtggacggcggcgtcgcacatcatcacggcggtgatcgggtcaggtgtgctgtcgctggcgtgggcgatcgcgcagctgggctgggtggtgggccccaccgtcatgctcctctttgctgccgtcatctacttcacctccaacctcctcgccgactgctaccgcaccggcgaccccgccaccggcagaaggaactacacctacatggacgccgtcaaggccaacctcggcggtgccaaggtgaaggtttgcggatgcattcagtacctcaaccttttgggagtggccatcggttacaccatcgccgcctccattagcatgatggcgatccagcgttccaactgcttccacgcgagaggagagcaggatccatgccacgcctccagcaacgtgtacatgatcatgttcggcatcgtccaggtgttcttctcccagatccccgacttcgaccaagtctggtggctctccatcctcgccgccgtcatgtccttcacctactccgccgtcggcctcgccctcggcgccgcccaggtcgcccagaaccgcacgttcgccggcagcgccatgggcgtcgccgtgggcttcgtcaccaagaccggcgacgtcgtcacccccgcgcagaaggtgtggcgcaacctgcaggcgctgggggacatcgccttcgcctactcctactccatcatcctcatcgagatccaggacacgctgcggtcgccgccggcggaggcgaggacgatgcggaaggcgacggggatcagcgtggtggtgacgagcgtgttctacctgctgtgcggatgcatggggtacgcggcgttcggcgacgacgcgccggggaacctcctcaccggcttcggcttctacaagccctactggctgctggacgtggccaacatggcgatcgtggtacacctggtgggggcgtaccaggtgtactgccagccgctcttcgccttcgtggagaggagggcggagcggcggtggcccaacggcctccccggcggcgactacgacctggggtggataaaggtgagcgtgttcaggttggcgtggcggacgtgcttcgtggcggtgacgacggtggtggcgatgctgctgcccttcttcaacgacgtggtgggcatcctgggggcgctcggcttctggccgctcaccgtctacttccccgtcgagatgtacatcgcccaccgccgcatccggaggtggacaaccacctgggtcggcctgcaggcgctcagcctcgcctgccttctcgtctcgctcgccgccgccgtcggctccatcgccggcgtcctgctcgacctcaagtcctaccgtccattccgctccacctactaa

(The sequence listing continues in the following parts.)
